United States Patent Application Publication US 2014/0004565 A1 - sequence listing, part 21

SEQ ID NO: 407933 - RNA, 19 nt, Artificial Sequence
  Description of Artificial Sequence: Synthetic oligonucleotide
cauuucguaccaguucggg

SEQ ID NO: 407934 - RNA, 19 nt, Artificial Sequence
  Description of Artificial Sequence: Synthetic oligonucleotide
ggaucuucgguagaugucc

SEQ ID NO: 407935 - RNA, 19 nt, Artificial Sequence
  Description of Artificial Sequence: Synthetic oligonucleotide
cagcguuccaugucuuugg

SEQ ID NO: 407936 - RNA, 19 nt, Artificial Sequence
  Description of Artificial Sequence: Synthetic oligonucleotide
agguacugcauauuuggua

SEQ ID NO: 407937 - RNA, 19 nt, Artificial Sequence
  Description of Artificial Sequence: Synthetic oligonucleotide
uucucucaacgaauucaca

SEQ ID NO: 407938 - RNA, 19 nt, Artificial Sequence
  Description of Artificial Sequence: Synthetic oligonucleotide
cacuguaagcagcaaccag

SEQ ID NO: 407939 - RNA, 19 nt, Artificial Sequence
  Description of Artificial Sequence: Synthetic oligonucleotide
agaaccccgaagaaugaag

SEQ ID NO: 407940 - RNA, 19 nt, Artificial Sequence
  Description of Artificial Sequence: Synthetic oligonucleotide
guagaugugucagguacug

SEQ ID NO: 407941 - RNA, 19 nt, Artificial Sequence
  Description of Artificial Sequence: Synthetic oligonucleotide
ugcuuguguaagucggaga

SEQ ID NO: 407942 - RNA, 19 nt, Artificial Sequence
  Description of Artificial Sequence: Synthetic oligonucleotide
cauuacauuuacacuaugu

SEQ ID NO: 407943 - RNA, 19 nt, Artificial Sequence
  Description of Artificial Sequence: Synthetic oligonucleotide
gcucguaauucacagugcc

SEQ ID NO: 407944 - RNA, 19 nt, Artificial Sequence
  Description of Artificial Sequence: Synthetic oligonucleotide
uccggaagaccaaaucuuu

SEQ ID NO: 407945 - RNA, 19 nt, Artificial Sequence
  Description of Artificial Sequence: Synthetic oligonucleotide
aacagcgucuuuguaggaa

SEQ ID NO: 407946 - RNA, 19 nt, Artificial Sequence
  Description of Artificial Sequence: Synthetic oligonucleotide
acuagaguguacugugcau

SEQ ID NO: 407947 - RNA, 19 nt, Artificial Sequence
  Description of Artificial Sequence: Synthetic oligonucleotide
gguaauuguagucaacacu

SEQ ID NO: 407948 - RNA, 19 nt, Artificial Sequence
  Description of Artificial Sequence: Synthetic oligonucleotide
gggagaaccccgaagaaug

SEQ ID NO: 407949 - RNA, 19 nt, Artificial Sequence
  Description of Artificial Sequence: Synthetic oligonucleotide
cagguaauuguagucaaca

SEQ ID NO: 407950 - RNA, 19 nt, Artificial Sequence
  Description of Artificial Sequence: Synthetic oligonucleotide
acagcgucuuuguaggaau

SEQ ID NO: 407951 - RNA, 19 nt, Artificial Sequence
  Description of Artificial Sequence: Synthetic oligonucleotide
aaucggcacccgacaaccc

SEQ ID NO: 407952 - RNA, 19 nt, Artificial Sequence
  Description of Artificial Sequence: Synthetic oligonucleotide
gaggcgaauguuauugaca

SEQ ID NO: 407953 - RNA, 19 nt, Artificial Sequence
  Description of Artificial Sequence: Synthetic oligonucleotide
gccaauguuacugugguca

SEQ ID NO: 407954 - RNA, 19 nt, Artificial Sequence
  Description of Artificial Sequence: Synthetic oligonucleotide
ugacguagaugaugccuca

SEQ ID NO: 407955 - RNA, 19 nt, Artificial Sequence
  Description of Artificial Sequence: Synthetic oligonucleotide
ugguucacccuaaacuauu

SEQ ID NO: 407956 - RNA, 19 nt, Artificial Sequence
  Description of Artificial Sequence: Synthetic oligonucleotide
agcucgaucucgguauuuc

SEQ ID NO: 407957 - RNA, 19 nt, Artificial Sequence
  Description of Artificial Sequence: Synthetic oligonucleotide
augcaaaaccucuguucug

SEQ ID NO: 407958 - RNA, 19 nt, Artificial Sequence
  Description of Artificial Sequence: Synthetic oligonucleotide
cgaacagcgucuuuguagg

SEQ ID NO: 407959 - RNA, 19 nt, Artificial Sequence
  Description of Artificial Sequence: Synthetic oligonucleotide
guuccgaagaauaauugua

SEQ ID NO: 407960 - RNA, 19 nt, Artificial Sequence
  Description of Artificial Sequence: Synthetic oligonucleotide
cacucucaagucuuuccac

SEQ ID NO: 407961 - RNA, 19 nt, Artificial Sequence
  Description of Artificial Sequence: Synthetic oligonucleotide
gucuuuguaggaaucggca

SEQ ID NO: 407962 - RNA, 19 nt, Artificial Sequence
  Description of Artificial Sequence: Synthetic oligonucleotide
cuguuguaggaucauaaua

SEQ ID NO: 407963 - RNA, 19 nt, Artificial Sequence
  Description of Artificial Sequence: Synthetic oligonucleotide
auaguaguauugugaguua

SEQ ID NO: 407964 - RNA, 19 nt, Artificial Sequence
  Description of Artificial Sequence: Synthetic oligonucleotide
ccgaacagcgucuuuguag

SEQ ID NO: 407965 - RNA, 19 nt, Artificial Sequence
  Description of Artificial Sequence: Synthetic oligonucleotide
uaaguagaugugucaggua

SEQ ID NO: 407966 - RNA, 19 nt, Artificial Sequence
  Description of Artificial Sequence: Synthetic oligonucleotide
cgaauucacaggcugaaag

SEQ ID NO: 407967 - RNA, 19 nt, Artificial Sequence
  Description of Artificial Sequence: Synthetic oligonucleotide
ggcaucucuguuuggaaac

SEQ ID NO: 407968 - RNA, 19 nt, Artificial Sequence
  Description of Artificial Sequence: Synthetic oligonucleotide
caguucggggaugaguugc

SEQ ID NO: 407969 - RNA, 19 nt, Artificial Sequence
  Description of Artificial Sequence: Synthetic oligonucleotide
agcuauguuccgaagaaua

SEQ ID NO: 407970 - RNA, 19 nt, Artificial Sequence
  Description of Artificial Sequence: Synthetic oligonucleotide
uccuaagccagcuccuuuu

SEQ ID NO: 407971 - RNA, 19 nt, Artificial Sequence
  Description of Artificial Sequence: Synthetic oligonucleotide
ugaccaaggcaucucuguu

SEQ ID NO: 407972 - RNA, 19 nt, Artificial Sequence
  Description of Artificial Sequence: Synthetic oligonucleotide
cacaggcuacaacauggag

SEQ ID NO: 407973 - RNA, 19 nt, Artificial Sequence
  Description of Artificial Sequence: Synthetic oligonucleotide
cuaggcugugcuuccucag

SEQ ID NO: 407974 - RNA, 19 nt, Artificial Sequence
  Description of Artificial Sequence: Synthetic oligonucleotide
ggcugcucguaauucacag

SEQ ID NO: 407975 - RNA, 19 nt, Artificial Sequence
  Description of Artificial Sequence: Synthetic oligonucleotide
augaggcgaauguuauuga

SEQ ID NO: 407976 - RNA, 19 nt, Artificial Sequence
  Description of Artificial Sequence: Synthetic oligonucleotide
accgacugaacagacucug

SEQ ID NO: 407977 - RNA, 19 nt, Artificial Sequence
  Description of Artificial Sequence: Synthetic oligonucleotide
uuaaggggauuuucuucau

SEQ ID NO: 407978 - RNA, 19 nt, Artificial Sequence
  Description of Artificial Sequence: Synthetic oligonucleotide
guaagucggagaguugcug

SEQ ID NO: 407979 - RNA, 19 nt, Artificial Sequence
  Description of Artificial Sequence: Synthetic oligonucleotide
ccuaaacuauuaauagcac

SEQ ID NO: 407980 - RNA, 19 nt, Artificial Sequence
  Description of Artificial Sequence: Synthetic oligonucleotide
guaauccugugaguacuag

SEQ ID NO: 407981 - RNA, 19 nt, Artificial Sequence
  Description of Artificial Sequence: Synthetic oligonucleotide
guaggaaucggcacccgac

SEQ ID NO: 407982 - RNA, 19 nt, Artificial Sequence
  Description of Artificial Sequence: Synthetic oligonucleotide
guagaggccuguuguagga

SEQ ID NO: 407983 - RNA, 19 nt, Artificial Sequence
  Description of Artificial Sequence: Synthetic oligonucleotide
auccugugaguacuagagu

SEQ ID NO: 407984 - RNA, 19 nt, Artificial Sequence
  Description of Artificial Sequence: Synthetic oligonucleotide
ccaagacauaacaacaaca

SEQ ID NO: 407985 - RNA, 19 nt, Artificial Sequence
  Description of Artificial Sequence: Synthetic oligonucleotide
aucggcacccgacaaccca

SEQ ID NO: 407986 - RNA, 19 nt, Artificial Sequence
  Description of Artificial Sequence: Synthetic oligonucleotide
gugcauagccauccuggcc

SEQ ID NO: 407987 - RNA, 19 nt, Artificial Sequence
  Description of Artificial Sequence: Synthetic oligonucleotide
cagucucacuccaucucag

SEQ ID NO: 407988 - RNA, 19 nt, Artificial Sequence
  Description of Artificial Sequence: Synthetic oligonucleotide
ugcggagcuauguuccgaa

SEQ ID NO: 407989 - RNA, 19 nt, Artificial Sequence
  Description of Artificial Sequence: Synthetic oligonucleotide
agugaaccgggcaaacaug

SEQ ID NO: 407990 - RNA, 19 nt, Artificial Sequence
  Description of Artificial Sequence: Synthetic oligonucleotide
gauggagacucuguaauau

SEQ ID NO: 407991 - RNA, 19 nt, Artificial Sequence
  Description of Artificial Sequence: Synthetic oligonucleotide
agcagccgcaaaccauccg

SEQ ID NO: 407992 - RNA, 19 nt, Artificial Sequence
  Description of Artificial Sequence: Synthetic oligonucleotide
guaucacaguaguaaucca

SEQ ID NO: 407993 - RNA, 19 nt, Artificial Sequence
  Description of Artificial Sequence: Synthetic oligonucleotide
ggauugcuauaaugcauug

SEQ ID NO: 407994 - RNA, 19 nt, Artificial Sequence
  Description of Artificial Sequence: Synthetic oligonucleotide
uuaugaggcgaauguuauu

SEQ ID NO: 407995 - RNA, 19 nt, Artificial Sequence
  Description of Artificial Sequence: Synthetic oligonucleotide
cauccggaagaccaaaucu

SEQ ID NO: 407996 - RNA, 19 nt, Artificial Sequence
  Description of Artificial Sequence: Synthetic oligonucleotide
ggagcuauguuccgaagaa

SEQ ID NO: 407997 - RNA, 19 nt, Artificial Sequence
  Description of Artificial Sequence: Synthetic oligonucleotide
uucguaccaguucggggau

SEQ ID NO: 407998 - RNA, 19 nt, Artificial Sequence
  Description of Artificial Sequence: Synthetic oligonucleotide
caacgaauucacaggcuga

SEQ ID NO: 407999 - RNA, 19 nt, Artificial Sequence
  Description of Artificial Sequence: Synthetic oligonucleotide
uaccaguucggggaugagu

SEQ ID NO: 408000 - RNA, 19 nt, Artificial Sequence
  Description of Artificial Sequence: Synthetic oligonucleotide
gaaugaagugguucacccu

SEQ ID NO: 408001 - RNA, 19 nt, Artificial Sequence
  Description of Artificial Sequence: Synthetic oligonucleotide
ucaagccccuaggaaggag

SEQ ID NO: 408002 - RNA, 19 nt, Artificial Sequence
  Description of Artificial Sequence: Synthetic oligonucleotide
cucguaauucacagugcca

SEQ ID NO: 408003 - RNA, 19 nt, Artificial Sequence
  Description of Artificial Sequence: Synthetic oligonucleotide
agucucacuccaucucagu

SEQ ID NO: 408004 - RNA, 19 nt, Artificial Sequence
  Description of Artificial Sequence: Synthetic oligonucleotide
aggucugggauugcuauaa

SEQ ID NO: 408005 - RNA, 19 nt, Artificial Sequence
  Description of Artificial Sequence: Synthetic oligonucleotide
acuuaggucugggauugcu

SEQ ID NO: 408006 - RNA, 19 nt, Artificial Sequence
  Description of Artificial Sequence: Synthetic oligonucleotide
gugaguacuagaguguacu

SEQ ID NO: 408007 - RNA, 19 nt, Artificial Sequence
  Description of Artificial Sequence: Synthetic oligonucleotide
agcaaccagaccucuuuua

SEQ ID NO: 408008 - RNA, 19 nt, Artificial Sequence
  Description of Artificial Sequence: Synthetic oligonucleotide
cuccaauaguuuucccauc

SEQ ID NO: 408009 - RNA, 19 nt, Artificial Sequence
  Description of Artificial Sequence: Synthetic oligonucleotide
caaggcuauugccaagaca

SEQ ID NO: 408010 - RNA, 19 nt, Artificial Sequence
  Description of Artificial Sequence: Synthetic oligonucleotide
aagacucaucauauugaua

SEQ ID NO: 408011 - RNA, 19 nt, Artificial Sequence
  Description of Artificial Sequence: Synthetic oligonucleotide
gaguacuagaguguacugu

SEQ ID NO: 408012 - RNA, 19 nt, Artificial Sequence
  Description of Artificial Sequence: Synthetic oligonucleotide
gguagauguccauguuuug

SEQ ID NO: 408013 - RNA, 19 nt, Artificial Sequence
  Description of Artificial Sequence: Synthetic oligonucleotide
acagugugcggagcuaugu

SEQ ID NO: 408014 - RNA, 19 nt, Artificial Sequence
  Description of Artificial Sequence: Synthetic oligonucleotide
agagcaaauugaggagaug

SEQ ID NO: 408015 - RNA, 19 nt, Artificial Sequence
  Description of Artificial Sequence: Synthetic oligonucleotide
uauugugaguuagggucau

SEQ ID NO: 408016 - RNA, 19 nt, Artificial Sequence
  Description of Artificial Sequence: Synthetic oligonucleotide
caucucuguuuggaaacug

SEQ ID NO: 408017 - RNA, 19 nt, Artificial Sequence
  Description of Artificial Sequence: Synthetic oligonucleotide
aaggaugcauagggagaca

SEQ ID NO: 408018 - RNA, 19 nt, Artificial Sequence
  Description of Artificial Sequence: Synthetic oligonucleotide
cccgacaacccauaugcac

SEQ ID NO: 408019 - RNA, 19 nt, Artificial Sequence
  Description of Artificial Sequence: Synthetic oligonucleotide
caaugggagcugugaugcc

SEQ ID NO: 408020 - RNA, 19 nt, Artificial Sequence
  Description of Artificial Sequence: Synthetic oligonucleotide
auccggaagaccaaaucuu

SEQ ID NO: 408021 - RNA, 19 nt, Artificial Sequence
  Description of Artificial Sequence: Synthetic oligonucleotide
ugucuuuuaugaggcgaau

SEQ ID NO: 408022 - RNA, 19 nt, Artificial Sequence
  Description of Artificial Sequence: Synthetic oligonucleotide
gguacauaggucuccuucu

SEQ ID NO: 408023 - RNA, 19 nt, Artificial Sequence
  Description of Artificial Sequence: Synthetic oligonucleotide
guucacccuaaacuauuaa

SEQ ID NO: 408024 - RNA, 19 nt, Artificial Sequence
  Description of Artificial Sequence: Synthetic oligonucleotide
cugugcccaucauugcuuc

SEQ ID NO: 408025 - RNA, 19 nt, Artificial Sequence
  Description of Artificial Sequence: Synthetic oligonucleotide
auccaccgacugaacagac

SEQ ID NO: 408026 - RNA, 19 nt, Artificial Sequence
  Description of Artificial Sequence: Synthetic oligonucleotide
cuucgguagauguccaugu

SEQ ID NO: 408027 - RNA, 19 nt, Artificial Sequence
  Description of Artificial Sequence: Synthetic oligonucleotide
ggaagaccaaaucuuuucu

SEQ ID NO: 408028 - RNA, 19 nt, Artificial Sequence
  Description of Artificial Sequence: Synthetic oligonucleotide
cacaaggcuauugccaaga

SEQ ID NO: 408029 - RNA, 19 nt, Artificial Sequence
  Description of Artificial Sequence: Synthetic oligonucleotide
caucucagugaaccgggca

SEQ ID NO: 408030 - RNA, 19 nt, Artificial Sequence
  Description of Artificial Sequence: Synthetic oligonucleotide
agcuaaggaugcauaggga

SEQ ID NO: 408031 - RNA, 19 nt, Artificial Sequence
  Description of Artificial Sequence: Synthetic oligonucleotide
gacugaguggaugaccacu

SEQ ID NO: 408032 - RNA, 19 nt, Artificial Sequence
  Description of Artificial Sequence: Synthetic oligonucleotide
cuuaggucugggauugcua

SEQ ID NO: 408033 - RNA, 19 nt, Artificial Sequence
  Description of Artificial Sequence: Synthetic oligonucleotide
gcuauugccaagacauaac

SEQ ID NO: 408034 - RNA, 19 nt, Artificial Sequence
  Description of Artificial Sequence: Synthetic oligonucleotide
agcugugccugacguagau

SEQ ID NO: 408035 - RNA, 19 nt, Artificial Sequence
  Description of Artificial Sequence: Synthetic oligonucleotide
gacaacccauaugcacugc

SEQ ID NO: 408036 - RNA, 19 nt, Artificial Sequence
  Description of Artificial Sequence: Synthetic oligonucleotide
agucggagaguugcuggug

SEQ ID NO: 408037 - RNA, 19 nt, Artificial Sequence
  Description of Artificial Sequence: Synthetic oligonucleotide
gcugauaaaacugcuggua

SEQ ID NO: 408038 - RNA, 19 nt, Artificial Sequence
  Description of Artificial Sequence: Synthetic oligonucleotide
caauaguuuucccaucaau

SEQ ID NO: 408039 - RNA, 19 nt, Artificial Sequence
  Description of Artificial Sequence: Synthetic oligonucleotide
gaucuucgguagaugucca

SEQ ID NO: 408040 - RNA, 19 nt, Artificial Sequence
  Description of Artificial Sequence: Synthetic oligonucleotide
cucagugaaccgggcaaac

SEQ ID NO: 408041 - RNA, 19 nt, Artificial Sequence
  Description of Artificial Sequence: Synthetic oligonucleotide
uuggugggcugcucguaau

SEQ ID NO: 408042 - RNA, 19 nt, Artificial Sequence
  Description of Artificial Sequence: Synthetic oligonucleotide
cggaagaccaaaucuuuuc

SEQ ID NO: 408043 - RNA, 19 nt, Artificial Sequence
  Description of Artificial Sequence: Synthetic oligonucleotide
ucccgccagcccauggccu

SEQ ID NO: 408044 - RNA, 19 nt, Artificial Sequence
  Description of Artificial Sequence: Synthetic oligonucleotide
gagaaccccgaagaaugaa

SEQ ID NO: 408045 - RNA, 19 nt, Artificial Sequence
  Description of Artificial Sequence: Synthetic oligonucleotide
ggcgaauguuauugacagc

SEQ ID NO: 408046 - RNA, 19 nt, Artificial Sequence
  Description of Artificial Sequence: Synthetic oligonucleotide
agucggagagccaggugga

SEQ ID NO: 408047 - RNA, 19 nt, Artificial Sequence
  Description of Artificial Sequence: Synthetic oligonucleotide
cagugaaccgggcaaacau

SEQ ID NO: 408048 - RNA, 19 nt, Artificial Sequence
  Description of Artificial Sequence: Synthetic oligonucleotide
gcaaauugaggagauggcu

SEQ ID NO: 408049 - RNA, 19 nt, Artificial Sequence
  Description of Artificial Sequence: Synthetic oligonucleotide
cuauguuccgaagaauaau

SEQ ID NO: 408050 - RNA, 19 nt, Artificial Sequence
  Description of Artificial Sequence: Synthetic oligonucleotide
gcuauguuccgaagaauaa

SEQ ID NO: 408051 - RNA, 19 nt, Artificial Sequence
  Description of Artificial Sequence: Synthetic oligonucleotide
gaugugucagguacugcau

SEQ ID NO: 408052 - RNA, 19 nt, Artificial Sequence
  Description of Artificial Sequence: Synthetic oligonucleotide
cucaacgaauucacaggcu

SEQ ID NO: 408053 - RNA, 19 nt, Artificial Sequence
  Description of Artificial Sequence: Synthetic oligonucleotide
aguucggggaugaguugcu

SEQ ID NO: 408054 - RNA, 19 nt, Artificial Sequence
  Description of Artificial Sequence: Synthetic oligonucleotide
gccccuaggaaggagggac

SEQ ID NO: 408055 - RNA, 19 nt, Artificial Sequence
  Description of Artificial Sequence: Synthetic oligonucleotide
ugacaaccacucagagcuu

SEQ ID NO: 408056 - RNA, 19 nt, Artificial Sequence
  Description of Artificial Sequence: Synthetic oligonucleotide
ucggagagccagguggauu

SEQ ID NO: 408057 - RNA, 19 nt, Artificial Sequence
  Description of Artificial Sequence: Synthetic oligonucleotide
uagaggccuguuguaggau

SEQ ID NO: 408058 - RNA, 19 nt, Artificial Sequence
  Description of Artificial Sequence: Synthetic oligonucleotide
cuacaccagcaggggaagc

SEQ ID NO: 408059 - RNA, 19 nt, Artificial Sequence
  Description of Artificial Sequence: Synthetic oligonucleotide
cugccgccggcagagcagg

SEQ ID NO: 408060 - RNA, 19 nt, Artificial Sequence
  Description of Artificial Sequence: Synthetic oligonucleotide
cugugaguacuagagugua

SEQ ID NO: 408061 - RNA, 19 nt, Artificial Sequence
  Description of Artificial Sequence: Synthetic oligonucleotide
gcuaggcugugcuuccuca

SEQ ID NO: 408062 - RNA, 19 nt, Artificial Sequence
  Description of Artificial Sequence: Synthetic oligonucleotide
acgaauucacaggcugaaa

SEQ ID NO: 408063 - RNA, 19 nt, Artificial Sequence
  Description of Artificial Sequence: Synthetic oligonucleotide
gcacccgacaacccauaug

SEQ ID NO: 408064 - RNA, 19 nt, Artificial Sequence
  Description of Artificial Sequence: Synthetic oligonucleotide
caacccauaugcacugccu

SEQ ID NO: 408065 - RNA, 19 nt, Artificial Sequence
  Description of Artificial Sequence: Synthetic oligonucleotide
cccaucaauuuucaaugga

SEQ ID NO: 408066 - RNA, 19 nt, Artificial Sequence
  Description of Artificial Sequence: Synthetic oligonucleotide
cucgaucucgguauuucau

SEQ ID NO: 408067 - RNA, 19 nt, Artificial Sequence
  Description of Artificial Sequence: Synthetic oligonucleotide
uuagccggaccugggccuc

SEQ ID NO: 408068 - RNA, 19 nt, Artificial Sequence
  Description of Artificial Sequence: Synthetic oligonucleotide
cugaguggaugaccacuga

SEQ ID NO: 408069 - RNA, 19 nt, Artificial Sequence
  Description of Artificial Sequence: Synthetic oligonucleotide
cuccacaucggaagcauuu

SEQ ID NO: 408070 - RNA, 19 nt, Artificial Sequence
  Description of Artificial Sequence: Synthetic oligonucleotide
ucguaccaguucggggaug

SEQ ID NO: 408071 - RNA, 19 nt, Artificial Sequence
  Description of Artificial Sequence: Synthetic oligonucleotide
agccuggaucuucgguaga

SEQ ID NO: 408072 - RNA, 19 nt, Artificial Sequence
  Description of Artificial Sequence: Synthetic oligonucleotide
gcucgaucucgguauuuca

SEQ ID NO: 408073 - RNA, 19 nt, Artificial Sequence
  Description of Artificial Sequence: Synthetic oligonucleotide
ggacacaacacaggcuaca

SEQ ID NO: 408074 - RNA, 19 nt, Artificial Sequence
  Description of Artificial Sequence: Synthetic oligonucleotide
cuuuuaugaggcgaauguu

SEQ ID NO: 408075 - RNA, 19 nt, Artificial Sequence
  Description of Artificial Sequence: Synthetic oligonucleotide
gccuguuguaggaucauaa

SEQ ID NO: 408076 - RNA, 19 nt, Artificial Sequence
  Description of Artificial Sequence: Synthetic oligonucleotide
caguaguaauccaccgacu

SEQ ID NO: 408077 - RNA, 19 nt, Artificial Sequence
  Description of Artificial Sequence: Synthetic oligonucleotide
cccgucugcugguuagugc

SEQ ID NO: 408078 - RNA, 19 nt, Artificial Sequence
  Description of Artificial Sequence: Synthetic oligonucleotide
aggagauggcuugcucccu

SEQ ID NO: 408079 - RNA, 19 nt, Artificial Sequence
  Description of Artificial Sequence: Synthetic oligonucleotide
augcucuuagagacagaaa

SEQ ID NO: 408080 - RNA, 19 nt, Artificial Sequence
  Description of Artificial Sequence: Synthetic oligonucleotide
ccgacaacccauaugcacu

SEQ ID NO: 408081 - RNA, 19 nt, Artificial Sequence
  Description of Artificial Sequence: Synthetic oligonucleotide
gcggagcuauguuccgaag

SEQ ID NO: 408082 - RNA, 19 nt, Artificial Sequence
  Description of Artificial Sequence: Synthetic oligonucleotide
guaccaguucggggaugag

SEQ ID NO: 408083 - RNA, 19 nt, Artificial Sequence
  Description of Artificial Sequence: Synthetic oligonucleotide
gggauugcuauaaugcauu

SEQ ID NO: 408084 - RNA, 19 nt, Artificial Sequence
  Description of Artificial Sequence: Synthetic oligonucleotide
cuuguguaagucggagagu

SEQ ID NO: 408085 - RNA, 19 nt, Artificial Sequence
  Description of Artificial Sequence: Synthetic oligonucleotide
gagcuauguuccgaagaau

SEQ ID NO: 408086 - RNA, 19 nt, Artificial Sequence
  Description of Artificial Sequence: Synthetic oligonucleotide
gcguuccaugucuuuggca

SEQ ID NO: 408087 - RNA, 19 nt, Artificial Sequence
  Description of Artificial Sequence: Synthetic oligonucleotide
cucuuagcccagcguucca

SEQ ID NO: 408088 - RNA, 19 nt, Artificial Sequence
  Description of Artificial Sequence: Synthetic oligonucleotide
agccccuaggaaggaggga

SEQ ID NO: 408089 - RNA, 19 nt, Artificial Sequence
  Description of Artificial Sequence: Synthetic oligonucleotide
acccgacaacccauaugca

SEQ ID NO: 408090 - RNA, 19 nt, Artificial Sequence
  Description of Artificial Sequence: Synthetic oligonucleotide
gguaauccugugaguacua

SEQ ID NO: 408091 - RNA, 19 nt, Artificial Sequence
  Description of Artificial Sequence: Synthetic oligonucleotide
gugcggagcuauguuccga

SEQ ID NO: 408092 - RNA, 19 nt, Artificial Sequence
  Description of Artificial Sequence: Synthetic oligonucleotide
cccuaggaaggagggacac

SEQ ID NO: 408093 - RNA, 19 nt, Artificial Sequence
  Description of Artificial Sequence: Synthetic oligonucleotide
caccacuuugagacugagu

SEQ ID NO: 408094 - RNA, 19 nt, Artificial Sequence
  Description of Artificial Sequence: Synthetic oligonucleotide
caccgacugaacagacucu

SEQ ID NO: 408095 - RNA, 19 nt, Artificial Sequence
  Description of Artificial Sequence: Synthetic oligonucleotide
ccgucugcugguuagugcu

SEQ ID NO: 408096 - RNA, 19 nt, Artificial Sequence
  Description of Artificial Sequence: Synthetic oligonucleotide
aggccuguuguaggaucau

SEQ ID NO: 408097 - RNA, 19 nt, Artificial Sequence
  Description of Artificial Sequence: Synthetic oligonucleotide
cuuuggugggcugcucgua

SEQ ID NO: 408098 - RNA, 19 nt, Artificial Sequence
  Description of Artificial Sequence: Synthetic oligonucleotide
cucagucggagagccaggu

SEQ ID NO: 408099 - RNA, 19 nt, Artificial Sequence
  Description of Artificial Sequence: Synthetic oligonucleotide
ccuguuguaggaucauaau

SEQ ID NO: 408100 - RNA, 19 nt, Artificial Sequence
  Description of Artificial Sequence: Synthetic oligonucleotide
ccacaucggaagcauuuua

SEQ ID NO: 408101 - RNA, 19 nt, Artificial Sequence
  Description of Artificial Sequence: Synthetic oligonucleotide
gggcugcucguaauucaca

SEQ ID NO: 408102 - RNA, 19 nt, Artificial Sequence
  Description of Artificial Sequence: Synthetic oligonucleotide
cagugugcggagcuauguu

SEQ ID NO: 408103 - RNA, 19 nt, Artificial Sequence
  Description of Artificial Sequence: Synthetic oligonucleotide
cguaccaguucggggauga

SEQ ID NO: 408104 - RNA, 19 nt, Artificial Sequence
  Description of Artificial Sequence: Synthetic oligonucleotide
ccuaggaaggagggacaca

SEQ ID NO: 408105 - RNA, 19 nt, Artificial Sequence
  Description of Artificial Sequence: Synthetic oligonucleotide
ggucugggauugcuauaau

SEQ ID NO: 408106 - RNA, 19 nt, Artificial Sequence
  Description of Artificial Sequence: Synthetic oligonucleotide
ccggaagaccaaaucuuuu

SEQ ID NO: 408107 - RNA, 19 nt, Artificial Sequence
  Description of Artificial Sequence: Synthetic oligonucleotide
ggcacccgacaacccauau

SEQ ID NO: 408108 - RNA, 19 nt, Artificial Sequence
  Description of Artificial Sequence: Synthetic oligonucleotide
agccggaccugggccucaa

SEQ ID NO: 408109 - RNA, 19 nt, Artificial Sequence
  Description of Artificial Sequence: Synthetic oligonucleotide
gucggagagccagguggau

SEQ ID NO: 408110 - RNA, 19 nt, Artificial Sequence
  Description of Artificial Sequence: Synthetic oligonucleotide
cuguucgcucagccuggau

SEQ ID NO: 408111 - RNA, 19 nt, Artificial Sequence
  Description of Artificial Sequence: Synthetic oligonucleotide
ccuguucgcucagccugga

SEQ ID NO: 408112 - RNA, 19 nt, Artificial Sequence
  Description of Artificial Sequence: Synthetic oligonucleotide
cagcucgaucucgguauuu

SEQ ID NO: 408113 - RNA, 19 nt, Artificial Sequence
  Description of Artificial Sequence: Synthetic oligonucleotide
cgucugcugguuagugcua

SEQ ID NO: 408114 - RNA, 19 nt, Artificial Sequence
  Description of Artificial Sequence: Synthetic oligonucleotide
ggccuggcugcagguaauu

SEQ ID NO: 408115 - RNA, 19 nt, Artificial Sequence
  Description of Artificial Sequence: Synthetic oligonucleotide
cggcacccgacaacccaua

SEQ ID NO: 408116 - RNA, 19 nt, Artificial Sequence
  Description of Artificial Sequence: Synthetic oligonucleotide
cggaagcauuuuagucuuu

SEQ ID NO: 408117 - RNA, 19 nt, Artificial Sequence
  Description of Artificial Sequence: Synthetic oligonucleotide
aaacccuaguucuugaacg

SEQ ID NO: 408118 - RNA, 19 nt, Artificial Sequence
  Description of Artificial Sequence: Synthetic oligonucleotide
aauggauuaaaguuuaaaa

SEQ ID NO: 408119 - RNA, 19 nt, Artificial Sequence
  Description of Artificial Sequence: Synthetic oligonucleotide
ugaaaagccgaaaauacug

SEQ ID NO: 408120 - RNA, 19 nt, Artificial Sequence
  Description of Artificial Sequence: Synthetic oligonucleotide
aaaaccuaagcaccgcuac

SEQ ID NO: 408121 - RNA, 19 nt, Artificial Sequence
  Description of Artificial Sequence: Synthetic oligonucleotide
uaugcauugaccagguagg

SEQ ID NO: 408122 - RNA, 19 nt, Artificial Sequence
  Description of Artificial Sequence: Synthetic oligonucleotide
aagccgaaaauacugggac

SEQ ID NO: 408123 - RNA, 19 nt, Artificial Sequence
  Description of Artificial Sequence: Synthetic oligonucleotide
aaaacaugcgcccggcggc

SEQ ID NO: 408124 - RNA, 19 nt, Artificial Sequence
  Description of Artificial Sequence: Synthetic oligonucleotide
auaugcauugaccagguag

SEQ ID NO: 408125 - RNA, 19 nt, Artificial Sequence
  Description of Artificial Sequence: Synthetic oligonucleotide
aaaagccgaaaauacuggg

SEQ ID NO: 408126 - RNA, 19 nt, Artificial Sequence
  Description of Artificial Sequence: Synthetic oligonucleotide
acaauaaauacacaagagu

SEQ ID NO: 408127 - RNA, 19 nt, Artificial Sequence
  Description of Artificial Sequence: Synthetic oligonucleotide
auuauacucagacuuuggg

SEQ ID NO: 408128 - RNA, 19 nt, Artificial Sequence
  Description of Artificial Sequence: Synthetic oligonucleotide
aaguuuaaaacaauggagu

SEQ ID NO: 408129 - RNA, 19 nt, Artificial Sequence
  Description of Artificial Sequence: Synthetic oligonucleotide
acgaguugaauugaaaagc

SEQ ID NO: 408130 - RNA, 19 nt, Artificial Sequence
  Description of Artificial Sequence: Synthetic oligonucleotide
aagcguaugacucuuuuga

SEQ ID NO: 408131 - RNA, 19 nt, Artificial Sequence
  Description of Artificial Sequence: Synthetic oligonucleotide
uacgaguugaauugaaaag

SEQ ID NO: 408132 - RNA, 19 nt, Artificial Sequence
  Description of Artificial Sequence: Synthetic oligonucleotide
ucgcagaaaagccaucugg

SEQ ID NO: 408133 - RNA, 19 nt, Artificial Sequence
  Description of Artificial Sequence: Synthetic oligonucleotide
uguaucugcaagcaacgcc

SEQ ID NO: 408134 - RNA, 19 nt, Artificial Sequence
  Description of Artificial Sequence: Synthetic oligonucleotide
aaggacuuaucaaaccagc

SEQ ID NO: 408135 - RNA, 19 nt, Artificial Sequence
  Description of Artificial Sequence: Synthetic oligonucleotide
ugaaauguagcugguaugc

SEQ ID NO: 408136 - RNA, 19 nt, Artificial Sequence
  Description of Artificial Sequence: Synthetic oligonucleotide
aacgccguaguuuauuucu

SEQ ID NO: 408137 - RNA, 19 nt, Artificial Sequence
  Description of Artificial Sequence: Synthetic oligonucleotide
gaguuaguuuuccaaaccc

SEQ ID NO: 408138 - RNA, 19 nt, Artificial Sequence
  Description of Artificial Sequence: Synthetic oligonucleotide
aggaguuaguuuuccaaac

SEQ ID NO: 408139 - RNA, 19 nt, Artificial Sequence
  Description of Artificial Sequence: Synthetic oligonucleotide
aagacauagaaauuuccuu

SEQ ID NO: 408140 - RNA, 19 nt, Artificial Sequence
  Description of Artificial Sequence: Synthetic oligonucleotide
ugucuggucauacugucgc

SEQ ID NO: 408141 - RNA, 19 nt, Artificial Sequence
  Description of Artificial Sequence: Synthetic oligonucleotide
uuauacucagacuuugggu

SEQ ID NO: 408142 - RNA, 19 nt, Artificial Sequence
  Description of Artificial Sequence: Synthetic oligonucleotide
uuuaucugccuguaugcag

SEQ ID NO: 408143 - RNA, 19 nt, Artificial Sequence
  Description of Artificial Sequence: Synthetic oligonucleotide
cuuguugacacauuggaga

SEQ ID NO: 408144 - RNA, 19 nt, Artificial Sequence
  Description of Artificial Sequence: Synthetic oligonucleotide
ucugaaacugaauggaguc

SEQ ID NO: 408145 - RNA, 19 nt, Artificial Sequence
  Description of Artificial Sequence: Synthetic oligonucleotide
gucucgagcagcuaaauac

SEQ ID NO: 408146 - RNA, 19 nt, Artificial Sequence
  Description of Artificial Sequence: Synthetic oligonucleotide
gaaaagccgaaaauacugg

SEQ ID NO: 408147 - RNA, 19 nt, Artificial Sequence
  Description of Artificial Sequence: Synthetic oligonucleotide
uugaaaagccgaaaauacu

SEQ ID NO: 408148 - RNA, 19 nt, Artificial Sequence
  Description of Artificial Sequence: Synthetic oligonucleotide
ugaacgaagggcuuugagu

SEQ ID NO: 408149 - RNA, 19 nt, Artificial Sequence
  Description of Artificial Sequence: Synthetic oligonucleotide
ucucugaacaccucguuga

SEQ ID NO: 408150 - RNA, 19 nt, Artificial Sequence
  Description of Artificial Sequence: Synthetic oligonucleotide
cuggucauuauacucagac

SEQ ID NO: 408151 - RNA, 19 nt, Artificial Sequence
  Description of Artificial Sequence: Synthetic oligonucleotide
uccucuaagcacuuguuga

SEQ ID NO: 408152 - RNA, 19 nt, Artificial Sequence
  Description of Artificial Sequence: Synthetic oligonucleotide
ucgaggacaucaaagacau

SEQ ID NO: 408153 - RNA, 19 nt, Artificial Sequence
  Description of Artificial Sequence: Synthetic oligonucleotide
aaagcguaugacucuuuug

SEQ ID NO: 408154 - RNA, 19 nt, Artificial Sequence
  Description of Artificial Sequence: Synthetic oligonucleotide
ucgaagugucuucagaaac

SEQ ID NO: 408155 - RNA, 19 nt, Artificial Sequence
  Description of Artificial Sequence: Synthetic oligonucleotide
uuagcgguggugaugccag

SEQ ID NO: 408156 - RNA, 19 nt, Artificial Sequence
  Description of Artificial Sequence: Synthetic oligonucleotide
gacguugcagccuauccag

SEQ ID NO: 408157 - RNA, 19 nt, Artificial Sequence
  Description of Artificial Sequence: Synthetic oligonucleotide
ucaagggccgacuuggggc

SEQ ID NO: 408158 - RNA, 19 nt, Artificial Sequence
  Description of Artificial Sequence: Synthetic oligonucleotide
uuaggaguuaguuuuccaa

SEQ ID NO: 408159 - RNA, 19 nt, Artificial Sequence
  Description of Artificial Sequence: Synthetic oligonucleotide
ggugucuucaaguuugggg

SEQ ID NO: 408160 - RNA, 19 nt, Artificial Sequence
  Description of Artificial Sequence: Synthetic oligonucleotide
auuggagaaacucgccggg

SEQ ID NO: 408161 - RNA, 19 nt, Artificial Sequence
  Description of Artificial Sequence: Synthetic oligonucleotide
auacgaguugaauugaaaa

SEQ ID NO: 408162 - RNA, 19 nt, Artificial Sequence
  Description of Artificial Sequence: Synthetic oligonucleotide
agggcuuugaguggcaacc

SEQ ID NO: 408163 - RNA, 19 nt, Artificial Sequence
  Description of Artificial Sequence: Synthetic oligonucleotide
uacucaagggccgacuugg

SEQ ID NO: 408164 - RNA, 19 nt, Artificial Sequence
  Description of Artificial Sequence: Synthetic oligonucleotide
uacacaagaguuaggaguu

SEQ ID NO: 408165 - RNA, 19 nt, Artificial Sequence
  Description of Artificial Sequence: Synthetic oligonucleotide
aggggauaugcauugacca

SEQ ID NO: 408166 - RNA, 19 nt, Artificial Sequence
  Description of Artificial Sequence: Synthetic oligonucleotide
ucuggauugaaugccauaa

SEQ ID NO: 408167 - RNA, 19 nt, Artificial Sequence
  Description of Artificial Sequence: Synthetic oligonucleotide
cauuauacucagacuuugg

SEQ ID NO: 408168 - RNA, 19 nt, Artificial Sequence
  Description of Artificial Sequence: Synthetic oligonucleotide
uuaaaacaauggagucucg

SEQ ID NO: 408169 - RNA, 19 nt, Artificial Sequence
  Description of Artificial Sequence: Synthetic oligonucleotide
auacugucgcagaaaagcc

SEQ ID NO: 408170 - RNA, 19 nt, Artificial Sequence
  Description of Artificial Sequence: Synthetic oligonucleotide
ggacuuaucaaaccagcgg

SEQ ID NO: 408171 - RNA, 19 nt, Artificial Sequence
  Description of Artificial Sequence: Synthetic oligonucleotide
guauuuggagcacucggcc

SEQ ID NO: 408172 - RNA, 19 nt, Artificial Sequence
  Description of Artificial Sequence: Synthetic oligonucleotide
ucugcaagcaacgccguag

SEQ ID NO: 408173 - RNA, 19 nt, Artificial Sequence
  Description of Artificial Sequence: Synthetic oligonucleotide
uuagaugugccugaauuuc

SEQ ID NO: 408174 - RNA, 19 nt, Artificial Sequence
  Description of Artificial Sequence: Synthetic oligonucleotide
aguggacugcggcagugcc

SEQ ID NO: 408175 - RNA, 19 nt, Artificial Sequence
  Description of Artificial Sequence: Synthetic oligonucleotide
aacgcggcggcugagguag

SEQ ID NO: 408176 - RNA, 19 nt, Artificial Sequence
  Description of Artificial Sequence: Synthetic oligonucleotide
uuuagagugcucguagaca

SEQ ID NO: 408177 - RNA, 19 nt, Artificial Sequence
  Description of Artificial Sequence: Synthetic oligonucleotide
acaaaugccucagaacauc

SEQ ID NO: 408178 - RNA, 19 nt, Artificial Sequence
  Description of Artificial Sequence: Synthetic oligonucleotide
ggguauacgaguugaauug

SEQ ID NO: 408179 - RNA, 19 nt, Artificial Sequence
  Description of Artificial Sequence: Synthetic oligonucleotide
aacucgccgggauugcguc

SEQ ID NO: 408180 - RNA, 19 nt, Artificial Sequence
  Description of Artificial Sequence: Synthetic oligonucleotide
uggguauacgaguugaauu

SEQ ID NO: 408181 - RNA, 19 nt, Artificial Sequence
  Description of Artificial Sequence: Synthetic oligonucleotide
gacuuaucaaaccagcggu

SEQ ID NO: 408182 - RNA, 19 nt, Artificial Sequence
  Description of Artificial Sequence: Synthetic oligonucleotide
auauccaggggauaugcau

SEQ ID NO: 408183 - RNA, 19 nt, Artificial Sequence
  Description of Artificial Sequence: Synthetic oligonucleotide
uggguuuggguauacgagu

SEQ ID NO: 408184 - RNA, 19 nt, Artificial Sequence
  Description of Artificial Sequence: Synthetic oligonucleotide
aaaccuaagcaccgcuaca

SEQ ID NO: 408185 - RNA, 19 nt, Artificial Sequence
  Description of Artificial Sequence: Synthetic oligonucleotide
aaagccgaaaauacuggga

SEQ ID NO: 408186 - RNA, 19 nt, Artificial Sequence
  Description of Artificial Sequence: Synthetic oligonucleotide
accuaagcaccgcuacacc

SEQ ID NO: 408187 - RNA, 19 nt, Artificial Sequence
  Description of Artificial Sequence: Synthetic oligonucleotide
cugccuguaugcaggaucc

SEQ ID NO: 408188 - RNA, 19 nt, Artificial Sequence
  Description of Artificial Sequence: Synthetic oligonucleotide
uccuuagcgguggugaugc

SEQ ID NO: 408189 - RNA, 19 nt, Artificial Sequence
  Description of Artificial Sequence: Synthetic oligonucleotide
auggaggcgggucggaccg

SEQ ID NO: 408190 - RNA, 19 nt, Artificial Sequence
  Description of Artificial Sequence: Synthetic oligonucleotide
ugcucaaaguggacugcgg

SEQ ID NO: 408191 - RNA, 19 nt, Artificial Sequence
  Description of Artificial Sequence: Synthetic oligonucleotide
aauguagcugguaugcuua

SEQ ID NO: 408192 - RNA, 19 nt, Artificial Sequence
  Description of Artificial Sequence: Synthetic oligonucleotide
acgaagggcuuugaguggc

SEQ ID NO: 408193 - RNA, 19 nt, Artificial Sequence
  Description of Artificial Sequence: Synthetic oligonucleotide
agcugguaugcuuauucug

SEQ ID NO: 408194 - RNA, 19 nt, Artificial Sequence
  Description of Artificial Sequence: Synthetic oligonucleotide
agccuuuaaagcaucgcuc

SEQ ID NO: 408195 - RNA, 19 nt, Artificial Sequence
  Description of Artificial Sequence: Synthetic oligonucleotide
ggaacaaagcguaugacuc

SEQ ID NO: 408196 - RNA, 19 nt, Artificial Sequence
  Description of Artificial Sequence: Synthetic oligonucleotide
aggacuuaucaaaccagcg

SEQ ID NO: 408197 - RNA, 19 nt, Artificial Sequence
  Description of Artificial Sequence: Synthetic oligonucleotide
uggucauuauacucagacu

SEQ ID NO: 408198 - RNA, 19 nt, Artificial Sequence
  Description of Artificial Sequence: Synthetic oligonucleotide
auacucagacuuugggucu

SEQ ID NO: 408199 - RNA, 19 nt, Artificial Sequence
  Description of Artificial Sequence: Synthetic oligonucleotide
ucaaaccagcgguuugugc

SEQ ID NO: 408200 - RNA, 19 nt, Artificial Sequence
  Description of Artificial Sequence: Synthetic oligonucleotide
agacguugcagccuaucca

SEQ ID NO: 408201 - RNA, 19 nt, Artificial Sequence
  Description of Artificial Sequence: Synthetic oligonucleotide
aguuuuccaaacccuaguu

SEQ ID NO: 408202 - RNA, 19 nt, Artificial Sequence
  Description of Artificial Sequence: Synthetic oligonucleotide
ccuaguucuugaacgaagg

SEQ ID NO: 408203 - RNA, 19 nt, Artificial Sequence
  Description of Artificial Sequence: Synthetic oligonucleotide
auuuggagcacucggccau

SEQ ID NO: 408204 - RNA, 19 nt, Artificial Sequence
  Description of Artificial Sequence: Synthetic oligonucleotide
ggaguuaguuuuccaaacc

SEQ ID NO: 408205 - RNA, 19 nt, Artificial Sequence
  Description of Artificial Sequence: Synthetic oligonucleotide
agcaucgcucagcuuaaag

SEQ ID NO: 408206 - RNA, 19 nt, Artificial Sequence
  Description of Artificial Sequence: Synthetic oligonucleotide
uagagugcucguagacagg

SEQ ID NO: 408207 - RNA, 19 nt, Artificial Sequence
  Description of Artificial Sequence: Synthetic oligonucleotide
ggcuaguuuuguuagguac

SEQ ID NO: 408208 - RNA, 19 nt, Artificial Sequence
  Description of Artificial Sequence: Synthetic oligonucleotide
aguuaguuuuccaaacccu

SEQ ID NO: 408209 - RNA, 19 nt, Artificial Sequence
  Description of Artificial Sequence: Synthetic oligonucleotide
gcaucgcucagcuuaaagc

SEQ ID NO: 408210 - RNA, 19 nt, Artificial Sequence
  Description of Artificial Sequence: Synthetic oligonucleotide
ugcggcagugccauccuug

SEQ ID NO: 408211 - RNA, 19 nt, Artificial Sequence
  Description of Artificial Sequence: Synthetic oligonucleotide
aaacaugcgcccggcggcg

SEQ ID NO: 408212 - RNA, 19 nt, Artificial Sequence
  Description of Artificial Sequence: Synthetic oligonucleotide
agcaaacaagugucgguca

SEQ ID NO: 408213 - RNA, 19 nt, Artificial Sequence
  Description of Artificial Sequence: Synthetic oligonucleotide
gucggaccgucucagugcg

SEQ ID NO: 408214 - RNA, 19 nt, Artificial Sequence
  Description of Artificial Sequence: Synthetic oligonucleotide
uucuaaggugucgaacaug

SEQ ID NO: 408215 - RNA, 19 nt, Artificial Sequence
  Description of Artificial Sequence: Synthetic oligonucleotide
guaaagaguucgucacggc

SEQ ID NO: 408216 - RNA, 19 nt, Artificial Sequence
  Description of Artificial Sequence: Synthetic oligonucleotide
ugaauuucugagggauuca

SEQ ID NO: 408217 - RNA, 19 nt, Artificial Sequence
  Description of Artificial Sequence: Synthetic oligonucleotide
cucaagggccgacuugggg

SEQ ID NO: 408218 - RNA, 19 nt, Artificial Sequence
  Description of Artificial Sequence: Synthetic oligonucleotide
uggcaaccucucauuaucu

SEQ ID NO: 408219 - RNA, 19 nt, Artificial Sequence
  Description of Artificial Sequence: Synthetic oligonucleotide
gcguaugacucuuuugaag

SEQ ID NO: 408220 - RNA, 19 nt, Artificial Sequence
  Description of Artificial Sequence: Synthetic oligonucleotide
uggagaaacucgccgggau

SEQ ID NO: 408221 - RNA, 19 nt, Artificial Sequence
  Description of Artificial Sequence: Synthetic oligonucleotide
uguguugcagguacucguu

SEQ ID NO: 408222 - RNA, 19 nt, Artificial Sequence
  Description of Artificial Sequence: Synthetic oligonucleotide
uucgucacggcuggguuug

SEQ ID NO: 408223 - RNA, 19 nt, Artificial Sequence
  Description of Artificial Sequence: Synthetic oligonucleotide
gcugguaugcuuauucugc

SEQ ID NO: 408224 - RNA, 19 nt, Artificial Sequence
  Description of Artificial Sequence: Synthetic oligonucleotide
uaucacucuuggcaggauu

SEQ ID NO: 408225 - RNA, 19 nt, Artificial Sequence
  Description of Artificial Sequence: Synthetic oligonucleotide
gauugcguccuguguagga

SEQ ID NO: 408226 - RNA, 19 nt, Artificial Sequence
  Description of Artificial Sequence: Synthetic oligonucleotide
gacaaguggacaauguccu

SEQ ID NO: 408227 - RNA, 19 nt, Artificial Sequence
  Description of Artificial Sequence: Synthetic oligonucleotide
caagcaacgccguaguuua

SEQ ID NO: 408228 - RNA, 19 nt, Artificial Sequence
  Description of Artificial Sequence: Synthetic oligonucleotide
cgaguugaauugaaaagcc

SEQ ID NO: 408229 - RNA, 19 nt, Artificial Sequence
  Description of Artificial Sequence: Synthetic oligonucleotide
guaacggcggcucgggaac

SEQ ID NO: 408230 - RNA, 19 nt, Artificial Sequence
  Description of Artificial Sequence: Synthetic oligonucleotide
cccacgaaugcucaaagug

SEQ ID NO: 408231 - RNA, 19 nt, Artificial Sequence
  Description of Artificial Sequence: Synthetic oligonucleotide
caucgcucagcuuaaagcu

SEQ ID NO: 408232 - RNA, 19 nt, Artificial Sequence
  Description of Artificial Sequence: Synthetic oligonucleotide
agccgaaaauacugggaca

SEQ ID NO: 408233 - RNA, 19 nt, Artificial Sequence
  Description of Artificial Sequence: Synthetic oligonucleotide
cucagugcggccgugcuug

SEQ ID NO: 408234 - RNA, 19 nt, Artificial Sequence
  Description of Artificial Sequence: Synthetic oligonucleotide
gaagcacuggcuagucgag

SEQ ID NO: 408235 - RNA, 19 nt, Artificial Sequence
  Description of Artificial Sequence: Synthetic oligonucleotide
gguauuuggagcacucggc

SEQ ID NO: 408236 - RNA, 19 nt, Artificial Sequence
  Description of Artificial Sequence: Synthetic oligonucleotide
agggcuaguuuuguuaggu

SEQ ID NO: 408237 - RNA, 19 nt, Artificial Sequence
  Description of Artificial Sequence: Synthetic oligonucleotide
ucguugucgggucccgagc

SEQ ID NO: 408238 - RNA, 19 nt, Artificial Sequence
  Description of Artificial Sequence: Synthetic oligonucleotide
cugaagcacuggcuagucg

SEQ ID NO: 408239 - RNA, 19 nt, Artificial Sequence
  Description of Artificial Sequence: Synthetic oligonucleotide
gaccgucucagugcggccg

SEQ ID NO: 408240 - RNA, 19 nt, Artificial Sequence
  Description of Artificial Sequence: Synthetic oligonucleotide
cuauccugguagugcagug

SEQ ID NO: 408241 - RNA, 19 nt, Artificial Sequence
  Description of Artificial Sequence: Synthetic oligonucleotide
guuaguuuuccaaacccua

SEQ ID NO: 408242 - RNA, 19 nt, Artificial Sequence
  Description of Artificial Sequence: Synthetic oligonucleotide
ucauugccacuaugcacca

SEQ ID NO: 408243 - RNA, 19 nt, Artificial Sequence
  Description of Artificial Sequence: Synthetic oligonucleotide
ggggauaugcauugaccag

SEQ ID NO: 408244 - RNA, 19 nt, Artificial Sequence
  Description of Artificial Sequence: Synthetic oligonucleotide
agcguaugacucuuuugaa

SEQ ID NO: 408245 - RNA, 19 nt, Artificial Sequence
  Description of Artificial Sequence: Synthetic oligonucleotide
ucauguugguuguccgggu

SEQ ID NO: 408246 - RNA, 19 nt, Artificial Sequence
  Description of Artificial Sequence: Synthetic oligonucleotide
cucguugucgggucccgag

SEQ ID NO: 408247 - RNA, 19 nt, Artificial Sequence
  Description of Artificial Sequence: Synthetic oligonucleotide
acucgccgggauugcgucc

SEQ ID NO: 408248 - RNA, 19 nt, Artificial Sequence
  Description of Artificial Sequence: Synthetic oligonucleotide
caccaugcagcauggugug

SEQ ID NO: 408249 - RNA, 19 nt, Artificial Sequence
  Description of Artificial Sequence: Synthetic oligonucleotide
gccuuuaaagcaucgcuca

SEQ ID NO: 408250 - RNA, 19 nt, Artificial Sequence
  Description of Artificial Sequence: Synthetic oligonucleotide
ccuucuaaggugucgaaca

SEQ ID NO: 408251 - RNA, 19 nt, Artificial Sequence
  Description of Artificial Sequence: Synthetic oligonucleotide
aagugucggucaaagcccu

SEQ ID NO: 408252 - RNA, 19 nt, Artificial Sequence
  Description of Artificial Sequence: Synthetic oligonucleotide
guacucaagggccgacuug

SEQ ID NO: 408253 - RNA, 19 nt, Artificial Sequence
  Description of Artificial Sequence: Synthetic oligonucleotide
aaagcaucgcucagcuuaa

SEQ ID NO: 408254 - RNA, 19 nt, Artificial Sequence
  Description of Artificial Sequence: Synthetic oligonucleotide
caucgcugcuucuuugguc

SEQ ID NO: 408255 - RNA, 19 nt, Artificial Sequence
  Description of Artificial Sequence: Synthetic oligonucleotide
acgaaugcucaaaguggac

SEQ ID NO: 408256 - RNA, 19 nt, Artificial Sequence
  Description of Artificial Sequence: Synthetic oligonucleotide
ugcuugaaggcggcagugc

SEQ ID NO: 408257 - RNA, 19 nt, Artificial Sequence
  Description of Artificial Sequence: Synthetic oligonucleotide
aaacucgccgggauugcgu

SEQ ID NO: 408258 - RNA, 19 nt, Artificial Sequence
  Description of Artificial Sequence: Synthetic oligonucleotide
gggauugcguccuguguag

SEQ ID NO: 408259 - RNA, 19 nt, Artificial Sequence
  Description of Artificial Sequence: Synthetic oligonucleotide
uggacugcggcagugccau

SEQ ID NO: 408260 - RNA, 19 nt, Artificial Sequence
  Description of Artificial Sequence: Synthetic oligonucleotide
ucacggcuggguuugggua

SEQ ID NO: 408261 - RNA, 19 nt, Artificial Sequence
  Description of Artificial Sequence: Synthetic oligonucleotide
guguugcagguacucguug

SEQ ID NO: 408262 - RNA, 19 nt, Artificial Sequence
  Description of Artificial Sequence: Synthetic oligonucleotide
aguucgucacggcuggguu

SEQ ID NO: 408263 - RNA, 19 nt, Artificial Sequence
  Description of Artificial Sequence: Synthetic oligonucleotide
uuggagaaacucgccggga

SEQ ID NO: 408264 - RNA, 19 nt, Artificial Sequence
  Description of Artificial Sequence: Synthetic oligonucleotide
ggucggaccgucucagugc

SEQ ID NO: 408265 - RNA, 19 nt, Artificial Sequence
  Description of Artificial Sequence: Synthetic oligonucleotide
acgaugcuguguugcaggu

SEQ ID NO: 408266 - RNA, 19 nt, Artificial Sequence
  Description of Artificial Sequence: Synthetic oligonucleotide
ugugggacaaguggacaau

SEQ ID NO: 408267 - RNA, 19 nt, Artificial Sequence
  Description of Artificial Sequence: Synthetic oligonucleotide
ucccgagcugguacucaag

SEQ ID NO: 408268 - RNA, 19 nt, Artificial Sequence
  Description of Artificial Sequence: Synthetic oligonucleotide
gaggagacguugcagccua

SEQ ID NO: 408269 - RNA, 19 nt, Artificial Sequence
  Description of Artificial Sequence: Synthetic oligonucleotide
agucucgagcagcuaaaua

SEQ ID NO: 408270 - RNA, 19 nt, Artificial Sequence
  Description of Artificial Sequence: Synthetic oligonucleotide
gugugggacaaguggacaa

SEQ ID NO: 408271 - RNA, 19 nt, Artificial Sequence
  Description of Artificial Sequence: Synthetic oligonucleotide
gggacaaguggacaauguc

SEQ ID NO: 408272 - RNA, 19 nt, Artificial Sequence
  Description of Artificial Sequence: Synthetic oligonucleotide
uacucguugucgggucccg

SEQ ID NO: 408273 - RNA, 19 nt, Artificial Sequence
  Description of Artificial Sequence: Synthetic oligonucleotide
caacgccguaguuuauuuc

SEQ ID NO: 408274 - RNA, 19 nt, Artificial Sequence
  Description of Artificial Sequence: Synthetic oligonucleotide
cuaaggugucgaacauguc

SEQ ID NO: 408275 - RNA, 19 nt, Artificial Sequence
  Description of Artificial Sequence: Synthetic oligonucleotide
uuaaagcaucgcucagcuu

SEQ ID NO: 408276 - RNA, 19 nt, Artificial Sequence
  Description of Artificial Sequence: Synthetic oligonucleotide
gcuccauaccaggacagag

SEQ ID NO: 408277 - RNA, 19 nt, Artificial Sequence
  Description of Artificial Sequence: Synthetic oligonucleotide
aggggcaaagccgccaaga

SEQ ID NO: 408278 - RNA, 19 nt, Artificial Sequence
  Description of Artificial Sequence: Synthetic oligonucleotide
gagcagcuaaauacauuuc

SEQ ID NO: 408279 - RNA, 19 nt, Artificial Sequence
  Description of Artificial Sequence: Synthetic oligonucleotide
gguacucguugucgggucc

SEQ ID NO: 408280 - RNA, 19 nt, Artificial Sequence
  Description of Artificial Sequence: Synthetic oligonucleotide
aacaugcgcccggcggcgg

SEQ ID NO: 408281 - RNA, 19 nt, Artificial Sequence
  Description of Artificial Sequence: Synthetic oligonucleotide
acuuaucaaaccagcgguu

SEQ ID NO: 408282 - RNA, 19 nt, Artificial Sequence
  Description of Artificial Sequence: Synthetic oligonucleotide
cuuagcgguggugaugcca

SEQ ID NO: 408283 - RNA, 19 nt, Artificial Sequence
  Description of Artificial Sequence: Synthetic oligonucleotide
uaacggcggcucgggaacg

SEQ ID NO: 408284 - RNA, 19 nt, Artificial Sequence
  Description of Artificial Sequence: Synthetic oligonucleotide
guauacgaguugaauugaa

SEQ ID NO: 408285 - RNA, 19 nt, Artificial Sequence
  Description of Artificial Sequence: Synthetic oligonucleotide
ccuuuaaagcaucgcucag

SEQ ID NO: 408286 - RNA, 19 nt, Artificial Sequence
  Description of Artificial Sequence: Synthetic oligonucleotide
cccgagcugguacucaagg

SEQ ID NO: 408287 - RNA, 19 nt, Artificial Sequence
  Description of Artificial Sequence: Synthetic oligonucleotide
guugucgggucccgagcug

SEQ ID NO: 408288 - RNA, 19 nt, Artificial Sequence
  Description of Artificial Sequence: Synthetic oligonucleotide
gcuagucgagcaccucagg

SEQ ID NO: 408289 - RNA, 19 nt, Artificial Sequence
  Description of Artificial Sequence: Synthetic oligonucleotide
gggucggaccgucucagug

SEQ ID NO: 408290 - RNA, 19 nt, Artificial Sequence
  Description of Artificial Sequence: Synthetic oligonucleotide
ccggacagcugaaacaguc

SEQ ID NO: 408291 - RNA, 19 nt, Artificial Sequence
  Description of Artificial Sequence: Synthetic oligonucleotide
guacucguugucggguccc

SEQ ID NO: 408292 - RNA, 19 nt, Artificial Sequence
  Description of Artificial Sequence: Synthetic oligonucleotide
aucgucccgggcgguaacg

SEQ ID NO: 408293 - RNA, 19 nt, Artificial Sequence
  Description of Artificial Sequence: Synthetic oligonucleotide
ucggaccgucucagugcgg

SEQ ID NO: 408294 - RNA, 19 nt, Artificial Sequence
  Description of Artificial Sequence: Synthetic oligonucleotide
cagcucgaagugucuucag

SEQ ID NO: 408295 - RNA, 19 nt, Artificial Sequence
  Description of Artificial Sequence: Synthetic oligonucleotide
agaaaccggacagcugaaa

SEQ ID NO: 408296 - RNA, 19 nt, Artificial Sequence
  Description of Artificial Sequence: Synthetic oligonucleotide
gacaaaugccucagaacau

SEQ ID NO: 408297 - RNA, 19 nt, Artificial Sequence
  Description of Artificial Sequence: Synthetic oligonucleotide
acucaagggccgacuuggg

SEQ ID NO: 408298 - RNA, 19 nt, Artificial Sequence
  Description of Artificial Sequence: Synthetic oligonucleotide
agcaacgccguaguuuauu

SEQ ID NO: 408299 - RNA, 19 nt, Artificial Sequence
  Description of Artificial Sequence: Synthetic oligonucleotide
ucaucgucccgggcgguaa

SEQ ID NO: 408300 - RNA, 19 nt, Artificial Sequence
  Description of Artificial Sequence: Synthetic oligonucleotide
ggcuagucgagcaccucag

SEQ ID NO: 408301 - RNA, 19 nt, Artificial Sequence
  Description of Artificial Sequence: Synthetic oligonucleotide
accgucucagugcggccgu

SEQ ID NO: 408302 - RNA, 19 nt, Artificial Sequence
  Description of Artificial Sequence: Synthetic oligonucleotide
gcaaacaagugucggucaa

SEQ ID NO: 408303 - RNA, 19 nt, Artificial Sequence
  Description of Artificial Sequence: Synthetic oligonucleotide
ccaggggauaugcauugac

SEQ ID NO: 408304 - RNA, 19 nt, Artificial Sequence
  Description of Artificial Sequence: Synthetic oligonucleotide
gcucguagacaggauguug

SEQ ID NO: 408305 - RNA, 19 nt, Artificial Sequence
  Description of Artificial Sequence: Synthetic oligonucleotide
caccgcaucagggcucagc

SEQ ID NO: 408306 - RNA, 19 nt, Artificial Sequence
  Description of Artificial Sequence: Synthetic oligonucleotide
acgccguaguuuauuucug

SEQ ID NO: 408307 - RNA, 19 nt, Artificial Sequence
  Description of Artificial Sequence: Synthetic oligonucleotide
gcgguuugugccaucacca

SEQ ID NO: 408308 - RNA, 19 nt, Artificial Sequence
  Description of Artificial Sequence: Synthetic oligonucleotide
cucgggaacgcggcggcug

SEQ ID NO: 408309 - RNA, 19 nt, Artificial Sequence
  Description of Artificial Sequence: Synthetic oligonucleotide
ggauugcguccuguguagg

SEQ ID NO: 408310 - RNA, 19 nt, Artificial Sequence
  Description of Artificial Sequence: Synthetic oligonucleotide
ccagccuuuaaagcaucgc

SEQ ID NO: 408311 - RNA, 19 nt, Artificial Sequence
  Description of Artificial Sequence: Synthetic oligonucleotide
uccuucccgaugccauuuu

SEQ ID NO: 408312 - RNA, 19 nt, Artificial Sequence
  Description of Artificial Sequence: Synthetic oligonucleotide
gggcacgaugcuguguugc

SEQ ID NO: 408313 - RNA, 19 nt, Artificial Sequence
  Description of Artificial Sequence: Synthetic oligonucleotide
ggcuuugaguggcaaccuc

SEQ ID NO: 408314 - RNA, 19 nt, Artificial Sequence
  Description of Artificial Sequence: Synthetic oligonucleotide
cuucuaaggugucgaacau

SEQ ID NO: 408315 - RNA, 19 nt, Artificial Sequence
  Description of Artificial Sequence: Synthetic oligonucleotide
ggcggggcaucaucguccc

SEQ ID NO: 408316 - RNA, 19 nt, Artificial Sequence
  Description of Artificial Sequence: Synthetic oligonucleotide
caaagcguaugacucuuuu

SEQ ID NO: 408317 - RNA, 19 nt, Artificial Sequence
  Description of Artificial Sequence: Synthetic oligonucleotide
ugccuguaugcaggaucca

SEQ ID NO: 408318 - RNA, 19 nt, Artificial Sequence
  Description of Artificial Sequence: Synthetic oligonucleotide
cuugaacgaagggcuuuga

SEQ ID NO: 408319 - RNA, 19 nt, Artificial Sequence
  Description of Artificial Sequence: Synthetic oligonucleotide
gucacggcuggguuugggu

SEQ ID NO: 408320 - RNA, 19 nt, Artificial Sequence
  Description of Artificial Sequence: Synthetic oligonucleotide
caggggcaaagccgccaag

SEQ ID NO: 408321 - RNA, 19 nt, Artificial Sequence
  Description of Artificial Sequence: Synthetic oligonucleotide
cugguacucaagggccgac

SEQ ID NO: 408322 - RNA, 19 nt, Artificial Sequence
  Description of Artificial Sequence: Synthetic oligonucleotide
caucgucccgggcgguaac

SEQ ID NO: 408323 - RNA, 19 nt, Artificial Sequence
  Description of Artificial Sequence: Synthetic oligonucleotide
gucccgagcugguacucaa

SEQ ID NO: 408324 - RNA, 19 nt, Artificial Sequence
  Description of Artificial Sequence: Synthetic oligonucleotide
ggucauacugucgcagaaa

SEQ ID NO: 408325 - RNA, 19 nt, Artificial Sequence
  Description of Artificial Sequence: Synthetic oligonucleotide
gggaacgcggcggcugagg

SEQ ID NO: 408326 - RNA, 19 nt, Artificial Sequence
  Description of Artificial Sequence: Synthetic oligonucleotide
aagcaucgcucagcuuaaa

SEQ ID NO: 408327 - RNA, 19 nt, Artificial Sequence
  Description of Artificial Sequence: Synthetic oligonucleotide
caugcgcccggcggcgggg

SEQ ID NO: 408328 - RNA, 19 nt, Artificial Sequence
  Description of Artificial Sequence: Synthetic oligonucleotide
cugcaagcaacgccguagu

SEQ ID NO: 408329 - RNA, 19 nt, Artificial Sequence
  Description of Artificial Sequence: Synthetic oligonucleotide
acaaagcguaugacucuuu

SEQ ID NO: 408330 - RNA, 19 nt, Artificial Sequence
  Description of Artificial Sequence: Synthetic oligonucleotide
ucgucacggcuggguuugg

SEQ ID NO: 408331 - RNA, 19 nt, Artificial Sequence
  Description of Artificial Sequence: Synthetic oligonucleotide
aagcaacgccguaguuuau

SEQ ID NO: 408332 - RNA, 19 nt, Artificial Sequence
  Description of Artificial Sequence: Synthetic oligonucleotide
ggagacguugcagccuauc

SEQ ID NO: 408333 - RNA, 19 nt, Artificial Sequence
  Description of Artificial Sequence: Synthetic oligonucleotide
ggaccgucucagugcggcc

SEQ ID NO: 408334 - RNA, 19 nt, Artificial Sequence
  Description of Artificial Sequence: Synthetic oligonucleotide
cuggcuagucgagcaccuc

SEQ ID NO: 408335 - RNA, 19 nt, Artificial Sequence
  Description of Artificial Sequence: Synthetic oligonucleotide
acucguugucgggucccga

SEQ ID NO: 408336 - RNA, 19 nt, Artificial Sequence
  Description of Artificial Sequence: Synthetic oligonucleotide
guucgucacggcuggguuu

SEQ ID NO: 408337 - RNA, 19 nt, Artificial Sequence
  Description of Artificial Sequence: Synthetic oligonucleotide
ucgccgggauugcguccug

SEQ ID NO: 408338 - RNA, 19 nt, Artificial Sequence
  Description of Artificial Sequence: Synthetic oligonucleotide
cacggcuggguuuggguau

SEQ ID NO: 408339 - RNA, 19 nt, Artificial Sequence
  Description of Artificial Sequence: Synthetic oligonucleotide
gggcuaguuuuguuaggua

SEQ ID NO: 408340 - RNA, 19 nt, Artificial Sequence
  Description of Artificial Sequence: Synthetic oligonucleotide
aucaucgucccgggcggua

SEQ ID NO: 408341 - RNA, 19 nt, Artificial Sequence
  Description of Artificial Sequence: Synthetic oligonucleotide
gccaugguauuuggagcac

SEQ ID NO: 408342 - RNA, 19 nt, Artificial Sequence
  Description of Artificial Sequence: Synthetic oligonucleotide
cacugagguaucuccucau

SEQ ID NO: 408343 - RNA, 19 nt, Artificial Sequence
  Description of Artificial Sequence: Synthetic oligonucleotide
gcggcucgggaacgcggcg

SEQ ID NO: 408344 - RNA, 19 nt, Artificial Sequence
  Description of Artificial Sequence: Synthetic oligonucleotide
ccagcucgaagugucuuca

SEQ ID NO: 408345 - RNA, 19 nt, Artificial Sequence
  Description of Artificial Sequence: Synthetic oligonucleotide
ggagaaacucgccgggauu

SEQ ID NO: 408346 - RNA, 19 nt, Artificial Sequence
  Description of Artificial Sequence: Synthetic oligonucleotide
gcgggucggaccgucucag

SEQ ID NO: 408347 - RNA, 19 nt, Artificial Sequence
  Description of Artificial Sequence: Synthetic oligonucleotide
gcugguacucaagggccga

SEQ ID NO: 408348 - RNA, 19 nt, Artificial Sequence
  Description of Artificial Sequence: Synthetic oligonucleotide
ggcgggucggaccgucuca

SEQ ID NO: 408349 - RNA, 19 nt, Artificial Sequence
  Description of Artificial Sequence: Synthetic oligonucleotide
gcaacgccguaguuuauuu

SEQ ID NO: 408350 - RNA, 19 nt, Artificial Sequence
  Description of Artificial Sequence: Synthetic oligonucleotide
acggcuggguuuggguaua

SEQ ID NO: 408351 - RNA, 19 nt, Artificial Sequence
  Description of Artificial Sequence: Synthetic oligonucleotide
ggcuccauaccaggacaga

SEQ ID NO: 408352 - RNA, 19 nt, Artificial Sequence
  Description of Artificial Sequence: Synthetic oligonucleotide
cucgccgggauugcguccu

SEQ ID NO: 408353 - RNA, 19 nt, Artificial Sequence
  Description of Artificial Sequence: Synthetic oligonucleotide
uggaggcgggucggaccgu

SEQ ID NO: 408354 - RNA, 19 nt, Artificial Sequence
  Description of Artificial Sequence: Synthetic oligonucleotide
gcaaagccgccaagacuca

SEQ ID NO: 408355 - RNA, 19 nt, Artificial Sequence
  Description of Artificial Sequence: Synthetic oligonucleotide
cgggauugcguccugugua

SEQ ID NO: 408356 - RNA, 19 nt, Artificial Sequence
  Description of Artificial Sequence: Synthetic oligonucleotide
guaucacucuuggcaggau

SEQ ID NO: 408357 - RNA, 19 nt, Artificial Sequence
  Description of Artificial Sequence: Synthetic oligonucleotide
ccgacuuggggcuccccaa

SEQ ID NO: 408358 - RNA, 19 nt, Artificial Sequence
  Description of Artificial Sequence: Synthetic oligonucleotide
gucgagcaccucagggcua

SEQ ID NO: 408359 - RNA, 19 nt, Artificial Sequence
  Description of Artificial Sequence: Synthetic oligonucleotide
gcggggcaucaucgucccg

SEQ ID NO: 408360 - RNA, 19 nt, Artificial Sequence
  Description of Artificial Sequence: Synthetic oligonucleotide
ccccacgaaugcucaaagu

SEQ ID NO: 408361 - RNA, 19 nt, Artificial Sequence
  Description of Artificial Sequence: Synthetic oligonucleotide
cgugcuugaaggcggcagu

SEQ ID NO: 408362 - RNA, 19 nt, Artificial Sequence
  Description of Artificial Sequence: Synthetic oligonucleotide
cgccguaguuuauuucugu

SEQ ID NO: 408363 - RNA, 19 nt, Artificial Sequence
  Description of Artificial Sequence: Synthetic oligonucleotide
ggacugcggcagugccauc

SEQ ID NO: 408364 - RNA, 19 nt, Artificial Sequence
  Description of Artificial Sequence: Synthetic oligonucleotide
gccgugcuugaaggcggca

SEQ ID NO: 408365 - RNA, 19 nt, Artificial Sequence
  Description of Artificial Sequence: Synthetic oligonucleotide
cugcggcagugccauccuu

SEQ ID NO: 408366 - RNA, 19 nt, Artificial Sequence
  Description of Artificial Sequence: Synthetic oligonucleotide
cgggucccgagcugguacu

SEQ ID NO: 408367 - RNA, 19 nt, Artificial Sequence
  Description of Artificial Sequence: Synthetic oligonucleotide
ccgcaucagggcucagcuu

SEQ ID NO: 408368 - RNA, 19 nt, Artificial Sequence
  Description of Artificial Sequence: Synthetic oligonucleotide
ccgggcgguaacggcggcu

SEQ ID NO: 408369 - RNA, 19 nt, Artificial Sequence
  Description of Artificial Sequence: Synthetic oligonucleotide
cgggucggaccgucucagu

SEQ ID NO: 408370 - RNA, 19 nt, Artificial Sequence
  Description of Artificial Sequence: Synthetic oligonucleotide
aaauuagauagauaauugg

SEQ ID NO: 408371 - RNA, 19 nt, Artificial Sequence
  Description of Artificial Sequence: Synthetic oligonucleotide
uaugauauaaaucuaggca

SEQ ID NO: 408372 - RNA, 19 nt, Artificial Sequence
  Description of Artificial Sequence: Synthetic oligonucleotide
auuauauugcauuuaggcc

SEQ ID NO: 408373 - RNA, 19 nt, Artificial Sequence
  Description of Artificial Sequence: Synthetic oligonucleotide
uaaauuauguuaaaggccu

SEQ ID NO: 408374 - RNA, 19 nt, Artificial Sequence
  Description of Artificial Sequence: Synthetic oligonucleotide
aacguuuuauauuuggcuc

SEQ ID NO: 408375 - RNA, 19 nt, Artificial Sequence
  Description of Artificial Sequence: Synthetic oligonucleotide
auaugauauaaaucuaggc

SEQ ID NO: 408376 - RNA, 19 nt, Artificial Sequence
  Description of Artificial Sequence: Synthetic oligonucleotide
auauagguuacauaagcac

SEQ ID NO: 408377 - RNA, 19 nt, Artificial Sequence
  Description of Artificial Sequence: Synthetic oligonucleotide
uauguauucgcuaauaaau

SEQ ID NO: 408378 - RNA, 19 nt, Artificial Sequence
  Description of Artificial Sequence: Synthetic oligonucleotide
gaauuaauaaacugcucgg

SEQ ID NO: 408379 - RNA, 19 nt, Artificial Sequence
  Description of Artificial Sequence: Synthetic oligonucleotide
uuagauagauaauugguca

SEQ ID NO: 408380 - RNA, 19 nt, Artificial Sequence
  Description of Artificial Sequence: Synthetic oligonucleotide
uaccuuuuaaccaucuacg

SEQ ID NO: 408381 - RNA, 19 nt, Artificial Sequence
  Description of Artificial Sequence: Synthetic oligonucleotide
agaaaagagauuauauugc

SEQ ID NO: 408382 - RNA, 19 nt, Artificial Sequence
  Description of Artificial Sequence: Synthetic oligonucleotide
uuaauaaacugcucggugc

SEQ ID NO: 408383 - RNA, 19 nt, Artificial Sequence
  Description of Artificial Sequence: Synthetic oligonucleotide
aaauuacuauuugaggugg

SEQ ID NO: 408384 - RNA, 19 nt, Artificial Sequence
  Description of Artificial Sequence: Synthetic oligonucleotide
guauacaguauugugaugg

SEQ ID NO: 408385 - RNA, 19 nt, Artificial Sequence
  Description of Artificial Sequence: Synthetic oligonucleotide
agcauuaaaugacaccacc

SEQ ID NO: 408386 - RNA, 19 nt, Artificial Sequence
  Description of Artificial Sequence: Synthetic oligonucleotide
acuguuagauaucuguugg

SEQ ID NO: 408387 - RNA, 19 nt, Artificial Sequence
  Description of Artificial Sequence: Synthetic oligonucleotide
aaggcuuauguuuaauaag

SEQ ID NO: 408388 - RNA, 19 nt, Artificial Sequence
  Description of Artificial Sequence: Synthetic oligonucleotide
uuuacuauggcuacuacuu

SEQ ID NO: 408389 - RNA, 19 nt, Artificial Sequence
  Description of Artificial Sequence: Synthetic oligonucleotide
aauuagauagauaauuggu

SEQ ID NO: 408390 - RNA, 19 nt, Artificial Sequence
  Description of Artificial Sequence: Synthetic oligonucleotide
  modified_base (18)..(18): a, c, u, g, unknown or other
uuuugaaccacacguacnc

SEQ ID NO: 408391 - RNA, 19 nt, Artificial Sequence
  Description of Artificial Sequence: Synthetic oligonucleotide
uagauaauuggucaauucu

SEQ ID NO: 408392 - RNA, 19 nt, Artificial Sequence
  Description of Artificial Sequence: Synthetic oligonucleotide
aaaccgaacgaauuaauaa

SEQ ID NO: 408393 - RNA, 19 nt, Artificial Sequence
  Description of Artificial Sequence: Synthetic oligonucleotide
aaguauacaguauugugau

SEQ ID NO: 408394 - RNA, 19 nt, Artificial Sequence
  Description of Artificial Sequence: Synthetic oligonucleotide
uguuuuauauguauucgcu

SEQ ID NO: 408395 - RNA, 19 nt, Artificial Sequence
  Description of Artificial Sequence: Synthetic oligonucleotide
ugacagaccuacaacaaag

SEQ ID NO: 408396 - RNA, 19 nt, Artificial Sequence
  Description of Artificial Sequence: Synthetic oligonucleotide
gauuggaugaacugauggg

SEQ ID NO: 408397 - RNA, 19 nt, Artificial Sequence
  Description of Artificial Sequence: Synthetic oligonucleotide
ugugcuauuauugaugaca

SEQ ID NO: 408398 - RNA, 19 nt, Artificial Sequence
  Description of Artificial Sequence: Synthetic oligonucleotide
uaauaaguauacaguauug

SEQ ID NO: 408399 - RNA, 19 nt, Artificial Sequence
  Description of Artificial Sequence: Synthetic oligonucleotide
uucgagugacaucaaaggg

SEQ ID NO: 408400 - RNA, 19 nt, Artificial Sequence
  Description of Artificial Sequence: Synthetic oligonucleotide
ucuacguauaauuaacaac

SEQ ID NO: 408401 - RNA, 19 nt, Artificial Sequence
  Description of Artificial Sequence: Synthetic oligonucleotide
cagaccuacaacaaagacg

SEQ ID NO: 408402 - RNA, 19 nt, Artificial Sequence
  Description of Artificial Sequence: Synthetic oligonucleotide
auagauaauuggucaauuc

SEQ ID NO: 408403 - RNA, 19 nt, Artificial Sequence
  Description of Artificial Sequence: Synthetic oligonucleotide
uucuuaucaacugaacccg

SEQ ID NO: 408404 - RNA, 19 nt, Artificial Sequence
  Description of Artificial Sequence: Synthetic oligonucleotide
uauugcguggaaaaggcca

SEQ ID NO: 408405 - RNA, 19 nt, Artificial Sequence
  Description of Artificial Sequence: Synthetic oligonucleotide
aacgaauuaauaaacugcu

SEQ ID NO: 408406 - RNA, 19 nt, Artificial Sequence
  Description of Artificial Sequence: Synthetic oligonucleotide
uauucgcuaauaaauuaug

SEQ ID NO: 408407 - RNA, 19 nt, Artificial Sequence
  Description of Artificial Sequence: Synthetic oligonucleotide
ucgagugacaucaaaggga

SEQ ID NO: 408408 - RNA, 19 nt, Artificial Sequence
  Description of Artificial Sequence: Synthetic oligonucleotide
uuaucaacugaacccguag

SEQ ID NO: 408409 - RNA, 19 nt, Artificial Sequence
  Description of Artificial Sequence: Synthetic oligonucleotide
caacugaacccguagauag

SEQ ID NO: 408410 - RNA, 19 nt, Artificial Sequence
  Description of Artificial Sequence: Synthetic oligonucleotide
ugguauacuaggcagugca

SEQ ID NO: 408411 - RNA, 19 nt, Artificial Sequence
  Description of Artificial Sequence: Synthetic oligonucleotide
auuuuguuguaccuaaaga

SEQ ID NO: 408412 - RNA, 19 nt, Artificial Sequence
  Description of Artificial Sequence: Synthetic oligonucleotide
aaccgaacgaauuaauaaa

SEQ ID NO: 408413 - RNA, 19 nt, Artificial Sequence
  Description of Artificial Sequence: Synthetic oligonucleotide
uggguguauacauuaaaug

SEQ ID NO: 408414 - RNA, 19 nt, Artificial Sequence
  Description of Artificial Sequence: Synthetic oligonucleotide
ugauauaaaucuaggcaac

SEQ ID NO: 408415 - RNA, 19 nt, Artificial Sequence
  Description of Artificial Sequence: Synthetic oligonucleotide
ugagguacacgcuaguugu

SEQ ID NO: 408416 - RNA, 19 nt, Artificial Sequence
  Description of Artificial Sequence: Synthetic oligonucleotide
ugcaguauuuuguuguacc

SEQ ID NO: 408417 - RNA, 19 nt, Artificial Sequence
  Description of Artificial Sequence: Synthetic oligonucleotide
cuacuacuuacauacaaug

SEQ ID NO: 408418 - RNA, 19 nt, Artificial Sequence
  Description of Artificial Sequence: Synthetic oligonucleotide
aggaacguuuuauauuugg

SEQ ID NO: 408419 - RNA, 19 nt, Artificial Sequence
  Description of Artificial Sequence: Synthetic oligonucleotide
acagaccuacaacaaagac

SEQ ID NO: 408420 - RNA, 19 nt, Artificial Sequence
  Description of Artificial Sequence: Synthetic oligonucleotide
  modified_base (7)..(7): a, c, u, g, unknown or other
acguacncuagccaaaugu

SEQ ID NO: 408421 - RNA, 19 nt, Artificial Sequence
  Description of Artificial Sequence: Synthetic oligonucleotide
uugugacagaccuacaaca

SEQ ID NO: 408422 - RNA, 19 nt, Artificial Sequence
  Description of Artificial Sequence: Synthetic oligonucleotide
aauuaauaaacugcucggu

SEQ ID NO: 408423 - RNA, 19 nt, Artificial Sequence
  Description of Artificial Sequence: Synthetic oligonucleotide
aaauugucugagaauaaug

SEQ ID NO: 408424 - RNA, 19 nt, Artificial Sequence
  Description of Artificial Sequence: Synthetic oligonucleotide
uuagauaucuguugggaau

SEQ ID NO: 408425 - RNA, 19 nt, Artificial Sequence
  Description of Artificial Sequence: Synthetic oligonucleotide
  modified_base (4)..(4): a, c, u, g, unknown or other
uacncuagccaaauguuuc

SEQ ID NO: 408426 - RNA, 19 nt, Artificial Sequence
  Description of Artificial Sequence: Synthetic oligonucleotide
guauaauuaacaaccauuc

SEQ ID NO: 408427 - RNA, 19 nt, Artificial Sequence
  Description of Artificial Sequence: Synthetic oligonucleotide
uuaagaaguaacugcagua

SEQ ID NO: 408428 - RNA, 19 nt, Artificial Sequence
  Description of Artificial Sequence: Synthetic oligonucleotide
uaauaaacugcucggugcu

SEQ ID NO: 408429 - RNA, 19 nt, Artificial Sequence
  Description of Artificial Sequence: Synthetic oligonucleotide
acaaauuagauagauaauu

SEQ ID NO: 408430 - RNA, 19 nt, Artificial Sequence
  Description of Artificial Sequence: Synthetic oligonucleotide
acuauuaagagaguuggca

SEQ ID NO: 408431 - RNA, 19 nt, Artificial Sequence
  Description of Artificial Sequence: Synthetic oligonucleotide
cuggcuguuuagaagagcc

SEQ ID NO: 408432 - RNA, 19 nt, Artificial Sequence
  Description of Artificial Sequence: Synthetic oligonucleotide
aagagauuauauugcauuu

SEQ ID NO: 408433 - RNA, 19 nt, Artificial Sequence
  Description of Artificial Sequence: Synthetic oligonucleotide
gaaggcguaucacuguuag

SEQ ID NO: 408434 - RNA, 19 nt, Artificial Sequence
  Description of Artificial Sequence: Synthetic oligonucleotide
uuacugccccuucaaaagg

SEQ ID NO: 408435 - RNA, 19 nt, Artificial Sequence
  Description of Artificial Sequence: Synthetic oligonucleotide
auagcugaagaaaauuggg

SEQ ID NO: 408436 - RNA, 19 nt, Artificial Sequence
  Description of Artificial Sequence: Synthetic oligonucleotide
ugcuauugcguggaaaagg

SEQ ID NO: 408437 - RNA, 19 nt, Artificial Sequence
  Description of Artificial Sequence: Synthetic oligonucleotide
ggauauagguuacauaagc

SEQ ID NO: 408438 - RNA, 19 nt, Artificial Sequence
  Description of Artificial Sequence: Synthetic oligonucleotide
cuuuacuccacuauaccuc

SEQ ID NO: 408439 - RNA, 19 nt, Artificial Sequence
  Description of Artificial Sequence: Synthetic oligonucleotide
auuguugacacacuguauu

SEQ ID NO: 408440 - RNA, 19 nt, Artificial Sequence
  Description of Artificial Sequence: Synthetic oligonucleotide
acuuuacuccacuauaccu

SEQ ID NO: 408441 - RNA, 19 nt, Artificial Sequence
  Description of Artificial Sequence: Synthetic oligonucleotide
uacuuuaggcaacuaugag

SEQ ID NO: 408442 - RNA, 19 nt, Artificial Sequence
  Description of Artificial Sequence: Synthetic oligonucleotide
auggucgaaaccuucaccu

SEQ ID NO: 408443 - RNA, 19 nt, Artificial Sequence
  Description of Artificial Sequence: Synthetic oligonucleotide
uaggcguugugacagaccu

SEQ ID NO: 408444 - RNA, 19 nt, Artificial Sequence
  Description of Artificial Sequence: Synthetic oligonucleotide
  modified_base (15)..(15): a, c, u, g, unknown or other
ugaaccacacguacncuag

SEQ ID NO: 408445 - RNA, 19 nt, Artificial Sequence
  Description of Artificial Sequence: Synthetic oligonucleotide
aaggauagcgggcugccug

SEQ ID NO: 408446 - RNA, 19 nt, Artificial Sequence
  Description of Artificial Sequence: Synthetic oligonucleotide
uguuuacccauguucaagu

SEQ ID NO: 408447 - RNA, 19 nt, Artificial Sequence
  Description of Artificial Sequence: Synthetic oligonucleotide
uguauucgcuaauaaauua

SEQ ID NO: 408448 - RNA, 19 nt, Artificial Sequence
  Description of Artificial Sequence: Synthetic oligonucleotide
cuagagauuggcauuuaug

SEQ ID NO: 408449 - RNA, 19 nt, Artificial Sequence
  Description of Artificial Sequence: Synthetic oligonucleotide
  modified_base (3)..(3): a, c, u, g, unknown or other
acncuagccaaauguuucg

SEQ ID NO: 408450 - RNA, 19 nt, Artificial Sequence
  Description of Artificial Sequence: Synthetic oligonucleotide
ugauaaaccaggugguggu

SEQ ID NO: 408451 - RNA, 19 nt, Artificial Sequence
  Description of Artificial Sequence: Synthetic oligonucleotide
auauguauucgcuaauaaa

SEQ ID NO: 408452 - RNA, 19 nt, Artificial Sequence
  Description of Artificial Sequence: Synthetic oligonucleotide
ucuguucguacucuuggug

SEQ ID NO: 408453 - RNA, 19 nt, Artificial Sequence
  Description of Artificial Sequence: Synthetic oligonucleotide
guacucuugguguuuaccc

SEQ ID NO: 408454 - RNA, 19 nt, Artificial Sequence
  Description of Artificial Sequence: Synthetic oligonucleotide
uacuccacuauaccucagg

SEQ ID NO: 408455 - RNA, 19 nt, Artificial Sequence
  Description of Artificial Sequence: Synthetic oligonucleotide
uuggguguauacauuaaau

SEQ ID NO: 408456 - RNA, 19 nt, Artificial Sequence
  Description of Artificial Sequence: Synthetic oligonucleotide
cuguaggccaaucacuggg

SEQ ID NO: 408457 - RNA, 19 nt, Artificial Sequence
  Description of Artificial Sequence: Synthetic oligonucleotide
accgaacgaauuaauaaac

SEQ ID NO: 408458 - RNA, 19 nt, Artificial Sequence
  Description of Artificial Sequence: Synthetic oligonucleotide
auuggacuuugauaaacca

SEQ ID NO: 408459 - RNA, 19 nt, Artificial Sequence
  Description of Artificial Sequence: Synthetic oligonucleotide
uggaaaaccgaacgaauua

SEQ ID NO: 408460 - RNA, 19 nt, Artificial Sequence
  Description of Artificial Sequence: Synthetic oligonucleotide
uuuggguguauacauuaaa

SEQ ID NO: 408461 - RNA, 19 nt, Artificial Sequence
  Description of Artificial Sequence: Synthetic oligonucleotide
uuguugacacacuguauug

SEQ ID NO: 408462 - RNA, 19 nt, Artificial Sequence
  Description of Artificial Sequence: Synthetic oligonucleotide
ugaacccguagauagcuga

SEQ ID NO: 408463 - RNA, 19 nt, Artificial Sequence
  Description of Artificial Sequence: Synthetic oligonucleotide
aauguuuacccauguucaa

SEQ ID NO: 408464 - RNA, 19 nt, Artificial Sequence
  Description of Artificial Sequence: Synthetic oligonucleotide
gauuggacuuugauaaacc

SEQ ID NO: 408465 - RNA, 19 nt, Artificial Sequence
  Description of Artificial Sequence: Synthetic oligonucleotide
cuuuuaaccaucuacguau

SEQ ID NO: 408466 - RNA, 19 nt, Artificial Sequence
  Description of Artificial Sequence: Synthetic oligonucleotide
ugccccuucaaaaggagac

SEQ ID NO: 408467 - RNA, 19 nt, Artificial Sequence
  Description of Artificial Sequence: Synthetic oligonucleotide
aguggcauggucgaaaccu

SEQ ID NO: 408468 - RNA, 19 nt, Artificial Sequence
  Description of Artificial Sequence: Synthetic oligonucleotide
auucccuauacugagagaa

SEQ ID NO: 408469 - RNA, 19 nt, Artificial Sequence
  Description of Artificial Sequence: Synthetic oligonucleotide
uauauugcauuuaggccau

SEQ ID NO: 408470 - RNA, 19 nt, Artificial Sequence
  Description of Artificial Sequence: Synthetic oligonucleotide
augcuauauaacaugagca

SEQ ID NO: 408471 - RNA, 19 nt, Artificial Sequence
  Description of Artificial Sequence: Synthetic oligonucleotide
uaccuaaagacgccuuaag

SEQ ID NO: 408472 - RNA, 19 nt, Artificial Sequence
  Description of Artificial Sequence: Synthetic oligonucleotide
aauuauguuaaaggccuaa

SEQ ID NO: 408473 - RNA, 19 nt, Artificial Sequence
  Description of Artificial Sequence: Synthetic oligonucleotide
ccuaaagacgccuuaagug

SEQ ID NO: 408474 - RNA, 19 nt, Artificial Sequence
  Description of Artificial Sequence: Synthetic oligonucleotide
uggcgggagauucaagucc

SEQ ID NO: 408475 - RNA, 19 nt, Artificial Sequence
  Description of Artificial Sequence: Synthetic oligonucleotide
aucuacguauaauuaacaa

SEQ ID NO: 408476 - RNA, 19 nt, Artificial Sequence
  Description of Artificial Sequence: Synthetic oligonucleotide
gaacguuuuauauuuggcu

SEQ ID NO: 408477 - RNA, 19 nt, Artificial Sequence
  Description of Artificial Sequence: Synthetic oligonucleotide
auuaucaccauucccuaua

SEQ ID NO: 408478 - RNA, 19 nt, Artificial Sequence
  Description of Artificial Sequence: Synthetic oligonucleotide
aauuacuauuugagguggg

SEQ ID NO: 408479 - RNA, 19 nt, Artificial Sequence
  Description of Artificial Sequence: Synthetic oligonucleotide
cacuguuagauaucuguug

SEQ ID NO: 408480 - RNA, 19 nt, Artificial Sequence
  Description of Artificial Sequence: Synthetic oligonucleotide
gauacaugcagucaggcuu

SEQ ID NO: 408481 - RNA, 19 nt, Artificial Sequence
  Description of Artificial Sequence: Synthetic oligonucleotide
auugaaagguaacccagaa

SEQ ID NO: 408482 - RNA, 19 nt, Artificial Sequence
  Description of Artificial Sequence: Synthetic oligonucleotide
uaauaccuuuuaaccaucu

SEQ ID NO: 408483 - RNA, 19 nt, Artificial Sequence
  Description of Artificial Sequence: Synthetic oligonucleotide
uguauguaacaggaaguca

SEQ ID NO: 408484 - RNA, 19 nt, Artificial Sequence
  Description of Artificial Sequence: Synthetic oligonucleotide
uaaagacgccuuaaguguc

SEQ ID NO: 408485 - RNA, 19 nt, Artificial Sequence
  Description of Artificial Sequence: Synthetic oligonucleotide
uuguauguaacaggaaguc

SEQ ID NO: 408486 - RNA, 19 nt, Artificial Sequence
  Description of Artificial Sequence: Synthetic oligonucleotide
uuaucaccauucccuauac

SEQ ID NO: 408487 - RNA, 19 nt, Artificial Sequence
  Description of Artificial Sequence: Synthetic oligonucleotide
uugguguuuacccgccugc

SEQ ID NO: 408488 - RNA, 19 nt, Artificial Sequence
  Description of Artificial Sequence: Synthetic oligonucleotide
accuaaagacgccuuaagu

SEQ ID NO: 408489 - RNA, 19 nt, Artificial Sequence
  Description of Artificial Sequence: Synthetic oligonucleotide
cuguuagauaucuguuggg

SEQ ID NO: 408490 - RNA, 19 nt, Artificial Sequence
  Description of Artificial Sequence: Synthetic oligonucleotide
agauuauauugcauuuagg

SEQ ID NO: 408491 - RNA, 19 nt, Artificial Sequence
  Description of Artificial Sequence: Synthetic oligonucleotide
acgugaagaggcucugugg

SEQ ID NO: 408492 - RNA, 19 nt, Artificial Sequence
  Description of Artificial Sequence: Synthetic oligonucleotide
ucgaaaauugucugagaau

SEQ ID NO: 408493 - RNA, 19 nt, Artificial Sequence
  Description of Artificial Sequence: Synthetic oligonucleotide
aaccucuguggcaagacug

SEQ ID NO: 408494 - RNA, 19 nt, Artificial Sequence
  Description of Artificial Sequence: Synthetic oligonucleotide
cacuuuacuccacuauacc

SEQ ID NO: 408495 - RNA, 19 nt, Artificial Sequence
  Description of Artificial Sequence: Synthetic oligonucleotide
uauacaguauugugauggu

SEQ ID NO: 408496 - RNA, 19 nt, Artificial Sequence
  Description of Artificial Sequence: Synthetic oligonucleotide
uugaaagguaacccagaaa

SEQ ID NO: 408497 - RNA, 19 nt, Artificial Sequence
  Description of Artificial Sequence: Synthetic oligonucleotide
accuuuuaaccaucuacgu

SEQ ID NO: 408498 - RNA, 19 nt, Artificial Sequence
  Description of Artificial Sequence: Synthetic oligonucleotide
cuaaagacgccuuaagugu

SEQ ID NO: 408499 - RNA, 19 nt, Artificial Sequence
  Description of Artificial Sequence: Synthetic oligonucleotide
uuuacccgccugcauuucc

SEQ ID NO: 408500 - RNA, 19 nt, Artificial Sequence
  Description of Artificial Sequence: Synthetic oligonucleotide
guacacgcuaguuguaggc

SEQ ID NO: 408501 - RNA, 19 nt, Artificial Sequence
  Description of Artificial Sequence: Synthetic oligonucleotide
ugccaaugcuauauaacau

SEQ ID NO: 408502 - RNA, 19 nt, Artificial Sequence
  Description of Artificial Sequence: Synthetic oligonucleotide
guuggggugucgaaaauug

SEQ ID NO: 408503 - RNA, 19 nt, Artificial Sequence
  Description of Artificial Sequence: Synthetic oligonucleotide
uguaccuaaagacgccuua

SEQ ID NO: 408504 - RNA, 19 nt, Artificial Sequence
  Description of Artificial Sequence: Synthetic oligonucleotide
aaacuagagauuggcauuu

SEQ ID NO: 408505 - RNA, 19 nt, Artificial Sequence
  Description of Artificial Sequence: Synthetic oligonucleotide
aggcguaucacuguuagau

SEQ ID NO: 408506 - RNA, 19 nt, Artificial Sequence
  Description of Artificial Sequence: Synthetic oligonucleotide
cauggucgaaaccuucacc

SEQ ID NO: 408507 - RNA, 19 nt, Artificial Sequence
  Description of Artificial Sequence: Synthetic oligonucleotide
gugucgaaaauugucugag

SEQ ID NO: 408508 - RNA, 19 nt, Artificial Sequence
  Description of Artificial Sequence: Synthetic oligonucleotide
ucacuguuagauaucuguu

SEQ ID NO: 408509 - RNA, 19 nt, Artificial Sequence
  Description of Artificial Sequence: Synthetic oligonucleotide
ucucauuauguugcuauaa

SEQ ID NO: 408510 - RNA, 19 nt, Artificial Sequence
  Description of Artificial Sequence: Synthetic oligonucleotide
auaauaccuuuuaaccauc

SEQ ID NO: 408511 - RNA, 19 nt, Artificial Sequence
  Description of Artificial Sequence: Synthetic oligonucleotide
ucuuaucaacugaacccgu

SEQ ID NO: 408512 - RNA, 19 nt, Artificial Sequence
  Description of Artificial Sequence: Synthetic oligonucleotide
auguuuacccauguucaag

SEQ ID NO: 408513 - RNA, 19 nt, Artificial Sequence
  Description of Artificial Sequence: Synthetic oligonucleotide
agacugaaaagguacuauu

SEQ ID NO: 408514 - RNA, 19 nt, Artificial Sequence
  Description of Artificial Sequence: Synthetic oligonucleotide
uguaggccaaucacugggu

SEQ ID NO: 408515 - RNA, 19 nt, Artificial Sequence
  Description of Artificial Sequence: Synthetic oligonucleotide
acgccuuaaguguccugcc

SEQ ID NO: 408516 - RNA, 19 nt, Artificial Sequence
  Description of Artificial Sequence: Synthetic oligonucleotide
aaggccuaauggaagaaau

SEQ ID NO: 408517 - RNA, 19 nt, Artificial Sequence
  Description of Artificial Sequence: Synthetic oligonucleotide
acguauaauuaacaaccau

SEQ ID NO: 408518 - RNA, 19 nt, Artificial Sequence
  Description of Artificial Sequence: Synthetic oligonucleotide
uuuuaaccaucuacguaua

SEQ ID NO: 408519 - RNA, 19 nt, Artificial Sequence
  Description of Artificial Sequence: Synthetic oligonucleotide
agauaauuggucaauucua

SEQ ID NO: 408520 - RNA, 19 nt, Artificial Sequence
  Description of Artificial Sequence: Synthetic oligonucleotide
cuauugcguggaaaaggcc

SEQ ID NO: 408521 - RNA, 19 nt, Artificial Sequence
  Description of Artificial Sequence: Synthetic oligonucleotide
acuugguauaggguugggg

SEQ ID NO: 408522 - RNA, 19 nt, Artificial Sequence
  Description of Artificial Sequence: Synthetic oligonucleotide
cuauacugagagaaucuga

SEQ ID NO: 408523 - RNA, 19 nt, Artificial Sequence
  Description of Artificial Sequence: Synthetic oligonucleotide
auucgcuaauaaauuaugu

SEQ ID NO: 408524 - RNA, 19 nt, Artificial Sequence
  Description of Artificial Sequence: Synthetic oligonucleotide
gaauuaucaccauucccua

SEQ ID NO: 408525 - RNA, 19 nt, Artificial Sequence
  Description of Artificial Sequence: Synthetic oligonucleotide
aggccaaucacuggguguc

SEQ ID NO: 408526 - RNA, 19 nt, Artificial Sequence
  Description of Artificial Sequence: Synthetic oligonucleotide
aucuucugaccggauauag

SEQ ID NO: 408527 - RNA, 19 nt, Artificial Sequence
  Description of Artificial Sequence: Synthetic oligonucleotide
acgaauuaauaaacugcuc

SEQ ID NO: 408528 - RNA, 19 nt, Artificial Sequence
  Description of Artificial Sequence: Synthetic oligonucleotide
augugcuauuauugaugac

SEQ ID NO: 408529 - RNA, 19 nt, Artificial Sequence
  Description of Artificial Sequence: Synthetic oligonucleotide
acccguagauagcugaaga

SEQ ID NO: 408530 - RNA, 19 nt, Artificial Sequence
  Description of Artificial Sequence: Synthetic oligonucleotide
uuacuauggcuacuacuua

SEQ ID NO: 408531 - RNA, 19 nt, Artificial Sequence
  Description of Artificial Sequence: Synthetic oligonucleotide
ucccuauacugagagaauc

SEQ ID NO: 408532 - RNA, 19 nt, Artificial Sequence
  Description of Artificial Sequence: Synthetic oligonucleotide
ccaucuacguauaauuaac

SEQ ID NO: 408533 - RNA, 19 nt, Artificial Sequence
  Description of Artificial Sequence: Synthetic oligonucleotide
ggcaagacugaaaagguac

SEQ ID NO: 408534 - RNA, 19 nt, Artificial Sequence
  Description of Artificial Sequence: Synthetic oligonucleotide
caucuacguauaauuaaca

SEQ ID NO: 408535 - RNA, 19 nt, Artificial Sequence
  Description of Artificial Sequence: Synthetic oligonucleotide
aacccguagauagcugaag

SEQ ID NO: 408536 - RNA, 19 nt, Artificial Sequence
  Description of Artificial Sequence: Synthetic oligonucleotide
gcuauuauugaugacaacu

SEQ ID NO: 408537 - RNA, 19 nt, Artificial Sequence
  Description of Artificial Sequence: Synthetic oligonucleotide
uauaggguuggggugucga

SEQ ID NO: 408538 - RNA, 19 nt, Artificial Sequence
  Description of Artificial Sequence: Synthetic oligonucleotide
agauagauaauuggucaau

SEQ ID NO: 408539 - RNA, 19 nt, Artificial Sequence
  Description of Artificial Sequence: Synthetic oligonucleotide
uguuuacccgccugcauuu

SEQ ID NO: 408540 - RNA, 19 nt, Artificial Sequence
  Description of Artificial Sequence: Synthetic oligonucleotide
auauaaaucuaggcaacua

SEQ ID NO: 408541 - RNA, 19 nt, Artificial Sequence
  Description of Artificial Sequence: Synthetic oligonucleotide
acuagagauuggcauuuau

SEQ ID NO: 408542 - RNA, 19 nt, Artificial Sequence
  Description of Artificial Sequence: Synthetic oligonucleotide
gguacacgcuaguuguagg

SEQ ID NO: 408543 - RNA, 19 nt, Artificial Sequence
  Description of Artificial Sequence: Synthetic oligonucleotide
gacugaaaagguacuauua

SEQ ID NO: 408544 - RNA, 19 nt, Artificial Sequence
  Description of Artificial Sequence: Synthetic oligonucleotide
gcuauugcguggaaaaggc

SEQ ID NO: 408545 - RNA, 19 nt, Artificial Sequence
  Description of Artificial Sequence: Synthetic oligonucleotide
uacacgcuaguuguaggca

SEQ ID NO: 408546 - RNA, 19 nt, Artificial Sequence
  Description of Artificial Sequence: Synthetic oligonucleotide
gauaauuggucaauucuau

SEQ ID NO: 408547 - RNA, 19 nt, Artificial Sequence
  Description of Artificial Sequence: Synthetic oligonucleotide
agguacacgcuaguuguag

SEQ ID NO: 408548 - RNA, 19 nt, Artificial Sequence
  Description of Artificial Sequence: Synthetic oligonucleotide
uagauaucuguugggaauu

SEQ ID NO: 408549 - RNA, 19 nt, Artificial Sequence
  Description of Artificial Sequence: Synthetic oligonucleotide
gagacuuguaggcugcugu

SEQ ID NO: 408550 - RNA, 19 nt, Artificial Sequence
  Description of Artificial Sequence: Synthetic oligonucleotide
auaaaccagguggugguga

SEQ ID NO: 408551 - RNA, 19 nt, Artificial Sequence
  Description of Artificial Sequence: Synthetic oligonucleotide
uguucguacucuugguguu

SEQ ID NO: 408552 - RNA, 19 nt, Artificial Sequence
  Description of Artificial Sequence: Synthetic oligonucleotide
uuaagagaguuggcauuug

SEQ ID NO: 408553 - RNA, 19 nt, Artificial Sequence
  Description of Artificial Sequence: Synthetic oligonucleotide
cucauuauguugcuauaaa

SEQ ID NO: 408554 - RNA, 19 nt, Artificial Sequence
  Description of Artificial Sequence: Synthetic oligonucleotide
acaguauugugaugguguu

SEQ ID NO: 408555 - RNA, 19 nt, Artificial Sequence
  Description of Artificial Sequence: Synthetic oligonucleotide
gauauaaaucuaggcaacu

SEQ ID NO: 408556 - RNA, 19 nt, Artificial Sequence
  Description of Artificial Sequence: Synthetic oligonucleotide
uccaaggauagcgggcugc

SEQ ID NO: 408557 - RNA, 19 nt, Artificial Sequence
  Description of Artificial Sequence: Synthetic oligonucleotide
  modified_base (17)..(17): a, c, u, g, unknown or other
uuugaaccacacguacncu

SEQ ID NO: 408558 - RNA, 19 nt, Artificial Sequence
  Description of Artificial Sequence: Synthetic oligonucleotide
agagauuauauugcauuua

SEQ ID NO: 408559 - RNA, 19 nt, Artificial Sequence
  Description of Artificial Sequence: Synthetic oligonucleotide
uaucaccauucccuauacu

SEQ ID NO: 408560 - RNA, 19 nt, Artificial Sequence
  Description of Artificial Sequence: Synthetic oligonucleotide
uucucauuauguugcuaua

SEQ ID NO: 408561 - RNA, 19 nt, Artificial Sequence
  Description of Artificial Sequence: Synthetic oligonucleotide
acuauggcuacuacuuaca

SEQ ID NO: 408562 - RNA, 19 nt, Artificial Sequence
  Description of Artificial Sequence: Synthetic oligonucleotide
auguauucgcuaauaaauu

SEQ ID NO: 408563 - RNA, 19 nt, Artificial Sequence
  Description of Artificial Sequence: Synthetic oligonucleotide
uugaggcauuuccugguau

SEQ ID NO: 408564 - RNA, 19 nt, Artificial Sequence
  Description of Artificial Sequence: Synthetic oligonucleotide
cuauuauugaugacaacuu

SEQ ID NO: 408565 - RNA, 19 nt, Artificial Sequence
  Description of Artificial Sequence: Synthetic oligonucleotide
ucggcuaggcguugugaca

SEQ ID NO: 408566 - RNA, 19 nt, Artificial Sequence
  Description of Artificial Sequence: Synthetic oligonucleotide
gucggcuaggcguugugac

SEQ ID NO: 408567 - RNA, 19 nt, Artificial Sequence
  Description of Artificial Sequence: Synthetic oligonucleotide
ugggauuguuucugacgug

SEQ ID NO: 408568 - RNA, 19 nt, Artificial Sequence
  Description of Artificial Sequence: Synthetic oligonucleotide
aggcagugcauuagaaaag

SEQ ID NO: 408569 - RNA, 19 nt, Artificial Sequence
  Description of Artificial Sequence: Synthetic oligonucleotide
guaggugcagcagaaugca

SEQ ID NO: 408570 - RNA, 19 nt, Artificial Sequence
  Description of Artificial Sequence: Synthetic oligonucleotide
ugcauaugaugugcuauua

SEQ ID NO: 408571 - RNA, 19 nt, Artificial Sequence
  Description of Artificial Sequence: Synthetic oligonucleotide
ugaugcuauugcguggaaa

SEQ ID NO: 408572 - RNA, 19 nt, Artificial Sequence
  Description of Artificial Sequence: Synthetic oligonucleotide
cuauggggaucccucccag

SEQ ID NO: 408573 - RNA, 19 nt, Artificial Sequence
  Description of Artificial Sequence: Synthetic oligonucleotide
acuauaccucaggaugaag

SEQ ID NO: 408574 - RNA, 19 nt, Artificial Sequence
  Description of Artificial Sequence: Synthetic oligonucleotide
ugaaggcguaucacuguua

SEQ ID NO: 408575 - RNA, 19 nt, Artificial Sequence
  Description of Artificial Sequence: Synthetic oligonucleotide
ggcguugugacagaccuac

SEQ ID NO: 408576 - RNA, 19 nt, Artificial Sequence
  Description of Artificial Sequence: Synthetic oligonucleotide
cacgcuaguuguaggcaug

SEQ ID NO: 408577 - RNA, 19 nt, Artificial Sequence
  Description of Artificial Sequence: Synthetic oligonucleotide
uauggggaucccucccaga

SEQ ID NO: 408578 - RNA, 19 nt, Artificial Sequence
  Description of Artificial Sequence: Synthetic oligonucleotide
uuguaccuaaagacgccuu

SEQ ID NO: 408579 - RNA, 19 nt, Artificial Sequence
  Description of Artificial Sequence: Synthetic oligonucleotide
uggucgaaaccuucaccuc

SEQ ID NO: 408580 - RNA, 19 nt, Artificial Sequence
  Description of Artificial Sequence: Synthetic oligonucleotide
caaguccaagaaauuacua

SEQ ID NO: 408581 - RNA, 19 nt, Artificial Sequence
  Description of Artificial Sequence: Synthetic oligonucleotide
gaggaacguuuuauauuug

SEQ ID NO: 408582 - RNA, 19 nt, Artificial Sequence
  Description of Artificial Sequence: Synthetic oligonucleotide
ggugggguuugcugugugg

SEQ ID NO: 408583 - RNA, 19 nt, Artificial Sequence
  Description of Artificial Sequence: Synthetic oligonucleotide
cuuaucaacugaacccgua

SEQ ID NO: 408584 - RNA, 19 nt, Artificial Sequence
  Description of Artificial Sequence: Synthetic oligonucleotide
guauucgcuaauaaauuau

SEQ ID NO: 408585 - RNA, 19 nt, Artificial Sequence
  Description of Artificial Sequence: Synthetic oligonucleotide
  modified_base (10)..(10): a, c, u, g, unknown or other
cacacguacncuagccaaa

SEQ ID NO: 408586 - RNA, 19 nt, Artificial Sequence
  Description of Artificial Sequence: Synthetic oligonucleotide
gcauuaaaugacaccacca

SEQ ID NO: 408587 - RNA, 19 nt, Artificial Sequence
  Description of Artificial Sequence: Synthetic oligonucleotide
uaggguuggggugucgaaa

SEQ ID NO: 408588 - RNA, 19 nt, Artificial Sequence
  Description of Artificial Sequence: Synthetic oligonucleotide
cuguucguacucuuggugu

SEQ ID NO: 408589 - RNA, 19 nt, Artificial Sequence
  Description of Artificial Sequence: Synthetic oligonucleotide
uggcuacuacuuacauaca

SEQ ID NO: 408590 - RNA, 19 nt, Artificial Sequence
  Description of Artificial Sequence: Synthetic oligonucleotide
caauucuaugauacucaaa

SEQ ID NO: 408591 - RNA, 19 nt, Artificial Sequence
  Description of Artificial Sequence: Synthetic oligonucleotide
cugaacccguagauagcug

SEQ ID NO: 408592 - RNA, 19 nt, Artificial Sequence
  Description of Artificial Sequence: Synthetic oligonucleotide
auaggguuggggugucgaa

SEQ ID NO: 408593 - RNA, 19 nt, Artificial Sequence
  Description of Artificial Sequence: Synthetic oligonucleotide
auugcguggaaaaggccau

SEQ ID NO: 408594 - RNA, 19 nt, Artificial Sequence
  Description of Artificial Sequence: Synthetic oligonucleotide
ggaaaaccgaacgaauuaa

SEQ ID NO: 408595 - RNA, 19 nt, Artificial Sequence
  Description of Artificial Sequence: Synthetic oligonucleotide
cugguauacuaggcagugc

SEQ ID NO: 408596 - RNA, 19 nt, Artificial Sequence
  Description of Artificial Sequence: Synthetic oligonucleotide
ccuauacugagagaaucug

SEQ ID NO: 408597 - RNA, 19 nt, Artificial Sequence
  Description of Artificial Sequence: Synthetic oligonucleotide
gcauuuguaggugcagcag

SEQ ID NO: 408598 - RNA, 19 nt, Artificial Sequence
  Description of Artificial Sequence: Synthetic oligonucleotide
ucgaaaccuucaccucuuc

SEQ ID NO: 408599 - RNA, 19 nt, Artificial Sequence
  Description of Artificial Sequence: Synthetic oligonucleotide
  modified_base (9)..(9): a, c, u, g, unknown or other
acacguacncuagccaaau

SEQ ID NO: 408600 - RNA, 19 nt, Artificial Sequence
  Description of Artificial Sequence: Synthetic oligonucleotide
aagguugaucuuggacgga

SEQ ID NO: 408601 - RNA, 19 nt, Artificial Sequence
  Description of Artificial Sequence: Synthetic oligonucleotide
guugcccaugcaagcaccc

SEQ ID NO: 408602 - RNA, 19 nt, Artificial Sequence
  Description of Artificial Sequence: Synthetic oligonucleotide
guauugcucugagagcauc

SEQ ID NO: 408603 - RNA, 19 nt, Artificial Sequence
  Description of Artificial Sequence: Synthetic oligonucleotide
aggcaacuaugagguacac

SEQ ID NO: 408604 - RNA, 19 nt, Artificial Sequence
  Description of Artificial Sequence: Synthetic oligonucleotide
  modified_base (8)..(8): a, c, u, g, unknown or other
cacguacncuagccaaaug

SEQ ID NO: 408605 - RNA, 19 nt, Artificial Sequence
  Description of Artificial Sequence: Synthetic oligonucleotide
guaccuaaagacgccuuaa

SEQ ID NO: 408606 - RNA, 19 nt, Artificial Sequence
  Description of Artificial Sequence: Synthetic oligonucleotide
aggcauuuccugguauacu

SEQ ID NO: 408607 - RNA, 19 nt, Artificial Sequence
  Description of Artificial Sequence: Synthetic oligonucleotide
ucguacucuugguguuuac

SEQ ID NO: 408608 - RNA, 19 nt, Artificial Sequence
  Description of Artificial Sequence: Synthetic oligonucleotide
acaugcagucaggcuuugg

SEQ ID NO: 408609 - RNA, 19 nt, Artificial Sequence
  Description of Artificial Sequence: Synthetic oligonucleotide
acaguaguguggagacuug

SEQ ID NO: 408610 - RNA, 19 nt, Artificial Sequence
  Description of Artificial Sequence: Synthetic oligonucleotide
caguggcauggucgaaacc

SEQ ID NO: 408611 - RNA, 19 nt, Artificial Sequence
  Description of Artificial Sequence: Synthetic oligonucleotide
ggucgaaaccuucaccucu

SEQ ID NO: 408612 - RNA, 19 nt, Artificial Sequence
  Description of Artificial Sequence: Synthetic oligonucleotide
aacuagagauuggcauuua

SEQ ID NO: 408613 - RNA, 19 nt, Artificial Sequence
  Description of Artificial Sequence: Synthetic oligonucleotide
acgcuaguuguaggcauga

SEQ ID NO: 408614 - RNA, 19 nt, Artificial Sequence
  Description of Artificial Sequence: Synthetic oligonucleotide
guauaggguuggggugucg

SEQ ID NO: 408615 - RNA, 19 nt, Artificial Sequence
  Description of Artificial Sequence: Synthetic oligonucleotide
ccacuauaccucaggauga

SEQ ID NO: 408616 - RNA, 19 nt, Artificial Sequence
  Description of Artificial Sequence: Synthetic oligonucleotide
gaugacaggauuggacuuu

SEQ ID NO: 408617 - RNA, 19 nt, Artificial Sequence
  Description of Artificial Sequence: Synthetic oligonucleotide
gaucccucccagaccugug

SEQ ID NO: 408618 - RNA, 19 nt, Artificial Sequence
  Description of Artificial Sequence: Synthetic oligonucleotide
guguuuacccgccugcauu

SEQ ID NO: 408619 - RNA, 19 nt, Artificial Sequence
  Description of Artificial Sequence: Synthetic oligonucleotide
gcauuuaugcugaacugua

SEQ ID NO: 408620 - RNA, 19 nt, Artificial Sequence
  Description of Artificial Sequence: Synthetic oligonucleotide
cugccccuucaaaaggaga

SEQ ID NO: 408621 - RNA, 19 nt, Artificial Sequence
  Description of Artificial Sequence: Synthetic oligonucleotide
  modified_base (2)..(2): a, c, u, g, unknown or other
cncuagccaaauguuucga

SEQ ID NO: 408622 - RNA, 19 nt, Artificial Sequence
  Description of Artificial Sequence: Synthetic oligonucleotide
gcuauggggaucccuccca

SEQ ID NO: 408623 - RNA, 19 nt, Artificial Sequence
  Description of Artificial Sequence: Synthetic oligonucleotide
ccuuuuaaccaucuacgua

SEQ ID NO: 408624 - RNA, 19 nt, Artificial Sequence
  Description of Artificial Sequence: Synthetic oligonucleotide
  modified_base (5)..(5): a, c, u, g, unknown or other
guacncuagccaaauguuu

SEQ ID NO: 408625 - RNA, 19 nt, Artificial Sequence
  Description of Artificial Sequence: Synthetic oligonucleotide
aggccuaauggaagaaaua

SEQ ID NO: 408626 - RNA, 19 nt, Artificial Sequence
  Description of Artificial Sequence: Synthetic oligonucleotide
augaugcuauugcguggaa

SEQ ID NO: 408627 - RNA, 19 nt, Artificial Sequence
  Description of Artificial Sequence: Synthetic oligonucleotide
ggccuggaaaaccgaacga

SEQ ID NO: 408628 - RNA, 19 nt, Artificial Sequence
  Description of Artificial Sequence: Synthetic oligonucleotide
ggcgggagauucaagucca

SEQ ID NO: 408629 - RNA, 19 nt, Artificial Sequence
  Description of Artificial Sequence: Synthetic oligonucleotide
gucucccaauucaugcaga

SEQ ID NO: 408630 - RNA, 19 nt, Artificial Sequence
  Description of Artificial Sequence: Synthetic oligonucleotide
uugcguggaaaaggccauc

SEQ ID NO: 408631 - RNA, 19 nt, Artificial Sequence
  Description of Artificial Sequence: Synthetic oligonucleotide
ggcauggucgaaaccuuca

SEQ ID NO: 408632 - RNA, 19 nt, Artificial Sequence
  Description of Artificial Sequence: Synthetic oligonucleotide
ggugaaggcguaucacugu

SEQ ID NO: 408633 - RNA, 19 nt, Artificial Sequence
  Description of Artificial Sequence: Synthetic oligonucleotide
  modified_base (11)..(11): a, c, u, g, unknown or other
ccacacguacncuagccaa

SEQ ID NO: 408634 - RNA, 19 nt, Artificial Sequence
  Description of Artificial Sequence: Synthetic oligonucleotide
ggucugcuaaggcuuucga

SEQ ID NO: 408635 - RNA, 19 nt, Artificial Sequence
  Description of Artificial Sequence: Synthetic oligonucleotide
gccuggaaaaccgaacgaa

SEQ ID NO: 408636 - RNA, 19 nt, Artificial Sequence
  Description of Artificial Sequence: Synthetic oligonucleotide
uuccccugcuauggggauc

SEQ ID NO: 408637 - RNA, 19 nt, Artificial Sequence
  Description of Artificial Sequence: Synthetic oligonucleotide
cuaugagguacacgcuagu

SEQ ID NO: 408638 - RNA, 19 nt, Artificial Sequence
  Description of Artificial Sequence: Synthetic oligonucleotide
ggcguaucacuguuagaua

SEQ ID NO: 408639 - RNA, 19 nt, Artificial Sequence
  Description of Artificial Sequence: Synthetic oligonucleotide
ccguagauagcugaagaaa

SEQ ID NO: 408640 - RNA, 19 nt, Artificial Sequence
  Description of Artificial Sequence: Synthetic oligonucleotide
ccgaacgaauuaauaaacu

SEQ ID NO: 408641 - RNA, 19 nt, Artificial Sequence
  Description of Artificial Sequence: Synthetic oligonucleotide
guuuacccgccugcauuuc

SEQ ID NO: 408642 - RNA, 19 nt, Artificial Sequence
  Description of Artificial Sequence: Synthetic oligonucleotide
gccuaauggaagaaauacu

SEQ ID NO: 408643 - RNA, 19 nt, Artificial Sequence
  Description of Artificial Sequence: Synthetic oligonucleotide
gcuaggcguugugacagac

SEQ ID NO: 408644 - RNA, 19 nt, Artificial Sequence
  Description of Artificial Sequence: Synthetic oligonucleotide
gagguacacgcuaguugua

SEQ ID NO: 408645 - RNA, 19 nt, Artificial Sequence
  Description of Artificial Sequence: Synthetic oligonucleotide
cccuauacugagagaaucu

SEQ ID NO: 408646 - RNA, 19 nt, Artificial Sequence
  Description of Artificial Sequence: Synthetic oligonucleotide
gguauaggguugggguguc

SEQ ID NO: 408647 - RNA, 19 nt, Artificial Sequence
  Description of Artificial Sequence: Synthetic oligonucleotide
cucccaauucaugcagaua

SEQ ID NO: 408648 - RNA, 19 nt, Artificial Sequence
  Description of Artificial Sequence: Synthetic oligonucleotide
caagcaccccagagucuaa

SEQ ID NO: 408649 - RNA, 19 nt, Artificial Sequence
  Description of Artificial Sequence: Synthetic oligonucleotide
gggucggcuaggcguugug

SEQ ID NO: 408650 - RNA, 19 nt, Artificial Sequence
  Description of Artificial Sequence: Synthetic oligonucleotide
ggucggcuaggcguuguga

SEQ ID NO: 408651 - RNA, 19 nt, Artificial Sequence
  Description of Artificial Sequence: Synthetic oligonucleotide
gucgaaaccuucaccucuu

SEQ ID NO: 408652 - RNA, 19 nt, Artificial Sequence
  Description of Artificial Sequence: Synthetic oligonucleotide
ccaauucaugcagauacau

SEQ ID NO: 408653 - RNA, 19 nt, Artificial Sequence
  Description of Artificial Sequence: Synthetic oligonucleotide
gccugcauaugaugugcua

SEQ ID NO: 408654 - RNA, 19 nt, Artificial Sequence
  Description of Artificial Sequence: Synthetic oligonucleotide
  modified_base (6)..(6): a, c, u, g, unknown or other
cguacncuagccaaauguu

SEQ ID NO: 408655 - RNA, 19 nt, Artificial Sequence
  Description of Artificial Sequence: Synthetic oligonucleotide
caguauugugaugguguuu

SEQ ID NO: 408656 - RNA, 19 nt, Artificial Sequence
  Description of Artificial Sequence: Synthetic oligonucleotide
aggcguugugacagaccua

SEQ ID NO: 408657 - RNA, 19 nt, Artificial Sequence
  Description of Artificial Sequence: Synthetic oligonucleotide
caaggauagcgggcugccu

SEQ ID NO: 408658 - RNA, 19 nt, Artificial Sequence
  Description of Artificial Sequence: Synthetic oligonucleotide
ggguuggggugucgaaaau

SEQ ID NO: 408659 - RNA, 19 nt, Artificial Sequence
  Description of Artificial Sequence: Synthetic oligonucleotide
cguuuuauauuuggcucuu

SEQ ID NO: 408660 - RNA, 19 nt, Artificial Sequence
  Description of Artificial Sequence: Synthetic oligonucleotide
aaaaggaccgugcucacgg

SEQ ID NO: 408661 - RNA, 19 nt, Artificial Sequence
  Description of Artificial Sequence: Synthetic oligonucleotide
ugaauuuacgguuauguga

SEQ ID NO: 408662 - RNA, 19 nt, Artificial Sequence
  Description of Artificial Sequence: Synthetic oligonucleotide
gaugcuguuuuccagaagc

SEQ ID NO: 408663 - RNA, 19 nt, Artificial Sequence
  Description of Artificial Sequence: Synthetic oligonucleotide
uuacuucccaccuugaacc

SEQ ID NO: 408664 - RNA, 19 nt, Artificial Sequence
  Description of Artificial Sequence: Synthetic oligonucleotide
ucuccuuaggauaucacag

SEQ ID NO: 408665 - RNA, 19 nt, Artificial Sequence
  Description of Artificial Sequence: Synthetic oligonucleotide
auuacuucccaccuugaac

SEQ ID NO: 408666 - RNA, 19 nt, Artificial Sequence
  Description of Artificial Sequence: Synthetic oligonucleotide
uaauguuggccucacuucg

SEQ ID NO: 408667 - RNA, 19 nt, Artificial Sequence
  Description of Artificial Sequence: Synthetic oligonucleotide
aacaccuggugucuuauuc

SEQ ID NO: 408668 - RNA, 19 nt, Artificial Sequence
  Description of Artificial Sequence: Synthetic oligonucleotide
aacacugcgaaaaggaccg

SEQ ID NO: 408669 - RNA, 19 nt, Artificial Sequence
  Description of Artificial Sequence: Synthetic oligonucleotide
uugauauugacucguggag

SEQ ID NO: 408670 - RNA, 19 nt, Artificial Sequence
  Description of Artificial Sequence: Synthetic oligonucleotide
uguagugcccagcauaucc

SEQ ID NO: 408671 - RNA, 19 nt, Artificial Sequence
  Description of Artificial Sequence: Synthetic oligonucleotide
ugaagguuaaccaggguca

SEQ ID NO: 408672 - RNA, 19 nt, Artificial Sequence
  Description of Artificial Sequence: Synthetic oligonucleotide
guuaucuggaauccaaggg

SEQ ID NO: 408673 - RNA, 19 nt, Artificial Sequence
  Description of Artificial Sequence: Synthetic oligonucleotide
agaagcgucaugcagacca

SEQ ID NO: 408674 - RNA, 19 nt, Artificial Sequence
  Description of Artificial Sequence: Synthetic oligonucleotide
uguauaauucagcaagcac

SEQ ID NO: 408675 - RNA, 19 nt, Artificial Sequence
  Description of Artificial Sequence: Synthetic oligonucleotide
aaaguucaacaaccggugg

SEQ ID NO: 408676 - RNA, 19 nt, Artificial Sequence
  Description of Artificial Sequence: Synthetic oligonucleotide
ucagacgguagaaacagug

SEQ ID NO: 408677 - RNA, 19 nt, Artificial Sequence
  Description of Artificial Sequence: Synthetic oligonucleotide
gauauugacucguggagug

SEQ ID NO: 408678 - RNA, 19 nt, Artificial Sequence
  Description of Artificial Sequence: Synthetic oligonucleotide
gaauuuacgguuaugugac

SEQ ID NO: 408679 - RNA, 19 nt, Artificial Sequence
  Description of Artificial Sequence: Synthetic oligonucleotide
gauucaaaggccccgaauc

SEQ ID NO: 408680 - RNA, 19 nt, Artificial Sequence
  Description of Artificial Sequence: Synthetic oligonucleotide
cauugguguggguagaugg

SEQ ID NO: 408681 - RNA, 19 nt, Artificial Sequence
  Description of Artificial Sequence: Synthetic oligonucleotide
uacuccacgaugcuucugg

SEQ ID NO: 408682 - RNA, 19 nt, Artificial Sequence
  Description of Artificial Sequence: Synthetic oligonucleotide
guauaauucagcaagcaca

SEQ ID NO: 408683 - RNA, 19 nt, Artificial Sequence
  Description of Artificial Sequence: Synthetic oligonucleotide
uuuacgguuaugugacagg

SEQ ID NO: 408684 - RNA, 19 nt, Artificial Sequence
  Description of Artificial Sequence: Synthetic oligonucleotide
aguuugguggccccaacac

SEQ ID NO: 408685 - RNA, 19 nt, Artificial Sequence
  Description of Artificial Sequence: Synthetic oligonucleotide
aguucaacaaccgguggcc

SEQ ID NO: 408686 - RNA, 19 nt, Artificial Sequence
  Description of Artificial Sequence: Synthetic oligonucleotide
caagucauuacuucccacc

SEQ ID NO: 408687 - RNA, 19 nt, Artificial Sequence
  Description of Artificial Sequence: Synthetic oligonucleotide
aauuugucugcagaacguc

SEQ ID NO: 408688 - RNA, 19 nt, Artificial Sequence
  Description of Artificial Sequence: Synthetic oligonucleotide
accgauguauucucgguac

SEQ ID NO: 408689 - RNA, 19 nt, Artificial Sequence
  Description of Artificial Sequence: Synthetic oligonucleotide
guacagaacuuuuccaggg

SEQ ID NO: 408690 - RNA, 19 nt, Artificial Sequence
  Description of Artificial Sequence: Synthetic oligonucleotide
aagucauuacuucccaccu

SEQ ID NO: 408691 - RNA, 19 nt, Artificial Sequence
  Description of Artificial Sequence: Synthetic oligonucleotide
ccauguauaauucagcaag

SEQ ID NO: 408692 - RNA, 19 nt, Artificial Sequence
  Description of Artificial Sequence: Synthetic oligonucleotide
caacacugcgaaaaggacc

SEQ ID NO: 408693 - RNA, 19 nt, Artificial Sequence
  Description of Artificial Sequence: Synthetic oligonucleotide
cucacuucgcucuagggug

SEQ ID NO: 408694 - RNA, 19 nt, Artificial Sequence
  Description of Artificial Sequence: Synthetic oligonucleotide
agcaucaagauguugcagu

SEQ ID NO: 408695 - RNA, 19 nt, Artificial Sequence
  Description of Artificial Sequence: Synthetic oligonucleotide
uagaguuagugcaaaguuc

SEQ ID NO: 408696 - RNA, 19 nt, Artificial Sequence
  Description of Artificial Sequence: Synthetic oligonucleotide
agugcuagaucuuccaccu

SEQ ID NO: 408697 - RNA, 19 nt, Artificial Sequence
  Description of Artificial Sequence: Synthetic oligonucleotide
aauaacagaccuccagcau

SEQ ID NO: 408698 - RNA, 19 nt, Artificial Sequence
  Description of Artificial Sequence: Synthetic oligonucleotide
gaugcauucagcagugcag

SEQ ID NO: 408699 - RNA, 19 nt, Artificial Sequence
  Description of Artificial Sequence: Synthetic oligonucleotide
acaaccgguggccaucgcc

SEQ ID NO: 408700 - RNA, 19 nt, Artificial Sequence
  Description of Artificial Sequence: Synthetic oligonucleotide
aggauaggaagguugcgag

SEQ ID NO: 408701 - RNA, 19 nt, Artificial Sequence
  Description of Artificial Sequence: Synthetic oligonucleotide
ccaaccuaaacacaggccg

SEQ ID NO: 408702 - RNA, 19 nt, Artificial Sequence
  Description of Artificial Sequence: Synthetic oligonucleotide
aggacuuagggaucgagga

SEQ ID NO: 408703 - RNA, 19 nt, Artificial Sequence
  Description of Artificial Sequence: Synthetic oligonucleotide
cauauccagugccugauag

SEQ ID NO: 408704 - RNA, 19 nt, Artificial Sequence
  Description of Artificial Sequence: Synthetic oligonucleotide
uagugcaaaguucaacaac

SEQ ID NO: 408705 - RNA, 19 nt, Artificial Sequence
  Description of Artificial Sequence: Synthetic oligonucleotide
ucuggggauagagcgaugg

SEQ ID NO: 408706 - RNA, 19 nt, Artificial Sequence
  Description of Artificial Sequence: Synthetic oligonucleotide
uuccacuuucggauguugg

SEQ ID NO: 408707 - RNA, 19 nt, Artificial Sequence
  Description of Artificial Sequence: Synthetic oligonucleotide
aguguucagaagcgacucc

SEQ ID NO: 408708 - RNA, 19 nt, Artificial Sequence
  Description of Artificial Sequence: Synthetic oligonucleotide
ucuggauagagaagcccag

SEQ ID NO: 408709 - RNA, 19 nt, Artificial Sequence
  Description of Artificial Sequence: Synthetic oligonucleotide
aauguuggccucacuucgc

SEQ ID NO: 408710 - RNA, 19 nt, Artificial Sequence
  Description of Artificial Sequence: Synthetic oligonucleotide
agaguuagugcaaaguuca

SEQ ID NO: 408711 - RNA, 19 nt, Artificial Sequence
  Description of Artificial Sequence: Synthetic oligonucleotide
agucagacgguagaaacag

SEQ ID NO: 408712 - RNA, 19 nt, Artificial Sequence
  Description of Artificial Sequence: Synthetic oligonucleotide
aaaggauaggaagguugcg

SEQ ID NO: 408713 - RNA, 19 nt, Artificial Sequence
  Description of Artificial Sequence: Synthetic oligonucleotide
aaaggaccgugcucacggc

SEQ ID NO: 408714 - RNA, 19 nt, Artificial Sequence
  Description of Artificial Sequence: Synthetic oligonucleotide
ugucuuauucuguccagga

SEQ ID NO: 408715 - RNA, 19 nt, Artificial Sequence
  Description of Artificial Sequence: Synthetic oligonucleotide
aaggaccgugcucacggcg

SEQ ID NO: 408716 - RNA, 19 nt, Artificial Sequence
  Description of Artificial Sequence: Synthetic oligonucleotide
ucccgcauaccuccaaagg

SEQ ID NO: 408717 - RNA, 19 nt, Artificial Sequence
  Description of Artificial Sequence: Synthetic oligonucleotide
gacgguagaaacagugagg

SEQ ID NO: 408718 - RNA, 19 nt, Artificial Sequence
  Description of Artificial Sequence: Synthetic oligonucleotide
aacucuggauagagaagcc

SEQ ID NO: 408719 - RNA, 19 nt, Artificial Sequence
  Description of Artificial Sequence: Synthetic oligonucleotide
auuuacgguuaugugacag

SEQ ID NO: 408720 - RNA, 19 nt, Artificial Sequence
  Description of Artificial Sequence: Synthetic oligonucleotide
auauccagugccugauagg

SEQ ID NO: 408721 - RNA, 19 nt, Artificial Sequence
  Description of Artificial Sequence: Synthetic oligonucleotide
guagcaggcgcccuucugg

SEQ ID NO: 408722 - RNA, 19 nt, Artificial Sequence
  Description of Artificial Sequence: Synthetic oligonucleotide
aacgucacgucccggugag

SEQ ID NO: 408723 - RNA, 19 nt, Artificial Sequence
  Description of Artificial Sequence: Synthetic oligonucleotide
acugcgaaaaggaccgugc

SEQ ID NO: 408724 - RNA, 19 nt, Artificial Sequence
  Description of Artificial Sequence: Synthetic oligonucleotide
ucaucaucgcucaugcuua

SEQ ID NO: 408725 - RNA, 19 nt, Artificial Sequence
  Description of Artificial Sequence: Synthetic oligonucleotide
uugacucguggagugaggg

SEQ ID NO: 408726 - RNA, 19 nt, Artificial Sequence
  Description of Artificial Sequence: Synthetic oligonucleotide
gacuugaaggcuucucagc

SEQ ID NO: 408727 - RNA, 19 nt, Artificial Sequence
  Description of Artificial Sequence: Synthetic oligonucleotide
agcgacuccaccccaggac

SEQ ID NO: 408728 - RNA, 19 nt, Artificial Sequence
  Description of Artificial Sequence: Synthetic oligonucleotide
cagugcuagaucuuccacc

SEQ ID NO: 408729 - RNA, 19 nt, Artificial Sequence
  Description of Artificial Sequence: Synthetic oligonucleotide
caugcgaugcauucagcag

SEQ ID NO: 408730 - RNA, 19 nt, Artificial Sequence
  Description of Artificial Sequence: Synthetic oligonucleotide
uucuggagcugacuugaag

SEQ ID NO: 408731 - RNA, 19 nt, Artificial Sequence
  Description of Artificial Sequence: Synthetic oligonucleotide
ugauauugacucguggagu

SEQ ID NO: 408732 - RNA, 19 nt, Artificial Sequence
  Description of Artificial Sequence: Synthetic oligonucleotide
aacggacugggacccacag

SEQ ID NO: 408733 - RNA, 19 nt, Artificial Sequence
  Description of Artificial Sequence: Synthetic oligonucleotide
ucuugcacagcuagaaguu

SEQ ID NO: 408734 - RNA, 19 nt, Artificial Sequence
  Description of Artificial Sequence: Synthetic oligonucleotide
ugcuaggugagcucucuug

SEQ ID NO: 408735 - RNA, 19 nt, Artificial Sequence
  Description of Artificial Sequence: Synthetic oligonucleotide
caaccgguggccaucgccg

SEQ ID NO: 408736 - RNA, 19 nt, Artificial Sequence
  Description of Artificial Sequence: Synthetic oligonucleotide
uuacgguuaugugacaggu

SEQ ID NO: 408737 - RNA, 19 nt, Artificial Sequence
  Description of Artificial Sequence: Synthetic oligonucleotide
gaagguugcgaggacuuag

SEQ ID NO: 408738 - RNA, 19 nt, Artificial Sequence
  Description of Artificial Sequence: Synthetic oligonucleotide
agccuuuauaagcacacaa

SEQ ID NO: 408739 - RNA, 19 nt, Artificial Sequence
  Description of Artificial Sequence: Synthetic oligonucleotide
aggaaguugcucucgggug

SEQ ID NO: 408740 - RNA, 19 nt, Artificial Sequence
  Description of Artificial Sequence: Synthetic oligonucleotide
uauucuguccaggaaggcu

SEQ ID NO: 408741 - RNA, 19 nt, Artificial Sequence
  Description of Artificial Sequence: Synthetic oligonucleotide
ucaaaggccccgaaucuuc

SEQ ID NO: 408742 - RNA, 19 nt, Artificial Sequence
  Description of Artificial Sequence: Synthetic oligonucleotide
cugggaugaggcuuggcag

SEQ ID NO: 408743 - RNA, 19 nt, Artificial Sequence
  Description of Artificial Sequence: Synthetic oligonucleotide
uugguguggguagaugggg

SEQ ID NO: 408744 - RNA, 19 nt, Artificial Sequence
  Description of Artificial Sequence: Synthetic oligonucleotide
agcacgugucaccccaggc

SEQ ID NO: 408745 - RNA, 19 nt, Artificial Sequence
  Description of Artificial Sequence: Synthetic oligonucleotide
aaccuggcgaggaacggac

SEQ ID NO: 408746 - RNA, 19 nt, Artificial Sequence
  Description of Artificial Sequence: Synthetic oligonucleotide
uuagaguuuccuguagagu

SEQ ID NO: 408747 - RNA, 19 nt, Artificial Sequence
  Description of Artificial Sequence: Synthetic oligonucleotide
caugcagaccaccucucgg

SEQ ID NO: 408748 - RNA, 19 nt, Artificial Sequence
  Description of Artificial Sequence: Synthetic oligonucleotide
guugcgaggacuuagggau

SEQ ID NO: 408749 - RNA, 19 nt, Artificial Sequence
  Description of Artificial Sequence: Synthetic oligonucleotide
aaauccccuaaaauaacaa

SEQ ID NO: 408750 - RNA, 19 nt, Artificial Sequence
  Description of Artificial Sequence: Synthetic oligonucleotide
agccagucagauuaaucug

SEQ ID NO: 408751 - RNA, 19 nt, Artificial Sequence
  Description of Artificial Sequence: Synthetic oligonucleotide
uggccaaccaacacagaac

SEQ ID NO: 408752 - RNA, 19 nt, Artificial Sequence
  Description of Artificial Sequence: Synthetic oligonucleotide
caaccuaaacacaggccgc

SEQ ID NO: 408753 - RNA, 19 nt, Artificial Sequence
  Description of Artificial Sequence: Synthetic oligonucleotide
guggccaaccuaaacacag

SEQ ID NO: 408754 - RNA, 19 nt, Artificial Sequence
  Description of Artificial Sequence: Synthetic oligonucleotide
ggggaugucccucaguucc

SEQ ID NO: 408755 - RNA, 19 nt, Artificial Sequence
  Description of Artificial Sequence: Synthetic oligonucleotide
aauuuacgguuaugugaca

SEQ ID NO: 408756 - RNA, 19 nt, Artificial Sequence
  Description of Artificial Sequence: Synthetic oligonucleotide
ugcacagcuagaaguuuga

SEQ ID NO: 408757 - RNA, 19 nt, Artificial Sequence
  Description of Artificial Sequence: Synthetic oligonucleotide
caguguugauguucagucg

SEQ ID NO: 408758 - RNA, 19 nt, Artificial Sequence
  Description of Artificial Sequence: Synthetic oligonucleotide
aagguugcgaggacuuagg

SEQ ID NO: 408759 - RNA, 19 nt, Artificial Sequence
  Description of Artificial Sequence: Synthetic oligonucleotide
uguucagucgcuccugauu

SEQ ID NO: 408760 - RNA, 19 nt, Artificial Sequence
  Description of Artificial Sequence: Synthetic oligonucleotide
uuggccaaaauccccuaaa

SEQ ID NO: 408761 - RNA, 19 nt, Artificial Sequence
  Description of Artificial Sequence: Synthetic oligonucleotide
gcagaguuacccuugcugc

SEQ ID NO: 408762 - RNA, 19 nt, Artificial Sequence
  Description of Artificial Sequence: Synthetic oligonucleotide
uggccaaccuaaacacagg

SEQ ID NO: 408763 - RNA, 19 nt, Artificial Sequence
  Description of Artificial Sequence: Synthetic oligonucleotide
ugauucaaaggccccgaau

SEQ ID NO: 408764 - RNA, 19 nt, Artificial Sequence
  Description of Artificial Sequence: Synthetic oligonucleotide
aagcgucaugcagaccacc

SEQ ID NO: 408765 - RNA, 19 nt, Artificial Sequence
  Description of Artificial Sequence: Synthetic oligonucleotide
guggccaucgccgugauuc

SEQ ID NO: 408766 - RNA, 19 nt, Artificial Sequence
  Description of Artificial Sequence: Synthetic oligonucleotide
caguuaucuggaauccaag

SEQ ID NO: 408767 - RNA, 19 nt, Artificial Sequence
  Description of Artificial Sequence: Synthetic oligonucleotide
gaagcgacuccaccccagg

SEQ ID NO: 408768 - RNA, 19 nt, Artificial Sequence
  Description of Artificial Sequence: Synthetic oligonucleotide
agucgcuccugauucacca

SEQ ID NO: 408769 - RNA, 19 nt, Artificial Sequence
  Description of Artificial Sequence: Synthetic oligonucleotide
augaccauugcuaggugag

SEQ ID NO: 408770 - RNA, 19 nt, Artificial Sequence
  Description of Artificial Sequence: Synthetic oligonucleotide
gauagagcgauggcagccc

SEQ ID NO: 408771 - RNA, 19 nt, Artificial Sequence
  Description of Artificial Sequence: Synthetic oligonucleotide
ugacucguggagugagggg

SEQ ID NO: 408772 - RNA, 19 nt, Artificial Sequence
  Description of Artificial Sequence: Synthetic oligonucleotide
gaaaaggaccgugcucacg

SEQ ID NO: 408773 - RNA, 19 nt, Artificial Sequence
  Description of Artificial Sequence: Synthetic oligonucleotide
agaguuacccuugcugcuc

SEQ ID NO: 408774 - RNA, 19 nt, Artificial Sequence
  Description of Artificial Sequence: Synthetic oligonucleotide
cucuggauagagaagccca

SEQ ID NO: 408775 - RNA, 19 nt, Artificial Sequence
  Description of Artificial Sequence: Synthetic oligonucleotide
agguugcgaggacuuaggg

SEQ ID NO: 408776 - RNA, 19 nt, Artificial Sequence
  Description of Artificial Sequence: Synthetic oligonucleotide
uuaggauaucacagucacu

SEQ ID NO: 408777 - RNA, 19 nt, Artificial Sequence
  Description of Artificial Sequence: Synthetic oligonucleotide
gauaaucugugugggcccc

SEQ ID NO: 408778 - RNA, 19 nt, Artificial Sequence
  Description of Artificial Sequence: Synthetic oligonucleotide
guucagaagcgacuccacc

SEQ ID NO: 408779 - RNA, 19 nt, Artificial Sequence
  Description of Artificial Sequence: Synthetic oligonucleotide
auguauaauucagcaagca

SEQ ID NO: 408780 - RNA, 19 nt, Artificial Sequence
  Description of Artificial Sequence: Synthetic oligonucleotide
cagauuaaucuguuuauua

SEQ ID NO: 408781 - RNA, 19 nt, Artificial Sequence
  Description of Artificial Sequence: Synthetic oligonucleotide
agguaagaccuccauuggu

SEQ ID NO: 408782 - RNA, 19 nt, Artificial Sequence
  Description of Artificial Sequence: Synthetic oligonucleotide
ugcgaaaaggaccgugcuc

SEQ ID NO: 408783 - RNA, 19 nt, Artificial Sequence
  Description of Artificial Sequence: Synthetic oligonucleotide
gguaagaccuccauuggug

SEQ ID NO: 408784 - RNA, 19 nt, Artificial Sequence
  Description of Artificial Sequence: Synthetic oligonucleotide
guuugguggccccaacacc

SEQ ID NO: 408785 - RNA, 19 nt, Artificial Sequence
  Description of Artificial Sequence: Synthetic oligonucleotide
acggcgguaguccacgaug

SEQ ID NO: 408786 - RNA, 19 nt, Artificial Sequence
  Description of Artificial Sequence: Synthetic oligonucleotide
ucagauuaaucuguuuauu

SEQ ID NO: 408787 - RNA, 19 nt, Artificial Sequence
  Description of Artificial Sequence: Synthetic oligonucleotide
gaaguugcucucgggugcg

SEQ ID NO: 408788 - RNA, 19 nt, Artificial Sequence
  Description of Artificial Sequence: Synthetic oligonucleotide
cacaggaauccagaguagc

SEQ ID NO: 408789 - RNA, 19 nt, Artificial Sequence
  Description of Artificial Sequence: Synthetic oligonucleotide
aucgccgugauucuugcuu

SEQ ID NO: 408790 - RNA, 19 nt, Artificial Sequence
  Description of Artificial Sequence: Synthetic oligonucleotide
ugguuuagcucuguacaga

SEQ ID NO: 408791 - RNA, 19 nt, Artificial Sequence
  Description of Artificial Sequence: Synthetic oligonucleotide
auccucaacacugcgaaaa

SEQ ID NO: 408792 - RNA, 19 nt, Artificial Sequence
  Description of Artificial Sequence: Synthetic oligonucleotide
acggacugggacccacagc

SEQ ID NO: 408793 - RNA, 19 nt, Artificial Sequence
  Description of Artificial Sequence: Synthetic oligonucleotide
ggaaguugcucucgggugc

SEQ ID NO: 408794 - RNA, 19 nt, Artificial Sequence
  Description of Artificial Sequence: Synthetic oligonucleotide
agaacgucacgucccggug

SEQ ID NO: 408795 - RNA, 19 nt, Artificial Sequence
  Description of Artificial Sequence: Synthetic oligonucleotide
ucaagauguugcaguccca

SEQ ID NO: 408796 - RNA, 19 nt, Artificial Sequence
  Description of Artificial Sequence: Synthetic oligonucleotide
aucccgcauaccuccaaag

SEQ ID NO: 408797 - RNA, 19 nt, Artificial Sequence
  Description of Artificial Sequence: Synthetic oligonucleotide
uguugcagucccagcuagc

SEQ ID NO: 408798 - RNA, 19 nt, Artificial Sequence
  Description of Artificial Sequence: Synthetic oligonucleotide
aagguuaaccagggucaag

SEQ ID NO: 408799 - RNA, 19 nt, Artificial Sequence
  Description of Artificial Sequence: Synthetic oligonucleotide
agccugaacucagcugucc

SEQ ID NO: 408800 - RNA, 19 nt, Artificial Sequence
  Description of Artificial Sequence: Synthetic oligonucleotide
accuaaacacaggccgccc

SEQ ID NO: 408801 - RNA, 19 nt, Artificial Sequence
  Description of Artificial Sequence: Synthetic oligonucleotide
gauucuugcuuggauucuc

SEQ ID NO: 408802 - RNA, 19 nt, Artificial Sequence
  Description of Artificial Sequence: Synthetic oligonucleotide
augcugauucaaaggcccc

SEQ ID NO: 408803 - RNA, 19 nt, Artificial Sequence
  Description of Artificial Sequence: Synthetic oligonucleotide
uucgcucuagggugacucc

SEQ ID NO: 408804 - RNA, 19 nt, Artificial Sequence
  Description of Artificial Sequence: Synthetic oligonucleotide
gugaccugugaacacuuuc

SEQ ID NO: 408805 - RNA, 19 nt, Artificial Sequence
  Description of Artificial Sequence: Synthetic oligonucleotide
acaggaauccagaguagca

SEQ ID NO: 408806 - RNA, 19 nt, Artificial Sequence
  Description of Artificial Sequence: Synthetic oligonucleotide
ggccaaccuaaacacaggc

SEQ ID NO: 408807 - RNA, 19 nt, Artificial Sequence
  Description of Artificial Sequence: Synthetic oligonucleotide
uucaacaaccgguggccau

SEQ ID NO: 408808 - RNA, 19 nt, Artificial Sequence
  Description of Artificial Sequence: Synthetic oligonucleotide
gaugaggcuuggcaguaaa

SEQ ID NO: 408809 - RNA, 19 nt, Artificial Sequence
  Description of Artificial Sequence: Synthetic oligonucleotide
aucgcucaugcuuaauguu

SEQ ID NO: 408810 - RNA, 19 nt, Artificial Sequence
  Description of Artificial Sequence: Synthetic oligonucleotide
acucaugagcugcgcuagg

SEQ ID NO: 408811 - RNA, 19 nt, Artificial Sequence
  Description of Artificial Sequence: Synthetic oligonucleotide
uggcgaggaacggacuggg

SEQ ID NO: 408812 - RNA, 19 nt, Artificial Sequence
  Description of Artificial Sequence: Synthetic oligonucleotide
aagcgacuccaccccagga

SEQ ID NO: 408813 - RNA, 19 nt, Artificial Sequence
  Description of Artificial Sequence: Synthetic oligonucleotide
uagagcgauggcagcccag

SEQ ID NO: 408814 - RNA, 19 nt, Artificial Sequence
  Description of Artificial Sequence: Synthetic oligonucleotide
ccgcauaccuccaaaggcc

SEQ ID NO: 408815 - RNA, 19 nt, Artificial Sequence
  Description of Artificial Sequence: Synthetic oligonucleotide
agaguagcaggcgcccuuc

SEQ ID NO: 408816 - RNA, 19 nt, Artificial Sequence
  Description of Artificial Sequence: Synthetic oligonucleotide
gucagauuaaucuguuuau

SEQ ID NO: 408817 - RNA, 19 nt, Artificial Sequence
  Description of Artificial Sequence: Synthetic oligonucleotide
gaauuugucugcagaacgu

SEQ ID NO: 408818 - RNA, 19 nt, Artificial Sequence
  Description of Artificial Sequence: Synthetic oligonucleotide
cucggauacucaugagcug

SEQ ID NO: 408819 - RNA, 19 nt, Artificial Sequence
  Description of Artificial Sequence: Synthetic oligonucleotide
cucacggcgguaguccacg

SEQ ID NO: 408820 - RNA, 19 nt, Artificial Sequence
  Description of Artificial Sequence: Synthetic oligonucleotide
aguuacccuugcugcucac

SEQ ID NO: 408821 - RNA, 19 nt, Artificial Sequence
  Description of Artificial Sequence: Synthetic oligonucleotide
gaacgucacgucccgguga

SEQ ID NO: 408822 - RNA, 19 nt, Artificial Sequence
  Description of Artificial Sequence: Synthetic oligonucleotide
gccgcauggagauaaucug

SEQ ID NO: 408823 - RNA, 19 nt, Artificial Sequence
  Description of Artificial Sequence: Synthetic oligonucleotide
cucgguggcaguguugaug

SEQ ID NO: 408824 - RNA, 19 nt, Artificial Sequence
  Description of Artificial Sequence: Synthetic oligonucleotide
cccgcauaccuccaaaggc

SEQ ID NO: 408825 - RNA, 19 nt, Artificial Sequence
  Description of Artificial Sequence: Synthetic oligonucleotide
accugugaacacuuucuuu

SEQ ID NO: 408826 - RNA, 19 nt, Artificial Sequence
  Description of Artificial Sequence: Synthetic oligonucleotide
auugacucguggagugagg

SEQ ID NO: 408827 - RNA, 19 nt, Artificial Sequence
  Description of Artificial Sequence: Synthetic oligonucleotide
cagacgguagaaacaguga

SEQ ID NO: 408828 - RNA, 19 nt, Artificial Sequence
  Description of Artificial Sequence: Synthetic oligonucleotide
ggugagcucucuuggccgg

SEQ ID NO: 408829 - RNA, 19 nt, Artificial Sequence
  Description of Artificial Sequence: Synthetic oligonucleotide
agcuagcuuugcuguagug

SEQ ID NO: 408830 - RNA, 19 nt, Artificial Sequence
  Description of Artificial Sequence: Synthetic oligonucleotide
auagagcgauggcagccca

SEQ ID NO: 408831 - RNA, 19 nt, Artificial Sequence
  Description of Artificial Sequence: Synthetic oligonucleotide
ucagucgcuccugauucac

SEQ ID NO: 408832 - RNA, 19 nt, Artificial Sequence
  Description of Artificial Sequence: Synthetic oligonucleotide
ggagccuuuauaagcacac

SEQ ID NO: 408833 - RNA, 19 nt, Artificial Sequence
  Description of Artificial Sequence: Synthetic oligonucleotide
ggauagagcgauggcagcc

SEQ ID NO: 408834 - RNA, 19 nt, Artificial Sequence
  Description of Artificial Sequence: Synthetic oligonucleotide
gguuuagcucuguacagaa

SEQ ID NO: 408835 - RNA, 19 nt, Artificial Sequence
  Description of Artificial Sequence: Synthetic oligonucleotide
aggaccgugcucacggcgg

SEQ ID NO: 408836 - RNA, 19 nt, Artificial Sequence
  Description of Artificial Sequence: Synthetic oligonucleotide
gccaccgauguauucucgg

SEQ ID NO: 408837 - RNA, 19 nt, Artificial Sequence
  Description of Artificial Sequence: Synthetic oligonucleotide
ugcgcuaggguagcugugu

SEQ ID NO: 408838 - RNA, 19 nt, Artificial Sequence
  Description of Artificial Sequence: Synthetic oligonucleotide
ugagcugcgcuaggguagc

SEQ ID NO: 408839 - RNA, 19 nt, Artificial Sequence
  Description of Artificial Sequence: Synthetic oligonucleotide
gaguuacccuugcugcuca

SEQ ID NO: 408840 - RNA, 19 nt, Artificial Sequence
  Description of Artificial Sequence: Synthetic oligonucleotide
guaagaccuccauuggugu

SEQ ID NO: 408841 - RNA, 19 nt, Artificial Sequence
  Description of Artificial Sequence: Synthetic oligonucleotide
uucaaaggccccgaaucuu

SEQ ID NO: 408842 - RNA, 19 nt, Artificial Sequence
  Description of Artificial Sequence: Synthetic oligonucleotide
cuggcgaggaacggacugg

SEQ ID NO: 408843 - RNA, 19 nt, Artificial Sequence
  Description of Artificial Sequence: Synthetic oligonucleotide
gcaaaguucaacaaccggu

SEQ ID NO: 408844 - RNA, 19 nt, Artificial Sequence
  Description of Artificial Sequence: Synthetic oligonucleotide
gguugcgaggacuuaggga

SEQ ID NO: 408845 - RNA, 19 nt, Artificial Sequence
  Description of Artificial Sequence: Synthetic oligonucleotide
aggccccgaaucuucucag

SEQ ID NO: 408846 - RNA, 19 nt, Artificial Sequence
  Description of Artificial Sequence: Synthetic oligonucleotide
caacaaccgguggccaucg

SEQ ID NO: 408847 - RNA, 19 nt, Artificial Sequence
  Description of Artificial Sequence: Synthetic oligonucleotide
agcauauccagugccugau

SEQ ID NO: 408848 - RNA, 19 nt, Artificial Sequence
  Description of Artificial Sequence: Synthetic oligonucleotide
aaccgguggccaucgccgu

SEQ ID NO: 408849 - RNA, 19 nt, Artificial Sequence
  Description of Artificial Sequence: Synthetic oligonucleotide
cgagucagacgguagaaac

SEQ ID NO: 408850 - RNA, 19 nt, Artificial Sequence
  Description of Artificial Sequence: Synthetic oligonucleotide
uaggguagcuguguugaua

SEQ ID NO: 408851 - RNA, 19 nt, Artificial Sequence
  Description of Artificial Sequence: Synthetic oligonucleotide
ccaccuugaaccuggcgag

SEQ ID NO: 408852 - RNA, 19 nt, Artificial Sequence
  Description of Artificial Sequence: Synthetic oligonucleotide
gguuaugugacaggucuga

SEQ ID NO: 408853 - RNA, 19 nt, Artificial Sequence
  Description of Artificial Sequence: Synthetic oligonucleotide
gcgaggaacggacugggac

SEQ ID NO: 408854 - RNA, 19 nt, Artificial Sequence
  Description of Artificial Sequence: Synthetic oligonucleotide
auauugacucguggaguga

SEQ ID NO: 408855 - RNA, 19 nt, Artificial Sequence
  Description of Artificial Sequence: Synthetic oligonucleotide
cucucaugcugccaugcga

SEQ ID NO: 408856 - RNA, 19 nt, Artificial Sequence
  Description of Artificial Sequence: Synthetic oligonucleotide
agagcgauggcagcccaga

SEQ ID NO: 408857 - RNA, 19 nt, Artificial Sequence
  Description of Artificial Sequence: Synthetic oligonucleotide
caucgcucaugcuuaaugu

SEQ ID NO: 408858 - RNA, 19 nt, Artificial Sequence
  Description of Artificial Sequence: Synthetic oligonucleotide
ucgcucuagggugacucca

SEQ ID NO: 408859 - RNA, 19 nt, Artificial Sequence
  Description of Artificial Sequence: Synthetic oligonucleotide
ccucucugcgaacaccugg

SEQ ID NO: 408860 - RNA, 19 nt, Artificial Sequence
  Description of Artificial Sequence: Synthetic oligonucleotide
gaggccucggauacucaug

SEQ ID NO: 408861 - RNA, 19 nt, Artificial Sequence
  Description of Artificial Sequence: Synthetic oligonucleotide
cccagagugcuccccaugg

SEQ ID NO: 408862 - RNA, 19 nt, Artificial Sequence
  Description of Artificial Sequence: Synthetic oligonucleotide
gaacaacucuggauagaga

SEQ ID NO: 408863 - RNA, 19 nt, Artificial Sequence
  Description of Artificial Sequence: Synthetic oligonucleotide
gucgcuccugauucaccag

SEQ ID NO: 408864 - RNA, 19 nt, Artificial Sequence
  Description of Artificial Sequence: Synthetic oligonucleotide
cauugccauuccuggggac

SEQ ID NO: 408865 - RNA, 19 nt, Artificial Sequence
  Description of Artificial Sequence: Synthetic oligonucleotide
gcuaggguagcuguguuga

SEQ ID NO: 408866 - RNA, 19 nt, Artificial Sequence
  Description of Artificial Sequence: Synthetic oligonucleotide
agaagcgacuccaccccag

SEQ ID NO: 408867 - RNA, 19 nt, Artificial Sequence
  Description of Artificial Sequence: Synthetic oligonucleotide
accaguuaucuggaaucca

SEQ ID NO: 408868 - RNA, 19 nt, Artificial Sequence
  Description of Artificial Sequence: Synthetic oligonucleotide
gcgacuccaccccaggacc

SEQ ID NO: 408869 - RNA, 19 nt, Artificial Sequence
  Description of Artificial Sequence: Synthetic oligonucleotide
gacaugagagccguggcau

SEQ ID NO: 408870 - RNA, 19 nt, Artificial Sequence
  Description of Artificial Sequence: Synthetic oligonucleotide
augcuuaauguuggccuca

SEQ ID NO: 408871 - RNA, 19 nt, Artificial Sequence
  Description of Artificial Sequence: Synthetic oligonucleotide
cauugcuaggugagcucuc

SEQ ID NO: 408872 - RNA, 19 nt, Artificial Sequence
  Description of Artificial Sequence: Synthetic oligonucleotide
cucaugcugccaugcgaug

SEQ ID NO: 408873 - RNA, 19 nt, Artificial Sequence
  Description of Artificial Sequence: Synthetic oligonucleotide
cagucgcuccugauucacc

SEQ ID NO: 408874 - RNA, 19 nt, Artificial Sequence
  Description of Artificial Sequence: Synthetic oligonucleotide
ggaauccaaggguuuguga

SEQ ID NO: 408875 - RNA, 19 nt, Artificial Sequence
  Description of Artificial Sequence: Synthetic oligonucleotide
ugaagccagucagauuaau

SEQ ID NO: 408876 - RNA, 19 nt, Artificial Sequence
  Description of Artificial Sequence: Synthetic oligonucleotide
gguggggcugggaugaggc

SEQ ID NO: 408877 - RNA, 19 nt, Artificial Sequence
  Description of Artificial Sequence: Synthetic oligonucleotide
agcgucaugcagaccaccu

SEQ ID NO: 408878 - RNA, 19 nt, Artificial Sequence
  Description of Artificial Sequence: Synthetic oligonucleotide
gaaccuggcgaggaacgga

SEQ ID NO: 408879 - RNA, 19 nt, Artificial Sequence
  Description of Artificial Sequence: Synthetic oligonucleotide
aggcagacaugagagccgu

SEQ ID NO: 408880 - RNA, 19 nt, Artificial Sequence
  Description of Artificial Sequence: Synthetic oligonucleotide
accgugcucacggcgguag

SEQ ID NO: 408881 - RNA, 19 nt, Artificial Sequence
  Description of Artificial Sequence: Synthetic oligonucleotide
cagcacgugucaccccagg

SEQ ID NO: 408882 - RNA, 19 nt, Artificial Sequence
  Description of Artificial Sequence: Synthetic oligonucleotide
ccacuuucggauguugggc

SEQ ID NO: 408883 - RNA, 19 nt, Artificial Sequence
  Description of Artificial Sequence: Synthetic oligonucleotide
ggguuugugagaccuucuc

SEQ ID NO: 408884 - RNA, 19 nt, Artificial Sequence
  Description of Artificial Sequence: Synthetic oligonucleotide
agcucuguacagaacuuuu

SEQ ID NO: 408885 - RNA, 19 nt, Artificial Sequence
  Description of Artificial Sequence: Synthetic oligonucleotide
ccucaacacugcgaaaagg

SEQ ID NO: 408886 - RNA, 19 nt, Artificial Sequence
  Description of Artificial Sequence: Synthetic oligonucleotide
gcccaucccgcauaccucc

SEQ ID NO: 408887 - RNA, 19 nt, Artificial Sequence
  Description of Artificial Sequence: Synthetic oligonucleotide
gauccucaacacugcgaaa

SEQ ID NO: 408888 - RNA, 19 nt, Artificial Sequence
  Description of Artificial Sequence: Synthetic oligonucleotide
caguuugguggccccaaca

SEQ ID NO: 408889 - RNA, 19 nt, Artificial Sequence
  Description of Artificial Sequence: Synthetic oligonucleotide
ggauuccuggugcugaugu

SEQ ID NO: 408890 - RNA, 19 nt, Artificial Sequence
  Description of Artificial Sequence: Synthetic oligonucleotide
accccaagccugaacucag

SEQ ID NO: 408891 - RNA, 19 nt, Artificial Sequence
  Description of Artificial Sequence: Synthetic oligonucleotide
ccaugcgaugcauucagca

SEQ ID NO: 408892 - RNA, 19 nt, Artificial Sequence
  Description of Artificial Sequence: Synthetic oligonucleotide
gcugcacugaauuuacggu

SEQ ID NO: 408893 - RNA, 19 nt, Artificial Sequence
  Description of Artificial Sequence: Synthetic oligonucleotide
gccaaccuaaacacaggcc

SEQ ID NO: 408894 - RNA, 19 nt, Artificial Sequence
  Description of Artificial Sequence: Synthetic oligonucleotide
ccaguuaucuggaauccaa

SEQ ID NO: 408895 - RNA, 19 nt, Artificial Sequence
  Description of Artificial Sequence: Synthetic oligonucleotide
gguuugugagaccuucucu

SEQ ID NO: 408896 - RNA, 19 nt, Artificial Sequence
  Description of Artificial Sequence: Synthetic oligonucleotide
caccuugaaccuggcgagg

SEQ ID NO: 408897 - RNA, 19 nt, Artificial Sequence
  Description of Artificial Sequence: Synthetic oligonucleotide
ggggucucuggggauagag

SEQ ID NO: 408898 - RNA, 19 nt, Artificial Sequence
  Description of Artificial Sequence: Synthetic oligonucleotide
cugggacccacagccuucc

SEQ ID NO: 408899 - RNA, 19 nt, Artificial Sequence
  Description of Artificial Sequence: Synthetic oligonucleotide
aggaagguugcgaggacuu

SEQ ID NO: 408900 - RNA, 19 nt, Artificial Sequence
  Description of Artificial Sequence: Synthetic oligonucleotide
cugcacugaauuuacgguu

SEQ ID NO: 408901 - RNA, 19 nt, Artificial Sequence
  Description of Artificial Sequence: Synthetic oligonucleotide
agugguccagggaccaaga

SEQ ID NO: 408902 - RNA, 19 nt, Artificial Sequence
  Description of Artificial Sequence: Synthetic oligonucleotide
ggugaggccucggauacuc

SEQ ID NO: 408903 - RNA, 19 nt, Artificial Sequence
  Description of Artificial Sequence: Synthetic oligonucleotide
accgcugaccagugcuaga

SEQ ID NO: 408904 - RNA, 19 nt, Artificial Sequence
  Description of Artificial Sequence: Synthetic oligonucleotide
caccgcugaccagugcuag

SEQ ID NO: 408905 - RNA, 19 nt, Artificial Sequence
  Description of Artificial Sequence: Synthetic oligonucleotide
ccucggauacucaugagcu

SEQ ID NO: 408906 - RNA, 19 nt, Artificial Sequence
  Description of Artificial Sequence: Synthetic oligonucleotide
guucaacaaccgguggcca

SEQ ID NO: 408907 - RNA, 19 nt, Artificial Sequence
  Description of Artificial Sequence: Synthetic oligonucleotide
ccccuaaaauaacaacauc

SEQ ID NO: 408908 - RNA, 19 nt, Artificial Sequence
  Description of Artificial Sequence: Synthetic oligonucleotide
agcugcgcuaggguagcug

SEQ ID NO: 408909 - RNA, 19 nt, Artificial Sequence
  Description of Artificial Sequence: Synthetic oligonucleotide
cugcgcuaggguagcugug

SEQ ID NO: 408910 - RNA, 19 nt, Artificial Sequence
  Description of Artificial Sequence: Synthetic oligonucleotide
ucgguacuccacgaugcuu

SEQ ID NO: 408911 - RNA, 19 nt, Artificial Sequence
  Description of Artificial Sequence: Synthetic oligonucleotide
caacaccgcugaccagugc

SEQ ID NO: 408912 - RNA, 19 nt, Artificial Sequence
  Description of Artificial Sequence: Synthetic oligonucleotide
cagaacgucacgucccggu

SEQ ID NO: 408913 - RNA, 19 nt, Artificial Sequence
  Description of Artificial Sequence: Synthetic oligonucleotide
caccgauguauucucggua

SEQ ID NO: 408914 - RNA, 19 nt, Artificial Sequence
  Description of Artificial Sequence: Synthetic oligonucleotide
ccuggcgaggaacggacug

SEQ ID NO: 408915 - RNA, 19 nt, Artificial Sequence
  Description of Artificial Sequence: Synthetic oligonucleotide
uuggccggggaugucccuc

SEQ ID NO: 408916 - RNA, 19 nt, Artificial Sequence
  Description of Artificial Sequence: Synthetic oligonucleotide
gcaggaucggcugguuuag

SEQ ID NO: 408917 - RNA, 19 nt, Artificial Sequence
  Description of Artificial Sequence: Synthetic oligonucleotide
ggauacucaugagcugcgc

SEQ ID NO: 408918 - RNA, 19 nt, Artificial Sequence
  Description of Artificial Sequence: Synthetic oligonucleotide
acgugucaccccaggcagg

SEQ ID NO: 408919 - RNA, 19 nt, Artificial Sequence
  Description of Artificial Sequence: Synthetic oligonucleotide
aggugugagcugggaucac

SEQ ID NO: 408920 - RNA, 19 nt, Artificial Sequence
  Description of Artificial Sequence: Synthetic oligonucleotide
cucucggaccccgggguug

SEQ ID NO: 408921 - RNA, 19 nt, Artificial Sequence
  Description of Artificial Sequence: Synthetic oligonucleotide
ccaucgccgugauucuugc

SEQ ID NO: 408922 - RNA, 19 nt, Artificial Sequence
  Description of Artificial Sequence: Synthetic oligonucleotide
gaacucagcuguccagcau

SEQ ID NO: 408923 - RNA, 19 nt, Artificial Sequence
  Description of Artificial Sequence: Synthetic oligonucleotide
cugauucaaaggccccgaa

SEQ ID NO: 408924 - RNA, 19 nt, Artificial Sequence
  Description of Artificial Sequence: Synthetic oligonucleotide
gaacggacugggacccaca

SEQ ID NO: 408925 - RNA, 19 nt, Artificial Sequence
  Description of Artificial Sequence: Synthetic oligonucleotide
caucccgcauaccuccaaa

SEQ ID NO: 408926 - RNA, 19 nt, Artificial Sequence
  Description of Artificial Sequence: Synthetic oligonucleotide
gccaucgccgugauucuug

SEQ ID NO: 408927 - RNA, 19 nt, Artificial Sequence
  Description of Artificial Sequence: Synthetic oligonucleotide
cagaagcgacuccacccca

SEQ ID NO: 408928 - RNA, 19 nt, Artificial Sequence
  Description of Artificial Sequence: Synthetic oligonucleotide
ccaagacgaagguccucag

SEQ ID NO: 408929 - RNA, 19 nt, Artificial Sequence
  Description of Artificial Sequence: Synthetic oligonucleotide
ucggcugguuuagcucugu

SEQ ID NO: 408930 - RNA, 19 nt, Artificial Sequence
  Description of Artificial Sequence: Synthetic oligonucleotide
gcugauucaaaggccccga

SEQ ID NO: 408931 - RNA, 19 nt, Artificial Sequence
  Description of Artificial Sequence: Synthetic oligonucleotide
gccugauaggcuccccuca

SEQ ID NO: 408932 - RNA, 19 nt, Artificial Sequence
  Description of Artificial Sequence: Synthetic oligonucleotide
cuucucggugaggccucgg

SEQ ID NO: 408933 - RNA, 19 nt, Artificial Sequence
  Description of Artificial Sequence: Synthetic oligonucleotide
gggaucgaggaaguugcuc

SEQ ID NO: 408934 - RNA, 19 nt, Artificial Sequence
  Description of Artificial Sequence: Synthetic oligonucleotide
guacuccacgaugcuucug

SEQ ID NO: 408935 - RNA, 19 nt, Artificial Sequence
  Description of Artificial Sequence: Synthetic oligonucleotide
caggaucggcugguuuagc

SEQ ID NO: 408936 - RNA, 19 nt, Artificial Sequence
  Description of Artificial Sequence: Synthetic oligonucleotide
caucaucgcucaugcuuaa

SEQ ID NO: 408937 - RNA, 19 nt, Artificial Sequence
  Description of Artificial Sequence: Synthetic oligonucleotide
gcuagaaguuugaugcugu

SEQ ID NO: 408938 - RNA, 19 nt, Artificial Sequence
  Description of Artificial Sequence: Synthetic oligonucleotide
ccgcccucagggaacuggg

SEQ ID NO: 408939 - RNA, 19 nt, Artificial Sequence
  Description of Artificial Sequence: Synthetic oligonucleotide
aucaucgcucaugcuuaau

SEQ ID NO: 408940 - RNA, 19 nt, Artificial Sequence
  Description of Artificial Sequence: Synthetic oligonucleotide
cugcgaaaaggaccgugcu

SEQ ID NO: 408941 - RNA, 19 nt, Artificial Sequence
  Description of Artificial Sequence: Synthetic oligonucleotide
ggugugagcugggaucaca

SEQ ID NO: 408942 - RNA, 19 nt, Artificial Sequence
  Description of Artificial Sequence: Synthetic oligonucleotide
cagaagcgucaugcagacc

SEQ ID NO: 408943 - RNA, 19 nt, Artificial Sequence
  Description of Artificial Sequence: Synthetic oligonucleotide
ggaacggacugggacccac

SEQ ID NO: 408944 - RNA, 19 nt, Artificial Sequence
  Description of Artificial Sequence: Synthetic oligonucleotide
ggccgcauggagauaaucu

SEQ ID NO: 408945 - RNA, 19 nt, Artificial Sequence
  Description of Artificial Sequence: Synthetic oligonucleotide
ugcgaacaccuggugucuu

SEQ ID NO: 408946 - RNA, 19 nt, Artificial Sequence
  Description of Artificial Sequence: Synthetic oligonucleotide
cggcgguaguccacgaugc

SEQ ID NO: 408947 - RNA, 19 nt, Artificial Sequence
  Description of Artificial Sequence: Synthetic oligonucleotide
aguccucgcucugcaggcu

SEQ ID NO: 408948 - RNA, 19 nt, Artificial Sequence
  Description of Artificial Sequence: Synthetic oligonucleotide
gguggccaaccuaaacaca

SEQ ID NO: 408949 - RNA, 19 nt, Artificial Sequence
  Description of Artificial Sequence: Synthetic oligonucleotide
ggccucggauacucaugag

SEQ ID NO: 408950 - RNA, 19 nt, Artificial Sequence
  Description of Artificial Sequence: Synthetic oligonucleotide
ggaucacaugaugaaauuu

SEQ ID NO: 408951 - RNA, 19 nt, Artificial Sequence
  Description of Artificial Sequence: Synthetic oligonucleotide
gcugcgcuaggguagcugu

SEQ ID NO: 408952 - RNA, 19 nt, Artificial Sequence
  Description of Artificial Sequence: Synthetic oligonucleotide
ggacccacagccuucccau

SEQ ID NO: 408953 - RNA, 19 nt, Artificial Sequence
  Description of Artificial Sequence: Synthetic oligonucleotide
cgaugcauucagcagugca

SEQ ID NO: 408954 - RNA, 19 nt, Artificial Sequence
  Description of Artificial Sequence: Synthetic oligonucleotide
agugaccugugaacacuuu

SEQ ID NO: 408955 - RNA, 19 nt, Artificial Sequence
  Description of Artificial Sequence: Synthetic oligonucleotide
acgucccggugaggcagac

SEQ ID NO: 408956 - RNA, 19 nt, Artificial Sequence
  Description of Artificial Sequence: Synthetic oligonucleotide
gcgucaugcagaccaccuc

SEQ ID NO: 408957 - RNA, 19 nt, Artificial Sequence
  Description of Artificial Sequence: Synthetic oligonucleotide
gcagaacgucacgucccgg

SEQ ID NO: 408958 - RNA, 19 nt, Artificial Sequence
  Description of Artificial Sequence: Synthetic oligonucleotide
agggaucgaggaaguugcu

SEQ ID NO: 408959 - RNA, 19 nt, Artificial Sequence
  Description of Artificial Sequence: Synthetic oligonucleotide
gggaucacaugaugaaauu

SEQ ID NO: 408960 - RNA, 19 nt, Artificial Sequence
  Description of Artificial Sequence: Synthetic oligonucleotide
ccucacuucgcucuagggu

SEQ ID NO: 408961 - RNA, 19 nt, Artificial Sequence
  Description of Artificial Sequence: Synthetic oligonucleotide
caacagcccagugaccugu

SEQ ID NO: 408962 - RNA, 19 nt, Artificial Sequence
  Description of Artificial Sequence: Synthetic oligonucleotide
ccauugguguggguagaug

SEQ ID NO: 408963 - RNA, 19 nt, Artificial Sequence
  Description of Artificial Sequence: Synthetic oligonucleotide
aggccgcccaucccgcaua

SEQ ID NO: 408964 - RNA, 19 nt, Artificial Sequence
  Description of Artificial Sequence: Synthetic oligonucleotide
gaacaccuggugucuuauu

SEQ ID NO: 408965 - RNA, 19 nt, Artificial Sequence
  Description of Artificial Sequence: Synthetic oligonucleotide
acaccgcugaccagugcua

SEQ ID NO: 408966 - RNA, 19 nt, Artificial Sequence
  Description of Artificial Sequence: Synthetic oligonucleotide
acacugcgaaaaggaccgu

SEQ ID NO: 408967 - RNA, 19 nt, Artificial Sequence
  Description of Artificial Sequence: Synthetic oligonucleotide
cucgguacuccacgaugcu

SEQ ID NO: 408968 - RNA, 19 nt, Artificial Sequence
  Description of Artificial Sequence: Synthetic oligonucleotide
cgaggacuuagggaucgag

SEQ ID NO: 408969 - RNA, 19 nt, Artificial Sequence
  Description of Artificial Sequence: Synthetic oligonucleotide
cagugaccugugaacacuu

SEQ ID NO: 408970 - RNA, 19 nt, Artificial Sequence
  Description of Artificial Sequence: Synthetic oligonucleotide
accuggcgaggaacggacu

SEQ ID NO: 408971 - RNA, 19 nt, Artificial Sequence
  Description of Artificial Sequence: Synthetic oligonucleotide
ccaguuugguggccccaac

SEQ ID NO: 408972 - RNA, 19 nt, Artificial Sequence
  Description of Artificial Sequence: Synthetic oligonucleotide
cgccgugauucuugcuugg

SEQ ID NO: 408973 - RNA, 19 nt, Artificial Sequence
  Description of Artificial Sequence: Synthetic oligonucleotide
ggucccgcccucagggaac

SEQ ID NO: 408974 - RNA, 19 nt, Artificial Sequence
  Description of Artificial Sequence: Synthetic oligonucleotide
gccaugcgaugcauucagc

SEQ ID NO: 408975 - RNA, 19 nt, Artificial Sequence
  Description of Artificial Sequence: Synthetic oligonucleotide
ccgcauggagauaaucugu

SEQ ID NO: 408976 - RNA, 19 nt, Artificial Sequence
  Description of Artificial Sequence: Synthetic oligonucleotide
ggaccccgggguuguuggc

SEQ ID NO: 408977 - RNA, 19 nt, Artificial Sequence
  Description of Artificial Sequence: Synthetic oligonucleotide
ccccaggaccaguuaucug

SEQ ID NO: 408978 - RNA, 19 nt, Artificial Sequence
  Description of Artificial Sequence: Synthetic oligonucleotide
aggaacggacugggaccca

SEQ ID NO: 408979 - RNA, 19 nt, Artificial Sequence
  Description of Artificial Sequence: Synthetic oligonucleotide
cacgucccggugaggcaga

SEQ ID NO: 408980 - RNA, 19 nt, Artificial Sequence
  Description of Artificial Sequence: Synthetic oligonucleotide
gucagacgguagaaacagu

SEQ ID NO: 408981 - RNA, 19 nt, Artificial Sequence
  Description of Artificial Sequence: Synthetic oligonucleotide
gugaggccucggauacuca

SEQ ID NO: 408982 - RNA, 19 nt, Artificial Sequence
  Description of Artificial Sequence: Synthetic oligonucleotide
ggccuggaccucucugcga

SEQ ID NO: 408983 - RNA, 19 nt, Artificial Sequence
  Description of Artificial Sequence: Synthetic oligonucleotide
cgugauucuugcuuggauu

SEQ ID NO: 408984 - RNA, 19 nt, Artificial Sequence
  Description of Artificial Sequence: Synthetic oligonucleotide
gcgaacaccuggugucuua

SEQ ID NO: 408985 - RNA, 19 nt, Artificial Sequence
  Description of Artificial Sequence: Synthetic oligonucleotide
cccaacaccgcugaccagu

SEQ ID NO: 408986 - RNA, 19 nt, Artificial Sequence
  Description of Artificial Sequence: Synthetic oligonucleotide
caaggguuugugagaccuu

SEQ ID NO: 408987 - RNA, 19 nt, Artificial Sequence
  Description of Artificial Sequence: Synthetic oligonucleotide
gggccgcauggagauaauc

SEQ ID NO: 408988 - RNA, 19 nt, Artificial Sequence
  Description of Artificial Sequence: Synthetic oligonucleotide
ggaagguugcgaggacuua

SEQ ID NO: 408989 - RNA, 19 nt, Artificial Sequence
  Description of Artificial Sequence: Synthetic oligonucleotide
gcgaugcauucagcagugc

SEQ ID NO: 408990 - RNA, 19 nt, Artificial Sequence
  Description of Artificial Sequence: Synthetic oligonucleotide
ggccgcccaucccgcauac

SEQ ID NO: 408991 - RNA, 19 nt, Artificial Sequence
  Description of Artificial Sequence: Synthetic oligonucleotide
ccaccgauguauucucggu

SEQ ID NO: 408992 - RNA, 19 nt, Artificial Sequence
  Description of Artificial Sequence: Synthetic oligonucleotide
ggcagacaugagagccgug

SEQ ID NO: 408993 - RNA, 19 nt, Artificial Sequence
  Description of Artificial Sequence: Synthetic oligonucleotide
cgcccaucccgcauaccuc

SEQ ID NO: 408994 - RNA, 19 nt, Artificial Sequence
  Description of Artificial Sequence: Synthetic oligonucleotide
ggcgcccuucuggagcuga

SEQ ID NO: 408995 - RNA, 19 nt, Artificial Sequence
  Description of Artificial Sequence: Synthetic oligonucleotide
ccuuugcccucccgaguca

SEQ ID NO: 408996 - RNA, 19 nt, Artificial Sequence
  Description of Artificial Sequence: Synthetic oligonucleotide
gaccgugcucacggcggua

SEQ ID NO: 408997 - RNA, 19 nt, Artificial Sequence
  Description of Artificial Sequence: Synthetic oligonucleotide
ccccaacaccgcugaccag

SEQ ID NO: 408998 - RNA, 19 nt, Artificial Sequence
  Description of Artificial Sequence: Synthetic oligonucleotide
cgcauaccuccaaaggccu

SEQ ID NO: 408999 - RNA, 19 nt, Artificial Sequence
  Description of Artificial Sequence: Synthetic oligonucleotide
ggcgaggaacggacuggga

SEQ ID NO: 409000 - RNA, 19 nt, Artificial Sequence
  Description of Artificial Sequence: Synthetic oligonucleotide
agggccgcauggagauaau

SEQ ID NO: 409001 - RNA, 19 nt, Artificial Sequence
  Description of Artificial Sequence: Synthetic oligonucleotide
gaccuccauuggugugggu

SEQ ID NO: 409002 - RNA, 19 nt, Artificial Sequence
  Description of Artificial Sequence: Synthetic oligonucleotide
ccgauguauucucgguacu

SEQ ID NO: 409003 - RNA, 19 nt, Artificial Sequence
  Description of Artificial Sequence: Synthetic oligonucleotide
gucccgcccucagggaacu

SEQ ID NO: 409004 - RNA, 19 nt, Artificial Sequence
  Description of Artificial Sequence: Synthetic oligonucleotide
ccaucccgcauaccuccaa

SEQ ID NO: 409005 - RNA, 19 nt, Artificial Sequence
  Description of Artificial Sequence: Synthetic oligonucleotide
caggccgcccaucccgcau

SEQ ID NO: 409006 - RNA, 19 nt, Artificial Sequence
  Description of Artificial Sequence: Synthetic oligonucleotide
cccgggguuguuggccuuc

SEQ ID NO: 409007 - RNA, 19 nt, Artificial Sequence
  Description of Artificial Sequence: Synthetic oligonucleotide
gagcugcgcuaggguagcu

SEQ ID NO: 409008 - RNA, 19 nt, Artificial Sequence
  Description of Artificial Sequence: Synthetic oligonucleotide
gcgaggacuuagggaucga

SEQ ID NO: 409009 - RNA, 19 nt, Artificial Sequence
  Description of Artificial Sequence: Synthetic oligonucleotide
gcgcccuucuggagcugac

SEQ ID NO: 409010 - RNA, 19 nt, Artificial Sequence
  Description of Artificial Sequence: Synthetic oligonucleotide
ccauuccuggggacuuccu

SEQ ID NO: 409011 - RNA, 19 nt, Artificial Sequence
  Description of Artificial Sequence: Synthetic oligonucleotide
gccggggaugucccucagu

SEQ ID NO: 409012 - RNA, 19 nt, Artificial Sequence
  Description of Artificial Sequence: Synthetic oligonucleotide
gcgcuaggguagcuguguu

SEQ ID NO: 409013 - RNA, 19 nt, Artificial Sequence
  Description of Artificial Sequence: Synthetic oligonucleotide
ccagaguagcaggcgcccu

SEQ ID NO: 409014 - RNA, 19 nt, Artificial Sequence
  Description of Artificial Sequence: Synthetic oligonucleotide
ccucgguggcaguguugau

SEQ ID NO: 409015 - RNA, 19 nt, Artificial Sequence
  Description of Artificial Sequence: Synthetic oligonucleotide
cgucccggugaggcagaca

SEQ ID NO: 409016 - RNA, 19 nt, Artificial Sequence
  Description of Artificial Sequence: Synthetic oligonucleotide
ccgggguuguuggccuucu

SEQ ID NO: 409017 - RNA, 19 nt, Artificial Sequence
  Description of Artificial Sequence: Synthetic oligonucleotide
ccuccacagagggccgcau

SEQ ID NO: 409018 - RNA, 19 nt, Artificial Sequence
  Description of Artificial Sequence: Synthetic oligonucleotide
cucggaccccgggguuguu

SEQ ID NO: 409019 - RNA, 19 nt, Artificial Sequence
  Description of Artificial Sequence: Synthetic oligonucleotide
cggugaggccucggauacu

SEQ ID NO: 409020 - RNA, 19 nt, Artificial Sequence
  Description of Artificial Sequence: Synthetic oligonucleotide
uguucuuauaccuaaaagc

SEQ ID NO: 409021 - RNA, 19 nt, Artificial Sequence
  Description of Artificial Sequence: Synthetic oligonucleotide
auauuaaucaccugacccc

SEQ ID NO: 409022 - RNA, 19 nt, Artificial Sequence
  Description of Artificial Sequence: Synthetic oligonucleotide
auuguauggcucuaguugc

SEQ ID NO: 409023 - RNA, 19 nt, Artificial Sequence
  Description of Artificial Sequence: Synthetic oligonucleotide
cauauuaaucaccugaccc

SEQ ID NO: 409024 - RNA, 19 nt, Artificial Sequence
  Description of Artificial Sequence: Synthetic oligonucleotide
aaguauucaauuccuauca

SEQ ID NO: 409025 - RNA, 19 nt, Artificial Sequence
  Description of Artificial Sequence: Synthetic oligonucleotide
aauuaguccagguacgaug

SEQ ID NO: 409026 - RNA, 19 nt, Artificial Sequence
  Description of Artificial Sequence: Synthetic oligonucleotide
aggcaaugacacuagaucc

SEQ ID NO: 409027 - RNA, 19 nt, Artificial Sequence
  Description of Artificial Sequence: Synthetic oligonucleotide
agauaucucauauuaauca

SEQ ID NO: 409028 - RNA, 19 nt, Artificial Sequence
  Description of Artificial Sequence: Synthetic oligonucleotide
uaugccuuaacacauggga

SEQ ID NO: 409029 - RNA, 19 nt, Artificial Sequence
  Description of Artificial Sequence: Synthetic oligonucleotide
aaaguucugauguagcaca

SEQ ID NO: 409030 - RNA, 19 nt, Artificial Sequence
  Description of Artificial Sequence: Synthetic oligonucleotide
aacucggugacuuacagaa

SEQ ID NO: 409031 - RNA, 19 nt, Artificial Sequence
  Description of Artificial Sequence: Synthetic oligonucleotide
aguaguucaccccacaaag

SEQ ID NO: 409032 - RNA, 19 nt, Artificial Sequence
  Description of Artificial Sequence: Synthetic oligonucleotide
acaucuauaccucugacga

SEQ ID NO: 409033 - RNA, 19 nt, Artificial Sequence
  Description of Artificial Sequence: Synthetic oligonucleotide
uuauguaccuuuuccagag

SEQ ID NO: 409034 - RNA, 19 nt, Artificial Sequence
  Description of Artificial Sequence: Synthetic oligonucleotide
uaauggaccaucuuacugc

SEQ ID NO: 409035 - RNA, 19 nt, Artificial Sequence
  Description of Artificial Sequence: Synthetic oligonucleotide
uuaugguucagaaaaguaa

SEQ ID NO: 409036 - RNA, 19 nt, Artificial Sequence
  Description of Artificial Sequence: Synthetic oligonucleotide
gauuaaguugauaugguug

SEQ ID NO: 409037 - RNA, 19 nt, Artificial Sequence
  Description of Artificial Sequence: Synthetic oligonucleotide
uuaauggaccaucuuacug

SEQ ID NO: 409038 - RNA, 19 nt, Artificial Sequence
  Description of Artificial Sequence: Synthetic oligonucleotide
ugucuuuccauucaugcga

SEQ ID NO: 409039 - RNA, 19 nt, Artificial Sequence
  Description of Artificial Sequence: Synthetic oligonucleotide
ugacuuacagaaaucaccu

SEQ ID NO: 409040 - RNA, 19 nt, Artificial Sequence
  Description of Artificial Sequence: Synthetic oligonucleotide
auaucgagaauacucucgg

SEQ ID NO: 409041 - RNA, 19 nt, Artificial Sequence
  Description of Artificial Sequence: Synthetic oligonucleotide
uaucucauauuaaucaccu

SEQ ID NO: 409042 - RNA, 19 nt, Artificial Sequence
  Description of Artificial Sequence: Synthetic oligonucleotide
acaggugccauuaauacac

SEQ ID NO: 409043 - RNA, 19 nt, Artificial Sequence
  Description of Artificial Sequence: Synthetic oligonucleotide
ucuuacugcaucauucacc

SEQ ID NO: 409044 - RNA, 19 nt, Artificial Sequence
  Description of Artificial Sequence: Synthetic oligonucleotide
uaugguucagaaaaguaaa

SEQ ID NO: 409045 - RNA, 19 nt, Artificial Sequence
  Description of Artificial Sequence: Synthetic oligonucleotide
aaacaagagacuuucucaa

SEQ ID NO: 409046 - RNA, 19 nt, Artificial Sequence
  Description of Artificial Sequence: Synthetic oligonucleotide
auuaauacacacacuuccc

SEQ ID NO: 409047 - RNA, 19 nt, Artificial Sequence
  Description of Artificial Sequence: Synthetic oligonucleotide
agugauucagugucgggac

SEQ ID NO: 409048 - RNA, 19 nt, Artificial Sequence
  Description of Artificial Sequence: Synthetic oligonucleotide
ucgagaauacucucggagg

SEQ ID NO: 409049 - RNA, 19 nt, Artificial Sequence
  Description of Artificial Sequence: Synthetic oligonucleotide
ucucugacuuccaacaagc

SEQ ID NO: 409050 - RNA, 19 nt, Artificial Sequence
  Description of Artificial Sequence: Synthetic oligonucleotide
ucgggaaugucucugacac

SEQ ID NO: 409051 - RNA, 19 nt, Artificial Sequence
  Description of Artificial Sequence: Synthetic oligonucleotide
aucgagaauacucucggag

SEQ ID NO: 409052 - RNA, 19 nt, Artificial Sequence
  Description of Artificial Sequence: Synthetic oligonucleotide
gacgaguaaagacaaggcc

SEQ ID NO: 409053 - RNA, 19 nt, Artificial Sequence
  Description of Artificial Sequence: Synthetic oligonucleotide
uuaauacacacacuucccu

SEQ ID NO: 409054 - RNA, 19 nt, Artificial Sequence
  Description of Artificial Sequence: Synthetic oligonucleotide
agcuagaguuucuuuagac

SEQ ID NO: 409055 - RNA, 19 nt, Artificial Sequence
  Description of Artificial Sequence: Synthetic oligonucleotide
uuaagaagcaagaggccug

SEQ ID NO: 409056 - RNA, 19 nt, Artificial Sequence
  Description of Artificial Sequence: Synthetic oligonucleotide
auauugccaaccuugucuc

SEQ ID NO: 409057 - RNA, 19 nt, Artificial Sequence
  Description of Artificial Sequence: Synthetic oligonucleotide
gacacuagauccucgagac

SEQ ID NO: 409058 - RNA, 19 nt, Artificial Sequence
  Description of Artificial Sequence: Synthetic oligonucleotide
aacugcaaguuuaauggac

SEQ ID NO: 409059 - RNA, 19 nt, Artificial Sequence
  Description of Artificial Sequence: Synthetic oligonucleotide
guaaggaaggaacaguaug

SEQ ID NO: 409060 - RNA, 19 nt, Artificial Sequence
  Description of Artificial Sequence: Synthetic oligonucleotide
uauuccagauaucucauau

SEQ ID NO: 409061 - RNA, 19 nt, Artificial Sequence
  Description of Artificial Sequence: Synthetic oligonucleotide
aaaaguaauaaagaaccua

SEQ ID NO: 409062 - RNA, 19 nt, Artificial Sequence
  Description of Artificial Sequence: Synthetic oligonucleotide
gauagagcaucaucccucg

SEQ ID NO: 409063 - RNA, 19 nt, Artificial Sequence
  Description of Artificial Sequence: Synthetic oligonucleotide
aguuucuuuagacaccgug

SEQ ID NO: 409064 - RNA, 19 nt, Artificial Sequence
  Description of Artificial Sequence: Synthetic oligonucleotide
ucucaauguucuuauaccu

SEQ ID NO: 409065 - RNA, 19 nt, Artificial Sequence
  Description of Artificial Sequence: Synthetic oligonucleotide
agguacuucacccucaagu

SEQ ID NO: 409066 - RNA, 19 nt, Artificial Sequence
  Description of Artificial Sequence: Synthetic oligonucleotide
gaagccagguguuucauac

SEQ ID NO: 409067 - RNA, 19 nt, Artificial Sequence
  Description of Artificial Sequence: Synthetic oligonucleotide
ccuaauuccauaauaauuc

SEQ ID NO: 409068 - RNA, 19 nt, Artificial Sequence
  Description of Artificial Sequence: Synthetic oligonucleotide
ugauguagcacauccuuga

SEQ ID NO: 409069 - RNA, 19 nt, Artificial Sequence
  Description of Artificial Sequence: Synthetic oligonucleotide
guucuuauaccuaaaagca

SEQ ID NO: 409070 - RNA, 19 nt, Artificial Sequence
  Description of Artificial Sequence: Synthetic oligonucleotide
gauuaaguugcagacagca

SEQ ID NO: 409071 - RNA, 19 nt, Artificial Sequence
  Description of Artificial Sequence: Synthetic oligonucleotide
acugcaaguuuaauggacc

SEQ ID NO: 409072 - RNA, 19 nt, Artificial Sequence
  Description of Artificial Sequence: Synthetic oligonucleotide
ugacgaguaaagacaaggc

SEQ ID NO: 409073 - RNA, 19 nt, Artificial Sequence
  Description of Artificial Sequence: Synthetic oligonucleotide
uucaccuuaucugagaaaa

SEQ ID NO: 409074 - RNA, 19 nt, Artificial Sequence
  Description of Artificial Sequence: Synthetic oligonucleotide
gugucgauguuauauuccg

SEQ ID NO: 409075 - RNA, 19 nt, Artificial Sequence
  Description of Artificial Sequence: Synthetic oligonucleotide
uaguucaccccacaaaggu

SEQ ID NO: 409076 - RNA, 19 nt, Artificial Sequence
  Description of Artificial Sequence: Synthetic oligonucleotide
cugacgaguaaagacaagg

SEQ ID NO: 409077 - RNA, 19 nt, Artificial Sequence
  Description of Artificial Sequence: Synthetic oligonucleotide
ugaccccugauuaaguuga

SEQ ID NO: 409078 - RNA, 19 nt, Artificial Sequence
  Description of Artificial Sequence: Synthetic oligonucleotide
aauggaccaucuuacugca

SEQ ID NO: 409079 - RNA, 19 nt, Artificial Sequence
  Description of Artificial Sequence: Synthetic oligonucleotide
uucacggcaaugucgaaca

SEQ ID NO: 409080 - RNA, 19 nt, Artificial Sequence
  Description of Artificial Sequence: Synthetic oligonucleotide
ugacacuagauccucgaga

SEQ ID NO: 409081 - RNA, 19 nt, Artificial Sequence
  Description of Artificial Sequence: Synthetic oligonucleotide
agauaucgagaauacucuc

SEQ ID NO: 409082 - RNA, 19 nt, Artificial Sequence
  Description of Artificial Sequence: Synthetic oligonucleotide
uagauccucgagacaaugg

SEQ ID NO: 409083 - RNA, 19 nt, Artificial Sequence
  Description of Artificial Sequence: Synthetic oligonucleotide
aacaggugccauuaauaca

SEQ ID NO: 409084 - RNA, 19 nt, Artificial Sequence
  Description of Artificial Sequence: Synthetic oligonucleotide
gaaagaggaacaugguuca

SEQ ID NO: 409085 - RNA, 19 nt, Artificial Sequence
  Description of Artificial Sequence: Synthetic oligonucleotide
cauaauuggaagaaggucu

SEQ ID NO: 409086 - RNA, 19 nt, Artificial Sequence
  Description of Artificial Sequence: Synthetic oligonucleotide
caaguauucaauuccuauc

SEQ ID NO: 409087 - RNA, 19 nt, Artificial Sequence
  Description of Artificial Sequence: Synthetic oligonucleotide
uguuucauacugcaucagu

SEQ ID NO: 409088 - RNA, 19 nt, Artificial Sequence
  Description of Artificial Sequence: Synthetic oligonucleotide
agaauacucucggagguac

SEQ ID NO: 409089 - RNA, 19 nt, Artificial Sequence
  Description of Artificial Sequence: Synthetic oligonucleotide
uucguagccgucuaugaga

SEQ ID NO: 409090 - RNA, 19 nt, Artificial Sequence
  Description of Artificial Sequence: Synthetic oligonucleotide
uucauguguacaaauccuc

SEQ ID NO: 409091 - RNA, 19 nt, Artificial Sequence
  Description of Artificial Sequence: Synthetic oligonucleotide
uucuuauaccuaaaagcaa

SEQ ID NO: 409092 - RNA, 19 nt, Artificial Sequence
  Description of Artificial Sequence: Synthetic oligonucleotide
uaugguuguugaaaccucu

SEQ ID NO: 409093 - RNA, 19 nt, Artificial Sequence
  Description of Artificial Sequence: Synthetic oligonucleotide
uagagcaucaucccucgga

SEQ ID NO: 409094 - RNA, 19 nt, Artificial Sequence
  Description of Artificial Sequence: Synthetic oligonucleotide
ucgugcuggcaucugaucc

SEQ ID NO: 409095 - RNA, 19 nt, Artificial Sequence
  Description of Artificial Sequence: Synthetic oligonucleotide
ccagguacgauguacagcc

SEQ ID NO: 409096 - RNA, 19 nt, Artificial Sequence
  Description of Artificial Sequence: Synthetic oligonucleotide
ccugauuaaguugauaugg

SEQ ID NO: 409097 - RNA, 19 nt, Artificial Sequence
  Description of Artificial Sequence: Synthetic oligonucleotide
aaacugcaaguuuaaugga

SEQ ID NO: 409098 - RNA, 19 nt, Artificial Sequence
  Description of Artificial Sequence: Synthetic oligonucleotide
agaaccuaauuccauaaua

SEQ ID NO: 409099 - RNA, 19 nt, Artificial Sequence
  Description of Artificial Sequence: Synthetic oligonucleotide
caacaggugccauuaauac

SEQ ID NO: 409100 - RNA, 19 nt, Artificial Sequence
  Description of Artificial Sequence: Synthetic oligonucleotide
acgauguacagccugcaug

SEQ ID NO: 409101 - RNA, 19 nt, Artificial Sequence
  Description of Artificial Sequence: Synthetic oligonucleotide
uuuaauggaccaucuuacu

SEQ ID NO: 409102 - RNA, 19 nt, Artificial Sequence
  Description of Artificial Sequence: Synthetic oligonucleotide
uggugaagccgucauauuc

SEQ ID NO: 409103 - RNA, 19 nt, Artificial Sequence
  Description of Artificial Sequence: Synthetic oligonucleotide
ugucguuugcacaagccau

SEQ ID NO: 409104 - RNA, 19 nt, Artificial Sequence
  Description of Artificial Sequence: Synthetic oligonucleotide
cagauaucucauauuaauc

SEQ ID NO: 409105 - RNA, 19 nt, Artificial Sequence
  Description of Artificial Sequence: Synthetic oligonucleotide
ugacugaauaggcaaugac

SEQ ID NO: 409106 - RNA, 19 nt, Artificial Sequence
  Description of Artificial Sequence: Synthetic oligonucleotide
gguucagugauucaguguc

SEQ ID NO: 409107 - RNA, 19 nt, Artificial Sequence
  Description of Artificial Sequence: Synthetic oligonucleotide
uauuaaucaccugaccccu

SEQ ID NO: 409108 - RNA, 19 nt, Artificial Sequence
  Description of Artificial Sequence: Synthetic oligonucleotide
uguuaugguucagaaaagu

SEQ ID NO: 409109 - RNA, 19 nt, Artificial Sequence
  Description of Artificial Sequence: Synthetic oligonucleotide
acgaguaaagacaaggccu

SEQ ID NO: 409110 - RNA, 19 nt, Artificial Sequence
  Description of Artificial Sequence: Synthetic oligonucleotide
aaugucgaacaugucccuc

SEQ ID NO: 409111 - RNA, 19 nt, Artificial Sequence
  Description of Artificial Sequence: Synthetic oligonucleotide
auucaugcgaaccuuugaa

SEQ ID NO: 409112 - RNA, 19 nt, Artificial Sequence
  Description of Artificial Sequence: Synthetic oligonucleotide
ucguucagcauaacuuuug

SEQ ID NO: 409113 - RNA, 19 nt, Artificial Sequence
  Description of Artificial Sequence: Synthetic oligonucleotide
caggucuuuauaaagggca

SEQ ID NO: 409114 - RNA, 19 nt, Artificial Sequence
  Description of Artificial Sequence: Synthetic oligonucleotide
ucaacuaacucuucccuuu

SEQ ID NO: 409115 - RNA, 19 nt, Artificial Sequence
  Description of Artificial Sequence: Synthetic oligonucleotide
ucaugcgaaccuuugaauu

SEQ ID NO: 409116 - RNA, 19 nt, Artificial Sequence
  Description of Artificial Sequence: Synthetic oligonucleotide
agugucgggacauuggcaa

SEQ ID NO: 409117 - RNA, 19 nt, Artificial Sequence
  Description of Artificial Sequence: Synthetic oligonucleotide
uugcaggcaacgcuugaag

SEQ ID NO: 409118 - RNA, 19 nt, Artificial Sequence
  Description of Artificial Sequence: Synthetic oligonucleotide
gucgauguuauauuccguc

SEQ ID NO: 409119 - RNA, 19 nt, Artificial Sequence
  Description of Artificial Sequence: Synthetic oligonucleotide
ugauuaaguugauaugguu

SEQ ID NO: 409120 - RNA, 19 nt, Artificial Sequence
  Description of Artificial Sequence: Synthetic oligonucleotide
uugaaaccucugcugagac

SEQ ID NO: 409121 - RNA, 19 nt, Artificial Sequence
  Description of Artificial Sequence: Synthetic oligonucleotide
aagaaccuaauuccauaau

SEQ ID NO: 409122 - RNA, 19 nt, Artificial Sequence
  Description of Artificial Sequence: Synthetic oligonucleotide
ucggcuuauucuuccaaca

SEQ ID NO: 409123 - RNA, 19 nt, Artificial Sequence
  Description of Artificial Sequence: Synthetic oligonucleotide
aacaagagacuuucucaau

SEQ ID NO: 409124 - RNA, 19 nt, Artificial Sequence
  Description of Artificial Sequence: Synthetic oligonucleotide
agccagguguuucauacug

SEQ ID NO: 409125 - RNA, 19 nt, Artificial Sequence
  Description of Artificial Sequence: Synthetic oligonucleotide
ucuucguagccgucuauga

SEQ ID NO: 409126 - RNA, 19 nt, Artificial Sequence
  Description of Artificial Sequence: Synthetic oligonucleotide
uaucgaggugugcaugcag

SEQ ID NO: 409127 - RNA, 19 nt, Artificial Sequence
  Description of Artificial Sequence: Synthetic oligonucleotide
ugcaugcagauaucgagaa

SEQ ID NO: 409128 - RNA, 19 nt, Artificial Sequence
  Description of Artificial Sequence: Synthetic oligonucleotide
acuaaggauaggauuaagu

SEQ ID NO: 409129 - RNA, 19 nt, Artificial Sequence
  Description of Artificial Sequence: Synthetic oligonucleotide
aucuauaccucugacgagu

SEQ ID NO: 409130 - RNA, 19 nt, Artificial Sequence
  Description of Artificial Sequence: Synthetic oligonucleotide
ugcugucaggucuuuauaa

SEQ ID NO: 409131 - RNA, 19 nt, Artificial Sequence
  Description of Artificial Sequence: Synthetic oligonucleotide
gaauaggcaaugacacuag

SEQ ID NO: 409132 - RNA, 19 nt, Artificial Sequence
  Description of Artificial Sequence: Synthetic oligonucleotide
ucucauguagcuagaguuu

SEQ ID NO: 409133 - RNA, 19 nt, Artificial Sequence
  Description of Artificial Sequence: Synthetic oligonucleotide
aaggugcacaggaaggaag

SEQ ID NO: 409134 - RNA, 19 nt, Artificial Sequence
  Description of Artificial Sequence: Synthetic oligonucleotide
uucauguacuggcacacuu

SEQ ID NO: 409135 - RNA, 19 nt, Artificial Sequence
  Description of Artificial Sequence: Synthetic oligonucleotide
acccucaaguacucugggc

SEQ ID NO: 409136 - RNA, 19 nt, Artificial Sequence
  Description of Artificial Sequence: Synthetic oligonucleotide
cauggcaguaguucacccc

SEQ ID NO: 409137 - RNA, 19 nt, Artificial Sequence
  Description of Artificial Sequence: Synthetic oligonucleotide
aucaccugaccccugauua

SEQ ID NO: 409138 - RNA, 19 nt, Artificial Sequence
  Description of Artificial Sequence: Synthetic oligonucleotide
aacuaaggauaggauuaag

SEQ ID NO: 409139 - RNA, 19 nt, Artificial Sequence
  Description of Artificial Sequence: Synthetic oligonucleotide
aaacccguuuucaugauuu

SEQ ID NO: 409140 - RNA, 19 nt, Artificial Sequence
  Description of Artificial Sequence: Synthetic oligonucleotide
ugaauuaguccagguacga

SEQ ID NO: 409141 - RNA, 19 nt, Artificial Sequence
  Description of Artificial Sequence: Synthetic oligonucleotide
aggaucguucagcauaacu

SEQ ID NO: 409142 - RNA, 19 nt, Artificial Sequence
  Description of Artificial Sequence: Synthetic oligonucleotide
auuaguccagguacgaugu

SEQ ID NO: 409143 - RNA, 19 nt, Artificial Sequence
  Description of Artificial Sequence: Synthetic oligonucleotide
caaaguucugauguagcac

SEQ ID NO: 409144 - RNA, 19 nt, Artificial Sequence
  Description of Artificial Sequence: Synthetic oligonucleotide
ucugacgaguaaagacaag

SEQ ID NO: 409145 - RNA, 19 nt, Artificial Sequence
  Description of Artificial Sequence: Synthetic oligonucleotide
ggugauagagcaucauccc

SEQ ID NO: 409146 - RNA, 19 nt, Artificial Sequence
  Description of Artificial Sequence: Synthetic oligonucleotide
ucguuugcacaagccaugg

SEQ ID NO: 409147 - RNA, 19 nt, Artificial Sequence
  Description of Artificial Sequence: Synthetic oligonucleotide
uacucucggagguacuuca

SEQ ID NO: 409148 - RNA, 19 nt, Artificial Sequence
  Description of Artificial Sequence: Synthetic oligonucleotide
ggcauuaaauuauaaaagu

SEQ ID NO: 409149 - RNA, 19 nt, Artificial Sequence
  Description of Artificial Sequence: Synthetic oligonucleotide
cuguuaugguucagaaaag

SEQ ID NO: 409150 - RNA, 19 nt, Artificial Sequence
  Description of Artificial Sequence: Synthetic oligonucleotide
agguacgauguacagccug

SEQ ID NO: 409151 - RNA, 19 nt, Artificial Sequence
  Description of Artificial Sequence: Synthetic oligonucleotide
uucaugcgaaccuuugaau

SEQ ID NO: 409152 - RNA, 19 nt, Artificial Sequence
  Description of Artificial Sequence: Synthetic oligonucleotide
cuucguagccgucuaugag

SEQ ID NO: 409153 - RNA, 19 nt, Artificial Sequence
  Description of Artificial Sequence: Synthetic oligonucleotide
agucgggaaugucucugac

SEQ ID NO: 409154 - RNA, 19 nt, Artificial Sequence
  Description of Artificial Sequence: Synthetic oligonucleotide
auaugguuguugaaaccuc

SEQ ID NO: 409155 - RNA, 19 nt, Artificial Sequence
  Description of Artificial Sequence: Synthetic oligonucleotide
gcaaugucgaacauguccc

SEQ ID NO: 409156 - RNA, 19 nt, Artificial Sequence
  Description of Artificial Sequence: Synthetic oligonucleotide
ucguagccgucuaugagaa

SEQ ID NO: 409157 - RNA, 19 nt, Artificial Sequence
  Description of Artificial Sequence: Synthetic oligonucleotide
uaggauuaaguugcagaca

SEQ ID NO: 409158 - RNA, 19 nt, Artificial Sequence
  Description of Artificial Sequence: Synthetic oligonucleotide
ucauguagcuagaguuucu

SEQ ID NO: 409159 - RNA, 19 nt, Artificial Sequence
  Description of Artificial Sequence: Synthetic oligonucleotide
aaacugucccauugccaca

SEQ ID NO: 409160 - RNA, 19 nt, Artificial Sequence
  Description of Artificial Sequence: Synthetic oligonucleotide
guaguucaccccacaaagg

SEQ ID NO: 409161 - RNA, 19 nt, Artificial Sequence
  Description of Artificial Sequence: Synthetic oligonucleotide
uguauggcucuaguugcag

SEQ ID NO: 409162 - RNA, 19 nt, Artificial Sequence
  Description of Artificial Sequence: Synthetic oligonucleotide
augcagauaucgagaauac

SEQ ID NO: 409163 - RNA, 19 nt, Artificial Sequence
  Description of Artificial Sequence: Synthetic oligonucleotide
ucggaggagaggaucagua

SEQ ID NO: 409164 - RNA, 19 nt, Artificial Sequence
  Description of Artificial Sequence: Synthetic oligonucleotide
aaaacccguuuucaugauu

SEQ ID NO: 409165 - RNA, 19 nt, Artificial Sequence
  Description of Artificial Sequence: Synthetic oligonucleotide
aguauucaauuccuaucaa

SEQ ID NO: 409166 - RNA, 19 nt, Artificial Sequence
  Description of Artificial Sequence: Synthetic oligonucleotide
caugcagauaucgagaaua

SEQ ID NO: 409167 - RNA, 19 nt, Artificial Sequence
  Description of Artificial Sequence: Synthetic oligonucleotide
aaucaccugaccccugauu

SEQ ID NO: 409168 - RNA, 19 nt, Artificial Sequence
  Description of Artificial Sequence: Synthetic oligonucleotide
cugaccccugauuaaguug

SEQ ID NO: 409169 - RNA, 19 nt, Artificial Sequence
  Description of Artificial Sequence: Synthetic oligonucleotide
ugguagauccgugucgaug

SEQ ID NO: 409170 - RNA, 19 nt, Artificial Sequence
  Description of Artificial Sequence: Synthetic oligonucleotide
auaaagaaccuaauuccau

SEQ ID NO: 409171 - RNA, 19 nt, Artificial Sequence
  Description of Artificial Sequence: Synthetic oligonucleotide
aucagcgauccuucuccac

SEQ ID NO: 409172 - RNA, 19 nt, Artificial Sequence
  Description of Artificial Sequence: Synthetic oligonucleotide
caucccucggagcugcagg

SEQ ID NO: 409173 - RNA, 19 nt, Artificial Sequence
  Description of Artificial Sequence: Synthetic oligonucleotide
ucaccuuaucugagaaaac

SEQ ID NO: 409174 - RNA, 19 nt, Artificial Sequence
  Description of Artificial Sequence: Synthetic oligonucleotide
gacaccgugggguggaguc

SEQ ID NO: 409175 - RNA, 19 nt, Artificial Sequence
  Description of Artificial Sequence: Synthetic oligonucleotide
guagccgucuaugagaaaa

SEQ ID NO: 409176 - RNA, 19 nt, Artificial Sequence
  Description of Artificial Sequence: Synthetic oligonucleotide
cucggcuuauucuuccaac

SEQ ID NO: 409177 - RNA, 19 nt, Artificial Sequence
  Description of Artificial Sequence: Synthetic oligonucleotide
augcgaaccuuugaauuag

SEQ ID NO: 409178 - RNA, 19 nt, Artificial Sequence
  Description of Artificial Sequence: Synthetic oligonucleotide
cgaaccuuugaauuagucc

SEQ ID NO: 409179 - RNA, 19 nt, Artificial Sequence
  Description of Artificial Sequence: Synthetic oligonucleotide
caacgcuugaaguucuuca

SEQ ID NO: 409180 - RNA, 19 nt, Artificial Sequence
  Description of Artificial Sequence: Synthetic oligonucleotide
gguaucgaggugugcaugc

SEQ ID NO: 409181 - RNA, 19 nt, Artificial Sequence
  Description of Artificial Sequence: Synthetic oligonucleotide
acacuucccuuccugguca

SEQ ID NO: 409182 - RNA, 19 nt, Artificial Sequence
  Description of Artificial Sequence: Synthetic oligonucleotide
ugccauuaauacacacacu

SEQ ID NO: 409183 - RNA, 19 nt, Artificial Sequence
  Description of Artificial Sequence: Synthetic oligonucleotide
acagugaacccguccuuug

SEQ ID NO: 409184 - RNA, 19 nt, Artificial Sequence
  Description of Artificial Sequence: Synthetic oligonucleotide
ggugaagccgucauauucc

SEQ ID NO: 409185 - RNA, 19 nt, Artificial Sequence
  Description of Artificial Sequence: Synthetic oligonucleotide
aucucauauuaaucaccug

SEQ ID NO: 409186 - RNA, 19 nt, Artificial Sequence
  Description of Artificial Sequence: Synthetic oligonucleotide
caucuauaccucugacgag

SEQ ID NO: 409187 - RNA, 19 nt, Artificial Sequence
  Description of Artificial Sequence: Synthetic oligonucleotide
cacuucacggcaaugucga

SEQ ID NO: 409188 - RNA, 19 nt, Artificial Sequence
  Description of Artificial Sequence: Synthetic oligonucleotide
ucuauaccucugacgagua

SEQ ID NO: 409189 - RNA, 19 nt, Artificial Sequence
  Description of Artificial Sequence: Synthetic oligonucleotide
cuauuuugcugaaggccuc

SEQ ID NO: 409190 - RNA, 19 nt, Artificial Sequence
  Description of Artificial Sequence: Synthetic oligonucleotide
ggcacacuucauuguaugg

SEQ ID NO: 409191 - RNA, 19 nt, Artificial Sequence
  Description of Artificial Sequence: Synthetic oligonucleotide
gugucguuugcacaagcca

SEQ ID NO: 409192 - RNA, 19 nt, Artificial Sequence
  Description of Artificial Sequence: Synthetic oligonucleotide
auccgugucgauguuauau

SEQ ID NO: 409193 - RNA, 19 nt, Artificial Sequence
  Description of Artificial Sequence: Synthetic oligonucleotide
gagacuucgugcuggcauc

SEQ ID NO: 409194 - RNA, 19 nt, Artificial Sequence
  Description of Artificial Sequence: Synthetic oligonucleotide
cucauguagcuagaguuuc

SEQ ID NO: 409195 - RNA, 19 nt, Artificial Sequence
  Description of Artificial Sequence: Synthetic oligonucleotide
cuggucaaguagcuuuccc

SEQ ID NO: 409196 - RNA, 19 nt, Artificial Sequence
  Description of Artificial Sequence: Synthetic oligonucleotide
gaucguucagcauaacuuu

SEQ ID NO: 409197 - RNA, 19 nt, Artificial Sequence
  Description of Artificial Sequence: Synthetic oligonucleotide
cuucacggcaaugucgaac

SEQ ID NO: 409198 - RNA, 19 nt, Artificial Sequence
  Description of Artificial Sequence: Synthetic oligonucleotide
aagccagguguuucauacu

SEQ ID NO: 409199 - RNA, 19 nt, Artificial Sequence
  Description of Artificial Sequence: Synthetic oligonucleotide
uuagacaccguggggugga

SEQ ID NO: 409200 - RNA, 19 nt, Artificial Sequence
  Description of Artificial Sequence: Synthetic oligonucleotide
cagaggaucguucagcaua

SEQ ID NO: 409201 - RNA, 19 nt, Artificial Sequence
  Description of Artificial Sequence: Synthetic oligonucleotide
guaugccuuaacacauggg

SEQ ID NO: 409202 - RNA, 19 nt, Artificial Sequence
  Description of Artificial Sequence: Synthetic oligonucleotide
auacucucggagguacuuc

SEQ ID NO: 409203 - RNA, 19 nt, Artificial Sequence
  Description of Artificial Sequence: Synthetic oligonucleotide
uccuggucaaguagcuuuc

SEQ ID NO: 409204 - RNA, 19 nt, Artificial Sequence
  Description of Artificial Sequence: Synthetic oligonucleotide
cuagauccucgagacaaug

SEQ ID NO: 409205 - RNA, 19 nt, Artificial Sequence
  Description of Artificial Sequence: Synthetic oligonucleotide
ccacaaugacugaauaggc

SEQ ID NO: 409206 - RNA, 19 nt, Artificial Sequence
  Description of Artificial Sequence: Synthetic oligonucleotide
acuucgugcuggcaucuga

SEQ ID NO: 409207 - RNA, 19 nt, Artificial Sequence
  Description of Artificial Sequence: Synthetic oligonucleotide
guuaugguucagaaaagua

SEQ ID NO: 409208 - RNA, 19 nt, Artificial Sequence
  Description of Artificial Sequence: Synthetic oligonucleotide
aaauccucucauguagcua

SEQ ID NO: 409209 - RNA, 19 nt, Artificial Sequence
  Description of Artificial Sequence: Synthetic oligonucleotide
caacuaacucuucccuuug

SEQ ID NO: 409210 - RNA, 19 nt, Artificial Sequence
  Description of Artificial Sequence: Synthetic oligonucleotide
cuggcugcucuucguagcc

SEQ ID NO: 409211 - RNA, 19 nt, Artificial Sequence
  Description of Artificial Sequence: Synthetic oligonucleotide
auaauuggaagaaggucuu

SEQ ID NO: 409212 - RNA, 19 nt, Artificial Sequence
  Description of Artificial Sequence: Synthetic oligonucleotide
uccgugucgauguuauauu

SEQ ID NO: 409213 - RNA, 19 nt, Artificial Sequence
  Description of Artificial Sequence: Synthetic oligonucleotide
gucuuuauaaagggcaucu

SEQ ID NO: 409214 - RNA, 19 nt, Artificial Sequence
  Description of Artificial Sequence: Synthetic oligonucleotide
uacgauguacagccugcau

SEQ ID NO: 409215 - RNA, 19 nt, Artificial Sequence
  Description of Artificial Sequence: Synthetic oligonucleotide
cucugacgaguaaagacaa

SEQ ID NO: 409216 - RNA, 19 nt, Artificial Sequence
  Description of Artificial Sequence: Synthetic oligonucleotide
guugaaaccucugcugaga

SEQ ID NO: 409217 - RNA, 19 nt, Artificial Sequence
  Description of Artificial Sequence: Synthetic oligonucleotide
augacugaauaggcaauga

SEQ ID NO: 409218 - RNA, 19 nt, Artificial Sequence
  Description of Artificial Sequence: Synthetic oligonucleotide
cugcaaguuuaauggacca

SEQ ID NO: 409219 - RNA, 19 nt, Artificial Sequence
  Description of Artificial Sequence: Synthetic oligonucleotide
caggcaacgcuugaaguuc

SEQ ID NO: 409220 - RNA, 19 nt, Artificial Sequence
  Description of Artificial Sequence: Synthetic oligonucleotide
gguacuucacccucaagua

SEQ ID NO: 409221 - RNA, 19 nt, Artificial Sequence
  Description of Artificial Sequence: Synthetic oligonucleotide
ugaacccguccuuuguuuu

SEQ ID NO: 409222 - RNA, 19 nt, Artificial Sequence
  Description of Artificial Sequence: Synthetic oligonucleotide
caguaugccuuaacacaug

SEQ ID NO: 409223 - RNA, 19 nt, Artificial Sequence
  Description of Artificial Sequence: Synthetic oligonucleotide
agugaacccguccuuuguu

SEQ ID NO: 409224 - RNA, 19 nt, Artificial Sequence
  Description of Artificial Sequence: Synthetic oligonucleotide
ugcaaguuuaauggaccau

SEQ ID NO: 409225 - RNA, 19 nt, Artificial Sequence
  Description of Artificial Sequence: Synthetic oligonucleotide
ugccugguagauccguguc

SEQ ID NO: 409226 - RNA, 19 nt, Artificial Sequence
  Description of Artificial Sequence: Synthetic oligonucleotide
gguagauccgugucgaugu

SEQ ID NO: 409227 - RNA, 19 nt, Artificial Sequence
  Description of Artificial Sequence: Synthetic oligonucleotide
accaucuuacugcaucauu

SEQ ID NO: 409228 - RNA, 19 nt, Artificial Sequence
  Description of Artificial Sequence: Synthetic oligonucleotide
auauuccagauaucucaua

SEQ ID NO: 409229 - RNA, 19 nt, Artificial Sequence
  Description of Artificial Sequence: Synthetic oligonucleotide
ucaccugaccccugauuaa

SEQ ID NO: 409230 - RNA, 19 nt, Artificial Sequence
  Description of Artificial Sequence: Synthetic oligonucleotide
caagagacuuucucaaugu

SEQ ID NO: 409231 - RNA, 19 nt, Artificial Sequence
  Description of Artificial Sequence: Synthetic oligonucleotide
cugugucguuugcacaagc

SEQ ID NO: 409232 - RNA, 19 nt, Artificial Sequence
  Description of Artificial Sequence: Synthetic oligonucleotide
uggaagcuacucaguggcu

SEQ ID NO: 409233 - RNA, 19 nt, Artificial Sequence
  Description of Artificial Sequence: Synthetic oligonucleotide
ugcgaaccuuugaauuagu

SEQ ID NO: 409234 - RNA, 19 nt, Artificial Sequence
  Description of Artificial Sequence: Synthetic oligonucleotide
uucuccacuucacggcaau

SEQ ID NO: 409235 - RNA, 19 nt, Artificial Sequence
  Description of Artificial Sequence: Synthetic oligonucleotide
gucguuugcacaagccaug

SEQ ID NO: 409236 - RNA, 19 nt, Artificial Sequence
  Description of Artificial Sequence: Synthetic oligonucleotide
cucuucguagccgucuaug

SEQ ID NO: 409237 - RNA, 19 nt, Artificial Sequence
  Description of Artificial Sequence: Synthetic oligonucleotide
gguacgauguacagccugc

SEQ ID NO: 409238 - RNA, 19 nt, Artificial Sequence
  Description of Artificial Sequence: Synthetic oligonucleotide
ucgaggugugcaugcagau

SEQ ID NO: 409239 - RNA, 19 nt, Artificial Sequence
  Description of Artificial Sequence: Synthetic oligonucleotide
cugauuaaguugauauggu

SEQ ID NO: 409240 - RNA, 19 nt, Artificial Sequence
  Description of Artificial Sequence: Synthetic oligonucleotide
ugggaggauggaaggccca

SEQ ID NO: 409241 - RNA, 19 nt, Artificial Sequence
  Description of Artificial Sequence: Synthetic oligonucleotide
uaccucugacgaguaaaga

SEQ ID NO: 409242 - RNA, 19 nt, Artificial Sequence
  Description of Artificial Sequence: Synthetic oligonucleotide
cgaguaaagacaaggccug

SEQ ID NO: 409243 - RNA, 19 nt, Artificial Sequence
  Description of Artificial Sequence: Synthetic oligonucleotide
augccuuaacacaugggaa

SEQ ID NO: 409244 - RNA, 19 nt, Artificial Sequence
  Description of Artificial Sequence: Synthetic oligonucleotide
ugucgggacauuggcaaau

SEQ ID NO: 409245 - RNA, 19 nt, Artificial Sequence
  Description of Artificial Sequence: Synthetic oligonucleotide
agauccgugucgauguuau

SEQ ID NO: 409246 - RNA, 19 nt, Artificial Sequence
  Description of Artificial Sequence: Synthetic oligonucleotide
guagcccucaaaguucuga

SEQ ID NO: 409247 - RNA, 19 nt, Artificial Sequence
  Description of Artificial Sequence: Synthetic oligonucleotide
gagucgggaaugucucuga

SEQ ID NO: 409248 - RNA, 19 nt, Artificial Sequence
  Description of Artificial Sequence: Synthetic oligonucleotide
gugauagagcaucaucccu

SEQ ID NO: 409249 - RNA, 19 nt, Artificial Sequence
  Description of Artificial Sequence: Synthetic oligonucleotide
cacggcaaugucgaacaug

SEQ ID NO: 409250 - RNA, 19 nt, Artificial Sequence
  Description of Artificial Sequence: Synthetic oligonucleotide
acacuagauccucgagaca

SEQ ID NO: 409251 - RNA, 19 nt, Artificial Sequence
  Description of Artificial Sequence: Synthetic oligonucleotide
agaggaucguucagcauaa

SEQ ID NO: 409252 - RNA, 19 nt, Artificial Sequence
  Description of Artificial Sequence: Synthetic oligonucleotide
auucggaggagaggaucag

SEQ ID NO: 409253 - RNA, 19 nt, Artificial Sequence
  Description of Artificial Sequence: Synthetic oligonucleotide
gugcaugcagauaucgaga

SEQ ID NO: 409254 - RNA, 19 nt, Artificial Sequence
  Description of Artificial Sequence: Synthetic oligonucleotide
cgugucgauguuauauucc

SEQ ID NO: 409255 - RNA, 19 nt, Artificial Sequence
  Description of Artificial Sequence: Synthetic oligonucleotide
uccccgaauucggaggaga

SEQ ID NO: 409256 - RNA, 19 nt, Artificial Sequence
  Description of Artificial Sequence: Synthetic oligonucleotide
cuuaacacaugggaaccaa

SEQ ID NO: 409257 - RNA, 19 nt, Artificial Sequence
  Description of Artificial Sequence: Synthetic oligonucleotide
ccucaaaguucugauguag

SEQ ID NO: 409258 - RNA, 19 nt, Artificial Sequence
  Description of Artificial Sequence: Synthetic oligonucleotide
guagcacauccuugaugug

SEQ ID NO: 409259 - RNA, 19 nt, Artificial Sequence
  Description of Artificial Sequence: Synthetic oligonucleotide
ugcucuucguagccgucua

SEQ ID NO: 409260 - RNA, 19 nt, Artificial Sequence
  Description of Artificial Sequence: Synthetic oligonucleotide
gccuuaacacaugggaacc

SEQ ID NO: 409261 - RNA, 19 nt, Artificial Sequence
  Description of Artificial Sequence: Synthetic oligonucleotide
uucggaggagaggaucagu

SEQ ID NO: 409262 - RNA, 19 nt, Artificial Sequence
  Description of Artificial Sequence: Synthetic oligonucleotide
gcuauuuugcugaaggccu

SEQ ID NO: 409263 - RNA, 19 nt, Artificial Sequence
  Description of Artificial Sequence: Synthetic oligonucleotide
caauguucuuauaccuaaa

SEQ ID NO: 409264 - RNA, 19 nt, Artificial Sequence
  Description of Artificial Sequence: Synthetic oligonucleotide
ggauaggauuaaguugcag

SEQ ID NO: 409265 - RNA, 19 nt, Artificial Sequence
  Description of Artificial Sequence: Synthetic oligonucleotide
cccuuccuggucaaguagc

SEQ ID NO: 409266 - RNA, 19 nt, Artificial Sequence
  Description of Artificial Sequence: Synthetic oligonucleotide
uuaguccagguacgaugua

SEQ ID NO: 409267 - RNA, 19 nt, Artificial Sequence
  Description of Artificial Sequence: Synthetic oligonucleotide
caucuauuucagcaugaua

SEQ ID NO: 409268 - RNA, 19 nt, Artificial Sequence
  Description of Artificial Sequence: Synthetic oligonucleotide
gccuccccgaauucggagg

SEQ ID NO: 409269 - RNA, 19 nt, Artificial Sequence
  Description of Artificial Sequence: Synthetic oligonucleotide
aaacuagcucacacauaaa

SEQ ID NO: 409270 - RNA, 19 nt, Artificial Sequence
  Description of Artificial Sequence: Synthetic oligonucleotide
gugauucagugucgggaca

SEQ ID NO: 409271 - RNA, 19 nt, Artificial Sequence
  Description of Artificial Sequence: Synthetic oligonucleotide
caaauccucucauguagcu

SEQ ID NO: 409272 - RNA, 19 nt, Artificial Sequence
  Description of Artificial Sequence: Synthetic oligonucleotide
gauguacagccugcaugac

SEQ ID NO: 409273 - RNA, 19 nt, Artificial Sequence
  Description of Artificial Sequence: Synthetic oligonucleotide
ugaagccgucauauuccuu

SEQ ID NO: 409274 - RNA, 19 nt, Artificial Sequence
  Description of Artificial Sequence: Synthetic oligonucleotide
uagauccgugucgauguua

SEQ ID NO: 409275 - RNA, 19 nt, Artificial Sequence
  Description of Artificial Sequence: Synthetic oligonucleotide
cgucauauuccuucccuug

SEQ ID NO: 409276 - RNA, 19 nt, Artificial Sequence
  Description of Artificial Sequence: Synthetic oligonucleotide
gcauggcaguaguucaccc

SEQ ID NO: 409277 - RNA, 19 nt, Artificial Sequence
  Description of Artificial Sequence: Synthetic oligonucleotide
cggucagccacacauauca

SEQ ID NO: 409278 - RNA, 19 nt, Artificial Sequence
  Description of Artificial Sequence: Synthetic oligonucleotide
ggaucguucagcauaacuu

SEQ ID NO: 409279 - RNA, 19 nt, Artificial Sequence
  Description of Artificial Sequence: Synthetic oligonucleotide
ccgaauucggaggagagga

SEQ ID NO: 409280 - RNA, 19 nt, Artificial Sequence
  Description of Artificial Sequence: Synthetic oligonucleotide
cagugucgggacauuggca

SEQ ID NO: 409281 - RNA, 19 nt, Artificial Sequence
  Description of Artificial Sequence: Synthetic oligonucleotide
uucugaccgggcagaggau

SEQ ID NO: 409282 - RNA, 19 nt, Artificial Sequence
  Description of Artificial Sequence: Synthetic oligonucleotide
uuuugcugucaggucuuua

SEQ ID NO: 409283 - RNA, 19 nt, Artificial Sequence
  Description of Artificial Sequence: Synthetic oligonucleotide
gagaauacucucggaggua

SEQ ID NO: 409284 - RNA, 19 nt, Artificial Sequence
  Description of Artificial Sequence: Synthetic oligonucleotide
agaaggucuuccacuuuau

SEQ ID NO: 409285 - RNA, 19 nt, Artificial Sequence
  Description of Artificial Sequence: Synthetic oligonucleotide
aacaagcccuuuggauuau

SEQ ID NO: 409286 - RNA, 19 nt, Artificial Sequence
  Description of Artificial Sequence: Synthetic oligonucleotide
agacuucgugcuggcaucu

SEQ ID NO: 409287 - RNA, 19 nt, Artificial Sequence
  Description of Artificial Sequence: Synthetic oligonucleotide
ggcauggcaguaguucacc

SEQ ID NO: 409288 - RNA, 19 nt, Artificial Sequence
  Description of Artificial Sequence: Synthetic oligonucleotide
ggauuaaguugcagacagc

SEQ ID NO: 409289 - RNA, 19 nt, Artificial Sequence
  Description of Artificial Sequence: Synthetic oligonucleotide
ucacggcaaugucgaacau

SEQ ID NO: 409290 - RNA, 19 nt, Artificial Sequence
  Description of Artificial Sequence: Synthetic oligonucleotide
ccgugucgauguuauauuc

SEQ ID NO: 409291 - RNA, 19 nt, Artificial Sequence
  Description of Artificial Sequence: Synthetic oligonucleotide
gucaacuaacucuucccuu

SEQ ID NO: 409292 - RNA, 19 nt, Artificial Sequence
  Description of Artificial Sequence: Synthetic oligonucleotide
gugaagccgucauauuccu

SEQ ID NO: 409293 - RNA, 19 nt, Artificial Sequence
  Description of Artificial Sequence: Synthetic oligonucleotide
gaauuaguccagguacgau

SEQ ID NO: 409294 - RNA, 19 nt, Artificial Sequence
  Description of Artificial Sequence: Synthetic oligonucleotide
aggauaggauuaaguugca

SEQ ID NO: 409295 - RNA, 19 nt, Artificial Sequence
  Description of Artificial Sequence: Synthetic oligonucleotide
gucgaacaugucccuccac

SEQ ID NO: 409296 - RNA, 19 nt, Artificial Sequence
  Description of Artificial Sequence: Synthetic oligonucleotide
guacgauguacagccugca

SEQ ID NO: 409297 - RNA, 19 nt, Artificial Sequence
  Description of Artificial Sequence: Synthetic oligonucleotide
cccaaacucggugacuuac

SEQ ID NO: 409298 - RNA, 19 nt, Artificial Sequence
  Description of Artificial Sequence: Synthetic oligonucleotide
guaucgaggugugcaugca

SEQ ID NO: 409299 - RNA, 19 nt, Artificial Sequence
  Description of Artificial Sequence: Synthetic oligonucleotide
ggauuauuugcuccaugau

SEQ ID NO: 409300 - RNA, 19 nt, Artificial Sequence
  Description of Artificial Sequence: Synthetic oligonucleotide
cucgagacaauggcauuaa

SEQ ID NO: 409301 - RNA, 19 nt, Artificial Sequence
  Description of Artificial Sequence: Synthetic oligonucleotide
gcaguaguucaccccacaa

SEQ ID NO: 409302 - RNA, 19 nt, Artificial Sequence
  Description of Artificial Sequence: Synthetic oligonucleotide
gacuucgugcuggcaucug

SEQ ID NO: 409303 - RNA, 19 nt, Artificial Sequence
  Description of Artificial Sequence: Synthetic oligonucleotide
cuauaccucugacgaguaa

SEQ ID NO: 409304 - RNA, 19 nt, Artificial Sequence
  Description of Artificial Sequence: Synthetic oligonucleotide
ggccuccccgaauucggag

SEQ ID NO: 409305 - RNA, 19 nt, Artificial Sequence
  Description of Artificial Sequence: Synthetic oligonucleotide
accugaccccugauuaagu

SEQ ID NO: 409306 - RNA, 19 nt, Artificial Sequence
  Description of Artificial Sequence: Synthetic oligonucleotide
aggcaacgcuugaaguucu

SEQ ID NO: 409307 - RNA, 19 nt, Artificial Sequence
  Description of Artificial Sequence: Synthetic oligonucleotide
ccccgaauucggaggagag

SEQ ID NO: 409308 - RNA, 19 nt, Artificial Sequence
  Description of Artificial Sequence: Synthetic oligonucleotide
uagacaccgugggguggag

SEQ ID NO: 409309 - RNA, 19 nt, Artificial Sequence
  Description of Artificial Sequence: Synthetic oligonucleotide
caaugucgaacaugucccu

SEQ ID NO: 409310 - RNA, 19 nt, Artificial Sequence
  Description of Artificial Sequence: Synthetic oligonucleotide
ggcaguaguucaccccaca

SEQ ID NO: 409311 - RNA, 19 nt, Artificial Sequence
  Description of Artificial Sequence: Synthetic oligonucleotide
ggguaucgaggugugcaug

SEQ ID NO: 409312 - RNA, 19 nt, Artificial Sequence
  Description of Artificial Sequence: Synthetic oligonucleotide
cccgaauucggaggagagg

SEQ ID NO: 409313 - RNA, 19 nt, Artificial Sequence
  Description of Artificial Sequence: Synthetic oligonucleotide
gcuguaaggaaggaacagu

SEQ ID NO: 409314 - RNA, 19 nt, Artificial Sequence
  Description of Artificial Sequence: Synthetic oligonucleotide
ugaccgggcagaggaucgu

SEQ ID NO: 409315 - RNA, 19 nt, Artificial Sequence
  Description of Artificial Sequence: Synthetic oligonucleotide
ggagguacuucacccucaa

SEQ ID NO: 409316 - RNA, 19 nt, Artificial Sequence
  Description of Artificial Sequence: Synthetic oligonucleotide
cuucgugcuggcaucugau

SEQ ID NO: 409317 - RNA, 19 nt, Artificial Sequence
  Description of Artificial Sequence: Synthetic oligonucleotide
gcuggucuggaucagcgau

SEQ ID NO: 409318 - RNA, 19 nt, Artificial Sequence
  Description of Artificial Sequence: Synthetic oligonucleotide
gaauacucucggagguacu

SEQ ID NO: 409319 - RNA, 19 nt, Artificial Sequence
  Description of Artificial Sequence: Synthetic oligonucleotide
ccuugaugugagguugcag

SEQ ID NO: 409320 - RNA, 19 nt, Artificial Sequence
  Description of Artificial Sequence: Synthetic oligonucleotide
ccaaacucggugacuuaca

SEQ ID NO: 409321 - RNA, 19 nt, Artificial Sequence
  Description of Artificial Sequence: Synthetic oligonucleotide
ggcuagccuucugaccggg

SEQ ID NO: 409322 - RNA, 19 nt, Artificial Sequence
  Description of Artificial Sequence: Synthetic oligonucleotide
gcgaaccuuugaauuaguc

SEQ ID NO: 409323 - RNA, 19 nt, Artificial Sequence
  Description of Artificial Sequence: Synthetic oligonucleotide
gugucgggacauuggcaaa

SEQ ID NO: 409324 - RNA, 19 nt, Artificial Sequence
  Description of Artificial Sequence: Synthetic oligonucleotide
caucggccuccccgaauuc

SEQ ID NO: 409325 - RNA, 19 nt, Artificial Sequence
  Description of Artificial Sequence: Synthetic oligonucleotide
gugaacccguccuuuguuu

SEQ ID NO: 409326 - RNA, 19 nt, Artificial Sequence
  Description of Artificial Sequence: Synthetic oligonucleotide
gauccgugucgauguuaua

SEQ ID NO: 409327 - RNA, 19 nt, Artificial Sequence
  Description of Artificial Sequence: Synthetic oligonucleotide
gaggaucguucagcauaac

SEQ ID NO: 409328 - RNA, 19 nt, Artificial Sequence
  Description of Artificial Sequence: Synthetic oligonucleotide
caaccuugucuccugugau

SEQ ID NO: 409329 - RNA, 19 nt, Artificial Sequence
  Description of Artificial Sequence: Synthetic oligonucleotide
ccugguagauccgugucga

SEQ ID NO: 409330 - RNA, 19 nt, Artificial Sequence
  Description of Artificial Sequence: Synthetic oligonucleotide
gcaggcaacgcuugaaguu

SEQ ID NO: 409331 - RNA, 19 nt, Artificial Sequence
  Description of Artificial Sequence: Synthetic oligonucleotide
gcaacgcuugaaguucuuc

SEQ ID NO: 409332 - RNA, 19 nt, Artificial Sequence
  Description of Artificial Sequence: Synthetic oligonucleotide
cugccugguagauccgugu

SEQ ID NO: 409333 - RNA, 19 nt, Artificial Sequence
  Description of Artificial Sequence: Synthetic oligonucleotide
accccugauuaaguugaua

SEQ ID NO: 409334 - RNA, 19 nt, Artificial Sequence
  Description of Artificial Sequence: Synthetic oligonucleotide
gaguccguguugagcaccu

SEQ ID NO: 409335 - RNA, 19 nt, Artificial Sequence
  Description of Artificial Sequence: Synthetic oligonucleotide
cuccccgaauucggaggag

SEQ ID NO: 409336 - RNA, 19 nt, Artificial Sequence
  Description of Artificial Sequence: Synthetic oligonucleotide
caagcccuuuggauuauuu

SEQ ID NO: 409337 - RNA, 19 nt, Artificial Sequence
  Description of Artificial Sequence: Synthetic oligonucleotide
ggacauuggcaaauacugu

SEQ ID NO: 409338 - RNA, 19 nt, Artificial Sequence
  Description of Artificial Sequence: Synthetic oligonucleotide
agacaccgugggguggagu

SEQ ID NO: 409339 - RNA, 19 nt, Artificial Sequence
  Description of Artificial Sequence: Synthetic oligonucleotide
cagugaacccguccuuugu

SEQ ID NO: 409340 - RNA, 19 nt, Artificial Sequence
  Description of Artificial Sequence: Synthetic oligonucleotide
acucggugacuuacagaaa

SEQ ID NO: 409341 - RNA, 19 nt, Artificial Sequence
  Description of Artificial Sequence: Synthetic oligonucleotide
caaaacccguuuucaugau

SEQ ID NO: 409342 - RNA, 19 nt, Artificial Sequence
  Description of Artificial Sequence: Synthetic oligonucleotide
ggcuggucuggaucagcga

SEQ ID NO: 409343 - RNA, 19 nt, Artificial Sequence
  Description of Artificial Sequence: Synthetic oligonucleotide
ggcggucagccacacauau

SEQ ID NO: 409344 - RNA, 19 nt, Artificial Sequence
  Description of Artificial Sequence: Synthetic oligonucleotide
cgagaauacucucggaggu

SEQ ID NO: 409345 - RNA, 19 nt, Artificial Sequence
  Description of Artificial Sequence: Synthetic oligonucleotide
acaagcccuuuggauuauu

SEQ ID NO: 409346 - RNA, 19 nt, Artificial Sequence
  Description of Artificial Sequence: Synthetic oligonucleotide
cuggaucagcgauccuucu

SEQ ID NO: 409347 - RNA, 19 nt, Artificial Sequence
  Description of Artificial Sequence: Synthetic oligonucleotide
ccguuuucaugauuucugu

SEQ ID NO: 409348 - RNA, 19 nt, Artificial Sequence
  Description of Artificial Sequence: Synthetic oligonucleotide
ccuccccgaauucggagga

SEQ ID NO: 409349 - RNA, 19 nt, Artificial Sequence
  Description of Artificial Sequence: Synthetic oligonucleotide
cauggcugagccccuucau

SEQ ID NO: 409350 - RNA, 19 nt, Artificial Sequence
  Description of Artificial Sequence: Synthetic oligonucleotide
cugcucuucguagccgucu

SEQ ID NO: 409351 - RNA, 19 nt, Artificial Sequence
  Description of Artificial Sequence: Synthetic oligonucleotide
guagauccgugucgauguu

SEQ ID NO: 409352 - RNA, 19 nt, Artificial Sequence
  Description of Artificial Sequence: Synthetic oligonucleotide
ccucgagacaauggcauua

SEQ ID NO: 409353 - RNA, 19 nt, Artificial Sequence
  Description of Artificial Sequence: Synthetic oligonucleotide
gcaucuauuucagcaugau

SEQ ID NO: 409354 - RNA, 19 nt, Artificial Sequence
  Description of Artificial Sequence: Synthetic oligonucleotide
cagguacgauguacagccu

SEQ ID NO: 409355 - RNA, 19 nt, Artificial Sequence
  Description of Artificial Sequence: Synthetic oligonucleotide
aggcggucagccacacaua

SEQ ID NO: 409356 - RNA, 19 nt, Artificial Sequence
  Description of Artificial Sequence: Synthetic oligonucleotide
gcggucagccacacauauc

SEQ ID NO: 409357 - RNA, 19 nt, Artificial Sequence
  Description of Artificial Sequence: Synthetic oligonucleotide
cugguagauccgugucgau

SEQ ID NO: 409358 - RNA, 19 nt, Artificial Sequence
  Description of Artificial Sequence: Synthetic oligonucleotide
gaccccugauuaaguugau

SEQ ID NO: 409359 - RNA, 19 nt, Artificial Sequence
  Description of Artificial Sequence: Synthetic oligonucleotide
gaccgggcagaggaucguu

SEQ ID NO: 409360 - RNA, 19 nt, Artificial Sequence
  Description of Artificial Sequence: Synthetic oligonucleotide
ccccaaaacccguuuucau

SEQ ID NO: 409361 - RNA, 19 nt, Artificial Sequence
  Description of Artificial Sequence: Synthetic oligonucleotide
gggaaccaacaggugccau

SEQ ID NO: 409362 - RNA, 19 nt, Artificial Sequence
  Description of Artificial Sequence: Synthetic oligonucleotide
cggccuccccgaauucgga

SEQ ID NO: 409363 - RNA, 19 nt, Artificial Sequence
  Description of Artificial Sequence: Synthetic oligonucleotide
ggcaacgcuugaaguucuu

SEQ ID NO: 409364 - RNA, 19 nt, Artificial Sequence
  Description of Artificial Sequence: Synthetic oligonucleotide
cgggaaugucucugacacu

SEQ ID NO: 409365 - RNA, 19 nt, Artificial Sequence
  Description of Artificial Sequence: Synthetic oligonucleotide
gcagggcccuuccgugguu

SEQ ID NO: 409366 - RNA, 19 nt, Artificial Sequence
  Description of Artificial Sequence: Synthetic oligonucleotide
  modified_base (2)..(2): a, c, u, g, unknown or other
anaguguggucacagaggc

SEQ ID NO: 409367 - RNA, 19 nt, Artificial Sequence
  Description of Artificial Sequence: Synthetic oligonucleotide
aauaucucgaacccgugcc

SEQ ID NO: 409368 - RNA, 19 nt, Artificial Sequence
  Description of Artificial Sequence: Synthetic oligonucleotide
ucuacuuuaagccacugca

SEQ ID NO: 409369 - RNA, 19 nt, Artificial Sequence
  Description of Artificial Sequence: Synthetic oligonucleotide
ucugccagcacucauacag

SEQ ID NO: 409370 - RNA, 19 nt, Artificial Sequence
  Description of Artificial Sequence: Synthetic oligonucleotide
auucuuaugccgcagcucc

SEQ ID NO: 409371 - RNA, 19 nt, Artificial Sequence
  Description of Artificial Sequence: Synthetic oligonucleotide
cugauagacuccaagaugg

SEQ ID NO: 409372 - RNA, 19 nt, Artificial Sequence
  Description of Artificial Sequence: Synthetic oligonucleotide
  modified_base (8)..(8): a, c, u, g, unknown or other
aaaggaanaguguggucac

SEQ ID NO: 409373 - RNA, 19 nt, Artificial Sequence
  Description of Artificial Sequence: Synthetic oligonucleotide
agaauagacuccaacagcc

SEQ ID NO: 409374 - RNA, 19 nt, Artificial Sequence
  Description of Artificial Sequence: Synthetic oligonucleotide
  modified_base (4)..(4): a, c, u, g, unknown or other
gaanaguguggucacagag

SEQ ID NO: 409375 - RNA, 19 nt, Artificial Sequence
  Description of Artificial Sequence: Synthetic oligonucleotide
aggacguuucuauacaggc

SEQ ID NO: 409376 - RNA, 19 nt, Artificial Sequence
  Description of Artificial Sequence: Synthetic oligonucleotide
aucgcaauaucucgaaccc

SEQ ID NO: 409377 - RNA, 19 nt, Artificial Sequence
  Description of Artificial Sequence: Synthetic oligonucleotide
uauuauaguccacauuuca

SEQ ID NO: 409378 - RNA, 19 nt, Artificial Sequence
  Description of Artificial Sequence: Synthetic oligonucleotide
uaggaaugcauucagagua

SEQ ID NO: 409379 - RNA, 19 nt, Artificial Sequence
  Description of Artificial Sequence: Synthetic oligonucleotide
gaucgcaauaucucgaacc

SEQ ID NO: 409380 - RNA, 19 nt, Artificial Sequence
  Description of Artificial Sequence: Synthetic oligonucleotide
aaucaaacugcucggguug

SEQ ID NO: 409381 - RNA, 19 nt, Artificial Sequence
  Description of Artificial Sequence: Synthetic oligonucleotide
ugcagugcgaguuucuugg

SEQ ID NO: 409382 - RNA, 19 nt, Artificial Sequence
  Description of Artificial Sequence: Synthetic oligonucleotide
  modified_base (3)..(3): a, c, u, g, unknown or other
aanaguguggucacagagg

SEQ ID NO: 409383 - RNA, 19 nt, Artificial Sequence
  Description of Artificial Sequence: Synthetic oligonucleotide
gaugggaugccucagugcc

SEQ ID NO: 409384 - RNA, 19 nt, Artificial Sequence
  Description of Artificial Sequence: Synthetic oligonucleotide
caauauaccgaccagcaac

SEQ ID NO: 409385 - RNA, 19 nt, Artificial Sequence
  Description of Artificial Sequence: Synthetic oligonucleotide
accuaguaaaggcugggcc

SEQ ID NO: 409386 - RNA, 19 nt, Artificial Sequence
  Description of Artificial Sequence: Synthetic oligonucleotide
agcuagcuuaucuugguac

SEQ ID NO: 409387 - RNA, 19 nt, Artificial Sequence
  Description of Artificial Sequence: Synthetic oligonucleotide
agcuauuggccugugaugc

SEQ ID NO: 409388 - RNA, 19 nt, Artificial Sequence
  Description of Artificial Sequence: Synthetic oligonucleotide
  modified_base (9)..(9): a, c, u, g, unknown or other
gaaaggaanagugugguca

SEQ ID NO: 409389 - RNA, 19 nt, Artificial Sequence
  Description of Artificial Sequence: Synthetic oligonucleotide
aaaagcacggaauccuuca

SEQ ID NO: 409390 - RNA, 19 nt, Artificial Sequence
  Description of Artificial Sequence: Synthetic oligonucleotide
uuuccguagucaaacuggg

SEQ ID NO: 409391 - RNA, 19 nt, Artificial Sequence
  Description of Artificial Sequence: Synthetic oligonucleotide
ucagcuucuacccguaaca

SEQ ID NO: 409392 - RNA, 19 nt, Artificial Sequence
  Description of Artificial Sequence: Synthetic oligonucleotide
uauagacaagccuuaccag

SEQ ID NO: 409393 - RNA, 19 nt, Artificial Sequence
  Description of Artificial Sequence: Synthetic oligonucleotide
aaguaugcagggcaggaga

SEQ ID NO: 409394 - RNA, 19 nt, Artificial Sequence
  Description of Artificial Sequence: Synthetic oligonucleotide
aaagcacggaauccuucac

SEQ ID NO: 409395 - RNA, 19 nt, Artificial Sequence
  Description of Artificial Sequence: Synthetic oligonucleotide
guacaagaugucuuggucc

SEQ ID NO: 409396 - RNA, 19 nt, Artificial Sequence
  Description of Artificial Sequence: Synthetic oligonucleotide
gaguuuagacuguuguucc

SEQ ID NO: 409397 - RNA, 19 nt, Artificial Sequence
  Description of Artificial Sequence: Synthetic oligonucleotide
auagacaagccuuaccagu

SEQ ID NO: 409398 - RNA, 19 nt, Artificial Sequence
  Description of Artificial Sequence: Synthetic oligonucleotide
ucuuuccguagucaaacug

SEQ ID NO: 409399 - RNA, 19 nt, Artificial Sequence
  Description of Artificial Sequence: Synthetic oligonucleotide
ugagcauuucuuuccguag

SEQ ID NO: 409400 - RNA, 19 nt, Artificial Sequence
  Description of Artificial Sequence: Synthetic oligonucleotide
ucgagcuagcuuaucuugg

SEQ ID NO: 409401 - RNA, 19 nt, Artificial Sequence
  Description of Artificial Sequence: Synthetic oligonucleotide
uguugcgaucgcaauaucu

SEQ ID NO: 409402 - RNA, 19 nt, Artificial Sequence
  Description of Artificial Sequence: Synthetic oligonucleotide
aauauaccgaccagcaaca

SEQ ID NO: 409403 - RNA, 19 nt, Artificial Sequence
  Description of Artificial Sequence: Synthetic oligonucleotide
uuaucuugguacugggccc

SEQ ID NO: 409404 - RNA, 19 nt, Artificial Sequence
  Description of Artificial Sequence: Synthetic oligonucleotide
gagucaaggacaugguggc

SEQ ID NO: 409405 - RNA, 19 nt, Artificial Sequence
  Description of Artificial Sequence: Synthetic oligonucleotide
uugcgaucgcaauaucucg

SEQ ID NO: 409406 - RNA, 19 nt, Artificial Sequence
  Description of Artificial Sequence: Synthetic oligonucleotide
caucucauucuuaugccgc

SEQ ID NO: 409407 - RNA, 19 nt, Artificial Sequence
  Description of Artificial Sequence: Synthetic oligonucleotide
uccgucuuuccucagcuug

SEQ ID NO: 409408 - RNA, 19 nt, Artificial Sequence
  Description of Artificial Sequence: Synthetic oligonucleotide
cagaauagacuccaacagc

SEQ ID NO: 409409 - RNA, 19 nt, Artificial Sequence
  Description of Artificial Sequence: Synthetic oligonucleotide
uauaccgaccagcaacagc

SEQ ID NO: 409410 - RNA, 19 nt, Artificial Sequence
  Description of Artificial Sequence: Synthetic oligonucleotide
aguggcucgacggauggcc

SEQ ID NO: 409411 - RNA, 19 nt, Artificial Sequence
  Description of Artificial Sequence: Synthetic oligonucleotide
uggucaacaagagaagcgc

SEQ ID NO: 409412 - RNA, 19 nt, Artificial Sequence
  Description of Artificial Sequence: Synthetic oligonucleotide
ucaccaaacaaggugccag

SEQ ID NO: 409413 - RNA, 19 nt, Artificial Sequence
  Description of Artificial Sequence: Synthetic oligonucleotide
uguagucuggucccugcag

SEQ ID NO: 409414 - RNA, 19 nt, Artificial Sequence
  Description of Artificial Sequence: Synthetic oligonucleotide
acuuacuacuaugcugucc

SEQ ID NO: 409415 - RNA, 19 nt, Artificial Sequence
  Description of Artificial Sequence: Synthetic oligonucleotide
uaaaggcugggccaauucu

SEQ ID NO: 409416 - RNA, 19 nt, Artificial Sequence
  Description of Artificial Sequence: Synthetic oligonucleotide
aaggcauugacaggagaag

SEQ ID NO: 409417 - RNA, 19 nt, Artificial Sequence
  Description of Artificial Sequence: Synthetic oligonucleotide
auaccgaccagcaacagca

SEQ ID NO: 409418 - RNA, 19 nt, Artificial Sequence
  Description of Artificial Sequence: Synthetic oligonucleotide
uaugccauggccugccaug

SEQ ID NO: 409419 - RNA, 19 nt, Artificial Sequence
  Description of Artificial Sequence: Synthetic oligonucleotide
aguagggucaauccagcca

SEQ ID NO: 409420 - RNA, 19 nt, Artificial Sequence
  Description of Artificial Sequence: Synthetic oligonucleotide
uccugauagacuccaagau

SEQ ID NO: 409421 - RNA, 19 nt, Artificial Sequence
  Description of Artificial Sequence: Synthetic oligonucleotide
uacaucaggacguuucuau

SEQ ID NO: 409422 - RNA, 19 nt, Artificial Sequence
  Description of Artificial Sequence: Synthetic oligonucleotide
agccuuaccaguguacugg

SEQ ID NO: 409423 - RNA, 19 nt, Artificial Sequence
  Description of Artificial Sequence: Synthetic oligonucleotide
agaagcgcgcccucggugg

SEQ ID NO: 409424 - RNA, 19 nt, Artificial Sequence
  Description of Artificial Sequence: Synthetic oligonucleotide
uuucuuguugcgaucgcaa

SEQ ID NO: 409425 - RNA, 19 nt, Artificial Sequence
  Description of Artificial Sequence: Synthetic oligonucleotide
caucaggacguuucuauac

SEQ ID NO: 409426 - RNA, 19 nt, Artificial Sequence
  Description of Artificial Sequence: Synthetic oligonucleotide
guagucuggucccugcagg

SEQ ID NO: 409427 - RNA, 19 nt, Artificial Sequence
  Description of Artificial Sequence: Synthetic oligonucleotide
ucuggcggugcucagcagc

SEQ ID NO: 409428 - RNA, 19 nt, Artificial Sequence
  Description of Artificial Sequence: Synthetic oligonucleotide
agaaauguccaggaggccu

SEQ ID NO: 409429 - RNA, 19 nt, Artificial Sequence
  Description of Artificial Sequence: Synthetic oligonucleotide
gaacuuacuacuaugcugu

SEQ ID NO: 409430 - RNA, 19 nt, Artificial Sequence
  Description of Artificial Sequence: Synthetic oligonucleotide
aacuuacuacuaugcuguc

SEQ ID NO: 409431 - RNA, 19 nt, Artificial Sequence
  Description of Artificial Sequence: Synthetic oligonucleotide
agcacggaauccuucacca

SEQ ID NO: 409432 - RNA, 19 nt, Artificial Sequence
  Description of Artificial Sequence: Synthetic oligonucleotide
aacaagagaagcgcgcccu

SEQ ID NO: 409433 - RNA, 19 nt, Artificial Sequence
  Description of Artificial Sequence: Synthetic oligonucleotide
ugguccgaacucaagugug

SEQ ID NO: 409434 - RNA, 19 nt, Artificial Sequence
  Description of Artificial Sequence: Synthetic oligonucleotide
  modified_base (6)..(6): a, c, u, g, unknown or other
aggaanaguguggucacag

SEQ ID NO: 409435 - RNA, 19 nt, Artificial Sequence
  Description of Artificial Sequence: Synthetic oligonucleotide
cagucgaagaccuugugca

SEQ ID NO: 409436 - RNA, 19 nt, Artificial Sequence
  Description of Artificial Sequence: Synthetic oligonucleotide
caauaucucgaacccgugc

SEQ ID NO: 409437 - RNA, 19 nt, Artificial Sequence
  Description of Artificial Sequence: Synthetic oligonucleotide
ugguuacuggccaggacca

SEQ ID NO: 409438 - RNA, 19 nt, Artificial Sequence
  Description of Artificial Sequence: Synthetic oligonucleotide
uugguacugggcccuagcc

SEQ ID NO: 409439 - RNA, 19 nt, Artificial Sequence
  Description of Artificial Sequence: Synthetic oligonucleotide
aagccuuaccaguguacug

SEQ ID NO: 409440 - RNA, 19 nt, Artificial Sequence
  Description of Artificial Sequence: Synthetic oligonucleotide
ugcgaucgcaauaucucga

SEQ ID NO: 409441 - RNA, 19 nt, Artificial Sequence
  Description of Artificial Sequence: Synthetic oligonucleotide
aucucgaacccgugccucc

SEQ ID NO: 409442 - RNA, 19 nt, Artificial Sequence
  Description of Artificial Sequence: Synthetic oligonucleotide
gacuaggaggugugggagg

SEQ ID NO: 409443 - RNA, 19 nt, Artificial Sequence
  Description of Artificial Sequence: Synthetic oligonucleotide
gacucgggcauccaucaug

SEQ ID NO: 409444 - RNA, 19 nt, Artificial Sequence
  Description of Artificial Sequence: Synthetic oligonucleotide
caggacguuucuauacagg

SEQ ID NO: 409445 - RNA, 19 nt, Artificial Sequence
  Description of Artificial Sequence: Synthetic oligonucleotide
ucaauauaccgaccagcaa

SEQ ID NO: 409446 - RNA, 19 nt, Artificial Sequence
  Description of Artificial Sequence: Synthetic oligonucleotide
uuaugccgcagcuccaucu

SEQ ID NO: 409447 - RNA, 19 nt, Artificial Sequence
  Description of Artificial Sequence: Synthetic oligonucleotide
uugauggcccaaucaaacu

SEQ ID NO: 409448 - RNA, 19 nt, Artificial Sequence
  Description of Artificial Sequence: Synthetic oligonucleotide
acccguaacaucucauucu

SEQ ID NO: 409449 - RNA, 19 nt, Artificial Sequence
  Description of Artificial Sequence: Synthetic oligonucleotide
uagcuauuggccugugaug

SEQ ID NO: 409450 - RNA, 19 nt, Artificial Sequence
  Description of Artificial Sequence: Synthetic oligonucleotide
cuuacuacuaugcuguccu

SEQ ID NO: 409451 - RNA, 19 nt, Artificial Sequence
  Description of Artificial Sequence: Synthetic oligonucleotide
agucaggcguacaagaugu

SEQ ID NO: 409452 - RNA, 19 nt, Artificial Sequence
  Description of Artificial Sequence: Synthetic oligonucleotide
ucggguugguuacuggcca

SEQ ID NO: 409453 - RNA, 19 nt, Artificial Sequence
  Description of Artificial Sequence: Synthetic oligonucleotide
uggcagaauagacuccaac

SEQ ID NO: 409454 - RNA, 19 nt, Artificial Sequence
  Description of Artificial Sequence: Synthetic oligonucleotide
cugcgcaaggcucagcgcc

SEQ ID NO: 409455 - RNA, 19 nt, Artificial Sequence
  Description of Artificial Sequence: Synthetic oligonucleotide
cuugcacacggauuuguuc

SEQ ID NO: 409456 - RNA, 19 nt, Artificial Sequence
  Description of Artificial Sequence: Synthetic oligonucleotide
uaguccaugccugaaugca

SEQ ID NO: 409457 - RNA, 19 nt, Artificial Sequence
  Description of Artificial Sequence: Synthetic oligonucleotide
cauagcgcugucgagcuag

SEQ ID NO: 409458 - RNA, 19 nt, Artificial Sequence
  Description of Artificial Sequence: Synthetic oligonucleotide
agugcgaguuucuuggcaa

SEQ ID NO: 409459 - RNA, 19 nt, Artificial Sequence
  Description of Artificial Sequence: Synthetic oligonucleotide
ggaagucucccucaccagg

SEQ ID NO: 409460 - RNA, 19 nt, Artificial Sequence
  Description of Artificial Sequence: Synthetic oligonucleotide
gaggcgaaucuguucccgg

SEQ ID NO: 409461 - RNA, 19 nt, Artificial Sequence
  Description of Artificial Sequence: Synthetic oligonucleotide
ucgacggauggccucuugc

SEQ ID NO: 409462 - RNA, 19 nt, Artificial Sequence
  Description of Artificial Sequence: Synthetic oligonucleotide
ugaggcgaaucuguucccg

SEQ ID NO: 409463 - RNA, 19 nt, Artificial Sequence
  Description of Artificial Sequence: Synthetic oligonucleotide
ucgccugcugaccuggaug

SEQ ID NO: 409464 - RNA, 19 nt, Artificial Sequence
  Description of Artificial Sequence: Synthetic oligonucleotide
uugugcauggcggucacac

SEQ ID NO: 409465 - RNA, 19 nt, Artificial Sequence
  Description of Artificial Sequence: Synthetic oligonucleotide
gaacucaagugugacucgc

SEQ ID NO: 409466 - RNA, 19 nt, Artificial Sequence
  Description of Artificial Sequence: Synthetic oligonucleotide
acucaagugugacucgcca

SEQ ID NO: 409467 - RNA, 19 nt, Artificial Sequence
  Description of Artificial Sequence: Synthetic oligonucleotide
ucgacucgggcauccauca

SEQ ID NO: 409468 - RNA, 19 nt, Artificial Sequence
  Description of Artificial Sequence: Synthetic oligonucleotide
guugcgaucgcaauaucuc

SEQ ID NO: 409469 - RNA, 19 nt, Artificial Sequence
  Description of Artificial Sequence: Synthetic oligonucleotide
cuugaguuuagacuguugu

SEQ ID NO: 409470 - RNA, 19 nt, Artificial Sequence
  Description of Artificial Sequence: Synthetic oligonucleotide
accagauccacucuaccua

SEQ ID NO: 409471 - RNA, 19 nt, Artificial Sequence
  Description of Artificial Sequence: Synthetic oligonucleotide
uugcucuacagcagcuuca

SEQ ID NO: 409472 - RNA, 19 nt, Artificial Sequence
  Description of Artificial Sequence: Synthetic oligonucleotide
acggaauccuucaccaaac

SEQ ID NO: 409473 - RNA, 19 nt, Artificial Sequence
  Description of Artificial Sequence: Synthetic oligonucleotide
ugauagacuccaagauggu

SEQ ID NO: 409474 - RNA, 19 nt, Artificial Sequence
  Description of Artificial Sequence: Synthetic oligonucleotide
aggcguacaagaugucuug

SEQ ID NO: 409475 - RNA, 19 nt, Artificial Sequence
  Description of Artificial Sequence: Synthetic oligonucleotide
cagcuguccugauagacuc

SEQ ID NO: 409476 - RNA, 19 nt, Artificial Sequence
  Description of Artificial Sequence: Synthetic oligonucleotide
guaguccaugccugaaugc

SEQ ID NO: 409477 - RNA, 19 nt, Artificial Sequence
  Description of Artificial Sequence: Synthetic oligonucleotide
agcacggagaugcgggaag

SEQ ID NO: 409478 - RNA, 19 nt, Artificial Sequence
  Description of Artificial Sequence: Synthetic oligonucleotide
ucaggcguacaagaugucu

SEQ ID NO: 409479 - RNA, 19 nt, Artificial Sequence
  Description of Artificial Sequence: Synthetic oligonucleotide
guugcucgcuuccugagga

SEQ ID NO: 409480 - RNA, 19 nt, Artificial Sequence
  Description of Artificial Sequence: Synthetic oligonucleotide
ucgcaauaucucgaacccg

SEQ ID NO: 409481 - RNA, 19 nt, Artificial Sequence
  Description of Artificial Sequence: Synthetic oligonucleotide
gacguuucuauacaggcuu

SEQ ID NO: 409482 - RNA, 19 nt, Artificial Sequence
  Description of Artificial Sequence: Synthetic oligonucleotide
auacuugucaaaauacauu

SEQ ID NO: 409483 - RNA, 19 nt, Artificial Sequence
  Description of Artificial Sequence: Synthetic oligonucleotide
guugcucuacagcagcuuc

SEQ ID NO: 409484 - RNA, 19 nt, Artificial Sequence
  Description of Artificial Sequence: Synthetic oligonucleotide
auaucucgaacccgugccu

SEQ ID NO: 409485 - RNA, 19 nt, Artificial Sequence
  Description of Artificial Sequence: Synthetic oligonucleotide
uacuacuaugcuguccugu

SEQ ID NO: 409486 - RNA, 19 nt, Artificial Sequence
  Description of Artificial Sequence: Synthetic oligonucleotide
acaagagaagcgcgcccuc

SEQ ID NO: 409487 - RNA, 19 nt, Artificial Sequence
  Description of Artificial Sequence: Synthetic oligonucleotide
aaacaaggugccagcuguc

SEQ ID NO: 409488 - RNA, 19 nt, Artificial Sequence
  Description of Artificial Sequence: Synthetic oligonucleotide
gucucucuacuuuaagcca

SEQ ID NO: 409489 - RNA, 19 nt, Artificial Sequence
  Description of Artificial Sequence: Synthetic oligonucleotide
uuaccaguguacuggggua

SEQ ID NO: 409490 - RNA, 19 nt, Artificial Sequence
  Description of Artificial Sequence: Synthetic oligonucleotide
agaaguaugcagggcagga

SEQ ID NO: 409491 - RNA, 19 nt, Artificial Sequence
  Description of Artificial Sequence: Synthetic oligonucleotide
ugccugaaugcagugcgag

SEQ ID NO: 409492 - RNA, 19 nt, Artificial Sequence
  Description of Artificial Sequence: Synthetic oligonucleotide
uuccguagucaaacugggc

SEQ ID NO: 409493 - RNA, 19 nt, Artificial Sequence
  Description of Artificial Sequence: Synthetic oligonucleotide
  modified_base (7)..(7): a, c, u, g, unknown or other
aaggaanaguguggucaca

SEQ ID NO: 409494 - RNA, 19 nt, Artificial Sequence
  Description of Artificial Sequence: Synthetic oligonucleotide
ucgucaaugcggucauuga

SEQ ID NO: 409495 - RNA, 19 nt, Artificial Sequence
  Description of Artificial Sequence: Synthetic oligonucleotide
ucgaacccgugccuccagg

SEQ ID NO: 409496 - RNA, 19 nt, Artificial Sequence
  Description of Artificial Sequence: Synthetic oligonucleotide
cucgucaaugcggucauug

SEQ ID NO: 409497 - RNA, 19 nt, Artificial Sequence
  Description of Artificial Sequence: Synthetic oligonucleotide
cuauuggccugugaugcag

SEQ ID NO: 409498 - RNA, 19 nt, Artificial Sequence
  Description of Artificial Sequence: Synthetic oligonucleotide
caacaagagaagcgcgccc

SEQ ID NO: 409499 - RNA, 19 nt, Artificial Sequence
  Description of Artificial Sequence: Synthetic oligonucleotide
ggugguccgaacucaagug

SEQ ID NO: 409500 - RNA, 19 nt, Artificial Sequence
  Description of Artificial Sequence: Synthetic oligonucleotide
uguccuguguaggaaugca

SEQ ID NO: 409501 - RNA, 19 nt, Artificial Sequence
  Description of Artificial Sequence: Synthetic oligonucleotide
ucccaagcgggccucaaua

SEQ ID NO: 409502 - RNA, 19 nt, Artificial Sequence
  Description of Artificial Sequence: Synthetic oligonucleotide
ucgggauugggucucucua

SEQ ID NO: 409503 - RNA, 19 nt, Artificial Sequence
  Description of Artificial Sequence: Synthetic oligonucleotide
uucuuuccguagucaaacu

SEQ ID NO: 409504 - RNA, 19 nt, Artificial Sequence
  Description of Artificial Sequence: Synthetic oligonucleotide
ugucgagcuagcuuaucuu

SEQ ID NO: 409505 - RNA, 19 nt, Artificial Sequence
  Description of Artificial Sequence: Synthetic oligonucleotide
augcagugcgaguuucuug

SEQ ID NO: 409506 - RNA, 19 nt, Artificial Sequence
  Description of Artificial Sequence: Synthetic oligonucleotide
guaaaggcugggccaauuc

SEQ ID NO: 409507 - RNA, 19 nt, Artificial Sequence
  Description of Artificial Sequence: Synthetic oligonucleotide
caaacaaggugccagcugu

SEQ ID NO: 409508 - RNA, 19 nt, Artificial Sequence
  Description of Artificial Sequence: Synthetic oligonucleotide
cuuggcagaauagacucca

SEQ ID NO: 409509 - RNA, 19 nt, Artificial Sequence
  Description of Artificial Sequence: Synthetic oligonucleotide
ugucgggucaaaguugcuc

SEQ ID NO: 409510 - RNA, 19 nt, Artificial Sequence
  Description of Artificial Sequence: Synthetic oligonucleotide
agcaccagauccacucuac

SEQ ID NO: 409511 - RNA, 19 nt, Artificial Sequence
  Description of Artificial Sequence: Synthetic oligonucleotide
cuagcuuaucuugguacug

SEQ ID NO: 409512 - RNA, 19 nt, Artificial Sequence
  Description of Artificial Sequence: Synthetic oligonucleotide
uaccuaguaaaggcugggc

SEQ ID NO: 409513 - RNA, 19 nt, Artificial Sequence
  Description of Artificial Sequence: Synthetic oligonucleotide
cacgcuccaggccugucgg

SEQ ID NO: 409514 - RNA, 19 nt, Artificial Sequence
  Description of Artificial Sequence: Synthetic oligonucleotide
uccaugccugaaugcagug

SEQ ID NO: 409515 - RNA, 19 nt, Artificial Sequence
  Description of Artificial Sequence: Synthetic oligonucleotide
acacggauuuguucacucu

SEQ ID NO: 409516 - RNA, 19 nt, Artificial Sequence
  Description of Artificial Sequence: Synthetic oligonucleotide
cuggcggugcucagcagcc

SEQ ID NO: 409517 - RNA, 19 nt, Artificial Sequence
  Description of Artificial Sequence: Synthetic oligonucleotide
uuacuacuaugcuguccug

SEQ ID NO: 409518 - RNA, 19 nt, Artificial Sequence
  Description of Artificial Sequence: Synthetic oligonucleotide
uucuuaugccgcagcucca

SEQ ID NO: 409519 - RNA, 19 nt, Artificial Sequence
  Description of Artificial Sequence: Synthetic oligonucleotide
ccauacaucaggacguuuc

SEQ ID NO: 409520 - RNA, 19 nt, Artificial Sequence
  Description of Artificial Sequence: Synthetic oligonucleotide
agaccuugugcauggcggu

SEQ ID NO: 409521 - RNA, 19 nt, Artificial Sequence
  Description of Artificial Sequence: Synthetic oligonucleotide
caguagggucaauccagcc

SEQ ID NO: 409522 - RNA, 19 nt, Artificial Sequence
  Description of Artificial Sequence: Synthetic oligonucleotide
caagagaagcgcgcccucg

SEQ ID NO: 409523 - RNA, 19 nt, Artificial Sequence
  Description of Artificial Sequence: Synthetic oligonucleotide
ucggugguccgaacucaag

SEQ ID NO: 409524 - RNA, 19 nt, Artificial Sequence
  Description of Artificial Sequence: Synthetic oligonucleotide
cucgacucgggcauccauc

SEQ ID NO: 409525 - RNA, 19 nt, Artificial Sequence
  Description of Artificial Sequence: Synthetic oligonucleotide
ucugcgcaaggcucagcgc

SEQ ID NO: 409526 - RNA, 19 nt, Artificial Sequence
  Description of Artificial Sequence: Synthetic oligonucleotide
acucuaccuaguaaaggcu

SEQ ID NO: 409527 - RNA, 19 nt, Artificial Sequence
  Description of Artificial Sequence: Synthetic oligonucleotide
guccucauagcgcugucga

SEQ ID NO: 409528 - RNA, 19 nt, Artificial Sequence
  Description of Artificial Sequence: Synthetic oligonucleotide
cagaaguaugcagggcagg

SEQ ID NO: 409529 - RNA, 19 nt, Artificial Sequence
  Description of Artificial Sequence: Synthetic oligonucleotide
aggccugucgggucaaagu

SEQ ID NO: 409530 - RNA, 19 nt, Artificial Sequence
  Description of Artificial Sequence: Synthetic oligonucleotide
cuguggccggcuuaaggac

SEQ ID NO: 409531 - RNA, 19 nt, Artificial Sequence
  Description of Artificial Sequence: Synthetic oligonucleotide
ccugucgggucaaaguugc

SEQ ID NO: 409532 - RNA, 19 nt, Artificial Sequence
  Description of Artificial Sequence: Synthetic oligonucleotide
aguccaugccugaaugcag

SEQ ID NO: 409533 - RNA, 19 nt, Artificial Sequence
  Description of Artificial Sequence: Synthetic oligonucleotide
uacugggguacaggaaggc

SEQ ID NO: 409534 - RNA, 19 nt, Artificial Sequence
  Description of Artificial Sequence: Synthetic oligonucleotide
guugguuacuggccaggac

SEQ ID NO: 409535 - RNA, 19 nt, Artificial Sequence
  Description of Artificial Sequence: Synthetic oligonucleotide
ucgggucaaaguugcucca

SEQ ID NO: 409536 - RNA, 19 nt, Artificial Sequence
  Description of Artificial Sequence: Synthetic oligonucleotide
uaccgaccagcaacagcag

SEQ ID NO: 409537 - RNA, 19 nt, Artificial Sequence
  Description of Artificial Sequence: Synthetic oligonucleotide
uaccaguguacugggguac

SEQ ID NO: 409538 - RNA, 19 nt, Artificial Sequence
  Description of Artificial Sequence: Synthetic oligonucleotide
cauucuuaugccgcagcuc

SEQ ID NO: 409539 - RNA, 19 nt, Artificial Sequence
  Description of Artificial Sequence: Synthetic oligonucleotide
uccuggggucggcugacca

SEQ ID NO: 409540 - RNA, 19 nt, Artificial Sequence
  Description of Artificial Sequence: Synthetic oligonucleotide
ucggcuggugcuugcccag

SEQ ID NO: 409541 - RNA, 19 nt, Artificial Sequence
  Description of Artificial Sequence: Synthetic oligonucleotide
ugcgggaagucucccucac

SEQ ID NO: 409542 - RNA, 19 nt, Artificial Sequence
  Description of Artificial Sequence: Synthetic oligonucleotide
agucgaagaccuugugcau

SEQ ID NO: 409543 - RNA, 19 nt, Artificial Sequence
  Description of Artificial Sequence: Synthetic oligonucleotide
agaugcgggaagucucccu

SEQ ID NO: 409544 - RNA, 19 nt, Artificial Sequence
  Description of Artificial Sequence: Synthetic oligonucleotide
cugagcauuucuuuccgua

SEQ ID NO: 409545 - RNA, 19 nt, Artificial Sequence
  Description of Artificial Sequence: Synthetic oligonucleotide
ucuuaugccgcagcuccau

SEQ ID NO: 409546 - RNA, 19 nt, Artificial Sequence
  Description of Artificial Sequence: Synthetic oligonucleotide
agcgcugucgagcuagcuu

SEQ ID NO: 409547 - RNA, 19 nt, Artificial Sequence
  Description of Artificial Sequence: Synthetic oligonucleotide
aggcgaaucuguucccgga

SEQ ID NO: 409548 - RNA, 19 nt, Artificial Sequence
  Description of Artificial Sequence: Synthetic oligonucleotide
ugcgaguuucuuggcaaac

SEQ ID NO: 409549 - RNA, 19 nt, Artificial Sequence
  Description of Artificial Sequence: Synthetic oligonucleotide
gagcauuucuuuccguagu

SEQ ID NO: 409550 - RNA, 19 nt, Artificial Sequence
  Description of Artificial Sequence: Synthetic oligonucleotide
uaucucgaacccgugccuc

SEQ ID NO: 409551 - RNA, 19 nt, Artificial Sequence
  Description of Artificial Sequence: Synthetic oligonucleotide
ccgaacucaagugugacuc

SEQ ID NO: 409552 - RNA, 19 nt, Artificial Sequence
  Description of Artificial Sequence: Synthetic oligonucleotide
ugggcgauugccggucucc

SEQ ID NO: 409553 - RNA, 19 nt, Artificial Sequence
  Description of Artificial Sequence: Synthetic oligonucleotide
acggagaugcgggaagucu

SEQ ID NO: 409554 - RNA, 19 nt, Artificial Sequence
  Description of Artificial Sequence: Synthetic oligonucleotide
auauaccgaccagcaacag

SEQ ID NO: 409555 - RNA, 19 nt, Artificial Sequence
  Description of Artificial Sequence: Synthetic oligonucleotide
ggaugggaugccucagugc

SEQ ID NO: 409556 - RNA, 19 nt, Artificial Sequence
  Description of Artificial Sequence: Synthetic oligonucleotide
agcuguccugauagacucc

SEQ ID NO: 409557 - RNA, 19 nt, Artificial Sequence
  Description of Artificial Sequence: Synthetic oligonucleotide
ucucgcuccucccgcugug

SEQ ID NO: 409558 - RNA, 19 nt, Artificial Sequence
  Description of Artificial Sequence: Synthetic oligonucleotide
uggcggucacacccucccg

SEQ ID NO: 409559 - RNA, 19 nt, Artificial Sequence
  Description of Artificial Sequence: Synthetic oligonucleotide
aacucgcgggccgcuuugg

SEQ ID NO: 409560 - RNA, 19 nt, Artificial Sequence
  Description of Artificial Sequence: Synthetic oligonucleotide
cuguccuguguaggaaugc

SEQ ID NO: 409561 - RNA, 19 nt, Artificial Sequence
  Description of Artificial Sequence: Synthetic oligonucleotide
gcgauugccggucuccagc

SEQ ID NO: 409562 - RNA, 19 nt, Artificial Sequence
  Description of Artificial Sequence: Synthetic oligonucleotide
gacaagccuuaccagugua

SEQ ID NO: 409563 - RNA, 19 nt, Artificial Sequence
  Description of Artificial Sequence: Synthetic oligonucleotide
auggcgcgagugcuccaac

SEQ ID NO: 409564 - RNA, 19 nt, Artificial Sequence
  Description of Artificial Sequence: Synthetic oligonucleotide
ggugcuugcccagucgaag

SEQ ID NO: 409565 - RNA, 19 nt, Artificial Sequence
  Description of Artificial Sequence: Synthetic oligonucleotide
cucugaauccuggaugcca

SEQ ID NO: 409566 - RNA, 19 nt, Artificial Sequence
  Description of Artificial Sequence: Synthetic oligonucleotide
gccuuaccaguguacuggg

SEQ ID NO: 409567 - RNA, 19 nt, Artificial Sequence
  Description of Artificial Sequence: Synthetic oligonucleotide
caccguggcugucacuuug

SEQ ID NO: 409568 - RNA, 19 nt, Artificial Sequence
  Description of Artificial Sequence: Synthetic oligonucleotide
  modified_base (5)..(5): a, c, u, g, unknown or other
ggaanaguguggucacaga

SEQ ID NO: 409569 - RNA, 19 nt, Artificial Sequence
  Description of Artificial Sequence: Synthetic oligonucleotide
ugggcccuagccuggugcu

SEQ ID NO: 409570 - RNA, 19 nt, Artificial Sequence
  Description of Artificial Sequence: Synthetic oligonucleotide
cuugcccagucgaagaccu

SEQ ID NO: 409571 - RNA, 19 nt, Artificial Sequence
  Description of Artificial Sequence: Synthetic oligonucleotide
ugccuucgcccuuggggcc

SEQ ID NO: 409572 - RNA, 19 nt, Artificial Sequence
  Description of Artificial Sequence: Synthetic oligonucleotide
gucuugguccagccagcag

SEQ ID NO: 409573 - RNA, 19 nt, Artificial Sequence
  Description of Artificial Sequence: Synthetic oligonucleotide
cuucuacccguaacaucuc

SEQ ID NO: 409574 - RNA, 19 nt, Artificial Sequence
  Description of Artificial Sequence: Synthetic oligonucleotide
guuuuccgucuuuccucag

SEQ ID NO: 409575 - RNA, 19 nt, Artificial Sequence
  Description of Artificial Sequence: Synthetic oligonucleotide
cuuguugcgaucgcaauau

SEQ ID NO: 409576 - RNA, 19 nt, Artificial Sequence
  Description of Artificial Sequence: Synthetic oligonucleotide
gcgcgagugcuccaacucg

SEQ ID NO: 409577 - RNA, 19 nt, Artificial Sequence
  Description of Artificial Sequence: Synthetic oligonucleotide
uuguugcgaucgcaauauc

SEQ ID NO: 409578 - RNA, 19 nt, Artificial Sequence
  Description of Artificial Sequence: Synthetic oligonucleotide
uggugcuugcccagucgaa

SEQ ID NO: 409579 - RNA, 19 nt, Artificial Sequence
  Description of Artificial Sequence: Synthetic oligonucleotide
ggcguacaagaugucuugg

SEQ ID NO: 409580 - RNA, 19 nt, Artificial Sequence
  Description of Artificial Sequence: Synthetic oligonucleotide
auagcgcugucgagcuagc

SEQ ID NO: 409581 - RNA, 19 nt, Artificial Sequence
  Description of Artificial Sequence: Synthetic oligonucleotide
gaugaggagucaaggacau

SEQ ID NO: 409582 - RNA, 19 nt, Artificial Sequence
  Description of Artificial Sequence: Synthetic oligonucleotide
gagaugcgggaagucuccc

SEQ ID NO: 409583 - RNA, 19 nt, Artificial Sequence
  Description of Artificial Sequence: Synthetic oligonucleotide
uggcguaguccaugccuga

SEQ ID NO: 409584 - RNA, 19 nt, Artificial Sequence
  Description of Artificial Sequence: Synthetic oligonucleotide
ccacucuaccuaguaaagg

SEQ ID NO: 409585 - RNA, 19 nt, Artificial Sequence
  Description of Artificial Sequence: Synthetic oligonucleotide
ggagaugcgggaagucucc

SEQ ID NO: 409586 - RNA, 19 nt, Artificial Sequence
  Description of Artificial Sequence: Synthetic oligonucleotide
cguacaagaugucuugguc

SEQ ID NO: 409587 - RNA, 19 nt, Artificial Sequence
  Description of Artificial Sequence: Synthetic oligonucleotide
agacuccaacagccaguag

SEQ ID NO: 409588 - RNA, 19 nt, Artificial Sequence
  Description of Artificial Sequence: Synthetic oligonucleotide
uggcgcgagugcuccaacu

SEQ ID NO: 409589 - RNA, 19 nt, Artificial Sequence
  Description of Artificial Sequence: Synthetic oligonucleotide
cuuaugccgcagcuccauc

SEQ ID NO: 409590 - RNA, 19 nt, Artificial Sequence
  Description of Artificial Sequence: Synthetic oligonucleotide
agacuccaagauggucugg

SEQ ID NO: 409591 - RNA, 19 nt, Artificial Sequence
  Description of Artificial Sequence: Synthetic oligonucleotide
caaucaaacugcucggguu

SEQ ID NO: 409592 - RNA, 19 nt, Artificial Sequence
  Description of Artificial Sequence: Synthetic oligonucleotide
ggcggucacacccucccgc

SEQ ID NO: 409593 - RNA, 19 nt, Artificial Sequence
  Description of Artificial Sequence: Synthetic oligonucleotide
guagucaaacugggccacc

SEQ ID NO: 409594 - RNA, 19 nt, Artificial Sequence
  Description of Artificial Sequence: Synthetic oligonucleotide
cuacuuuaagccacugcau

SEQ ID NO: 409595 - RNA, 19 nt, Artificial Sequence
  Description of Artificial Sequence: Synthetic oligonucleotide
uucccaagcgggccucaau

SEQ ID NO: 409596 - RNA, 19 nt, Artificial Sequence
  Description of Artificial Sequence: Synthetic oligonucleotide
gggaagucucccucaccag

SEQ ID NO: 409597 - RNA, 19 nt, Artificial Sequence
  Description of Artificial Sequence: Synthetic oligonucleotide
gcgaaucuguucccggaug

SEQ ID NO: 409598 - RNA, 19 nt, Artificial Sequence
  Description of Artificial Sequence: Synthetic oligonucleotide
caccagauccacucuaccu

SEQ ID NO: 409599 - RNA, 19 nt, Artificial Sequence
  Description of Artificial Sequence: Synthetic oligonucleotide
gaccagucgccugcugacc

SEQ ID NO: 409600 - RNA, 19 nt, Artificial Sequence
  Description of Artificial Sequence: Synthetic oligonucleotide
acugaucuuuucaguugcu

SEQ ID NO: 409601 - RNA, 19 nt, Artificial Sequence
  Description of Artificial Sequence: Synthetic oligonucleotide
caagcguugcuuuccuucu

SEQ ID NO: 409602 - RNA, 19 nt, Artificial Sequence
  Description of Artificial Sequence: Synthetic oligonucleotide
cugucgagcuagcuuaucu

SEQ ID NO: 409603 - RNA, 19 nt, Artificial Sequence
  Description of Artificial Sequence: Synthetic oligonucleotide
uucaagcguugcuuuccuu

SEQ ID NO: 409604 - RNA, 19 nt, Artificial Sequence
  Description of Artificial Sequence: Synthetic oligonucleotide
cagugcgaguuucuuggca

SEQ ID NO: 409605 - RNA, 19 nt, Artificial Sequence
  Description of Artificial Sequence: Synthetic oligonucleotide
cagcaugaacuuacuacua

SEQ ID NO: 409606 - RNA, 19 nt, Artificial Sequence
  Description of Artificial Sequence: Synthetic oligonucleotide
auacaucaggacguuucua

SEQ ID NO: 409607 - RNA, 19 nt, Artificial Sequence
  Description of Artificial Sequence: Synthetic oligonucleotide
ucgcccuuggggcccuugu

SEQ ID NO: 409608 - RNA, 19 nt, Artificial Sequence
  Description of Artificial Sequence: Synthetic oligonucleotide
gcaugccuuccucugccag

SEQ ID NO: 409609 - RNA, 19 nt, Artificial Sequence
  Description of Artificial Sequence: Synthetic oligonucleotide
gcuagcuuaucuugguacu

SEQ ID NO: 409610 - RNA, 19 nt, Artificial Sequence
  Description of Artificial Sequence: Synthetic oligonucleotide
cccaaucaaacugcucggg

SEQ ID NO: 409611 - RNA, 19 nt, Artificial Sequence
  Description of Artificial Sequence: Synthetic oligonucleotide
agucaaggacaugguggcu

SEQ ID NO: 409612 - RNA, 19 nt, Artificial Sequence
  Description of Artificial Sequence: Synthetic oligonucleotide
acgcuccaggccugucggg

SEQ ID NO: 409613 - RNA, 19 nt, Artificial Sequence
  Description of Artificial Sequence: Synthetic oligonucleotide
ccuuaccaguguacugggg

SEQ ID NO: 409614 - RNA, 19 nt, Artificial Sequence
  Description of Artificial Sequence: Synthetic oligonucleotide
uugggcgauugccggucuc

SEQ ID NO: 409615 - RNA, 19 nt, Artificial Sequence
  Description of Artificial Sequence: Synthetic oligonucleotide
cucgucggcuggugcuugc

SEQ ID NO: 409616 - RNA, 19 nt, Artificial Sequence
  Description of Artificial Sequence: Synthetic oligonucleotide
gaacccgugccuccaggcu

SEQ ID NO: 409617 - RNA, 19 nt, Artificial Sequence
  Description of Artificial Sequence: Synthetic oligonucleotide
cucgaacccgugccuccag

SEQ ID NO: 409618 - RNA, 19 nt, Artificial Sequence
  Description of Artificial Sequence: Synthetic oligonucleotide
cuguagucuggucccugca

SEQ ID NO: 409619 - RNA, 19 nt, Artificial Sequence
  Description of Artificial Sequence: Synthetic oligonucleotide
ucauagcgcugucgagcua

SEQ ID NO: 409620 - RNA, 19 nt, Artificial Sequence
  Description of Artificial Sequence: Synthetic oligonucleotide
aagcgcgcccucggugguc

SEQ ID NO: 409621 - RNA, 19 nt, Artificial Sequence
  Description of Artificial Sequence: Synthetic oligonucleotide
ucgucggcuggugcuugcc

SEQ ID NO: 409622 - RNA, 19 nt, Artificial Sequence
  Description of Artificial Sequence: Synthetic oligonucleotide
gcgcugucgagcuagcuua

SEQ ID NO: 409623 - RNA, 19 nt, Artificial Sequence
  Description of Artificial Sequence: Synthetic oligonucleotide
agcagaccaucucgucaau

SEQ ID NO: 409624 - RNA, 19 nt, Artificial Sequence
  Description of Artificial Sequence: Synthetic oligonucleotide
ggcgauugccggucuccag

SEQ ID NO: 409625 - RNA, 19 nt, Artificial Sequence
  Description of Artificial Sequence: Synthetic oligonucleotide
gugcgaguuucuuggcaaa

SEQ ID NO: 409626 - RNA, 19 nt, Artificial Sequence
  Description of Artificial Sequence: Synthetic oligonucleotide
caggcguacaagaugucuu

SEQ ID NO: 409627 - RNA, 19 nt, Artificial Sequence
  Description of Artificial Sequence: Synthetic oligonucleotide
uugguccagccagcagaug

SEQ ID NO: 409628 - RNA, 19 nt, Artificial Sequence
  Description of Artificial Sequence: Synthetic oligonucleotide
cuacccguaacaucucauu

SEQ ID NO: 409629 - RNA, 19 nt, Artificial Sequence
  Description of Artificial Sequence: Synthetic oligonucleotide
gcuauuggccugugaugca

SEQ ID NO: 409630 - RNA, 19 nt, Artificial Sequence
  Description of Artificial Sequence: Synthetic oligonucleotide
cuucaagcguugcuuuccu

SEQ ID NO: 409631 - RNA, 19 nt, Artificial Sequence
  Description of Artificial Sequence: Synthetic oligonucleotide
acugcucggguugguuacu

SEQ ID NO: 409632 - RNA, 19 nt, Artificial Sequence
  Description of Artificial Sequence: Synthetic oligonucleotide
cugcucggguugguuacug

SEQ ID NO: 409633 - RNA, 19 nt, Artificial Sequence
  Description of Artificial Sequence: Synthetic oligonucleotide
gccugucgggucaaaguug

SEQ ID NO: 409634 - RNA, 19 nt, Artificial Sequence
  Description of Artificial Sequence: Synthetic oligonucleotide
gcgaucgcaauaucucgaa

SEQ ID NO: 409635 - RNA, 19 nt, Artificial Sequence
  Description of Artificial Sequence: Synthetic oligonucleotide
ggcauaugccauggccugc

SEQ ID NO: 409636 - RNA, 19 nt, Artificial Sequence
  Description of Artificial Sequence: Synthetic oligonucleotide
cgcgagugcuccaacucgc

SEQ ID NO: 409637 - RNA, 19 nt, Artificial Sequence
  Description of Artificial Sequence: Synthetic oligonucleotide
cuagcaccagauccacucu

SEQ ID NO: 409638 - RNA, 19 nt, Artificial Sequence
  Description of Artificial Sequence: Synthetic oligonucleotide
gcagaccaucucgucaaug

SEQ ID NO: 409639 - RNA, 19 nt, Artificial Sequence
  Description of Artificial Sequence: Synthetic oligonucleotide
cucggugguccgaacucaa

SEQ ID NO: 409640 - RNA, 19 nt, Artificial Sequence
  Description of Artificial Sequence: Synthetic oligonucleotide
caguagcauucuuggcaga

SEQ ID NO: 409641 - RNA, 19 nt, Artificial Sequence
  Description of Artificial Sequence: Synthetic oligonucleotide
gcgaguuucuuggcaaaca

SEQ ID NO: 409642 - RNA, 19 nt, Artificial Sequence
  Description of Artificial Sequence: Synthetic oligonucleotide
gguccgaacucaaguguga

SEQ ID NO: 409643 - RNA, 19 nt, Artificial Sequence
  Description of Artificial Sequence: Synthetic oligonucleotide
ucccgcuguggcagugcaa

SEQ ID NO: 409644 - RNA, 19 nt, Artificial Sequence
  Description of Artificial Sequence: Synthetic oligonucleotide
gcgagugcuccaacucgcg

SEQ ID NO: 409645 - RNA, 19 nt, Artificial Sequence
  Description of Artificial Sequence: Synthetic oligonucleotide
ggcuuauagacaagccuua

SEQ ID NO: 409646 - RNA, 19 nt, Artificial Sequence
  Description of Artificial Sequence: Synthetic oligonucleotide
acguuucuauacaggcuuu

SEQ ID NO: 409647 - RNA, 19 nt, Artificial Sequence
  Description of Artificial Sequence: Synthetic oligonucleotide
ggccggcuuaaggacauac

SEQ ID NO: 409648 - RNA, 19 nt, Artificial Sequence
  Description of Artificial Sequence: Synthetic oligonucleotide
gcuuaaggacauacuuguc

SEQ ID NO: 409649 - RNA, 19 nt, Artificial Sequence
  Description of Artificial Sequence: Synthetic oligonucleotide
caucugcgcaaggcucagc

SEQ ID NO: 409650 - RNA, 19 nt, Artificial Sequence
  Description of Artificial Sequence: Synthetic oligonucleotide
gguuacuggccaggaccag

SEQ ID NO: 409651 - RNA, 19 nt, Artificial Sequence
  Description of Artificial Sequence: Synthetic oligonucleotide
cgagugcuccaacucgcgg

SEQ ID NO: 409652 - RNA, 19 nt, Artificial Sequence
  Description of Artificial Sequence: Synthetic oligonucleotide
cucgggauugggucucucu

SEQ ID NO: 409653 - RNA, 19 nt, Artificial Sequence
  Description of Artificial Sequence: Synthetic oligonucleotide
gguggcaccucugaauccu

SEQ ID NO: 409654 - RNA, 19 nt, Artificial Sequence
  Description of Artificial Sequence: Synthetic oligonucleotide
uccucgacucgggcaucca

SEQ ID NO: 409655 - RNA, 19 nt, Artificial Sequence
  Description of Artificial Sequence: Synthetic oligonucleotide
uucgcccuuggggcccuug

SEQ ID NO: 409656 - RNA, 19 nt, Artificial Sequence
  Description of Artificial Sequence: Synthetic oligonucleotide
ggacguuucuauacaggcu

SEQ ID NO: 409657 - RNA, 19 nt, Artificial Sequence
  Description of Artificial Sequence: Synthetic oligonucleotide
gcgggaagucucccucacc

SEQ ID NO: 409658 - RNA, 19 nt, Artificial Sequence
  Description of Artificial Sequence: Synthetic oligonucleotide
gcgccuccuuggcauggcg

SEQ ID NO: 409659 - RNA, 19 nt, Artificial Sequence
  Description of Artificial Sequence: Synthetic oligonucleotide
cauggcgcgagugcuccaa

SEQ ID NO: 409660 - RNA, 19 nt, Artificial Sequence
  Description of Artificial Sequence: Synthetic oligonucleotide
cccucggugguccgaacuc

SEQ ID NO: 409661 - RNA, 19 nt, Artificial Sequence
  Description of Artificial Sequence: Synthetic oligonucleotide
gucaggcguacaagauguc

SEQ ID NO: 409662 - RNA, 19 nt, Artificial Sequence
  Description of Artificial Sequence: Synthetic oligonucleotide
gcaucugcgcaaggcucag

SEQ ID NO: 409663 - RNA, 19 nt, Artificial Sequence
  Description of Artificial Sequence: Synthetic oligonucleotide
cgaucgcaauaucucgaac

SEQ ID NO: 409664 - RNA, 19 nt, Artificial Sequence
  Description of Artificial Sequence: Synthetic oligonucleotide
ggccugucgggucaaaguu

SEQ ID NO: 409665 - RNA, 19 nt, Artificial Sequence
  Description of Artificial Sequence: Synthetic oligonucleotide
aacagccaguagggucaau

SEQ ID NO: 409666 - RNA, 19 nt, Artificial Sequence
  Description of Artificial Sequence: Synthetic oligonucleotide
gaagcgcgcccucgguggu

SEQ ID NO: 409667 - RNA, 19 nt, Artificial Sequence
  Description of Artificial Sequence: Synthetic oligonucleotide
ccaaucaaacugcucgggu

SEQ ID NO: 409668 - RNA, 19 nt, Artificial Sequence
  Description of Artificial Sequence: Synthetic oligonucleotide
cuaugcuguccuguccugu

SEQ ID NO: 409669 - RNA, 19 nt, Artificial Sequence
  Description of Artificial Sequence: Synthetic oligonucleotide
uccaacucgcgggccgcuu

SEQ ID NO: 409670 - RNA, 19 nt, Artificial Sequence
  Description of Artificial Sequence: Synthetic oligonucleotide
gguggcucgcuggccucgg

SEQ ID NO: 409671 - RNA, 19 nt, Artificial Sequence
  Description of Artificial Sequence: Synthetic oligonucleotide
ccgugaggaccccauucuc

SEQ ID NO: 409672 - RNA, 19 nt, Artificial Sequence
  Description of Artificial Sequence: Synthetic oligonucleotide
ggaugccucagugccucca

SEQ ID NO: 409673 - RNA, 19 nt, Artificial Sequence
  Description of Artificial Sequence: Synthetic oligonucleotide
ccagugcauccuggggucg

SEQ ID NO: 409674 - RNA, 19 nt, Artificial Sequence
  Description of Artificial Sequence: Synthetic oligonucleotide
cauccucgacucgggcauc

SEQ ID NO: 409675 - RNA, 19 nt, Artificial Sequence
  Description of Artificial Sequence: Synthetic oligonucleotide
ccuugggcgauugccgguc

SEQ ID NO: 409676 - RNA, 19 nt, Artificial Sequence
  Description of Artificial Sequence: Synthetic oligonucleotide
cagauccacucuaccuagu

SEQ ID NO: 409677 - RNA, 19 nt, Artificial Sequence
  Description of Artificial Sequence: Synthetic oligonucleotide
ccggcuuaaggacauacuu

SEQ ID NO: 409678 - RNA, 19 nt, Artificial Sequence
  Description of Artificial Sequence: Synthetic oligonucleotide
ggcgaaucuguucccggau

SEQ ID NO: 409679 - RNA, 19 nt, Artificial Sequence
  Description of Artificial Sequence: Synthetic oligonucleotide
gccugucaugauggcguag

SEQ ID NO: 409680 - RNA, 19 nt, Artificial Sequence
  Description of Artificial Sequence: Synthetic oligonucleotide
gccuguagucuggucccug

SEQ ID NO: 409681 - RNA, 19 nt, Artificial Sequence
  Description of Artificial Sequence: Synthetic oligonucleotide
gcauggcggucacacccuc

SEQ ID NO: 409682 - RNA, 19 nt, Artificial Sequence
  Description of Artificial Sequence: Synthetic oligonucleotide
cgauugccggucuccagca

SEQ ID NO: 409683 - RNA, 19 nt, Artificial Sequence
  Description of Artificial Sequence: Synthetic oligonucleotide
cagcuucuacccguaacau

SEQ ID NO: 409684 - RNA, 19 nt, Artificial Sequence
  Description of Artificial Sequence: Synthetic oligonucleotide
cccgcuguggcagugcaaa

SEQ ID NO: 409685 - RNA, 19 nt, Artificial Sequence
  Description of Artificial Sequence: Synthetic oligonucleotide
gucggcugaccagucgccu

SEQ ID NO: 409686 - RNA, 19 nt, Artificial Sequence
  Description of Artificial Sequence: Synthetic oligonucleotide
gcccuagccuggugcugcc

SEQ ID NO: 409687 - RNA, 19 nt, Artificial Sequence
  Description of Artificial Sequence: Synthetic oligonucleotide
cuugggcgauugccggucu

SEQ ID NO: 409688 - RNA, 19 nt, Artificial Sequence
  Description of Artificial Sequence: Synthetic oligonucleotide
ggcguaguccaugccugaa

SEQ ID NO: 409689 - RNA, 19 nt, Artificial Sequence
  Description of Artificial Sequence: Synthetic oligonucleotide
guggccggcuuaaggacau

SEQ ID NO: 409690 - RNA, 19 nt, Artificial Sequence
  Description of Artificial Sequence: Synthetic oligonucleotide
cccguaacaucucauucuu

SEQ ID NO: 409691 - RNA, 19 nt, Artificial Sequence
  Description of Artificial Sequence: Synthetic oligonucleotide
agucgccugcugaccugga

SEQ ID NO: 409692 - RNA, 19 nt, Artificial Sequence
  Description of Artificial Sequence: Synthetic oligonucleotide
guccccagucaggcguaca

SEQ ID NO: 409693 - RNA, 19 nt, Artificial Sequence
  Description of Artificial Sequence: Synthetic oligonucleotide
guggcucgacggauggccu

SEQ ID NO: 409694 - RNA, 19 nt, Artificial Sequence
  Description of Artificial Sequence: Synthetic oligonucleotide
caacagccaguagggucaa

SEQ ID NO: 409695 - RNA, 19 nt, Artificial Sequence
  Description of Artificial Sequence: Synthetic oligonucleotide
ccguggcugucacuuuguc

SEQ ID NO: 409696 - RNA, 19 nt, Artificial Sequence
  Description of Artificial Sequence: Synthetic oligonucleotide
gcguaguccaugccugaau

SEQ ID NO: 409697 - RNA, 19 nt, Artificial Sequence
  Description of Artificial Sequence: Synthetic oligonucleotide
gggcgauugccggucucca

SEQ ID NO: 409698 - RNA, 19 nt, Artificial Sequence
  Description of Artificial Sequence: Synthetic oligonucleotide
cggauuuguucacucuuua

SEQ ID NO: 409699 - RNA, 19 nt, Artificial Sequence
  Description of Artificial Sequence: Synthetic oligonucleotide
gccgcuuuggcugcacgcu

SEQ ID NO: 409700 - RNA, 19 nt, Artificial Sequence
  Description of Artificial Sequence: Synthetic oligonucleotide
cgagcuagcuuaucuuggu

SEQ ID NO: 409701 - RNA, 19 nt, Artificial Sequence
  Description of Artificial Sequence: Synthetic oligonucleotide
ccucggugguccgaacuca

SEQ ID NO: 409702 - RNA, 19 nt, Artificial Sequence
  Description of Artificial Sequence: Synthetic oligonucleotide
ccguaacaucucauucuua

SEQ ID NO: 409703 - RNA, 19 nt, Artificial Sequence
  Description of Artificial Sequence: Synthetic oligonucleotide
ggaccagcaugaacuuacu

SEQ ID NO: 409704 - RNA, 19 nt, Artificial Sequence
  Description of Artificial Sequence: Synthetic oligonucleotide
cccuagccuggugcugccg

SEQ ID NO: 409705 - RNA, 19 nt, Artificial Sequence
  Description of Artificial Sequence: Synthetic oligonucleotide
gcccucggugguccgaacu

SEQ ID NO: 409706 - RNA, 19 nt, Artificial Sequence
  Description of Artificial Sequence: Synthetic oligonucleotide
gccggcuuaaggacauacu

SEQ ID NO: 409707 - RNA, 19 nt, Artificial Sequence
  Description of Artificial Sequence: Synthetic oligonucleotide
cggucacacccucccgccc

SEQ ID NO: 409708 - RNA, 19 nt, Artificial Sequence
  Description of Artificial Sequence: Synthetic oligonucleotide
uggccggcuuaaggacaua

SEQ ID NO: 409709 - RNA, 19 nt, Artificial Sequence
  Description of Artificial Sequence: Synthetic oligonucleotide
cgaagaccuugugcauggc

SEQ ID NO: 409710 - RNA, 19 nt, Artificial Sequence
  Description of Artificial Sequence: Synthetic oligonucleotide
cggugguccgaacucaagu

SEQ ID NO: 409711 - RNA, 19 nt, Artificial Sequence
  Description of Artificial Sequence: Synthetic oligonucleotide
gcggaggccccgugccuuc

SEQ ID NO: 409712 - RNA, 19 nt, Artificial Sequence
  Description of Artificial Sequence: Synthetic oligonucleotide
cgacggauggccucuugcu

SEQ ID NO: 409713 - RNA, 19 nt, Artificial Sequence
  Description of Artificial Sequence: Synthetic oligonucleotide
ccucgucggcuggugcuug

SEQ ID NO: 409714 - RNA, 19 nt, Artificial Sequence
  Description of Artificial Sequence: Synthetic oligonucleotide
gugcauccuggggucggcu

SEQ ID NO: 409715 - RNA, 19 nt, Artificial Sequence
  Description of Artificial Sequence: Synthetic oligonucleotide
ccccuccgucagcugggcc

SEQ ID NO: 409716 - RNA, 19 nt, Artificial Sequence
  Description of Artificial Sequence: Synthetic oligonucleotide
cccaagcgggccucaauau

SEQ ID NO: 409717 - RNA, 19 nt, Artificial Sequence
  Description of Artificial Sequence: Synthetic oligonucleotide
gcauggcgcgagugcucca

SEQ ID NO: 409718 - RNA, 19 nt, Artificial Sequence
  Description of Artificial Sequence: Synthetic oligonucleotide
ccauuuguccuugggcgau

SEQ ID NO: 409719 - RNA, 19 nt, Artificial Sequence
  Description of Artificial Sequence: Synthetic oligonucleotide
gcgcaaggcucagcgccuc

SEQ ID NO: 409720 - RNA, 19 nt, Artificial Sequence
  Description of Artificial Sequence: Synthetic oligonucleotide
gcgcgcccucggugguccg

SEQ ID NO: 409721 - RNA, 19 nt, Artificial Sequence
  Description of Artificial Sequence: Synthetic oligonucleotide
cuccaacucgcgggccgcu

SEQ ID NO: 409722 - RNA, 19 nt, Artificial Sequence
  Description of Artificial Sequence: Synthetic oligonucleotide
cccugaggucuucacugau

SEQ ID NO: 409723 - RNA, 19 nt, Artificial Sequence
  Description of Artificial Sequence: Synthetic oligonucleotide
ccucgacucgggcauccau

SEQ ID NO: 409724 - RNA, 19 nt, Artificial Sequence
  Description of Artificial Sequence: Synthetic oligonucleotide
cgccugucaugauggcgua

SEQ ID NO: 409725 - RNA, 19 nt, Artificial Sequence
  Description of Artificial Sequence: Synthetic oligonucleotide
gccucgggauugggucucu

SEQ ID NO: 409726 - RNA, 19 nt, Artificial Sequence
  Description of Artificial Sequence: Synthetic oligonucleotide
cccucgucggcuggugcuu

SEQ ID NO: 409727 - RNA, 19 nt, Artificial Sequence
  Description of Artificial Sequence: Synthetic oligonucleotide
cgacucgggcauccaucau

SEQ ID NO: 409728 - RNA, 19 nt, Artificial Sequence
  Description of Artificial Sequence: Synthetic oligonucleotide
cgcgcccucggugguccga

SEQ ID NO: 409729 - RNA, 19 nt, Artificial Sequence
  Description of Artificial Sequence: Synthetic oligonucleotide
cuucgcccuuggggcccuu

SEQ ID NO: 409730 - RNA, 19 nt, Artificial Sequence
  Description of Artificial Sequence: Synthetic oligonucleotide
uauauaguaugccaggagc

SEQ ID NO: 409731 - RNA, 19 nt, Artificial Sequence
  Description of Artificial Sequence: Synthetic oligonucleotide
uuugacgucaaaauuaccu

SEQ ID NO: 409732 - RNA, 19 nt, Artificial Sequence
  Description of Artificial Sequence: Synthetic oligonucleotide
uuaaaggugacugggaugg

SEQ ID NO: 409733 - RNA, 19 nt, Artificial Sequence
  Description of Artificial Sequence: Synthetic oligonucleotide
accacauauacccugcucc

SEQ ID NO: 409734 - RNA, 19 nt, Artificial Sequence
  Description of Artificial Sequence: Synthetic oligonucleotide
ugauguaggaugccgagcg

SEQ ID NO: 409735 - RNA, 19 nt, Artificial Sequence
  Description of Artificial Sequence: Synthetic oligonucleotide
aaaacugcgcagcaggcag

SEQ ID NO: 409736 - RNA, 19 nt, Artificial Sequence
  Description of Artificial Sequence: Synthetic oligonucleotide
aucagaauggucuuggucu

SEQ ID NO: 409737 - RNA, 19 nt, Artificial Sequence
  Description of Artificial Sequence: Synthetic oligonucleotide
auggacacgccccaaaccc

SEQ ID NO: 409738 - RNA, 19 nt, Artificial Sequence
  Description of Artificial Sequence: Synthetic oligonucleotide
ugagacaaugguucgaugc

SEQ ID NO: 409739 - RNA, 19 nt, Artificial Sequence
  Description of Artificial Sequence: Synthetic oligonucleotide
acgguacugacacaguucc

SEQ ID NO: 409740 - RNA, 19 nt, Artificial Sequence
  Description of Artificial Sequence: Synthetic oligonucleotide
auagacaucacgcucugag

SEQ ID NO: 409741 - RNA, 19 nt, Artificial Sequence
  Description of Artificial Sequence: Synthetic oligonucleotide
aggaaucaggccuagcccc

SEQ ID NO: 409742 - RNA, 19 nt, Artificial Sequence
  Description of Artificial Sequence: Synthetic oligonucleotide
uguucagugauaugggcag

SEQ ID NO: 409743 - RNA, 19 nt, Artificial Sequence
  Description of Artificial Sequence: Synthetic oligonucleotide
acgagugugagacagaagu

SEQ ID NO: 409744 - RNA, 19 nt, Artificial Sequence
  Description of Artificial Sequence: Synthetic oligonucleotide
agugagaugcacucagggc

SEQ ID NO: 409745 - RNA, 19 nt, Artificial Sequence
  Description of Artificial Sequence: Synthetic oligonucleotide
uucgaugcaagucaggaaa

SEQ ID NO: 409746 - RNA, 19 nt, Artificial Sequence
  Description of Artificial Sequence: Synthetic oligonucleotide
aaugguaccuugcuggccu

SEQ ID NO: 409747 - RNA, 19 nt, Artificial Sequence
  Description of Artificial Sequence: Synthetic oligonucleotide
ucaaauagacaucacgcuc

SEQ ID NO: 409748 - RNA, 19 nt, Artificial Sequence
  Description of Artificial Sequence: Synthetic oligonucleotide
ucuuucuagggaaugaauc

SEQ ID NO: 409749 - RNA, 19 nt, Artificial Sequence
  Description of Artificial Sequence: Synthetic oligonucleotide
gacgcucuaagauacacug

SEQ ID NO: 409750 - RNA, 19 nt, Artificial Sequence
  Description of Artificial Sequence: Synthetic oligonucleotide
auauaguaugccaggagcc

SEQ ID NO: 409751 - RNA, 19 nt, Artificial Sequence
  Description of Artificial Sequence: Synthetic oligonucleotide
gaauccacgagugugagac

SEQ ID NO: 409752 - RNA, 19 nt, Artificial Sequence
  Description of Artificial Sequence: Synthetic oligonucleotide
gugagaugcacucagggcc

SEQ ID NO: 409753 - RNA, 19 nt, Artificial Sequence
  Description of Artificial Sequence: Synthetic oligonucleotide
ucuuugacgucaaaauuac

SEQ ID NO: 409754 - RNA, 19 nt, Artificial Sequence
  Description of Artificial Sequence: Synthetic oligonucleotide
aguacauagcccaaccagc

SEQ ID NO: 409755 - RNA, 19 nt, Artificial Sequence
  Description of Artificial Sequence: Synthetic oligonucleotide
gauugggucugacaggaag

SEQ ID NO: 409756 - RNA, 19 nt, Artificial Sequence
  Description of Artificial Sequence: Synthetic oligonucleotide
auauacccugcucccaucc

SEQ ID NO: 409757 - RNA, 19 nt, Artificial Sequence
  Description of Artificial Sequence: Synthetic oligonucleotide
uugacgucaaaauuaccug

SEQ ID NO: 409758 - RNA, 19 nt, Artificial Sequence
  Description of Artificial Sequence: Synthetic oligonucleotide
agaugcaacuggcaaugcc

SEQ ID NO: 409759 - RNA, 19 nt, Artificial Sequence
  Description of Artificial Sequence: Synthetic oligonucleotide
ucuagggaaugaauccacg

SEQ ID NO: 409760 - RNA, 19 nt, Artificial Sequence
  Description of Artificial Sequence: Synthetic oligonucleotide
caaacccacagugagaugc

SEQ ID NO: 409761 - RNA, 19 nt, Artificial Sequence
  Description of Artificial Sequence: Synthetic oligonucleotide
guuucacuugauuuggcag

SEQ ID NO: 409762 - RNA, 19 nt, Artificial Sequence
  Description of Artificial Sequence: Synthetic oligonucleotide
cuuggaacuguuucugagg

SEQ ID NO: 409763 - RNA, 19 nt, Artificial Sequence
  Description of Artificial Sequence: Synthetic oligonucleotide
aaggauaaucagaaugguc

SEQ ID NO: 409764 - RNA, 19 nt, Artificial Sequence
  Description of Artificial Sequence: Synthetic oligonucleotide
gaaggagcuacauggacac

SEQ ID NO: 409765 - RNA, 19 nt, Artificial Sequence
  Description of Artificial Sequence: Synthetic oligonucleotide
aggagcuacauggacacgc

SEQ ID NO: 409766 - RNA, 19 nt, Artificial Sequence
  Description of Artificial Sequence: Synthetic oligonucleotide
cuguggacggcccugaugc

SEQ ID NO: 409767 - RNA, 19 nt, Artificial Sequence
  Description of Artificial Sequence: Synthetic oligonucleotide
ucuuaaaggugacugggau

SEQ ID NO: 409768 - RNA, 19 nt, Artificial Sequence
  Description of Artificial Sequence: Synthetic oligonucleotide
agguagguagagcaacagc

SEQ ID NO: 409769 - RNA, 19 nt, Artificial Sequence
  Description of Artificial Sequence: Synthetic oligonucleotide
accacagacucucugcagg

SEQ ID NO: 409770 - RNA, 19 nt, Artificial Sequence
  Description of Artificial Sequence: Synthetic oligonucleotide
acuacaucccgcuugcugu

SEQ ID NO: 409771 - RNA, 19 nt, Artificial Sequence
  Description of Artificial Sequence: Synthetic oligonucleotide
aaauagacaucacgcucug

SEQ ID NO: 409772 - RNA, 19 nt, Artificial Sequence
  Description of Artificial Sequence: Synthetic oligonucleotide
gauaugggcagacaccuuc

SEQ ID NO: 409773 - RNA, 19 nt, Artificial Sequence
  Description of Artificial Sequence: Synthetic oligonucleotide
aguacguggaagguugggc

SEQ ID NO: 409774 - RNA, 19 nt, Artificial Sequence
  Description of Artificial Sequence: Synthetic oligonucleotide
ugacgucaaaauuaccuga

SEQ ID NO: 409775 - RNA, 19 nt, Artificial Sequence
  Description of Artificial Sequence: Synthetic oligonucleotide
uucacuacaucccgcuugc

SEQ ID NO: 409776 - RNA, 19 nt, Artificial Sequence
  Description of Artificial Sequence: Synthetic oligonucleotide
uguaggaugccgagcgagg

SEQ ID NO: 409777 - RNA, 19 nt, Artificial Sequence
  Description of Artificial Sequence: Synthetic oligonucleotide
cacaguacguggaagguug

SEQ ID NO: 409778 - RNA, 19 nt, Artificial Sequence
  Description of Artificial Sequence: Synthetic oligonucleotide
aaugaauccacgaguguga

SEQ ID NO: 409779 - RNA, 19 nt, Artificial Sequence
  Description of Artificial Sequence: Synthetic oligonucleotide
cuauauaguaugccaggag

SEQ ID NO: 409780 - RNA, 19 nt, Artificial Sequence
  Description of Artificial Sequence: Synthetic oligonucleotide
agacagaaguacauagccc

SEQ ID NO: 409781 - RNA, 19 nt, Artificial Sequence
  Description of Artificial Sequence: Synthetic oligonucleotide
agguucaugguucgacggc

SEQ ID NO: 409782 - RNA, 19 nt, Artificial Sequence
  Description of Artificial Sequence: Synthetic oligonucleotide
agggaaugaauccacgagu

SEQ ID NO: 409783 - RNA, 19 nt, Artificial Sequence
  Description of Artificial Sequence: Synthetic oligonucleotide
ugacccaugccaacgacac

SEQ ID NO: 409784 - RNA, 19 nt, Artificial Sequence
  Description of Artificial Sequence: Synthetic oligonucleotide
cauggggcacuuuagugcc

SEQ ID NO: 409785 - RNA, 19 nt, Artificial Sequence
  Description of Artificial Sequence: Synthetic oligonucleotide
agccuguacacgugaaugg

SEQ ID NO: 409786 - RNA, 19 nt, Artificial Sequence
  Description of Artificial Sequence: Synthetic oligonucleotide
cuuaaaggugacugggaug

SEQ ID NO: 409787 - RNA, 19 nt, Artificial Sequence
  Description of Artificial Sequence: Synthetic oligonucleotide
cacaacuaccacaucgggc

SEQ ID NO: 409788 - RNA, 19 nt, Artificial Sequence
  Description of Artificial Sequence: Synthetic oligonucleotide
ucacccaggugaaauuugc

SEQ ID NO: 409789 - RNA, 19 nt, Artificial Sequence
  Description of Artificial Sequence: Synthetic oligonucleotide
acacgugaauggcuguggc

SEQ ID NO: 409790 - RNA, 19 nt, Artificial Sequence
  Description of Artificial Sequence: Synthetic oligonucleotide
ggugaaauuugcagaaugg

SEQ ID NO: 409791 - RNA, 19 nt, Artificial Sequence
  Description of Artificial Sequence: Synthetic oligonucleotide
guacguggaagguugggcc

SEQ ID NO: 409792 - RNA, 19 nt, Artificial Sequence
  Description of Artificial Sequence: Synthetic oligonucleotide
uaccacggguuccauauca

SEQ ID NO: 409793 - RNA, 19 nt, Artificial Sequence
  Description of Artificial Sequence: Synthetic oligonucleotide
uauaguaugccaggagcca

SEQ ID NO: 409794 - RNA, 19 nt, Artificial Sequence
  Description of Artificial Sequence: Synthetic oligonucleotide
gagagugcugcaauggccc

SEQ ID NO: 409795 - RNA, 19 nt, Artificial Sequence
  Description of Artificial Sequence: Synthetic oligonucleotide
guaggguaagccuagccca

SEQ ID NO: 409796 - RNA, 19 nt, Artificial Sequence
  Description of Artificial Sequence: Synthetic oligonucleotide
ugagguagguagagcaaca

SEQ ID NO: 409797 - RNA, 19 nt, Artificial Sequence
  Description of Artificial Sequence: Synthetic oligonucleotide
acauagcccaaccagcccu

SEQ ID NO: 409798 - RNA, 19 nt, Artificial Sequence
  Description of Artificial Sequence: Synthetic oligonucleotide
aauuugcagaaugguaccu

SEQ ID NO: 409799 - RNA, 19 nt, Artificial Sequence
  Description of Artificial Sequence: Synthetic oligonucleotide
uuuauuugggugggcuggg

SEQ ID NO: 409800 - RNA, 19 nt, Artificial Sequence
  Description of Artificial Sequence: Synthetic oligonucleotide
cagugauaggaccagguuc

SEQ ID NO: 409801 - RNA, 19 nt, Artificial Sequence
  Description of Artificial Sequence: Synthetic oligonucleotide
uaagauacacugcccacuu

SEQ ID NO: 409802 - RNA, 19 nt, Artificial Sequence
  Description of Artificial Sequence: Synthetic oligonucleotide
caugccuagcuguucagug

SEQ ID NO: 409803 - RNA, 19 nt, Artificial Sequence
  Description of Artificial Sequence: Synthetic oligonucleotide
gagacaaugguucgaugca

SEQ ID NO: 409804 - RNA, 19 nt, Artificial Sequence
  Description of Artificial Sequence: Synthetic oligonucleotide
ccaaagacccuacacaccc

SEQ ID NO: 409805 - RNA, 19 nt, Artificial Sequence
  Description of Artificial Sequence: Synthetic oligonucleotide
caucuuugcugauuggguc

SEQ ID NO: 409806 - RNA, 19 nt, Artificial Sequence
  Description of Artificial Sequence: Synthetic oligonucleotide
uacauagcccaaccagccc

SEQ ID NO: 409807 - RNA, 19 nt, Artificial Sequence
  Description of Artificial Sequence: Synthetic oligonucleotide
cagguucaugguucgacgg

SEQ ID NO: 409808 - RNA, 19 nt, Artificial Sequence
  Description of Artificial Sequence: Synthetic oligonucleotide
acacacgguacugacacag

SEQ ID NO: 409809 - RNA, 19 nt, Artificial Sequence
  Description of Artificial Sequence: Synthetic oligonucleotide
acggguuccauaucagucu

SEQ ID NO: 409810 - RNA, 19 nt, Artificial Sequence
  Description of Artificial Sequence: Synthetic oligonucleotide
auacccugcucccauccuc

SEQ ID NO: 409811 - RNA, 19 nt, Artificial Sequence
  Description of Artificial Sequence: Synthetic oligonucleotide
gaagguaggguaagccuag

SEQ ID NO: 409812 - RNA, 19 nt, Artificial Sequence
  Description of Artificial Sequence: Synthetic oligonucleotide
aucgacaucagagauguuu

SEQ ID NO: 409813 - RNA, 19 nt, Artificial Sequence
  Description of Artificial Sequence: Synthetic oligonucleotide
cugaauucgccacccgggg

SEQ ID NO: 409814 - RNA, 19 nt, Artificial Sequence
  Description of Artificial Sequence: Synthetic oligonucleotide
caccuaauccacaggaauc

SEQ ID NO: 409815 - RNA, 19 nt, Artificial Sequence
  Description of Artificial Sequence: Synthetic oligonucleotide
acccuacacacccacagga

SEQ ID NO: 409816 - RNA, 19 nt, Artificial Sequence
  Description of Artificial Sequence: Synthetic oligonucleotide
gcauauaggucaaauagac

SEQ ID NO: 409817 - RNA, 19 nt, Artificial Sequence
  Description of Artificial Sequence: Synthetic oligonucleotide
ugggguuaggcauggggca

SEQ ID NO: 409818 - RNA, 19 nt, Artificial Sequence
  Description of Artificial Sequence: Synthetic oligonucleotide
ucgaugcaagucaggaaac

SEQ ID NO: 409819 - RNA, 19 nt, Artificial Sequence
  Description of Artificial Sequence: Synthetic oligonucleotide
uagacaucacgcucugaga

SEQ ID NO: 409820 - RNA, 19 nt, Artificial Sequence
  Description of Artificial Sequence: Synthetic oligonucleotide
ccugauugauguaggaugc

SEQ ID NO: 409821 - RNA, 19 nt, Artificial Sequence
  Description of Artificial Sequence: Synthetic oligonucleotide
accuaauccacaggaauca

SEQ ID NO: 409822 - RNA, 19 nt, Artificial Sequence
  Description of Artificial Sequence: Synthetic oligonucleotide
caaauagacaucacgcucu

SEQ ID NO: 409823 - RNA, 19 nt, Artificial Sequence
  Description of Artificial Sequence: Synthetic oligonucleotide
cacaugacccaugccaacg

SEQ ID NO: 409824 - RNA, 19 nt, Artificial Sequence
  Description of Artificial Sequence: Synthetic oligonucleotide
agaaggagagugcugcaau

SEQ ID NO: 409825 - RNA, 19 nt, Artificial Sequence
  Description of Artificial Sequence: Synthetic oligonucleotide
cuuugacgucaaaauuacc

SEQ ID NO: 409826 - RNA, 19 nt, Artificial Sequence
  Description of Artificial Sequence: Synthetic oligonucleotide
gguucgacggcccauccag

SEQ ID NO: 409827 - RNA, 19 nt, Artificial Sequence
  Description of Artificial Sequence: Synthetic oligonucleotide
agcauggacacacgguacu

SEQ ID NO: 409828 - RNA, 19 nt, Artificial Sequence
  Description of Artificial Sequence: Synthetic oligonucleotide
ugacgcucuaagauacacu

SEQ ID NO: 409829 - RNA, 19 nt, Artificial Sequence
  Description of Artificial Sequence: Synthetic oligonucleotide
uacugacacaguuccacaa

SEQ ID NO: 409830 - RNA, 19 nt, Artificial Sequence
  Description of Artificial Sequence: Synthetic oligonucleotide
gauugauguaggaugccga

SEQ ID NO: 409831 - RNA, 19 nt, Artificial Sequence
  Description of Artificial Sequence: Synthetic oligonucleotide
ucugagacaaugguucgau

SEQ ID NO: 409832 - RNA, 19 nt, Artificial Sequence
  Description of Artificial Sequence: Synthetic oligonucleotide
cauauaggucaaauagaca

SEQ ID NO: 409833 - RNA, 19 nt, Artificial Sequence
  Description of Artificial Sequence: Synthetic oligonucleotide
ugguucgaugcaagucagg

SEQ ID NO: 409834 - RNA, 19 nt, Artificial Sequence
  Description of Artificial Sequence: Synthetic oligonucleotide
aggaagcaggcugauaucu

SEQ ID NO: 409835 - RNA, 19 nt, Artificial Sequence
  Description of Artificial Sequence: Synthetic oligonucleotide
augguucgacggcccaucc

SEQ ID NO: 409836 - RNA, 19 nt, Artificial Sequence
  Description of Artificial Sequence: Synthetic oligonucleotide
cuagggaaugaauccacga

SEQ ID NO: 409837 - RNA, 19 nt, Artificial Sequence
  Description of Artificial Sequence: Synthetic oligonucleotide
auguaggaugccgagcgag

SEQ ID NO: 409838 - RNA, 19 nt, Artificial Sequence
  Description of Artificial Sequence: Synthetic oligonucleotide
uucccggauagucuucacu

SEQ ID NO: 409839 - RNA, 19 nt, Artificial Sequence
  Description of Artificial Sequence: Synthetic oligonucleotide
uugauguaggaugccgagc

SEQ ID NO: 409840 - RNA, 19 nt, Artificial Sequence
  Description of Artificial Sequence: Synthetic oligonucleotide
aggaaacuccccaaucauc

SEQ ID NO: 409841 - RNA, 19 nt, Artificial Sequence
  Description of Artificial Sequence: Synthetic oligonucleotide
agcguucuuucauccaucu

SEQ ID NO: 409842 - RNA, 19 nt, Artificial Sequence
  Description of Artificial Sequence: Synthetic oligonucleotide
cuuggacccuucugcaagc

SEQ ID NO: 409843 - RNA, 19 nt, Artificial Sequence
  Description of Artificial Sequence: Synthetic oligonucleotide
aggaugccgagcgaggcgg

SEQ ID NO: 409844 - RNA, 19 nt, Artificial Sequence
  Description of Artificial Sequence: Synthetic oligonucleotide
gcauggggcacuuuagugc

SEQ ID NO: 409845 - RNA, 19 nt, Artificial Sequence
  Description of Artificial Sequence: Synthetic oligonucleotide
cacaucgggcuguacuucc

SEQ ID NO: 409846 - RNA, 19 nt, Artificial Sequence
  Description of Artificial Sequence: Synthetic oligonucleotide
acgccccaaacccacagug

SEQ ID NO: 409847 - RNA, 19 nt, Artificial Sequence
  Description of Artificial Sequence: Synthetic oligonucleotide
uguacacgugaauggcugu

SEQ ID NO: 409848 - RNA, 19 nt, Artificial Sequence
  Description of Artificial Sequence: Synthetic oligonucleotide
guuaccacggguuccauau

SEQ ID NO: 409849 - RNA, 19 nt, Artificial Sequence
  Description of Artificial Sequence: Synthetic oligonucleotide
gagguagguagagcaacag

SEQ ID NO: 409850 - RNA, 19 nt, Artificial Sequence
  Description of Artificial Sequence: Synthetic oligonucleotide
cugauguuaccacggguuc

SEQ ID NO: 409851 - RNA, 19 nt, Artificial Sequence
  Description of Artificial Sequence: Synthetic oligonucleotide
ccugaauucgccacccggg

SEQ ID NO: 409852 - RNA, 19 nt, Artificial Sequence
  Description of Artificial Sequence: Synthetic oligonucleotide
aauggcccucuuaaaggug

SEQ ID NO: 409853 - RNA, 19 nt, Artificial Sequence
  Description of Artificial Sequence: Synthetic oligonucleotide
guagcagcguucuuucauc

SEQ ID NO: 409854 - RNA, 19 nt, Artificial Sequence
  Description of Artificial Sequence: Synthetic oligonucleotide
cucguagcagcguucuuuc

SEQ ID NO: 409855 - RNA, 19 nt, Artificial Sequence
  Description of Artificial Sequence: Synthetic oligonucleotide
cacgugaauggcuguggcc

SEQ ID NO: 409856 - RNA, 19 nt, Artificial Sequence
  Description of Artificial Sequence: Synthetic oligonucleotide
agugcccaccacauauacc

SEQ ID NO: 409857 - RNA, 19 nt, Artificial Sequence
  Description of Artificial Sequence: Synthetic oligonucleotide
gguacugacacaguuccac

SEQ ID NO: 409858 - RNA, 19 nt, Artificial Sequence
  Description of Artificial Sequence: Synthetic oligonucleotide
uguuuggggcugcugggaa

SEQ ID NO: 409859 - RNA, 19 nt, Artificial Sequence
  Description of Artificial Sequence: Synthetic oligonucleotide
cacgguacugacacaguuc

SEQ ID NO: 409860 - RNA, 19 nt, Artificial Sequence
  Description of Artificial Sequence: Synthetic oligonucleotide
uucuuucauccaucuucag

SEQ ID NO: 409861 - RNA, 19 nt, Artificial Sequence
  Description of Artificial Sequence: Synthetic oligonucleotide
uacauggacacgccccaaa

SEQ ID NO: 409862 - RNA, 19 nt, Artificial Sequence
  Description of Artificial Sequence: Synthetic oligonucleotide
acgucaaaauuaccugagu

SEQ ID NO: 409863 - RNA, 19 nt, Artificial Sequence
  Description of Artificial Sequence: Synthetic oligonucleotide
aucgggcuguacuucccgg

SEQ ID NO: 409864 - RNA, 19 nt, Artificial Sequence
  Description of Artificial Sequence: Synthetic oligonucleotide
gggaaugaauccacgagug

SEQ ID NO: 409865 - RNA, 19 nt, Artificial Sequence
  Description of Artificial Sequence: Synthetic oligonucleotide
uauacccugcucccauccu

SEQ ID NO: 409866 - RNA, 19 nt, Artificial Sequence
  Description of Artificial Sequence: Synthetic oligonucleotide
ccuccuaccggccuggccg

SEQ ID NO: 409867 - RNA, 19 nt, Artificial Sequence
  Description of Artificial Sequence: Synthetic oligonucleotide
cagccuguacacgugaaug

SEQ ID NO: 409868 - RNA, 19 nt, Artificial Sequence
  Description of Artificial Sequence: Synthetic oligonucleotide
uggacacgccccaaaccca

SEQ ID NO: 409869 - RNA, 19 nt, Artificial Sequence
  Description of Artificial Sequence: Synthetic oligonucleotide
cacuuuagugccucuucuc

SEQ ID NO: 409870 - RNA, 19 nt, Artificial Sequence
  Description of Artificial Sequence: Synthetic oligonucleotide
acaugacccaugccaacga

SEQ ID NO: 409871 - RNA, 19 nt, Artificial Sequence
  Description of Artificial Sequence: Synthetic oligonucleotide
cuguacuucccggauaguc

SEQ ID NO: 409872 - RNA, 19 nt, Artificial Sequence
  Description of Artificial Sequence: Synthetic oligonucleotide
gcuuggacccuucugcaag

SEQ ID NO: 409873 - RNA, 19 nt, Artificial Sequence
  Description of Artificial Sequence: Synthetic oligonucleotide
aggcaucgacaucagagau

SEQ ID NO: 409874 - RNA, 19 nt, Artificial Sequence
  Description of Artificial Sequence: Synthetic oligonucleotide
cauaucagucucuugaguu

SEQ ID NO: 409875 - RNA, 19 nt, Artificial Sequence
  Description of Artificial Sequence: Synthetic oligonucleotide
caccggaugugaugcagag

SEQ ID NO: 409876 - RNA, 19 nt, Artificial Sequence
  Description of Artificial Sequence: Synthetic oligonucleotide
aauccacgagugugagaca

SEQ ID NO: 409877 - RNA, 19 nt, Artificial Sequence
  Description of Artificial Sequence: Synthetic oligonucleotide
acgcucuaagauacacugc

SEQ ID NO: 409878 - RNA, 19 nt, Artificial Sequence
  Description of Artificial Sequence: Synthetic oligonucleotide
ugaauccacgagugugaga

SEQ ID NO: 409879 - RNA, 19 nt, Artificial Sequence
  Description of Artificial Sequence: Synthetic oligonucleotide
ggagcaccggaugugaugc

SEQ ID NO: 409880 - RNA, 19 nt, Artificial Sequence
  Description of Artificial Sequence: Synthetic oligonucleotide
cugauugggucugacagga

SEQ ID NO: 409881 - RNA, 19 nt, Artificial Sequence
  Description of Artificial Sequence: Synthetic oligonucleotide
aacuaccacaucgggcugu

SEQ ID NO: 409882 - RNA, 19 nt, Artificial Sequence
  Description of Artificial Sequence: Synthetic oligonucleotide
cugacgcucuaagauacac

SEQ ID NO: 409883 - RNA, 19 nt, Artificial Sequence
  Description of Artificial Sequence: Synthetic oligonucleotide
acacgccccaaacccacag

SEQ ID NO: 409884 - RNA, 19 nt, Artificial Sequence
  Description of Artificial Sequence: Synthetic oligonucleotide
ugaguuggcuucuccucuc

SEQ ID NO: 409885 - RNA, 19 nt, Artificial Sequence
  Description of Artificial Sequence: Synthetic oligonucleotide
ucagugauaugggcagaca

SEQ ID NO: 409886 - RNA, 19 nt, Artificial Sequence
  Description of Artificial Sequence: Synthetic oligonucleotide
cagcuugccaggcccaccc

SEQ ID NO: 409887 - RNA, 19 nt, Artificial Sequence
  Description of Artificial Sequence: Synthetic oligonucleotide
gguggguccacuacugucc

SEQ ID NO: 409888 - RNA, 19 nt, Artificial Sequence
  Description of Artificial Sequence: Synthetic oligonucleotide
cucuuaaaggugacuggga

SEQ ID NO: 409889 - RNA, 19 nt, Artificial Sequence
  Description of Artificial Sequence: Synthetic oligonucleotide
guaggaugccgagcgaggc

SEQ ID NO: 409890 - RNA, 19 nt, Artificial Sequence
  Description of Artificial Sequence: Synthetic oligonucleotide
ugggacgcacuuccugggc

SEQ ID NO: 409891 - RNA, 19 nt, Artificial Sequence
  Description of Artificial Sequence: Synthetic oligonucleotide
ucccugaauucgccacccg

SEQ ID NO: 409892 - RNA, 19 nt, Artificial Sequence
  Description of Artificial Sequence: Synthetic oligonucleotide
aauagacaucacgcucuga

SEQ ID NO: 409893 - RNA, 19 nt, Artificial Sequence
  Description of Artificial Sequence: Synthetic oligonucleotide
ucgacggcccauccaguac

SEQ ID NO: 409894 - RNA, 19 nt, Artificial Sequence
  Description of Artificial Sequence: Synthetic oligonucleotide
caaggcgccgugcagccug

SEQ ID NO: 409895 - RNA, 19 nt, Artificial Sequence
  Description of Artificial Sequence: Synthetic oligonucleotide
ugauaggaccagguucaug

SEQ ID NO: 409896 - RNA, 19 nt, Artificial Sequence
  Description of Artificial Sequence: Synthetic oligonucleotide
aaggagcuacauggacacg

SEQ ID NO: 409897 - RNA, 19 nt, Artificial Sequence
  Description of Artificial Sequence: Synthetic oligonucleotide
cauagcccaaccagcccug

SEQ ID NO: 409898 - RNA, 19 nt, Artificial Sequence
  Description of Artificial Sequence: Synthetic oligonucleotide
ccuacacacccacaggaag

SEQ ID NO: 409899 - RNA, 19 nt, Artificial Sequence
  Description of Artificial Sequence: Synthetic oligonucleotide
caaagaaggcagccuucac

SEQ ID NO: 409900 - RNA, 19 nt, Artificial Sequence
  Description of Artificial Sequence: Synthetic oligonucleotide
agaggcucggggaagcuca

SEQ ID NO: 409901 - RNA, 19 nt, Artificial Sequence
  Description of Artificial Sequence: Synthetic oligonucleotide
ccagguucaugguucgacg

SEQ ID NO: 409902 - RNA, 19 nt, Artificial Sequence
  Description of Artificial Sequence: Synthetic oligonucleotide
caugguccuccuaccggcc

SEQ ID NO: 409903 - RNA, 19 nt, Artificial Sequence
  Description of Artificial Sequence: Synthetic oligonucleotide
caugacccaugccaacgac

SEQ ID NO: 409904 - RNA, 19 nt, Artificial Sequence
  Description of Artificial Sequence: Synthetic oligonucleotide
gggcauaaggaagguaggg

SEQ ID NO: 409905 - RNA, 19 nt, Artificial Sequence
  Description of Artificial Sequence: Synthetic oligonucleotide
gcuguuguggaguccagca

SEQ ID NO: 409906 - RNA, 19 nt, Artificial Sequence
  Description of Artificial Sequence: Synthetic oligonucleotide
augguucgaugcaagucag

SEQ ID NO: 409907 - RNA, 19 nt, Artificial Sequence
  Description of Artificial Sequence: Synthetic oligonucleotide
ucgggcuguacuucccgga

SEQ ID NO: 409908 - RNA, 19 nt, Artificial Sequence
  Description of Artificial Sequence: Synthetic oligonucleotide
uuauuugggugggcugggc

SEQ ID NO: 409909 - RNA, 19 nt, Artificial Sequence
  Description of Artificial Sequence: Synthetic oligonucleotide
gcauaaggaagguagggua

SEQ ID NO: 409910 - RNA, 19 nt, Artificial Sequence
  Description of Artificial Sequence: Synthetic oligonucleotide
gguucaugguucgacggcc

SEQ ID NO: 409911 - RNA, 19 nt, Artificial Sequence
  Description of Artificial Sequence: Synthetic oligonucleotide
aguagagccccugggugug

SEQ ID NO: 409912 - RNA, 19 nt, Artificial Sequence
  Description of Artificial Sequence: Synthetic oligonucleotide
aguuugggcauuccaccua

SEQ ID NO: 409913 - RNA, 19 nt, Artificial Sequence
  Description of Artificial Sequence: Synthetic oligonucleotide
gauguaggaugccgagcga

SEQ ID NO: 409914 - RNA, 19 nt, Artificial Sequence
  Description of Artificial Sequence: Synthetic oligonucleotide
ccacauauacccugcuccc

SEQ ID NO: 409915 - RNA, 19 nt, Artificial Sequence
  Description of Artificial Sequence: Synthetic oligonucleotide
uccacgagugugagacaga

SEQ ID NO: 409916 - RNA, 19 nt, Artificial Sequence
  Description of Artificial Sequence: Synthetic oligonucleotide
ugguucgacggcccaucca

SEQ ID NO: 409917 - RNA, 19 nt, Artificial Sequence
  Description of Artificial Sequence: Synthetic oligonucleotide
ggaaggagcuacauggaca

SEQ ID NO: 409918 - RNA, 19 nt, Artificial Sequence
  Description of Artificial Sequence: Synthetic oligonucleotide
uucgacggcccauccagua

SEQ ID NO: 409919 - RNA, 19 nt, Artificial Sequence
  Description of Artificial Sequence: Synthetic oligonucleotide
cauauacccugcucccauc

SEQ ID NO: 409920 - RNA, 19 nt, Artificial Sequence
  Description of Artificial Sequence: Synthetic oligonucleotide
acagccuguacacgugaau

SEQ ID NO: 409921 - RNA, 19 nt, Artificial Sequence
  Description of Artificial Sequence: Synthetic oligonucleotide
ggaccagguucaugguucg

SEQ ID NO: 409922 - RNA, 19 nt, Artificial Sequence
  Description of Artificial Sequence: Synthetic oligonucleotide
uugccagccagagcacaag

SEQ ID NO: 409923 - RNA, 19 nt, Artificial Sequence
  Description of Artificial Sequence: Synthetic oligonucleotide
ggacaugagcccauucugc

SEQ ID NO: 409924 - RNA, 19 nt, Artificial Sequence
  Description of Artificial Sequence: Synthetic oligonucleotide
guucgaugcaagucaggaa

SEQ ID NO: 409925 - RNA, 19 nt, Artificial Sequence
  Description of Artificial Sequence: Synthetic oligonucleotide
augguaccuugcuggccuc

SEQ ID NO: 409926 - RNA, 19 nt, Artificial Sequence
  Description of Artificial Sequence: Synthetic oligonucleotide
ccaugguccuccuaccggc

SEQ ID NO: 409927 - RNA, 19 nt, Artificial Sequence
  Description of Artificial Sequence: Synthetic oligonucleotide
ucacaguacguggaagguu

SEQ ID NO: 409928 - RNA, 19 nt, Artificial Sequence
  Description of Artificial Sequence: Synthetic oligonucleotide
caccacauauacccugcuc

SEQ ID NO: 409929 - RNA, 19 nt, Artificial Sequence
  Description of Artificial Sequence: Synthetic oligonucleotide
gaguagagccccugggugu

SEQ ID NO: 409930 - RNA, 19 nt, Artificial Sequence
  Description of Artificial Sequence: Synthetic oligonucleotide
uguggacggcccugaugcc

SEQ ID NO: 409931 - RNA, 19 nt, Artificial Sequence
  Description of Artificial Sequence: Synthetic oligonucleotide
cugaggccccugauguuac

SEQ ID NO: 409932 - RNA, 19 nt, Artificial Sequence
  Description of Artificial Sequence: Synthetic oligonucleotide
augacccaugccaacgaca

SEQ ID NO: 409933 - RNA, 19 nt, Artificial Sequence
  Description of Artificial Sequence: Synthetic oligonucleotide
guucaugguucgacggccc

SEQ ID NO: 409934 - RNA, 19 nt, Artificial Sequence
  Description of Artificial Sequence: Synthetic oligonucleotide
gcuauauaguaugccagga

SEQ ID NO: 409935 - RNA, 19 nt, Artificial Sequence
  Description of Artificial Sequence: Synthetic oligonucleotide
ugauaugggcagacaccuu

SEQ ID NO: 409936 - RNA, 19 nt, Artificial Sequence
  Description of Artificial Sequence: Synthetic oligonucleotide
cuccuaccggccuggccgg

SEQ ID NO: 409937 - RNA, 19 nt, Artificial Sequence
  Description of Artificial Sequence: Synthetic oligonucleotide
aauucgccacccggggcca

SEQ ID NO: 409938 - RNA, 19 nt, Artificial Sequence
  Description of Artificial Sequence: Synthetic oligonucleotide
ucgggagcaccggauguga

SEQ ID NO: 409939 - RNA, 19 nt, Artificial Sequence
  Description of Artificial Sequence: Synthetic oligonucleotide
cagcguucuuucauccauc

SEQ ID NO: 409940 - RNA, 19 nt, Artificial Sequence
  Description of Artificial Sequence: Synthetic oligonucleotide
ggaacugucaugaucuccu

SEQ ID NO: 409941 - RNA, 19 nt, Artificial Sequence
  Description of Artificial Sequence: Synthetic oligonucleotide
ggcacuuuagugccucuuc

SEQ ID NO: 409942 - RNA, 19 nt, Artificial Sequence
  Description of Artificial Sequence: Synthetic oligonucleotide
gcucggggaagcucaaggc

SEQ ID NO: 409943 - RNA, 19 nt, Artificial Sequence
  Description of Artificial Sequence: Synthetic oligonucleotide
cccugaauucgccacccgg

SEQ ID NO: 409944 - RNA, 19 nt, Artificial Sequence
  Description of Artificial Sequence: Synthetic oligonucleotide
aaacugcgcagcaggcagu

SEQ ID NO: 409945 - RNA, 19 nt, Artificial Sequence
  Description of Artificial Sequence: Synthetic oligonucleotide
ccacaacuaccacaucggg

SEQ ID NO: 409946 - RNA, 19 nt, Artificial Sequence
  Description of Artificial Sequence: Synthetic oligonucleotide
caugguucgacggcccauc

SEQ ID NO: 409947 - RNA, 19 nt, Artificial Sequence
  Description of Artificial Sequence: Synthetic oligonucleotide
uccggacaugagcccauuc

SEQ ID NO: 409948 - RNA, 19 nt, Artificial Sequence
  Description of Artificial Sequence: Synthetic oligonucleotide
augguccuccuaccggccu

SEQ ID NO: 409949 - RNA, 19 nt, Artificial Sequence
  Description of Artificial Sequence: Synthetic oligonucleotide
cccaggugaaauuugcaga

SEQ ID NO: 409950 - RNA, 19 nt, Artificial Sequence
  Description of Artificial Sequence: Synthetic oligonucleotide
ugaggccccugauguuacc

SEQ ID NO: 409951 - RNA, 19 nt, Artificial Sequence
  Description of Artificial Sequence: Synthetic oligonucleotide
gggagcaccggaugugaug

SEQ ID NO: 409952 - RNA, 19 nt, Artificial Sequence
  Description of Artificial Sequence: Synthetic oligonucleotide
ggcaucgacaucagagaug

SEQ ID NO: 409953 - RNA, 19 nt, Artificial Sequence
  Description of Artificial Sequence: Synthetic oligonucleotide
ccacagacucucugcaggc

SEQ ID NO: 409954 - RNA, 19 nt, Artificial Sequence
  Description of Artificial Sequence: Synthetic oligonucleotide
ggaagguaggguaagccua

SEQ ID NO: 409955 - RNA, 19 nt, Artificial Sequence
  Description of Artificial Sequence: Synthetic oligonucleotide
cuggccgggccucacucac

SEQ ID NO: 409956 - RNA, 19 nt, Artificial Sequence
  Description of Artificial Sequence: Synthetic oligonucleotide
ggaagcucaaggcgccgug

SEQ ID NO: 409957 - RNA, 19 nt, Artificial Sequence
  Description of Artificial Sequence: Synthetic oligonucleotide
gaugcccguggguggcccc

SEQ ID NO: 409958 - RNA, 19 nt, Artificial Sequence
  Description of Artificial Sequence: Synthetic oligonucleotide
gacggcccauccaguacag

SEQ ID NO: 409959 - RNA, 19 nt, Artificial Sequence
  Description of Artificial Sequence: Synthetic oligonucleotide
caaagacccuacacaccca

SEQ ID NO: 409960 - RNA, 19 nt, Artificial Sequence
  Description of Artificial Sequence: Synthetic oligonucleotide
ggaagguugggccgcucac

SEQ ID NO: 409961 - RNA, 19 nt, Artificial Sequence
  Description of Artificial Sequence: Synthetic oligonucleotide
ugaugcccguggguggccc

SEQ ID NO: 409962 - RNA, 19 nt, Artificial Sequence
  Description of Artificial Sequence: Synthetic oligonucleotide
cuaccggccuggccgggcc

SEQ ID NO: 409963 - RNA, 19 nt, Artificial Sequence
  Description of Artificial Sequence: Synthetic oligonucleotide
ggggcacacaaauacaaau

SEQ ID NO: 409964 - RNA, 19 nt, Artificial Sequence
  Description of Artificial Sequence: Synthetic oligonucleotide
ccgcuugcugucaucacug

SEQ ID NO: 409965 - RNA, 19 nt, Artificial Sequence
  Description of Artificial Sequence: Synthetic oligonucleotide
cacgcucugagacaauggu

SEQ ID NO: 409966 - RNA, 19 nt, Artificial Sequence
  Description of Artificial Sequence: Synthetic oligonucleotide
cacagaugggacgcacuuc

SEQ ID NO: 409967 - RNA, 19 nt, Artificial Sequence
  Description of Artificial Sequence: Synthetic oligonucleotide
cucgggagcaccggaugug

SEQ ID NO: 409968 - RNA, 19 nt, Artificial Sequence
  Description of Artificial Sequence: Synthetic oligonucleotide
gccccugauguuaccacgg

SEQ ID NO: 409969 - RNA, 19 nt, Artificial Sequence
  Description of Artificial Sequence: Synthetic oligonucleotide
cugcuggguccugacacug

SEQ ID NO: 409970 - RNA, 19 nt, Artificial Sequence
  Description of Artificial Sequence: Synthetic oligonucleotide
cugagcucagacaguuaaa

SEQ ID NO: 409971 - RNA, 19 nt, Artificial Sequence
  Description of Artificial Sequence: Synthetic oligonucleotide
guuccucgggagcaccgga

SEQ ID NO: 409972 - RNA, 19 nt, Artificial Sequence
  Description of Artificial Sequence: Synthetic oligonucleotide
cacauauacccugcuccca

SEQ ID NO: 409973 - RNA, 19 nt, Artificial Sequence
  Description of Artificial Sequence: Synthetic oligonucleotide
gguggcuuggaugcaucug

SEQ ID NO: 409974 - RNA, 19 nt, Artificial Sequence
  Description of Artificial Sequence: Synthetic oligonucleotide
cacccgggacacucugccc

SEQ ID NO: 409975 - RNA, 19 nt, Artificial Sequence
  Description of Artificial Sequence: Synthetic oligonucleotide
acaucccgcuugcugucau

SEQ ID NO: 409976 - RNA, 19 nt, Artificial Sequence
  Description of Artificial Sequence: Synthetic oligonucleotide
cccuacaguguguguuugg

SEQ ID NO: 409977 - RNA, 19 nt, Artificial Sequence
  Description of Artificial Sequence: Synthetic oligonucleotide
gccugacgcagcauauagg

SEQ ID NO: 409978 - RNA, 19 nt, Artificial Sequence
  Description of Artificial Sequence: Synthetic oligonucleotide
ccacccgggacacucugcc

SEQ ID NO: 409979 - RNA, 19 nt, Artificial Sequence
  Description of Artificial Sequence: Synthetic oligonucleotide
gagcuguuguggaguccag

SEQ ID NO: 409980 - RNA, 19 nt, Artificial Sequence
  Description of Artificial Sequence: Synthetic oligonucleotide
aucugcacccagggacauc

SEQ ID NO: 409981 - RNA, 19 nt, Artificial Sequence
  Description of Artificial Sequence: Synthetic oligonucleotide
cacaggaaucaggccuagc

SEQ ID NO: 409982 - RNA, 19 nt, Artificial Sequence
  Description of Artificial Sequence: Synthetic oligonucleotide
cggacaugagcccauucug

SEQ ID NO: 409983 - RNA, 19 nt, Artificial Sequence
  Description of Artificial Sequence: Synthetic oligonucleotide
cgucaaaauuaccugagua

SEQ ID NO: 409984 - RNA, 19 nt, Artificial Sequence
  Description of Artificial Sequence: Synthetic oligonucleotide
cccgagauggauggagggg

SEQ ID NO: 409985 - RNA, 19 nt, Artificial Sequence
  Description of Artificial Sequence: Synthetic oligonucleotide
ccuaauccacaggaaucag

SEQ ID NO: 409986 - RNA, 19 nt, Artificial Sequence
  Description of Artificial Sequence: Synthetic oligonucleotide
uggguccacuacuguccac

SEQ ID NO: 409987 - RNA, 19 nt, Artificial Sequence
  Description of Artificial Sequence: Synthetic oligonucleotide
gcgcagcaggcagugauag

SEQ ID NO: 409988 - RNA, 19 nt, Artificial Sequence
  Description of Artificial Sequence: Synthetic oligonucleotide
ggguguggucucuucuuuc

SEQ ID NO: 409989 - RNA, 19 nt, Artificial Sequence
  Description of Artificial Sequence: Synthetic oligonucleotide
ggcauaaggaagguagggu

SEQ ID NO: 409990 - RNA, 19 nt, Artificial Sequence
  Description of Artificial Sequence: Synthetic oligonucleotide
gccaggcuauauaguaugc

SEQ ID NO: 409991 - RNA, 19 nt, Artificial Sequence
  Description of Artificial Sequence: Synthetic oligonucleotide
cagaaggagagugcugcaa

SEQ ID NO: 409992 - RNA, 19 nt, Artificial Sequence
  Description of Artificial Sequence: Synthetic oligonucleotide
gcauggacacacgguacug

SEQ ID NO: 409993 - RNA, 19 nt, Artificial Sequence
  Description of Artificial Sequence: Synthetic oligonucleotide
gcacaugacccaugccaac

SEQ ID NO: 409994 - RNA, 19 nt, Artificial Sequence
  Description of Artificial Sequence: Synthetic oligonucleotide
ggcacaugacccaugccaa

SEQ ID NO: 409995 - RNA, 19 nt, Artificial Sequence
  Description of Artificial Sequence: Synthetic oligonucleotide
gacgcacuuccugggcuca

SEQ ID NO: 409996 - RNA, 19 nt, Artificial Sequence
  Description of Artificial Sequence: Synthetic oligonucleotide
ggcgccgugcagccugacg

SEQ ID NO: 409997 - RNA, 19 nt, Artificial Sequence
  Description of Artificial Sequence: Synthetic oligonucleotide
ccacaaccacagaugggac

SEQ ID NO: 409998 - RNA, 19 nt, Artificial Sequence
  Description of Artificial Sequence: Synthetic oligonucleotide
caucccgcuugcugucauc

SEQ ID NO: 409999 - RNA, 19 nt, Artificial Sequence
  Description of Artificial Sequence: Synthetic oligonucleotide
guagguagagcaacagcuu

SEQ ID NO: 410000 - RNA, 19 nt, Artificial Sequence
  Description of Artificial Sequence: Synthetic oligonucleotide
gcacuuuagugccucuucu

SEQ ID NO: 410001 - RNA, 19 nt, Artificial Sequence
  Description of Artificial Sequence: Synthetic oligonucleotide
ucacuacaucccgcuugcu

SEQ ID NO: 410002 - RNA, 19 nt, Artificial Sequence
  Description of Artificial Sequence: Synthetic oligonucleotide
cugcacccagggacauccc

SEQ ID NO: 410003 - RNA, 19 nt, Artificial Sequence
  Description of Artificial Sequence: Synthetic oligonucleotide
cugcaugaguccggacaug

SEQ ID NO: 410004 - RNA, 19 nt, Artificial Sequence
  Description of Artificial Sequence: Synthetic oligonucleotide
cccucccaugacuggacag

SEQ ID NO: 410005 - RNA, 19 nt, Artificial Sequence
  Description of Artificial Sequence: Synthetic oligonucleotide
cagaggcucggggaagcuc

SEQ ID NO: 410006 - RNA, 19 nt, Artificial Sequence
  Description of Artificial Sequence: Synthetic oligonucleotide
auagcccaaccagcccugu

SEQ ID NO: 410007 - RNA, 19 nt, Artificial Sequence
  Description of Artificial Sequence: Synthetic oligonucleotide
ggguggccccuacagugug

SEQ ID NO: 410008 - RNA, 19 nt, Artificial Sequence
  Description of Artificial Sequence: Synthetic oligonucleotide
uucgccacccggggccaug

SEQ ID NO: 410009 - RNA, 19 nt, Artificial Sequence
  Description of Artificial Sequence: Synthetic oligonucleotide
ccuagccccuccaggcacc

SEQ ID NO: 410010 - RNA, 19 nt, Artificial Sequence
  Description of Artificial Sequence: Synthetic oligonucleotide
gccuagccccuccaggcac

SEQ ID NO: 410011 - RNA, 19 nt, Artificial Sequence
  Description of Artificial Sequence: Synthetic oligonucleotide
ucgccacccggggccaugc

SEQ ID NO: 410012 - RNA, 19 nt, Artificial Sequence
  Description of Artificial Sequence: Synthetic oligonucleotide
uccuaccggccuggccggg

SEQ ID NO: 410013 - RNA, 19 nt, Artificial Sequence
  Description of Artificial Sequence: Synthetic oligonucleotide
gggguuaggcauggggcac

SEQ ID NO: 410014 - RNA, 19 nt, Artificial Sequence
  Description of Artificial Sequence: Synthetic oligonucleotide
cugaugcccguggguggcc

SEQ ID NO: 410015 - RNA, 19 nt, Artificial Sequence
  Description of Artificial Sequence: Synthetic oligonucleotide
ggguccugacacuguggac

SEQ ID NO: 410016 - RNA, 19 nt, Artificial Sequence
  Description of Artificial Sequence: Synthetic oligonucleotide
uaccggccuggccgggccu

SEQ ID NO: 410017 - RNA, 19 nt, Artificial Sequence
  Description of Artificial Sequence: Synthetic oligonucleotide
gacacgccccaaacccaca

SEQ ID NO: 410018 - RNA, 19 nt, Artificial Sequence
  Description of Artificial Sequence: Synthetic oligonucleotide
gaccagguucaugguucga

SEQ ID NO: 410019 - RNA, 19 nt, Artificial Sequence
  Description of Artificial Sequence: Synthetic oligonucleotide
ggcagugauaggaccaggu

SEQ ID NO: 410020 - RNA, 19 nt, Artificial Sequence
  Description of Artificial Sequence: Synthetic oligonucleotide
ggcuuggacccuucugcaa

SEQ ID NO: 410021 - RNA, 19 nt, Artificial Sequence
  Description of Artificial Sequence: Synthetic oligonucleotide
aaggcgccgugcagccuga

SEQ ID NO: 410022 - RNA, 19 nt, Artificial Sequence
  Description of Artificial Sequence: Synthetic oligonucleotide
acgcacuuccugggcucag

SEQ ID NO: 410023 - RNA, 19 nt, Artificial Sequence
  Description of Artificial Sequence: Synthetic oligonucleotide
ggccacccgggacacucug

SEQ ID NO: 410024 - RNA, 19 nt, Artificial Sequence
  Description of Artificial Sequence: Synthetic oligonucleotide
ccaccuaauccacaggaau

SEQ ID NO: 410025 - RNA, 19 nt, Artificial Sequence
  Description of Artificial Sequence: Synthetic oligonucleotide
guccacuacuguccacagu

SEQ ID NO: 410026 - RNA, 19 nt, Artificial Sequence
  Description of Artificial Sequence: Synthetic oligonucleotide
auguuaccacggguuccau

SEQ ID NO: 410027 - RNA, 19 nt, Artificial Sequence
  Description of Artificial Sequence: Synthetic oligonucleotide
gggacgcacuuccugggcu

SEQ ID NO: 410028 - RNA, 19 nt, Artificial Sequence
  Description of Artificial Sequence: Synthetic oligonucleotide
ccagaaggagagugcugca

SEQ ID NO: 410029 - RNA, 19 nt, Artificial Sequence
  Description of Artificial Sequence: Synthetic oligonucleotide
ccauaucagucucuugagu

SEQ ID NO: 410030 - RNA, 19 nt, Artificial Sequence
  Description of Artificial Sequence: Synthetic oligonucleotide
gccgugcagccugacgcag

SEQ ID NO: 410031 - RNA, 19 nt, Artificial Sequence
  Description of Artificial Sequence: Synthetic oligonucleotide
gcaccggaugugaugcaga

SEQ ID NO: 410032 - RNA, 19 nt, Artificial Sequence
  Description of Artificial Sequence: Synthetic oligonucleotide
acggcccauccaguacaga

SEQ ID NO: 410033 - RNA, 19 nt, Artificial Sequence
  Description of Artificial Sequence: Synthetic oligonucleotide
gcugcuggguccugacacu

SEQ ID NO: 410034 - RNA, 19 nt, Artificial Sequence
  Description of Artificial Sequence: Synthetic oligonucleotide
gaggcucggggaagcucaa

SEQ ID NO: 410035 - RNA, 19 nt, Artificial Sequence
  Description of Artificial Sequence: Synthetic oligonucleotide
cgacggcccauccaguaca

SEQ ID NO: 410036 - RNA, 19 nt, Artificial Sequence
  Description of Artificial Sequence: Synthetic oligonucleotide
cacuggauuuaaggcuugu

SEQ ID NO: 410037 - RNA, 19 nt, Artificial Sequence
  Description of Artificial Sequence: Synthetic oligonucleotide
ccccuacaguguguguuug

SEQ ID NO: 410038 - RNA, 19 nt, Artificial Sequence
  Description of Artificial Sequence: Synthetic oligonucleotide
aggcgccgugcagccugac

SEQ ID NO: 410039 - RNA, 19 nt, Artificial Sequence
  Description of Artificial Sequence: Synthetic oligonucleotide
cgugaauggcuguggccca

SEQ ID NO: 410040 - RNA, 19 nt, Artificial Sequence
  Description of Artificial Sequence: Synthetic oligonucleotide
cacgccccaaacccacagu

SEQ ID NO: 410041 - RNA, 19 nt, Artificial Sequence
  Description of Artificial Sequence: Synthetic oligonucleotide
guucgacggcccauccagu

SEQ ID NO: 410042 - RNA, 19 nt, Artificial Sequence
  Description of Artificial Sequence: Synthetic oligonucleotide
guggaagguugggccgcuc

SEQ ID NO: 410043 - RNA, 19 nt, Artificial Sequence
  Description of Artificial Sequence: Synthetic oligonucleotide
acgcagcauauaggucaaa

SEQ ID NO: 410044 - RNA, 19 nt, Artificial Sequence
  Description of Artificial Sequence: Synthetic oligonucleotide
cagccugacgcagcauaua

SEQ ID NO: 410045 - RNA, 19 nt, Artificial Sequence
  Description of Artificial Sequence: Synthetic oligonucleotide
cggauagucuucacuacau

SEQ ID NO: 410046 - RNA, 19 nt, Artificial Sequence
  Description of Artificial Sequence: Synthetic oligonucleotide
guccuccuaccggccuggc

SEQ ID NO: 410047 - RNA, 19 nt, Artificial Sequence
  Description of Artificial Sequence: Synthetic oligonucleotide
ggccccuacaguguguguu

SEQ ID NO: 410048 - RNA, 19 nt, Artificial Sequence
  Description of Artificial Sequence: Synthetic oligonucleotide
ccuaccggccuggccgggc

SEQ ID NO: 410049 - RNA, 19 nt, Artificial Sequence
  Description of Artificial Sequence: Synthetic oligonucleotide
cucacgccgccgcuucagu

SEQ ID NO: 410050 - RNA, 19 nt, Artificial Sequence
  Description of Artificial Sequence: Synthetic oligonucleotide
gggccaugccuagcuguuc

SEQ ID NO: 410051 - RNA, 19 nt, Artificial Sequence
  Description of Artificial Sequence: Synthetic oligonucleotide
gccccacaccacacugagc

SEQ ID NO: 410052 - RNA, 19 nt, Artificial Sequence
  Description of Artificial Sequence: Synthetic oligonucleotide
ggguuaggcauggggcacu

SEQ ID NO: 410053 - RNA, 19 nt, Artificial Sequence
  Description of Artificial Sequence: Synthetic oligonucleotide
ccgcucacgccgccgcuuc

SEQ ID NO: 410054 - RNA, 19 nt, Artificial Sequence
  Description of Artificial Sequence: Synthetic oligonucleotide
ccucgggagcaccggaugu

SEQ ID NO: 410055 - RNA, 19 nt, Artificial Sequence
  Description of Artificial Sequence: Synthetic oligonucleotide
ggcccucuuaaaggugacu

SEQ ID NO: 410056 - RNA, 19 nt, Artificial Sequence
  Description of Artificial Sequence: Synthetic oligonucleotide
ggccggucacccaggugaa

SEQ ID NO: 410057 - RNA, 19 nt, Artificial Sequence
  Description of Artificial Sequence: Synthetic oligonucleotide
gcguucuuucauccaucuu

SEQ ID NO: 410058 - RNA, 19 nt, Artificial Sequence
  Description of Artificial Sequence: Synthetic oligonucleotide
gcccguggguggccccuac

SEQ ID NO: 410059 - RNA, 19 nt, Artificial Sequence
  Description of Artificial Sequence: Synthetic oligonucleotide
ccaugccuagcuguucagu

SEQ ID NO: 410060 - RNA, 19 nt, Artificial Sequence
  Description of Artificial Sequence: Synthetic oligonucleotide
gguggccccuacagugugu

SEQ ID NO: 410061 - RNA, 19 nt, Artificial Sequence
  Description of Artificial Sequence: Synthetic oligonucleotide
gcggcgcuccucagccggc

SEQ ID NO: 410062 - RNA, 19 nt, Artificial Sequence
  Description of Artificial Sequence: Synthetic oligonucleotide
gcuguggcccauggugggu

SEQ ID NO: 410063 - RNA, 19 nt, Artificial Sequence
  Description of Artificial Sequence: Synthetic oligonucleotide
cgccgugcagccugacgca

SEQ ID NO: 410064 - RNA, 19 nt, Artificial Sequence
  Description of Artificial Sequence: Synthetic oligonucleotide
ggggccaugccuagcuguu

SEQ ID NO: 410065 - RNA, 19 nt, Artificial Sequence
  Description of Artificial Sequence: Synthetic oligonucleotide
gccuagcuguucagugaua

SEQ ID NO: 410066 - RNA, 19 nt, Artificial Sequence
  Description of Artificial Sequence: Synthetic oligonucleotide
gggcacuuuagugccucuu

SEQ ID NO: 410067 - RNA, 19 nt, Artificial Sequence
  Description of Artificial Sequence: Synthetic oligonucleotide
gcuguacuucccggauagu

SEQ ID NO: 410068 - RNA, 19 nt, Artificial Sequence
  Description of Artificial Sequence: Synthetic oligonucleotide
cggggccaugccuagcugu

SEQ ID NO: 410069 - RNA, 19 nt, Artificial Sequence
  Description of Artificial Sequence: Synthetic oligonucleotide
caucgacaucagagauguu

SEQ ID NO: 410070 - RNA, 19 nt, Artificial Sequence
  Description of Artificial Sequence: Synthetic oligonucleotide
guccggacaugagcccauu

SEQ ID NO: 410071 - RNA, 19 nt, Artificial Sequence
  Description of Artificial Sequence: Synthetic oligonucleotide
cgggcuguacuucccggau

SEQ ID NO: 410072 - RNA, 19 nt, Artificial Sequence
  Description of Artificial Sequence: Synthetic oligonucleotide
gccgccgcuucaguuucau

SEQ ID NO: 410073 - RNA, 19 nt, Artificial Sequence
  Description of Artificial Sequence: Synthetic oligonucleotide
cgggagcaccggaugugau

SEQ ID NO: 410074 - RNA, 19 nt, Artificial Sequence
  Description of Artificial Sequence: Synthetic oligonucleotide
cguggaagguugggccgcu

SEQ ID NO: 410075 - RNA, 19 nt, Artificial Sequence
  Description of Artificial Sequence: Synthetic oligonucleotide
aaaauugcuggauuugagc

SEQ ID NO: 410076 - RNA, 19 nt, Artificial Sequence
  Description of Artificial Sequence: Synthetic oligonucleotide
acuaguaagaaacaagggg

SEQ ID NO: 410077 - RNA, 19 nt, Artificial Sequence
  Description of Artificial Sequence: Synthetic oligonucleotide
uuaucuaagagacagcccc

SEQ ID NO: 410078 - RNA, 19 nt, Artificial Sequence
  Description of Artificial Sequence: Synthetic oligonucleotide
ugaauuagggcccaugggg

SEQ ID NO: 410079 - RNA, 19 nt, Artificial Sequence
  Description of Artificial Sequence: Synthetic oligonucleotide
aaacuaguaagaaacaagg

SEQ ID NO: 410080 - RNA, 19 nt, Artificial Sequence
  Description of Artificial Sequence: Synthetic oligonucleotide
cauucuuaaauuaagacca

SEQ ID NO: 410081 - RNA, 19 nt, Artificial Sequence
  Description of Artificial Sequence: Synthetic oligonucleotide
aagacaguuggguucaguc

SEQ ID NO: 410082 - RNA, 19 nt, Artificial Sequence
  Description of Artificial Sequence: Synthetic oligonucleotide
uuuuaucuaagagacagcc

SEQ ID NO: 410083 - RNA, 19 nt, Artificial Sequence
  Description of Artificial Sequence: Synthetic oligonucleotide
ucacaaauaacauuugccu

SEQ ID NO: 410084 - RNA, 19 nt, Artificial Sequence
  Description of Artificial Sequence: Synthetic oligonucleotide
ucugaguucacacccauug

SEQ ID NO: 410085 - RNA, 19 nt, Artificial Sequence
  Description of Artificial Sequence: Synthetic oligonucleotide
ugaguucacacccauuggg

SEQ ID NO: 410086 - RNA, 19 nt, Artificial Sequence
  Description of Artificial Sequence: Synthetic oligonucleotide
uccacaagaacaauucaag

SEQ ID NO: 410087 - RNA, 19 nt, Artificial Sequence
  Description of Artificial Sequence: Synthetic oligonucleotide
gaagcgggcaauuaggacc

SEQ ID NO: 410088 - RNA, 19 nt, Artificial Sequence
  Description of Artificial Sequence: Synthetic oligonucleotide
auacacccgaccuaggagc

SEQ ID NO: 410089 - RNA, 19 nt, Artificial Sequence
  Description of Artificial Sequence: Synthetic oligonucleotide
cuaauggaccagcagaucg

SEQ ID NO: 410090 - RNA, 19 nt, Artificial Sequence
  Description of Artificial Sequence: Synthetic oligonucleotide
ugggguuagacauaggccc

SEQ ID NO: 410091 - RNA, 19 nt, Artificial Sequence
  Description of Artificial Sequence: Synthetic oligonucleotide
uuggauuagccauaggacc

SEQ ID NO: 410092 - RNA, 19 nt, Artificial Sequence
  Description of Artificial Sequence: Synthetic oligonucleotide
aauacacccgaccuaggag

SEQ ID NO: 410093 - RNA, 19 nt, Artificial Sequence
  Description of Artificial Sequence: Synthetic oligonucleotide
uguucuaggguuuaagccu

SEQ ID NO: 410094 - RNA, 19 nt, Artificial Sequence
  Description of Artificial Sequence: Synthetic oligonucleotide
uggaaaguuagguugguug

SEQ ID NO: 410095 - RNA, 19 nt, Artificial Sequence
  Description of Artificial Sequence: Synthetic oligonucleotide
uguagcaucaccagauagc

SEQ ID NO: 410096 - RNA, 19 nt, Artificial Sequence
  Description of Artificial Sequence: Synthetic oligonucleotide
uugaucucagauuaggacu

SEQ ID NO: 410097 - RNA, 19 nt, Artificial Sequence
  Description of Artificial Sequence: Synthetic oligonucleotide
uaacauuccauuuggguac

SEQ ID NO: 410098 - RNA, 19 nt, Artificial Sequence
  Description of Artificial Sequence: Synthetic oligonucleotide
gauccuguacccaagaggc

SEQ ID NO: 410099 - RNA, 19 nt, Artificial Sequence
  Description of Artificial Sequence: Synthetic oligonucleotide
cauucuguguucaagcccc

SEQ ID NO: 410100 - RNA, 19 nt, Artificial Sequence
  Description of Artificial Sequence: Synthetic oligonucleotide
aguuagguugguuggggcc

SEQ ID NO: 410101 - RNA, 19 nt, Artificial Sequence
  Description of Artificial Sequence: Synthetic oligonucleotide
cagauuaggacuugguccg

SEQ ID NO: 410102 - RNA, 19 nt, Artificial Sequence
  Description of Artificial Sequence: Synthetic oligonucleotide
guaagaaaagauacaaugc

SEQ ID NO: 410103 - RNA, 19 nt, Artificial Sequence
  Description of Artificial Sequence: Synthetic oligonucleotide
agauccuguacccaagagg

SEQ ID NO: 410104 - RNA, 19 nt, Artificial Sequence
  Description of Artificial Sequence: Synthetic oligonucleotide
uuaagccugguccuggucc

SEQ ID NO: 410105 - RNA, 19 nt, Artificial Sequence
  Description of Artificial Sequence: Synthetic oligonucleotide
agacaguuggguucagucc

SEQ ID NO: 410106 - RNA, 19 nt, Artificial Sequence
  Description of Artificial Sequence: Synthetic oligonucleotide
guuacagggccauucaucc

SEQ ID NO: 410107 - RNA, 19 nt, Artificial Sequence
  Description of Artificial Sequence: Synthetic oligonucleotide
uggguuaagacccaggguu

SEQ ID NO: 410108 - RNA, 19 nt, Artificial Sequence
  Description of Artificial Sequence: Synthetic oligonucleotide
cuuggauuagccauaggac

SEQ ID NO: 410109 - RNA, 19 nt, Artificial Sequence
  Description of Artificial Sequence: Synthetic oligonucleotide
uaagaccagauccuguacc

SEQ ID NO: 410110 - RNA, 19 nt, Artificial Sequence
  Description of Artificial Sequence: Synthetic oligonucleotide
cuugaucucagauuaggac

SEQ ID NO: 410111 - RNA, 19 nt, Artificial Sequence
  Description of Artificial Sequence: Synthetic oligonucleotide
aacuaguaagaaacaaggg

SEQ ID NO: 410112 - RNA, 19 nt, Artificial Sequence
  Description of Artificial Sequence: Synthetic oligonucleotide
gauugggaguaccaguggg

SEQ ID NO: 410113 - RNA, 19 nt, Artificial Sequence
  Description of Artificial Sequence: Synthetic oligonucleotide
aauuaggaccugcaggcca

SEQ ID NO: 410114 - RNA, 19 nt, Artificial Sequence
  Description of Artificial Sequence: Synthetic oligonucleotide
agugauucucccuuuuauc

SEQ ID NO: 410115 - RNA, 19 nt, Artificial Sequence
  Description of Artificial Sequence: Synthetic oligonucleotide
aaaguuagguugguugggg

SEQ ID NO: 410116 - RNA, 19 nt, Artificial Sequence
  Description of Artificial Sequence: Synthetic oligonucleotide
aaauacacccgaccuagga

SEQ ID NO: 410117 - RNA, 19 nt, Artificial Sequence
  Description of Artificial Sequence: Synthetic oligonucleotide
gaggauaagacaccugccc

SEQ ID NO: 410118 - RNA, 19 nt, Artificial Sequence
  Description of Artificial Sequence: Synthetic oligonucleotide
uacauugcagccauuggac

SEQ ID NO: 410119 - RNA, 19 nt, Artificial Sequence
  Description of Artificial Sequence: Synthetic oligonucleotide
aaugugguaggaucuguga

SEQ ID NO: 410120 - RNA, 19 nt, Artificial Sequence
  Description of Artificial Sequence: Synthetic oligonucleotide
cagaggauaagacaccugc

SEQ ID NO: 410121 - RNA, 19 nt, Artificial Sequence
  Description of Artificial Sequence: Synthetic oligonucleotide
ugccauaaggaaaggaucu

SEQ ID NO: 410122 - RNA, 19 nt, Artificial Sequence
  Description of Artificial Sequence: Synthetic oligonucleotide
cucauuugaacuugagccc

SEQ ID NO: 410123 - RNA, 19 nt, Artificial Sequence
  Description of Artificial Sequence: Synthetic oligonucleotide
uguagcuccaaaucuacuc

SEQ ID NO: 410124 - RNA, 19 nt, Artificial Sequence
  Description of Artificial Sequence: Synthetic oligonucleotide
aaauuaagaccagauccug

SEQ ID NO: 410125 - RNA, 19 nt, Artificial Sequence
  Description of Artificial Sequence: Synthetic oligonucleotide
guacucuugacaugguagg

SEQ ID NO: 410126 - RNA, 19 nt, Artificial Sequence
  Description of Artificial Sequence: Synthetic oligonucleotide
gaacgaagcacagugauuc

SEQ ID NO: 410127 - RNA, 19 nt, Artificial Sequence
  Description of Artificial Sequence: Synthetic oligonucleotide
augugguaggaucugugac

SEQ ID NO: 410128 - RNA, 19 nt, Artificial Sequence
  Description of Artificial Sequence: Synthetic oligonucleotide
cagguuuccaccaagagaa

SEQ ID NO: 410129 - RNA, 19 nt, Artificial Sequence
  Description of Artificial Sequence: Synthetic oligonucleotide
ggaaaguuagguugguugg

SEQ ID NO: 410130 - RNA, 19 nt, Artificial Sequence
  Description of Artificial Sequence: Synthetic oligonucleotide
agcaaccgcccucucaucc

SEQ ID NO: 410131 - RNA, 19 nt, Artificial Sequence
  Description of Artificial Sequence: Synthetic oligonucleotide
cuacucuuuuaucuaagag

SEQ ID NO: 410132 - RNA, 19 nt, Artificial Sequence
  Description of Artificial Sequence: Synthetic oligonucleotide
cuccuaaaagaccugcugc

SEQ ID NO: 410133 - RNA, 19 nt, Artificial Sequence
  Description of Artificial Sequence: Synthetic oligonucleotide
uaagacaccugcccucagg

SEQ ID NO: 410134 - RNA, 19 nt, Artificial Sequence
  Description of Artificial Sequence: Synthetic oligonucleotide
ucauuugaacuugagcccc

SEQ ID NO: 410135 - RNA, 19 nt, Artificial Sequence
  Description of Artificial Sequence: Synthetic oligonucleotide
ucuuugauugggaguacca

SEQ ID NO: 410136 - RNA, 19 nt, Artificial Sequence
  Description of Artificial Sequence: Synthetic oligonucleotide
ugcccauguuuccagaagc

SEQ ID NO: 410137 - RNA, 19 nt, Artificial Sequence
  Description of Artificial Sequence: Synthetic oligonucleotide
guaacauuccauuugggua

SEQ ID NO: 410138 - RNA, 19 nt, Artificial Sequence
  Description of Artificial Sequence: Synthetic oligonucleotide
auguagcaucaccagauag

SEQ ID NO: 410139 - RNA, 19 nt, Artificial Sequence
  Description of Artificial Sequence: Synthetic oligonucleotide
agacuguagcuccaaaucu

SEQ ID NO: 410140 - RNA, 19 nt, Artificial Sequence
  Description of Artificial Sequence: Synthetic oligonucleotide
ucucggguuagguccaagg

SEQ ID NO: 410141 - RNA, 19 nt, Artificial Sequence
  Description of Artificial Sequence: Synthetic oligonucleotide
uuugugcccauguuuccag

SEQ ID NO: 410142 - RNA, 19 nt, Artificial Sequence
  Description of Artificial Sequence: Synthetic oligonucleotide
cagauagcaagugagccag

SEQ ID NO: 410143 - RNA, 19 nt, Artificial Sequence
  Description of Artificial Sequence: Synthetic oligonucleotide
aguucacacccauugggug

SEQ ID NO: 410144 - RNA, 19 nt, Artificial Sequence
  Description of Artificial Sequence: Synthetic oligonucleotide
gaauuagggcccauggggc

SEQ ID NO: 410145 - RNA, 19 nt, Artificial Sequence
  Description of Artificial Sequence: Synthetic oligonucleotide
uaagagacagccccaccac

SEQ ID NO: 410146 - RNA, 19 nt, Artificial Sequence
  Description of Artificial Sequence: Synthetic oligonucleotide
cugaauuagggcccauggg

SEQ ID NO: 410147 - RNA, 19 nt, Artificial Sequence
  Description of Artificial Sequence: Synthetic oligonucleotide
acuggccuaggauugggag

SEQ ID NO: 410148 - RNA, 19 nt, Artificial Sequence
  Description of Artificial Sequence: Synthetic oligonucleotide
aggcuccagaauuuacccc

SEQ ID NO: 410149 - RNA, 19 nt, Artificial Sequence
  Description of Artificial Sequence: Synthetic oligonucleotide
aggauaagacaccugcccu

SEQ ID NO: 410150 - RNA, 19 nt, Artificial Sequence
  Description of Artificial Sequence: Synthetic oligonucleotide
ggaaauacacccgaccuag

SEQ ID NO: 410151 - RNA, 19 nt, Artificial Sequence
  Description of Artificial Sequence: Synthetic oligonucleotide
gaaaaugugcuggauuuga

SEQ ID NO: 410152 - RNA, 19 nt, Artificial Sequence
  Description of Artificial Sequence: Synthetic oligonucleotide
guacauugcagccauugga

SEQ ID NO: 410153 - RNA, 19 nt, Artificial Sequence
  Description of Artificial Sequence: Synthetic oligonucleotide
augggaagcgggcaauuag

SEQ ID NO: 410154 - RNA, 19 nt, Artificial Sequence
  Description of Artificial Sequence: Synthetic oligonucleotide
uguguucauaacaggcccu

SEQ ID NO: 410155 - RNA, 19 nt, Artificial Sequence
  Description of Artificial Sequence: Synthetic oligonucleotide
gcugaauuagggcccaugg

SEQ ID NO: 410156 - RNA, 19 nt, Artificial Sequence
  Description of Artificial Sequence: Synthetic oligonucleotide
cucagauuaggacuugguc

SEQ ID NO: 410157 - RNA, 19 nt, Artificial Sequence
  Description of Artificial Sequence: Synthetic oligonucleotide
cuaggagccgcguuuguac

SEQ ID NO: 410158 - RNA, 19 nt, Artificial Sequence
  Description of Artificial Sequence: Synthetic oligonucleotide
aaaugugguaggaucugug

SEQ ID NO: 410159 - RNA, 19 nt, Artificial Sequence
  Description of Artificial Sequence: Synthetic oligonucleotide
ugaccuugggaaagcaacu

SEQ ID NO: 410160 - RNA, 19 nt, Artificial Sequence
  Description of Artificial Sequence: Synthetic oligonucleotide
ggcugaacgaagcacagug

SEQ ID NO: 410161 - RNA, 19 nt, Artificial Sequence
  Description of Artificial Sequence: Synthetic oligonucleotide
uugguuacagggccauuca

SEQ ID NO: 410162 - RNA, 19 nt, Artificial Sequence
  Description of Artificial Sequence: Synthetic oligonucleotide
gguacucuugacaugguag

SEQ ID NO: 410163 - RNA, 19 nt, Artificial Sequence
  Description of Artificial Sequence: Synthetic oligonucleotide
aaucaucccugucugccau

SEQ ID NO: 410164 - RNA, 19 nt, Artificial Sequence
  Description of Artificial Sequence: Synthetic oligonucleotide
cuacccgaggaaaugggac

SEQ ID NO: 410165 - RNA, 19 nt, Artificial Sequence
  Description of Artificial Sequence: Synthetic oligonucleotide
cuaagagacagccccacca

SEQ ID NO: 410166 - RNA, 19 nt, Artificial Sequence
  Description of Artificial Sequence: Synthetic oligonucleotide
uuugaaccagggaggcugc

SEQ ID NO: 410167 - RNA, 19 nt, Artificial Sequence
  Description of Artificial Sequence: Synthetic oligonucleotide
uugagccccagcuauguuc

SEQ ID NO: 410168 - RNA, 19 nt, Artificial Sequence
  Description of Artificial Sequence: Synthetic oligonucleotide
cuggccuaggauugggagg

SEQ ID NO: 410169 - RNA, 19 nt, Artificial Sequence
  Description of Artificial Sequence: Synthetic oligonucleotide
ugggaaaauugcuggauuu

SEQ ID NO: 410170 - RNA, 19 nt, Artificial Sequence
  Description of Artificial Sequence: Synthetic oligonucleotide
ucugugacaugagugucca

SEQ ID NO: 410171 - RNA, 19 nt, Artificial Sequence
  Description of Artificial Sequence: Synthetic oligonucleotide
uggaaauacacccgaccua

SEQ ID NO: 410172 - RNA, 19 nt, Artificial Sequence
  Description of Artificial Sequence: Synthetic oligonucleotide
cuaaucugggguuagacau

SEQ ID NO: 410173 - RNA, 19 nt, Artificial Sequence
  Description of Artificial Sequence: Synthetic oligonucleotide
gaggccaccugcucuagug

SEQ ID NO: 410174 - RNA, 19 nt, Artificial Sequence
  Description of Artificial Sequence: Synthetic oligonucleotide
cugaguucacacccauugg

SEQ ID NO: 410175 - RNA, 19 nt, Artificial Sequence
  Description of Artificial Sequence: Synthetic oligonucleotide
cucggguuagguccaaggc

SEQ ID NO: 410176 - RNA, 19 nt, Artificial Sequence
  Description of Artificial Sequence: Synthetic oligonucleotide
caauguaccagaagacuga

SEQ ID NO: 410177 - RNA, 19 nt, Artificial Sequence
  Description of Artificial Sequence: Synthetic oligonucleotide
aguucuccaaugggaagcg

SEQ ID NO: 410178 - RNA, 19 nt, Artificial Sequence
  Description of Artificial Sequence: Synthetic oligonucleotide
gacaguuggguucaguccu

SEQ ID NO: 410179 - RNA, 19 nt, Artificial Sequence
  Description of Artificial Sequence: Synthetic oligonucleotide
caccagauagcaagugagc

SEQ ID NO: 410180 - RNA, 19 nt, Artificial Sequence
  Description of Artificial Sequence: Synthetic oligonucleotide
uacacccgaccuaggagcc

SEQ ID NO: 410181 - RNA, 19 nt, Artificial Sequence
  Description of Artificial Sequence: Synthetic oligonucleotide
ugcucaccaauguagcauc

SEQ ID NO: 410182 - RNA, 19 nt, Artificial Sequence
  Description of Artificial Sequence: Synthetic oligonucleotide
agccccaccacagaaccac

SEQ ID NO: 410183 - RNA, 19 nt, Artificial Sequence
  Description of Artificial Sequence: Synthetic oligonucleotide
uggccuaggauugggagga

SEQ ID NO: 410184 - RNA, 19 nt, Artificial Sequence
  Description of Artificial Sequence: Synthetic oligonucleotide
uggaaagaaguuggauucc

SEQ ID NO: 410185 - RNA, 19 nt, Artificial Sequence
  Description of Artificial Sequence: Synthetic oligonucleotide
uccaaugggaagcgggcaa

SEQ ID NO: 410186 - RNA, 19 nt, Artificial Sequence
  Description of Artificial Sequence: Synthetic oligonucleotide
uggcccuuggaaaguuagg

SEQ ID NO: 410187 - RNA, 19 nt, Artificial Sequence
  Description of Artificial Sequence: Synthetic oligonucleotide
caccaauguagcaucacca

SEQ ID NO: 410188 - RNA, 19 nt, Artificial Sequence
  Description of Artificial Sequence: Synthetic oligonucleotide
ugccuacccgaggaaaugg

SEQ ID NO: 410189 - RNA, 19 nt, Artificial Sequence
  Description of Artificial Sequence: Synthetic oligonucleotide
gaaauguaccuggauuuga

SEQ ID NO: 410190 - RNA, 19 nt, Artificial Sequence
  Description of Artificial Sequence: Synthetic oligonucleotide
aaugcucauuugaacuuga

SEQ ID NO: 410191 - RNA, 19 nt, Artificial Sequence
  Description of Artificial Sequence: Synthetic oligonucleotide
uggaugaucagaggagccu

SEQ ID NO: 410192 - RNA, 19 nt, Artificial Sequence
  Description of Artificial Sequence: Synthetic oligonucleotide
ugcuccuaaaagaccugcu

SEQ ID NO: 410193 - RNA, 19 nt, Artificial Sequence
  Description of Artificial Sequence: Synthetic oligonucleotide
ugaacgaagcacagugauu

SEQ ID NO: 410194 - RNA, 19 nt, Artificial Sequence
  Description of Artificial Sequence: Synthetic oligonucleotide
cagaucgugggaaggcagc

SEQ ID NO: 410195 - RNA, 19 nt, Artificial Sequence
  Description of Artificial Sequence: Synthetic oligonucleotide
uccuaaucugggguuagac

SEQ ID NO: 410196 - RNA, 19 nt, Artificial Sequence
  Description of Artificial Sequence: Synthetic oligonucleotide
uugcuccuaaaagaccugc

SEQ ID NO: 410197 - RNA, 19 nt, Artificial Sequence
  Description of Artificial Sequence: Synthetic oligonucleotide
uugacccgggccuaaugga

SEQ ID NO: 410198 - RNA, 19 nt, Artificial Sequence
  Description of Artificial Sequence: Synthetic oligonucleotide
guucuaggguuuaagccug

SEQ ID NO: 410199 - RNA, 19 nt, Artificial Sequence
  Description of Artificial Sequence: Synthetic oligonucleotide
uuaagacccaggguuccug

SEQ ID NO: 410200 - RNA, 19 nt, Artificial Sequence
  Description of Artificial Sequence: Synthetic oligonucleotide
acgaagcacagugauucuc

SEQ ID NO: 410201 - RNA, 19 nt, Artificial Sequence
  Description of Artificial Sequence: Synthetic oligonucleotide
ugcaggccaaugaaucccu

SEQ ID NO: 410202 - RNA, 19 nt, Artificial Sequence
  Description of Artificial Sequence: Synthetic oligonucleotide
ccuguucuaggguuuaagc

SEQ ID NO: 410203 - RNA, 19 nt, Artificial Sequence
  Description of Artificial Sequence: Synthetic oligonucleotide
agcuggaugaucagaggag

SEQ ID NO: 410204 - RNA, 19 nt, Artificial Sequence
  Description of Artificial Sequence: Synthetic oligonucleotide
gaggcugccuacccgagga

SEQ ID NO: 410205 - RNA, 19 nt, Artificial Sequence
  Description of Artificial Sequence: Synthetic oligonucleotide
accaguaccagaggauaag

SEQ ID NO: 410206 - RNA, 19 nt, Artificial Sequence
  Description of Artificial Sequence: Synthetic oligonucleotide
ggucacgagcaccagcagg

SEQ ID NO: 410207 - RNA, 19 nt, Artificial Sequence
  Description of Artificial Sequence: Synthetic oligonucleotide
uuuaagccugguccugguc

SEQ ID NO: 410208 - RNA, 19 nt, Artificial Sequence
  Description of Artificial Sequence: Synthetic oligonucleotide
uaggagccgcguuuguacc

SEQ ID NO: 410209 - RNA, 19 nt, Artificial Sequence
  Description of Artificial Sequence: Synthetic oligonucleotide
ccuuggauuagccauagga

SEQ ID NO: 410210 - RNA, 19 nt, Artificial Sequence
  Description of Artificial Sequence: Synthetic oligonucleotide
gaagcaugaucugcucacc

SEQ ID NO: 410211 - RNA, 19 nt, Artificial Sequence
  Description of Artificial Sequence: Synthetic oligonucleotide
aaagacaguuggguucagu

SEQ ID NO: 410212 - RNA, 19 nt, Artificial Sequence
  Description of Artificial Sequence: Synthetic oligonucleotide
agccuuaagucuggccacc

SEQ ID NO: 410213 - RNA, 19 nt, Artificial Sequence
  Description of Artificial Sequence: Synthetic oligonucleotide
aagcugaauuugcuccuaa

SEQ ID NO: 410214 - RNA, 19 nt, Artificial Sequence
  Description of Artificial Sequence: Synthetic oligonucleotide
ggucuugagaaaugagcug

SEQ ID NO: 410215 - RNA, 19 nt, Artificial Sequence
  Description of Artificial Sequence: Synthetic oligonucleotide
uccccauucuguguucaag

SEQ ID NO: 410216 - RNA, 19 nt, Artificial Sequence
  Description of Artificial Sequence: Synthetic oligonucleotide
uguucauaacaggcccucc

SEQ ID NO: 410217 - RNA, 19 nt, Artificial Sequence
  Description of Artificial Sequence: Synthetic oligonucleotide
cuaggguuuaagccugguc

SEQ ID NO: 410218 - RNA, 19 nt, Artificial Sequence
  Description of Artificial Sequence: Synthetic oligonucleotide
accagaggauaagacaccu

SEQ ID NO: 410219 - RNA, 19 nt, Artificial Sequence
  Description of Artificial Sequence: Synthetic oligonucleotide
gaccucugaaauguaccug

SEQ ID NO: 410220 - RNA, 19 nt, Artificial Sequence
  Description of Artificial Sequence: Synthetic oligonucleotide
ggccuaauggaccagcaga

SEQ ID NO: 410221 - RNA, 19 nt, Artificial Sequence
  Description of Artificial Sequence: Synthetic oligonucleotide
gguucuuugauugggagua

SEQ ID NO: 410222 - RNA, 19 nt, Artificial Sequence
  Description of Artificial Sequence: Synthetic oligonucleotide
cuggaaauacacccgaccu

SEQ ID NO: 410223 - RNA, 19 nt, Artificial Sequence
  Description of Artificial Sequence: Synthetic oligonucleotide
cugcucguggguugggccc

SEQ ID NO: 410224 - RNA, 19 nt, Artificial Sequence
  Description of Artificial Sequence: Synthetic oligonucleotide
ggauucaucccucuuggaa

SEQ ID NO: 410225 - RNA, 19 nt, Artificial Sequence
  Description of Artificial Sequence: Synthetic oligonucleotide
acgagcaccagcaggaaaa

SEQ ID NO: 410226 - RNA, 19 nt, Artificial Sequence
  Description of Artificial Sequence: Synthetic oligonucleotide
agugccagugggauucauc

SEQ ID NO: 410227 - RNA, 19 nt, Artificial Sequence
  Description of Artificial Sequence: Synthetic oligonucleotide
gguuuaagccugguccugg

SEQ ID NO: 410228 - RNA, 19 nt, Artificial Sequence
  Description of Artificial Sequence: Synthetic oligonucleotide
uuacagggccauucauccu

SEQ ID NO: 410229 - RNA, 19 nt, Artificial Sequence
  Description of Artificial Sequence: Synthetic oligonucleotide
ucacaucaggcugaacgaa

SEQ ID NO: 410230 - RNA, 19 nt, Artificial Sequence
  Description of Artificial Sequence: Synthetic oligonucleotide
cccgaugaacuuuggaaag

SEQ ID NO: 410231 - RNA, 19 nt, Artificial Sequence
  Description of Artificial Sequence: Synthetic oligonucleotide
auaagacaccugcccucag

SEQ ID NO: 410232 - RNA, 19 nt, Artificial Sequence
  Description of Artificial Sequence: Synthetic oligonucleotide
gccuguguucauaacaggc

SEQ ID NO: 410233 - RNA, 19 nt, Artificial Sequence
  Description of Artificial Sequence: Synthetic oligonucleotide
uaccuggauuugaagccaa

SEQ ID NO: 410234 - RNA, 19 nt, Artificial Sequence
  Description of Artificial Sequence: Synthetic oligonucleotide
agcugaauuugcuccuaaa

SEQ ID NO: 410235 - RNA, 19 nt, Artificial Sequence
  Description of Artificial Sequence: Synthetic oligonucleotide
ugcccagcggcugaccuug

SEQ ID NO: 410236 - RNA, 19 nt, Artificial Sequence
  Description of Artificial Sequence: Synthetic oligonucleotide
guacccaagaggccaccug

SEQ ID NO: 410237 - RNA, 19 nt, Artificial Sequence
  Description of Artificial Sequence: Synthetic oligonucleotide
aacuugagccccagcuaug

SEQ ID NO: 410238 - RNA, 19 nt, Artificial Sequence
  Description of Artificial Sequence: Synthetic oligonucleotide
cuugguccggggcccaggc

SEQ ID NO: 410239 - RNA, 19 nt, Artificial Sequence
  Description of Artificial Sequence: Synthetic oligonucleotide
ccaaaucuacucuuuuauc

SEQ ID NO: 410240 - RNA, 19 nt, Artificial Sequence
  Description of Artificial Sequence: Synthetic oligonucleotide
aaggugcccagcggcugac

SEQ ID NO: 410241 - RNA, 19 nt, Artificial Sequence
  Description of Artificial Sequence: Synthetic oligonucleotide
caagugagccaguucucca

SEQ ID NO: 410242 - RNA, 19 nt, Artificial Sequence
  Description of Artificial Sequence: Synthetic oligonucleotide
ggacuuggacccugaaggc

SEQ ID NO: 410243 - RNA, 19 nt, Artificial Sequence
  Description of Artificial Sequence: Synthetic oligonucleotide
accuggucuugagaaauga

SEQ ID NO: 410244 - RNA, 19 nt, Artificial Sequence
  Description of Artificial Sequence: Synthetic oligonucleotide
ggguacauugcagccauug

SEQ ID NO: 410245 - RNA, 19 nt, Artificial Sequence
  Description of Artificial Sequence: Synthetic oligonucleotide
guuugugcccauguuucca

SEQ ID NO: 410246 - RNA, 19 nt, Artificial Sequence
  Description of Artificial Sequence: Synthetic oligonucleotide
caauuccccuccacaucag

SEQ ID NO: 410247 - RNA, 19 nt, Artificial Sequence
  Description of Artificial Sequence: Synthetic oligonucleotide
cagcagaucgugggaaggc

SEQ ID NO: 410248 - RNA, 19 nt, Artificial Sequence
  Description of Artificial Sequence: Synthetic oligonucleotide
guugauacccacagggccu

SEQ ID NO: 410249 - RNA, 19 nt, Artificial Sequence
  Description of Artificial Sequence: Synthetic oligonucleotide
agaucgugggaaggcagcu

SEQ ID NO: 410250 - RNA, 19 nt, Artificial Sequence
  Description of Artificial Sequence: Synthetic oligonucleotide
gacccgggccuaauggacc

SEQ ID NO: 410251 - RNA, 19 nt, Artificial Sequence
  Description of Artificial Sequence: Synthetic oligonucleotide
ggaagcgggcaauuaggac

SEQ ID NO: 410252 - RNA, 19 nt, Artificial Sequence
  Description of Artificial Sequence: Synthetic oligonucleotide
agcagaucgugggaaggca

SEQ ID NO: 410253 - RNA, 19 nt, Artificial Sequence
  Description of Artificial Sequence: Synthetic oligonucleotide
agugggauucaucccucuu

SEQ ID NO: 410254 - RNA, 19 nt, Artificial Sequence
  Description of Artificial Sequence: Synthetic oligonucleotide
gguuaagacccaggguucc

SEQ ID NO: 410255 - RNA, 19 nt, Artificial Sequence
  Description of Artificial Sequence: Synthetic oligonucleotide
aaaagaccugcugcccuua

SEQ ID NO: 410256 - RNA, 19 nt, Artificial Sequence
  Description of Artificial Sequence: Synthetic oligonucleotide
aggagccgcguuuguaccu

SEQ ID NO: 410257 - RNA, 19 nt, Artificial Sequence
  Description of Artificial Sequence: Synthetic oligonucleotide
gacauaggcccugggccug

SEQ ID NO: 410258 - RNA, 19 nt, Artificial Sequence
  Description of Artificial Sequence: Synthetic oligonucleotide
gaccuaggagccgcguuug

SEQ ID NO: 410259 - RNA, 19 nt, Artificial Sequence
  Description of Artificial Sequence: Synthetic oligonucleotide
agagaaccugcugccauaa

SEQ ID NO: 410260 - RNA, 19 nt, Artificial Sequence
  Description of Artificial Sequence: Synthetic oligonucleotide
cauuugaacuugagcccca

SEQ ID NO: 410261 - RNA, 19 nt, Artificial Sequence
  Description of Artificial Sequence: Synthetic oligonucleotide
gcaagugagccaguucucc

SEQ ID NO: 410262 - RNA, 19 nt, Artificial Sequence
  Description of Artificial Sequence: Synthetic oligonucleotide
acaguuggguucaguccuc

SEQ ID NO: 410263 - RNA, 19 nt, Artificial Sequence
  Description of Artificial Sequence: Synthetic oligonucleotide
ccaauuccccuccacauca

SEQ ID NO: 410264 - RNA, 19 nt, Artificial Sequence
  Description of Artificial Sequence: Synthetic oligonucleotide
ggguuugugcccauguuuc

SEQ ID NO: 410265 - RNA, 19 nt, Artificial Sequence
  Description of Artificial Sequence: Synthetic oligonucleotide
aguuggguugauacccaca

SEQ ID NO: 410266 - RNA, 19 nt, Artificial Sequence
  Description of Artificial Sequence: Synthetic oligonucleotide
aguuugaguuugagguucu

SEQ ID NO: 410267 - RNA, 19 nt, Artificial Sequence
  Description of Artificial Sequence: Synthetic oligonucleotide
acccgaggaaaugggacca

SEQ ID NO: 410268 - RNA, 19 nt, Artificial Sequence
  Description of Artificial Sequence: Synthetic oligonucleotide
gagcccgaugaacuuugga

SEQ ID NO: 410269 - RNA, 19 nt, Artificial Sequence
  Description of Artificial Sequence: Synthetic oligonucleotide
cccaaaagaccaccuggcc

SEQ ID NO: 410270 - RNA, 19 nt, Artificial Sequence
  Description of Artificial Sequence: Synthetic oligonucleotide
gcccgaugaacuuuggaaa

SEQ ID NO: 410271 - RNA, 19 nt, Artificial Sequence
  Description of Artificial Sequence: Synthetic oligonucleotide
caccuaagucccaggagaa

SEQ ID NO: 410272 - RNA, 19 nt, Artificial Sequence
  Description of Artificial Sequence: Synthetic oligonucleotide
ugcucguggguugggcccc

SEQ ID NO: 410273 - RNA, 19 nt, Artificial Sequence
  Description of Artificial Sequence: Synthetic oligonucleotide
ggaccuaaaccaccugcuc

SEQ ID NO: 410274 - RNA, 19 nt, Artificial Sequence
  Description of Artificial Sequence: Synthetic oligonucleotide
cugccuacccgaggaaaug

SEQ ID NO: 410275 - RNA, 19 nt, Artificial Sequence
  Description of Artificial Sequence: Synthetic oligonucleotide
caguuggguucaguccucc

SEQ ID NO: 410276 - RNA, 19 nt, Artificial Sequence
  Description of Artificial Sequence: Synthetic oligonucleotide
gaugaucagaggagccuua

SEQ ID NO: 410277 - RNA, 19 nt, Artificial Sequence
  Description of Artificial Sequence: Synthetic oligonucleotide
ggaggcugccuacccgagg

SEQ ID NO: 410278 - RNA, 19 nt, Artificial Sequence
  Description of Artificial Sequence: Synthetic oligonucleotide
gauagcaagugagccaguu

SEQ ID NO: 410279 - RNA, 19 nt, Artificial Sequence
  Description of Artificial Sequence: Synthetic oligonucleotide
cgaggaaaugggaccacag

SEQ ID NO: 410280 - RNA, 19 nt, Artificial Sequence
  Description of Artificial Sequence: Synthetic oligonucleotide
gacccauggggccaccacu

SEQ ID NO: 410281 - RNA, 19 nt, Artificial Sequence
  Description of Artificial Sequence: Synthetic oligonucleotide
gcagaucgugggaaggcag

SEQ ID NO: 410282 - RNA, 19 nt, Artificial Sequence
  Description of Artificial Sequence: Synthetic oligonucleotide
gccauaaggaaaggaucug

SEQ ID NO: 410283 - RNA, 19 nt, Artificial Sequence
  Description of Artificial Sequence: Synthetic oligonucleotide
cuugggucacgagcaccag

SEQ ID NO: 410284 - RNA, 19 nt, Artificial Sequence
  Description of Artificial Sequence: Synthetic oligonucleotide
cacaucaguuugaguuuga

SEQ ID NO: 410285 - RNA, 19 nt, Artificial Sequence
  Description of Artificial Sequence: Synthetic oligonucleotide
agccaugcuugggucacga

SEQ ID NO: 410286 - RNA, 19 nt, Artificial Sequence
  Description of Artificial Sequence: Synthetic oligonucleotide
cuugacaugguaggugggu

SEQ ID NO: 410287 - RNA, 19 nt, Artificial Sequence
  Description of Artificial Sequence: Synthetic oligonucleotide
aacuugacccgggccuaau

SEQ ID NO: 410288 - RNA, 19 nt, Artificial Sequence
  Description of Artificial Sequence: Synthetic oligonucleotide
guuuaagccugguccuggu

SEQ ID NO: 410289 - RNA, 19 nt, Artificial Sequence
  Description of Artificial Sequence: Synthetic oligonucleotide
ccagcagaucgugggaagg

SEQ ID NO: 410290 - RNA, 19 nt, Artificial Sequence
  Description of Artificial Sequence: Synthetic oligonucleotide
auguaccagaagacugaga

SEQ ID NO: 410291 - RNA, 19 nt, Artificial Sequence
  Description of Artificial Sequence: Synthetic oligonucleotide
caggccaacuggccuagga

SEQ ID NO: 410292 - RNA, 19 nt, Artificial Sequence
  Description of Artificial Sequence: Synthetic oligonucleotide
ccuguuggccuugcaaaag

SEQ ID NO: 410293 - RNA, 19 nt, Artificial Sequence
  Description of Artificial Sequence: Synthetic oligonucleotide
gccuacccgaggaaauggg

SEQ ID NO: 410294 - RNA, 19 nt, Artificial Sequence
  Description of Artificial Sequence: Synthetic oligonucleotide
ccuaguggcccagaggcuc

SEQ ID NO: 410295 - RNA, 19 nt, Artificial Sequence
  Description of Artificial Sequence: Synthetic oligonucleotide
accuaggagccgcguuugu

SEQ ID NO: 410296 - RNA, 19 nt, Artificial Sequence
  Description of Artificial Sequence: Synthetic oligonucleotide
gccaugucucacaaauaac

SEQ ID NO: 410297 - RNA, 19 nt, Artificial Sequence
  Description of Artificial Sequence: Synthetic oligonucleotide
ugucugccauaggccaugu

SEQ ID NO: 410298 - RNA, 19 nt, Artificial Sequence
  Description of Artificial Sequence: Synthetic oligonucleotide
gcggcugaccuugggaaag

SEQ ID NO: 410299 - RNA, 19 nt, Artificial Sequence
  Description of Artificial Sequence: Synthetic oligonucleotide
accuaagucccaggagaaa

SEQ ID NO: 410300 - RNA, 19 nt, Artificial Sequence
  Description of Artificial Sequence: Synthetic oligonucleotide
ccauaaggaaaggaucuga

SEQ ID NO: 410301 - RNA, 19 nt, Artificial Sequence
  Description of Artificial Sequence: Synthetic oligonucleotide
aggagcccucggcauggca

SEQ ID NO: 410302 - RNA, 19 nt, Artificial Sequence
  Description of Artificial Sequence: Synthetic oligonucleotide
cagguugggcacacaucca

SEQ ID NO: 410303 - RNA, 19 nt, Artificial Sequence
  Description of Artificial Sequence: Synthetic oligonucleotide
gcucuaguguccagauuug

SEQ ID NO: 410304 - RNA, 19 nt, Artificial Sequence
  Description of Artificial Sequence: Synthetic oligonucleotide
ggggccuaguggcccagag

SEQ ID NO: 410305 - RNA, 19 nt, Artificial Sequence
  Description of Artificial Sequence: Synthetic oligonucleotide
accugcccucagguugggc

SEQ ID NO: 410306 - RNA, 19 nt, Artificial Sequence
  Description of Artificial Sequence: Synthetic oligonucleotide
ggaccaguaccagaggaua

SEQ ID NO: 410307 - RNA, 19 nt, Artificial Sequence
  Description of Artificial Sequence: Synthetic oligonucleotide
ugauacccacagggccugc

SEQ ID NO: 410308 - RNA, 19 nt, Artificial Sequence
  Description of Artificial Sequence: Synthetic oligonucleotide
caaccgcccucucauccca

SEQ ID NO: 410309 - RNA, 19 nt, Artificial Sequence
  Description of Artificial Sequence: Synthetic oligonucleotide
agauuugggccugggccua

SEQ ID NO: 410310 - RNA, 19 nt, Artificial Sequence
  Description of Artificial Sequence: Synthetic oligonucleotide
ggguuuaagccugguccug

SEQ ID NO: 410311 - RNA, 19 nt, Artificial Sequence
  Description of Artificial Sequence: Synthetic oligonucleotide
ggguuagacauaggcccug

SEQ ID NO: 410312 - RNA, 19 nt, Artificial Sequence
  Description of Artificial Sequence: Synthetic oligonucleotide
gcugaacgaagcacaguga

SEQ ID NO: 410313 - RNA, 19 nt, Artificial Sequence
  Description of Artificial Sequence: Synthetic oligonucleotide
caccacuucuggggucagg

SEQ ID NO: 410314 - RNA, 19 nt, Artificial Sequence
  Description of Artificial Sequence: Synthetic oligonucleotide
ggcccuuggaaaguuaggu

SEQ ID NO: 410315 - RNA, 19 nt, Artificial Sequence
  Description of Artificial Sequence: Synthetic oligonucleotide
ccuacccgaggaaauggga

SEQ ID NO: 410316 - RNA, 19 nt, Artificial Sequence
  Description of Artificial Sequence: Synthetic oligonucleotide
cacgagcaccagcaggaaa

SEQ ID NO: 410317 - RNA, 19 nt, Artificial Sequence
  Description of Artificial Sequence: Synthetic oligonucleotide
gccgcguuuguaccuaaaa

SEQ ID NO: 410318 - RNA, 19 nt, Artificial Sequence
  Description of Artificial Sequence: Synthetic oligonucleotide
gccuaggauugggaggacc

SEQ ID NO: 410319 - RNA, 19 nt, Artificial Sequence
  Description of Artificial Sequence: Synthetic oligonucleotide
cucucggguuagguccaag

SEQ ID NO: 410320 - RNA, 19 nt, Artificial Sequence
  Description of Artificial Sequence: Synthetic oligonucleotide
guuaagacccaggguuccu

SEQ ID NO: 410321 - RNA, 19 nt, Artificial Sequence
  Description of Artificial Sequence: Synthetic oligonucleotide
cugcucaccaauguagcau

SEQ ID NO: 410322 - RNA, 19 nt, Artificial Sequence
  Description of Artificial Sequence: Synthetic oligonucleotide
gauacccacagggccugcu

SEQ ID NO: 410323 - RNA, 19 nt, Artificial Sequence
  Description of Artificial Sequence: Synthetic oligonucleotide
gggauucaucccucuugga

SEQ ID NO: 410324 - RNA, 19 nt, Artificial Sequence
  Description of Artificial Sequence: Synthetic oligonucleotide
cuaguggcccagaggcucu

SEQ ID NO: 410325 - RNA, 19 nt, Artificial Sequence
  Description of Artificial Sequence: Synthetic oligonucleotide
ccuccuaaucugggguuag

SEQ ID NO: 410326 - RNA, 19 nt, Artificial Sequence
  Description of Artificial Sequence: Synthetic oligonucleotide
cagcuauguucuucagacu

SEQ ID NO: 410327 - RNA, 19 nt, Artificial Sequence
  Description of Artificial Sequence: Synthetic oligonucleotide
cuccuaaucugggguuaga

SEQ ID NO: 410328 - RNA, 19 nt, Artificial Sequence
  Description of Artificial Sequence: Synthetic oligonucleotide
aggccaugucucacaaaua

SEQ ID NO: 410329 - RNA, 19 nt, Artificial Sequence
  Description of Artificial Sequence: Synthetic oligonucleotide
gagccgcguuuguaccuaa

SEQ ID NO: 410330 - RNA, 19 nt, Artificial Sequence
  Description of Artificial Sequence: Synthetic oligonucleotide
cuccccauucuguguucaa

SEQ ID NO: 410331 - RNA, 19 nt, Artificial Sequence
  Description of Artificial Sequence: Synthetic oligonucleotide
agcagaccucugaaaugua

SEQ ID NO: 410332 - RNA, 19 nt, Artificial Sequence
  Description of Artificial Sequence: Synthetic oligonucleotide
gccuaauggaccagcagau

SEQ ID NO: 410333 - RNA, 19 nt, Artificial Sequence
  Description of Artificial Sequence: Synthetic oligonucleotide
ccuaaaccaccugcucgug

SEQ ID NO: 410334 - RNA, 19 nt, Artificial Sequence
  Description of Artificial Sequence: Synthetic oligonucleotide
ggaugaucagaggagccuu

SEQ ID NO: 410335 - RNA, 19 nt, Artificial Sequence
  Description of Artificial Sequence: Synthetic oligonucleotide
aaccgcccucucaucccau

SEQ ID NO: 410336 - RNA, 19 nt, Artificial Sequence
  Description of Artificial Sequence: Synthetic oligonucleotide
gcucaccaauguagcauca

SEQ ID NO: 410337 - RNA, 19 nt, Artificial Sequence
  Description of Artificial Sequence: Synthetic oligonucleotide
acccgaccuaggagccgcg

SEQ ID NO: 410338 - RNA, 19 nt, Artificial Sequence
  Description of Artificial Sequence: Synthetic oligonucleotide
uggggccuaguggcccaga

SEQ ID NO: 410339 - RNA, 19 nt, Artificial Sequence
  Description of Artificial Sequence: Synthetic oligonucleotide
ccaauuccccaauuccccu

SEQ ID NO: 410340 - RNA, 19 nt, Artificial Sequence
  Description of Artificial Sequence: Synthetic oligonucleotide
agccccuguucuaggguuu

SEQ ID NO: 410341 - RNA, 19 nt, Artificial Sequence
  Description of Artificial Sequence: Synthetic oligonucleotide
ccgggccuaauggaccagc

SEQ ID NO: 410342 - RNA, 19 nt, Artificial Sequence
  Description of Artificial Sequence: Synthetic oligonucleotide
gggguuagacauaggcccu

SEQ ID NO: 410343 - RNA, 19 nt, Artificial Sequence
  Description of Artificial Sequence: Synthetic oligonucleotide
cccagcggcugaccuuggg

SEQ ID NO: 410344 - RNA, 19 nt, Artificial Sequence
  Description of Artificial Sequence: Synthetic oligonucleotide
gccuaggccaccagcucuc

SEQ ID NO: 410345 - RNA, 19 nt, Artificial Sequence
  Description of Artificial Sequence: Synthetic oligonucleotide
caccugcccucagguuggg

SEQ ID NO: 410346 - RNA, 19 nt, Artificial Sequence
  Description of Artificial Sequence: Synthetic oligonucleotide
ggcugccuacccgaggaaa

SEQ ID NO: 410347 - RNA, 19 nt, Artificial Sequence
  Description of Artificial Sequence: Synthetic oligonucleotide
gcaacuugacccgggccua

SEQ ID NO: 410348 - RNA, 19 nt, Artificial Sequence
  Description of Artificial Sequence: Synthetic oligonucleotide
agccgcguuuguaccuaaa

SEQ ID NO: 410349 - RNA, 19 nt, Artificial Sequence
  Description of Artificial Sequence: Synthetic oligonucleotide
ggagccgcguuuguaccua

SEQ ID NO: 410350 - RNA, 19 nt, Artificial Sequence
  Description of Artificial Sequence: Synthetic oligonucleotide
cuugagccccagcuauguu

SEQ ID NO: 410351 - RNA, 19 nt, Artificial Sequence
  Description of Artificial Sequence: Synthetic oligonucleotide
ccgaggaaaugggaccaca

SEQ ID NO: 410352 - RNA, 19 nt, Artificial Sequence
  Description of Artificial Sequence: Synthetic oligonucleotide
gcugccuacccgaggaaau

SEQ ID NO: 410353 - RNA, 19 nt, Artificial Sequence
  Description of Artificial Sequence: Synthetic oligonucleotide
cccgaggaaaugggaccac

SEQ ID NO: 410354 - RNA, 19 nt, Artificial Sequence
  Description of Artificial Sequence: Synthetic oligonucleotide
ccaccuggucuugagaaau

SEQ ID NO: 410355 - RNA, 19 nt, Artificial Sequence
  Description of Artificial Sequence: Synthetic oligonucleotide
ccuaggagccgcguuugua

SEQ ID NO: 410356 - RNA, 19 nt, Artificial Sequence
  Description of Artificial Sequence: Synthetic oligonucleotide
gcccuccuaaucugggguu

SEQ ID NO: 410357 - RNA, 19 nt, Artificial Sequence
  Description of Artificial Sequence: Synthetic oligonucleotide
guccggggcccaggccaac

SEQ ID NO: 410358 - RNA, 19 nt, Artificial Sequence
  Description of Artificial Sequence: Synthetic oligonucleotide
gagcugaauuagggcccau

SEQ ID NO: 410359 - RNA, 19 nt, Artificial Sequence
  Description of Artificial Sequence: Synthetic oligonucleotide
cccuccuaaucugggguua

SEQ ID NO: 410360 - RNA, 19 nt, Artificial Sequence
  Description of Artificial Sequence: Synthetic oligonucleotide
cgaccuaggagccgcguuu

SEQ ID NO: 410361 - RNA, 19 nt, Artificial Sequence
  Description of Artificial Sequence: Synthetic oligonucleotide
gcucguggguugggcccca

SEQ ID NO: 410362 - RNA, 19 nt, Artificial Sequence
  Description of Artificial Sequence: Synthetic oligonucleotide
cagugccagugggauucau

SEQ ID NO: 410363 - RNA, 19 nt, Artificial Sequence
  Description of Artificial Sequence: Synthetic oligonucleotide
ccgaccuaggagccgcguu

SEQ ID NO: 410364 - RNA, 19 nt, Artificial Sequence
  Description of Artificial Sequence: Synthetic oligonucleotide
ccaccccaauuccccaauu

SEQ ID NO: 410365 - RNA, 19 nt, Artificial Sequence
  Description of Artificial Sequence: Synthetic oligonucleotide
cccgaccuaggagccgcgu

SEQ ID NO: 410366 - RNA, 19 nt, Artificial Sequence
  Description of Artificial Sequence: Synthetic oligonucleotide
auuagaaugaagugguucc

SEQ ID NO: 410367 - RNA, 19 nt, Artificial Sequence
  Description of Artificial Sequence: Synthetic oligonucleotide
aauaguggggcccauacgg

SEQ ID NO: 410368 - RNA, 19 nt, Artificial Sequence
  Description of Artificial Sequence: Synthetic oligonucleotide
auaaauaaggggcaugcgc

SEQ ID NO: 410369 - RNA, 19 nt, Artificial Sequence
  Description of Artificial Sequence: Synthetic oligonucleotide
agucgugucaguuagcucg

SEQ ID NO: 410370 - RNA, 19 nt, Artificial Sequence
  Description of Artificial Sequence: Synthetic oligonucleotide
aaugagaugcccaucaccg

SEQ ID NO: 410371 - RNA, 19 nt, Artificial Sequence
  Description of Artificial Sequence: Synthetic oligonucleotide
acaaaggguaccaagaagc

SEQ ID NO: 410372 - RNA, 19 nt, Artificial Sequence
  Description of Artificial Sequence: Synthetic oligonucleotide
uaacgcaacacgaagacca

SEQ ID NO: 410373 - RNA, 19 nt, Artificial Sequence
  Description of Artificial Sequence: Synthetic oligonucleotide
ugacucacaaccaaugugc

SEQ ID NO: 410374 - RNA, 19 nt, Artificial Sequence
  Description of Artificial Sequence: Synthetic oligonucleotide
agugccugaagccaggggc

SEQ ID NO: 410375 - RNA, 19 nt, Artificial Sequence
  Description of Artificial Sequence: Synthetic oligonucleotide
aaacuugccucuaacgucc

SEQ ID NO: 410376 - RNA, 19 nt, Artificial Sequence
  Description of Artificial Sequence: Synthetic oligonucleotide
cauguaguuacgaagcucc

SEQ ID NO: 410377 - RNA, 19 nt, Artificial Sequence
  Description of Artificial Sequence: Synthetic oligonucleotide
agugacgagacgcacaggg

SEQ ID NO: 410378 - RNA, 19 nt, Artificial Sequence
  Description of Artificial Sequence: Synthetic oligonucleotide
aacucuacucucuuccgac

SEQ ID NO: 410379 - RNA, 19 nt, Artificial Sequence
  Description of Artificial Sequence: Synthetic oligonucleotide
ucuaacguccacauggccc

SEQ ID NO: 410380 - RNA, 19 nt, Artificial Sequence
  Description of Artificial Sequence: Synthetic oligonucleotide
cauacggucagcuucagug

SEQ ID NO: 410381 - RNA, 19 nt, Artificial Sequence
  Description of Artificial Sequence: Synthetic oligonucleotide
ucaaacuugccucuaacgu

SEQ ID NO: 410382 - RNA, 19 nt, Artificial Sequence
  Description of Artificial Sequence: Synthetic oligonucleotide
accuacuccacucaccacc

SEQ ID NO: 410383 - RNA, 19 nt, Artificial Sequence
  Description of Artificial Sequence: Synthetic oligonucleotide
uaugcgaggaucuugcaca

SEQ ID NO: 410384 - RNA, 19 nt, Artificial Sequence
  Description of Artificial Sequence: Synthetic oligonucleotide
ugugcaggggcaauagugg

SEQ ID NO: 410385 - RNA, 19 nt, Artificial Sequence
  Description of Artificial Sequence: Synthetic oligonucleotide
aaaggguaccaagaagcgc

SEQ ID NO: 410386 - RNA, 19 nt, Artificial Sequence
  Description of Artificial Sequence: Synthetic oligonucleotide
guaguuacgaagcuccucc

SEQ ID NO: 410387 - RNA, 19 nt, Artificial Sequence
  Description of Artificial Sequence: Synthetic oligonucleotide
gucggugacacgcugaggg

SEQ ID NO: 410388 - RNA, 19 nt, Artificial Sequence
  Description of Artificial Sequence: Synthetic oligonucleotide
cuugucgucugucacagcc

SEQ ID NO: 410389 - RNA, 19 nt, Artificial Sequence
  Description of Artificial Sequence: Synthetic oligonucleotide
aacgaaccucaauagaggu

SEQ ID NO: 410390 - RNA, 19 nt, Artificial Sequence
  Description of Artificial Sequence: Synthetic oligonucleotide
uguccucacacacccagcg

SEQ ID NO: 410391 - RNA, 19 nt, Artificial Sequence
  Description of Artificial Sequence: Synthetic oligonucleotide
agagcauacauucccagcu

SEQ ID NO: 410392 - RNA, 19 nt, Artificial Sequence
  Description of Artificial Sequence: Synthetic oligonucleotide
cuccauguaguuacgaagc

SEQ ID NO: 410393 - RNA, 19 nt, Artificial Sequence
  Description of Artificial Sequence: Synthetic oligonucleotide
guuagcucgaugugcaggg

SEQ ID NO: 410394 - RNA, 19 nt, Artificial Sequence
  Description of Artificial Sequence: Synthetic oligonucleotide
ucaguuagcucgaugugca

SEQ ID NO: 410395 - RNA, 19 nt, Artificial Sequence
  Description of Artificial Sequence: Synthetic oligonucleotide
gauacggccgccuuccaag

SEQ ID NO: 410396 - RNA, 19 nt, Artificial Sequence
  Description of Artificial Sequence: Synthetic oligonucleotide
cauaccacccgcuaccugc

SEQ ID NO: 410397 - RNA, 19 nt, Artificial Sequence
  Description of Artificial Sequence: Synthetic oligonucleotide
auaagggccaggcaagaag

SEQ ID NO: 410398 - RNA, 19 nt, Artificial Sequence
  Description of Artificial Sequence: Synthetic oligonucleotide
cuaacguccacauggcccc

SEQ ID NO: 410399 - RNA, 19 nt, Artificial Sequence
  Description of Artificial Sequence: Synthetic oligonucleotide
ugagaugcccaucaccggc

SEQ ID NO: 410400 - RNA, 19 nt, Artificial Sequence
  Description of Artificial Sequence: Synthetic oligonucleotide
guuacgaagcuccuccggg

SEQ ID NO: 410401 - RNA, 19 nt, Artificial Sequence
  Description of Artificial Sequence: Synthetic oligonucleotide
accucaauagaggugacuc

SEQ ID NO: 410402 - RNA, 19 nt, Artificial Sequence
  Description of Artificial Sequence: Synthetic oligonucleotide
accaaugugcucugucacc

SEQ ID NO: 410403 - RNA, 19 nt, Artificial Sequence
  Description of Artificial Sequence: Synthetic oligonucleotide
agauaguggggaacgaacc

SEQ ID NO: 410404 - RNA, 19 nt, Artificial Sequence
  Description of Artificial Sequence: Synthetic oligonucleotide
ucuuccgccgguaggacag

SEQ ID NO: 410405 - RNA, 19 nt, Artificial Sequence
  Description of Artificial Sequence: Synthetic oligonucleotide
caaaggguaccaagaagcg

SEQ ID NO: 410406 - RNA, 19 nt, Artificial Sequence
  Description of Artificial Sequence: Synthetic oligonucleotide
gaacgaaccucaauagagg

SEQ ID NO: 410407 - RNA, 19 nt, Artificial Sequence
  Description of Artificial Sequence: Synthetic oligonucleotide
uggggaacgaaccucaaua

SEQ ID NO: 410408 - RNA, 19 nt, Artificial Sequence
  Description of Artificial Sequence: Synthetic oligonucleotide
acagugacgagacgcacag

SEQ ID NO: 410409 - RNA, 19 nt, Artificial Sequence
  Description of Artificial Sequence: Synthetic oligonucleotide
aagcaggggacucggauca

SEQ ID NO: 410410 - RNA, 19 nt, Artificial Sequence
  Description of Artificial Sequence: Synthetic oligonucleotide
auagaggugacuccaggcu

SEQ ID NO: 410411 - RNA, 19 nt, Artificial Sequence
  Description of Artificial Sequence: Synthetic oligonucleotide
auacauucccagcucuagg

SEQ ID NO: 410412 - RNA, 19 nt, Artificial Sequence
  Description of Artificial Sequence: Synthetic oligonucleotide
uacauucccagcucuaggu

SEQ ID NO: 410413 - RNA, 19 nt, Artificial Sequence
  Description of Artificial Sequence: Synthetic oligonucleotide
caaacuugccucuaacguc

SEQ ID NO: 410414 - RNA, 19 nt, Artificial Sequence
  Description of Artificial Sequence: Synthetic oligonucleotide
ugguaacgcaacacgaaga

SEQ ID NO: 410415 - RNA, 19 nt, Artificial Sequence
  Description of Artificial Sequence: Synthetic oligonucleotide
agucagauaguggggaacg

SEQ ID NO: 410416 - RNA, 19 nt, Artificial Sequence
  Description of Artificial Sequence: Synthetic oligonucleotide
aguuacgaagcuccuccgg

SEQ ID NO: 410417 - RNA, 19 nt, Artificial Sequence
  Description of Artificial Sequence: Synthetic oligonucleotide
caaugagaugcccaucacc

SEQ ID NO: 410418 - RNA, 19 nt, Artificial Sequence
  Description of Artificial Sequence: Synthetic oligonucleotide
agcucucugguacugcagg

SEQ ID NO: 410419 - RNA, 19 nt, Artificial Sequence
  Description of Artificial Sequence: Synthetic oligonucleotide
agcucuaggucggugacac

SEQ ID NO: 410420 - RNA, 19 nt, Artificial Sequence
  Description of Artificial Sequence: Synthetic oligonucleotide
uuagaaugaagugguuccc

SEQ ID NO: 410421 - RNA, 19 nt, Artificial Sequence
  Description of Artificial Sequence: Synthetic oligonucleotide
ucgaggagccgacagugcc

SEQ ID NO: 410422 - RNA, 19 nt, Artificial Sequence
  Description of Artificial Sequence: Synthetic oligonucleotide
ugucaguuagcucgaugug

SEQ ID NO: 410423 - RNA, 19 nt, Artificial Sequence
  Description of Artificial Sequence: Synthetic oligonucleotide
ugacgagacgcacagggau

SEQ ID NO: 410424 - RNA, 19 nt, Artificial Sequence
  Description of Artificial Sequence: Synthetic oligonucleotide
aguuagcucgaugugcagg

SEQ ID NO: 410425 - RNA, 19 nt, Artificial Sequence
  Description of Artificial Sequence: Synthetic oligonucleotide
auugagaccuugucgucug

SEQ ID NO: 410426 - RNA, 19 nt, Artificial Sequence
  Description of Artificial Sequence: Synthetic oligonucleotide
cugacucacaaccaaugug

SEQ ID NO: 410427 - RNA, 19 nt, Artificial Sequence
  Description of Artificial Sequence: Synthetic oligonucleotide
ggaucaacaagcaccagag

SEQ ID NO: 410428 - RNA, 19 nt, Artificial Sequence
  Description of Artificial Sequence: Synthetic oligonucleotide
ucgucugucacagccagug

SEQ ID NO: 410429 - RNA, 19 nt, Artificial Sequence
  Description of Artificial Sequence: Synthetic oligonucleotide
cucuaggucggugacacgc

SEQ ID NO: 410430 - RNA, 19 nt, Artificial Sequence
  Description of Artificial Sequence: Synthetic oligonucleotide
ugugaaugguggacuccgg

SEQ ID NO: 410431 - RNA, 19 nt, Artificial Sequence
  Description of Artificial Sequence: Synthetic oligonucleotide
cagcagagcauacauuccc

SEQ ID NO: 410432 - RNA, 19 nt, Artificial Sequence
  Description of Artificial Sequence: Synthetic oligonucleotide
accggcugcacucucagcu

SEQ ID NO: 410433 - RNA, 19 nt, Artificial Sequence
  Description of Artificial Sequence: Synthetic oligonucleotide
gugaaugguggacuccggg

SEQ ID NO: 410434 - RNA, 19 nt, Artificial Sequence
  Description of Artificial Sequence: Synthetic oligonucleotide
agaggugacuccaggcucc

SEQ ID NO: 410435 - RNA, 19 nt, Artificial Sequence
  Description of Artificial Sequence: Synthetic oligonucleotide
cuagcauugagaccuuguc

SEQ ID NO: 410436 - RNA, 19 nt, Artificial Sequence
  Description of Artificial Sequence: Synthetic oligonucleotide
ugucaauggagcuguguuc

SEQ ID NO: 410437 - RNA, 19 nt, Artificial Sequence
  Description of Artificial Sequence: Synthetic oligonucleotide
uccauguaguuacgaagcu

SEQ ID NO: 410438 - RNA, 19 nt, Artificial Sequence
  Description of Artificial Sequence: Synthetic oligonucleotide
gacccacuaggauacggcc

SEQ ID NO: 410439 - RNA, 19 nt, Artificial Sequence
  Description of Artificial Sequence: Synthetic oligonucleotide
uaguuacgaagcuccuccg

SEQ ID NO: 410440 - RNA, 19 nt, Artificial Sequence
  Description of Artificial Sequence: Synthetic oligonucleotide
acgagacgcacagggaugc

SEQ ID NO: 410441 - RNA, 19 nt, Artificial Sequence
  Description of Artificial Sequence: Synthetic oligonucleotide
augagaugcccaucaccgg

SEQ ID NO: 410442 - RNA, 19 nt, Artificial Sequence
  Description of Artificial Sequence: Synthetic oligonucleotide
cagagcauacauucccagc

SEQ ID NO: 410443 - RNA, 19 nt, Artificial Sequence
  Description of Artificial Sequence: Synthetic oligonucleotide
gguaacgcaacacgaagac

SEQ ID NO: 410444 - RNA, 19 nt, Artificial Sequence
  Description of Artificial Sequence: Synthetic oligonucleotide
cugacgacucaguuccucc

SEQ ID NO: 410445 - RNA, 19 nt, Artificial Sequence
  Description of Artificial Sequence: Synthetic oligonucleotide
cuaugcgaggaucuugcac

SEQ ID NO: 410446 - RNA, 19 nt, Artificial Sequence
  Description of Artificial Sequence: Synthetic oligonucleotide
ggaggaaggguccguagcg

SEQ ID NO: 410447 - RNA, 19 nt, Artificial Sequence
  Description of Artificial Sequence: Synthetic oligonucleotide
gacuguacagcuggggccc

SEQ ID NO: 410448 - RNA, 19 nt, Artificial Sequence
  Description of Artificial Sequence: Synthetic oligonucleotide
guacccaacauuagaauga

SEQ ID NO: 410449 - RNA, 19 nt, Artificial Sequence
  Description of Artificial Sequence: Synthetic oligonucleotide
aacacgaagaccacaccau

SEQ ID NO: 410450 - RNA, 19 nt, Artificial Sequence
  Description of Artificial Sequence: Synthetic oligonucleotide
ggagcaacgguccagcuga

SEQ ID NO: 410451 - RNA, 19 nt, Artificial Sequence
  Description of Artificial Sequence: Synthetic oligonucleotide
aacgcaacacgaagaccac

SEQ ID NO: 410452 - RNA, 19 nt, Artificial Sequence
  Description of Artificial Sequence: Synthetic oligonucleotide
ucccgacccacuaggauac

SEQ ID NO: 410453 - RNA, 19 nt, Artificial Sequence
  Description of Artificial Sequence: Synthetic oligonucleotide
caacacgaagaccacacca

SEQ ID NO: 410454 - RNA, 19 nt, Artificial Sequence
  Description of Artificial Sequence: Synthetic oligonucleotide
gacagugcccucugaagca

SEQ ID NO: 410455 - RNA, 19 nt, Artificial Sequence
  Description of Artificial Sequence: Synthetic oligonucleotide
aggauggagucagauagug

SEQ ID NO: 410456 - RNA, 19 nt, Artificial Sequence
  Description of Artificial Sequence: Synthetic oligonucleotide
caauaguggggcccauacg

SEQ ID NO: 410457 - RNA, 19 nt, Artificial Sequence
  Description of Artificial Sequence: Synthetic oligonucleotide
uuacgaagcuccuccgggu

SEQ ID NO: 410458 - RNA, 19 nt, Artificial Sequence
  Description of Artificial Sequence: Synthetic oligonucleotide
ugaccaugguccacaacaa

SEQ ID NO: 410459 - RNA, 19 nt, Artificial Sequence
  Description of Artificial Sequence: Synthetic oligonucleotide
cuaccugccgcuuucccuc

SEQ ID NO: 410460 - RNA, 19 nt, Artificial Sequence
  Description of Artificial Sequence: Synthetic oligonucleotide
cagggaguagucaagagcu

SEQ ID NO: 410461 - RNA, 19 nt, Artificial Sequence
  Description of Artificial Sequence: Synthetic oligonucleotide
accagaaguccacccgcac

SEQ ID NO: 410462 - RNA, 19 nt, Artificial Sequence
  Description of Artificial Sequence: Synthetic oligonucleotide
gugucaguuagcucgaugu

SEQ ID NO: 410463 - RNA, 19 nt, Artificial Sequence
  Description of Artificial Sequence: Synthetic oligonucleotide
aauaaggggcaugcgcccu

SEQ ID NO: 410464 - RNA, 19 nt, Artificial Sequence
  Description of Artificial Sequence: Synthetic oligonucleotide
ucggugacacgcugagggg

SEQ ID NO: 410465 - RNA, 19 nt, Artificial Sequence
  Description of Artificial Sequence: Synthetic oligonucleotide
uuuuaugccuguucccauu

SEQ ID NO: 410466 - RNA, 19 nt, Artificial Sequence
  Description of Artificial Sequence: Synthetic oligonucleotide
uugucgucugucacagcca

SEQ ID NO: 410467 - RNA, 19 nt, Artificial Sequence
  Description of Artificial Sequence: Synthetic oligonucleotide
accacccgcuaccugccgc

SEQ ID NO: 410468 - RNA, 19 nt, Artificial Sequence
  Description of Artificial Sequence: Synthetic oligonucleotide
ucacugcggucguagagcu

SEQ ID NO: 410469 - RNA, 19 nt, Artificial Sequence
  Description of Artificial Sequence: Synthetic oligonucleotide
agcaccuacuccacucacc

SEQ ID NO: 410470 - RNA, 19 nt, Artificial Sequence
  Description of Artificial Sequence: Synthetic oligonucleotide
agcauaagggccaggcaag

SEQ ID NO: 410471 - RNA, 19 nt, Artificial Sequence
  Description of Artificial Sequence: Synthetic oligonucleotide
ugcgcuggggcacuccugu

SEQ ID NO: 410472 - RNA, 19 nt, Artificial Sequence
  Description of Artificial Sequence: Synthetic oligonucleotide
aaguccagccagacacccc

SEQ ID NO: 410473 - RNA, 19 nt, Artificial Sequence
  Description of Artificial Sequence: Synthetic oligonucleotide
caacaagcaccagaggaug

SEQ ID NO: 410474 - RNA, 19 nt, Artificial Sequence
  Description of Artificial Sequence: Synthetic oligonucleotide
accuugucgucugucacag

SEQ ID NO: 410475 - RNA, 19 nt, Artificial Sequence
  Description of Artificial Sequence: Synthetic oligonucleotide
ucgggaggcucuuugcgcu

SEQ ID NO: 410476 - RNA, 19 nt, Artificial Sequence
  Description of Artificial Sequence: Synthetic oligonucleotide
uguaguuacgaagcuccuc

SEQ ID NO: 410477 - RNA, 19 nt, Artificial Sequence
  Description of Artificial Sequence: Synthetic oligonucleotide
ggggaacgaaccucaauag

SEQ ID NO: 410478 - RNA, 19 nt, Artificial Sequence
  Description of Artificial Sequence: Synthetic oligonucleotide
auacggccgccuuccaagg

SEQ ID NO: 410479 - RNA, 19 nt, Artificial Sequence
  Description of Artificial Sequence: Synthetic oligonucleotide
aggcucccgacccacuagg

SEQ ID NO: 410480 - RNA, 19 nt, Artificial Sequence
  Description of Artificial Sequence: Synthetic oligonucleotide
gucacugcggucguagagc

SEQ ID NO: 410481 - RNA, 19 nt, Artificial Sequence
  Description of Artificial Sequence: Synthetic oligonucleotide
ggucguagagcucggcagg

SEQ ID NO: 410482 - RNA, 19 nt, Artificial Sequence
  Description of Artificial Sequence: Synthetic oligonucleotide
ugacgacucaguuccuccu

SEQ ID NO: 410483 - RNA, 19 nt, Artificial Sequence
  Description of Artificial Sequence: Synthetic oligonucleotide
ugcucuuccgccgguagga

SEQ ID NO: 410484 - RNA, 19 nt, Artificial Sequence
  Description of Artificial Sequence: Synthetic oligonucleotide
accauugaccagaaagaug

SEQ ID NO: 410485 - RNA, 19 nt, Artificial Sequence
  Description of Artificial Sequence: Synthetic oligonucleotide
uacgaagcuccuccggguc

SEQ ID NO: 410486 - RNA, 19 nt, Artificial Sequence
  Description of Artificial Sequence: Synthetic oligonucleotide
uccguagcgcugucgggag

SEQ ID NO: 410487 - RNA, 19 nt, Artificial Sequence
  Description of Artificial Sequence: Synthetic oligonucleotide
acggccgccuuccaaggag

SEQ ID NO: 410488 - RNA, 19 nt, Artificial Sequence
  Description of Artificial Sequence: Synthetic oligonucleotide
uacucucuuccgacguccc

SEQ ID NO: 410489 - RNA, 19 nt, Artificial Sequence
  Description of Artificial Sequence: Synthetic oligonucleotide
cucuaacguccacauggcc

SEQ ID NO: 410490 - RNA, 19 nt, Artificial Sequence
  Description of Artificial Sequence: Synthetic oligonucleotide
cugagacugacagucccag

SEQ ID NO: 410491 - RNA, 19 nt, Artificial Sequence
  Description of Artificial Sequence: Synthetic oligonucleotide
cucuuugcgcugguaacgc

SEQ ID NO: 410492 - RNA, 19 nt, Artificial Sequence
  Description of Artificial Sequence: Synthetic oligonucleotide
aaccucaauagaggugacu

SEQ ID NO: 410493 - RNA, 19 nt, Artificial Sequence
  Description of Artificial Sequence: Synthetic oligonucleotide
uuagcucgaugugcagggg

SEQ ID NO: 410494 - RNA, 19 nt, Artificial Sequence
  Description of Artificial Sequence: Synthetic oligonucleotide
agccagacaccccacuggu

SEQ ID NO: 410495 - RNA, 19 nt, Artificial Sequence
  Description of Artificial Sequence: Synthetic oligonucleotide
gcgcaaaugucacaaacuc

SEQ ID NO: 410496 - RNA, 19 nt, Artificial Sequence
  Description of Artificial Sequence: Synthetic oligonucleotide
ggggacucggaucaacaag

SEQ ID NO: 410497 - RNA, 19 nt, Artificial Sequence
  Description of Artificial Sequence: Synthetic oligonucleotide
auaccacccgcuaccugcc

SEQ ID NO: 410498 - RNA, 19 nt, Artificial Sequence
  Description of Artificial Sequence: Synthetic oligonucleotide
gacgagacgcacagggaug

SEQ ID NO: 410499 - RNA, 19 nt, Artificial Sequence
  Description of Artificial Sequence: Synthetic oligonucleotide
acgguuggggcauccccuc

SEQ ID NO: 410500 - RNA, 19 nt, Artificial Sequence
  Description of Artificial Sequence: Synthetic oligonucleotide
acccacuaggauacggccg

SEQ ID NO: 410501 - RNA, 19 nt, Artificial Sequence
  Description of Artificial Sequence: Synthetic oligonucleotide
aggaggcuaugcgaggauc

SEQ ID NO: 410502 - RNA, 19 nt, Artificial Sequence
  Description of Artificial Sequence: Synthetic oligonucleotide
agucggcgccaccagaagu

SEQ ID NO: 410503 - RNA, 19 nt, Artificial Sequence
  Description of Artificial Sequence: Synthetic oligonucleotide
gaucaugccucggcucagg

SEQ ID NO: 410504 - RNA, 19 nt, Artificial Sequence
  Description of Artificial Sequence: Synthetic oligonucleotide
ugcucgaggagccgacagu

SEQ ID NO: 410505 - RNA, 19 nt, Artificial Sequence
  Description of Artificial Sequence: Synthetic oligonucleotide
aaggaggcuaugcgaggau

SEQ ID NO: 410506 - RNA, 19 nt, Artificial Sequence
  Description of Artificial Sequence: Synthetic oligonucleotide
ucuuugcgcugguaacgca

SEQ ID NO: 410507 - RNA, 19 nt, Artificial Sequence
  Description of Artificial Sequence: Synthetic oligonucleotide
acuugccucuaacguccac

SEQ ID NO: 410508 - RNA, 19 nt, Artificial Sequence
  Description of Artificial Sequence: Synthetic oligonucleotide
gagacgcacagggaugcgc

SEQ ID NO: 410509 - RNA, 19 nt, Artificial Sequence
  Description of Artificial Sequence: Synthetic oligonucleotide
gccaccagaaguccacccg

SEQ ID NO: 410510 - RNA, 19 nt, Artificial Sequence
  Description of Artificial Sequence: Synthetic oligonucleotide
ggguccguagcgcugucgg

SEQ ID NO: 410511 - RNA, 19 nt, Artificial Sequence
  Description of Artificial Sequence: Synthetic oligonucleotide
uaguggggcccauacgguc

SEQ ID NO: 410512 - RNA, 19 nt, Artificial Sequence
  Description of Artificial Sequence: Synthetic oligonucleotide
gcgggugggccacaaaggg

SEQ ID NO: 410513 - RNA, 19 nt, Artificial Sequence
  Description of Artificial Sequence: Synthetic oligonucleotide
caacgguccagcugacgac

SEQ ID NO: 410514 - RNA, 19 nt, Artificial Sequence
  Description of Artificial Sequence: Synthetic oligonucleotide
agcgggugggccacaaagg

SEQ ID NO: 410515 - RNA, 19 nt, Artificial Sequence
  Description of Artificial Sequence: Synthetic oligonucleotide
gggaguagucaagagcugc

SEQ ID NO: 410516 - RNA, 19 nt, Artificial Sequence
  Description of Artificial Sequence: Synthetic oligonucleotide
gaugagcauaagggccagg

SEQ ID NO: 410517 - RNA, 19 nt, Artificial Sequence
  Description of Artificial Sequence: Synthetic oligonucleotide
gaugcccaucaccggcugc

SEQ ID NO: 410518 - RNA, 19 nt, Artificial Sequence
  Description of Artificial Sequence: Synthetic oligonucleotide
gguacugcaggcggcagcc

SEQ ID NO: 410519 - RNA, 19 nt, Artificial Sequence
  Description of Artificial Sequence: Synthetic oligonucleotide
gugcucgaggagccgacag

SEQ ID NO: 410520 - RNA, 19 nt, Artificial Sequence
  Description of Artificial Sequence: Synthetic oligonucleotide
gauacccagcagagcauac

SEQ ID NO: 410521 - RNA, 19 nt, Artificial Sequence
  Description of Artificial Sequence: Synthetic oligonucleotide
agcaccagaggaugagcau

SEQ ID NO: 410522 - RNA, 19 nt, Artificial Sequence
  Description of Artificial Sequence: Synthetic oligonucleotide
cuaggucggugacacgcug

SEQ ID NO: 410523 - RNA, 19 nt, Artificial Sequence
  Description of Artificial Sequence: Synthetic oligonucleotide
ggcuaugcgaggaucuugc

SEQ ID NO: 410524 - RNA, 19 nt, Artificial Sequence
  Description of Artificial Sequence: Synthetic oligonucleotide
acgaaccucaauagaggug

SEQ ID NO: 410525 - RNA, 19 nt, Artificial Sequence
  Description of Artificial Sequence: Synthetic oligonucleotide
cacucaccaccacaccaag

SEQ ID NO: 410526 - RNA, 19 nt, Artificial Sequence
  Description of Artificial Sequence: Synthetic oligonucleotide
gggcgcaaaugucacaaac

SEQ ID NO: 410527 - RNA, 19 nt, Artificial Sequence
  Description of Artificial Sequence: Synthetic oligonucleotide
ucguagagcucggcagggg

SEQ ID NO: 410528 - RNA, 19 nt, Artificial Sequence
  Description of Artificial Sequence: Synthetic oligonucleotide
ggaguagucaagagcugcc

SEQ ID NO: 410529 - RNA, 19 nt, Artificial Sequence
  Description of Artificial Sequence: Synthetic oligonucleotide
cccaaggggacccaagcag

SEQ ID NO: 410530 - RNA, 19 nt, Artificial Sequence
  Description of Artificial Sequence: Synthetic oligonucleotide
ccaaaguguggucagagaa

SEQ ID NO: 410531 - RNA, 19 nt, Artificial Sequence
  Description of Artificial Sequence: Synthetic oligonucleotide
ggcccauacggucagcuuc

SEQ ID NO: 410532 - RNA, 19 nt, Artificial Sequence
  Description of Artificial Sequence: Synthetic oligonucleotide
cccacuaggauacggccgc

SEQ ID NO: 410533 - RNA, 19 nt, Artificial Sequence
  Description of Artificial Sequence: Synthetic oligonucleotide
aggggacucggaucaacaa

SEQ ID NO: 410534 - RNA, 19 nt, Artificial Sequence
  Description of Artificial Sequence: Synthetic oligonucleotide
ugugcggcugcggggagga

SEQ ID NO: 410535 - RNA, 19 nt, Artificial Sequence
  Description of Artificial Sequence: Synthetic oligonucleotide
ugcgaggaucuugcacacg

SEQ ID NO: 410536 - RNA, 19 nt, Artificial Sequence
  Description of Artificial Sequence: Synthetic oligonucleotide
cacacgauggcggccccgg

SEQ ID NO: 410537 - RNA, 19 nt, Artificial Sequence
  Description of Artificial Sequence: Synthetic oligonucleotide
uaccacccgcuaccugccg

SEQ ID NO: 410538 - RNA, 19 nt, Artificial Sequence
  Description of Artificial Sequence: Synthetic oligonucleotide
caguuagcucgaugugcag

SEQ ID NO: 410539 - RNA, 19 nt, Artificial Sequence
  Description of Artificial Sequence: Synthetic oligonucleotide
gagucgugucaguuagcuc

SEQ ID NO: 410540 - RNA, 19 nt, Artificial Sequence
  Description of Artificial Sequence: Synthetic oligonucleotide
cacccagcggauguccucc

SEQ ID NO: 410541 - RNA, 19 nt, Artificial Sequence
  Description of Artificial Sequence: Synthetic oligonucleotide
cuccgggcaggacuggaug

SEQ ID NO: 410542 - RNA, 19 nt, Artificial Sequence
  Description of Artificial Sequence: Synthetic oligonucleotide
ggagcguuucucugccucc

SEQ ID NO: 410543 - RNA, 19 nt, Artificial Sequence
  Description of Artificial Sequence: Synthetic oligonucleotide
cucccgacccacuaggaua

SEQ ID NO: 410544 - RNA, 19 nt, Artificial Sequence
  Description of Artificial Sequence: Synthetic oligonucleotide
aguggggcccauacgguca

SEQ ID NO: 410545 - RNA, 19 nt, Artificial Sequence
  Description of Artificial Sequence: Synthetic oligonucleotide
ccucuaacguccacauggc

SEQ ID NO: 410546 - RNA, 19 nt, Artificial Sequence
  Description of Artificial Sequence: Synthetic oligonucleotide
caccagaggaugagcauaa

SEQ ID NO: 410547 - RNA, 19 nt, Artificial Sequence
  Description of Artificial Sequence: Synthetic oligonucleotide
augcccaucaccggcugca

SEQ ID NO: 410548 - RNA, 19 nt, Artificial Sequence
  Description of Artificial Sequence: Synthetic oligonucleotide
agauacccagcagagcaua

SEQ ID NO: 410549 - RNA, 19 nt, Artificial Sequence
  Description of Artificial Sequence: Synthetic oligonucleotide
agcaacgguccagcugacg

SEQ ID NO: 410550 - RNA, 19 nt, Artificial Sequence
  Description of Artificial Sequence: Synthetic oligonucleotide
auaguggggcccauacggu

SEQ ID NO: 410551 - RNA, 19 nt, Artificial Sequence
  Description of Artificial Sequence: Synthetic oligonucleotide
ucggcgccaccagaagucc

SEQ ID NO: 410552 - RNA, 19 nt, Artificial Sequence
  Description of Artificial Sequence: Synthetic oligonucleotide
ccaccagaaguccacccgc

SEQ ID NO: 410553 - RNA, 19 nt, Artificial Sequence
  Description of Artificial Sequence: Synthetic oligonucleotide
agggcgagugacugccaca

SEQ ID NO: 410554 - RNA, 19 nt, Artificial Sequence
  Description of Artificial Sequence: Synthetic oligonucleotide
cucguggcugugaccuccc

SEQ ID NO: 410555 - RNA, 19 nt, Artificial Sequence
  Description of Artificial Sequence: Synthetic oligonucleotide
gcaacacgaagaccacacc

SEQ ID NO: 410556 - RNA, 19 nt, Artificial Sequence
  Description of Artificial Sequence: Synthetic oligonucleotide
ggugcgggcgcaaauguca

SEQ ID NO: 410557 - RNA, 19 nt, Artificial Sequence
  Description of Artificial Sequence: Synthetic oligonucleotide
gccgguaggacagcacugg

SEQ ID NO: 410558 - RNA, 19 nt, Artificial Sequence
  Description of Artificial Sequence: Synthetic oligonucleotide
uccgccgguaggacagcac

SEQ ID NO: 410559 - RNA, 19 nt, Artificial Sequence
  Description of Artificial Sequence: Synthetic oligonucleotide
cugccacaaggugagucac

SEQ ID NO: 410560 - RNA, 19 nt, Artificial Sequence
  Description of Artificial Sequence: Synthetic oligonucleotide
cgaaccucaauagagguga

SEQ ID NO: 410561 - RNA, 19 nt, Artificial Sequence
  Description of Artificial Sequence: Synthetic oligonucleotide
ucgaugugcaggggcaaua

SEQ ID NO: 410562 - RNA, 19 nt, Artificial Sequence
  Description of Artificial Sequence: Synthetic oligonucleotide
gaagcgcacaccagcucuc

SEQ ID NO: 410563 - RNA, 19 nt, Artificial Sequence
  Description of Artificial Sequence: Synthetic oligonucleotide
ccccauaccacccgcuacc

SEQ ID NO: 410564 - RNA, 19 nt, Artificial Sequence
  Description of Artificial Sequence: Synthetic oligonucleotide
guggggcccauacggucag

SEQ ID NO: 410565 - RNA, 19 nt, Artificial Sequence
  Description of Artificial Sequence: Synthetic oligonucleotide
guccguagcgcugucggga

SEQ ID NO: 410566 - RNA, 19 nt, Artificial Sequence
  Description of Artificial Sequence: Synthetic oligonucleotide
uaccugccgcuuucccucc

SEQ ID NO: 410567 - RNA, 19 nt, Artificial Sequence
  Description of Artificial Sequence: Synthetic oligonucleotide
ugcgggcgcaaaugucaca

SEQ ID NO: 410568 - RNA, 19 nt, Artificial Sequence
  Description of Artificial Sequence: Synthetic oligonucleotide
ucggaucaacaagcaccag

SEQ ID NO: 410569 - RNA, 19 nt, Artificial Sequence
  Description of Artificial Sequence: Synthetic oligonucleotide
agcucguggcugugaccuc

SEQ ID NO: 410570 - RNA, 19 nt, Artificial Sequence
  Description of Artificial Sequence: Synthetic oligonucleotide
ccgacagugcccucugaag

SEQ ID NO: 410571 - RNA, 19 nt, Artificial Sequence
  Description of Artificial Sequence: Synthetic oligonucleotide
cagcaccuacuccacucac

SEQ ID NO: 410572 - RNA, 19 nt, Artificial Sequence
  Description of Artificial Sequence: Synthetic oligonucleotide
gaaccucaauagaggugac

SEQ ID NO: 410573 - RNA, 19 nt, Artificial Sequence
  Description of Artificial Sequence: Synthetic oligonucleotide
aggugaggcggcggccacc

SEQ ID NO: 410574 - RNA, 19 nt, Artificial Sequence
  Description of Artificial Sequence: Synthetic oligonucleotide
ucuccuggccagccacaaa

SEQ ID NO: 410575 - RNA, 19 nt, Artificial Sequence
  Description of Artificial Sequence: Synthetic oligonucleotide
agcgcugucgggaggcucu

SEQ ID NO: 410576 - RNA, 19 nt, Artificial Sequence
  Description of Artificial Sequence: Synthetic oligonucleotide
aguccacccgcacucccuu

SEQ ID NO: 410577 - RNA, 19 nt, Artificial Sequence
  Description of Artificial Sequence: Synthetic oligonucleotide
agggaguagucaagagcug

SEQ ID NO: 410578 - RNA, 19 nt, Artificial Sequence
  Description of Artificial Sequence: Synthetic oligonucleotide
cagucggcgccaccagaag

SEQ ID NO: 410579 - RNA, 19 nt, Artificial Sequence
  Description of Artificial Sequence: Synthetic oligonucleotide
agcucggcaggggccaaag

SEQ ID NO: 410580 - RNA, 19 nt, Artificial Sequence
  Description of Artificial Sequence: Synthetic oligonucleotide
aacuugccucuaacgucca

SEQ ID NO: 410581 - RNA, 19 nt, Artificial Sequence
  Description of Artificial Sequence: Synthetic oligonucleotide
caccuacuccacucaccac

SEQ ID NO: 410582 - RNA, 19 nt, Artificial Sequence
  Description of Artificial Sequence: Synthetic oligonucleotide
cucuagcauugagaccuug

SEQ ID NO: 410583 - RNA, 19 nt, Artificial Sequence
  Description of Artificial Sequence: Synthetic oligonucleotide
caggggcaauaguggggcc

SEQ ID NO: 410584 - RNA, 19 nt, Artificial Sequence
  Description of Artificial Sequence: Synthetic oligonucleotide
caugcgcccucccucuuga

SEQ ID NO: 410585 - RNA, 19 nt, Artificial Sequence
  Description of Artificial Sequence: Synthetic oligonucleotide
guugugcggcugcggggag

SEQ ID NO: 410586 - RNA, 19 nt, Artificial Sequence
  Description of Artificial Sequence: Synthetic oligonucleotide
acgcaacacgaagaccaca

SEQ ID NO: 410587 - RNA, 19 nt, Artificial Sequence
  Description of Artificial Sequence: Synthetic oligonucleotide
caagucgggcucccugcuc

SEQ ID NO: 410588 - RNA, 19 nt, Artificial Sequence
  Description of Artificial Sequence: Synthetic oligonucleotide
cucuuccgccgguaggaca

SEQ ID NO: 410589 - RNA, 19 nt, Artificial Sequence
  Description of Artificial Sequence: Synthetic oligonucleotide
augcgcccucccucuugac

SEQ ID NO: 410590 - RNA, 19 nt, Artificial Sequence
  Description of Artificial Sequence: Synthetic oligonucleotide
cauccagcgggugggccac

SEQ ID NO: 410591 - RNA, 19 nt, Artificial Sequence
  Description of Artificial Sequence: Synthetic oligonucleotide
ccauguaguuacgaagcuc

SEQ ID NO: 410592 - RNA, 19 nt, Artificial Sequence
  Description of Artificial Sequence: Synthetic oligonucleotide
ggaugagcauaagggccag

SEQ ID NO: 410593 - RNA, 19 nt, Artificial Sequence
  Description of Artificial Sequence: Synthetic oligonucleotide
cacacgggcaugggcugcc

SEQ ID NO: 410594 - RNA, 19 nt, Artificial Sequence
  Description of Artificial Sequence: Synthetic oligonucleotide
cggucguagagcucggcag

SEQ ID NO: 410595 - RNA, 19 nt, Artificial Sequence
  Description of Artificial Sequence: Synthetic oligonucleotide
acucaccaccacaccaagu

SEQ ID NO: 410596 - RNA, 19 nt, Artificial Sequence
  Description of Artificial Sequence: Synthetic oligonucleotide
gugacgagacgcacaggga

SEQ ID NO: 410597 - RNA, 19 nt, Artificial Sequence
  Description of Artificial Sequence: Synthetic oligonucleotide
cccgggagcguuucucugc

SEQ ID NO: 410598 - RNA, 19 nt, Artificial Sequence
  Description of Artificial Sequence: Synthetic oligonucleotide
gcugacucacaaccaaugu

SEQ ID NO: 410599 - RNA, 19 nt, Artificial Sequence
  Description of Artificial Sequence: Synthetic oligonucleotide
ccacgguuggggcaucccc

SEQ ID NO: 410600 - RNA, 19 nt, Artificial Sequence
  Description of Artificial Sequence: Synthetic oligonucleotide
aucaccggcugcacucuca

SEQ ID NO: 410601 - RNA, 19 nt, Artificial Sequence
  Description of Artificial Sequence: Synthetic oligonucleotide
cacgugacagggcgaguga

SEQ ID NO: 410602 - RNA, 19 nt, Artificial Sequence
  Description of Artificial Sequence: Synthetic oligonucleotide
agggccgaguagguaggug

SEQ ID NO: 410603 - RNA, 19 nt, Artificial Sequence
  Description of Artificial Sequence: Synthetic oligonucleotide
ggccgaguagguaggugag

SEQ ID NO: 410604 - RNA, 19 nt, Artificial Sequence
  Description of Artificial Sequence: Synthetic oligonucleotide
uuccgccgguaggacagca

SEQ ID NO: 410605 - RNA, 19 nt, Artificial Sequence
  Description of Artificial Sequence: Synthetic oligonucleotide
ggcgcaaaugucacaaacu

SEQ ID NO: 410606 - RNA, 19 nt, Artificial Sequence
  Description of Artificial Sequence: Synthetic oligonucleotide
cacguguaggggcagcccu

SEQ ID NO: 410607 - RNA, 19 nt, Artificial Sequence
  Description of Artificial Sequence: Synthetic oligonucleotide
cggaucaacaagcaccaga

SEQ ID NO: 410608 - RNA, 19 nt, Artificial Sequence
  Description of Artificial Sequence: Synthetic oligonucleotide
cucccacaccauuuugucu

SEQ ID NO: 410609 - RNA, 19 nt, Artificial Sequence
  Description of Artificial Sequence: Synthetic oligonucleotide
cacgguuggggcauccccu

SEQ ID NO: 410610 - RNA, 19 nt, Artificial Sequence
  Description of Artificial Sequence: Synthetic oligonucleotide
gccgaguagguaggugagg

SEQ ID NO: 410611 - RNA, 19 nt, Artificial Sequence
  Description of Artificial Sequence: Synthetic oligonucleotide
gggcacacgauggcggccc

SEQ ID NO: 410612 - RNA, 19 nt, Artificial Sequence
  Description of Artificial Sequence: Synthetic oligonucleotide
cagugacgagacgcacagg

SEQ ID NO: 410613 - RNA, 19 nt, Artificial Sequence
  Description of Artificial Sequence: Synthetic oligonucleotide
cacacacccagcggauguc

SEQ ID NO: 410614 - RNA, 19 nt, Artificial Sequence
  Description of Artificial Sequence: Synthetic oligonucleotide
ccgguaggacagcacuggg

SEQ ID NO: 410615 - RNA, 19 nt, Artificial Sequence
  Description of Artificial Sequence: Synthetic oligonucleotide
aggauacggccgccuucca

SEQ ID NO: 410616 - RNA, 19 nt, Artificial Sequence
  Description of Artificial Sequence: Synthetic oligonucleotide
ccgggagcguuucucugcc

SEQ ID NO: 410617 - RNA, 19 nt, Artificial Sequence
  Description of Artificial Sequence: Synthetic oligonucleotide
caccauugaccagaaagau

SEQ ID NO: 410618 - RNA, 19 nt, Artificial Sequence
  Description of Artificial Sequence: Synthetic oligonucleotide
gugcgggcgcaaaugucac

SEQ ID NO: 410619 - RNA, 19 nt, Artificial Sequence
  Description of Artificial Sequence: Synthetic oligonucleotide
ccuacaggcuccuccggca

SEQ ID NO: 410620 - RNA, 19 nt, Artificial Sequence
  Description of Artificial Sequence: Synthetic oligonucleotide
ggaucaugccucggcucag

SEQ ID NO: 410621 - RNA, 19 nt, Artificial Sequence
  Description of Artificial Sequence: Synthetic oligonucleotide
gccccggcgacacgguucc

SEQ ID NO: 410622 - RNA, 19 nt, Artificial Sequence
  Description of Artificial Sequence: Synthetic oligonucleotide
caucaccggcugcacucuc

SEQ ID NO: 410623 - RNA, 19 nt, Artificial Sequence
  Description of Artificial Sequence: Synthetic oligonucleotide
gcggucguagagcucggca

SEQ ID NO: 410624 - RNA, 19 nt, Artificial Sequence
  Description of Artificial Sequence: Synthetic oligonucleotide
cacgggcaugggcugccac

SEQ ID NO: 410625 - RNA, 19 nt, Artificial Sequence
  Description of Artificial Sequence: Synthetic oligonucleotide
ccgacccacuaggauacgg

SEQ ID NO: 410626 - RNA, 19 nt, Artificial Sequence
  Description of Artificial Sequence: Synthetic oligonucleotide
gcgacacgguuccgguggg

SEQ ID NO: 410627 - RNA, 19 nt, Artificial Sequence
  Description of Artificial Sequence: Synthetic oligonucleotide
gcuaugcgaggaucuugca

SEQ ID NO: 410628 - RNA, 19 nt, Artificial Sequence
  Description of Artificial Sequence: Synthetic oligonucleotide
gacaccccacuggucccac

SEQ ID NO: 410629 - RNA, 19 nt, Artificial Sequence
  Description of Artificial Sequence: Synthetic oligonucleotide
cacucucagcucuagcauu

SEQ ID NO: 410630 - RNA, 19 nt, Artificial Sequence
  Description of Artificial Sequence: Synthetic oligonucleotide
ggucggugacacgcugagg

SEQ ID NO: 410631 - RNA, 19 nt, Artificial Sequence
  Description of Artificial Sequence: Synthetic oligonucleotide
ggacccuccagccucgaau

SEQ ID NO: 410632 - RNA, 19 nt, Artificial Sequence
  Description of Artificial Sequence: Synthetic oligonucleotide
ggauacggccgccuuccaa

SEQ ID NO: 410633 - RNA, 19 nt, Artificial Sequence
  Description of Artificial Sequence: Synthetic oligonucleotide
gcugacgacucaguuccuc

SEQ ID NO: 410634 - RNA, 19 nt, Artificial Sequence
  Description of Artificial Sequence: Synthetic oligonucleotide
gagcguuucucugccuccu

SEQ ID NO: 410635 - RNA, 19 nt, Artificial Sequence
  Description of Artificial Sequence: Synthetic oligonucleotide
gccgacagugcccucugaa

SEQ ID NO: 410636 - RNA, 19 nt, Artificial Sequence
  Description of Artificial Sequence: Synthetic oligonucleotide
guacuccagcugccacgug

SEQ ID NO: 410637 - RNA, 19 nt, Artificial Sequence
  Description of Artificial Sequence: Synthetic oligonucleotide
gcaccagaggaugagcaua

SEQ ID NO: 410638 - RNA, 19 nt, Artificial Sequence
  Description of Artificial Sequence: Synthetic oligonucleotide
cccgcacucccuuggcccc

SEQ ID NO: 410639 - RNA, 19 nt, Artificial Sequence
  Description of Artificial Sequence: Synthetic oligonucleotide
cgaugugcaggggcaauag

SEQ ID NO: 410640 - RNA, 19 nt, Artificial Sequence
  Description of Artificial Sequence: Synthetic oligonucleotide
gcgggcgcaaaugucacaa

SEQ ID NO: 410641 - RNA, 19 nt, Artificial Sequence
  Description of Artificial Sequence: Synthetic oligonucleotide
gccacguguaggggcagcc

SEQ ID NO: 410642 - RNA, 19 nt, Artificial Sequence
  Description of Artificial Sequence: Synthetic oligonucleotide
cuuccgccgguaggacagc

SEQ ID NO: 410643 - RNA, 19 nt, Artificial Sequence
  Description of Artificial Sequence: Synthetic oligonucleotide
uucccagcucuaggucggu

SEQ ID NO: 410644 - RNA, 19 nt, Artificial Sequence
  Description of Artificial Sequence: Synthetic oligonucleotide
guggggaacgaaccucaau

SEQ ID NO: 410645 - RNA, 19 nt, Artificial Sequence
  Description of Artificial Sequence: Synthetic oligonucleotide
uccagcgggugggccacaa

SEQ ID NO: 410646 - RNA, 19 nt, Artificial Sequence
  Description of Artificial Sequence: Synthetic oligonucleotide
cgcugguaacgcaacacga

SEQ ID NO: 410647 - RNA, 19 nt, Artificial Sequence
  Description of Artificial Sequence: Synthetic oligonucleotide
agucgggcucccugcucuu

SEQ ID NO: 410648 - RNA, 19 nt, Artificial Sequence
  Description of Artificial Sequence: Synthetic oligonucleotide
ccgggcaggacuggauggg

SEQ ID NO: 410649 - RNA, 19 nt, Artificial Sequence
  Description of Artificial Sequence: Synthetic oligonucleotide
ucgugucaguuagcucgau

SEQ ID NO: 410650 - RNA, 19 nt, Artificial Sequence
  Description of Artificial Sequence: Synthetic oligonucleotide
acccgcuaccugccgcuuu

SEQ ID NO: 410651 - RNA, 19 nt, Artificial Sequence
  Description of Artificial Sequence: Synthetic oligonucleotide
cccggcgacacgguuccgg

SEQ ID NO: 410652 - RNA, 19 nt, Artificial Sequence
  Description of Artificial Sequence: Synthetic oligonucleotide
gccucgaaucugcuccaga

SEQ ID NO: 410653 - RNA, 19 nt, Artificial Sequence
  Description of Artificial Sequence: Synthetic oligonucleotide
gcagucggcgccaccagaa

SEQ ID NO: 410654 - RNA, 19 nt, Artificial Sequence
  Description of Artificial Sequence: Synthetic oligonucleotide
cccgcuaccugccgcuuuc

SEQ ID NO: 410655 - RNA, 19 nt, Artificial Sequence
  Description of Artificial Sequence: Synthetic oligonucleotide
cccaguugugcggcugcgg

SEQ ID NO: 410656 - RNA, 19 nt, Artificial Sequence
  Description of Artificial Sequence: Synthetic oligonucleotide
ccauaccacccgcuaccug

SEQ ID NO: 410657 - RNA, 19 nt, Artificial Sequence
  Description of Artificial Sequence: Synthetic oligonucleotide
ccacguguaggggcagccc

SEQ ID NO: 410658 - RNA, 19 nt, Artificial Sequence
  Description of Artificial Sequence: Synthetic oligonucleotide
ccuugucgucugucacagc

SEQ ID NO: 410659 - RNA, 19 nt, Artificial Sequence
  Description of Artificial Sequence: Synthetic oligonucleotide
ggaugcgcuggggcacucc

SEQ ID NO: 410660 - RNA, 19 nt, Artificial Sequence
  Description of Artificial Sequence: Synthetic oligonucleotide
cggccgccuuccaaggagg

SEQ ID NO: 410661 - RNA, 19 nt, Artificial Sequence
  Description of Artificial Sequence: Synthetic oligonucleotide
ggggugcgggcgcaaaugu

SEQ ID NO: 410662 - RNA, 19 nt, Artificial Sequence
  Description of Artificial Sequence: Synthetic oligonucleotide
gcacacgauggcggccccg

SEQ ID NO: 410663 - RNA, 19 nt, Artificial Sequence
  Description of Artificial Sequence: Synthetic oligonucleotide
ggccaaugagaugcccauc

SEQ ID NO: 410664 - RNA, 19 nt, Artificial Sequence
  Description of Artificial Sequence: Synthetic oligonucleotide
ggagccgacagugcccucu

SEQ ID NO: 410665 - RNA, 19 nt, Artificial Sequence
  Description of Artificial Sequence: Synthetic oligonucleotide
ugaccuccccaggguggau

SEQ ID NO: 410666 - RNA, 19 nt, Artificial Sequence
  Description of Artificial Sequence: Synthetic oligonucleotide
ccccaggguggaucaugcc

SEQ ID NO: 410667 - RNA, 19 nt, Artificial Sequence
  Description of Artificial Sequence: Synthetic oligonucleotide
ggugcucgaggagccgaca

SEQ ID NO: 410668 - RNA, 19 nt, Artificial Sequence
  Description of Artificial Sequence: Synthetic oligonucleotide
cgccgguaggacagcacug

SEQ ID NO: 410669 - RNA, 19 nt, Artificial Sequence
  Description of Artificial Sequence: Synthetic oligonucleotide
ccucuugaccaugguccac

SEQ ID NO: 410670 - RNA, 19 nt, Artificial Sequence
  Description of Artificial Sequence: Synthetic oligonucleotide
gcccggggaggagcaacgg

SEQ ID NO: 410671 - RNA, 19 nt, Artificial Sequence
  Description of Artificial Sequence: Synthetic oligonucleotide
gggugcgggcgcaaauguc

SEQ ID NO: 410672 - RNA, 19 nt, Artificial Sequence
  Description of Artificial Sequence: Synthetic oligonucleotide
cacuaggauacggccgccu

SEQ ID NO: 410673 - RNA, 19 nt, Artificial Sequence
  Description of Artificial Sequence: Synthetic oligonucleotide
ccaagcaggggacucggau

SEQ ID NO: 410674 - RNA, 19 nt, Artificial Sequence
  Description of Artificial Sequence: Synthetic oligonucleotide
cuccagagucgugucaguu

SEQ ID NO: 410675 - RNA, 19 nt, Artificial Sequence
  Description of Artificial Sequence: Synthetic oligonucleotide
gggcaugcgcccucccucu

SEQ ID NO: 410676 - RNA, 19 nt, Artificial Sequence
  Description of Artificial Sequence: Synthetic oligonucleotide
ccacuaggauacggccgcc

SEQ ID NO: 410677 - RNA, 19 nt, Artificial Sequence
  Description of Artificial Sequence: Synthetic oligonucleotide
ggcaauaguggggcccaua

SEQ ID NO: 410678 - RNA, 19 nt, Artificial Sequence
  Description of Artificial Sequence: Synthetic oligonucleotide
cuuugcgggccagggugcu

SEQ ID NO: 410679 - RNA, 19 nt, Artificial Sequence
  Description of Artificial Sequence: Synthetic oligonucleotide
ggcucccgacccacuagga

SEQ ID NO: 410680 - RNA, 19 nt, Artificial Sequence
  Description of Artificial Sequence: Synthetic oligonucleotide
cucgaugugcaggggcaau

SEQ ID NO: 410681 - RNA, 19 nt, Artificial Sequence
  Description of Artificial Sequence: Synthetic oligonucleotide
cccauacggucagcuucag

SEQ ID NO: 410682 - RNA, 19 nt, Artificial Sequence
  Description of Artificial Sequence: Synthetic oligonucleotide
cgagacgcacagggaugcg

SEQ ID NO: 410683 - RNA, 19 nt, Artificial Sequence
  Description of Artificial Sequence: Synthetic oligonucleotide
cccgacucuccuggccagc

SEQ ID NO: 410684 - RNA, 19 nt, Artificial Sequence
  Description of Artificial Sequence: Synthetic oligonucleotide
ccgccgguaggacagcacu

SEQ ID NO: 410685 - RNA, 19 nt, Artificial Sequence
  Description of Artificial Sequence: Synthetic oligonucleotide
gcagccccgggagcguuuc

SEQ ID NO: 410686 - RNA, 19 nt, Artificial Sequence
  Description of Artificial Sequence: Synthetic oligonucleotide
guagcgcugucgggaggcu

SEQ ID NO: 410687 - RNA, 19 nt, Artificial Sequence
  Description of Artificial Sequence: Synthetic oligonucleotide
cgugacagggcgagugacu

SEQ ID NO: 410688 - RNA, 19 nt, Artificial Sequence
  Description of Artificial Sequence: Synthetic oligonucleotide
ccgcuaccugccgcuuucc

SEQ ID NO: 410689 - RNA, 19 nt, Artificial Sequence
  Description of Artificial Sequence: Synthetic oligonucleotide
cccgacccacuaggauacg

SEQ ID NO: 410690 - RNA, 19 nt, Artificial Sequence
  Description of Artificial Sequence: Synthetic oligonucleotide
cccggauccucuccaugua

SEQ ID NO: 410691 - RNA, 19 nt, Artificial Sequence
  Description of Artificial Sequence: Synthetic oligonucleotide
ggggccacgguuggggcau

SEQ ID NO: 410692 - RNA, 19 nt, Artificial Sequence
  Description of Artificial Sequence: Synthetic oligonucleotide
cggcgacacgguuccggug

SEQ ID NO: 410693 - RNA, 19 nt, Artificial Sequence
  Description of Artificial Sequence: Synthetic oligonucleotide
ccacccgcuaccugccgcu

SEQ ID NO: 410694 - RNA, 19 nt, Artificial Sequence
  Description of Artificial Sequence: Synthetic oligonucleotide
cagggccgaguagguaggu

SEQ ID NO: 410695 - RNA, 19 nt, Artificial Sequence
  Description of Artificial Sequence: Synthetic oligonucleotide
ccggcgacacgguuccggu

SEQ ID NO: 410696 - RNA, 19 nt, Artificial Sequence
  Description of Artificial Sequence: Synthetic oligonucleotide
gccgccuuccaaggaggcu

SEQ ID NO: 410697 - RNA, 19 nt, Artificial Sequence
  Description of Artificial Sequence: Synthetic oligonucleotide
ccaucaccggcugcacucu

SEQ ID NO: 410698 - RNA, 19 nt, Artificial Sequence
  Description of Artificial Sequence: Synthetic oligonucleotide
cgggcgcaaaugucacaaa

SEQ ID NO: 410699 - RNA, 19 nt, Artificial Sequence
  Description of Artificial Sequence: Synthetic oligonucleotide
ccagcgggugggccacaaa

SEQ ID NO: 410700 - RNA, 19 nt, Artificial Sequence
  Description of Artificial Sequence: Synthetic oligonucleotide
ggcccgcagucggcgccac

SEQ ID NO: 410701 - RNA, 19 nt, Artificial Sequence
  Description of Artificial Sequence: Synthetic oligonucleotide
cagccccgggagcguuucu

SEQ ID NO: 410702 - RNA, 19 nt, Artificial Sequence
  Description of Artificial Sequence: Synthetic oligonucleotide
ccccggcgacacgguuccg

SEQ ID NO: 410703 - RNA, 19 nt, Artificial Sequence
  Description of Artificial Sequence: Synthetic oligonucleotide
cggggaggaaggguccgua

SEQ ID NO: 410704 - RNA, 19 nt, Artificial Sequence
  Description of Artificial Sequence: Synthetic oligonucleotide
gggcaauaguggggcccau

SEQ ID NO: 410705 - RNA, 19 nt, Artificial Sequence
  Description of Artificial Sequence: Synthetic oligonucleotide
cacccgcuaccugccgcuu

SEQ ID NO: 410706 - RNA, 19 nt, Artificial Sequence
  Description of Artificial Sequence: Synthetic oligonucleotide
ggcagccccgggagcguuu

SEQ ID NO: 410707 - RNA, 19 nt, Artificial Sequence
  Description of Artificial Sequence: Synthetic oligonucleotide
gcgcugucgggaggcucuu

SEQ ID NO: 410708 - RNA, 19 nt, Artificial Sequence
  Description of Artificial Sequence: Synthetic oligonucleotide
gccucggcucagggccaau

SEQ ID NO: 410709 - RNA, 19 nt, Artificial Sequence
  Description of Artificial Sequence: Synthetic oligonucleotide
cgcugucgggaggcucuuu

SEQ ID NO: 410710 - RNA, 19 nt, Artificial Sequence
  Description of Artificial Sequence: Synthetic oligonucleotide
uuuugauagaagaagaggg

SEQ ID NO: 410711 - RNA, 19 nt, Artificial Sequence
  Description of Artificial Sequence: Synthetic oligonucleotide
ucuacgacaggguagaucc

SEQ ID NO: 410712 - RNA, 19 nt, Artificial Sequence
  Description of Artificial Sequence: Synthetic oligonucleotide
uaacugacucuccagaugg

SEQ ID NO: 410713 - RNA, 19 nt, Artificial Sequence
  Description of Artificial Sequence: Synthetic oligonucleotide
auagcuugaguuuucgggc

SEQ ID NO: 410714 - RNA, 19 nt, Artificial Sequence
  Description of Artificial Sequence: Synthetic oligonucleotide
cuauuuuggaccaggaucc

SEQ ID NO: 410715 - RNA, 19 nt, Artificial Sequence
  Description of Artificial Sequence: Synthetic oligonucleotide
guacaguugagcuagacug

SEQ ID NO: 410716 - RNA, 19 nt, Artificial Sequence
  Description of Artificial Sequence: Synthetic oligonucleotide
aauucuaggcccuccuggg

SEQ ID NO: 410717 - RNA, 19 nt, Artificial Sequence
  Description of Artificial Sequence: Synthetic oligonucleotide
auauaguagaucuucccag

SEQ ID NO: 410718 - RNA, 19 nt, Artificial Sequence
  Description of Artificial Sequence: Synthetic oligonucleotide
uccucaucgaauuccaggg

SEQ ID NO: 410719 - RNA, 19 nt, Artificial Sequence
  Description of Artificial Sequence: Synthetic oligonucleotide
cuucacauaguacagaguc

SEQ ID NO: 410720 - RNA, 19 nt, Artificial Sequence
  Description of Artificial Sequence: Synthetic oligonucleotide
ugccaguuggaacucaugg

SEQ ID NO: 410721 - RNA, 19 nt, Artificial Sequence
  Description of Artificial Sequence: Synthetic oligonucleotide
aaagugacaaagccuugag

SEQ ID NO: 410722 - RNA, 19 nt, Artificial Sequence
  Description of Artificial Sequence: Synthetic oligonucleotide
guagaugacacaucguacc

SEQ ID NO: 410723 - RNA, 19 nt, Artificial Sequence
  Description of Artificial Sequence: Synthetic oligonucleotide
aaagcaugugcagccaggc

SEQ ID NO: 410724 - RNA, 19 nt, Artificial Sequence
  Description of Artificial Sequence: Synthetic oligonucleotide
cuaagauuggacuucagga

SEQ ID NO: 410725 - RNA, 19 nt, Artificial Sequence
  Description of Artificial Sequence: Synthetic oligonucleotide
ugcaaagugacaaagccuu

SEQ ID NO: 410726 - RNA, 19 nt, Artificial Sequence
  Description of Artificial Sequence: Synthetic oligonucleotide
gaugaaaauccccaggcuc

SEQ ID NO: 410727 - RNA, 19 nt, Artificial Sequence
  Description of Artificial Sequence: Synthetic oligonucleotide
ucggaaguaaccuucggca

SEQ ID NO: 410728 - RNA, 19 nt, Artificial Sequence
  Description of Artificial Sequence: Synthetic oligonucleotide
augggcgaauucuaggccc

SEQ ID NO: 410729 - RNA, 19 nt, Artificial Sequence
  Description of Artificial Sequence: Synthetic oligonucleotide
uaguguugggcuaagcuac

SEQ ID NO: 410730 - RNA, 19 nt, Artificial Sequence
  Description of Artificial Sequence: Synthetic oligonucleotide
gagugcuagggccucaugg

SEQ ID NO: 410731 - RNA, 19 nt, Artificial Sequence
  Description of Artificial Sequence: Synthetic oligonucleotide
gauagaaagacacagcuuu

SEQ ID NO: 410732 - RNA, 19 nt, Artificial Sequence
  Description of Artificial Sequence: Synthetic oligonucleotide
uaagcuacgugcaccagcu

SEQ ID NO: 410733 - RNA, 19 nt, Artificial Sequence
  Description of Artificial Sequence: Synthetic oligonucleotide
ucaugggcgaauucuaggc

SEQ ID NO: 410734 - RNA, 19 nt, Artificial Sequence
  Description of Artificial Sequence: Synthetic oligonucleotide
uguacaguugagcuagacu

SEQ ID NO: 410735 - RNA, 19 nt, Artificial Sequence
  Description of Artificial Sequence: Synthetic oligonucleotide
agugcuagggccucauggg

SEQ ID NO: 410736 - RNA, 19 nt, Artificial Sequence
  Description of Artificial Sequence: Synthetic oligonucleotide
cacacuacugggcagcugg

SEQ ID NO: 410737 - RNA, 19 nt, Artificial Sequence
  Description of Artificial Sequence: Synthetic oligonucleotide
caaacggucuacgacaggg

SEQ ID NO: 410738 - RNA, 19 nt, Artificial Sequence
  Description of Artificial Sequence: Synthetic oligonucleotide
ugguagaugacacaucgua

SEQ ID NO: 410739 - RNA, 19 nt, Artificial Sequence
  Description of Artificial Sequence: Synthetic oligonucleotide
gaagaguccccuugcacag

SEQ ID NO: 410740 - RNA, 19 nt, Artificial Sequence
  Description of Artificial Sequence: Synthetic oligonucleotide
uguaggcccgcucagugcc

SEQ ID NO: 410741 - RNA, 19 nt, Artificial Sequence
  Description of Artificial Sequence: Synthetic oligonucleotide
ugauuuccuauagucacag

SEQ ID NO: 410742 - RNA, 19 nt, Artificial Sequence
  Description of Artificial Sequence: Synthetic oligonucleotide
agcugcgucaaagggaucc

SEQ ID NO: 410743 - RNA, 19 nt, Artificial Sequence
  Description of Artificial Sequence: Synthetic oligonucleotide
gauccggaguaccaggucc

SEQ ID NO: 410744 - RNA, 19 nt, Artificial Sequence
  Description of Artificial Sequence: Synthetic oligonucleotide
guugggcuaagcuacgugc

SEQ ID NO: 410745 - RNA, 19 nt, Artificial Sequence
  Description of Artificial Sequence: Synthetic oligonucleotide
gacacaucguaccucguug

SEQ ID NO: 410746 - RNA, 19 nt, Artificial Sequence
  Description of Artificial Sequence: Synthetic oligonucleotide
uccguuugguguaauccag

SEQ ID NO: 410747 - RNA, 19 nt, Artificial Sequence
  Description of Artificial Sequence: Synthetic oligonucleotide
ugcauaguuggcccaacca

SEQ ID NO: 410748 - RNA, 19 nt, Artificial Sequence
  Description of Artificial Sequence: Synthetic oligonucleotide
gcuauuuuggaccaggauc

SEQ ID NO: 410749 - RNA, 19 nt, Artificial Sequence
  Description of Artificial Sequence: Synthetic oligonucleotide
gucgaugaaaauccccagg

SEQ ID NO: 410750 - RNA, 19 nt, Artificial Sequence
  Description of Artificial Sequence: Synthetic oligonucleotide
cacucgcucauucaggcgg

SEQ ID NO: 410751 - RNA, 19 nt, Artificial Sequence
  Description of Artificial Sequence: Synthetic oligonucleotide
agauuuguaggcccgcuca

SEQ ID NO: 410752 - RNA, 19 nt, Artificial Sequence
  Description of Artificial Sequence: Synthetic oligonucleotide
gagugagagaagccaaugc

SEQ ID NO: 410753 - RNA, 19 nt, Artificial Sequence
  Description of Artificial Sequence: Synthetic oligonucleotide
ucacauaguacagagucuc

SEQ ID NO: 410754 - RNA, 19 nt, Artificial Sequence
  Description of Artificial Sequence: Synthetic oligonucleotide
uagaugacacaucguaccu

SEQ ID NO: 410755 - RNA, 19 nt, Artificial Sequence
  Description of Artificial Sequence: Synthetic oligonucleotide
acaguugagcuagacuggc

SEQ ID NO: 410756 - RNA, 19 nt, Artificial Sequence
  Description of Artificial Sequence: Synthetic oligonucleotide
uucacauaguacagagucu

SEQ ID NO: 410757 - RNA, 19 nt, Artificial Sequence
  Description of Artificial Sequence: Synthetic oligonucleotide
uguccguacuguaugcaug

SEQ ID NO: 410758 - RNA, 19 nt, Artificial Sequence
  Description of Artificial Sequence: Synthetic oligonucleotide
aagagggacaucucacggu

SEQ ID NO: 410759 - RNA, 19 nt, Artificial Sequence
  Description of Artificial Sequence: Synthetic oligonucleotide
uugauuuccuauagucaca

SEQ ID NO: 410760 - RNA, 19 nt, Artificial Sequence
  Description of Artificial Sequence: Synthetic oligonucleotide
ucaucgaauuccaggggug

SEQ ID NO: 410761 - RNA, 19 nt, Artificial Sequence
  Description of Artificial Sequence: Synthetic oligonucleotide
acuacugggcagcugggag

SEQ ID NO: 410762 - RNA, 19 nt, Artificial Sequence
  Description of Artificial Sequence: Synthetic oligonucleotide
acacaucguaccucguugg

SEQ ID NO: 410763 - RNA, 19 nt, Artificial Sequence
  Description of Artificial Sequence: Synthetic oligonucleotide
aguuggcccaaccacagga

SEQ ID NO: 410764 - RNA, 19 nt, Artificial Sequence
  Description of Artificial Sequence: Synthetic oligonucleotide
uguagaaguggcauagcuu

SEQ ID NO: 410765 - RNA, 19 nt, Artificial Sequence
  Description of Artificial Sequence: Synthetic oligonucleotide
guccguacuguaugcaugg

SEQ ID NO: 410766 - RNA, 19 nt, Artificial Sequence
  Description of Artificial Sequence: Synthetic oligonucleotide
cuaagcuacgugcaccagc

SEQ ID NO: 410767 - RNA, 19 nt, Artificial Sequence
  Description of Artificial Sequence: Synthetic oligonucleotide
uggcauagcuuuugcacag

SEQ ID NO: 410768 - RNA, 19 nt, Artificial Sequence
  Description of Artificial Sequence: Synthetic oligonucleotide
gaaguaaccuucggcagcc

SEQ ID NO: 410769 - RNA, 19 nt, Artificial Sequence
  Description of Artificial Sequence: Synthetic oligonucleotide
uggcgcaggauauaguaga

SEQ ID NO: 410770 - RNA, 19 nt, Artificial Sequence
  Description of Artificial Sequence: Synthetic oligonucleotide
cucaugggcgaauucuagg

SEQ ID NO: 410771 - RNA, 19 nt, Artificial Sequence
  Description of Artificial Sequence: Synthetic oligonucleotide
cugguaauacccagcugcg

SEQ ID NO: 410772 - RNA, 19 nt, Artificial Sequence
  Description of Artificial Sequence: Synthetic oligonucleotide
agcuacgugcaccagcuug

SEQ ID NO: 410773 - RNA, 19 nt, Artificial Sequence
  Description of Artificial Sequence: Synthetic oligonucleotide
ugggauccccaguauacag

SEQ ID NO: 410774 - RNA, 19 nt, Artificial Sequence
  Description of Artificial Sequence: Synthetic oligonucleotide
ggagaagagucccacacgc

SEQ ID NO: 410775 - RNA, 19 nt, Artificial Sequence
  Description of Artificial Sequence: Synthetic oligonucleotide
cucggaaguaaccuucggc

SEQ ID NO: 410776 - RNA, 19 nt, Artificial Sequence
  Description of Artificial Sequence: Synthetic oligonucleotide
gagcuagacuggcauagag

SEQ ID NO: 410777 - RNA, 19 nt, Artificial Sequence
  Description of Artificial Sequence: Synthetic oligonucleotide
uccuauagucacagccagg

SEQ ID NO: 410778 - RNA, 19 nt, Artificial Sequence
  Description of Artificial Sequence: Synthetic oligonucleotide
guaacugacucuccagaug

SEQ ID NO: 410779 - RNA, 19 nt, Artificial Sequence
  Description of Artificial Sequence: Synthetic oligonucleotide
gaugcaggguggcuagccg

SEQ ID NO: 410780 - RNA, 19 nt, Artificial Sequence
  Description of Artificial Sequence: Synthetic oligonucleotide
caaauugacuuucuuggca

SEQ ID NO: 410781 - RNA, 19 nt, Artificial Sequence
  Description of Artificial Sequence: Synthetic oligonucleotide
caguuggaacucaugguag

SEQ ID NO: 410782 - RNA, 19 nt, Artificial Sequence
  Description of Artificial Sequence: Synthetic oligonucleotide
acaucguaccucguugggc

SEQ ID NO: 410783 - RNA, 19 nt, Artificial Sequence
  Description of Artificial Sequence: Synthetic oligonucleotide
cuuuugcacagccuguaac

SEQ ID NO: 410784 - RNA, 19 nt, Artificial Sequence
  Description of Artificial Sequence: Synthetic oligonucleotide
ggauauaguagaucuuccc

SEQ ID NO: 410785 - RNA, 19 nt, Artificial Sequence
  Description of Artificial Sequence: Synthetic oligonucleotide
uguugggcuaagcuacgug

SEQ ID NO: 410786 - RNA, 19 nt, Artificial Sequence
  Description of Artificial Sequence: Synthetic oligonucleotide
uugggcuaagcuacgugca

SEQ ID NO: 410787 - RNA, 19 nt, Artificial Sequence
  Description of Artificial Sequence: Synthetic oligonucleotide
ugugccaagcauccagcca

SEQ ID NO: 410788 - RNA, 19 nt, Artificial Sequence
  Description of Artificial Sequence: Synthetic oligonucleotide
uggguguaaugccuggcca

SEQ ID NO: 410789 - RNA, 19 nt, Artificial Sequence
  Description of Artificial Sequence: Synthetic oligonucleotide
uugcacagacccuucucag

SEQ ID NO: 410790 - RNA, 19 nt, Artificial Sequence
  Description of Artificial Sequence: Synthetic oligonucleotide
gcuacuaaguucuuuccac

SEQ ID NO: 410791 - RNA, 19 nt, Artificial Sequence
  Description of Artificial Sequence: Synthetic oligonucleotide
cauaguuggcccaaccaca

SEQ ID NO: 410792 - RNA, 19 nt, Artificial Sequence
  Description of Artificial Sequence: Synthetic oligonucleotide
ccuauagucacagccaggg

SEQ ID NO: 410793 - RNA, 19 nt, Artificial Sequence
  Description of Artificial Sequence: Synthetic oligonucleotide
agagccaugcccaaauuga

SEQ ID NO: 410794 - RNA, 19 nt, Artificial Sequence
  Description of Artificial Sequence: Synthetic oligonucleotide
cuuguuggccacagcugcg

SEQ ID NO: 410795 - RNA, 19 nt, Artificial Sequence
  Description of Artificial Sequence: Synthetic oligonucleotide
caggcaagcgccaccaaac

SEQ ID NO: 410796 - RNA, 19 nt, Artificial Sequence
  Description of Artificial Sequence: Synthetic oligonucleotide
cagaaaggcccacucguag

SEQ ID NO: 410797 - RNA, 19 nt, Artificial Sequence
  Description of Artificial Sequence: Synthetic oligonucleotide
aacggucuacgacagggua

SEQ ID NO: 410798 - RNA, 19 nt, Artificial Sequence
  Description of Artificial Sequence: Synthetic oligonucleotide
gugaguugcaaagugacaa

SEQ ID NO: 410799 - RNA, 19 nt, Artificial Sequence
  Description of Artificial Sequence: Synthetic oligonucleotide
agaaaggcccacucguagu

SEQ ID NO: 410800 - RNA, 19 nt, Artificial Sequence
  Description of Artificial Sequence: Synthetic oligonucleotide
uauuuuggaccaggauccg

SEQ ID NO: 410801 - RNA, 19 nt, Artificial Sequence
  Description of Artificial Sequence: Synthetic oligonucleotide
ugaguugcaaagugacaaa

SEQ ID NO: 410802 - RNA, 19 nt, Artificial Sequence
  Description of Artificial Sequence: Synthetic oligonucleotide
caugggcgaauucuaggcc

SEQ ID NO: 410803 - RNA, 19 nt, Artificial Sequence
  Description of Artificial Sequence: Synthetic oligonucleotide
caggucgaugaaaaucccc

SEQ ID NO: 410804 - RNA, 19 nt, Artificial Sequence
  Description of Artificial Sequence: Synthetic oligonucleotide
ugguguaauccagagcaga

SEQ ID NO: 410805 - RNA, 19 nt, Artificial Sequence
  Description of Artificial Sequence: Synthetic oligonucleotide
caccaaacggucuacgaca

SEQ ID NO: 410806 - RNA, 19 nt, Artificial Sequence
  Description of Artificial Sequence: Synthetic oligonucleotide
gccucaaauagcuccagcc

SEQ ID NO: 410807 - RNA, 19 nt, Artificial Sequence
  Description of Artificial Sequence: Synthetic oligonucleotide
uuggaacucaugguagaug

SEQ ID NO: 410808 - RNA, 19 nt, Artificial Sequence
  Description of Artificial Sequence: Synthetic oligonucleotide
gguaauacccagcugcguc

SEQ ID NO: 410809 - RNA, 19 nt, Artificial Sequence
  Description of Artificial Sequence: Synthetic oligonucleotide
cugaccuucuagcaccuug

SEQ ID NO: 410810 - RNA, 19 nt, Artificial Sequence
  Description of Artificial Sequence: Synthetic oligonucleotide
cacauaguacagagucucc

SEQ ID NO: 410811 - RNA, 19 nt, Artificial Sequence
  Description of Artificial Sequence: Synthetic oligonucleotide
guugucaggauggguaacc

SEQ ID NO: 410812 - RNA, 19 nt, Artificial Sequence
  Description of Artificial Sequence: Synthetic oligonucleotide
caucguaccucguugggca

SEQ ID NO: 410813 - RNA, 19 nt, Artificial Sequence
  Description of Artificial Sequence: Synthetic oligonucleotide
cacucguaguagcacuugg

SEQ ID NO: 410814 - RNA, 19 nt, Artificial Sequence
  Description of Artificial Sequence: Synthetic oligonucleotide
ggaaguaaccuucggcagc

SEQ ID NO: 410815 - RNA, 19 nt, Artificial Sequence
  Description of Artificial Sequence: Synthetic oligonucleotide
guaauacccagcugcguca

SEQ ID NO: 410816 - RNA, 19 nt, Artificial Sequence
  Description of Artificial Sequence: Synthetic oligonucleotide
cuauagucacagccagggg

SEQ ID NO: 410817 - RNA, 19 nt, Artificial Sequence
  Description of Artificial Sequence: Synthetic oligonucleotide
auaguuggcccaaccacag

SEQ ID NO: 410818 - RNA, 19 nt, Artificial Sequence
  Description of Artificial Sequence: Synthetic oligonucleotide
guagagcuggcugauggcc

SEQ ID NO: 410819 - RNA, 19 nt, Artificial Sequence
  Description of Artificial Sequence: Synthetic oligonucleotide
uacgacaggguagauccca

SEQ ID NO: 410820 - RNA, 19 nt, Artificial Sequence
  Description of Artificial Sequence: Synthetic oligonucleotide
aggucgaugaaaaucccca

SEQ ID NO: 410821 - RNA, 19 nt, Artificial Sequence
  Description of Artificial Sequence: Synthetic oligonucleotide
guggguguaaugccuggcc

SEQ ID NO: 410822 - RNA, 19 nt, Artificial Sequence
  Description of Artificial Sequence: Synthetic oligonucleotide
agcagauuuguaggcccgc

SEQ ID NO: 410823 - RNA, 19 nt, Artificial Sequence
  Description of Artificial Sequence: Synthetic oligonucleotide
cuacuaaguucuuuccaca

SEQ ID NO: 410824 - RNA, 19 nt, Artificial Sequence
  Description of Artificial Sequence: Synthetic oligonucleotide
ccaacgagcaccuagucca

SEQ ID NO: 410825 - RNA, 19 nt, Artificial Sequence
  Description of Artificial Sequence: Synthetic oligonucleotide
uaguuggcccaaccacagg

SEQ ID NO: 410826 - RNA, 19 nt, Artificial Sequence
  Description of Artificial Sequence: Synthetic oligonucleotide
agauggucccaucuccaca

SEQ ID NO: 410827 - RNA, 19 nt, Artificial Sequence
  Description of Artificial Sequence: Synthetic oligonucleotide
gccuuucugagguaguaag

SEQ ID NO: 410828 - RNA, 19 nt, Artificial Sequence
  Description of Artificial Sequence: Synthetic oligonucleotide
agccugucggguccugccc

SEQ ID NO: 410829 - RNA, 19 nt, Artificial Sequence
  Description of Artificial Sequence: Synthetic oligonucleotide
uggccaacgagcaccuagu

SEQ ID NO: 410830 - RNA, 19 nt, Artificial Sequence
  Description of Artificial Sequence: Synthetic oligonucleotide
ugaugcaggguggcuagcc

SEQ ID NO: 410831 - RNA, 19 nt, Artificial Sequence
  Description of Artificial Sequence: Synthetic oligonucleotide
agccaaccccucuucauca

SEQ ID NO: 410832 - RNA, 19 nt, Artificial Sequence
  Description of Artificial Sequence: Synthetic oligonucleotide
cacaucguaccucguuggg

SEQ ID NO: 410833 - RNA, 19 nt, Artificial Sequence
  Description of Artificial Sequence: Synthetic oligonucleotide
uuggcaacuccucgugccu

SEQ ID NO: 410834 - RNA, 19 nt, Artificial Sequence
  Description of Artificial Sequence: Synthetic oligonucleotide
agauuggacuucaggaugu

SEQ ID NO: 410835 - RNA, 19 nt, Artificial Sequence
  Description of Artificial Sequence: Synthetic oligonucleotide
aguaagcaaucuggguggg

SEQ ID NO: 410836 - RNA, 19 nt, Artificial Sequence
  Description of Artificial Sequence: Synthetic oligonucleotide
ggucccgauagaaagacac

SEQ ID NO: 410837 - RNA, 19 nt, Artificial Sequence
  Description of Artificial Sequence: Synthetic oligonucleotide
ugggcuaagcuacgugcac

SEQ ID NO: 410838 - RNA, 19 nt, Artificial Sequence
  Description of Artificial Sequence: Synthetic oligonucleotide
gugccaagcauccagccaa

SEQ ID NO: 410839 - RNA, 19 nt, Artificial Sequence
  Description of Artificial Sequence: Synthetic oligonucleotide
ucguugggcaugaccuugc

SEQ ID NO: 410840 - RNA, 19 nt, Artificial Sequence
  Description of Artificial Sequence: Synthetic oligonucleotide
guauacacugcugccacca

SEQ ID NO: 410841 - RNA, 19 nt, Artificial Sequence
  Description of Artificial Sequence: Synthetic oligonucleotide
uagaugucggcagugccuc

SEQ ID NO: 410842 - RNA, 19 nt, Artificial Sequence
  Description of Artificial Sequence: Synthetic oligonucleotide
cacagccuguaacugacuc

SEQ ID NO: 410843 - RNA, 19 nt, Artificial Sequence
  Description of Artificial Sequence: Synthetic oligonucleotide
ugcccggagugagagaagc

SEQ ID NO: 410844 - RNA, 19 nt, Artificial Sequence
  Description of Artificial Sequence: Synthetic oligonucleotide
ccaaauugacuuucuuggc

SEQ ID NO: 410845 - RNA, 19 nt, Artificial Sequence
  Description of Artificial Sequence: Synthetic oligonucleotide
agaugucggcagugccucc

SEQ ID NO: 410846 - RNA, 19 nt, Artificial Sequence
  Description of Artificial Sequence: Synthetic oligonucleotide
acacgccucccgcagguag

SEQ ID NO: 410847 - RNA, 19 nt, Artificial Sequence
  Description of Artificial Sequence: Synthetic oligonucleotide
gaaaggcccacucguagua

SEQ ID NO: 410848 - RNA, 19 nt, Artificial Sequence
  Description of Artificial Sequence: Synthetic oligonucleotide
ugggcgaauucuaggcccu

SEQ ID NO: 410849 - RNA, 19 nt, Artificial Sequence
  Description of Artificial Sequence: Synthetic oligonucleotide
guggcuagccggugguagg

SEQ ID NO: 410850 - RNA, 19 nt, Artificial Sequence
  Description of Artificial Sequence: Synthetic oligonucleotide
gcaccuaguccacagugag

SEQ ID NO: 410851 - RNA, 19 nt, Artificial Sequence
  Description of Artificial Sequence: Synthetic oligonucleotide
aaugccuuucugagguagu

SEQ ID NO: 410852 - RNA, 19 nt, Artificial Sequence
  Description of Artificial Sequence: Synthetic oligonucleotide
gggagaagagucccacacg

SEQ ID NO: 410853 - RNA, 19 nt, Artificial Sequence
  Description of Artificial Sequence: Synthetic oligonucleotide
uacgugcaccagcuugaag

SEQ ID NO: 410854 - RNA, 19 nt, Artificial Sequence
  Description of Artificial Sequence: Synthetic oligonucleotide
caggcguccccaagaaaag

SEQ ID NO: 410855 - RNA, 19 nt, Artificial Sequence
  Description of Artificial Sequence: Synthetic oligonucleotide
ugggauagcuugaguuuuc

SEQ ID NO: 410856 - RNA, 19 nt, Artificial Sequence
  Description of Artificial Sequence: Synthetic oligonucleotide
ucgaauuccaggggugagu

SEQ ID NO: 410857 - RNA, 19 nt, Artificial Sequence
  Description of Artificial Sequence: Synthetic oligonucleotide
agcucauucuggcgcagga

SEQ ID NO: 410858 - RNA, 19 nt, Artificial Sequence
  Description of Artificial Sequence: Synthetic oligonucleotide
ugcaggguggcuagccggu

SEQ ID NO: 410859 - RNA, 19 nt, Artificial Sequence
  Description of Artificial Sequence: Synthetic oligonucleotide
accaaacggucuacgacag

SEQ ID NO: 410860 - RNA, 19 nt, Artificial Sequence
  Description of Artificial Sequence: Synthetic oligonucleotide
ggucgaugaaaauccccag

SEQ ID NO: 410861 - RNA, 19 nt, Artificial Sequence
  Description of Artificial Sequence: Synthetic oligonucleotide
caaagggauccuucagguc

SEQ ID NO: 410862 - RNA, 19 nt, Artificial Sequence
  Description of Artificial Sequence: Synthetic oligonucleotide
gaggcggugguuuugcccu

SEQ ID NO: 410863 - RNA, 19 nt, Artificial Sequence
  Description of Artificial Sequence: Synthetic oligonucleotide
cucagccaguucuccgugg

SEQ ID NO: 410864 - RNA, 19 nt, Artificial Sequence
  Description of Artificial Sequence: Synthetic oligonucleotide
ggguguaaugccuggccag

SEQ ID NO: 410865 - RNA, 19 nt, Artificial Sequence
  Description of Artificial Sequence: Synthetic oligonucleotide
gugcuagggccucaugggc

SEQ ID NO: 410866 - RNA, 19 nt, Artificial Sequence
  Description of Artificial Sequence: Synthetic oligonucleotide
aaacggucuacgacagggu

SEQ ID NO: 410867 - RNA, 19 nt, Artificial Sequence
  Description of Artificial Sequence: Synthetic oligonucleotide
aucgaauuccaggggugag

SEQ ID NO: 410868 - RNA, 19 nt, Artificial Sequence
  Description of Artificial Sequence: Synthetic oligonucleotide
aguguugggcuaagcuacg

SEQ ID NO: 410869 - RNA, 19 nt, Artificial Sequence
  Description of Artificial Sequence: Synthetic oligonucleotide
cagauggucccaucuccac

SEQ ID NO: 410870 - RNA, 19 nt, Artificial Sequence
  Description of Artificial Sequence: Synthetic oligonucleotide
acggucuacgacaggguag

SEQ ID NO: 410871 - RNA, 19 nt, Artificial Sequence
  Description of Artificial Sequence: Synthetic oligonucleotide
gugcauaguuggcccaacc

SEQ ID NO: 410872 - RNA, 19 nt, Artificial Sequence
  Description of Artificial Sequence: Synthetic oligonucleotide
agcugguaauacccagcug

SEQ ID NO: 410873 - RNA, 19 nt, Artificial Sequence
  Description of Artificial Sequence: Synthetic oligonucleotide
agguaguguugggcuaagc

SEQ ID NO: 410874 - RNA, 19 nt, Artificial Sequence
  Description of Artificial Sequence: Synthetic oligonucleotide
aggcguccccaagaaaagg

SEQ ID NO: 410875 - RNA, 19 nt, Artificial Sequence
  Description of Artificial Sequence: Synthetic oligonucleotide
caagcgccaccaaacgguc

SEQ ID NO: 410876 - RNA, 19 nt, Artificial Sequence
  Description of Artificial Sequence: Synthetic oligonucleotide
gaaccugggugaagucccg

SEQ ID NO: 410877 - RNA, 19 nt, Artificial Sequence
  Description of Artificial Sequence: Synthetic oligonucleotide
ccaagcauccagccaaccc

SEQ ID NO: 410878 - RNA, 19 nt, Artificial Sequence
  Description of Artificial Sequence: Synthetic oligonucleotide
agcgccaccaaacggucua

SEQ ID NO: 410879 - RNA, 19 nt, Artificial Sequence
  Description of Artificial Sequence: Synthetic oligonucleotide
gccaacgagcaccuagucc

SEQ ID NO: 410880 - RNA, 19 nt, Artificial Sequence
  Description of Artificial Sequence: Synthetic oligonucleotide
ugcccaaauugacuuucuu

SEQ ID NO: 410881 - RNA, 19 nt, Artificial Sequence
  Description of Artificial Sequence: Synthetic oligonucleotide
cuuugggugcgaccugcac

SEQ ID NO: 410882 - RNA, 19 nt, Artificial Sequence
  Description of Artificial Sequence: Synthetic oligonucleotide
ugagcuagacuggcauaga

SEQ ID NO: 410883 - RNA, 19 nt, Artificial Sequence
  Description of Artificial Sequence: Synthetic oligonucleotide
aggcacgugccuccuucuc

SEQ ID NO: 410884 - RNA, 19 nt, Artificial Sequence
  Description of Artificial Sequence: Synthetic oligonucleotide
cccgauagaaagacacagc

SEQ ID NO: 410885 - RNA, 19 nt, Artificial Sequence
  Description of Artificial Sequence: Synthetic oligonucleotide
cuacgacaggguagauccc

SEQ ID NO: 410886 - RNA, 19 nt, Artificial Sequence
  Description of Artificial Sequence: Synthetic oligonucleotide
cugagacauaaaggcaaug

SEQ ID NO: 410887 - RNA, 19 nt, Artificial Sequence
  Description of Artificial Sequence: Synthetic oligonucleotide
gggugaguugcaaagugac

SEQ ID NO: 410888 - RNA, 19 nt, Artificial Sequence
  Description of Artificial Sequence: Synthetic oligonucleotide
cuguagaaguggcauagcu

SEQ ID NO: 410889 - RNA, 19 nt, Artificial Sequence
  Description of Artificial Sequence: Synthetic oligonucleotide
ugguaauacccagcugcgu

SEQ ID NO: 410890 - RNA, 19 nt, Artificial Sequence
  Description of Artificial Sequence: Synthetic oligonucleotide
cggagguucaguucugagg

SEQ ID NO: 410891 - RNA, 19 nt, Artificial Sequence
  Description of Artificial Sequence: Synthetic oligonucleotide
uaauacccagcugcgucaa

SEQ ID NO: 410892 - RNA, 19 nt, Artificial Sequence
  Description of Artificial Sequence: Synthetic oligonucleotide
aguguccguacuguaugca

SEQ ID NO: 410893 - RNA, 19 nt, Artificial Sequence
  Description of Artificial Sequence: Synthetic oligonucleotide
aguacacccgggccuggga

SEQ ID NO: 410894 - RNA, 19 nt, Artificial Sequence
  Description of Artificial Sequence: Synthetic oligonucleotide
guugcacaggcgcagcucu

SEQ ID NO: 410895 - RNA, 19 nt, Artificial Sequence
  Description of Artificial Sequence: Synthetic oligonucleotide
uaaccuucggcagccuguc

SEQ ID NO: 410896 - RNA, 19 nt, Artificial Sequence
  Description of Artificial Sequence: Synthetic oligonucleotide
caggcacgggccucgggcc

SEQ ID NO: 410897 - RNA, 19 nt, Artificial Sequence
  Description of Artificial Sequence: Synthetic oligonucleotide
cagguccacacuccucaag

SEQ ID NO: 410898 - RNA, 19 nt, Artificial Sequence
  Description of Artificial Sequence: Synthetic oligonucleotide
uggcuagccggugguaggc

SEQ ID NO: 410899 - RNA, 19 nt, Artificial Sequence
  Description of Artificial Sequence: Synthetic oligonucleotide
ugccuuucugagguaguaa

SEQ ID NO: 410900 - RNA, 19 nt, Artificial Sequence
  Description of Artificial Sequence: Synthetic oligonucleotide
ggcacuuccggccauagau

SEQ ID NO: 410901 - RNA, 19 nt, Artificial Sequence
  Description of Artificial Sequence: Synthetic oligonucleotide
ugcccggucccgauagaaa

SEQ ID NO: 410902 - RNA, 19 nt, Artificial Sequence
  Description of Artificial Sequence: Synthetic oligonucleotide
ggcacgugccuccuucucc

SEQ ID NO: 410903 - RNA, 19 nt, Artificial Sequence
  Description of Artificial Sequence: Synthetic oligonucleotide
gguguaaugccuggccagc

SEQ ID NO: 410904 - RNA, 19 nt, Artificial Sequence
  Description of Artificial Sequence: Synthetic oligonucleotide
cugcgucuaagauuggacu

SEQ ID NO: 410905 - RNA, 19 nt, Artificial Sequence
  Description of Artificial Sequence: Synthetic oligonucleotide
ccaccaaacggucuacgac

SEQ ID NO: 410906 - RNA, 19 nt, Artificial Sequence
  Description of Artificial Sequence: Synthetic oligonucleotide
ggcuaagcuacgugcacca

SEQ ID NO: 410907 - RNA, 19 nt, Artificial Sequence
  Description of Artificial Sequence: Synthetic oligonucleotide
cucaugguagaugacacau

SEQ ID NO: 410908 - RNA, 19 nt, Artificial Sequence
  Description of Artificial Sequence: Synthetic oligonucleotide
uccggccacagaagcgcug

SEQ ID NO: 410909 - RNA, 19 nt, Artificial Sequence
  Description of Artificial Sequence: Synthetic oligonucleotide
agcugcgucuaagauugga

SEQ ID NO: 410910 - RNA, 19 nt, Artificial Sequence
  Description of Artificial Sequence: Synthetic oligonucleotide
gcaggcacgggccucgggc

SEQ ID NO: 410911 - RNA, 19 nt, Artificial Sequence
  Description of Artificial Sequence: Synthetic oligonucleotide
caacgagcaccuaguccac

SEQ ID NO: 410912 - RNA, 19 nt, Artificial Sequence
  Description of Artificial Sequence: Synthetic oligonucleotide
acacccgggccugggauag

SEQ ID NO: 410913 - RNA, 19 nt, Artificial Sequence
  Description of Artificial Sequence: Synthetic oligonucleotide
ugcgaccugcacacauuuc

SEQ ID NO: 410914 - RNA, 19 nt, Artificial Sequence
  Description of Artificial Sequence: Synthetic oligonucleotide
ucgugccugugccaagcau

SEQ ID NO: 410915 - RNA, 19 nt, Artificial Sequence
  Description of Artificial Sequence: Synthetic oligonucleotide
gguggcuagccggugguag

SEQ ID NO: 410916 - RNA, 19 nt, Artificial Sequence
  Description of Artificial Sequence: Synthetic oligonucleotide
ccugugccaagcauccagc

SEQ ID NO: 410917 - RNA, 19 nt, Artificial Sequence
  Description of Artificial Sequence: Synthetic oligonucleotide
ccaggcguccccaagaaaa

SEQ ID NO: 410918 - RNA, 19 nt, Artificial Sequence
  Description of Artificial Sequence: Synthetic oligonucleotide
ucguaccucguugggcaug

SEQ ID NO: 410919 - RNA, 19 nt, Artificial Sequence
  Description of Artificial Sequence: Synthetic oligonucleotide
ugcggagguucaguucuga

SEQ ID NO: 410920 - RNA, 19 nt, Artificial Sequence
  Description of Artificial Sequence: Synthetic oligonucleotide
caucgaauuccagggguga

SEQ ID NO: 410921 - RNA, 19 nt, Artificial Sequence
  Description of Artificial Sequence: Synthetic oligonucleotide
ccgauagaaagacacagcu

SEQ ID NO: 410922 - RNA, 19 nt, Artificial Sequence
  Description of Artificial Sequence: Synthetic oligonucleotide
aggauccggaguaccaggu

SEQ ID NO: 410923 - RNA, 19 nt, Artificial Sequence
  Description of Artificial Sequence: Synthetic oligonucleotide
gcugcgucuaagauuggac

SEQ ID NO: 410924 - RNA, 19 nt, Artificial Sequence
  Description of Artificial Sequence: Synthetic oligonucleotide
acgacaggguagaucccag

SEQ ID NO: 410925 - RNA, 19 nt, Artificial Sequence
  Description of Artificial Sequence: Synthetic oligonucleotide
cacuuccggccauagaugu

SEQ ID NO: 410926 - RNA, 19 nt, Artificial Sequence
  Description of Artificial Sequence: Synthetic oligonucleotide
augguagaugacacaucgu

SEQ ID NO: 410927 - RNA, 19 nt, Artificial Sequence
  Description of Artificial Sequence: Synthetic oligonucleotide
ccaaggugaugcugagugc

SEQ ID NO: 410928 - RNA, 19 nt, Artificial Sequence
  Description of Artificial Sequence: Synthetic oligonucleotide
ugcuugagguggguguaau

SEQ ID NO: 410929 - RNA, 19 nt, Artificial Sequence
  Description of Artificial Sequence: Synthetic oligonucleotide
gacccuucucagguuguca

SEQ ID NO: 410930 - RNA, 19 nt, Artificial Sequence
  Description of Artificial Sequence: Synthetic oligonucleotide
cggaaguaaccuucggcag

SEQ ID NO: 410931 - RNA, 19 nt, Artificial Sequence
  Description of Artificial Sequence: Synthetic oligonucleotide
cguguguagaucuucagcu

SEQ ID NO: 410932 - RNA, 19 nt, Artificial Sequence
  Description of Artificial Sequence: Synthetic oligonucleotide
guaaccuucggcagccugu

SEQ ID NO: 410933 - RNA, 19 nt, Artificial Sequence
  Description of Artificial Sequence: Synthetic oligonucleotide
gggcuaagcuacgugcacc

SEQ ID NO: 410934 - RNA, 19 nt, Artificial Sequence
  Description of Artificial Sequence: Synthetic oligonucleotide
aggcguguguagaucuuca

SEQ ID NO: 410935 - RNA, 19 nt, Artificial Sequence
  Description of Artificial Sequence: Synthetic oligonucleotide
gguagaucccagcugcagu

SEQ ID NO: 410936 - RNA, 19 nt, Artificial Sequence
  Description of Artificial Sequence: Synthetic oligonucleotide
aggcggugguuuugcccuc

SEQ ID NO: 410937 - RNA, 19 nt, Artificial Sequence
  Description of Artificial Sequence: Synthetic oligonucleotide
gcauagggccccgaaguug

SEQ ID NO: 410938 - RNA, 19 nt, Artificial Sequence
  Description of Artificial Sequence: Synthetic oligonucleotide
aucguaccucguugggcau

SEQ ID NO: 410939 - RNA, 19 nt, Artificial Sequence
  Description of Artificial Sequence: Synthetic oligonucleotide
gggcccuacgggugcauag

SEQ ID NO: 410940 - RNA, 19 nt, Artificial Sequence
  Description of Artificial Sequence: Synthetic oligonucleotide
cuagcaccuugucagcugu

SEQ ID NO: 410941 - RNA, 19 nt, Artificial Sequence
  Description of Artificial Sequence: Synthetic oligonucleotide
caguugagcuagacuggca

SEQ ID NO: 410942 - RNA, 19 nt, Artificial Sequence
  Description of Artificial Sequence: Synthetic oligonucleotide
gucccgauagaaagacaca

SEQ ID NO: 410943 - RNA, 19 nt, Artificial Sequence
  Description of Artificial Sequence: Synthetic oligonucleotide
uagcaccuugucagcuguc

SEQ ID NO: 410944 - RNA, 19 nt, Artificial Sequence
  Description of Artificial Sequence: Synthetic oligonucleotide
ggugaguugcaaagugaca

SEQ ID NO: 410945 - RNA, 19 nt, Artificial Sequence
  Description of Artificial Sequence: Synthetic oligonucleotide
gcggagguucaguucugag

SEQ ID NO: 410946 - RNA, 19 nt, Artificial Sequence
  Description of Artificial Sequence: Synthetic oligonucleotide
ccggugguaggccacucgc

SEQ ID NO: 410947 - RNA, 19 nt, Artificial Sequence
  Description of Artificial Sequence: Synthetic oligonucleotide
ucggguccugccccugguc

SEQ ID NO: 410948 - RNA, 19 nt, Artificial Sequence
  Description of Artificial Sequence: Synthetic oligonucleotide
aagcuacgugcaccagcuu

SEQ ID NO: 410949 - RNA, 19 nt, Artificial Sequence
  Description of Artificial Sequence: Synthetic oligonucleotide
aagcgccaccaaacggucu

SEQ ID NO: 410950 - RNA, 19 nt, Artificial Sequence
  Description of Artificial Sequence: Synthetic oligonucleotide
gccaccaaacggucuacga

SEQ ID NO: 410951 - RNA, 19 nt, Artificial Sequence
  Description of Artificial Sequence: Synthetic oligonucleotide
gugccaguuggaacucaug

SEQ ID NO: 410952 - RNA, 19 nt, Artificial Sequence
  Description of Artificial Sequence: Synthetic oligonucleotide
cagagcucggaaguaaccu

SEQ ID NO: 410953 - RNA, 19 nt, Artificial Sequence
  Description of Artificial Sequence: Synthetic oligonucleotide
gggagagguccccaaaacu

SEQ ID NO: 410954 - RNA, 19 nt, Artificial Sequence
  Description of Artificial Sequence: Synthetic oligonucleotide
cugcggagguucaguucug

SEQ ID NO: 410955 - RNA, 19 nt, Artificial Sequence
  Description of Artificial Sequence: Synthetic oligonucleotide
uccggaguaccagguccac

SEQ ID NO: 410956 - RNA, 19 nt, Artificial Sequence
  Description of Artificial Sequence: Synthetic oligonucleotide
ucccgugcccggagugaga

SEQ ID NO: 410957 - RNA, 19 nt, Artificial Sequence
  Description of Artificial Sequence: Synthetic oligonucleotide
ggcgaauucuaggcccucc

SEQ ID NO: 410958 - RNA, 19 nt, Artificial Sequence
  Description of Artificial Sequence: Synthetic oligonucleotide
gcacuuccggccauagaug

SEQ ID NO: 410959 - RNA, 19 nt, Artificial Sequence
  Description of Artificial Sequence: Synthetic oligonucleotide
gccggugguaggccacucg

SEQ ID NO: 410960 - RNA, 19 nt, Artificial Sequence
  Description of Artificial Sequence: Synthetic oligonucleotide
ccgaaguuggccaggacua

SEQ ID NO: 410961 - RNA, 19 nt, Artificial Sequence
  Description of Artificial Sequence: Synthetic oligonucleotide
guuggaacucaugguagau

SEQ ID NO: 410962 - RNA, 19 nt, Artificial Sequence
  Description of Artificial Sequence: Synthetic oligonucleotide
gcguccccaagaaaagggc

SEQ ID NO: 410963 - RNA, 19 nt, Artificial Sequence
  Description of Artificial Sequence: Synthetic oligonucleotide
guaccagguccacacuccu

SEQ ID NO: 410964 - RNA, 19 nt, Artificial Sequence
  Description of Artificial Sequence: Synthetic oligonucleotide
cagugccagcugguaauac

SEQ ID NO: 410965 - RNA, 19 nt, Artificial Sequence
  Description of Artificial Sequence: Synthetic oligonucleotide
acucgcucauucaggcggu

SEQ ID NO: 410966 - RNA, 19 nt, Artificial Sequence
  Description of Artificial Sequence: Synthetic oligonucleotide
ggauccggaguaccagguc

SEQ ID NO: 410967 - RNA, 19 nt, Artificial Sequence
  Description of Artificial Sequence: Synthetic oligonucleotide
gcaggucgaugaaaauccc

SEQ ID NO: 410968 - RNA, 19 nt, Artificial Sequence
  Description of Artificial Sequence: Synthetic oligonucleotide
cccuacgggugcauaguug

SEQ ID NO: 410969 - RNA, 19 nt, Artificial Sequence
  Description of Artificial Sequence: Synthetic oligonucleotide
aggcccacucguaguagca

SEQ ID NO: 410970 - RNA, 19 nt, Artificial Sequence
  Description of Artificial Sequence: Synthetic oligonucleotide
aggcacgggccucgggccu

SEQ ID NO: 410971 - RNA, 19 nt, Artificial Sequence
  Description of Artificial Sequence: Synthetic oligonucleotide
cagcuuugggugcgaccug

SEQ ID NO: 410972 - RNA, 19 nt, Artificial Sequence
  Description of Artificial Sequence: Synthetic oligonucleotide
gccaguuggaacucauggu

SEQ ID NO: 410973 - RNA, 19 nt, Artificial Sequence
  Description of Artificial Sequence: Synthetic oligonucleotide
ccggucccgauagaaagac

SEQ ID NO: 410974 - RNA, 19 nt, Artificial Sequence
  Description of Artificial Sequence: Synthetic oligonucleotide
ccagauggucccaucucca

SEQ ID NO: 410975 - RNA, 19 nt, Artificial Sequence
  Description of Artificial Sequence: Synthetic oligonucleotide
ccaggcacgugccuccuuc

SEQ ID NO: 410976 - RNA, 19 nt, Artificial Sequence
  Description of Artificial Sequence: Synthetic oligonucleotide
gccugggauagcuugaguu

SEQ ID NO: 410977 - RNA, 19 nt, Artificial Sequence
  Description of Artificial Sequence: Synthetic oligonucleotide
gcuuuugcacagccuguaa

SEQ ID NO: 410978 - RNA, 19 nt, Artificial Sequence
  Description of Artificial Sequence: Synthetic oligonucleotide
cacgguccaugaggaagug

SEQ ID NO: 410979 - RNA, 19 nt, Artificial Sequence
  Description of Artificial Sequence: Synthetic oligonucleotide
aggguagaucccagcugca

SEQ ID NO: 410980 - RNA, 19 nt, Artificial Sequence
  Description of Artificial Sequence: Synthetic oligonucleotide
acgccucccgcagguagug

SEQ ID NO: 410981 - RNA, 19 nt, Artificial Sequence
  Description of Artificial Sequence: Synthetic oligonucleotide
gcuaagcuacgugcaccag

SEQ ID NO: 410982 - RNA, 19 nt, Artificial Sequence
  Description of Artificial Sequence: Synthetic oligonucleotide
cgaauucuaggcccuccug

SEQ ID NO: 410983 - RNA, 19 nt, Artificial Sequence
  Description of Artificial Sequence: Synthetic oligonucleotide
ggggaggcggugguuuugc

SEQ ID NO: 410984 - RNA, 19 nt, Artificial Sequence
  Description of Artificial Sequence: Synthetic oligonucleotide
cacuacugggcagcuggga

SEQ ID NO: 410985 - RNA, 19 nt, Artificial Sequence
  Description of Artificial Sequence: Synthetic oligonucleotide
guaggcccgcucagugccc

SEQ ID NO: 410986 - RNA, 19 nt, Artificial Sequence
  Description of Artificial Sequence: Synthetic oligonucleotide
guacacccgggccugggau

SEQ ID NO: 410987 - RNA, 19 nt, Artificial Sequence
  Description of Artificial Sequence: Synthetic oligonucleotide
ccagcugcgucaaagggau

SEQ ID NO: 410988 - RNA, 19 nt, Artificial Sequence
  Description of Artificial Sequence: Synthetic oligonucleotide
cugggauagcuugaguuuu

SEQ ID NO: 410989 - RNA, 19 nt, Artificial Sequence
  Description of Artificial Sequence: Synthetic oligonucleotide
ggccaacgagcaccuaguc

SEQ ID NO: 410990 - RNA, 19 nt, Artificial Sequence
  Description of Artificial Sequence: Synthetic oligonucleotide
gugcgaccugcacacauuu

SEQ ID NO: 410991 - RNA, 19 nt, Artificial Sequence
  Description of Artificial Sequence: Synthetic oligonucleotide
cauucuggcgcaggauaua

SEQ ID NO: 410992 - RNA, 19 nt, Artificial Sequence
  Description of Artificial Sequence: Synthetic oligonucleotide
ccguuugguguaauccaga

SEQ ID NO: 410993 - RNA, 19 nt, Artificial Sequence
  Description of Artificial Sequence: Synthetic oligonucleotide
cccgugcccggagugagag

SEQ ID NO: 410994 - RNA, 19 nt, Artificial Sequence
  Description of Artificial Sequence: Synthetic oligonucleotide
cugcagcuuugggugcgac

SEQ ID NO: 410995 - RNA, 19 nt, Artificial Sequence
  Description of Artificial Sequence: Synthetic oligonucleotide
gcgaauucuaggcccuccu

SEQ ID NO: 410996 - RNA, 19 nt, Artificial Sequence
  Description of Artificial Sequence: Synthetic oligonucleotide
ggcccacucguaguagcac

SEQ ID NO: 410997 - RNA, 19 nt, Artificial Sequence
  Description of Artificial Sequence: Synthetic oligonucleotide
ccggagugagagaagccaa

SEQ ID NO: 410998 - RNA, 19 nt, Artificial Sequence
  Description of Artificial Sequence: Synthetic oligonucleotide
ugggugcgaccugcacaca

SEQ ID NO: 410999 - RNA, 19 nt, Artificial Sequence
  Description of Artificial Sequence: Synthetic oligonucleotide
ggagcucaguguccguacu

SEQ ID NO: 411000 - RNA, 19 nt, Artificial Sequence
  Description of Artificial Sequence: Synthetic oligonucleotide
ccgcucccagguuccauug

SEQ ID NO: 411001 - RNA, 19 nt, Artificial Sequence
  Description of Artificial Sequence: Synthetic oligonucleotide
gggcaggcacuuccggcca

SEQ ID NO: 411002 - RNA, 19 nt, Artificial Sequence
  Description of Artificial Sequence: Synthetic oligonucleotide
gcccacucguaguagcacu

SEQ ID NO: 411003 - RNA, 19 nt, Artificial Sequence
  Description of Artificial Sequence: Synthetic oligonucleotide
ggcccugcgcagugcguac

SEQ ID NO: 411004 - RNA, 19 nt, Artificial Sequence
  Description of Artificial Sequence: Synthetic oligonucleotide
cagcugcgucaaagggauc

SEQ ID NO: 411005 - RNA, 19 nt, Artificial Sequence
  Description of Artificial Sequence: Synthetic oligonucleotide
guccugcggagguucaguu

SEQ ID NO: 411006 - RNA, 19 nt, Artificial Sequence
  Description of Artificial Sequence: Synthetic oligonucleotide
ggccaggcguccccaagaa

SEQ ID NO: 411007 - RNA, 19 nt, Artificial Sequence
  Description of Artificial Sequence: Synthetic oligonucleotide
ggaguaccagguccacacu

SEQ ID NO: 411008 - RNA, 19 nt, Artificial Sequence
  Description of Artificial Sequence: Synthetic oligonucleotide
cccggucccgauagaaaga

SEQ ID NO: 411009 - RNA, 19 nt, Artificial Sequence
  Description of Artificial Sequence: Synthetic oligonucleotide
guguugggcuaagcuacgu

SEQ ID NO: 411010 - RNA, 19 nt, Artificial Sequence
  Description of Artificial Sequence: Synthetic oligonucleotide
gcccggagugagagaagcc

SEQ ID NO: 411011 - RNA, 19 nt, Artificial Sequence
  Description of Artificial Sequence: Synthetic oligonucleotide
cgucuaagauuggacuuca

SEQ ID NO: 411012 - RNA, 19 nt, Artificial Sequence
  Description of Artificial Sequence: Synthetic oligonucleotide
gggugcgaccugcacacau

SEQ ID NO: 411013 - RNA, 19 nt, Artificial Sequence
  Description of Artificial Sequence: Synthetic oligonucleotide
gccucgggccugugggcug

SEQ ID NO: 411014 - RNA, 19 nt, Artificial Sequence
  Description of Artificial Sequence: Synthetic oligonucleotide
cggucuacgacaggguaga

SEQ ID NO: 411015 - RNA, 19 nt, Artificial Sequence
  Description of Artificial Sequence: Synthetic oligonucleotide
gucggguccugccccuggu

SEQ ID NO: 411016 - RNA, 19 nt, Artificial Sequence
  Description of Artificial Sequence: Synthetic oligonucleotide
gcagauuuguaggcccgcu

SEQ ID NO: 411017 - RNA, 19 nt, Artificial Sequence
  Description of Artificial Sequence: Synthetic oligonucleotide
cacagacccuucucagguu

SEQ ID NO: 411018 - RNA, 19 nt, Artificial Sequence
  Description of Artificial Sequence: Synthetic oligonucleotide
cgccaccaaacggucuacg

SEQ ID NO: 411019 - RNA, 19 nt, Artificial Sequence
  Description of Artificial Sequence: Synthetic oligonucleotide
guaccucguugggcaugac

SEQ ID NO: 411020 - RNA, 19 nt, Artificial Sequence
  Description of Artificial Sequence: Synthetic oligonucleotide
cccaguauacagggcugca

SEQ ID NO: 411021 - RNA, 19 nt, Artificial Sequence
  Description of Artificial Sequence: Synthetic oligonucleotide
gccaggcguccccaagaaa

SEQ ID NO: 411022 - RNA, 19 nt, Artificial Sequence
  Description of Artificial Sequence: Synthetic oligonucleotide
cagaagcgcuggggcacca

SEQ ID NO: 411023 - RNA, 19 nt, Artificial Sequence
  Description of Artificial Sequence: Synthetic oligonucleotide
cucgggccugugggcugag

SEQ ID NO: 411024 - RNA, 19 nt, Artificial Sequence
  Description of Artificial Sequence: Synthetic oligonucleotide
cguaccucguugggcauga

SEQ ID NO: 411025 - RNA, 19 nt, Artificial Sequence
  Description of Artificial Sequence: Synthetic oligonucleotide
cacccgggccugggauagc

SEQ ID NO: 411026 - RNA, 19 nt, Artificial Sequence
  Description of Artificial Sequence: Synthetic oligonucleotide
gggcgaauucuaggcccuc

SEQ ID NO: 411027 - RNA, 19 nt, Artificial Sequence
  Description of Artificial Sequence: Synthetic oligonucleotide
guccugcgugccagugcca

SEQ ID NO: 411028 - RNA, 19 nt, Artificial Sequence
  Description of Artificial Sequence: Synthetic oligonucleotide
ggcccuacgggugcauagu

SEQ ID NO: 411029 - RNA, 19 nt, Artificial Sequence
  Description of Artificial Sequence: Synthetic oligonucleotide
guccggccacagaagcgcu

SEQ ID NO: 411030 - RNA, 19 nt, Artificial Sequence
  Description of Artificial Sequence: Synthetic oligonucleotide
ggccugggauagcuugagu

SEQ ID NO: 411031 - RNA, 19 nt, Artificial Sequence
  Description of Artificial Sequence: Synthetic oligonucleotide
ggugcgaccugcacacauu

SEQ ID NO: 411032 - RNA, 19 nt, Artificial Sequence
  Description of Artificial Sequence: Synthetic oligonucleotide
gcccuacgggugcauaguu

SEQ ID NO: 411033 - RNA, 19 nt, Artificial Sequence
  Description of Artificial Sequence: Synthetic oligonucleotide
ccggaguaccagguccaca

SEQ ID NO: 411034 - RNA, 19 nt, Artificial Sequence
  Description of Artificial Sequence: Synthetic oligonucleotide
cccacucguaguagcacuu

SEQ ID NO: 411035 - RNA, 19 nt, Artificial Sequence
  Description of Artificial Sequence: Synthetic oligonucleotide
cggagugagagaagccaau

SEQ ID NO: 411036 - RNA, 19 nt, Artificial Sequence
  Description of Artificial Sequence: Synthetic oligonucleotide
gcggugguuuugcccuccu

SEQ ID NO: 411037 - RNA, 19 nt, Artificial Sequence
  Description of Artificial Sequence: Synthetic oligonucleotide
ccucgggccugugggcuga

SEQ ID NO: 411038 - RNA, 19 nt, Artificial Sequence
  Description of Artificial Sequence: Synthetic oligonucleotide
gccgccccagcaggaggca

SEQ ID NO: 411039 - RNA, 19 nt, Artificial Sequence
  Description of Artificial Sequence: Synthetic oligonucleotide
cggugguaggccacucgcu

SEQ ID NO: 411040 - RNA, 19 nt, Artificial Sequence
  Description of Artificial Sequence: Synthetic oligonucleotide
ccgugcccggagugagaga

SEQ ID NO: 411041 - RNA, 19 nt, Artificial Sequence
  Description of Artificial Sequence: Synthetic oligonucleotide
ggacuacugccuggcucuu

SEQ ID NO: 411042 - RNA, 19 nt, Artificial Sequence
  Description of Artificial Sequence: Synthetic oligonucleotide
cgccucccgcagguagugu

SEQ ID NO: 411043 - RNA, 19 nt, Artificial Sequence
  Description of Artificial Sequence: Synthetic oligonucleotide
aauccuuauucccauaacc

SEQ ID NO: 411044 - RNA, 19 nt, Artificial Sequence
  Description of Artificial Sequence: Synthetic oligonucleotide
uauaaaacacgccagaucu

SEQ ID NO: 411045 - RNA, 19 nt, Artificial Sequence
  Description of Artificial Sequence: Synthetic oligonucleotide
agauauuugauauaaugag

SEQ ID NO: 411046 - RNA, 19 nt, Artificial Sequence
  Description of Artificial Sequence: Synthetic oligonucleotide
gauucacccaucuugacgg

SEQ ID NO: 411047 - RNA, 19 nt, Artificial Sequence
  Description of Artificial Sequence: Synthetic oligonucleotide
ugguaaagcaucuucauag

SEQ ID NO: 411048 - RNA, 19 nt, Artificial Sequence
  Description of Artificial Sequence: Synthetic oligonucleotide
gauauaaugagauuccuuc

SEQ ID NO: 411049 - RNA, 19 nt, Artificial Sequence
  Description of Artificial Sequence: Synthetic oligonucleotide
aauaucauuucaggaagcc

SEQ ID NO: 411050 - RNA, 19 nt, Artificial Sequence
  Description of Artificial Sequence: Synthetic oligonucleotide
agugugauaaaacuucaac

SEQ ID NO: 411051 - RNA, 19 nt, Artificial Sequence
  Description of Artificial Sequence: Synthetic oligonucleotide
ugugauaaaacuucaacaa

SEQ ID NO: 411052 - RNA, 19 nt, Artificial Sequence
  Description of Artificial Sequence: Synthetic oligonucleotide
aauugagccuucugaauac

SEQ ID NO: 411053 - RNA, 19 nt, Artificial Sequence
  Description of Artificial Sequence: Synthetic oligonucleotide
cuugguacuauuaucgucc

SEQ ID NO: 411054 - RNA, 19 nt, Artificial Sequence
  Description of Artificial Sequence: Synthetic oligonucleotide
uucauaaagacaccagucc

SEQ ID NO: 411055 - RNA, 19 nt, Artificial Sequence
  Description of Artificial Sequence: Synthetic oligonucleotide
aacauauaucccuagggca

SEQ ID NO: 411056 - RNA, 19 nt, Artificial Sequence
  Description of Artificial Sequence: Synthetic oligonucleotide
aagaucgucuuacuggagg

SEQ ID NO: 411057 - RNA, 19 nt, Artificial Sequence
  Description of Artificial Sequence: Synthetic oligonucleotide
uuuacaacugugaagaguu

SEQ ID NO: 411058 - RNA, 19 nt, Artificial Sequence
  Description of Artificial Sequence: Synthetic oligonucleotide
uaacauauaucccuagggc

SEQ ID NO: 411059 - RNA, 19 nt, Artificial Sequence
  Description of Artificial Sequence: Synthetic oligonucleotide
cuaacauauaucccuaggg

SEQ ID NO: 411060 - RNA, 19 nt, Artificial Sequence
  Description of Artificial Sequence: Synthetic oligonucleotide
ucucaauuugcaauucggg

SEQ ID NO: 411061 - RNA, 19 nt, Artificial Sequence
  Description of Artificial Sequence: Synthetic oligonucleotide
uguaguuaguuugaaaacc

SEQ ID NO: 411062 - RNA, 19 nt, Artificial Sequence
  Description of Artificial Sequence: Synthetic oligonucleotide
aagaaaguagcgccguuuc

SEQ ID NO: 411063 - RNA, 19 nt, Artificial Sequence
  Description of Artificial Sequence: Synthetic oligonucleotide
uuuugcuacagcccgcugg

SEQ ID NO: 411064 - RNA, 19 nt, Artificial Sequence
  Description of Artificial Sequence: Synthetic oligonucleotide
auaaaacgaaccuagaaua

SEQ ID NO: 411065 - RNA, 19 nt, Artificial Sequence
  Description of Artificial Sequence: Synthetic oligonucleotide
agaguguccacuccuaaac

SEQ ID NO: 411066 - RNA, 19 nt, Artificial Sequence
  Description of Artificial Sequence: Synthetic oligonucleotide
uuugggaacauaauaaauu

SEQ ID NO: 411067 - RNA, 19 nt, Artificial Sequence
  Description of Artificial Sequence: Synthetic oligonucleotide
cuaacauggguucugcugg

SEQ ID NO: 411068 - RNA, 19 nt, Artificial Sequence
  Description of Artificial Sequence: Synthetic oligonucleotide
uaaaacacgccagaucucg

SEQ ID NO: 411069 - RNA, 19 nt, Artificial Sequence
  Description of Artificial Sequence: Synthetic oligonucleotide
auuaucguccauaugcacc

SEQ ID NO: 411070 - RNA, 19 nt, Artificial Sequence
  Description of Artificial Sequence: Synthetic oligonucleotide
auguaguuaguuugaaaac

SEQ ID NO: 411071 - RNA, 19 nt, Artificial Sequence
  Description of Artificial Sequence: Synthetic oligonucleotide
cuuggauggauguaguuag

SEQ ID NO: 411072 - RNA, 19 nt, Artificial Sequence
  Description of Artificial Sequence: Synthetic oligonucleotide
aaaacgaaccuagaauauc

SEQ ID NO: 411073 - RNA, 19 nt, Artificial Sequence
  Description of Artificial Sequence: Synthetic oligonucleotide
uccaaguagaaauucugag

SEQ ID NO: 411074 - RNA, 19 nt, Artificial Sequence
  Description of Artificial Sequence: Synthetic oligonucleotide
uguaaauccuuaaacccac

SEQ ID NO: 411075 - RNA, 19 nt, Artificial Sequence
  Description of Artificial Sequence: Synthetic oligonucleotide
ucugaugccuccugaagcg

SEQ ID NO: 411076 - RNA, 19 nt, Artificial Sequence
  Description of Artificial Sequence: Synthetic oligonucleotide
acuaacauauaucccuagg

SEQ ID NO: 411077 - RNA, 19 nt, Artificial Sequence
  Description of Artificial Sequence: Synthetic oligonucleotide
aguucugguacgaugaugg

SEQ ID NO: 411078 - RNA, 19 nt, Artificial Sequence
  Description of Artificial Sequence: Synthetic oligonucleotide
aacaacauuuucauggucu

SEQ ID NO: 411079 - RNA, 19 nt, Artificial Sequence
  Description of Artificial Sequence: Synthetic oligonucleotide
ucccauaacccacuguccg

SEQ ID NO: 411080 - RNA, 19 nt, Artificial Sequence
  Description of Artificial Sequence: Synthetic oligonucleotide
ugcaauucgggauauauuu

SEQ ID NO: 411081 - RNA, 19 nt, Artificial Sequence
  Description of Artificial Sequence: Synthetic oligonucleotide
aaucugaccauugggcugg

SEQ ID NO: 411082 - RNA, 19 nt, Artificial Sequence
  Description of Artificial Sequence: Synthetic oligonucleotide
aguucuugcaucaucacag

SEQ ID NO: 411083 - RNA, 19 nt, Artificial Sequence
  Description of Artificial Sequence: Synthetic oligonucleotide
aucccuagggcacauugcc

SEQ ID NO: 411084 - RNA, 19 nt, Artificial Sequence
  Description of Artificial Sequence: Synthetic oligonucleotide
auccuuauucccauaaccc

SEQ ID NO: 411085 - RNA, 19 nt, Artificial Sequence
  Description of Artificial Sequence: Synthetic oligonucleotide
caugaaaucuugcucgccg

SEQ ID NO: 411086 - RNA, 19 nt, Artificial Sequence
  Description of Artificial Sequence: Synthetic oligonucleotide
aaaucuugcucgccgcuuc

SEQ ID NO: 411087 - RNA, 19 nt, Artificial Sequence
  Description of Artificial Sequence: Synthetic oligonucleotide
ugcaaagcuuucaugaggu

SEQ ID NO: 411088 - RNA, 19 nt, Artificial Sequence
  Description of Artificial Sequence: Synthetic oligonucleotide
aaacacgccagaucucggg

SEQ ID NO: 411089 - RNA, 19 nt, Artificial Sequence
  Description of Artificial Sequence: Synthetic oligonucleotide
uucgggauauauuucauaa

SEQ ID NO: 411090 - RNA, 19 nt, Artificial Sequence
  Description of Artificial Sequence: Synthetic oligonucleotide
aaacauacgggauguacau

SEQ ID NO: 411091 - RNA, 19 nt, Artificial Sequence
  Description of Artificial Sequence: Synthetic oligonucleotide
aaacccacacuguaguuga

SEQ ID NO: 411092 - RNA, 19 nt, Artificial Sequence
  Description of Artificial Sequence: Synthetic oligonucleotide
aaaugaucaagaugccaca

SEQ ID NO: 411093 - RNA, 19 nt, Artificial Sequence
  Description of Artificial Sequence: Synthetic oligonucleotide
acuuauaucugcuaccaaa

SEQ ID NO: 411094 - RNA, 19 nt, Artificial Sequence
  Description of Artificial Sequence: Synthetic oligonucleotide
ugggaacauaauaaauucc

SEQ ID NO: 411095 - RNA, 19 nt, Artificial Sequence
  Description of Artificial Sequence: Synthetic oligonucleotide
uuuaaacacagcauauuuu

SEQ ID NO: 411096 - RNA, 19 nt, Artificial Sequence
  Description of Artificial Sequence: Synthetic oligonucleotide
acauacgggauguacaugu

SEQ ID NO: 411097 - RNA, 19 nt, Artificial Sequence
  Description of Artificial Sequence: Synthetic oligonucleotide
uucuagucagaaaacauuu

SEQ ID NO: 411098 - RNA, 19 nt, Artificial Sequence
  Description of Artificial Sequence: Synthetic oligonucleotide
augaaaucuugcucgccgc

SEQ ID NO: 411099 - RNA, 19 nt, Artificial Sequence
  Description of Artificial Sequence: Synthetic oligonucleotide
uuaucguccauaugcaccu

SEQ ID NO: 411100 - RNA, 19 nt, Artificial Sequence
  Description of Artificial Sequence: Synthetic oligonucleotide
aaacgaaccuagaauauca

SEQ ID NO: 411101 - RNA, 19 nt, Artificial Sequence
  Description of Artificial Sequence: Synthetic oligonucleotide
ucgaguucugguacgauga

SEQ ID NO: 411102 - RNA, 19 nt, Artificial Sequence
  Description of Artificial Sequence: Synthetic oligonucleotide
aaaguagcgccguuuccag

SEQ ID NO: 411103 - RNA, 19 nt, Artificial Sequence
  Description of Artificial Sequence: Synthetic oligonucleotide
uccagugcuaauuuaauuu

SEQ ID NO: 411104 - RNA, 19 nt, Artificial Sequence
  Description of Artificial Sequence: Synthetic oligonucleotide
aguguccacuccuaaacuc

SEQ ID NO: 411105 - RNA, 19 nt, Artificial Sequence
  Description of Artificial Sequence: Synthetic oligonucleotide
uuggcaauccuuauuccca

SEQ ID NO: 411106 - RNA, 19 nt, Artificial Sequence
  Description of Artificial Sequence: Synthetic oligonucleotide
guaguugaacucuucucgg

SEQ ID NO: 411107 - RNA, 19 nt, Artificial Sequence
  Description of Artificial Sequence: Synthetic oligonucleotide
uaaauccuuaaacccacac

SEQ ID NO: 411108 - RNA, 19 nt, Artificial Sequence
  Description of Artificial Sequence: Synthetic oligonucleotide
auugcuguaccaacagucc

SEQ ID NO: 411109 - RNA, 19 nt, Artificial Sequence
  Description of Artificial Sequence: Synthetic oligonucleotide
aaucuugcucgccgcuucc

SEQ ID NO: 411110 - RNA, 19 nt, Artificial Sequence
  Description of Artificial Sequence: Synthetic oligonucleotide
uacgggauguacauguaug

SEQ ID NO: 411111 - RNA, 19 nt, Artificial Sequence
  Description of Artificial Sequence: Synthetic oligonucleotide
guuaguuugaaaaccucag

SEQ ID NO: 411112 - RNA, 19 nt, Artificial Sequence
  Description of Artificial Sequence: Synthetic oligonucleotide
cugaauacaauaaaacgaa

SEQ ID NO: 411113 - RNA, 19 nt, Artificial Sequence
  Description of Artificial Sequence: Synthetic oligonucleotide
ugugccacagaaacuuucc

SEQ ID NO: 411114 - RNA, 19 nt, Artificial Sequence
  Description of Artificial Sequence: Synthetic oligonucleotide
uaaaacgaaccuagaauau

SEQ ID NO: 411115 - RNA, 19 nt, Artificial Sequence
  Description of Artificial Sequence: Synthetic oligonucleotide
uaaaaugaucaagaugcca

SEQ ID NO: 411116 - RNA, 19 nt, Artificial Sequence
  Description of Artificial Sequence: Synthetic oligonucleotide
ugggucaagagauccaucu

SEQ ID NO: 411117 - RNA, 19 nt, Artificial Sequence
  Description of Artificial Sequence: Synthetic oligonucleotide
uguuucaacuugugucugg

SEQ ID NO: 411118 - RNA, 19 nt, Artificial Sequence
  Description of Artificial Sequence: Synthetic oligonucleotide
uuaaguccuguacuguacu

SEQ ID NO: 411119 - RNA, 19 nt, Artificial Sequence
  Description of Artificial Sequence: Synthetic oligonucleotide
caaauuagaaaugaucaca

SEQ ID NO: 411120 - RNA, 19 nt, Artificial Sequence
  Description of Artificial Sequence: Synthetic oligonucleotide
acagacacuaacauauauc

SEQ ID NO: 411121 - RNA, 19 nt, Artificial Sequence
  Description of Artificial Sequence: Synthetic oligonucleotide
gaaggucuaacauggguuc

SEQ ID NO: 411122 - RNA, 19 nt, Artificial Sequence
  Description of Artificial Sequence: Synthetic oligonucleotide
aaacucugggucaagagau

SEQ ID NO: 411123 - RNA, 19 nt, Artificial Sequence
  Description of Artificial Sequence: Synthetic oligonucleotide
uuuaaggacucauguaaau

SEQ ID NO: 411124 - RNA, 19 nt, Artificial Sequence
  Description of Artificial Sequence: Synthetic oligonucleotide
uuugcaauucgggauauau

SEQ ID NO: 411125 - RNA, 19 nt, Artificial Sequence
  Description of Artificial Sequence: Synthetic oligonucleotide
uuuuaaguccuguacugua

SEQ ID NO: 411126 - RNA, 19 nt, Artificial Sequence
  Description of Artificial Sequence: Synthetic oligonucleotide
acuguauaaaacacgccag

SEQ ID NO: 411127 - RNA, 19 nt, Artificial Sequence
  Description of Artificial Sequence: Synthetic oligonucleotide
uuccuuugggaacauaaua

SEQ ID NO: 411128 - RNA, 19 nt, Artificial Sequence
  Description of Artificial Sequence: Synthetic oligonucleotide
uccgaagaucgucuuacug

SEQ ID NO: 411129 - RNA, 19 nt, Artificial Sequence
  Description of Artificial Sequence: Synthetic oligonucleotide
cacucaggugaaaacauac

SEQ ID NO: 411130 - RNA, 19 nt, Artificial Sequence
  Description of Artificial Sequence: Synthetic oligonucleotide
ggugaaaacauacgggaug

SEQ ID NO: 411131 - RNA, 19 nt, Artificial Sequence
  Description of Artificial Sequence: Synthetic oligonucleotide
gacuuuggugguaaggcag

SEQ ID NO: 411132 - RNA, 19 nt, Artificial Sequence
  Description of Artificial Sequence: Synthetic oligonucleotide
aaaguccgguggcuccucc

SEQ ID NO: 411133 - RNA, 19 nt, Artificial Sequence
  Description of Artificial Sequence: Synthetic oligonucleotide
auaacccacuguccgagag

SEQ ID NO: 411134 - RNA, 19 nt, Artificial Sequence
  Description of Artificial Sequence: Synthetic oligonucleotide
guauaaaacacgccagauc

SEQ ID NO: 411135 - RNA, 19 nt, Artificial Sequence
  Description of Artificial Sequence: Synthetic oligonucleotide
uuaaggacucauguaaauc

SEQ ID NO: 411136 - RNA, 19 nt, Artificial Sequence
  Description of Artificial Sequence: Synthetic oligonucleotide
gguacgaugauggaugugc

SEQ ID NO: 411137 - RNA, 19 nt, Artificial Sequence
  Description of Artificial Sequence: Synthetic oligonucleotide
ggucaagagauccaucucc

SEQ ID NO: 411138 - RNA, 19 nt, Artificial Sequence
  Description of Artificial Sequence: Synthetic oligonucleotide
cucaauuugcaauucggga

SEQ ID NO: 411139 - RNA, 19 nt, Artificial Sequence
  Description of Artificial Sequence: Synthetic oligonucleotide
uguuauccaaguagaaauu

SEQ ID NO: 411140 - RNA, 19 nt, Artificial Sequence
  Description of Artificial Sequence: Synthetic oligonucleotide
uauuaucguccauaugcac

SEQ ID NO: 411141 - RNA, 19 nt, Artificial Sequence
  Description of Artificial Sequence: Synthetic oligonucleotide
caccuuaaccacaagcuuc

SEQ ID NO: 411142 - RNA, 19 nt, Artificial Sequence
  Description of Artificial Sequence: Synthetic oligonucleotide
uaugugcuuggauggaugu

SEQ ID NO: 411143 - RNA, 19 nt, Artificial Sequence
  Description of Artificial Sequence: Synthetic oligonucleotide
cuguacuagucugagcugg

SEQ ID NO: 411144 - RNA, 19 nt, Artificial Sequence
  Description of Artificial Sequence: Synthetic oligonucleotide
acagcagagauauuugaua

SEQ ID NO: 411145 - RNA, 19 nt, Artificial Sequence
  Description of Artificial Sequence: Synthetic oligonucleotide
uggaugugaacauaauauu

SEQ ID NO: 411146 - RNA, 19 nt, Artificial Sequence
  Description of Artificial Sequence: Synthetic oligonucleotide
caauucgggauauauuuca

SEQ ID NO: 411147 - RNA, 19 nt, Artificial Sequence
  Description of Artificial Sequence: Synthetic oligonucleotide
auguaaauccuuaaaccca

SEQ ID NO: 411148 - RNA, 19 nt, Artificial Sequence
  Description of Artificial Sequence: Synthetic oligonucleotide
aaguagaaauucugaggau

SEQ ID NO: 411149 - RNA, 19 nt, Artificial Sequence
  Description of Artificial Sequence: Synthetic oligonucleotide
gaagucgucgggcggggcg

SEQ ID NO: 411150 - RNA, 19 nt, Artificial Sequence
  Description of Artificial Sequence: Synthetic oligonucleotide
augagauuccuucuggauu

SEQ ID NO: 411151 - RNA, 19 nt, Artificial Sequence
  Description of Artificial Sequence: Synthetic oligonucleotide
gaggugguaaagcaucuuc

SEQ ID NO: 411152 - RNA, 19 nt, Artificial Sequence
  Description of Artificial Sequence: Synthetic oligonucleotide
uucccauaacccacugucc

SEQ ID NO: 411153 - RNA, 19 nt, Artificial Sequence
  Description of Artificial Sequence: Synthetic oligonucleotide
ccgaagaucgucuuacugg

SEQ ID NO: 411154 - RNA, 19 nt, Artificial Sequence
  Description of Artificial Sequence: Synthetic oligonucleotide
uccuuaaacccacacugua

SEQ ID NO: 411155 - RNA, 19 nt, Artificial Sequence
  Description of Artificial Sequence: Synthetic oligonucleotide
uaucccuagggcacauugc

SEQ ID NO: 411156 - RNA, 19 nt, Artificial Sequence
  Description of Artificial Sequence: Synthetic oligonucleotide
gaaggcgcugcuaccaagg

SEQ ID NO: 411157 - RNA, 19 nt, Artificial Sequence
  Description of Artificial Sequence: Synthetic oligonucleotide
aacacgccagaucucggga

SEQ ID NO: 411158 - RNA, 19 nt, Artificial Sequence
  Description of Artificial Sequence: Synthetic oligonucleotide
aaaggccgcagcccuuggg

SEQ ID NO: 411159 - RNA, 19 nt, Artificial Sequence
  Description of Artificial Sequence: Synthetic oligonucleotide
aaguagcgccguuuccagg

SEQ ID NO: 411160 - RNA, 19 nt, Artificial Sequence
  Description of Artificial Sequence: Synthetic oligonucleotide
uguacuagucugagcuggc

SEQ ID NO: 411161 - RNA, 19 nt, Artificial Sequence
  Description of Artificial Sequence: Synthetic oligonucleotide
ugaaaucuugcucgccgcu

SEQ ID NO: 411162 - RNA, 19 nt, Artificial Sequence
  Description of Artificial Sequence: Synthetic oligonucleotide
ucuaugucuucauuugauu

SEQ ID NO: 411163 - RNA, 19 nt, Artificial Sequence
  Description of Artificial Sequence: Synthetic oligonucleotide
ugucuuuccuuugggaaca

SEQ ID NO: 411164 - RNA, 19 nt, Artificial Sequence
  Description of Artificial Sequence: Synthetic oligonucleotide
cuauuaucguccauaugca

SEQ ID NO: 411165 - RNA, 19 nt, Artificial Sequence
  Description of Artificial Sequence: Synthetic oligonucleotide
uggugccuguuuuaagucc

SEQ ID NO: 411166 - RNA, 19 nt, Artificial Sequence
  Description of Artificial Sequence: Synthetic oligonucleotide
uuauucccauaacccacug

SEQ ID NO: 411167 - RNA, 19 nt, Artificial Sequence
  Description of Artificial Sequence: Synthetic oligonucleotide
acaugaaaucuugcucgcc

SEQ ID NO: 411168 - RNA, 19 nt, Artificial Sequence
  Description of Artificial Sequence: Synthetic oligonucleotide
cauaaccaagugacgcugc

SEQ ID NO: 411169 - RNA, 19 nt, Artificial Sequence
  Description of Artificial Sequence: Synthetic oligonucleotide
ucuagucagaaaacauuuu

SEQ ID NO: 411170 - RNA, 19 nt, Artificial Sequence
  Description of Artificial Sequence: Synthetic oligonucleotide
ugagccuucugaauacaau

SEQ ID NO: 411171 - RNA, 19 nt, Artificial Sequence
  Description of Artificial Sequence: Synthetic oligonucleotide
aguccuguacuguacuagu

SEQ ID NO: 411172 - RNA, 19 nt, Artificial Sequence
  Description of Artificial Sequence: Synthetic oligonucleotide
aaaacacgccagaucucgg

SEQ ID NO: 411173 - RNA, 19 nt, Artificial Sequence
  Description of Artificial Sequence: Synthetic oligonucleotide
cuagucagaaaacauuuua

SEQ ID NO: 411174 - RNA, 19 nt, Artificial Sequence
  Description of Artificial Sequence: Synthetic oligonucleotide
uccugaagcgcugaguggu

SEQ ID NO: 411175 - RNA, 19 nt, Artificial Sequence
  Description of Artificial Sequence: Synthetic oligonucleotide
aaggacucauguaaauccu

SEQ ID NO: 411176 - RNA, 19 nt, Artificial Sequence
  Description of Artificial Sequence: Synthetic oligonucleotide
cacugaaucccauaguaaa

SEQ ID NO: 411177 - RNA, 19 nt, Artificial Sequence
  Description of Artificial Sequence: Synthetic oligonucleotide
ggugucuaaaucuuggucu

SEQ ID NO: 411178 - RNA, 19 nt, Artificial Sequence
  Description of Artificial Sequence: Synthetic oligonucleotide
uagugguuacccaagccuu

SEQ ID NO: 411179 - RNA, 19 nt, Artificial Sequence
  Description of Artificial Sequence: Synthetic oligonucleotide
gagccuucugaauacaaua

SEQ ID NO: 411180 - RNA, 19 nt, Artificial Sequence
  Description of Artificial Sequence: Synthetic oligonucleotide
auucacccaucuugacggc

SEQ ID NO: 411181 - RNA, 19 nt, Artificial Sequence
  Description of Artificial Sequence: Synthetic oligonucleotide
gugucucuuguccagugug

SEQ ID NO: 411182 - RNA, 19 nt, Artificial Sequence
  Description of Artificial Sequence: Synthetic oligonucleotide
ucgcucauccaccaucagu

SEQ ID NO: 411183 - RNA, 19 nt, Artificial Sequence
  Description of Artificial Sequence: Synthetic oligonucleotide
ggggaaucugaccauuggg

SEQ ID NO: 411184 - RNA, 19 nt, Artificial Sequence
  Description of Artificial Sequence: Synthetic oligonucleotide
acaguacuuuguuuucugu

SEQ ID NO: 411185 - RNA, 19 nt, Artificial Sequence
  Description of Artificial Sequence: Synthetic oligonucleotide
uauucccauaacccacugu

SEQ ID NO: 411186 - RNA, 19 nt, Artificial Sequence
  Description of Artificial Sequence: Synthetic oligonucleotide
acuguacuagucugagcug

SEQ ID NO: 411187 - RNA, 19 nt, Artificial Sequence
  Description of Artificial Sequence: Synthetic oligonucleotide
gaucgucuuacuggagggg

SEQ ID NO: 411188 - RNA, 19 nt, Artificial Sequence
  Description of Artificial Sequence: Synthetic oligonucleotide
cacuaacauauaucccuag

SEQ ID NO: 411189 - RNA, 19 nt, Artificial Sequence
  Description of Artificial Sequence: Synthetic oligonucleotide
ugugucucuuguccagugu

SEQ ID NO: 411190 - RNA, 19 nt, Artificial Sequence
  Description of Artificial Sequence: Synthetic oligonucleotide
uuccccuuguuauccaagu

SEQ ID NO: 411191 - RNA, 19 nt, Artificial Sequence
  Description of Artificial Sequence: Synthetic oligonucleotide
uugguacuauuaucgucca

SEQ ID NO: 411192 - RNA, 19 nt, Artificial Sequence
  Description of Artificial Sequence: Synthetic oligonucleotide
ggagguaacucgcugucgc

SEQ ID NO: 411193 - RNA, 19 nt, Artificial Sequence
  Description of Artificial Sequence: Synthetic oligonucleotide
agugcuaauuuaauuuuau

SEQ ID NO: 411194 - RNA, 19 nt, Artificial Sequence
  Description of Artificial Sequence: Synthetic oligonucleotide
ucccauacuuggcaauccu

SEQ ID NO: 411195 - RNA, 19 nt, Artificial Sequence
  Description of Artificial Sequence: Synthetic oligonucleotide
aucucgggaugucuuuguc

SEQ ID NO: 411196 - RNA, 19 nt, Artificial Sequence
  Description of Artificial Sequence: Synthetic oligonucleotide
gcuaccaaggcccuuggac

SEQ ID NO: 411197 - RNA, 19 nt, Artificial Sequence
  Description of Artificial Sequence: Synthetic oligonucleotide
gggaaucugaccauugggc

SEQ ID NO: 411198 - RNA, 19 nt, Artificial Sequence
  Description of Artificial Sequence: Synthetic oligonucleotide
cuuaaacccacacuguagu

SEQ ID NO: 411199 - RNA, 19 nt, Artificial Sequence
  Description of Artificial Sequence: Synthetic oligonucleotide
uugcaauucgggauauauu

SEQ ID NO: 411200 - RNA, 19 nt, Artificial Sequence
  Description of Artificial Sequence: Synthetic oligonucleotide
ugcugauucugggaggacu

SEQ ID NO: 411201 - RNA, 19 nt, Artificial Sequence
  Description of Artificial Sequence: Synthetic oligonucleotide
gccuuaauggaugugaaca

SEQ ID NO: 411202 - RNA, 19 nt, Artificial Sequence
  Description of Artificial Sequence: Synthetic oligonucleotide
uacaacugugaagaguuuu

SEQ ID NO: 411203 - RNA, 19 nt, Artificial Sequence
  Description of Artificial Sequence: Synthetic oligonucleotide
caucccgagccaacugucg

SEQ ID NO: 411204 - RNA, 19 nt, Artificial Sequence
  Description of Artificial Sequence: Synthetic oligonucleotide
ccaacaguccccagguucg

SEQ ID NO: 411205 - RNA, 19 nt, Artificial Sequence
  Description of Artificial Sequence: Synthetic oligonucleotide
auacgggauguacauguau

SEQ ID NO: 411206 - RNA, 19 nt, Artificial Sequence
  Description of Artificial Sequence: Synthetic oligonucleotide
ggaugcuuuagaacaaagc

SEQ ID NO: 411207 - RNA, 19 nt, Artificial Sequence
  Description of Artificial Sequence: Synthetic oligonucleotide
ugccuuaauggaugugaac

SEQ ID NO: 411208 - RNA, 19 nt, Artificial Sequence
  Description of Artificial Sequence: Synthetic oligonucleotide
uggagguaacucgcugucg

SEQ ID NO: 411209 - RNA, 19 nt, Artificial Sequence
  Description of Artificial Sequence: Synthetic oligonucleotide
aacucugggucaagagauc

SEQ ID NO: 411210 - RNA, 19 nt, Artificial Sequence
  Description of Artificial Sequence: Synthetic oligonucleotide
caauccuuauucccauaac

SEQ ID NO: 411211 - RNA, 19 nt, Artificial Sequence
  Description of Artificial Sequence: Synthetic oligonucleotide
aauucgggauauauuucau

SEQ ID NO: 411212 - RNA, 19 nt, Artificial Sequence
  Description of Artificial Sequence: Synthetic oligonucleotide
ucguccauaugcaccuuaa

SEQ ID NO: 411213 - RNA, 19 nt, Artificial Sequence
  Description of Artificial Sequence: Synthetic oligonucleotide
ccuuaaacccacacuguag

SEQ ID NO: 411214 - RNA, 19 nt, Artificial Sequence
  Description of Artificial Sequence: Synthetic oligonucleotide
aagcccucagaagaaagua

SEQ ID NO: 411215 - RNA, 19 nt, Artificial Sequence
  Description of Artificial Sequence: Synthetic oligonucleotide
agugacgcugcaacccagc

SEQ ID NO: 411216 - RNA, 19 nt, Artificial Sequence
  Description of Artificial Sequence: Synthetic oligonucleotide
aagucgucgggcggggcgg

SEQ ID NO: 411217 - RNA, 19 nt, Artificial Sequence
  Description of Artificial Sequence: Synthetic oligonucleotide
uucugguacgaugauggau

SEQ ID NO: 411218 - RNA, 19 nt, Artificial Sequence
  Description of Artificial Sequence: Synthetic oligonucleotide
auucgggauauauuucaua

SEQ ID NO: 411219 - RNA, 19 nt, Artificial Sequence
  Description of Artificial Sequence: Synthetic oligonucleotide
gacgcugcaacccagccau

SEQ ID NO: 411220 - RNA, 19 nt, Artificial Sequence
  Description of Artificial Sequence: Synthetic oligonucleotide
augugccacagaaacuuuc

SEQ ID NO: 411221 - RNA, 19 nt, Artificial Sequence
  Description of Artificial Sequence: Synthetic oligonucleotide
aaggcccuuggacuuuggu

SEQ ID NO: 411222 - RNA, 19 nt, Artificial Sequence
  Description of Artificial Sequence: Synthetic oligonucleotide
uucccauacuuggcaaucc

SEQ ID NO: 411223 - RNA, 19 nt, Artificial Sequence
  Description of Artificial Sequence: Synthetic oligonucleotide
aacccacuguccgagaguu

SEQ ID NO: 411224 - RNA, 19 nt, Artificial Sequence
  Description of Artificial Sequence: Synthetic oligonucleotide
agguucguccaccgagagg

SEQ ID NO: 411225 - RNA, 19 nt, Artificial Sequence
  Description of Artificial Sequence: Synthetic oligonucleotide
cauaugcaccuuaaccaca

SEQ ID NO: 411226 - RNA, 19 nt, Artificial Sequence
  Description of Artificial Sequence: Synthetic oligonucleotide
auacuuggcaauccuuauu

SEQ ID NO: 411227 - RNA, 19 nt, Artificial Sequence
  Description of Artificial Sequence: Synthetic oligonucleotide
uuggauggauguaguuagu

SEQ ID NO: 411228 - RNA, 19 nt, Artificial Sequence
  Description of Artificial Sequence: Synthetic oligonucleotide
accgagaggcaaguccagc

SEQ ID NO: 411229 - RNA, 19 nt, Artificial Sequence
  Description of Artificial Sequence: Synthetic oligonucleotide
cagcaauagaguaccaaaa

SEQ ID NO: 411230 - RNA, 19 nt, Artificial Sequence
  Description of Artificial Sequence: Synthetic oligonucleotide
uguaugugcuuggauggau

SEQ ID NO: 411231 - RNA, 19 nt, Artificial Sequence
  Description of Artificial Sequence: Synthetic oligonucleotide
cuggugccuguuuuaaguc

SEQ ID NO: 411232 - RNA, 19 nt, Artificial Sequence
  Description of Artificial Sequence: Synthetic oligonucleotide
guaugugcuuggauggaug

SEQ ID NO: 411233 - RNA, 19 nt, Artificial Sequence
  Description of Artificial Sequence: Synthetic oligonucleotide
aggaugcuuuagaacaaag

SEQ ID NO: 411234 - RNA, 19 nt, Artificial Sequence
  Description of Artificial Sequence: Synthetic oligonucleotide
aggacucuuucugagccug

SEQ ID NO: 411235 - RNA, 19 nt, Artificial Sequence
  Description of Artificial Sequence: Synthetic oligonucleotide
uaacauggguucugcuggu

SEQ ID NO: 411236 - RNA, 19 nt, Artificial Sequence
  Description of Artificial Sequence: Synthetic oligonucleotide
gaagaguguccacuccuaa

SEQ ID NO: 411237 - RNA, 19 nt, Artificial Sequence
  Description of Artificial Sequence: Synthetic oligonucleotide
guacuguacuagucugagc

SEQ ID NO: 411238 - RNA, 19 nt, Artificial Sequence
  Description of Artificial Sequence: Synthetic oligonucleotide
gaagaucgucuuacuggag

SEQ ID NO: 411239 - RNA, 19 nt, Artificial Sequence
  Description of Artificial Sequence: Synthetic oligonucleotide
agcagagauauuugauaua

SEQ ID NO: 411240 - RNA, 19 nt, Artificial Sequence
  Description of Artificial Sequence: Synthetic oligonucleotide
ugaaaaccucagcugccuu

SEQ ID NO: 411241 - RNA, 19 nt, Artificial Sequence
  Description of Artificial Sequence: Synthetic oligonucleotide
ucccuagggcacauugccu

SEQ ID NO: 411242 - RNA, 19 nt, Artificial Sequence
  Description of Artificial Sequence: Synthetic oligonucleotide
uggucgucgucuccuggga

SEQ ID NO: 411243 - RNA, 19 nt, Artificial Sequence
  Description of Artificial Sequence: Synthetic oligonucleotide
ggugcuuuguauuucaguu

SEQ ID NO: 411244 - RNA, 19 nt, Artificial Sequence
  Description of Artificial Sequence: Synthetic oligonucleotide
ccuguacuguacuagucug

SEQ ID NO: 411245 - RNA, 19 nt, Artificial Sequence
  Description of Artificial Sequence: Synthetic oligonucleotide
uucucggguggcuuggguu

SEQ ID NO: 411246 - RNA, 19 nt, Artificial Sequence
  Description of Artificial Sequence: Synthetic oligonucleotide
ggauuugaggaugcuuuag

SEQ ID NO: 411247 - RNA, 19 nt, Artificial Sequence
  Description of Artificial Sequence: Synthetic oligonucleotide
guacgaugauggaugugcc

SEQ ID NO: 411248 - RNA, 19 nt, Artificial Sequence
  Description of Artificial Sequence: Synthetic oligonucleotide
ugauucucuuugguugcac

SEQ ID NO: 411249 - RNA, 19 nt, Artificial Sequence
  Description of Artificial Sequence: Synthetic oligonucleotide
gucgucuccugggagagac

SEQ ID NO: 411250 - RNA, 19 nt, Artificial Sequence
  Description of Artificial Sequence: Synthetic oligonucleotide
gguaaggcagggcugccac

SEQ ID NO: 411251 - RNA, 19 nt, Artificial Sequence
  Description of Artificial Sequence: Synthetic oligonucleotide
aagugacgcugcaacccag

SEQ ID NO: 411252 - RNA, 19 nt, Artificial Sequence
  Description of Artificial Sequence: Synthetic oligonucleotide
aggucuaacauggguucug

SEQ ID NO: 411253 - RNA, 19 nt, Artificial Sequence
  Description of Artificial Sequence: Synthetic oligonucleotide
agccuucugaauacaauaa

SEQ ID NO: 411254 - RNA, 19 nt, Artificial Sequence
  Description of Artificial Sequence: Synthetic oligonucleotide
ggugguggagguaacucgc

SEQ ID NO: 411255 - RNA, 19 nt, Artificial Sequence
  Description of Artificial Sequence: Synthetic oligonucleotide
cuggguagugguuacccaa

SEQ ID NO: 411256 - RNA, 19 nt, Artificial Sequence
  Description of Artificial Sequence: Synthetic oligonucleotide
guacuauuaucguccauau

SEQ ID NO: 411257 - RNA, 19 nt, Artificial Sequence
  Description of Artificial Sequence: Synthetic oligonucleotide
ccaagugacgcugcaaccc

SEQ ID NO: 411258 - RNA, 19 nt, Artificial Sequence
  Description of Artificial Sequence: Synthetic oligonucleotide
auugagccuucugaauaca

SEQ ID NO: 411259 - RNA, 19 nt, Artificial Sequence
  Description of Artificial Sequence: Synthetic oligonucleotide
gguugcaccuggguagugg

SEQ ID NO: 411260 - RNA, 19 nt, Artificial Sequence
  Description of Artificial Sequence: Synthetic oligonucleotide
caagugacgcugcaaccca

SEQ ID NO: 411261 - RNA, 19 nt, Artificial Sequence
  Description of Artificial Sequence: Synthetic oligonucleotide
gaagcgcugaguggugcug

SEQ ID NO: 411262 - RNA, 19 nt, Artificial Sequence
  Description of Artificial Sequence: Synthetic oligonucleotide
cuuaauggaugugaacaua

SEQ ID NO: 411263 - RNA, 19 nt, Artificial Sequence
  Description of Artificial Sequence: Synthetic oligonucleotide
gagccuggaugguucucug

SEQ ID NO: 411264 - RNA, 19 nt, Artificial Sequence
  Description of Artificial Sequence: Synthetic oligonucleotide
gcugccuuaauggauguga

SEQ ID NO: 411265 - RNA, 19 nt, Artificial Sequence
  Description of Artificial Sequence: Synthetic oligonucleotide
cacgccagaucucgggaug

SEQ ID NO: 411266 - RNA, 19 nt, Artificial Sequence
  Description of Artificial Sequence: Synthetic oligonucleotide
auccuuaaacccacacugu

SEQ ID NO: 411267 - RNA, 19 nt, Artificial Sequence
  Description of Artificial Sequence: Synthetic oligonucleotide
cagguucguccaccgagag

SEQ ID NO: 411268 - RNA, 19 nt, Artificial Sequence
  Description of Artificial Sequence: Synthetic oligonucleotide
cugaagcgcugaguggugc

SEQ ID NO: 411269 - RNA, 19 nt, Artificial Sequence
  Description of Artificial Sequence: Synthetic oligonucleotide
aagcgcugaguggugcuga

SEQ ID NO: 411270 - RNA, 19 nt, Artificial Sequence
  Description of Artificial Sequence: Synthetic oligonucleotide
cagugcuaauuuaauuuua

SEQ ID NO: 411271 - RNA, 19 nt, Artificial Sequence
  Description of Artificial Sequence: Synthetic oligonucleotide
aggugaaaacauacgggau

SEQ ID NO: 411272 - RNA, 19 nt, Artificial Sequence
  Description of Artificial Sequence: Synthetic oligonucleotide
acacuaacauauaucccua

SEQ ID NO: 411273 - RNA, 19 nt, Artificial Sequence
  Description of Artificial Sequence: Synthetic oligonucleotide
uccucaaguaagguuucuu

SEQ ID NO: 411274 - RNA, 19 nt, Artificial Sequence
  Description of Artificial Sequence: Synthetic oligonucleotide
ugcuaccaaggcccuugga

SEQ ID NO: 411275 - RNA, 19 nt, Artificial Sequence
  Description of Artificial Sequence: Synthetic oligonucleotide
acacgccagaucucgggau

SEQ ID NO: 411276 - RNA, 19 nt, Artificial Sequence
  Description of Artificial Sequence: Synthetic oligonucleotide
cccagguucguccaccgag

SEQ ID NO: 411277 - RNA, 19 nt, Artificial Sequence
  Description of Artificial Sequence: Synthetic oligonucleotide
ugguacuauuaucguccau

SEQ ID NO: 411278 - RNA, 19 nt, Artificial Sequence
  Description of Artificial Sequence: Synthetic oligonucleotide
guuuuaaguccuguacugu

SEQ ID NO: 411279 - RNA, 19 nt, Artificial Sequence
  Description of Artificial Sequence: Synthetic oligonucleotide
aucguccauaugcaccuua

SEQ ID NO: 411280 - RNA, 19 nt, Artificial Sequence
  Description of Artificial Sequence: Synthetic oligonucleotide
aucccauaguaaauguuua

SEQ ID NO: 411281 - RNA, 19 nt, Artificial Sequence
  Description of Artificial Sequence: Synthetic oligonucleotide
cugcaacccagccaucuga

SEQ ID NO: 411282 - RNA, 19 nt, Artificial Sequence
  Description of Artificial Sequence: Synthetic oligonucleotide
ggggugguggugguggugg

SEQ ID NO: 411283 - RNA, 19 nt, Artificial Sequence
  Description of Artificial Sequence: Synthetic oligonucleotide
ggauguaguuaguuugaaa

SEQ ID NO: 411284 - RNA, 19 nt, Artificial Sequence
  Description of Artificial Sequence: Synthetic oligonucleotide
gcauuuaaggacucaugua

SEQ ID NO: 411285 - RNA, 19 nt, Artificial Sequence
  Description of Artificial Sequence: Synthetic oligonucleotide
agguguccgaagaucgucu

SEQ ID NO: 411286 - RNA, 19 nt, Artificial Sequence
  Description of Artificial Sequence: Synthetic oligonucleotide
cucuugcggggcacugggg

SEQ ID NO: 411287 - RNA, 19 nt, Artificial Sequence
  Description of Artificial Sequence: Synthetic oligonucleotide
guggaaggucuaacauggg

SEQ ID NO: 411288 - RNA, 19 nt, Artificial Sequence
  Description of Artificial Sequence: Synthetic oligonucleotide
cugcuaccaaggcccuugg

SEQ ID NO: 411289 - RNA, 19 nt, Artificial Sequence
  Description of Artificial Sequence: Synthetic oligonucleotide
cugaugccuccugaagcgc

SEQ ID NO: 411290 - RNA, 19 nt, Artificial Sequence
  Description of Artificial Sequence: Synthetic oligonucleotide
cagguguccgaagaucguc

SEQ ID NO: 411291 - RNA, 19 nt, Artificial Sequence
  Description of Artificial Sequence: Synthetic oligonucleotide
cagugugauaaaacuucaa

SEQ ID NO: 411292 - RNA, 19 nt, Artificial Sequence
  Description of Artificial Sequence: Synthetic oligonucleotide
ggucuaacauggguucugc

SEQ ID NO: 411293 - RNA, 19 nt, Artificial Sequence
  Description of Artificial Sequence: Synthetic oligonucleotide
cccuuguuauccaaguaga

SEQ ID NO: 411294 - RNA, 19 nt, Artificial Sequence
  Description of Artificial Sequence: Synthetic oligonucleotide
ugguacgaugauggaugug

SEQ ID NO: 411295 - RNA, 19 nt, Artificial Sequence
  Description of Artificial Sequence: Synthetic oligonucleotide
gaagaaaguagcgccguuu

SEQ ID NO: 411296 - RNA, 19 nt, Artificial Sequence
  Description of Artificial Sequence: Synthetic oligonucleotide
caccgagaggcaaguccag

SEQ ID NO: 411297 - RNA, 19 nt, Artificial Sequence
  Description of Artificial Sequence: Synthetic oligonucleotide
cugccuuaauggaugugaa

SEQ ID NO: 411298 - RNA, 19 nt, Artificial Sequence
  Description of Artificial Sequence: Synthetic oligonucleotide
caacuugugucugggccuc

SEQ ID NO: 411299 - RNA, 19 nt, Artificial Sequence
  Description of Artificial Sequence: Synthetic oligonucleotide
cuuuugcuacagcccgcug

SEQ ID NO: 411300 - RNA, 19 nt, Artificial Sequence
  Description of Artificial Sequence: Synthetic oligonucleotide
ccuuugggaacauaauaaa

SEQ ID NO: 411301 - RNA, 19 nt, Artificial Sequence
  Description of Artificial Sequence: Synthetic oligonucleotide
guaaauccuuaaacccaca

SEQ ID NO: 411302 - RNA, 19 nt, Artificial Sequence
  Description of Artificial Sequence: Synthetic oligonucleotide
cagagccuucaaaggccgc

SEQ ID NO: 411303 - RNA, 19 nt, Artificial Sequence
  Description of Artificial Sequence: Synthetic oligonucleotide
guugcaccuggguaguggu

SEQ ID NO: 411304 - RNA, 19 nt, Artificial Sequence
  Description of Artificial Sequence: Synthetic oligonucleotide
ccauaaccaagugacgcug

SEQ ID NO: 411305 - RNA, 19 nt, Artificial Sequence
  Description of Artificial Sequence: Synthetic oligonucleotide
caaaggccgcagcccuugg

SEQ ID NO: 411306 - RNA, 19 nt, Artificial Sequence
  Description of Artificial Sequence: Synthetic oligonucleotide
ccucuugcggggcacuggg

SEQ ID NO: 411307 - RNA, 19 nt, Artificial Sequence
  Description of Artificial Sequence: Synthetic oligonucleotide
ccauaacccacuguccgag

SEQ ID NO: 411308 - RNA, 19 nt, Artificial Sequence
  Description of Artificial Sequence: Synthetic oligonucleotide
gcaauucgggauauauuuc

SEQ ID NO: 411309 - RNA, 19 nt, Artificial Sequence
  Description of Artificial Sequence: Synthetic oligonucleotide
ccaugagggugucuaaauc

SEQ ID NO: 411310 - RNA, 19 nt, Artificial Sequence
  Description of Artificial Sequence: Synthetic oligonucleotide
gccuucugaauacaauaaa

SEQ ID NO: 411311 - RNA, 19 nt, Artificial Sequence
  Description of Artificial Sequence: Synthetic oligonucleotide
uagggcacauugccucuuu

SEQ ID NO: 411312 - RNA, 19 nt, Artificial Sequence
  Description of Artificial Sequence: Synthetic oligonucleotide
aguuuacacugaaucccau

SEQ ID NO: 411313 - RNA, 19 nt, Artificial Sequence
  Description of Artificial Sequence: Synthetic oligonucleotide
cauagagggucuucccaua

SEQ ID NO: 411314 - RNA, 19 nt, Artificial Sequence
  Description of Artificial Sequence: Synthetic oligonucleotide
cgaagaucgucuuacugga

SEQ ID NO: 411315 - RNA, 19 nt, Artificial Sequence
  Description of Artificial Sequence: Synthetic oligonucleotide
gagaggcaaguccagcuuu

SEQ ID NO: 411316 - RNA, 19 nt, Artificial Sequence
  Description of Artificial Sequence: Synthetic oligonucleotide
ucgucuccugggagagaca

SEQ ID NO: 411317 - RNA, 19 nt, Artificial Sequence
  Description of Artificial Sequence: Synthetic oligonucleotide
ccagugugauaaaacuuca

SEQ ID NO: 411318 - RNA, 19 nt, Artificial Sequence
  Description of Artificial Sequence: Synthetic oligonucleotide
guccuguacuguacuaguc

SEQ ID NO: 411319 - RNA, 19 nt, Artificial Sequence
  Description of Artificial Sequence: Synthetic oligonucleotide
guaacucgcugucgcuguc

SEQ ID NO: 411320 - RNA, 19 nt, Artificial Sequence
  Description of Artificial Sequence: Synthetic oligonucleotide
gucgcucauccaccaucag

SEQ ID NO: 411321 - RNA, 19 nt, Artificial Sequence
  Description of Artificial Sequence: Synthetic oligonucleotide
ccauacuuggcaauccuua

SEQ ID NO: 411322 - RNA, 19 nt, Artificial Sequence
  Description of Artificial Sequence: Synthetic oligonucleotide
ggugguaaagcaucuucau

SEQ ID NO: 411323 - RNA, 19 nt, Artificial Sequence
  Description of Artificial Sequence: Synthetic oligonucleotide
auauaucccuagggcacau

SEQ ID NO: 411324 - RNA, 19 nt, Artificial Sequence
  Description of Artificial Sequence: Synthetic oligonucleotide
guacuagucugagcuggca

SEQ ID NO: 411325 - RNA, 19 nt, Artificial Sequence
  Description of Artificial Sequence: Synthetic oligonucleotide
cauaacccacuguccgaga

SEQ ID NO: 411326 - RNA, 19 nt, Artificial Sequence
  Description of Artificial Sequence: Synthetic oligonucleotide
uucaggcgaugauucucuu

SEQ ID NO: 411327 - RNA, 19 nt, Artificial Sequence
  Description of Artificial Sequence: Synthetic oligonucleotide
gggucaagagauccaucuc

SEQ ID NO: 411328 - RNA, 19 nt, Artificial Sequence
  Description of Artificial Sequence: Synthetic oligonucleotide
ggaugguucucugcucagc

SEQ ID NO: 411329 - RNA, 19 nt, Artificial Sequence
  Description of Artificial Sequence: Synthetic oligonucleotide
aggacucauguaaauccuu

SEQ ID NO: 411330 - RNA, 19 nt, Artificial Sequence
  Description of Artificial Sequence: Synthetic oligonucleotide
uaccaacaguccccagguu

SEQ ID NO: 411331 - RNA, 19 nt, Artificial Sequence
  Description of Artificial Sequence: Synthetic oligonucleotide
gcugcaacccagccaucug

SEQ ID NO: 411332 - RNA, 19 nt, Artificial Sequence
  Description of Artificial Sequence: Synthetic oligonucleotide
cauacgggauguacaugua

SEQ ID NO: 411333 - RNA, 19 nt, Artificial Sequence
  Description of Artificial Sequence: Synthetic oligonucleotide
ccaccgagaggcaagucca

SEQ ID NO: 411334 - RNA, 19 nt, Artificial Sequence
  Description of Artificial Sequence: Synthetic oligonucleotide
aucugaccauugggcuggc

SEQ ID NO: 411335 - RNA, 19 nt, Artificial Sequence
  Description of Artificial Sequence: Synthetic oligonucleotide
ggaaggucuaacauggguu

SEQ ID NO: 411336 - RNA, 19 nt, Artificial Sequence
  Description of Artificial Sequence: Synthetic oligonucleotide
acgccagaucucgggaugu

SEQ ID NO: 411337 - RNA, 19 nt, Artificial Sequence
  Description of Artificial Sequence: Synthetic oligonucleotide
gguaacucgcugucgcugu

SEQ ID NO: 411338 - RNA, 19 nt, Artificial Sequence
  Description of Artificial Sequence: Synthetic oligonucleotide
ggacucauguaaauccuua

SEQ ID NO: 411339 - RNA, 19 nt, Artificial Sequence
  Description of Artificial Sequence: Synthetic oligonucleotide
ugccucuugcggggcacug

SEQ ID NO: 411340 - RNA, 19 nt, Artificial Sequence
  Description of Artificial Sequence: Synthetic oligonucleotide
uagcgccguuuccaggauu

SEQ ID NO: 411341 - RNA, 19 nt, Artificial Sequence
  Description of Artificial Sequence: Synthetic oligonucleotide
agcgcugaguggugcugau

SEQ ID NO: 411342 - RNA, 19 nt, Artificial Sequence
  Description of Artificial Sequence: Synthetic oligonucleotide
agggcacauugccucuuuu

SEQ ID NO: 411343 - RNA, 19 nt, Artificial Sequence
  Description of Artificial Sequence: Synthetic oligonucleotide
gcaaagcuuucaugagguc

SEQ ID NO: 411344 - RNA, 19 nt, Artificial Sequence
  Description of Artificial Sequence: Synthetic oligonucleotide
ccuuguuauccaaguagaa

SEQ ID NO: 411345 - RNA, 19 nt, Artificial Sequence
  Description of Artificial Sequence: Synthetic oligonucleotide
gaaaucuugcucgccgcuu

SEQ ID NO: 411346 - RNA, 19 nt, Artificial Sequence
  Description of Artificial Sequence: Synthetic oligonucleotide
ggacucuuucugagccugg

SEQ ID NO: 411347 - RNA, 19 nt, Artificial Sequence
  Description of Artificial Sequence: Synthetic oligonucleotide
aguggucagugggugcuuu

SEQ ID NO: 411348 - RNA, 19 nt, Artificial Sequence
  Description of Artificial Sequence: Synthetic oligonucleotide
augugcuuggauggaugua

SEQ ID NO: 411349 - RNA, 19 nt, Artificial Sequence
  Description of Artificial Sequence: Synthetic oligonucleotide
cgucuccugggagagacag

SEQ ID NO: 411350 - RNA, 19 nt, Artificial Sequence
  Description of Artificial Sequence: Synthetic oligonucleotide
auuugcaauucgggauaua

SEQ ID NO: 411351 - RNA, 19 nt, Artificial Sequence
  Description of Artificial Sequence: Synthetic oligonucleotide
ccuaaacucugggucaaga

SEQ ID NO: 411352 - RNA, 19 nt, Artificial Sequence
  Description of Artificial Sequence: Synthetic oligonucleotide
ccugaagcgcugaguggug

SEQ ID NO: 411353 - RNA, 19 nt, Artificial Sequence
  Description of Artificial Sequence: Synthetic oligonucleotide
caaaguccgguggcuccuc

SEQ ID NO: 411354 - RNA, 19 nt, Artificial Sequence
  Description of Artificial Sequence: Synthetic oligonucleotide
aacccacacuguaguugaa

SEQ ID NO: 411355 - RNA, 19 nt, Artificial Sequence
  Description of Artificial Sequence: Synthetic oligonucleotide
ccuuaauggaugugaacau

SEQ ID NO: 411356 - RNA, 19 nt, Artificial Sequence
  Description of Artificial Sequence: Synthetic oligonucleotide
ccagugcuaauuuaauuuu

SEQ ID NO: 411357 - RNA, 19 nt, Artificial Sequence
  Description of Artificial Sequence: Synthetic oligonucleotide
ccagguucguccaccgaga

SEQ ID NO: 411358 - RNA, 19 nt, Artificial Sequence
  Description of Artificial Sequence: Synthetic oligonucleotide
gaacucuucucggguggcu

SEQ ID NO: 411359 - RNA, 19 nt, Artificial Sequence
  Description of Artificial Sequence: Synthetic oligonucleotide
guccgaagaucgucuuacu

SEQ ID NO: 411360 - RNA, 19 nt, Artificial Sequence
  Description of Artificial Sequence: Synthetic oligonucleotide
gcaccuuaaccacaagcuu

SEQ ID NO: 411361 - RNA, 19 nt, Artificial Sequence
  Description of Artificial Sequence: Synthetic oligonucleotide
gaccauugggcuggcuggu

SEQ ID NO: 411362 - RNA, 19 nt, Artificial Sequence
  Description of Artificial Sequence: Synthetic oligonucleotide
gugcugauucugggaggac

SEQ ID NO: 411363 - RNA, 19 nt, Artificial Sequence
  Description of Artificial Sequence: Synthetic oligonucleotide
cuggacuucaggcgaugau

SEQ ID NO: 411364 - RNA, 19 nt, Artificial Sequence
  Description of Artificial Sequence: Synthetic oligonucleotide
ggguggugguggugguggc

SEQ ID NO: 411365 - RNA, 19 nt, Artificial Sequence
  Description of Artificial Sequence: Synthetic oligonucleotide
uugcuacagcccgcuggua

SEQ ID NO: 411366 - RNA, 19 nt, Artificial Sequence
  Description of Artificial Sequence: Synthetic oligonucleotide
aucugccaugagggugucu

SEQ ID NO: 411367 - RNA, 19 nt, Artificial Sequence
  Description of Artificial Sequence: Synthetic oligonucleotide
gcuuuugcuacagcccgcu

SEQ ID NO: 411368 - RNA, 19 nt, Artificial Sequence
  Description of Artificial Sequence: Synthetic oligonucleotide
gggaaggcgcugcuaccaa

SEQ ID NO: 411369 - RNA, 19 nt, Artificial Sequence
  Description of Artificial Sequence: Synthetic oligonucleotide
gguggugguggugguggca

SEQ ID NO: 411370 - RNA, 19 nt, Artificial Sequence
  Description of Artificial Sequence: Synthetic oligonucleotide
cuucucggguggcuugggu

SEQ ID NO: 411371 - RNA, 19 nt, Artificial Sequence
  Description of Artificial Sequence: Synthetic oligonucleotide
ccgagaggcaaguccagcu

SEQ ID NO: 411372 - RNA, 19 nt, Artificial Sequence
  Description of Artificial Sequence: Synthetic oligonucleotide
ccuucgaguucugguacga

SEQ ID NO: 411373 - RNA, 19 nt, Artificial Sequence
  Description of Artificial Sequence: Synthetic oligonucleotide
gucgggcggggcggggaag

SEQ ID NO: 411374 - RNA, 19 nt, Artificial Sequence
  Description of Artificial Sequence: Synthetic oligonucleotide
ucgccgcuuccugcugcac

SEQ ID NO: 411375 - RNA, 19 nt, Artificial Sequence
  Description of Artificial Sequence: Synthetic oligonucleotide
acgcugcaacccagccauc

SEQ ID NO: 411376 - RNA, 19 nt, Artificial Sequence
  Description of Artificial Sequence: Synthetic oligonucleotide
guagcgccguuuccaggau

SEQ ID NO: 411377 - RNA, 19 nt, Artificial Sequence
  Description of Artificial Sequence: Synthetic oligonucleotide
gguguccgaagaucgucuu

SEQ ID NO: 411378 - RNA, 19 nt, Artificial Sequence
  Description of Artificial Sequence: Synthetic oligonucleotide
cccagccaucugaugccuc

SEQ ID NO: 411379 - RNA, 19 nt, Artificial Sequence
  Description of Artificial Sequence: Synthetic oligonucleotide
cuucgaguucugguacgau

SEQ ID NO: 411380 - RNA, 19 nt, Artificial Sequence
  Description of Artificial Sequence: Synthetic oligonucleotide
ccccagcaaagugcugaac

SEQ ID NO: 411381 - RNA, 19 nt, Artificial Sequence
  Description of Artificial Sequence: Synthetic oligonucleotide
caccggggaguccuugguu

SEQ ID NO: 411382 - RNA, 19 nt, Artificial Sequence
  Description of Artificial Sequence: Synthetic oligonucleotide
ccgagccaacugucgcuca

SEQ ID NO: 411383 - RNA, 19 nt, Artificial Sequence
  Description of Artificial Sequence: Synthetic oligonucleotide
ccggggaguccuugguucu

SEQ ID NO: 411384 - RNA, 19 nt, Artificial Sequence
  Description of Artificial Sequence: Synthetic oligonucleotide
cggggaguccuugguucuc

SEQ ID NO: 411385 - RNA, 19 nt, Artificial Sequence
  Description of Artificial Sequence: Synthetic oligonucleotide
cgccagaucucgggauguc

SEQ ID NO: 411386 - RNA, 19 nt, Artificial Sequence
  Description of Artificial Sequence: Synthetic oligonucleotide
cgcugcaacccagccaucu

SEQ ID NO: 411387 - RNA, 19 nt, Artificial Sequence
  Description of Artificial Sequence: Synthetic oligonucleotide
cgaguucugguacgaugau

SEQ ID NO: 411388 - RNA, 19 nt, Artificial Sequence
  Description of Artificial Sequence: Synthetic oligonucleotide
gcgcugaguggugcugauu

SEQ ID NO: 411389 - RNA, 19 nt, Artificial Sequence
  Description of Artificial Sequence: Synthetic oligonucleotide
cgucgucuccugggagaga

SEQ ID NO: 411390 - RNA, 19 nt, Artificial Sequence
  Description of Artificial Sequence: Synthetic oligonucleotide
aaugcaacacaugacacgc

SEQ ID NO: 411391 - RNA, 19 nt, Artificial Sequence
  Description of Artificial Sequence: Synthetic oligonucleotide
uguaccaucccacagagca

SEQ ID NO: 411392 - RNA, 19 nt, Artificial Sequence
  Description of Artificial Sequence: Synthetic oligonucleotide
ugucaaaccaccaacagac

SEQ ID NO: 411393 - RNA, 19 nt, Artificial Sequence
  Description of Artificial Sequence: Synthetic oligonucleotide
augacgaucauaaagcugc

SEQ ID NO: 411394 - RNA, 19 nt, Artificial Sequence
  Description of Artificial Sequence: Synthetic oligonucleotide
agugcgagcaacuucacac

SEQ ID NO: 411395 - RNA, 19 nt, Artificial Sequence
  Description of Artificial Sequence: Synthetic oligonucleotide
uguguagaaugccugaccg

SEQ ID NO: 411396 - RNA, 19 nt, Artificial Sequence
  Description of Artificial Sequence: Synthetic oligonucleotide
aaugccugaccguagacuc

SEQ ID NO: 411397 - RNA, 19 nt, Artificial Sequence
  Description of Artificial Sequence: Synthetic oligonucleotide
aguuagauauguuaccaac

SEQ ID NO: 411398 - RNA, 19 nt, Artificial Sequence
  Description of Artificial Sequence: Synthetic oligonucleotide
aaacaguuagauauguuac

SEQ ID NO: 411399 - RNA, 19 nt, Artificial Sequence
  Description of Artificial Sequence: Synthetic oligonucleotide
cugccaaccaucuauaacg

SEQ ID NO: 411400 - RNA, 19 nt, Artificial Sequence
  Description of Artificial Sequence: Synthetic oligonucleotide
uuagauauguuaccaacug

SEQ ID NO: 411401 - RNA, 19 nt, Artificial Sequence
  Description of Artificial Sequence: Synthetic oligonucleotide
gagagugucauuuaucagc

SEQ ID NO: 411402 - RNA, 19 nt, Artificial Sequence
  Description of Artificial Sequence: Synthetic oligonucleotide
aagcuuacauccuugggag

SEQ ID NO: 411403 - RNA, 19 nt, Artificial Sequence
  Description of Artificial Sequence: Synthetic oligonucleotide
aauuccgugggagacaggg

SEQ ID NO: 411404 - RNA, 19 nt, Artificial Sequence
  Description of Artificial Sequence: Synthetic oligonucleotide
aaccgaucaaucuucucac

SEQ ID NO: 411405 - RNA, 19 nt, Artificial Sequence
  Description of Artificial Sequence: Synthetic oligonucleotide
aauaucaauuccgugggag

SEQ ID NO: 411406 - RNA, 19 nt, Artificial Sequence
  Description of Artificial Sequence: Synthetic oligonucleotide
uguaguauucacugcagag

SEQ ID NO: 411407 - RNA, 19 nt, Artificial Sequence
  Description of Artificial Sequence: Synthetic oligonucleotide
uucuuccuuacaaagugcg

SEQ ID NO: 411408 - RNA, 19 nt, Artificial Sequence
  Description of Artificial Sequence: Synthetic oligonucleotide
auaagugagcaccaucucg

SEQ ID NO: 411409 - RNA, 19 nt, Artificial Sequence
  Description of Artificial Sequence: Synthetic oligonucleotide
gguguaaucacucaugcag

SEQ ID NO: 411410 - RNA, 19 nt, Artificial Sequence
  Description of Artificial Sequence: Synthetic oligonucleotide
ucugauuucuuccuuacaa

SEQ ID NO: 411411 - RNA, 19 nt, Artificial Sequence
  Description of Artificial Sequence: Synthetic oligonucleotide
uaccaagucgcuauaagug

SEQ ID NO: 411412 - RNA, 19 nt, Artificial Sequence
  Description of Artificial Sequence: Synthetic oligonucleotide
ugggcaaugcaacacauga

SEQ ID NO: 411413 - RNA, 19 nt, Artificial Sequence
  Description of Artificial Sequence: Synthetic oligonucleotide
agaagugucaaguccauga

SEQ ID NO: 411414 - RNA, 19 nt, Artificial Sequence
  Description of Artificial Sequence: Synthetic oligonucleotide
ucuaucacacucucuaccc

SEQ ID NO: 411415 - RNA, 19 nt, Artificial Sequence
  Description of Artificial Sequence: Synthetic oligonucleotide
aaugcuugaccgaaguuuc

SEQ ID NO: 411416 - RNA, 19 nt, Artificial Sequence
  Description of Artificial Sequence: Synthetic oligonucleotide
aucgccuucaaacugucuc

SEQ ID NO: 411417 - RNA, 19 nt, Artificial Sequence
  Description of Artificial Sequence: Synthetic oligonucleotide
ugaugguaaagcuuguugu

SEQ ID NO: 411418 - RNA, 19 nt, Artificial Sequence
  Description of Artificial Sequence: Synthetic oligonucleotide
aauguugggaauacauggg

SEQ ID NO: 411419 - RNA, 19 nt, Artificial Sequence
  Description of Artificial Sequence: Synthetic oligonucleotide
ucagagguaaagaugucga

SEQ ID NO: 411420 - RNA, 19 nt, Artificial Sequence
  Description of Artificial Sequence: Synthetic oligonucleotide
cagcuuauaaccaggaaac

SEQ ID NO: 411421 - RNA, 19 nt, Artificial Sequence
  Description of Artificial Sequence: Synthetic oligonucleotide
uuguguguagaucuggacu

SEQ ID NO: 411422 - RNA, 19 nt, Artificial Sequence
  Description of Artificial Sequence: Synthetic oligonucleotide
ucggcaucuaccaagucgc

SEQ ID NO: 411423 - RNA, 19 nt, Artificial Sequence
  Description of Artificial Sequence: Synthetic oligonucleotide
uaaucacucaugcagccca

SEQ ID NO: 411424 - RNA, 19 nt, Artificial Sequence
  Description of Artificial Sequence: Synthetic oligonucleotide
agagugucauuuaucagcc

SEQ ID NO: 411425 - RNA, 19 nt, Artificial Sequence
  Description of Artificial Sequence: Synthetic oligonucleotide
aacuggaagcucuccgccc

SEQ ID NO: 411426 - RNA, 19 nt, Artificial Sequence
  Description of Artificial Sequence: Synthetic oligonucleotide
aagcacaucggcaucuacc

SEQ ID NO: 411427 - RNA, 19 nt, Artificial Sequence
  Description of Artificial Sequence: Synthetic oligonucleotide
cugucgaagugcaagagag

SEQ ID NO: 411428 - RNA, 19 nt, Artificial Sequence
  Description of Artificial Sequence: Synthetic oligonucleotide
caaguggucaaucaucggc

SEQ ID NO: 411429 - RNA, 19 nt, Artificial Sequence
  Description of Artificial Sequence: Synthetic oligonucleotide
ugugguguaaucacucaug

SEQ ID NO: 411430 - RNA, 19 nt, Artificial Sequence
  Description of Artificial Sequence: Synthetic oligonucleotide
gucgcuauaagugagcacc

SEQ ID NO: 411431 - RNA, 19 nt, Artificial Sequence
  Description of Artificial Sequence: Synthetic oligonucleotide
gaaccgaucaaucuucuca

SEQ ID NO: 411432 - RNA, 19 nt, Artificial Sequence
  Description of Artificial Sequence: Synthetic oligonucleotide
ucuaccaagucgcuauaag

SEQ ID NO: 411433 - RNA, 19 nt, Artificial Sequence
  Description of Artificial Sequence: Synthetic oligonucleotide
cuuguauaaggcauaggug

SEQ ID NO: 411434 - RNA, 19 nt, Artificial Sequence
  Description of Artificial Sequence: Synthetic oligonucleotide
acugccaaccaucuauaac

SEQ ID NO: 411435 - RNA, 19 nt, Artificial Sequence
  Description of Artificial Sequence: Synthetic oligonucleotide
uguguguagaucuggacuc

SEQ ID NO: 411436 - RNA, 19 nt, Artificial Sequence
  Description of Artificial Sequence: Synthetic oligonucleotide
uguaaucacucaugcagcc

SEQ ID NO: 411437 - RNA, 19 nt, Artificial Sequence
  Description of Artificial Sequence: Synthetic oligonucleotide
aauagucugcuguagucaa

SEQ ID NO: 411438 - RNA, 19 nt, Artificial Sequence
  Description of Artificial Sequence: Synthetic oligonucleotide
ugggcuucaauuagcacug

SEQ ID NO: 411439 - RNA, 19 nt, Artificial Sequence
  Description of Artificial Sequence: Synthetic oligonucleotide
cuaccaauuccuuuggcug

SEQ ID NO: 411440 - RNA, 19 nt, Artificial Sequence
  Description of Artificial Sequence: Synthetic oligonucleotide
acaaagugcgagcaacuuc

SEQ ID NO: 411441 - RNA, 19 nt, Artificial Sequence
  Description of Artificial Sequence: Synthetic oligonucleotide
cagaugaccccugagaagg

SEQ ID NO: 411442 - RNA, 19 nt, Artificial Sequence
  Description of Artificial Sequence: Synthetic oligonucleotide
uacucaaagaggcucugug

SEQ ID NO: 411443 - RNA, 19 nt, Artificial Sequence
  Description of Artificial Sequence: Synthetic oligonucleotide
uuuggaaccagcugggguc

SEQ ID NO: 411444 - RNA, 19 nt, Artificial Sequence
  Description of Artificial Sequence: Synthetic oligonucleotide
acggugucaccuuuaaagg

SEQ ID NO: 411445 - RNA, 19 nt, Artificial Sequence
  Description of Artificial Sequence: Synthetic oligonucleotide
ucauaaguucuccucccag

SEQ ID NO: 411446 - RNA, 19 nt, Artificial Sequence
  Description of Artificial Sequence: Synthetic oligonucleotide
ugagaucgccuucaaacug

SEQ ID NO: 411447 - RNA, 19 nt, Artificial Sequence
  Description of Artificial Sequence: Synthetic oligonucleotide
uguauaaggcauaggugac

SEQ ID NO: 411448 - RNA, 19 nt, Artificial Sequence
  Description of Artificial Sequence: Synthetic oligonucleotide
gagagucaggaauauccgg

SEQ ID NO: 411449 - RNA, 19 nt, Artificial Sequence
  Description of Artificial Sequence: Synthetic oligonucleotide
cuucaauuagcacuggcuc

SEQ ID NO: 411450 - RNA, 19 nt, Artificial Sequence
  Description of Artificial Sequence: Synthetic oligonucleotide
ggucauggcagcuucacgg

SEQ ID NO: 411451 - RNA, 19 nt, Artificial Sequence
  Description of Artificial Sequence: Synthetic oligonucleotide
cauccuaccaauuccuuug

SEQ ID NO: 411452 - RNA, 19 nt, Artificial Sequence
  Description of Artificial Sequence: Synthetic oligonucleotide
gaugucgaagcacccauug

SEQ ID NO: 411453 - RNA, 19 nt, Artificial Sequence
  Description of Artificial Sequence: Synthetic oligonucleotide
uuauaaccaggaaacaguu

SEQ ID NO: 411454 - RNA, 19 nt, Artificial Sequence
  Description of Artificial Sequence: Synthetic oligonucleotide
gauggccccaucccaaugg

SEQ ID NO: 411455 - RNA, 19 nt, Artificial Sequence
  Description of Artificial Sequence: Synthetic oligonucleotide
gacacgcucacagaugugg

SEQ ID NO: 411456 - RNA, 19 nt, Artificial Sequence
  Description of Artificial Sequence: Synthetic oligonucleotide
gaagugucaaguccaugag

SEQ ID NO: 411457 - RNA, 19 nt, Artificial Sequence
  Description of Artificial Sequence: Synthetic oligonucleotide
uucaauuagcacuggcucu

SEQ ID NO: 411458 - RNA, 19 nt, Artificial Sequence
  Description of Artificial Sequence: Synthetic oligonucleotide
ugccaaccaucuauaacgg

SEQ ID NO: 411459 - RNA, 19 nt, Artificial Sequence
  Description of Artificial Sequence: Synthetic oligonucleotide
agagucaggaauauccggg

SEQ ID NO: 411460 - RNA, 19 nt, Artificial Sequence
  Description of Artificial Sequence: Synthetic oligonucleotide
caaagugcgagcaacuuca

SEQ ID NO: 411461 - RNA, 19 nt, Artificial Sequence
  Description of Artificial Sequence: Synthetic oligonucleotide
cuuccuuacaaagugcgag

SEQ ID NO: 411462 - RNA, 19 nt, Artificial Sequence
  Description of Artificial Sequence: Synthetic oligonucleotide
uaaagaugucgaagcaccc

SEQ ID NO: 411463 - RNA, 19 nt, Artificial Sequence
  Description of Artificial Sequence: Synthetic oligonucleotide
aagaugucgaagcacccau

SEQ ID NO: 411464 - RNA, 19 nt, Artificial Sequence
  Description of Artificial Sequence: Synthetic oligonucleotide
auauccgggcagcaugagc

SEQ ID NO: 411465 - RNA, 19 nt, Artificial Sequence
  Description of Artificial Sequence: Synthetic oligonucleotide
cuggagcucagcaagguac

SEQ ID NO: 411466 - RNA, 19 nt, Artificial Sequence
  Description of Artificial Sequence: Synthetic oligonucleotide
uugagaucgccuucaaacu

SEQ ID NO: 411467 - RNA, 19 nt, Artificial Sequence
  Description of Artificial Sequence: Synthetic oligonucleotide
cucuaucacacucucuacc

SEQ ID NO: 411468 - RNA, 19 nt, Artificial Sequence
  Description of Artificial Sequence: Synthetic oligonucleotide
gucucauaaguucuccucc

SEQ ID NO: 411469 - RNA, 19 nt, Artificial Sequence
  Description of Artificial Sequence: Synthetic oligonucleotide
uuccggaucacagggaaag

SEQ ID NO: 411470 - RNA, 19 nt, Artificial Sequence
  Description of Artificial Sequence: Synthetic oligonucleotide
ugagagugucauuuaucag

SEQ ID NO: 411471 - RNA, 19 nt, Artificial Sequence
  Description of Artificial Sequence: Synthetic oligonucleotide
agugagcaccaucucguac

SEQ ID NO: 411472 - RNA, 19 nt, Artificial Sequence
  Description of Artificial Sequence: Synthetic oligonucleotide
ucaauuccgugggagacag

SEQ ID NO: 411473 - RNA, 19 nt, Artificial Sequence
  Description of Artificial Sequence: Synthetic oligonucleotide
ccaacugcaaaauagucug

SEQ ID NO: 411474 - RNA, 19 nt, Artificial Sequence
  Description of Artificial Sequence: Synthetic oligonucleotide
uuccuuacaaagugcgagc

SEQ ID NO: 411475 - RNA, 19 nt, Artificial Sequence
  Description of Artificial Sequence: Synthetic oligonucleotide
cagacaguucuccggaugg

SEQ ID NO: 411476 - RNA, 19 nt, Artificial Sequence
  Description of Artificial Sequence: Synthetic oligonucleotide
uuacaaagugcgagcaacu

SEQ ID NO: 411477 - RNA, 19 nt, Artificial Sequence
  Description of Artificial Sequence: Synthetic oligonucleotide
ugcaagagagucaggaaua

SEQ ID NO: 411478 - RNA, 19 nt, Artificial Sequence
  Description of Artificial Sequence: Synthetic oligonucleotide
guauauuccuggaagccag

SEQ ID NO: 411479 - RNA, 19 nt, Artificial Sequence
  Description of Artificial Sequence: Synthetic oligonucleotide
gugguguaaucacucaugc

SEQ ID NO: 411480 - RNA, 19 nt, Artificial Sequence
  Description of Artificial Sequence: Synthetic oligonucleotide
uuuaaagggcauucuggaa

SEQ ID NO: 411481 - RNA, 19 nt, Artificial Sequence
  Description of Artificial Sequence: Synthetic oligonucleotide
auauguuaccaacugcaaa

SEQ ID NO: 411482 - RNA, 19 nt, Artificial Sequence
  Description of Artificial Sequence: Synthetic oligonucleotide
ugcaaugcuugaccgaagu

SEQ ID NO: 411483 - RNA, 19 nt, Artificial Sequence
  Description of Artificial Sequence: Synthetic oligonucleotide
uauucacugcagagggcgg

SEQ ID NO: 411484 - RNA, 19 nt, Artificial Sequence
  Description of Artificial Sequence: Synthetic oligonucleotide
ugcuuucacaccaacuguc

SEQ ID NO: 411485 - RNA, 19 nt, Artificial Sequence
  Description of Artificial Sequence: Synthetic oligonucleotide
ugucauuuaucagccacug

SEQ ID NO: 411486 - RNA, 19 nt, Artificial Sequence
  Description of Artificial Sequence: Synthetic oligonucleotide
accaagucgcuauaaguga

SEQ ID NO: 411487 - RNA, 19 nt, Artificial Sequence
  Description of Artificial Sequence: Synthetic oligonucleotide
uacauggguggcuauguac

SEQ ID NO: 411488 - RNA, 19 nt, Artificial Sequence
  Description of Artificial Sequence: Synthetic oligonucleotide
aaagaugucgaagcaccca

SEQ ID NO: 411489 - RNA, 19 nt, Artificial Sequence
  Description of Artificial Sequence: Synthetic oligonucleotide
uggacacccugucauuuag

SEQ ID NO: 411490 - RNA, 19 nt, Artificial Sequence
  Description of Artificial Sequence: Synthetic oligonucleotide
aucggcuugguauauuccu

SEQ ID NO: 411491 - RNA, 19 nt, Artificial Sequence
  Description of Artificial Sequence: Synthetic oligonucleotide
gaugacgaucauaaagcug

SEQ ID NO: 411492 - RNA, 19 nt, Artificial Sequence
  Description of Artificial Sequence: Synthetic oligonucleotide
uggucuuccggaucacagg

SEQ ID NO: 411493 - RNA, 19 nt, Artificial Sequence
  Description of Artificial Sequence: Synthetic oligonucleotide
uauaagugagcaccaucuc

SEQ ID NO: 411494 - RNA, 19 nt, Artificial Sequence
  Description of Artificial Sequence: Synthetic oligonucleotide
aacaacaauguugggaaua

SEQ ID NO: 411495 - RNA, 19 nt, Artificial Sequence
  Description of Artificial Sequence: Synthetic oligonucleotide
uaucaauuccgugggagac

SEQ ID NO: 411496 - RNA, 19 nt, Artificial Sequence
  Description of Artificial Sequence: Synthetic oligonucleotide
agaaugccugaccguagac

SEQ ID NO: 411497 - RNA, 19 nt, Artificial Sequence
  Description of Artificial Sequence: Synthetic oligonucleotide
gagucaggaauauccgggc

SEQ ID NO: 411498 - RNA, 19 nt, Artificial Sequence
  Description of Artificial Sequence: Synthetic oligonucleotide
cuauaagugagcaccaucu

SEQ ID NO: 411499 - RNA, 19 nt, Artificial Sequence
  Description of Artificial Sequence: Synthetic oligonucleotide
cagagagucugugacaggc

SEQ ID NO: 411500 - RNA, 19 nt, Artificial Sequence
  Description of Artificial Sequence: Synthetic oligonucleotide
uagaaugccugaccguaga

SEQ ID NO: 411501 - RNA, 19 nt, Artificial Sequence
  Description of Artificial Sequence: Synthetic oligonucleotide
acaugacacgcucacagau

SEQ ID NO: 411502 - RNA, 19 nt, Artificial Sequence
  Description of Artificial Sequence: Synthetic oligonucleotide
ucgucaagcacaucggcau

SEQ ID NO: 411503 - RNA, 19 nt, Artificial Sequence
  Description of Artificial Sequence: Synthetic oligonucleotide
gaccccuauagagaugacg

SEQ ID NO: 411504 - RNA, 19 nt, Artificial Sequence
  Description of Artificial Sequence: Synthetic oligonucleotide
cugaaucccuuucauguac

SEQ ID NO: 411505 - RNA, 19 nt, Artificial Sequence
  Description of Artificial Sequence: Synthetic oligonucleotide
agugauauggacacccugu

SEQ ID NO: 411506 - RNA, 19 nt, Artificial Sequence
  Description of Artificial Sequence: Synthetic oligonucleotide
ucuuccuuacaaagugcga

SEQ ID NO: 411507 - RNA, 19 nt, Artificial Sequence
  Description of Artificial Sequence: Synthetic oligonucleotide
ucgaagugcaagagaguca

SEQ ID NO: 411508 - RNA, 19 nt, Artificial Sequence
  Description of Artificial Sequence: Synthetic oligonucleotide
ugaaucccuuucauguacu

SEQ ID NO: 411509 - RNA, 19 nt, Artificial Sequence
  Description of Artificial Sequence: Synthetic oligonucleotide
ucaauuagcacuggcucuc

SEQ ID NO: 411510 - RNA, 19 nt, Artificial Sequence
  Description of Artificial Sequence: Synthetic oligonucleotide
ucaucggcuugguauauuc

SEQ ID NO: 411511 - RNA, 19 nt, Artificial Sequence
  Description of Artificial Sequence: Synthetic oligonucleotide
gacacccugucauuuagga

SEQ ID NO: 411512 - RNA, 19 nt, Artificial Sequence
  Description of Artificial Sequence: Synthetic oligonucleotide
aagucgcuauaagugagca

SEQ ID NO: 411513 - RNA, 19 nt, Artificial Sequence
  Description of Artificial Sequence: Synthetic oligonucleotide
agucgcuauaagugagcac

SEQ ID NO: 411514 - RNA, 19 nt, Artificial Sequence
  Description of Artificial Sequence: Synthetic oligonucleotide
ggaauauccgggcagcaug

SEQ ID NO: 411515 - RNA, 19 nt, Artificial Sequence
  Description of Artificial Sequence: Synthetic oligonucleotide
aauuugggagggcacccaa

SEQ ID NO: 411516 - RNA, 19 nt, Artificial Sequence
  Description of Artificial Sequence: Synthetic oligonucleotide
gagaccaaguggucaauca

SEQ ID NO: 411517 - RNA, 19 nt, Artificial Sequence
  Description of Artificial Sequence: Synthetic oligonucleotide
ucccagaccccuauagaga

SEQ ID NO: 411518 - RNA, 19 nt, Artificial Sequence
  Description of Artificial Sequence: Synthetic oligonucleotide
caagucgcuauaagugagc

SEQ ID NO: 411519 - RNA, 19 nt, Artificial Sequence
  Description of Artificial Sequence: Synthetic oligonucleotide
auccuaccaauuccuuugg

SEQ ID NO: 411520 - RNA, 19 nt, Artificial Sequence
  Description of Artificial Sequence: Synthetic oligonucleotide
acaugaccucgucaagcac

SEQ ID NO: 411521 - RNA, 19 nt, Artificial Sequence
  Description of Artificial Sequence: Synthetic oligonucleotide
ggugcguuccaguucacag

SEQ ID NO: 411522 - RNA, 19 nt, Artificial Sequence
  Description of Artificial Sequence: Synthetic oligonucleotide
aaccacagcgggucaucuc

SEQ ID NO: 411523 - RNA, 19 nt, Artificial Sequence
  Description of Artificial Sequence: Synthetic oligonucleotide
accccuauagagaugacga

SEQ ID NO: 411524 - RNA, 19 nt, Artificial Sequence
  Description of Artificial Sequence: Synthetic oligonucleotide
gauggcaccgugucuugug

SEQ ID NO: 411525 - RNA, 19 nt, Artificial Sequence
  Description of Artificial Sequence: Synthetic oligonucleotide
auguaguauucacugcaga

SEQ ID NO: 411526 - RNA, 19 nt, Artificial Sequence
  Description of Artificial Sequence: Synthetic oligonucleotide
ucccucguucuccuggaag

SEQ ID NO: 411527 - RNA, 19 nt, Artificial Sequence
  Description of Artificial Sequence: Synthetic oligonucleotide
cuaucacacucucuacccc

SEQ ID NO: 411528 - RNA, 19 nt, Artificial Sequence
  Description of Artificial Sequence: Synthetic oligonucleotide
uggaauggcuugaaacaaa

SEQ ID NO: 411529 - RNA, 19 nt, Artificial Sequence
  Description of Artificial Sequence: Synthetic oligonucleotide
uccuuacaaagugcgagca

SEQ ID NO: 411530 - RNA, 19 nt, Artificial Sequence
  Description of Artificial Sequence: Synthetic oligonucleotide
uucucacuugccugcuggg

SEQ ID NO: 411531 - RNA, 19 nt, Artificial Sequence
  Description of Artificial Sequence: Synthetic oligonucleotide
aaggauggcaccgugucuu

SEQ ID NO: 411532 - RNA, 19 nt, Artificial Sequence
  Description of Artificial Sequence: Synthetic oligonucleotide
auuuaggagguuguccuca

SEQ ID NO: 411533 - RNA, 19 nt, Artificial Sequence
  Description of Artificial Sequence: Synthetic oligonucleotide
ucuauaacggugucaccuu

SEQ ID NO: 411534 - RNA, 19 nt, Artificial Sequence
  Description of Artificial Sequence: Synthetic oligonucleotide
guguaaucacucaugcagc

SEQ ID NO: 411535 - RNA, 19 nt, Artificial Sequence
  Description of Artificial Sequence: Synthetic oligonucleotide
gaccccacuacuucaucug

SEQ ID NO: 411536 - RNA, 19 nt, Artificial Sequence
  Description of Artificial Sequence: Synthetic oligonucleotide
ucaggaggguuucacugaa

SEQ ID NO: 411537 - RNA, 19 nt, Artificial Sequence
  Description of Artificial Sequence: Synthetic oligonucleotide
aaacaaagugaaggcuucu

SEQ ID NO: 411538 - RNA, 19 nt, Artificial Sequence
  Description of Artificial Sequence: Synthetic oligonucleotide
agcuagguaggcaaggacu

SEQ ID NO: 411539 - RNA, 19 nt, Artificial Sequence
  Description of Artificial Sequence: Synthetic oligonucleotide
ucgccuucaaacugucucu

SEQ ID NO: 411540 - RNA, 19 nt, Artificial Sequence
  Description of Artificial Sequence: Synthetic oligonucleotide
ugguguaaucacucaugca

SEQ ID NO: 411541 - RNA, 19 nt, Artificial Sequence
  Description of Artificial Sequence: Synthetic oligonucleotide
agaccccacuacuucaucu

SEQ ID NO: 411542 - RNA, 19 nt, Artificial Sequence
  Description of Artificial Sequence: Synthetic oligonucleotide
auaggugaccucugcacaa

SEQ ID NO: 411543 - RNA, 19 nt, Artificial Sequence
  Description of Artificial Sequence: Synthetic oligonucleotide
acggaaccgaucaaucuuc

SEQ ID NO: 411544 - RNA, 19 nt, Artificial Sequence
  Description of Artificial Sequence: Synthetic oligonucleotide
uggagcucagcaagguacu

SEQ ID NO: 411545 - RNA, 19 nt, Artificial Sequence
  Description of Artificial Sequence: Synthetic oligonucleotide
cuuucacaccaacugucug

SEQ ID NO: 411546 - RNA, 19 nt, Artificial Sequence
  Description of Artificial Sequence: Synthetic oligonucleotide
agagagucugugacaggcc

SEQ ID NO: 411547 - RNA, 19 nt, Artificial Sequence
  Description of Artificial Sequence: Synthetic oligonucleotide
ucgcuauaagugagcacca

SEQ ID NO: 411548 - RNA, 19 nt, Artificial Sequence
  Description of Artificial Sequence: Synthetic oligonucleotide
ugcgagcaacuucacacaa

SEQ ID NO: 411549 - RNA, 19 nt, Artificial Sequence
  Description of Artificial Sequence: Synthetic oligonucleotide
auaacggugucaccuuuaa

SEQ ID NO: 411550 - RNA, 19 nt, Artificial Sequence
  Description of Artificial Sequence: Synthetic oligonucleotide
agaccaaguggucaaucau

SEQ ID NO: 411551 - RNA, 19 nt, Artificial Sequence
  Description of Artificial Sequence: Synthetic oligonucleotide
ugucgaagugcaagagagu

SEQ ID NO: 411552 - RNA, 19 nt, Artificial Sequence
  Description of Artificial Sequence: Synthetic oligonucleotide
acauggguggcuauguacu

SEQ ID NO: 411553 - RNA, 19 nt, Artificial Sequence
  Description of Artificial Sequence: Synthetic oligonucleotide
caucggcuugguauauucc

SEQ ID NO: 411554 - RNA, 19 nt, Artificial Sequence
  Description of Artificial Sequence: Synthetic oligonucleotide
aaauuugggagggcaccca

SEQ ID NO: 411555 - RNA, 19 nt, Artificial Sequence
  Description of Artificial Sequence: Synthetic oligonucleotide
cuuuggcugcagaccaccg

SEQ ID NO: 411556 - RNA, 19 nt, Artificial Sequence
  Description of Artificial Sequence: Synthetic oligonucleotide
agucaggaauauccgggca

SEQ ID NO: 411557 - RNA, 19 nt, Artificial Sequence
  Description of Artificial Sequence: Synthetic oligonucleotide
aagaccuucaggaggguuu

SEQ ID NO: 411558 - RNA, 19 nt, Artificial Sequence
  Description of Artificial Sequence: Synthetic oligonucleotide
ccaggaaacaguuagauau

SEQ ID NO: 411559 - RNA, 19 nt, Artificial Sequence
  Description of Artificial Sequence: Synthetic oligonucleotide
uccuaccaauuccuuuggc

SEQ ID NO: 411560 - RNA, 19 nt, Artificial Sequence
  Description of Artificial Sequence: Synthetic oligonucleotide
guacaggugacuguucuca

SEQ ID NO: 411561 - RNA, 19 nt, Artificial Sequence
  Description of Artificial Sequence: Synthetic oligonucleotide
agacaguucuccggauggc

SEQ ID NO: 411562 - RNA, 19 nt, Artificial Sequence
  Description of Artificial Sequence: Synthetic oligonucleotide
ggacucagcuuccaggagc

SEQ ID NO: 411563 - RNA, 19 nt, Artificial Sequence
  Description of Artificial Sequence: Synthetic oligonucleotide
gcuugaccgaaguuucugg

SEQ ID NO: 411564 - RNA, 19 nt, Artificial Sequence
  Description of Artificial Sequence: Synthetic oligonucleotide
ccaucuauaacggugucac

SEQ ID NO: 411565 - RNA, 19 nt, Artificial Sequence
  Description of Artificial Sequence: Synthetic oligonucleotide
auaaggcauaggugaccuc

SEQ ID NO: 411566 - RNA, 19 nt, Artificial Sequence
  Description of Artificial Sequence: Synthetic oligonucleotide
uggaaucagcuccgucucc

SEQ ID NO: 411567 - RNA, 19 nt, Artificial Sequence
  Description of Artificial Sequence: Synthetic oligonucleotide
guaaucacucaugcagccc

SEQ ID NO: 411568 - RNA, 19 nt, Artificial Sequence
  Description of Artificial Sequence: Synthetic oligonucleotide
gaauauccgggcagcauga

SEQ ID NO: 411569 - RNA, 19 nt, Artificial Sequence
  Description of Artificial Sequence: Synthetic oligonucleotide
agcgggucaucuccucugg

SEQ ID NO: 411570 - RNA, 19 nt, Artificial Sequence
  Description of Artificial Sequence: Synthetic oligonucleotide
gucgaagcacccauuggcc

SEQ ID NO: 411571 - RNA, 19 nt, Artificial Sequence
  Description of Artificial Sequence: Synthetic oligonucleotide
gugauauggacacccuguc

SEQ ID NO: 411572 - RNA, 19 nt, Artificial Sequence
  Description of Artificial Sequence: Synthetic oligonucleotide
ugugggcuucaauuagcac

SEQ ID NO: 411573 - RNA, 19 nt, Artificial Sequence
  Description of Artificial Sequence: Synthetic oligonucleotide
cugaccguagacucuguca

SEQ ID NO: 411574 - RNA, 19 nt, Artificial Sequence
  Description of Artificial Sequence: Synthetic oligonucleotide
aggcucuguguagaaugcc

SEQ ID NO: 411575 - RNA, 19 nt, Artificial Sequence
  Description of Artificial Sequence: Synthetic oligonucleotide
guggucuuccggaucacag

SEQ ID NO: 411576 - RNA, 19 nt, Artificial Sequence
  Description of Artificial Sequence: Synthetic oligonucleotide
ugacgaucauaaagcugcu

SEQ ID NO: 411577 - RNA, 19 nt, Artificial Sequence
  Description of Artificial Sequence: Synthetic oligonucleotide
aaucacucaugcagcccag

SEQ ID NO: 411578 - RNA, 19 nt, Artificial Sequence
  Description of Artificial Sequence: Synthetic oligonucleotide
cagugauauggacacccug

SEQ ID NO: 411579 - RNA, 19 nt, Artificial Sequence
  Description of Artificial Sequence: Synthetic oligonucleotide
caucuauaacggugucacc

SEQ ID NO: 411580 - RNA, 19 nt, Artificial Sequence
  Description of Artificial Sequence: Synthetic oligonucleotide
cucgucaagcacaucggca

SEQ ID NO: 411581 - RNA, 19 nt, Artificial Sequence
  Description of Artificial Sequence: Synthetic oligonucleotide
aaaccacagcgggucaucu

SEQ ID NO: 411582 - RNA, 19 nt, Artificial Sequence
  Description of Artificial Sequence: Synthetic oligonucleotide
ugagcgggaaggccuggga

SEQ ID NO: 411583 - RNA, 19 nt, Artificial Sequence
  Description of Artificial Sequence: Synthetic oligonucleotide
acaccaacugucuggcaaa

SEQ ID NO: 411584 - RNA, 19 nt, Artificial Sequence
  Description of Artificial Sequence: Synthetic oligonucleotide
cuuucucagaggucuguga

SEQ ID NO: 411585 - RNA, 19 nt, Artificial Sequence
  Description of Artificial Sequence: Synthetic oligonucleotide
gaggccgcgucagaccugg

SEQ ID NO: 411586 - RNA, 19 nt, Artificial Sequence
  Description of Artificial Sequence: Synthetic oligonucleotide
guagaaugccugaccguag

SEQ ID NO: 411587 - RNA, 19 nt, Artificial Sequence
  Description of Artificial Sequence: Synthetic oligonucleotide
cacacugcuugucucauaa

SEQ ID NO: 411588 - RNA, 19 nt, Artificial Sequence
  Description of Artificial Sequence: Synthetic oligonucleotide
ugccugaccguagacucug

SEQ ID NO: 411589 - RNA, 19 nt, Artificial Sequence
  Description of Artificial Sequence: Synthetic oligonucleotide
cuaccaagucgcuauaagu

SEQ ID NO: 411590 - RNA, 19 nt, Artificial Sequence
  Description of Artificial Sequence: Synthetic oligonucleotide
ccaagucgcuauaagugag

SEQ ID NO: 411591 - RNA, 19 nt, Artificial Sequence
  Description of Artificial Sequence: Synthetic oligonucleotide
ggggugguuuuccucagag

SEQ ID NO: 411592 - RNA, 19 nt, Artificial Sequence
  Description of Artificial Sequence: Synthetic oligonucleotide
uccggaucacagggaaagg

SEQ ID NO: 411593 - RNA, 19 nt, Artificial Sequence
  Description of Artificial Sequence: Synthetic oligonucleotide
gaaggaaauuugggagggc

SEQ ID NO: 411594 - RNA, 19 nt, Artificial Sequence
  Description of Artificial Sequence: Synthetic oligonucleotide
cagaccccuauagagauga

SEQ ID NO: 411595 - RNA, 19 nt, Artificial Sequence
  Description of Artificial Sequence: Synthetic oligonucleotide
gagccgcucuaucacacuc

SEQ ID NO: 411596 - RNA, 19 nt, Artificial Sequence
  Description of Artificial Sequence: Synthetic oligonucleotide
acgccaaggagaucacaca

SEQ ID NO: 411597 - RNA, 19 nt, Artificial Sequence
  Description of Artificial Sequence: Synthetic oligonucleotide
gcuauaagugagcaccauc

SEQ ID NO: 411598 - RNA, 19 nt, Artificial Sequence
  Description of Artificial Sequence: Synthetic oligonucleotide
cucacuugccugcugggca

SEQ ID NO: 411599 - RNA, 19 nt, Artificial Sequence
  Description of Artificial Sequence: Synthetic oligonucleotide
accaucuauaacgguguca

SEQ ID NO: 411600 - RNA, 19 nt, Artificial Sequence
  Description of Artificial Sequence: Synthetic oligonucleotide
accucgucaagcacaucgg

SEQ ID NO: 411601 - RNA, 19 nt, Artificial Sequence
  Description of Artificial Sequence: Synthetic oligonucleotide
uacaaagugcgagcaacuu

SEQ ID NO: 411602 - RNA, 19 nt, Artificial Sequence
  Description of Artificial Sequence: Synthetic oligonucleotide
gguauauuccuggaagcca

SEQ ID NO: 411603 - RNA, 19 nt, Artificial Sequence
  Description of Artificial Sequence: Synthetic oligonucleotide
gacgaucauaaagcugcug

SEQ ID NO: 411604 - RNA, 19 nt, Artificial Sequence
  Description of Artificial Sequence: Synthetic oligonucleotide
cauggguggcuauguacuc

SEQ ID NO: 411605 - RNA, 19 nt, Artificial Sequence
  Description of Artificial Sequence: Synthetic oligonucleotide
cauggagaccaagugguca

SEQ ID NO: 411606 - RNA, 19 nt, Artificial Sequence
  Description of Artificial Sequence: Synthetic oligonucleotide
caaucaucggcuugguaua

SEQ ID NO: 411607 - RNA, 19 nt, Artificial Sequence
  Description of Artificial Sequence: Synthetic oligonucleotide
gacccucugcuuucacacc

SEQ ID NO: 411608 - RNA, 19 nt, Artificial Sequence
  Description of Artificial Sequence: Synthetic oligonucleotide
aaucaucggcuugguauau

SEQ ID NO: 411609 - RNA, 19 nt, Artificial Sequence
  Description of Artificial Sequence: Synthetic oligonucleotide
gagaaguacaggugacugu

SEQ ID NO: 411610 - RNA, 19 nt, Artificial Sequence
  Description of Artificial Sequence: Synthetic oligonucleotide
caggcuuugcacugccuuc

SEQ ID NO: 411611 - RNA, 19 nt, Artificial Sequence
  Description of Artificial Sequence: Synthetic oligonucleotide
uuaggagguuguccucaaa

SEQ ID NO: 411612 - RNA, 19 nt, Artificial Sequence
  Description of Artificial Sequence: Synthetic oligonucleotide
ucaacccaaccaggagccg

SEQ ID NO: 411613 - RNA, 19 nt, Artificial Sequence
  Description of Artificial Sequence: Synthetic oligonucleotide
acacgcucacagauguggg

SEQ ID NO: 411614 - RNA, 19 nt, Artificial Sequence
  Description of Artificial Sequence: Synthetic oligonucleotide
auauggacacccugucauu

SEQ ID NO: 411615 - RNA, 19 nt, Artificial Sequence
  Description of Artificial Sequence: Synthetic oligonucleotide
accgaucaaucuucucacu

SEQ ID NO: 411616 - RNA, 19 nt, Artificial Sequence
  Description of Artificial Sequence: Synthetic oligonucleotide
ugagcacggaaccgaucaa

SEQ ID NO: 411617 - RNA, 19 nt, Artificial Sequence
  Description of Artificial Sequence: Synthetic oligonucleotide
auguuaccaacugcaaaau

SEQ ID NO: 411618 - RNA, 19 nt, Artificial Sequence
  Description of Artificial Sequence: Synthetic oligonucleotide
uuggaaccagcuggggucu

SEQ ID NO: 411619 - RNA, 19 nt, Artificial Sequence
  Description of Artificial Sequence: Synthetic oligonucleotide
ugacacgcucacagaugug

SEQ ID NO: 411620 - RNA, 19 nt, Artificial Sequence
  Description of Artificial Sequence: Synthetic oligonucleotide
gaccugugagaaccugcug

SEQ ID NO: 411621 - RNA, 19 nt, Artificial Sequence
  Description of Artificial Sequence: Synthetic oligonucleotide
aguggucaaucaucggcuu

SEQ ID NO: 411622 - RNA, 19 nt, Artificial Sequence
  Description of Artificial Sequence: Synthetic oligonucleotide
guucacagaggccgcguca

SEQ ID NO: 411623 - RNA, 19 nt, Artificial Sequence
  Description of Artificial Sequence: Synthetic oligonucleotide
aaagggcauucuggaaagu

SEQ ID NO: 411624 - RNA, 19 nt, Artificial Sequence
  Description of Artificial Sequence: Synthetic oligonucleotide
caguuagauauguuaccaa

SEQ ID NO: 411625 - RNA, 19 nt, Artificial Sequence
  Description of Artificial Sequence: Synthetic oligonucleotide
agaucgccuucaaacuguc

SEQ ID NO: 411626 - RNA, 19 nt, Artificial Sequence
  Description of Artificial Sequence: Synthetic oligonucleotide
augugggcuucaauuagca

SEQ ID NO: 411627 - RNA, 19 nt, Artificial Sequence
  Description of Artificial Sequence: Synthetic oligonucleotide
cgaagugcaagagagucag

SEQ ID NO: 411628 - RNA, 19 nt, Artificial Sequence
  Description of Artificial Sequence: Synthetic oligonucleotide
gugcguuccaguucacaga

SEQ ID NO: 411629 - RNA, 19 nt, Artificial Sequence
  Description of Artificial Sequence: Synthetic oligonucleotide
ggcuucaauuagcacuggc

SEQ ID NO: 411630 - RNA, 19 nt, Artificial Sequence
  Description of Artificial Sequence: Synthetic oligonucleotide
agcuuacauccuugggaga

SEQ ID NO: 411631 - RNA, 19 nt, Artificial Sequence
  Description of Artificial Sequence: Synthetic oligonucleotide
guaggugggcagucccaag

SEQ ID NO: 411632 - RNA, 19 nt, Artificial Sequence
  Description of Artificial Sequence: Synthetic oligonucleotide
gagaaaccacagcggguca

SEQ ID NO: 411633 - RNA, 19 nt, Artificial Sequence
  Description of Artificial Sequence: Synthetic oligonucleotide
gguugugcagugccuuugc

SEQ ID NO: 411634 - RNA, 19 nt, Artificial Sequence
  Description of Artificial Sequence: Synthetic oligonucleotide
gagcauccuucugaauccc

SEQ ID NO: 411635 - RNA, 19 nt, Artificial Sequence
  Description of Artificial Sequence: Synthetic oligonucleotide
cacagaggccgcgucagac

SEQ ID NO: 411636 - RNA, 19 nt, Artificial Sequence
  Description of Artificial Sequence: Synthetic oligonucleotide
cugcaaugcuugaccgaag

SEQ ID NO: 411637 - RNA, 19 nt, Artificial Sequence
  Description of Artificial Sequence: Synthetic oligonucleotide
ugucaccuuuaaagggcau

SEQ ID NO: 411638 - RNA, 19 nt, Artificial Sequence
  Description of Artificial Sequence: Synthetic oligonucleotide
caagcacaucggcaucuac

SEQ ID NO: 411639 - RNA, 19 nt, Artificial Sequence
  Description of Artificial Sequence: Synthetic oligonucleotide
gguuccgcugcccucuuac

SEQ ID NO: 411640 - RNA, 19 nt, Artificial Sequence
  Description of Artificial Sequence: Synthetic oligonucleotide
cuggaauggcuugaaacaa

SEQ ID NO: 411641 - RNA, 19 nt, Artificial Sequence
  Description of Artificial Sequence: Synthetic oligonucleotide
gaaugccugaccguagacu

SEQ ID NO: 411642 - RNA, 19 nt, Artificial Sequence
  Description of Artificial Sequence: Synthetic oligonucleotide
aggcuuugcacugccuucu

SEQ ID NO: 411643 - RNA, 19 nt, Artificial Sequence
  Description of Artificial Sequence: Synthetic oligonucleotide
agaucuggacucaguguca

SEQ ID NO: 411644 - RNA, 19 nt, Artificial Sequence
  Description of Artificial Sequence: Synthetic oligonucleotide
cggugucaccuuuaaaggg

SEQ ID NO: 411645 - RNA, 19 nt, Artificial Sequence
  Description of Artificial Sequence: Synthetic oligonucleotide
gagaucgccuucaaacugu

SEQ ID NO: 411646 - RNA, 19 nt, Artificial Sequence
  Description of Artificial Sequence: Synthetic oligonucleotide
gaaugggagggcugucgaa

SEQ ID NO: 411647 - RNA, 19 nt, Artificial Sequence
  Description of Artificial Sequence: Synthetic oligonucleotide
ucugugaagccagcuugua

SEQ ID NO: 411648 - RNA, 19 nt, Artificial Sequence
  Description of Artificial Sequence: Synthetic oligonucleotide
gcuagguaggcaaggacuc

SEQ ID NO: 411649 - RNA, 19 nt, Artificial Sequence
  Description of Artificial Sequence: Synthetic oligonucleotide
auggacacccugucauuua

SEQ ID NO: 411650 - RNA, 19 nt, Artificial Sequence
  Description of Artificial Sequence: Synthetic oligonucleotide
gagugucauuuaucagcca

SEQ ID NO: 411651 - RNA, 19 nt, Artificial Sequence
  Description of Artificial Sequence: Synthetic oligonucleotide
cagagguaaagaugucgaa

SEQ ID NO: 411652 - RNA, 19 nt, Artificial Sequence
  Description of Artificial Sequence: Synthetic oligonucleotide
aggaauauccgggcagcau

SEQ ID NO: 411653 - RNA, 19 nt, Artificial Sequence
  Description of Artificial Sequence: Synthetic oligonucleotide
ggugggcagucccaagagc

SEQ ID NO: 411654 - RNA, 19 nt, Artificial Sequence
  Description of Artificial Sequence: Synthetic oligonucleotide
gagcgggaaggccugggaa

SEQ ID NO: 411655 - RNA, 19 nt, Artificial Sequence
  Description of Artificial Sequence: Synthetic oligonucleotide
cugcgguggggaacauggg

SEQ ID NO: 411656 - RNA, 19 nt, Artificial Sequence
  Description of Artificial Sequence: Synthetic oligonucleotide
agaaaccacagcgggucau

SEQ ID NO: 411657 - RNA, 19 nt, Artificial Sequence
  Description of Artificial Sequence: Synthetic oligonucleotide
ccagcagaagugucaaguc

SEQ ID NO: 411658 - RNA, 19 nt, Artificial Sequence
  Description of Artificial Sequence: Synthetic oligonucleotide
gggcacgccaaggagauca

SEQ ID NO: 411659 - RNA, 19 nt, Artificial Sequence
  Description of Artificial Sequence: Synthetic oligonucleotide
gcuuacauccuugggagaa

SEQ ID NO: 411660 - RNA, 19 nt, Artificial Sequence
  Description of Artificial Sequence: Synthetic oligonucleotide
ggaaugggagggcugucga

SEQ ID NO: 411661 - RNA, 19 nt, Artificial Sequence
  Description of Artificial Sequence: Synthetic oligonucleotide
ggcaaauucuugagaucgc

SEQ ID NO: 411662 - RNA, 19 nt, Artificial Sequence
  Description of Artificial Sequence: Synthetic oligonucleotide
gugacaggccuguuugucu

SEQ ID NO: 411663 - RNA, 19 nt, Artificial Sequence
  Description of Artificial Sequence: Synthetic oligonucleotide
accgugucuuguguguaga

SEQ ID NO: 411664 - RNA, 19 nt, Artificial Sequence
  Description of Artificial Sequence: Synthetic oligonucleotide
agcacagaccccacuacuu

SEQ ID NO: 411665 - RNA, 19 nt, Artificial Sequence
  Description of Artificial Sequence: Synthetic oligonucleotide
gcacccaaggcugaggaga

SEQ ID NO: 411666 - RNA, 19 nt, Artificial Sequence
  Description of Artificial Sequence: Synthetic oligonucleotide
cugugacacaauguuucca

SEQ ID NO: 411667 - RNA, 19 nt, Artificial Sequence
  Description of Artificial Sequence: Synthetic oligonucleotide
ggcuugaaacaaagugaag

SEQ ID NO: 411668 - RNA, 19 nt, Artificial Sequence
  Description of Artificial Sequence: Synthetic oligonucleotide
caauuccgugggagacagg

SEQ ID NO: 411669 - RNA, 19 nt, Artificial Sequence
  Description of Artificial Sequence: Synthetic oligonucleotide
cuucccucguucuccugga

SEQ ID NO: 411670 - RNA, 19 nt, Artificial Sequence
  Description of Artificial Sequence: Synthetic oligonucleotide
gcuucaauuagcacuggcu

SEQ ID NO: 411671 - RNA, 19 nt, Artificial Sequence
  Description of Artificial Sequence: Synthetic oligonucleotide
ccucgucaagcacaucggc

SEQ ID NO: 411672 - RNA, 19 nt, Artificial Sequence
  Description of Artificial Sequence: Synthetic oligonucleotide
guaucuguaggugggcagu

SEQ ID NO: 411673 - RNA, 19 nt, Artificial Sequence
  Description of Artificial Sequence: Synthetic oligonucleotide
cacggacccaggcucccac

SEQ ID NO: 411674 - RNA, 19 nt, Artificial Sequence
  Description of Artificial Sequence: Synthetic oligonucleotide
ggaaccgaucaaucuucuc

SEQ ID NO: 411675 - RNA, 19 nt, Artificial Sequence
  Description of Artificial Sequence: Synthetic oligonucleotide
cucuuacaacuggaagcuc

SEQ ID NO: 411676 - RNA, 19 nt, Artificial Sequence
  Description of Artificial Sequence: Synthetic oligonucleotide
uucccucguucuccuggaa

SEQ ID NO: 411677 - RNA, 19 nt, Artificial Sequence
  Description of Artificial Sequence: Synthetic oligonucleotide
cacagcgggucaucuccuc

SEQ ID NO: 411678 - RNA, 19 nt, Artificial Sequence
  Description of Artificial Sequence: Synthetic oligonucleotide
gucaagcacaucggcaucu

SEQ ID NO: 411679 - RNA, 19 nt, Artificial Sequence
  Description of Artificial Sequence: Synthetic oligonucleotide
aguucuccggauggcccca

SEQ ID NO: 411680 - RNA, 19 nt, Artificial Sequence
  Description of Artificial Sequence: Synthetic oligonucleotide
agcauccuucugaaucccu

SEQ ID NO: 411681 - RNA, 19 nt, Artificial Sequence
  Description of Artificial Sequence: Synthetic oligonucleotide
cacccaaggcugaggagaa

SEQ ID NO: 411682 - RNA, 19 nt, Artificial Sequence
  Description of Artificial Sequence: Synthetic oligonucleotide
aggugcguuccaguucaca

SEQ ID NO: 411683 - RNA, 19 nt, Artificial Sequence
  Description of Artificial Sequence: Synthetic oligonucleotide
caacaauguugggaauaca

SEQ ID NO: 411684 - RNA, 19 nt, Artificial Sequence
  Description of Artificial Sequence: Synthetic oligonucleotide
auagucugcuguagucaaa

SEQ ID NO: 411685 - RNA, 19 nt, Artificial Sequence
  Description of Artificial Sequence: Synthetic oligonucleotide
agccgcucuaucacacucu

SEQ ID NO: 411686 - RNA, 19 nt, Artificial Sequence
  Description of Artificial Sequence: Synthetic oligonucleotide
agaccccuauagagaugac

SEQ ID NO: 411687 - RNA, 19 nt, Artificial Sequence
  Description of Artificial Sequence: Synthetic oligonucleotide
gugucaaguccaugaggcu

SEQ ID NO: 411688 - RNA, 19 nt, Artificial Sequence
  Description of Artificial Sequence: Synthetic oligonucleotide
gaucuggacucagugucau

SEQ ID NO: 411689 - RNA, 19 nt, Artificial Sequence
  Description of Artificial Sequence: Synthetic oligonucleotide
cacugccaaccaucuauaa

SEQ ID NO: 411690 - RNA, 19 nt, Artificial Sequence
  Description of Artificial Sequence: Synthetic oligonucleotide
augcuugaccgaaguuucu

SEQ ID NO: 411691 - RNA, 19 nt, Artificial Sequence
  Description of Artificial Sequence: Synthetic oligonucleotide
caucggcaucuaccaaguc

SEQ ID NO: 411692 - RNA, 19 nt, Artificial Sequence
  Description of Artificial Sequence: Synthetic oligonucleotide
agaugaccccugagaagga

SEQ ID NO: 411693 - RNA, 19 nt, Artificial Sequence
  Description of Artificial Sequence: Synthetic oligonucleotide
ggagaccaaguggucaauc

SEQ ID NO: 411694 - RNA, 19 nt, Artificial Sequence
  Description of Artificial Sequence: Synthetic oligonucleotide
caucccagcuagguaggca

SEQ ID NO: 411695 - RNA, 19 nt, Artificial Sequence
  Description of Artificial Sequence: Synthetic oligonucleotide
ccuuccagccauccuacca

SEQ ID NO: 411696 - RNA, 19 nt, Artificial Sequence
  Description of Artificial Sequence: Synthetic oligonucleotide
gccgcgucagaccugggaa

SEQ ID NO: 411697 - RNA, 19 nt, Artificial Sequence
  Description of Artificial Sequence: Synthetic oligonucleotide
augccugaccguagacucu

SEQ ID NO: 411698 - RNA, 19 nt, Artificial Sequence
  Description of Artificial Sequence: Synthetic oligonucleotide
cagaggccgcgucagaccu

SEQ ID NO: 411699 - RNA, 19 nt, Artificial Sequence
  Description of Artificial Sequence: Synthetic oligonucleotide
gccgcucuaucacacucuc

SEQ ID NO: 411700 - RNA, 19 nt, Artificial Sequence
  Description of Artificial Sequence: Synthetic oligonucleotide
gagcacggaaccgaucaau

SEQ ID NO: 411701 - RNA, 19 nt, Artificial Sequence
  Description of Artificial Sequence: Synthetic oligonucleotide
agaugucgaagcacccauu

SEQ ID NO: 411702 - RNA, 19 nt, Artificial Sequence
  Description of Artificial Sequence: Synthetic oligonucleotide
aucaucggcuugguauauu

SEQ ID NO: 411703 - RNA, 19 nt, Artificial Sequence
  Description of Artificial Sequence: Synthetic oligonucleotide
cagaccaccgcaccacagu

SEQ ID NO: 411704 - RNA, 19 nt, Artificial Sequence
  Description of Artificial Sequence: Synthetic oligonucleotide
caccgcaccacaguguccu

SEQ ID NO: 411705 - RNA, 19 nt, Artificial Sequence
  Description of Artificial Sequence: Synthetic oligonucleotide
cuauaacggugucaccuuu

SEQ ID NO: 411706 - RNA, 19 nt, Artificial Sequence
  Description of Artificial Sequence: Synthetic oligonucleotide
caucuaccaagucgcuaua

SEQ ID NO: 411707 - RNA, 19 nt, Artificial Sequence
  Description of Artificial Sequence: Synthetic oligonucleotide
ggcaccgugucuugugugu

SEQ ID NO: 411708 - RNA, 19 nt, Artificial Sequence
  Description of Artificial Sequence: Synthetic oligonucleotide
caacaacaauguugggaau

SEQ ID NO: 411709 - RNA, 19 nt, Artificial Sequence
  Description of Artificial Sequence: Synthetic oligonucleotide
ugguuccgcugcccucuua

SEQ ID NO: 411710 - RNA, 19 nt, Artificial Sequence
  Description of Artificial Sequence: Synthetic oligonucleotide
ccugaccguagacucuguc

SEQ ID NO: 411711 - RNA, 19 nt, Artificial Sequence
  Description of Artificial Sequence: Synthetic oligonucleotide
ggguggcuauguacucagg

SEQ ID NO: 411712 - RNA, 19 nt, Artificial Sequence
  Description of Artificial Sequence: Synthetic oligonucleotide
gaccaccgcaccacagugu

SEQ ID NO: 411713 - RNA, 19 nt, Artificial Sequence
  Description of Artificial Sequence: Synthetic oligonucleotide
agaggccgcgucagaccug

SEQ ID NO: 411714 - RNA, 19 nt, Artificial Sequence
  Description of Artificial Sequence: Synthetic oligonucleotide
ggcaucuaccaagucgcua

SEQ ID NO: 411715 - RNA, 19 nt, Artificial Sequence
  Description of Artificial Sequence: Synthetic oligonucleotide
cccagaccccuauagagau

SEQ ID NO: 411716 - RNA, 19 nt, Artificial Sequence
  Description of Artificial Sequence: Synthetic oligonucleotide
ccgugggagacagggcacc

SEQ ID NO: 411717 - RNA, 19 nt, Artificial Sequence
  Description of Artificial Sequence: Synthetic oligonucleotide
gcaagagagucaggaauau

SEQ ID NO: 411718 - RNA, 19 nt, Artificial Sequence
  Description of Artificial Sequence: Synthetic oligonucleotide
gccaaccaucuauaacggu

SEQ ID NO: 411719 - RNA, 19 nt, Artificial Sequence
  Description of Artificial Sequence: Synthetic oligonucleotide
ggucugugacacaauguuu

SEQ ID NO: 411720 - RNA, 19 nt, Artificial Sequence
  Description of Artificial Sequence: Synthetic oligonucleotide
cgucaagcacaucggcauc

SEQ ID NO: 411721 - RNA, 19 nt, Artificial Sequence
  Description of Artificial Sequence: Synthetic oligonucleotide
cgcgucagaccugggaaac

SEQ ID NO: 411722 - RNA, 19 nt, Artificial Sequence
  Description of Artificial Sequence: Synthetic oligonucleotide
ugggcacgccaaggagauc

SEQ ID NO: 411723 - RNA, 19 nt, Artificial Sequence
  Description of Artificial Sequence: Synthetic oligonucleotide
gugaagccucagggcagga

SEQ ID NO: 411724 - RNA, 19 nt, Artificial Sequence
  Description of Artificial Sequence: Synthetic oligonucleotide
gcgagcaacuucacacaaa

SEQ ID NO: 411725 - RNA, 19 nt, Artificial Sequence
  Description of Artificial Sequence: Synthetic oligonucleotide
gcgucagaccugggaaaca

SEQ ID NO: 411726 - RNA, 19 nt, Artificial Sequence
  Description of Artificial Sequence: Synthetic oligonucleotide
ccgcgucagaccugggaaa

SEQ ID NO: 411727 - RNA, 19 nt, Artificial Sequence
  Description of Artificial Sequence: Synthetic oligonucleotide
ccgcugcccucuuacaacu

SEQ ID NO: 411728 - RNA, 19 nt, Artificial Sequence
  Description of Artificial Sequence: Synthetic oligonucleotide
caccaacugucuggcaaau

SEQ ID NO: 411729 - RNA, 19 nt, Artificial Sequence
  Description of Artificial Sequence: Synthetic oligonucleotide
cggaaccgaucaaucuucu

SEQ ID NO: 411730 - RNA, 19 nt, Artificial Sequence
  Description of Artificial Sequence: Synthetic oligonucleotide
cucguacaccuggcuugcu

SEQ ID NO: 411731 - RNA, 19 nt, Artificial Sequence
  Description of Artificial Sequence: Synthetic oligonucleotide
ccgugucuuguguguagau

SEQ ID NO: 411732 - RNA, 19 nt, Artificial Sequence
  Description of Artificial Sequence: Synthetic oligonucleotide
gugguuccgcugcccucuu

SEQ ID NO: 411733 - RNA, 19 nt, Artificial Sequence
  Description of Artificial Sequence: Synthetic oligonucleotide
cacuugccugcugggcaau

SEQ ID NO: 411734 - RNA, 19 nt, Artificial Sequence
  Description of Artificial Sequence: Synthetic oligonucleotide
ccgcucuaucacacucucu

SEQ ID NO: 411735 - RNA, 19 nt, Artificial Sequence
  Description of Artificial Sequence: Synthetic oligonucleotide
cgcuauaagugagcaccau

SEQ ID NO: 411736 - RNA, 19 nt, Artificial Sequence
  Description of Artificial Sequence: Synthetic oligonucleotide
gccugaccguagacucugu

SEQ ID NO: 411737 - RNA, 19 nt, Artificial Sequence
  Description of Artificial Sequence: Synthetic oligonucleotide
cggcaucuaccaagucgcu

SEQ ID NO: 411738 - RNA, 19 nt, Artificial Sequence
  Description of Artificial Sequence: Synthetic oligonucleotide
ccgagacagcugccuccuu

SEQ ID NO: 411739 - RNA, 19 nt, Artificial Sequence
  Description of Artificial Sequence: Synthetic oligonucleotide
cccugucauuuaggagguu

SEQ ID NO: 411740 - RNA, 19 nt, Artificial Sequence
  Description of Artificial Sequence: Synthetic oligonucleotide
uuaacaccaaaucagacug

SEQ ID NO: 411741 - RNA, 19 nt, Artificial Sequence
  Description of Artificial Sequence: Synthetic oligonucleotide
agcguuguaaaauauaauc

SEQ ID NO: 411742 - RNA, 19 nt, Artificial Sequence
  Description of Artificial Sequence: Synthetic oligonucleotide
auuaccuacagguugaaag

SEQ ID NO: 411743 - RNA, 19 nt, Artificial Sequence
  Description of Artificial Sequence: Synthetic oligonucleotide
aauuuuggcaccuaaugga

SEQ ID NO: 411744 - RNA, 19 nt, Artificial Sequence
  Description of Artificial Sequence: Synthetic oligonucleotide
ugaaguuuaguaaagucac

SEQ ID NO: 411745 - RNA, 19 nt, Artificial Sequence
  Description of Artificial Sequence: Synthetic oligonucleotide
ucuuuuaacuucacgaagc

SEQ ID NO: 411746 - RNA, 19 nt, Artificial Sequence
  Description of Artificial Sequence: Synthetic oligonucleotide
aaacccagguccuauuacc

SEQ ID NO: 411747 - RNA, 19 nt, Artificial Sequence
  Description of Artificial Sequence: Synthetic oligonucleotide
ucuccuugaaaccagaacu

SEQ ID NO: 411748 - RNA, 19 nt, Artificial Sequence
  Description of Artificial Sequence: Synthetic oligonucleotide
ugaaauagcagucucccug

SEQ ID NO: 411749 - RNA, 19 nt, Artificial Sequence
  Description of Artificial Sequence: Synthetic oligonucleotide
uuucuaacugucuugaacu

SEQ ID NO: 411750 - RNA, 19 nt, Artificial Sequence
  Description of Artificial Sequence: Synthetic oligonucleotide
aauugugcuuccucuaggg

SEQ ID NO: 411751 - RNA, 19 nt, Artificial Sequence
  Description of Artificial Sequence: Synthetic oligonucleotide
ucuaguuuaacaccaaauc

SEQ ID NO: 411752 - RNA, 19 nt, Artificial Sequence
  Description of Artificial Sequence: Synthetic oligonucleotide
aacuucacgaagcacagca

SEQ ID NO: 411753 - RNA, 19 nt, Artificial Sequence
  Description of Artificial Sequence: Synthetic oligonucleotide
auguuuauaaaaugacgac

SEQ ID NO: 411754 - RNA, 19 nt, Artificial Sequence
  Description of Artificial Sequence: Synthetic oligonucleotide
uuaccuacagguugaaagg

SEQ ID NO: 411755 - RNA, 19 nt, Artificial Sequence
  Description of Artificial Sequence: Synthetic oligonucleotide
uuuaacaccaaaucagacu

SEQ ID NO: 411756 - RNA, 19 nt, Artificial Sequence
  Description of Artificial Sequence: Synthetic oligonucleotide
aaagucacguuguaggcug

SEQ ID NO: 411757 - RNA, 19 nt, Artificial Sequence
  Description of Artificial Sequence: Synthetic oligonucleotide
uaaaacgaggcugugaacc

SEQ ID NO: 411758 - RNA, 19 nt, Artificial Sequence
  Description of Artificial Sequence: Synthetic oligonucleotide
uauacugccggcuucccgg

SEQ ID NO: 411759 - RNA, 19 nt, Artificial Sequence
  Description of Artificial Sequence: Synthetic oligonucleotide
guuuaguaaagucacguug

SEQ ID NO: 411760 - RNA, 19 nt, Artificial Sequence
  Description of Artificial Sequence: Synthetic oligonucleotide
uccuauuaccuacagguug

SEQ ID NO: 411761 - RNA, 19 nt, Artificial Sequence
  Description of Artificial Sequence: Synthetic oligonucleotide
gaaauagcagucucccugg

SEQ ID NO: 411762 - RNA, 19 nt, Artificial Sequence
  Description of Artificial Sequence: Synthetic oligonucleotide
uuggauccuaaccaggucc

SEQ ID NO: 411763 - RNA, 19 nt, Artificial Sequence
  Description of Artificial Sequence: Synthetic oligonucleotide
acuacugcuuucuacuaac

SEQ ID NO: 411764 - RNA, 19 nt, Artificial Sequence
  Description of Artificial Sequence: Synthetic oligonucleotide
acuuaggucauuucauuuc

SEQ ID NO: 411765 - RNA, 19 nt, Artificial Sequence
  Description of Artificial Sequence: Synthetic oligonucleotide
acugugaagagucuggugu

SEQ ID NO: 411766 - RNA, 19 nt, Artificial Sequence
  Description of Artificial Sequence: Synthetic oligonucleotide
ggccuaauaaaccagagcc

SEQ ID NO: 411767 - RNA, 19 nt, Artificial Sequence
  Description of Artificial Sequence: Synthetic oligonucleotide
agugauugauuauucaaca

SEQ ID NO: 411768 - RNA, 19 nt, Artificial Sequence
  Description of Artificial Sequence: Synthetic oligonucleotide
ucuugaaaccaacaugcca

SEQ ID NO: 411769 - RNA, 19 nt, Artificial Sequence
  Description of Artificial Sequence: Synthetic oligonucleotide
agggaagccccguaaagcc

SEQ ID NO: 411770 - RNA, 19 nt, Artificial Sequence
  Description of Artificial Sequence: Synthetic oligonucleotide
ugucauuggaucagggaag

SEQ ID NO: 411771 - RNA, 19 nt, Artificial Sequence
  Description of Artificial Sequence: Synthetic oligonucleotide
ugugaaccagccaaaacac

SEQ ID NO: 411772 - RNA, 19 nt, Artificial Sequence
  Description of Artificial Sequence: Synthetic oligonucleotide
uuaugcagugugaggaagg

SEQ ID NO: 411773 - RNA, 19 nt, Artificial Sequence
  Description of Artificial Sequence: Synthetic oligonucleotide
uguagguacagccuggguc

SEQ ID NO: 411774 - RNA, 19 nt, Artificial Sequence
  Description of Artificial Sequence: Synthetic oligonucleotide
auaaaccagagccuggcag

SEQ ID NO: 411775 - RNA, 19 nt, Artificial Sequence
  Description of Artificial Sequence: Synthetic oligonucleotide
uacugcuuucuacuaacgg

SEQ ID NO: 411776 - RNA, 19 nt, Artificial Sequence
  Description of Artificial Sequence: Synthetic oligonucleotide
ucuuuaugcagcuccucgg

SEQ ID NO: 411777 - RNA, 19 nt, Artificial Sequence
  Description of Artificial Sequence: Synthetic oligonucleotide
aaguuuaguaaagucacgu

SEQ ID NO: 411778 - RNA, 19 nt, Artificial Sequence
  Description of Artificial Sequence: Synthetic oligonucleotide
ugauugauuauucaacauu

SEQ ID NO: 411779 - RNA, 19 nt, Artificial Sequence
  Description of Artificial Sequence: Synthetic oligonucleotide
aauaucauggggccuaaua

SEQ ID NO: 411780 - RNA, 19 nt, Artificial Sequence
  Description of Artificial Sequence: Synthetic oligonucleotide
aaaaugacgacaaggagua

SEQ ID NO: 411781 - RNA, 19 nt, Artificial Sequence
  Description of Artificial Sequence: Synthetic oligonucleotide
acuaaaacgaggcugugaa

SEQ ID NO: 411782 - RNA, 19 nt, Artificial Sequence
  Description of Artificial Sequence: Synthetic oligonucleotide
gguacuuguagguacagcc

SEQ ID NO: 411783 - RNA, 19 nt, Artificial Sequence
  Description of Artificial Sequence: Synthetic oligonucleotide
uggaacuaaaacgaggcug

SEQ ID NO: 411784 - RNA, 19 nt, Artificial Sequence
  Description of Artificial Sequence: Synthetic oligonucleotide
ugagugauugauuauucaa

SEQ ID NO: 411785 - RNA, 19 nt, Artificial Sequence
  Description of Artificial Sequence: Synthetic oligonucleotide
uauuguguaugaacgggug

SEQ ID NO: 411786 - RNA, 19 nt, Artificial Sequence
  Description of Artificial Sequence: Synthetic oligonucleotide
ucuugaacugaaacccagg

SEQ ID NO: 411787 - RNA, 19 nt, Artificial Sequence
  Description of Artificial Sequence: Synthetic oligonucleotide
aacucgaccucauugugga

SEQ ID NO: 411788 - RNA, 19 nt, Artificial Sequence
  Description of Artificial Sequence: Synthetic oligonucleotide
caccuaauggaauagagca

SEQ ID NO: 411789 - RNA, 19 nt, Artificial Sequence
  Description of Artificial Sequence: Synthetic oligonucleotide
ugaacgggugcacacagca

SEQ ID NO: 411790 - RNA, 19 nt, Artificial Sequence
  Description of Artificial Sequence: Synthetic oligonucleotide
uaugaacgggugcacacag

SEQ ID NO: 411791 - RNA, 19 nt, Artificial Sequence
  Description of Artificial Sequence: Synthetic oligonucleotide
aacgggugcacacagcaca

SEQ ID NO: 411792 - RNA, 19 nt, Artificial Sequence
  Description of Artificial Sequence: Synthetic oligonucleotide
cuaguuuaacaccaaauca

SEQ ID NO: 411793 - RNA, 19 nt, Artificial Sequence
  Description of Artificial Sequence: Synthetic oligonucleotide
aagugucgggaucucugcc

SEQ ID NO: 411794 - RNA, 19 nt, Artificial Sequence
  Description of Artificial Sequence: Synthetic oligonucleotide
uuauuguguaugaacgggu

SEQ ID NO: 411795 - RNA, 19 nt, Artificial Sequence
  Description of Artificial Sequence: Synthetic oligonucleotide
uucauuucagggcuggccu

SEQ ID NO: 411796 - RNA, 19 nt, Artificial Sequence
  Description of Artificial Sequence: Synthetic oligonucleotide
caugaaguuuaguaaaguc

SEQ ID NO: 411797 - RNA, 19 nt, Artificial Sequence
  Description of Artificial Sequence: Synthetic oligonucleotide
caugaaauagcagucuccc

SEQ ID NO: 411798 - RNA, 19 nt, Artificial Sequence
  Description of Artificial Sequence: Synthetic oligonucleotide
gucuacacuacccuugucc

SEQ ID NO: 411799 - RNA, 19 nt, Artificial Sequence
  Description of Artificial Sequence: Synthetic oligonucleotide
aaaccagaacugucucagc

SEQ ID NO: 411800 - RNA, 19 nt, Artificial Sequence
  Description of Artificial Sequence: Synthetic oligonucleotide
agaccggacaauucgggac

SEQ ID NO: 411801 - RNA, 19 nt, Artificial Sequence
  Description of Artificial Sequence: Synthetic oligonucleotide
ucuacuaacgggugugagc

SEQ ID NO: 411802 - RNA, 19 nt, Artificial Sequence
  Description of Artificial Sequence: Synthetic oligonucleotide
ugacuucuaaagagaaugc

SEQ ID NO: 411803 - RNA, 19 nt, Artificial Sequence
  Description of Artificial Sequence: Synthetic oligonucleotide
aauauaauccaaggugccu

SEQ ID NO: 411804 - RNA, 19 nt, Artificial Sequence
  Description of Artificial Sequence: Synthetic oligonucleotide
ucuacacuacccuugucca

SEQ ID NO: 411805 - RNA, 19 nt, Artificial Sequence
  Description of Artificial Sequence: Synthetic oligonucleotide
ucucuuuuaacuucacgaa

SEQ ID NO: 411806 - RNA, 19 nt, Artificial Sequence
  Description of Artificial Sequence: Synthetic oligonucleotide
ugcuuaugcagugugagga

SEQ ID NO: 411807 - RNA, 19 nt, Artificial Sequence
  Description of Artificial Sequence: Synthetic oligonucleotide
accgccauuuuccccaugc

SEQ ID NO: 411808 - RNA, 19 nt, Artificial Sequence
  Description of Artificial Sequence: Synthetic oligonucleotide
cauuauccgagucauugag

SEQ ID NO: 411809 - RNA, 19 nt, Artificial Sequence
  Description of Artificial Sequence: Synthetic oligonucleotide
aaaacgaggcugugaacca

SEQ ID NO: 411810 - RNA, 19 nt, Artificial Sequence
  Description of Artificial Sequence: Synthetic oligonucleotide
ucccacgauaucuugaaac

SEQ ID NO: 411811 - RNA, 19 nt, Artificial Sequence
  Description of Artificial Sequence: Synthetic oligonucleotide
auaucauggggccuaauaa

SEQ ID NO: 411812 - RNA, 19 nt, Artificial Sequence
  Description of Artificial Sequence: Synthetic oligonucleotide
uguucagguacuuguaggu

SEQ ID NO: 411813 - RNA, 19 nt, Artificial Sequence
  Description of Artificial Sequence: Synthetic oligonucleotide
cuucuaaagagaaugcaga

SEQ ID NO: 411814 - RNA, 19 nt, Artificial Sequence
  Description of Artificial Sequence: Synthetic oligonucleotide
uucaugcugccacuaaagc

SEQ ID NO: 411815 - RNA, 19 nt, Artificial Sequence
  Description of Artificial Sequence: Synthetic oligonucleotide
caagguuuggggaggaaag

SEQ ID NO: 411816 - RNA, 19 nt, Artificial Sequence
  Description of Artificial Sequence: Synthetic oligonucleotide
uaauaaaccagagccuggc

SEQ ID NO: 411817 - RNA, 19 nt, Artificial Sequence
  Description of Artificial Sequence: Synthetic oligonucleotide
accaaaucagacugaaaca

SEQ ID NO: 411818 - RNA, 19 nt, Artificial Sequence
  Description of Artificial Sequence: Synthetic oligonucleotide
gacgucaccauuauccgag

SEQ ID NO: 411819 - RNA, 19 nt, Artificial Sequence
  Description of Artificial Sequence: Synthetic oligonucleotide
uucuaaagagaaugcagaa

SEQ ID NO: 411820 - RNA, 19 nt, Artificial Sequence
  Description of Artificial Sequence: Synthetic oligonucleotide
ucguagcagagcauagagg

SEQ ID NO: 411821 - RNA, 19 nt, Artificial Sequence
  Description of Artificial Sequence: Synthetic oligonucleotide
uguaugaacgggugcacac

SEQ ID NO: 411822 - RNA, 19 nt, Artificial Sequence
  Description of Artificial Sequence: Synthetic oligonucleotide
auauaauccaaggugccug

SEQ ID NO: 411823 - RNA, 19 nt, Artificial Sequence
  Description of Artificial Sequence: Synthetic oligonucleotide
ucauggggccuaauaaacc

SEQ ID NO: 411824 - RNA, 19 nt, Artificial Sequence
  Description of Artificial Sequence: Synthetic oligonucleotide
ugagcacucugccacucgg

SEQ ID NO: 411825 - RNA, 19 nt, Artificial Sequence
  Description of Artificial Sequence: Synthetic oligonucleotide
caugccgaaauaaggcucc

SEQ ID NO: 411826 - RNA, 19 nt, Artificial Sequence
  Description of Artificial Sequence: Synthetic oligonucleotide
caaccugugacaucugaag

SEQ ID NO: 411827 - RNA, 19 nt, Artificial Sequence
  Description of Artificial Sequence: Synthetic oligonucleotide
ugaaaggugucuacacuac

SEQ ID NO: 411828 - RNA, 19 nt, Artificial Sequence
  Description of Artificial Sequence: Synthetic oligonucleotide
ucugacaugcagcagcgau

SEQ ID NO: 411829 - RNA, 19 nt, Artificial Sequence
  Description of Artificial Sequence: Synthetic oligonucleotide
ucgauaucccacgauaucu

SEQ ID NO: 411830 - RNA, 19 nt, Artificial Sequence
  Description of Artificial Sequence: Synthetic oligonucleotide
caugcggguauagagaccc

SEQ ID NO: 411831 - RNA, 19 nt, Artificial Sequence
  Description of Artificial Sequence: Synthetic oligonucleotide
aucauggggccuaauaaac

SEQ ID NO: 411832 - RNA, 19 nt, Artificial Sequence
  Description of Artificial Sequence: Synthetic oligonucleotide
gagugauugauuauucaac

SEQ ID NO: 411833 - RNA, 19 nt, Artificial Sequence
  Description of Artificial Sequence: Synthetic oligonucleotide
uaucauggggccuaauaaa

SEQ ID NO: 411834 - RNA, 19 nt, Artificial Sequence
  Description of Artificial Sequence: Synthetic oligonucleotide
gaagagguauugccaagcc

SEQ ID NO: 411835 - RNA, 19 nt, Artificial Sequence
  Description of Artificial Sequence: Synthetic oligonucleotide
uguguaauugauggugcag

SEQ ID NO: 411836 - RNA, 19 nt, Artificial Sequence
  Description of Artificial Sequence: Synthetic oligonucleotide
gucguagcagagcauagag

SEQ ID NO: 411837 - RNA, 19 nt, Artificial Sequence
  Description of Artificial Sequence: Synthetic oligonucleotide
aagagguauugccaagccu

SEQ ID NO: 411838 - RNA, 19 nt, Artificial Sequence
  Description of Artificial Sequence: Synthetic oligonucleotide
aaccaguuuaggauauuuc

SEQ ID NO: 411839 - RNA, 19 nt, Artificial Sequence
  Description of Artificial Sequence: Synthetic oligonucleotide
gaaguuuaguaaagucacg

SEQ ID NO: 411840 - RNA, 19 nt, Artificial Sequence
  Description of Artificial Sequence: Synthetic oligonucleotide
uuucauuucagggcuggcc

SEQ ID NO: 411841 - RNA, 19 nt, Artificial Sequence
  Description of Artificial Sequence: Synthetic oligonucleotide
cuacaccuuacuuagguca

SEQ ID NO: 411842 - RNA, 19 nt, Artificial Sequence
  Description of Artificial Sequence: Synthetic oligonucleotide
gaggacauucugcagcgcc

SEQ ID NO: 411843 - RNA, 19 nt, Artificial Sequence
  Description of Artificial Sequence: Synthetic oligonucleotide
ucgugaugccagcucaccg

SEQ ID NO: 411844 - RNA, 19 nt, Artificial Sequence
  Description of Artificial Sequence: Synthetic oligonucleotide
aaucggugcaaauuuuguu

SEQ ID NO: 411845 - RNA, 19 nt, Artificial Sequence
  Description of Artificial Sequence: Synthetic oligonucleotide
cauuguggauaucuucucc

SEQ ID NO: 411846 - RNA, 19 nt, Artificial Sequence
  Description of Artificial Sequence: Synthetic oligonucleotide
uggugugccauucuuuccu

SEQ ID NO: 411847 - RNA, 19 nt, Artificial Sequence
  Description of Artificial Sequence: Synthetic oligonucleotide
acagcuauagcuguacacu

SEQ ID NO: 411848 - RNA, 19 nt, Artificial Sequence
  Description of Artificial Sequence: Synthetic oligonucleotide
agccacucaaacucgaccu

SEQ ID NO: 411849 - RNA, 19 nt, Artificial Sequence
  Description of Artificial Sequence: Synthetic oligonucleotide
gauucgagacacuggggug

SEQ ID NO: 411850 - RNA, 19 nt, Artificial Sequence
  Description of Artificial Sequence: Synthetic oligonucleotide
uguugauagaacucaucau

SEQ ID NO: 411851 - RNA, 19 nt, Artificial Sequence
  Description of Artificial Sequence: Synthetic oligonucleotide
uccccgaugaggauucgag

SEQ ID NO: 411852 - RNA, 19 nt, Artificial Sequence
  Description of Artificial Sequence: Synthetic oligonucleotide
aucggugcaaauuuuguuu

SEQ ID NO: 411853 - RNA, 19 nt, Artificial Sequence
  Description of Artificial Sequence: Synthetic oligonucleotide
accuacaccuuacuuaggu

SEQ ID NO: 411854 - RNA, 19 nt, Artificial Sequence
  Description of Artificial Sequence: Synthetic oligonucleotide
uucuaacugucuugaacug

SEQ ID NO: 411855 - RNA, 19 nt, Artificial Sequence
  Description of Artificial Sequence: Synthetic oligonucleotide
ucgaucuccuugaaaccag

SEQ ID NO: 411856 - RNA, 19 nt, Artificial Sequence
  Description of Artificial Sequence: Synthetic oligonucleotide
acaaggaguagcagggucg

SEQ ID NO: 411857 - RNA, 19 nt, Artificial Sequence
  Description of Artificial Sequence: Synthetic oligonucleotide
uucgaucuccuugaaacca

SEQ ID NO: 411858 - RNA, 19 nt, Artificial Sequence
  Description of Artificial Sequence: Synthetic oligonucleotide
uaugcagcuccucggauau

SEQ ID NO: 411859 - RNA, 19 nt, Artificial Sequence
  Description of Artificial Sequence: Synthetic oligonucleotide
caugcuuaugcagugugag

SEQ ID NO: 411860 - RNA, 19 nt, Artificial Sequence
  Description of Artificial Sequence: Synthetic oligonucleotide
gguccuauuaccuacaggu

SEQ ID NO: 411861 - RNA, 19 nt, Artificial Sequence
  Description of Artificial Sequence: Synthetic oligonucleotide
uuaggauauuucagcugcc

SEQ ID NO: 411862 - RNA, 19 nt, Artificial Sequence
  Description of Artificial Sequence: Synthetic oligonucleotide
gguauugccaagccuggcg

SEQ ID NO: 411863 - RNA, 19 nt, Artificial Sequence
  Description of Artificial Sequence: Synthetic oligonucleotide
ugaaaccacuucugugagg

SEQ ID NO: 411864 - RNA, 19 nt, Artificial Sequence
  Description of Artificial Sequence: Synthetic oligonucleotide
uggauccuaaccagguccc

SEQ ID NO: 411865 - RNA, 19 nt, Artificial Sequence
  Description of Artificial Sequence: Synthetic oligonucleotide
aaccaacaugccaaguguc

SEQ ID NO: 411866 - RNA, 19 nt, Artificial Sequence
  Description of Artificial Sequence: Synthetic oligonucleotide
aagaccggacaauucggga

SEQ ID NO: 411867 - RNA, 19 nt, Artificial Sequence
  Description of Artificial Sequence: Synthetic oligonucleotide
gaaacaagcagccaugcuu

SEQ ID NO: 411868 - RNA, 19 nt, Artificial Sequence
  Description of Artificial Sequence: Synthetic oligonucleotide
ucucgauaucccacgauau

SEQ ID NO: 411869 - RNA, 19 nt, Artificial Sequence
  Description of Artificial Sequence: Synthetic oligonucleotide
uggguggaacuaaaacgag

SEQ ID NO: 411870 - RNA, 19 nt, Artificial Sequence
  Description of Artificial Sequence: Synthetic oligonucleotide
aguuuaacaccaaaucaga

SEQ ID NO: 411871 - RNA, 19 nt, Artificial Sequence
  Description of Artificial Sequence: Synthetic oligonucleotide
cacuuucguccucagagcc

SEQ ID NO: 411872 - RNA, 19 nt, Artificial Sequence
  Description of Artificial Sequence: Synthetic oligonucleotide
auauacugccggcuucccg

SEQ ID NO: 411873 - RNA, 19 nt, Artificial Sequence
  Description of Artificial Sequence: Synthetic oligonucleotide
ugccacuguugauagaacu

SEQ ID NO: 411874 - RNA, 19 nt, Artificial Sequence
  Description of Artificial Sequence: Synthetic oligonucleotide
uuauguggaaucuccccaa

SEQ ID NO: 411875 - RNA, 19 nt, Artificial Sequence
  Description of Artificial Sequence: Synthetic oligonucleotide
cuuucuacuaacgggugug

SEQ ID NO: 411876 - RNA, 19 nt, Artificial Sequence
  Description of Artificial Sequence: Synthetic oligonucleotide
guucucaucgugaugccag

SEQ ID NO: 411877 - RNA, 19 nt, Artificial Sequence
  Description of Artificial Sequence: Synthetic oligonucleotide
ucccgaaacaagcagccau

SEQ ID NO: 411878 - RNA, 19 nt, Artificial Sequence
  Description of Artificial Sequence: Synthetic oligonucleotide
augcuuaugcagugugagg

SEQ ID NO: 411879 - RNA, 19 nt, Artificial Sequence
  Description of Artificial Sequence: Synthetic oligonucleotide
ucauuagccuucucuuuga

SEQ ID NO: 411880 - RNA, 19 nt, Artificial Sequence
  Description of Artificial Sequence: Synthetic oligonucleotide
uaucccacgauaucuugaa

SEQ ID NO: 411881 - RNA, 19 nt, Artificial Sequence
  Description of Artificial Sequence: Synthetic oligonucleotide
aacuaaaacgaggcuguga

SEQ ID NO: 411882 - RNA, 19 nt, Artificial Sequence
  Description of Artificial Sequence: Synthetic oligonucleotide
aacaccaaaucagacugaa

SEQ ID NO: 411883 - RNA, 19 nt, Artificial Sequence
  Description of Artificial Sequence: Synthetic oligonucleotide
ucaucaucacaggaugacc

SEQ ID NO: 411884 - RNA, 19 nt, Artificial Sequence
  Description of Artificial Sequence: Synthetic oligonucleotide
caugccaacccuugggaac

SEQ ID NO: 411885 - RNA, 19 nt, Artificial Sequence
  Description of Artificial Sequence: Synthetic oligonucleotide
ucuaacugucuugaacuga

SEQ ID NO: 411886 - RNA, 19 nt, Artificial Sequence
  Description of Artificial Sequence: Synthetic oligonucleotide
cacagcuauagcuguacac

SEQ ID NO: 411887 - RNA, 19 nt, Artificial Sequence
  Description of Artificial Sequence: Synthetic oligonucleotide
agcucaccgccauuuuccc

SEQ ID NO: 411888 - RNA, 19 nt, Artificial Sequence
  Description of Artificial Sequence: Synthetic oligonucleotide
ucggugcaaauuuuguuuc

SEQ ID NO: 411889 - RNA, 19 nt, Artificial Sequence
  Description of Artificial Sequence: Synthetic oligonucleotide
cauuucauuucagggcugg

SEQ ID NO: 411890 - RNA, 19 nt, Artificial Sequence
  Description of Artificial Sequence: Synthetic oligonucleotide
gauugauuauucaacauuu

SEQ ID NO: 411891 - RNA, 19 nt, Artificial Sequence
  Description of Artificial Sequence: Synthetic oligonucleotide
gagcacgcgacacuacugc

SEQ ID NO: 411892 - RNA, 19 nt, Artificial Sequence
  Description of Artificial Sequence: Synthetic oligonucleotide
uguacacugccacggcuga

SEQ ID NO: 411893 - RNA, 19 nt, Artificial Sequence
  Description of Artificial Sequence: Synthetic oligonucleotide
aagaaauaucauggggccu

SEQ ID NO: 411894 - RNA, 19 nt, Artificial Sequence
  Description of Artificial Sequence: Synthetic oligonucleotide
uacuuaggucauuucauuu

SEQ ID NO: 411895 - RNA, 19 nt, Artificial Sequence
  Description of Artificial Sequence: Synthetic oligonucleotide
ugagcacgcgacacuacug

SEQ ID NO: 411896 - RNA, 19 nt, Artificial Sequence
  Description of Artificial Sequence: Synthetic oligonucleotide
ugcuuucuacuaacgggug

SEQ ID NO: 411897 - RNA, 19 nt, Artificial Sequence
  Description of Artificial Sequence: Synthetic oligonucleotide
accaacaugccaagugucg

SEQ ID NO: 411898 - RNA, 19 nt, Artificial Sequence
  Description of Artificial Sequence: Synthetic oligonucleotide
aguuuaguaaagucacguu

SEQ ID NO: 411899 - RNA, 19 nt, Artificial Sequence
  Description of Artificial Sequence: Synthetic oligonucleotide
gucaccauuauccgaguca

SEQ ID NO: 411900 - RNA, 19 nt, Artificial Sequence
  Description of Artificial Sequence: Synthetic oligonucleotide
uuaguauuugugagcuuua

SEQ ID NO: 411901 - RNA, 19 nt, Artificial Sequence
  Description of Artificial Sequence: Synthetic oligonucleotide
acuaacgggugugagcaag

SEQ ID NO: 411902 - RNA, 19 nt, Artificial Sequence
  Description of Artificial Sequence: Synthetic oligonucleotide
agguccuauuaccuacagg

SEQ ID NO: 411903 - RNA, 19 nt, Artificial Sequence
  Description of Artificial Sequence: Synthetic oligonucleotide
acgauaucuugaaaccaac

SEQ ID NO: 411904 - RNA, 19 nt, Artificial Sequence
  Description of Artificial Sequence: Synthetic oligonucleotide
guuuaacaccaaaucagac

SEQ ID NO: 411905 - RNA, 19 nt, Artificial Sequence
  Description of Artificial Sequence: Synthetic oligonucleotide
uguuucgaucuccuugaaa

SEQ ID NO: 411906 - RNA, 19 nt, Artificial Sequence
  Description of Artificial Sequence: Synthetic oligonucleotide
cauggggccuaauaaacca

SEQ ID NO: 411907 - RNA, 19 nt, Artificial Sequence
  Description of Artificial Sequence: Synthetic oligonucleotide
agaaauaucauggggccua

SEQ ID NO: 411908 - RNA, 19 nt, Artificial Sequence
  Description of Artificial Sequence: Synthetic oligonucleotide
caagugucgggaucucugc

SEQ ID NO: 411909 - RNA, 19 nt, Artificial Sequence
  Description of Artificial Sequence: Synthetic oligonucleotide
ucccggagaaccaguuuag

SEQ ID NO: 411910 - RNA, 19 nt, Artificial Sequence
  Description of Artificial Sequence: Synthetic oligonucleotide
acuguugauagaacucauc

SEQ ID NO: 411911 - RNA, 19 nt, Artificial Sequence
  Description of Artificial Sequence: Synthetic oligonucleotide
uacagguugaaaggugucu

SEQ ID NO: 411912 - RNA, 19 nt, Artificial Sequence
  Description of Artificial Sequence: Synthetic oligonucleotide
uaacaccaaaucagacuga

SEQ ID NO: 411913 - RNA, 19 nt, Artificial Sequence
  Description of Artificial Sequence: Synthetic oligonucleotide
uacaccuuacuuaggucau

SEQ ID NO: 411914 - RNA, 19 nt, Artificial Sequence
  Description of Artificial Sequence: Synthetic oligonucleotide
uuaugcagcuccucggaua

SEQ ID NO: 411915 - RNA, 19 nt, Artificial Sequence
  Description of Artificial Sequence: Synthetic oligonucleotide
aguauuugugagcuuuauu

SEQ ID NO: 411916 - RNA, 19 nt, Artificial Sequence
  Description of Artificial Sequence: Synthetic oligonucleotide
ucaccauuauccgagucau

SEQ ID NO: 411917 - RNA, 19 nt, Artificial Sequence
  Description of Artificial Sequence: Synthetic oligonucleotide
uuggaucagggaagccccg

SEQ ID NO: 411918 - RNA, 19 nt, Artificial Sequence
  Description of Artificial Sequence: Synthetic oligonucleotide
uucacagcuauagcuguac

SEQ ID NO: 411919 - RNA, 19 nt, Artificial Sequence
  Description of Artificial Sequence: Synthetic oligonucleotide
aucgugaugccagcucacc

SEQ ID NO: 411920 - RNA, 19 nt, Artificial Sequence
  Description of Artificial Sequence: Synthetic oligonucleotide
uaggauauuucagcugcca

SEQ ID NO: 411921 - RNA, 19 nt, Artificial Sequence
  Description of Artificial Sequence: Synthetic oligonucleotide
cuaacgggugugagcaagc

SEQ ID NO: 411922 - RNA, 19 nt, Artificial Sequence
  Description of Artificial Sequence: Synthetic oligonucleotide
agguacuuguagguacagc

SEQ ID NO: 411923 - RNA, 19 nt, Artificial Sequence
  Description of Artificial Sequence: Synthetic oligonucleotide
agcugguaaagaccggaca

SEQ ID NO: 411924 - RNA, 19 nt, Artificial Sequence
  Description of Artificial Sequence: Synthetic oligonucleotide
uucuacuaacgggugugag

SEQ ID NO: 411925 - RNA, 19 nt, Artificial Sequence
  Description of Artificial Sequence: Synthetic oligonucleotide
accuuacuuaggucauuuc

SEQ ID NO: 411926 - RNA, 19 nt, Artificial Sequence
  Description of Artificial Sequence: Synthetic oligonucleotide
auagagacccaggagcaca

SEQ ID NO: 411927 - RNA, 19 nt, Artificial Sequence
  Description of Artificial Sequence: Synthetic oligonucleotide
guaauugauggugcagccc

SEQ ID NO: 411928 - RNA, 19 nt, Artificial Sequence
  Description of Artificial Sequence: Synthetic oligonucleotide
ccaccuacaccuuacuuag

SEQ ID NO: 411929 - RNA, 19 nt, Artificial Sequence
  Description of Artificial Sequence: Synthetic oligonucleotide
cuaaaacgaggcugugaac

SEQ ID NO: 411930 - RNA, 19 nt, Artificial Sequence
  Description of Artificial Sequence: Synthetic oligonucleotide
ccuaauaaaccagagccug

SEQ ID NO: 411931 - RNA, 19 nt, Artificial Sequence
  Description of Artificial Sequence: Synthetic oligonucleotide
uccuugaaaccagaacugu

SEQ ID NO: 411932 - RNA, 19 nt, Artificial Sequence
  Description of Artificial Sequence: Synthetic oligonucleotide
guacagguguucuaguuua

SEQ ID NO: 411933 - RNA, 19 nt, Artificial Sequence
  Description of Artificial Sequence: Synthetic oligonucleotide
cagguguucuaguuuaaca

SEQ ID NO: 411934 - RNA, 19 nt, Artificial Sequence
  Description of Artificial Sequence: Synthetic oligonucleotide
guauagagacccaggagca

SEQ ID NO: 411935 - RNA, 19 nt, Artificial Sequence
  Description of Artificial Sequence: Synthetic oligonucleotide
auucgagacacugggguga

SEQ ID NO: 411936 - RNA, 19 nt, Artificial Sequence
  Description of Artificial Sequence: Synthetic oligonucleotide
cacgauaucuugaaaccaa

SEQ ID NO: 411937 - RNA, 19 nt, Artificial Sequence
  Description of Artificial Sequence: Synthetic oligonucleotide
cugacaugcagcagcgauc

SEQ ID NO: 411938 - RNA, 19 nt, Artificial Sequence
  Description of Artificial Sequence: Synthetic oligonucleotide
ugcggguauagagacccag

SEQ ID NO: 411939 - RNA, 19 nt, Artificial Sequence
  Description of Artificial Sequence: Synthetic oligonucleotide
cuuacuuaggucauuucau

SEQ ID NO: 411940 - RNA, 19 nt, Artificial Sequence
  Description of Artificial Sequence: Synthetic oligonucleotide
uucucaucgugaugccagc

SEQ ID NO: 411941 - RNA, 19 nt, Artificial Sequence
  Description of Artificial Sequence: Synthetic oligonucleotide
uaccuacagguugaaaggu

SEQ ID NO: 411942 - RNA, 19 nt, Artificial Sequence
  Description of Artificial Sequence: Synthetic oligonucleotide
ucggcagucuggcuucuga

SEQ ID NO: 411943 - RNA, 19 nt, Artificial Sequence
  Description of Artificial Sequence: Synthetic oligonucleotide
gugaugccagcucaccgcc

SEQ ID NO: 411944 - RNA, 19 nt, Artificial Sequence
  Description of Artificial Sequence: Synthetic oligonucleotide
cuuuaugcagcuccucgga

SEQ ID NO: 411945 - RNA, 19 nt, Artificial Sequence
  Description of Artificial Sequence: Synthetic oligonucleotide
aagucacguuguaggcugc

SEQ ID NO: 411946 - RNA, 19 nt, Artificial Sequence
  Description of Artificial Sequence: Synthetic oligonucleotide
acuacccuuguccaagguu

SEQ ID NO: 411947 - RNA, 19 nt, Artificial Sequence
  Description of Artificial Sequence: Synthetic oligonucleotide
cucgauaucccacgauauc

SEQ ID NO: 411948 - RNA, 19 nt, Artificial Sequence
  Description of Artificial Sequence: Synthetic oligonucleotide
auuuuggcaccuaauggaa

SEQ ID NO: 411949 - RNA, 19 nt, Artificial Sequence
  Description of Artificial Sequence: Synthetic oligonucleotide
ggcugaucuguccaccagg

SEQ ID NO: 411950 - RNA, 19 nt, Artificial Sequence
  Description of Artificial Sequence: Synthetic oligonucleotide
cuggugugccauucuuucc

SEQ ID NO: 411951 - RNA, 19 nt, Artificial Sequence
  Description of Artificial Sequence: Synthetic oligonucleotide
aggcauucugacuucuaaa

SEQ ID NO: 411952 - RNA, 19 nt, Artificial Sequence
  Description of Artificial Sequence: Synthetic oligonucleotide
uuucuacuaacggguguga

SEQ ID NO: 411953 - RNA, 19 nt, Artificial Sequence
  Description of Artificial Sequence: Synthetic oligonucleotide
agacgucaccauuauccga

SEQ ID NO: 411954 - RNA, 19 nt, Artificial Sequence
  Description of Artificial Sequence: Synthetic oligonucleotide
agguauugccaagccuggc

SEQ ID NO: 411955 - RNA, 19 nt, Artificial Sequence
  Description of Artificial Sequence: Synthetic oligonucleotide
ggugcagcccuucacuggc

SEQ ID NO: 411956 - RNA, 19 nt, Artificial Sequence
  Description of Artificial Sequence: Synthetic oligonucleotide
ggcgucucgauaucccacg

SEQ ID NO: 411957 - RNA, 19 nt, Artificial Sequence
  Description of Artificial Sequence: Synthetic oligonucleotide
gucucgauaucccacgaua

SEQ ID NO: 411958 - RNA, 19 nt, Artificial Sequence
  Description of Artificial Sequence: Synthetic oligonucleotide
uauagagacccaggagcac

SEQ ID NO: 411959 - RNA, 19 nt, Artificial Sequence
  Description of Artificial Sequence: Synthetic oligonucleotide
ggguggaacuaaaacgagg

SEQ ID NO: 411960 - RNA, 19 nt, Artificial Sequence
  Description of Artificial Sequence: Synthetic oligonucleotide
guucuaguuuaacaccaaa

SEQ ID NO: 411961 - RNA, 19 nt, Artificial Sequence
  Description of Artificial Sequence: Synthetic oligonucleotide
uuguagguacagccugggu

SEQ ID NO: 411962 - RNA, 19 nt, Artificial Sequence
  Description of Artificial Sequence: Synthetic oligonucleotide
uggcgucucgauaucccac

SEQ ID NO: 411963 - RNA, 19 nt, Artificial Sequence
  Description of Artificial Sequence: Synthetic oligonucleotide
cucaucgugaugccagcuc

SEQ ID NO: 411964 - RNA, 19 nt, Artificial Sequence
  Description of Artificial Sequence: Synthetic oligonucleotide
agguugaaaggugucuaca

SEQ ID NO: 411965 - RNA, 19 nt, Artificial Sequence
  Description of Artificial Sequence: Synthetic oligonucleotide
uauugccaagccuggcguc

SEQ ID NO: 411966 - RNA, 19 nt, Artificial Sequence
  Description of Artificial Sequence: Synthetic oligonucleotide
cauuagccuucucuuugac

SEQ ID NO: 411967 - RNA, 19 nt, Artificial Sequence
  Description of Artificial Sequence: Synthetic oligonucleotide
gucgggaucucugcccucg

SEQ ID NO: 411968 - RNA, 19 nt, Artificial Sequence
  Description of Artificial Sequence: Synthetic oligonucleotide
ggagccucaguuucuuagc

SEQ ID NO: 411969 - RNA, 19 nt, Artificial Sequence
  Description of Artificial Sequence: Synthetic oligonucleotide
gcugguaaagaccggacaa

SEQ ID NO: 411970 - RNA, 19 nt, Artificial Sequence
  Description of Artificial Sequence: Synthetic oligonucleotide
auccuaaccaggucccgaa

SEQ ID NO: 411971 - RNA, 19 nt, Artificial Sequence
  Description of Artificial Sequence: Synthetic oligonucleotide
gauauacugccggcuuccc

SEQ ID NO: 411972 - RNA, 19 nt, Artificial Sequence
  Description of Artificial Sequence: Synthetic oligonucleotide
augaacgggugcacacagc

SEQ ID NO: 411973 - RNA, 19 nt, Artificial Sequence
  Description of Artificial Sequence: Synthetic oligonucleotide
gaacuaaaacgaggcugug

SEQ ID NO: 411974 - RNA, 19 nt, Artificial Sequence
  Description of Artificial Sequence: Synthetic oligonucleotide
agggucggcagucuggcuu

SEQ ID NO: 411975 - RNA, 19 nt, Artificial Sequence
  Description of Artificial Sequence: Synthetic oligonucleotide
ccuaauggaauagagcaca

SEQ ID NO: 411976 - RNA, 19 nt, Artificial Sequence
  Description of Artificial Sequence: Synthetic oligonucleotide
guagggucggcagucuggc

SEQ ID NO: 411977 - RNA, 19 nt, Artificial Sequence
  Description of Artificial Sequence: Synthetic oligonucleotide
aggauucgagacacugggg

SEQ ID NO: 411978 - RNA, 19 nt, Artificial Sequence
  Description of Artificial Sequence: Synthetic oligonucleotide
uaacgggugugagcaagca

SEQ ID NO: 411979 - RNA, 19 nt, Artificial Sequence
  Description of Artificial Sequence: Synthetic oligonucleotide
gcaugaaauagcagucucc

SEQ ID NO: 411980 - RNA, 19 nt, Artificial Sequence
  Description of Artificial Sequence: Synthetic oligonucleotide
ccuauuaccuacagguuga

SEQ ID NO: 411981 - RNA, 19 nt, Artificial Sequence
  Description of Artificial Sequence: Synthetic oligonucleotide
cuguguaauugauggugca

SEQ ID NO: 411982 - RNA, 19 nt, Artificial Sequence
  Description of Artificial Sequence: Synthetic oligonucleotide
gccccguaaagccaggaug

SEQ ID NO: 411983 - RNA, 19 nt, Artificial Sequence
  Description of Artificial Sequence: Synthetic oligonucleotide
ucucguuccuccgcagucu

SEQ ID NO: 411984 - RNA, 19 nt, Artificial Sequence
  Description of Artificial Sequence: Synthetic oligonucleotide
uauuaccuacagguugaaa

SEQ ID NO: 411985 - RNA, 19 nt, Artificial Sequence
  Description of Artificial Sequence: Synthetic oligonucleotide
accuacagguugaaaggug

SEQ ID NO: 411986 - RNA, 19 nt, Artificial Sequence
  Description of Artificial Sequence: Synthetic oligonucleotide
cagagagacgucaccauua

SEQ ID NO: 411987 - RNA, 19 nt, Artificial Sequence
  Description of Artificial Sequence: Synthetic oligonucleotide
uggcagcguuguaaaauau

SEQ ID NO: 411988 - RNA, 19 nt, Artificial Sequence
  Description of Artificial Sequence: Synthetic oligonucleotide
cagccaaaacacagugcug

SEQ ID NO: 411989 - RNA, 19 nt, Artificial Sequence
  Description of Artificial Sequence: Synthetic oligonucleotide
cagguccuauuaccuacag

SEQ ID NO: 411990 - RNA, 19 nt, Artificial Sequence
  Description of Artificial Sequence: Synthetic oligonucleotide
caggaugaccccaugccaa

SEQ ID NO: 411991 - RNA, 19 nt, Artificial Sequence
  Description of Artificial Sequence: Synthetic oligonucleotide
ggauucgagacacuggggu

SEQ ID NO: 411992 - RNA, 19 nt, Artificial Sequence
  Description of Artificial Sequence: Synthetic oligonucleotide
ggucccgaaacaagcagcc

SEQ ID NO: 411993 - RNA, 19 nt, Artificial Sequence
  Description of Artificial Sequence: Synthetic oligonucleotide
agcacgcgacacuacugcu

SEQ ID NO: 411994 - RNA, 19 nt, Artificial Sequence
  Description of Artificial Sequence: Synthetic oligonucleotide
acacuacugcuuucuacua

SEQ ID NO: 411995 - RNA, 19 nt, Artificial Sequence
  Description of Artificial Sequence: Synthetic oligonucleotide
gugugcaguguacaggugu

SEQ ID NO: 411996 - RNA, 19 nt, Artificial Sequence
  Description of Artificial Sequence: Synthetic oligonucleotide
uccuaaccaggucccgaaa

SEQ ID NO: 411997 - RNA, 19 nt, Artificial Sequence
  Description of Artificial Sequence: Synthetic oligonucleotide
guauugccaagccuggcgu

SEQ ID NO: 411998 - RNA, 19 nt, Artificial Sequence
  Description of Artificial Sequence: Synthetic oligonucleotide
ucucaucgugaugccagcu

SEQ ID NO: 411999 - RNA, 19 nt, Artificial Sequence
  Description of Artificial Sequence: Synthetic oligonucleotide
cacgcucucguuccuccgc

SEQ ID NO: 412000 - RNA, 19 nt, Artificial Sequence
  Description of Artificial Sequence: Synthetic oligonucleotide
ccuugaaaccagaacuguc

SEQ ID NO: 412001 - RNA, 19 nt, Artificial Sequence
  Description of Artificial Sequence: Synthetic oligonucleotide
ggaacuaaaacgaggcugu

SEQ ID NO: 412002 - RNA, 19 nt, Artificial Sequence
  Description of Artificial Sequence: Synthetic oligonucleotide
auguggaaucuccccaauu

SEQ ID NO: 412003 - RNA, 19 nt, Artificial Sequence
  Description of Artificial Sequence: Synthetic oligonucleotide
agggaguuccucucuuuua

SEQ ID NO: 412004 - RNA, 19 nt, Artificial Sequence
  Description of Artificial Sequence: Synthetic oligonucleotide
cuacccuuguccaagguuu

SEQ ID NO: 412005 - RNA, 19 nt, Artificial Sequence
  Description of Artificial Sequence: Synthetic oligonucleotide
gaccggacaauucgggacu

SEQ ID NO: 412006 - RNA, 19 nt, Artificial Sequence
  Description of Artificial Sequence: Synthetic oligonucleotide
agcgccaacuggcagcguu

SEQ ID NO: 412007 - RNA, 19 nt, Artificial Sequence
  Description of Artificial Sequence: Synthetic oligonucleotide
ccuggugugccauucuuuc

SEQ ID NO: 412008 - RNA, 19 nt, Artificial Sequence
  Description of Artificial Sequence: Synthetic oligonucleotide
ugucuacacuacccuuguc

SEQ ID NO: 412009 - RNA, 19 nt, Artificial Sequence
  Description of Artificial Sequence: Synthetic oligonucleotide
acugagcacgcgacacuac

SEQ ID NO: 412010 - RNA, 19 nt, Artificial Sequence
  Description of Artificial Sequence: Synthetic oligonucleotide
caccuacaccuuacuuagg

SEQ ID NO: 412011 - RNA, 19 nt, Artificial Sequence
  Description of Artificial Sequence: Synthetic oligonucleotide
guaugaacgggugcacaca

SEQ ID NO: 412012 - RNA, 19 nt, Artificial Sequence
  Description of Artificial Sequence: Synthetic oligonucleotide
cugggcgcgcuucaugcug

SEQ ID NO: 412013 - RNA, 19 nt, Artificial Sequence
  Description of Artificial Sequence: Synthetic oligonucleotide
ccuaaccaggucccgaaac

SEQ ID NO: 412014 - RNA, 19 nt, Artificial Sequence
  Description of Artificial Sequence: Synthetic oligonucleotide
ccaugccgaaauaaggcuc

SEQ ID NO: 412015 - RNA, 19 nt, Artificial Sequence
  Description of Artificial Sequence: Synthetic oligonucleotide
gccaccuacaccuuacuua

SEQ ID NO: 412016 - RNA, 19 nt, Artificial Sequence
  Description of Artificial Sequence: Synthetic oligonucleotide
auagagcacagaagaaaua

SEQ ID NO: 412017 - RNA, 19 nt, Artificial Sequence
  Description of Artificial Sequence: Synthetic oligonucleotide
cugccacuguugauagaac

SEQ ID NO: 412018 - RNA, 19 nt, Artificial Sequence
  Description of Artificial Sequence: Synthetic oligonucleotide
gaagccccguaaagccagg

SEQ ID NO: 412019 - RNA, 19 nt, Artificial Sequence
  Description of Artificial Sequence: Synthetic oligonucleotide
gccgaaauaaggcuccucu

SEQ ID NO: 412020 - RNA, 19 nt, Artificial Sequence
  Description of Artificial Sequence: Synthetic oligonucleotide
uggaucagggaagccccgu

SEQ ID NO: 412021 - RNA, 19 nt, Artificial Sequence
  Description of Artificial Sequence: Synthetic oligonucleotide
cccgaaacaagcagccaug

SEQ ID NO: 412022 - RNA, 19 nt, Artificial Sequence
  Description of Artificial Sequence: Synthetic oligonucleotide
agccuggcgucucgauauc

SEQ ID NO: 412023 - RNA, 19 nt, Artificial Sequence
  Description of Artificial Sequence: Synthetic oligonucleotide
cacuacugcuuucuacuaa

SEQ ID NO: 412024 - RNA, 19 nt, Artificial Sequence
  Description of Artificial Sequence: Synthetic oligonucleotide
cuggcgucucgauauccca

SEQ ID NO: 412025 - RNA, 19 nt, Artificial Sequence
  Description of Artificial Sequence: Synthetic oligonucleotide
gggaucauguuuauaaaau

SEQ ID NO: 412026 - RNA, 19 nt, Artificial Sequence
  Description of Artificial Sequence: Synthetic oligonucleotide
agccucuguguaauugaug

SEQ ID NO: 412027 - RNA, 19 nt, Artificial Sequence
  Description of Artificial Sequence: Synthetic oligonucleotide
ccuggcgucucgauauccc

SEQ ID NO: 412028 - RNA, 19 nt, Artificial Sequence
  Description of Artificial Sequence: Synthetic oligonucleotide
ccguaaagccaggaugugg

SEQ ID NO: 412029 - RNA, 19 nt, Artificial Sequence
  Description of Artificial Sequence: Synthetic oligonucleotide
uagguacagccuggguccc

SEQ ID NO: 412030 - RNA, 19 nt, Artificial Sequence
  Description of Artificial Sequence: Synthetic oligonucleotide
agccccguaaagccaggau

SEQ ID NO: 412031 - RNA, 19 nt, Artificial Sequence
  Description of Artificial Sequence: Synthetic oligonucleotide
uacuaacgggugugagcaa

SEQ ID NO: 412032 - RNA, 19 nt, Artificial Sequence
  Description of Artificial Sequence: Synthetic oligonucleotide
aucccacgauaucuugaaa

SEQ ID NO: 412033 - RNA, 19 nt, Artificial Sequence
  Description of Artificial Sequence: Synthetic oligonucleotide
gcggguauagagacccagg

SEQ ID NO: 412034 - RNA, 19 nt, Artificial Sequence
  Description of Artificial Sequence: Synthetic oligonucleotide
guggaacuaaaacgaggcu

SEQ ID NO: 412035 - RNA, 19 nt, Artificial Sequence
  Description of Artificial Sequence: Synthetic oligonucleotide
acgcgacacuacugcuuuc

SEQ ID NO: 412036 - RNA, 19 nt, Artificial Sequence
  Description of Artificial Sequence: Synthetic oligonucleotide
guacuuguagguacagccu

SEQ ID NO: 412037 - RNA, 19 nt, Artificial Sequence
  Description of Artificial Sequence: Synthetic oligonucleotide
cucgaccucauuguggaua

SEQ ID NO: 412038 - RNA, 19 nt, Artificial Sequence
  Description of Artificial Sequence: Synthetic oligonucleotide
ccuacaccuuacuuagguc

SEQ ID NO: 412039 - RNA, 19 nt, Artificial Sequence
  Description of Artificial Sequence: Synthetic oligonucleotide
aagccccguaaagccagga

SEQ ID NO: 412040 - RNA, 19 nt, Artificial Sequence
  Description of Artificial Sequence: Synthetic oligonucleotide
cugcagcgccaacuggcag

SEQ ID NO: 412041 - RNA, 19 nt, Artificial Sequence
  Description of Artificial Sequence: Synthetic oligonucleotide
uggguccccgaugaggauu

SEQ ID NO: 412042 - RNA, 19 nt, Artificial Sequence
  Description of Artificial Sequence: Synthetic oligonucleotide
ggauccuaaccaggucccg

SEQ ID NO: 412043 - RNA, 19 nt, Artificial Sequence
  Description of Artificial Sequence: Synthetic oligonucleotide
ccugucauuggaucaggga

SEQ ID NO: 412044 - RNA, 19 nt, Artificial Sequence
  Description of Artificial Sequence: Synthetic oligonucleotide
ugccgaaauaaggcuccuc

SEQ ID NO: 412045 - RNA, 19 nt, Artificial Sequence
  Description of Artificial Sequence: Synthetic oligonucleotide
ccacuguugauagaacuca

SEQ ID NO: 412046 - RNA, 19 nt, Artificial Sequence
  Description of Artificial Sequence: Synthetic oligonucleotide
ccggagaaccaguuuagga

SEQ ID NO: 412047 - RNA, 19 nt, Artificial Sequence
  Description of Artificial Sequence: Synthetic oligonucleotide
ccgaaacaagcagccaugc

SEQ ID NO: 412048 - RNA, 19 nt, Artificial Sequence
  Description of Artificial Sequence: Synthetic oligonucleotide
gugugagcaagcagguuua

SEQ ID NO: 412049 - RNA, 19 nt, Artificial Sequence
  Description of Artificial Sequence: Synthetic oligonucleotide
gaggcauggaagggucauc

SEQ ID NO: 412050 - RNA, 19 nt, Artificial Sequence
  Description of Artificial Sequence: Synthetic oligonucleotide
ggugugccauucuuuccuc

SEQ ID NO: 412051 - RNA, 19 nt, Artificial Sequence
  Description of Artificial Sequence: Synthetic oligonucleotide
cugagcacgcgacacuacu

SEQ ID NO: 412052 - RNA, 19 nt, Artificial Sequence
  Description of Artificial Sequence: Synthetic oligonucleotide
ggacaauucgggacuggca

SEQ ID NO: 412053 - RNA, 19 nt, Artificial Sequence
  Description of Artificial Sequence: Synthetic oligonucleotide
ccauuauccgagucauuga

SEQ ID NO: 412054 - RNA, 19 nt, Artificial Sequence
  Description of Artificial Sequence: Synthetic oligonucleotide
uagggucggcagucuggcu

SEQ ID NO: 412055 - RNA, 19 nt, Artificial Sequence
  Description of Artificial Sequence: Synthetic oligonucleotide
ccuacagguugaaaggugu

SEQ ID NO: 412056 - RNA, 19 nt, Artificial Sequence
  Description of Artificial Sequence: Synthetic oligonucleotide
accucauuguggauaucuu

SEQ ID NO: 412057 - RNA, 19 nt, Artificial Sequence
  Description of Artificial Sequence: Synthetic oligonucleotide
cacgaagcacagcauuugu

SEQ ID NO: 412058 - RNA, 19 nt, Artificial Sequence
  Description of Artificial Sequence: Synthetic oligonucleotide
cugcccucgaagcuggacu

SEQ ID NO: 412059 - RNA, 19 nt, Artificial Sequence
  Description of Artificial Sequence: Synthetic oligonucleotide
acucgguggguggaacuaa

SEQ ID NO: 412060 - RNA, 19 nt, Artificial Sequence
  Description of Artificial Sequence: Synthetic oligonucleotide
gggucguagcagagcauag

SEQ ID NO: 412061 - RNA, 19 nt, Artificial Sequence
  Description of Artificial Sequence: Synthetic oligonucleotide
ugucgggaucucugcccuc

SEQ ID NO: 412062 - RNA, 19 nt, Artificial Sequence
  Description of Artificial Sequence: Synthetic oligonucleotide
gugucgggaucucugcccu

SEQ ID NO: 412063 - RNA, 19 nt, Artificial Sequence
  Description of Artificial Sequence: Synthetic oligonucleotide
ggucguagcagagcauaga

SEQ ID NO: 412064 - RNA, 19 nt, Artificial Sequence
  Description of Artificial Sequence: Synthetic oligonucleotide
ccaacuggcagcguuguaa

SEQ ID NO: 412065 - RNA, 19 nt, Artificial Sequence
  Description of Artificial Sequence: Synthetic oligonucleotide
auaggcauucugacuucua

SEQ ID NO: 412066 - RNA, 19 nt, Artificial Sequence
  Description of Artificial Sequence: Synthetic oligonucleotide
acucgaccucauuguggau

SEQ ID NO: 412067 - RNA, 19 nt, Artificial Sequence
  Description of Artificial Sequence: Synthetic oligonucleotide
gccacucaaacucgaccuc

SEQ ID NO: 412068 - RNA, 19 nt, Artificial Sequence
  Description of Artificial Sequence: Synthetic oligonucleotide
aggugccuguugagcacuc

SEQ ID NO: 412069 - RNA, 19 nt, Artificial Sequence
  Description of Artificial Sequence: Synthetic oligonucleotide
gcuuucuacuaacgggugu

SEQ ID NO: 412070 - RNA, 19 nt, Artificial Sequence
  Description of Artificial Sequence: Synthetic oligonucleotide
augccgaaauaaggcuccu

SEQ ID NO: 412071 - RNA, 19 nt, Artificial Sequence
  Description of Artificial Sequence: Synthetic oligonucleotide
cacugagcacgcgacacua

SEQ ID NO: 412072 - RNA, 19 nt, Artificial Sequence
  Description of Artificial Sequence: Synthetic oligonucleotide
cuauuaccuacagguugaa

SEQ ID NO: 412073 - RNA, 19 nt, Artificial Sequence
  Description of Artificial Sequence: Synthetic oligonucleotide
cacuguugauagaacucau

SEQ ID NO: 412074 - RNA, 19 nt, Artificial Sequence
  Description of Artificial Sequence: Synthetic oligonucleotide
gggucagguaaggaagcca

SEQ ID NO: 412075 - RNA, 19 nt, Artificial Sequence
  Description of Artificial Sequence: Synthetic oligonucleotide
ccucagggaccucuuuaug

SEQ ID NO: 412076 - RNA, 19 nt, Artificial Sequence
  Description of Artificial Sequence: Synthetic oligonucleotide
ggcagcguuguaaaauaua

SEQ ID NO: 412077 - RNA, 19 nt, Artificial Sequence
  Description of Artificial Sequence: Synthetic oligonucleotide
ucgagacacuggggugagc

SEQ ID NO: 412078 - RNA, 19 nt, Artificial Sequence
  Description of Artificial Sequence: Synthetic oligonucleotide
caucacaggaugaccccau

SEQ ID NO: 412079 - RNA, 19 nt, Artificial Sequence
  Description of Artificial Sequence: Synthetic oligonucleotide
cauaggcauucugacuucu

SEQ ID NO: 412080 - RNA, 19 nt, Artificial Sequence
  Description of Artificial Sequence: Synthetic oligonucleotide
acaccuuacuuaggucauu

SEQ ID NO: 412081 - RNA, 19 nt, Artificial Sequence
  Description of Artificial Sequence: Synthetic oligonucleotide
gccuaauaaaccagagccu

SEQ ID NO: 412082 - RNA, 19 nt, Artificial Sequence
  Description of Artificial Sequence: Synthetic oligonucleotide
cccggagaaccaguuuagg

SEQ ID NO: 412083 - RNA, 19 nt, Artificial Sequence
  Description of Artificial Sequence: Synthetic oligonucleotide
caaggaguagcagggucgu

SEQ ID NO: 412084 - RNA, 19 nt, Artificial Sequence
  Description of Artificial Sequence: Synthetic oligonucleotide
cacgcgacacuacugcuuu

SEQ ID NO: 412085 - RNA, 19 nt, Artificial Sequence
  Description of Artificial Sequence: Synthetic oligonucleotide
gucccgaaacaagcagcca

SEQ ID NO: 412086 - RNA, 19 nt, Artificial Sequence
  Description of Artificial Sequence: Synthetic oligonucleotide
ugccaagugucgggaucuc

SEQ ID NO: 412087 - RNA, 19 nt, Artificial Sequence
  Description of Artificial Sequence: Synthetic oligonucleotide
cugguaaagaccggacaau

SEQ ID NO: 412088 - RNA, 19 nt, Artificial Sequence
  Description of Artificial Sequence: Synthetic oligonucleotide
cggacaauucgggacuggc

SEQ ID NO: 412089 - RNA, 19 nt, Artificial Sequence
  Description of Artificial Sequence: Synthetic oligonucleotide
cggguauagagacccagga

SEQ ID NO: 412090 - RNA, 19 nt, Artificial Sequence
  Description of Artificial Sequence: Synthetic oligonucleotide
gggaagccccguaaagcca

SEQ ID NO: 412091 - RNA, 19 nt, Artificial Sequence
  Description of Artificial Sequence: Synthetic oligonucleotide
ccuugggaacucugccaug

SEQ ID NO: 412092 - RNA, 19 nt, Artificial Sequence
  Description of Artificial Sequence: Synthetic oligonucleotide
ccagguccuauuaccuaca

SEQ ID NO: 412093 - RNA, 19 nt, Artificial Sequence
  Description of Artificial Sequence: Synthetic oligonucleotide
ugccacucgguggguggaa

SEQ ID NO: 412094 - RNA, 19 nt, Artificial Sequence
  Description of Artificial Sequence: Synthetic oligonucleotide
cccaugccgaaauaaggcu

SEQ ID NO: 412095 - RNA, 19 nt, Artificial Sequence
  Description of Artificial Sequence: Synthetic oligonucleotide
cggauauacugccggcuuc

SEQ ID NO: 412096 - RNA, 19 nt, Artificial Sequence
  Description of Artificial Sequence: Synthetic oligonucleotide
gcugagucauggguucaca

SEQ ID NO: 412097 - RNA, 19 nt, Artificial Sequence
  Description of Artificial Sequence: Synthetic oligonucleotide
cacucgguggguggaacua

SEQ ID NO: 412098 - RNA, 19 nt, Artificial Sequence
  Description of Artificial Sequence: Synthetic oligonucleotide
gccuggcgucucgauaucc

SEQ ID NO: 412099 - RNA, 19 nt, Artificial Sequence
  Description of Artificial Sequence: Synthetic oligonucleotide
cagggaguuccucucuuuu

SEQ ID NO: 412100 - RNA, 19 nt, Artificial Sequence
  Description of Artificial Sequence: Synthetic oligonucleotide
caccuuacuuaggucauuu

SEQ ID NO: 412101 - RNA, 19 nt, Artificial Sequence
  Description of Artificial Sequence: Synthetic oligonucleotide
gccuggauggucucacccu

SEQ ID NO: 412102 - RNA, 19 nt, Artificial Sequence
  Description of Artificial Sequence: Synthetic oligonucleotide
gcgucucgauaucccacga

SEQ ID NO: 412103 - RNA, 19 nt, Artificial Sequence
  Description of Artificial Sequence: Synthetic oligonucleotide
gcgccaacuggcagcguug

SEQ ID NO: 412104 - RNA, 19 nt, Artificial Sequence
  Description of Artificial Sequence: Synthetic oligonucleotide
ccccgaugaggauucgaga

SEQ ID NO: 412105 - RNA, 19 nt, Artificial Sequence
  Description of Artificial Sequence: Synthetic oligonucleotide
ccaugaaguuuaguaaagu

SEQ ID NO: 412106 - RNA, 19 nt, Artificial Sequence
  Description of Artificial Sequence: Synthetic oligonucleotide
augcggguauagagaccca

SEQ ID NO: 412107 - RNA, 19 nt, Artificial Sequence
  Description of Artificial Sequence: Synthetic oligonucleotide
cccguaaagccaggaugug

SEQ ID NO: 412108 - RNA, 19 nt, Artificial Sequence
  Description of Artificial Sequence: Synthetic oligonucleotide
cacuacccuuguccaaggu

SEQ ID NO: 412109 - RNA, 19 nt, Artificial Sequence
  Description of Artificial Sequence: Synthetic oligonucleotide
ccggacaauucgggacugg

SEQ ID NO: 412110 - RNA, 19 nt, Artificial Sequence
  Description of Artificial Sequence: Synthetic oligonucleotide
caucuuugccuuggauccu

SEQ ID NO: 412111 - RNA, 19 nt, Artificial Sequence
  Description of Artificial Sequence: Synthetic oligonucleotide
cgaucuccuugaaaccaga

SEQ ID NO: 412112 - RNA, 19 nt, Artificial Sequence
  Description of Artificial Sequence: Synthetic oligonucleotide
cuccgcagucugggcgcgc

SEQ ID NO: 412113 - RNA, 19 nt, Artificial Sequence
  Description of Artificial Sequence: Synthetic oligonucleotide
ccgaaauaaggcuccucuu

SEQ ID NO: 412114 - RNA, 19 nt, Artificial Sequence
  Description of Artificial Sequence: Synthetic oligonucleotide
ccuccgcagucugggcgcg

SEQ ID NO: 412115 - RNA, 19 nt, Artificial Sequence
  Description of Artificial Sequence: Synthetic oligonucleotide
ggcgcacggugagcggggc

SEQ ID NO: 412116 - RNA, 19 nt, Artificial Sequence
  Description of Artificial Sequence: Synthetic oligonucleotide
ggccaaccugugacaucug

SEQ ID NO: 412117 - RNA, 19 nt, Artificial Sequence
  Description of Artificial Sequence: Synthetic oligonucleotide
gggauccaugaaguuuagu

SEQ ID NO: 412118 - RNA, 19 nt, Artificial Sequence
  Description of Artificial Sequence: Synthetic oligonucleotide
augcagcuccucggauaua

SEQ ID NO: 412119 - RNA, 19 nt, Artificial Sequence
  Description of Artificial Sequence: Synthetic oligonucleotide
caccauuauccgagucauu

SEQ ID NO: 412120 - RNA, 19 nt, Artificial Sequence
  Description of Artificial Sequence: Synthetic oligonucleotide
cgauaucccacgauaucuu

SEQ ID NO: 412121 - RNA, 19 nt, Artificial Sequence
  Description of Artificial Sequence: Synthetic oligonucleotide
gccaagugucgggaucucu

SEQ ID NO: 412122 - RNA, 19 nt, Artificial Sequence
  Description of Artificial Sequence: Synthetic oligonucleotide
gccaacuggcagcguugua

SEQ ID NO: 412123 - RNA, 19 nt, Artificial Sequence
  Description of Artificial Sequence: Synthetic oligonucleotide
ccacucgguggguggaacu

SEQ ID NO: 412124 - RNA, 19 nt, Artificial Sequence
  Description of Artificial Sequence: Synthetic oligonucleotide
gcacgcgacacuacugcuu

SEQ ID NO: 412125 - RNA, 19 nt, Artificial Sequence
  Description of Artificial Sequence: Synthetic oligonucleotide
cgggacuggcaccuggugu

SEQ ID NO: 412126 - RNA, 19 nt, Artificial Sequence
  Description of Artificial Sequence: Synthetic oligonucleotide
cgggaucucugcccucgaa

SEQ ID NO: 412127 - RNA, 19 nt, Artificial Sequence
  Description of Artificial Sequence: Synthetic oligonucleotide
ggucggcagucuggcuucu

SEQ ID NO: 412128 - RNA, 19 nt, Artificial Sequence
  Description of Artificial Sequence: Synthetic oligonucleotide
cgccaacuggcagcguugu

SEQ ID NO: 412129 - RNA, 19 nt, Artificial Sequence
  Description of Artificial Sequence: Synthetic oligonucleotide
ccgcagucugggcgcgcuu

SEQ ID NO: 412130 - RNA, 19 nt, Artificial Sequence
  Description of Artificial Sequence: Synthetic oligonucleotide
ccgagucauugaggacauu

SEQ ID NO: 412131 - RNA, 19 nt, Artificial Sequence
  Description of Artificial Sequence: Synthetic oligonucleotide
aauaauuuaagaaugacac

SEQ ID NO: 412132 - RNA, 19 nt, Artificial Sequence
  Description of Artificial Sequence: Synthetic oligonucleotide
uuaguaagauuuaagaagg

SEQ ID NO: 412133 - RNA, 19 nt, Artificial Sequence
  Description of Artificial Sequence: Synthetic oligonucleotide
uguuaguugaauaugggcg

SEQ ID NO: 412134 - RNA, 19 nt, Artificial Sequence
  Description of Artificial Sequence: Synthetic oligonucleotide
auuaguaagauuuaagaag

SEQ ID NO: 412135 - RNA, 19 nt, Artificial Sequence
  Description of Artificial Sequence: Synthetic oligonucleotide
agcaauaaguaucagaugg

SEQ ID NO: 412136 - RNA, 19 nt, Artificial Sequence
  Description of Artificial Sequence: Synthetic oligonucleotide
aagauugugagccacauug

SEQ ID NO: 412137 - RNA, 19 nt, Artificial Sequence
  Description of Artificial Sequence: Synthetic oligonucleotide
acauugaaaauucaguggc

SEQ ID NO: 412138 - RNA, 19 nt, Artificial Sequence
  Description of Artificial Sequence: Synthetic oligonucleotide
auguauaagauugugagcc

SEQ ID NO: 412139 - RNA, 19 nt, Artificial Sequence
  Description of Artificial Sequence: Synthetic oligonucleotide
auuuaagaaggcuagacuc

SEQ ID NO: 412140 - RNA, 19 nt, Artificial Sequence
  Description of Artificial Sequence: Synthetic oligonucleotide
uuugguguuaguauaagag

SEQ ID NO: 412141 - RNA, 19 nt, Artificial Sequence
  Description of Artificial Sequence: Synthetic oligonucleotide
uguaaaaccauccagguua

SEQ ID NO: 412142 - RNA, 19 nt, Artificial Sequence
  Description of Artificial Sequence: Synthetic oligonucleotide
aaauccaaaacugguagcc

SEQ ID NO: 412143 - RNA, 19 nt, Artificial Sequence
  Description of Artificial Sequence: Synthetic oligonucleotide
aagauaaugccagaguggc

SEQ ID NO: 412144 - RNA, 19 nt, Artificial Sequence
  Description of Artificial Sequence: Synthetic oligonucleotide
ugcauuauuccuuuggagg

SEQ ID NO: 412145 - RNA, 19 nt, Artificial Sequence
  Description of Artificial Sequence: Synthetic oligonucleotide
guaaagacaauuugaaagg

SEQ ID NO: 412146 - RNA, 19 nt, Artificial Sequence
  Description of Artificial Sequence: Synthetic oligonucleotide
uuuagaaauauccaggaau

SEQ ID NO: 412147 - RNA, 19 nt, Artificial Sequence
  Description of Artificial Sequence: Synthetic oligonucleotide
aggaaugucuucuaggcgc

SEQ ID NO: 412148 - RNA, 19 nt, Artificial Sequence
  Description of Artificial Sequence: Synthetic oligonucleotide
caaucaagagucuugaggg

SEQ ID NO: 412149 - RNA, 19 nt, Artificial Sequence
  Description of Artificial Sequence: Synthetic oligonucleotide
uuagaaauauccaggaaug

SEQ ID NO: 412150 - RNA, 19 nt, Artificial Sequence
  Description of Artificial Sequence: Synthetic oligonucleotide
aaauggucaccuuacacag

SEQ ID NO: 412151 - RNA, 19 nt, Artificial Sequence
  Description of Artificial Sequence: Synthetic oligonucleotide
auugcuuaaguucacaucu

SEQ ID NO: 412152 - RNA, 19 nt, Artificial Sequence
  Description of Artificial Sequence: Synthetic oligonucleotide
aagucaauuggguucaaag

SEQ ID NO: 412153 - RNA, 19 nt, Artificial Sequence
  Description of Artificial Sequence: Synthetic oligonucleotide
aauugcuuaaguucacauc

SEQ ID NO: 412154 - RNA, 19 nt, Artificial Sequence
  Description of Artificial Sequence: Synthetic oligonucleotide
auuagaaaggucuaagugu

SEQ ID NO: 412155 - RNA, 19 nt, Artificial Sequence
  Description of Artificial Sequence: Synthetic oligonucleotide
auuguugugacucauauuu

SEQ ID NO: 412156 - RNA, 19 nt, Artificial Sequence
  Description of Artificial Sequence: Synthetic oligonucleotide
auaaguaucagauggaaau

SEQ ID NO: 412157 - RNA, 19 nt, Artificial Sequence
  Description of Artificial Sequence: Synthetic oligonucleotide
uggaauagauccaaaagca

SEQ ID NO: 412158 - RNA, 19 nt, Artificial Sequence
  Description of Artificial Sequence: Synthetic oligonucleotide
auggaaauagaauuuguag

SEQ ID NO: 412159 - RNA, 19 nt, Artificial Sequence
  Description of Artificial Sequence: Synthetic oligonucleotide
uguguaguaaauuguuugg

SEQ ID NO: 412160 - RNA, 19 nt, Artificial Sequence
  Description of Artificial Sequence: Synthetic oligonucleotide
ugugcuauuaaaauuacuu

SEQ ID NO: 412161 - RNA, 19 nt, Artificial Sequence
  Description of Artificial Sequence: Synthetic oligonucleotide
aaugcuauaguggauacca

SEQ ID NO: 412162 - RNA, 19 nt, Artificial Sequence
  Description of Artificial Sequence: Synthetic oligonucleotide
auguuaguugaauaugggc

SEQ ID NO: 412163 - RNA, 19 nt, Artificial Sequence
  Description of Artificial Sequence: Synthetic oligonucleotide
uauaguggauaccacaagc

SEQ ID NO: 412164 - RNA, 19 nt, Artificial Sequence
  Description of Artificial Sequence: Synthetic oligonucleotide
uuaguaaguaauaauuuaa

SEQ ID NO: 412165 - RNA, 19 nt, Artificial Sequence
  Description of Artificial Sequence: Synthetic oligonucleotide
ugaguauuagaccaagaug

SEQ ID NO: 412166 - RNA, 19 nt, Artificial Sequence
  Description of Artificial Sequence: Synthetic oligonucleotide
uggaaauagaauuuguaga

SEQ ID NO: 412167 - RNA, 19 nt, Artificial Sequence
  Description of Artificial Sequence: Synthetic oligonucleotide
gauaugaguauauaaagaa

SEQ ID NO: 412168 - RNA, 19 nt, Artificial Sequence
  Description of Artificial Sequence: Synthetic oligonucleotide
uggaaauugcuuaaguuca

SEQ ID NO: 412169 - RNA, 19 nt, Artificial Sequence
  Description of Artificial Sequence: Synthetic oligonucleotide
uaaguauuggccaggaugu

SEQ ID NO: 412170 - RNA, 19 nt, Artificial Sequence
  Description of Artificial Sequence: Synthetic oligonucleotide
uauuaguaagauuuaagaa

SEQ ID NO: 412171 - RNA, 19 nt, Artificial Sequence
  Description of Artificial Sequence: Synthetic oligonucleotide
cacauauacaggcaaaggg

SEQ ID NO: 412172 - RNA, 19 nt, Artificial Sequence
  Description of Artificial Sequence: Synthetic oligonucleotide
auaagagaugucaagauag

SEQ ID NO: 412173 - RNA, 19 nt, Artificial Sequence
  Description of Artificial Sequence: Synthetic oligonucleotide
aaaauguuaguugaauaug

SEQ ID NO: 412174 - RNA, 19 nt, Artificial Sequence
  Description of Artificial Sequence: Synthetic oligonucleotide
cuaaguauuggccaggaug

SEQ ID NO: 412175 - RNA, 19 nt, Artificial Sequence
  Description of Artificial Sequence: Synthetic oligonucleotide
ugagcuguaauauuuaaua

SEQ ID NO: 412176 - RNA, 19 nt, Artificial Sequence
  Description of Artificial Sequence: Synthetic oligonucleotide
uuuaccaacucauuucuca

SEQ ID NO: 412177 - RNA, 19 nt, Artificial Sequence
  Description of Artificial Sequence: Synthetic oligonucleotide
aaaggaaaaccauggugag

SEQ ID NO: 412178 - RNA, 19 nt, Artificial Sequence
  Description of Artificial Sequence: Synthetic oligonucleotide
ucuuagagucaguucaugg

SEQ ID NO: 412179 - RNA, 19 nt, Artificial Sequence
  Description of Artificial Sequence: Synthetic oligonucleotide
gaaggcuagacucuuuggg

SEQ ID NO: 412180 - RNA, 19 nt, Artificial Sequence
  Description of Artificial Sequence: Synthetic oligonucleotide
uguugugacucauauuuag

SEQ ID NO: 412181 - RNA, 19 nt, Artificial Sequence
  Description of Artificial Sequence: Synthetic oligonucleotide
gagccuaauuccuugaaag

SEQ ID NO: 412182 - RNA, 19 nt, Artificial Sequence
  Description of Artificial Sequence: Synthetic oligonucleotide
uuaugauaugaguauauaa

SEQ ID NO: 412183 - RNA, 19 nt, Artificial Sequence
  Description of Artificial Sequence: Synthetic oligonucleotide
aaaacucauuugcauaugu

SEQ ID NO: 412184 - RNA, 19 nt, Artificial Sequence
  Description of Artificial Sequence: Synthetic oligonucleotide
uuuuaagguguugagacug

SEQ ID NO: 412185 - RNA, 19 nt, Artificial Sequence
  Description of Artificial Sequence: Synthetic oligonucleotide
aaaucaauuuugguguuag

SEQ ID NO: 412186 - RNA, 19 nt, Artificial Sequence
  Description of Artificial Sequence: Synthetic oligonucleotide
uaguaacucaagucuaugg

SEQ ID NO: 412187 - RNA, 19 nt, Artificial Sequence
  Description of Artificial Sequence: Synthetic oligonucleotide
auccaaaacugguagcccc

SEQ ID NO: 412188 - RNA, 19 nt, Artificial Sequence
  Description of Artificial Sequence: Synthetic oligonucleotide
ucaagggguaagaacauug

SEQ ID NO: 412189 - RNA, 19 nt, Artificial Sequence
  Description of Artificial Sequence: Synthetic oligonucleotide
caagguguccaauagguag

SEQ ID NO: 412190 - RNA, 19 nt, Artificial Sequence
  Description of Artificial Sequence: Synthetic oligonucleotide
uuugccauuugaaauauuu

SEQ ID NO: 412191 - RNA, 19 nt, Artificial Sequence
  Description of Artificial Sequence: Synthetic oligonucleotide
aauaugggcguuccuagca

SEQ ID NO: 412192 - RNA, 19 nt, Artificial Sequence
  Description of Artificial Sequence: Synthetic oligonucleotide
aauguuaguugaauauggg

SEQ ID NO: 412193 - RNA, 19 nt, Artificial Sequence
  Description of Artificial Sequence: Synthetic oligonucleotide
aauuuguagaccagaaaug

SEQ ID NO: 412194 - RNA, 19 nt, Artificial Sequence
  Description of Artificial Sequence: Synthetic oligonucleotide
uucuaggcgcuuuagauac

SEQ ID NO: 412195 - RNA, 19 nt, Artificial Sequence
  Description of Artificial Sequence: Synthetic oligonucleotide
augagcauguauuaaucag

SEQ ID NO: 412196 - RNA, 19 nt, Artificial Sequence
  Description of Artificial Sequence: Synthetic oligonucleotide
ucuaaguguucuagguugg

SEQ ID NO: 412197 - RNA, 19 nt, Artificial Sequence
  Description of Artificial Sequence: Synthetic oligonucleotide
uauggagagugucaaacac

SEQ ID NO: 412198 - RNA, 19 nt, Artificial Sequence
  Description of Artificial Sequence: Synthetic oligonucleotide
agaaaggggaguuccagag

SEQ ID NO: 412199 - RNA, 19 nt, Artificial Sequence
  Description of Artificial Sequence: Synthetic oligonucleotide
uaguauaagagaugucaag

SEQ ID NO: 412200 - RNA, 19 nt, Artificial Sequence
  Description of Artificial Sequence: Synthetic oligonucleotide
aaacagaaugaguauuaga

SEQ ID NO: 412201 - RNA, 19 nt, Artificial Sequence
  Description of Artificial Sequence: Synthetic oligonucleotide
cagcucuaaagaaagauug

SEQ ID NO: 412202 - RNA, 19 nt, Artificial Sequence
  Description of Artificial Sequence: Synthetic oligonucleotide
aguaacucaagucuaugga

SEQ ID NO: 412203 - RNA, 19 nt, Artificial Sequence
  Description of Artificial Sequence: Synthetic oligonucleotide
guuacaagguguccaauag

SEQ ID NO: 412204 - RNA, 19 nt, Artificial Sequence
  Description of Artificial Sequence: Synthetic oligonucleotide
aaagucuguaaaucugugu

SEQ ID NO: 412205 - RNA, 19 nt, Artificial Sequence
  Description of Artificial Sequence: Synthetic oligonucleotide
ugguguuaguauaagagau

SEQ ID NO: 412206 - RNA, 19 nt, Artificial Sequence
  Description of Artificial Sequence: Synthetic oligonucleotide
uaaaguuacaaggugucca

SEQ ID NO: 412207 - RNA, 19 nt, Artificial Sequence
  Description of Artificial Sequence: Synthetic oligonucleotide
agaaauauccaggaauguc

SEQ ID NO: 412208 - RNA, 19 nt, Artificial Sequence
  Description of Artificial Sequence: Synthetic oligonucleotide
auacagcuccacuuguugc

SEQ ID NO: 412209 - RNA, 19 nt, Artificial Sequence
  Description of Artificial Sequence: Synthetic oligonucleotide
cucuaugugauugaaacug

SEQ ID NO: 412210 - RNA, 19 nt, Artificial Sequence
  Description of Artificial Sequence: Synthetic oligonucleotide
aguucugauguucacauau

SEQ ID NO: 412211 - RNA, 19 nt, Artificial Sequence
  Description of Artificial Sequence: Synthetic oligonucleotide
cauacuaaguauuggccag

SEQ ID NO: 412212 - RNA, 19 nt, Artificial Sequence
  Description of Artificial Sequence: Synthetic oligonucleotide
cauguauuaaucagguuuc

SEQ ID NO: 412213 - RNA, 19 nt, Artificial Sequence
  Description of Artificial Sequence: Synthetic oligonucleotide
gaauuuguagaccagaaau

SEQ ID NO: 412214 - RNA, 19 nt, Artificial Sequence
  Description of Artificial Sequence: Synthetic oligonucleotide
cugaauaaagugucuagac

SEQ ID NO: 412215 - RNA, 19 nt, Artificial Sequence
  Description of Artificial Sequence: Synthetic oligonucleotide
aaacauuugccaagcaauc

SEQ ID NO: 412216 - RNA, 19 nt, Artificial Sequence
  Description of Artificial Sequence: Synthetic oligonucleotide
uuaacacugucucugugac

SEQ ID NO: 412217 - RNA, 19 nt, Artificial Sequence
  Description of Artificial Sequence: Synthetic oligonucleotide
uuuaagguguugagacugg

SEQ ID NO: 412218 - RNA, 19 nt, Artificial Sequence
  Description of Artificial Sequence: Synthetic oligonucleotide
cuguguaguaaauuguuug

SEQ ID NO: 412219 - RNA, 19 nt, Artificial Sequence
  Description of Artificial Sequence: Synthetic oligonucleotide
aaagggauuauuaguaaga

SEQ ID NO: 412220 - RNA, 19 nt, Artificial Sequence
  Description of Artificial Sequence: Synthetic oligonucleotide
uauaagagaugucaagaua

SEQ ID NO: 412221 - RNA, 19 nt, Artificial Sequence
  Description of Artificial Sequence: Synthetic oligonucleotide
cagaaugaguauuagacca

SEQ ID NO: 412222 - RNA, 19 nt, Artificial Sequence
  Description of Artificial Sequence: Synthetic oligonucleotide
aguauaagagaugucaaga

SEQ ID NO: 412223 - RNA, 19 nt, Artificial Sequence
  Description of Artificial Sequence: Synthetic oligonucleotide
uugguguuaguauaagaga

SEQ ID NO: 412224 - RNA, 19 nt, Artificial Sequence
  Description of Artificial Sequence: Synthetic oligonucleotide
ugaguauauaaagaaggca

SEQ ID NO: 412225 - RNA, 19 nt, Artificial Sequence
  Description of Artificial Sequence: Synthetic oligonucleotide
aaaugcuauaguggauacc

SEQ ID NO: 412226 - RNA, 19 nt, Artificial Sequence
  Description of Artificial Sequence: Synthetic oligonucleotide
ucuaugugauugaaacugc

SEQ ID NO: 412227 - RNA, 19 nt, Artificial Sequence
  Description of Artificial Sequence: Synthetic oligonucleotide
ggaaauguugcauuauucc

SEQ ID NO: 412228 - RNA, 19 nt, Artificial Sequence
  Description of Artificial Sequence: Synthetic oligonucleotide
aaauauuuaggaaugucuu

SEQ ID NO: 412229 - RNA, 19 nt, Artificial Sequence
  Description of Artificial Sequence: Synthetic oligonucleotide
gauugugagccacauugag

SEQ ID NO: 412230 - RNA, 19 nt, Artificial Sequence
  Description of Artificial Sequence: Synthetic oligonucleotide
uaucagauggaaauagaau

SEQ ID NO: 412231 - RNA, 19 nt, Artificial Sequence
  Description of Artificial Sequence: Synthetic oligonucleotide
ggcauuuagaaauauccag

SEQ ID NO: 412232 - RNA, 19 nt, Artificial Sequence
  Description of Artificial Sequence: Synthetic oligonucleotide
uuugcauaugugaaccgga

SEQ ID NO: 412233 - RNA, 19 nt, Artificial Sequence
  Description of Artificial Sequence: Synthetic oligonucleotide
uccuucuaugacauagcgg

SEQ ID NO: 412234 - RNA, 19 nt, Artificial Sequence
  Description of Artificial Sequence: Synthetic oligonucleotide
gcaaucaagagucuugagg

SEQ ID NO: 412235 - RNA, 19 nt, Artificial Sequence
  Description of Artificial Sequence: Synthetic oligonucleotide
guuuggauauaguuauuag

SEQ ID NO: 412236 - RNA, 19 nt, Artificial Sequence
  Description of Artificial Sequence: Synthetic oligonucleotide
uauaauggaauagauccaa

SEQ ID NO: 412237 - RNA, 19 nt, Artificial Sequence
  Description of Artificial Sequence: Synthetic oligonucleotide
uugugagccacauugaguu

SEQ ID NO: 412238 - RNA, 19 nt, Artificial Sequence
  Description of Artificial Sequence: Synthetic oligonucleotide
uuguugguaauaaaaucaa

SEQ ID NO: 412239 - RNA, 19 nt, Artificial Sequence
  Description of Artificial Sequence: Synthetic oligonucleotide
guaaauuguuuggauauag

SEQ ID NO: 412240 - RNA, 19 nt, Artificial Sequence
  Description of Artificial Sequence: Synthetic oligonucleotide
acaauuugaaaggauguug

SEQ ID NO: 412241 - RNA, 19 nt, Artificial Sequence
  Description of Artificial Sequence: Synthetic oligonucleotide
acucauauuuaguaacuca

SEQ ID NO: 412242 - RNA, 19 nt, Artificial Sequence
  Description of Artificial Sequence: Synthetic oligonucleotide
augaguauuagaccaagau

SEQ ID NO: 412243 - RNA, 19 nt, Artificial Sequence
  Description of Artificial Sequence: Synthetic oligonucleotide
caaagggauuauuaguaag

SEQ ID NO: 412244 - RNA, 19 nt, Artificial Sequence
  Description of Artificial Sequence: Synthetic oligonucleotide
ugaaagaauugccagccau

SEQ ID NO: 412245 - RNA, 19 nt, Artificial Sequence
  Description of Artificial Sequence: Synthetic oligonucleotide
ucugaauaaagugucuaga

SEQ ID NO: 412246 - RNA, 19 nt, Artificial Sequence
  Description of Artificial Sequence: Synthetic oligonucleotide
agcggucaaaccuuucuac

SEQ ID NO: 412247 - RNA, 19 nt, Artificial Sequence
  Description of Artificial Sequence: Synthetic oligonucleotide
auauaguuauuagaaaggu

SEQ ID NO: 412248 - RNA, 19 nt, Artificial Sequence
  Description of Artificial Sequence: Synthetic oligonucleotide
ucuaaugacugcuaagguu

SEQ ID NO: 412249 - RNA, 19 nt, Artificial Sequence
  Description of Artificial Sequence: Synthetic oligonucleotide
ucuuguggaagccuuccug

SEQ ID NO: 412250 - RNA, 19 nt, Artificial Sequence
  Description of Artificial Sequence: Synthetic oligonucleotide
uugcauuauuccuuuggag

SEQ ID NO: 412251 - RNA, 19 nt, Artificial Sequence
  Description of Artificial Sequence: Synthetic oligonucleotide
auaugaguauauaaagaag

SEQ ID NO: 412252 - RNA, 19 nt, Artificial Sequence
  Description of Artificial Sequence: Synthetic oligonucleotide
uuuaaaguggaaugcugaa

SEQ ID NO: 412253 - RNA, 19 nt, Artificial Sequence
  Description of Artificial Sequence: Synthetic oligonucleotide
ugucuagacaccacaacaa

SEQ ID NO: 412254 - RNA, 19 nt, Artificial Sequence
  Description of Artificial Sequence: Synthetic oligonucleotide
aaaccauccagguuaugaa

SEQ ID NO: 412255 - RNA, 19 nt, Artificial Sequence
  Description of Artificial Sequence: Synthetic oligonucleotide
agccuaauuccuugaaagg

SEQ ID NO: 412256 - RNA, 19 nt, Artificial Sequence
  Description of Artificial Sequence: Synthetic oligonucleotide
uggcauuuagaaauaucca

SEQ ID NO: 412257 - RNA, 19 nt, Artificial Sequence
  Description of Artificial Sequence: Synthetic oligonucleotide
ucacauauacaggcaaagg

SEQ ID NO: 412258 - RNA, 19 nt, Artificial Sequence
  Description of Artificial Sequence: Synthetic oligonucleotide
ugacucauauuuaguaacu

SEQ ID NO: 412259 - RNA, 19 nt, Artificial Sequence
  Description of Artificial Sequence: Synthetic oligonucleotide
ucuagguagguguuccugc

SEQ ID NO: 412260 - RNA, 19 nt, Artificial Sequence
  Description of Artificial Sequence: Synthetic oligonucleotide
cacuccuucuucuaaauuc

SEQ ID NO: 412261 - RNA, 19 nt, Artificial Sequence
  Description of Artificial Sequence: Synthetic oligonucleotide
uaacuuaguaaguaauaau

SEQ ID NO: 412262 - RNA, 19 nt, Artificial Sequence
  Description of Artificial Sequence: Synthetic oligonucleotide
auaaagucucuguagugga

SEQ ID NO: 412263 - RNA, 19 nt, Artificial Sequence
  Description of Artificial Sequence: Synthetic oligonucleotide
uaaacagaaugaguauuag

SEQ ID NO: 412264 - RNA, 19 nt, Artificial Sequence
  Description of Artificial Sequence: Synthetic oligonucleotide
caaauggucaccuuacaca

SEQ ID NO: 412265 - RNA, 19 nt, Artificial Sequence
  Description of Artificial Sequence: Synthetic oligonucleotide
aguugaauaugggcguucc

SEQ ID NO: 412266 - RNA, 19 nt, Artificial Sequence
  Description of Artificial Sequence: Synthetic oligonucleotide
gugacucauauuuaguaac

SEQ ID NO: 412267 - RNA, 19 nt, Artificial Sequence
  Description of Artificial Sequence: Synthetic oligonucleotide
auaacuuaguaaguaauaa

SEQ ID NO: 412268 - RNA, 19 nt, Artificial Sequence
  Description of Artificial Sequence: Synthetic oligonucleotide
aucucuacagguguugcac

SEQ ID NO: 412269 - RNA, 19 nt, Artificial Sequence
  Description of Artificial Sequence: Synthetic oligonucleotide
cucugaauaaagugucuag

SEQ ID NO: 412270 - RNA, 19 nt, Artificial Sequence
  Description of Artificial Sequence: Synthetic oligonucleotide
uucuaugacauagcgguca

SEQ ID NO: 412271 - RNA, 19 nt, Artificial Sequence
  Description of Artificial Sequence: Synthetic oligonucleotide
aaucaagagucuugaggga

SEQ ID NO: 412272 - RNA, 19 nt, Artificial Sequence
  Description of Artificial Sequence: Synthetic oligonucleotide
uaaauucucccaagaucag

SEQ ID NO: 412273 - RNA, 19 nt, Artificial Sequence
  Description of Artificial Sequence: Synthetic oligonucleotide
ucucuaacagccuuauuua

SEQ ID NO: 412274 - RNA, 19 nt, Artificial Sequence
  Description of Artificial Sequence: Synthetic oligonucleotide
guaauaauuuaagaaugac

SEQ ID NO: 412275 - RNA, 19 nt, Artificial Sequence
  Description of Artificial Sequence: Synthetic oligonucleotide
aaccggaacuccucaaaug

SEQ ID NO: 412276 - RNA, 19 nt, Artificial Sequence
  Description of Artificial Sequence: Synthetic oligonucleotide
aaugucaaguuuguaguau

SEQ ID NO: 412277 - RNA, 19 nt, Artificial Sequence
  Description of Artificial Sequence: Synthetic oligonucleotide
uagaccaagauguuuuguc

SEQ ID NO: 412278 - RNA, 19 nt, Artificial Sequence
  Description of Artificial Sequence: Synthetic oligonucleotide
uagauccaaaagcaguaga

SEQ ID NO: 412279 - RNA, 19 nt, Artificial Sequence
  Description of Artificial Sequence: Synthetic oligonucleotide
augacugcuaagguuugcc

SEQ ID NO: 412280 - RNA, 19 nt, Artificial Sequence
  Description of Artificial Sequence: Synthetic oligonucleotide
uugugacucauauuuagua

SEQ ID NO: 412281 - RNA, 19 nt, Artificial Sequence
  Description of Artificial Sequence: Synthetic oligonucleotide
aagaaaggggaguuccaga

SEQ ID NO: 412282 - RNA, 19 nt, Artificial Sequence
  Description of Artificial Sequence: Synthetic oligonucleotide
uaguggauaccacaagcac

SEQ ID NO: 412283 - RNA, 19 nt, Artificial Sequence
  Description of Artificial Sequence: Synthetic oligonucleotide
augaagauaaugccagagu

SEQ ID NO: 412284 - RNA, 19 nt, Artificial Sequence
  Description of Artificial Sequence: Synthetic oligonucleotide
acauauacaggcaaaggga

SEQ ID NO: 412285 - RNA, 19 nt, Artificial Sequence
  Description of Artificial Sequence: Synthetic oligonucleotide
uucauuacauuugugcuau

SEQ ID NO: 412286 - RNA, 19 nt, Artificial Sequence
  Description of Artificial Sequence: Synthetic oligonucleotide
uaagaaaggggaguuccag

SEQ ID NO: 412287 - RNA, 19 nt, Artificial Sequence
  Description of Artificial Sequence: Synthetic oligonucleotide
gaaaugcuauaguggauac

SEQ ID NO: 412288 - RNA, 19 nt, Artificial Sequence
  Description of Artificial Sequence: Synthetic oligonucleotide
cuuaguaaguaauaauuua

SEQ ID NO: 412289 - RNA, 19 nt, Artificial Sequence
  Description of Artificial Sequence: Synthetic oligonucleotide
ugagaagucgauacagcuc

SEQ ID NO: 412290 - RNA, 19 nt, Artificial Sequence
  Description of Artificial Sequence: Synthetic oligonucleotide
gcauuuagaaauauccagg

SEQ ID NO: 412291 - RNA, 19 nt, Artificial Sequence
  Description of Artificial Sequence: Synthetic oligonucleotide
uaguaagauuuaagaaggc

SEQ ID NO: 412292 - RNA, 19 nt, Artificial Sequence
  Description of Artificial Sequence: Synthetic oligonucleotide
guccuucuaugacauagcg

SEQ ID NO: 412293 - RNA, 19 nt, Artificial Sequence
  Description of Artificial Sequence: Synthetic oligonucleotide
gaaugaguauuagaccaag

SEQ ID NO: 412294 - RNA, 19 nt, Artificial Sequence
  Description of Artificial Sequence: Synthetic oligonucleotide
agaaggcuagacucuuugg

SEQ ID NO: 412295 - RNA, 19 nt, Artificial Sequence
  Description of Artificial Sequence: Synthetic oligonucleotide
acaccagcgacucugaaua

SEQ ID NO: 412296 - RNA, 19 nt, Artificial Sequence
  Description of Artificial Sequence: Synthetic oligonucleotide
uggauauaguuauuagaaa

SEQ ID NO: 412297 - RNA, 19 nt, Artificial Sequence
  Description of Artificial Sequence: Synthetic oligonucleotide
uguaaacagaaugaguauu

SEQ ID NO: 412298 - RNA, 19 nt, Artificial Sequence
  Description of Artificial Sequence: Synthetic oligonucleotide
uguauaagauugugagcca

SEQ ID NO: 412299 - RNA, 19 nt, Artificial Sequence
  Description of Artificial Sequence: Synthetic oligonucleotide
uugagacuggucaagccaa

SEQ ID NO: 412300 - RNA, 19 nt, Artificial Sequence
  Description of Artificial Sequence: Synthetic oligonucleotide
uccaugagcauguauuaau

SEQ ID NO: 412301 - RNA, 19 nt, Artificial Sequence
  Description of Artificial Sequence: Synthetic oligonucleotide
aauaaguaucagauggaaa

SEQ ID NO: 412302 - RNA, 19 nt, Artificial Sequence
  Description of Artificial Sequence: Synthetic oligonucleotide
uagguguuccugcugagaa

SEQ ID NO: 412303 - RNA, 19 nt, Artificial Sequence
  Description of Artificial Sequence: Synthetic oligonucleotide
agauacaccagcgacucug

SEQ ID NO: 412304 - RNA, 19 nt, Artificial Sequence
  Description of Artificial Sequence: Synthetic oligonucleotide
accgacacacugaugaugg

SEQ ID NO: 412305 - RNA, 19 nt, Artificial Sequence
  Description of Artificial Sequence: Synthetic oligonucleotide
gcuuuagauacacauuugc

SEQ ID NO: 412306 - RNA, 19 nt, Artificial Sequence
  Description of Artificial Sequence: Synthetic oligonucleotide
agguuuccuaaagaaauag

SEQ ID NO: 412307 - RNA, 19 nt, Artificial Sequence
  Description of Artificial Sequence: Synthetic oligonucleotide
ucacguaaagucuguaaau

SEQ ID NO: 412308 - RNA, 19 nt, Artificial Sequence
  Description of Artificial Sequence: Synthetic oligonucleotide
aagucgauacagcuccacu

SEQ ID NO: 412309 - RNA, 19 nt, Artificial Sequence
  Description of Artificial Sequence: Synthetic oligonucleotide
uuguaaacagaaugaguau

SEQ ID NO: 412310 - RNA, 19 nt, Artificial Sequence
  Description of Artificial Sequence: Synthetic oligonucleotide
agccuuauuuaugauauga

SEQ ID NO: 412311 - RNA, 19 nt, Artificial Sequence
  Description of Artificial Sequence: Synthetic oligonucleotide
gaguauauaaagaaggcau

SEQ ID NO: 412312 - RNA, 19 nt, Artificial Sequence
  Description of Artificial Sequence: Synthetic oligonucleotide
uucagucuucacuaagaac

SEQ ID NO: 412313 - RNA, 19 nt, Artificial Sequence
  Description of Artificial Sequence: Synthetic oligonucleotide
gauuuaagaaggcuagacu

SEQ ID NO: 412314 - RNA, 19 nt, Artificial Sequence
  Description of Artificial Sequence: Synthetic oligonucleotide
aggucuaaguguucuaggu

SEQ ID NO: 412315 - RNA, 19 nt, Artificial Sequence
  Description of Artificial Sequence: Synthetic oligonucleotide
uggggauuuucacguaaag

SEQ ID NO: 412316 - RNA, 19 nt, Artificial Sequence
  Description of Artificial Sequence: Synthetic oligonucleotide
aaacucauuugcauaugug

SEQ ID NO: 412317 - RNA, 19 nt, Artificial Sequence
  Description of Artificial Sequence: Synthetic oligonucleotide
uacuuguuguaacuggcau

SEQ ID NO: 412318 - RNA, 19 nt, Artificial Sequence
  Description of Artificial Sequence: Synthetic oligonucleotide
acagccuuauuuaugauau

SEQ ID NO: 412319 - RNA, 19 nt, Artificial Sequence
  Description of Artificial Sequence: Synthetic oligonucleotide
guugagacuggucaagcca

SEQ ID NO: 412320 - RNA, 19 nt, Artificial Sequence
  Description of Artificial Sequence: Synthetic oligonucleotide
uaaagugucuagacaccac

SEQ ID NO: 412321 - RNA, 19 nt, Artificial Sequence
  Description of Artificial Sequence: Synthetic oligonucleotide
uuaguaacucaagucuaug

SEQ ID NO: 412322 - RNA, 19 nt, Artificial Sequence
  Description of Artificial Sequence: Synthetic oligonucleotide
aggcaaagggauuauuagu

SEQ ID NO: 412323 - RNA, 19 nt, Artificial Sequence
  Description of Artificial Sequence: Synthetic oligonucleotide
uuuaugauaugaguauaua

SEQ ID NO: 412324 - RNA, 19 nt, Artificial Sequence
  Description of Artificial Sequence: Synthetic oligonucleotide
gaaagauugagcuggggau

SEQ ID NO: 412325 - RNA, 19 nt, Artificial Sequence
  Description of Artificial Sequence: Synthetic oligonucleotide
guaagauuuaagaaggcua

SEQ ID NO: 412326 - RNA, 19 nt, Artificial Sequence
  Description of Artificial Sequence: Synthetic oligonucleotide
aucuaaugacugcuaaggu

SEQ ID NO: 412327 - RNA, 19 nt, Artificial Sequence
  Description of Artificial Sequence: Synthetic oligonucleotide
ucccacucuagguaggugu

SEQ ID NO: 412328 - RNA, 19 nt, Artificial Sequence
  Description of Artificial Sequence: Synthetic oligonucleotide
ugaucaccgacacacugau

SEQ ID NO: 412329 - RNA, 19 nt, Artificial Sequence
  Description of Artificial Sequence: Synthetic oligonucleotide
uguauuaaucagguuuccu

SEQ ID NO: 412330 - RNA, 19 nt, Artificial Sequence
  Description of Artificial Sequence: Synthetic oligonucleotide
agaaaugcuauaguggaua

SEQ ID NO: 412331 - RNA, 19 nt, Artificial Sequence
  Description of Artificial Sequence: Synthetic oligonucleotide
uugaauaugggcguuccua

SEQ ID NO: 412332 - RNA, 19 nt, Artificial Sequence
  Description of Artificial Sequence: Synthetic oligonucleotide
uuaaaguggaaugcugaaa

SEQ ID NO: 412333 - RNA, 19 nt, Artificial Sequence
  Description of Artificial Sequence: Synthetic oligonucleotide
cuauaguggauaccacaag

SEQ ID NO: 412334 - RNA, 19 nt, Artificial Sequence
  Description of Artificial Sequence: Synthetic oligonucleotide
uaaugacugcuaagguuug

SEQ ID NO: 412335 - RNA, 19 nt, Artificial Sequence
  Description of Artificial Sequence: Synthetic oligonucleotide
aagucuauggagaguguca

SEQ ID NO: 412336 - RNA, 19 nt, Artificial Sequence
  Description of Artificial Sequence: Synthetic oligonucleotide
auucucccaagaucagccg

SEQ ID NO: 412337 - RNA, 19 nt, Artificial Sequence
  Description of Artificial Sequence: Synthetic oligonucleotide
uaguuauuagaaaggucua

SEQ ID NO: 412338 - RNA, 19 nt, Artificial Sequence
  Description of Artificial Sequence: Synthetic oligonucleotide
uucucccaagaucagccga

SEQ ID NO: 412339 - RNA, 19 nt, Artificial Sequence
  Description of Artificial Sequence: Synthetic oligonucleotide
gaauagauccaaaagcagu

SEQ ID NO: 412340 - RNA, 19 nt, Artificial Sequence
  Description of Artificial Sequence: Synthetic oligonucleotide
gaaacauuugccaagcaau

SEQ ID NO: 412341 - RNA, 19 nt, Artificial Sequence
  Description of Artificial Sequence: Synthetic oligonucleotide
uaaccuuccggcucuugug

SEQ ID NO: 412342 - RNA, 19 nt, Artificial Sequence
  Description of Artificial Sequence: Synthetic oligonucleotide
guggauaccacaagcacac

SEQ ID NO: 412343 - RNA, 19 nt, Artificial Sequence
  Description of Artificial Sequence: Synthetic oligonucleotide
auuaaucagguuuccuaaa

SEQ ID NO: 412344 - RNA, 19 nt, Artificial Sequence
  Description of Artificial Sequence: Synthetic oligonucleotide
agguaggcuguccagagaa

SEQ ID NO: 412345 - RNA, 19 nt, Artificial Sequence
  Description of Artificial Sequence: Synthetic oligonucleotide
ucagccgaugcacuuguaa

SEQ ID NO: 412346 - RNA, 19 nt, Artificial Sequence
  Description of Artificial Sequence: Synthetic oligonucleotide
uccuaucaacaaauuauuu

SEQ ID NO: 412347 - RNA, 19 nt, Artificial Sequence
  Description of Artificial Sequence: Synthetic oligonucleotide
ugaaccggaacuccucaaa

SEQ ID NO: 412348 - RNA, 19 nt, Artificial Sequence
  Description of Artificial Sequence: Synthetic oligonucleotide
cauauuuaguaacucaagu

SEQ ID NO: 412349 - RNA, 19 nt, Artificial Sequence
  Description of Artificial Sequence: Synthetic oligonucleotide
aggcgcuuuagauacacau

SEQ ID NO: 412350 - RNA, 19 nt, Artificial Sequence
  Description of Artificial Sequence: Synthetic oligonucleotide
aaagauugagcuggggauu

SEQ ID NO: 412351 - RNA, 19 nt, Artificial Sequence
  Description of Artificial Sequence: Synthetic oligonucleotide
aaugaguauuagaccaaga

SEQ ID NO: 412352 - RNA, 19 nt, Artificial Sequence
  Description of Artificial Sequence: Synthetic oligonucleotide
caugagcauguauuaauca

SEQ ID NO: 412353 - RNA, 19 nt, Artificial Sequence
  Description of Artificial Sequence: Synthetic oligonucleotide
agaccagaaaugcuauagu

SEQ ID NO: 412354 - RNA, 19 nt, Artificial Sequence
  Description of Artificial Sequence: Synthetic oligonucleotide
auacuaaguauuggccagg

SEQ ID NO: 412355 - RNA, 19 nt, Artificial Sequence
  Description of Artificial Sequence: Synthetic oligonucleotide
auaguggauaccacaagca

SEQ ID NO: 412356 - RNA, 19 nt, Artificial Sequence
  Description of Artificial Sequence: Synthetic oligonucleotide
cuaaugacugcuaagguuu

SEQ ID NO: 412357 - RNA, 19 nt, Artificial Sequence
  Description of Artificial Sequence: Synthetic oligonucleotide
aguggauaccacaagcaca

SEQ ID NO: 412358 - RNA, 19 nt, Artificial Sequence
  Description of Artificial Sequence: Synthetic oligonucleotide
ugcaaucaagagucuugag

SEQ ID NO: 412359 - RNA, 19 nt, Artificial Sequence
  Description of Artificial Sequence: Synthetic oligonucleotide
agguuaugaaugcaaguuu

SEQ ID NO: 412360 - RNA, 19 nt, Artificial Sequence
  Description of Artificial Sequence: Synthetic oligonucleotide
agucgauacagcuccacuu

SEQ ID NO: 412361 - RNA, 19 nt, Artificial Sequence
  Description of Artificial Sequence: Synthetic oligonucleotide
ucuaugacauagcggucaa

SEQ ID NO: 412362 - RNA, 19 nt, Artificial Sequence
  Description of Artificial Sequence: Synthetic oligonucleotide
guuaguugaauaugggcgu

SEQ ID NO: 412363 - RNA, 19 nt, Artificial Sequence
  Description of Artificial Sequence: Synthetic oligonucleotide
cacguaaagucuguaaauc

SEQ ID NO: 412364 - RNA, 19 nt, Artificial Sequence
  Description of Artificial Sequence: Synthetic oligonucleotide
ugacauccauaacuuagua

SEQ ID NO: 412365 - RNA, 19 nt, Artificial Sequence
  Description of Artificial Sequence: Synthetic oligonucleotide
uuguaaaaccauccagguu

SEQ ID NO: 412366 - RNA, 19 nt, Artificial Sequence
  Description of Artificial Sequence: Synthetic oligonucleotide
ugacugcuaagguuugcca

SEQ ID NO: 412367 - RNA, 19 nt, Artificial Sequence
  Description of Artificial Sequence: Synthetic oligonucleotide
caaccucugguccuugacc

SEQ ID NO: 412368 - RNA, 19 nt, Artificial Sequence
  Description of Artificial Sequence: Synthetic oligonucleotide
aagaucagccgaugcacuu

SEQ ID NO: 412369 - RNA, 19 nt, Artificial Sequence
  Description of Artificial Sequence: Synthetic oligonucleotide
uauuuaggaaugucuucua

SEQ ID NO: 412370 - RNA, 19 nt, Artificial Sequence
  Description of Artificial Sequence: Synthetic oligonucleotide
ucccaagaucagccgaugc

SEQ ID NO: 412371 - RNA, 19 nt, Artificial Sequence
  Description of Artificial Sequence: Synthetic oligonucleotide
ucgauacagcuccacuugu

SEQ ID NO: 412372 - RNA, 19 nt, Artificial Sequence
  Description of Artificial Sequence: Synthetic oligonucleotide
aaggaauguauaagauugu

SEQ ID NO: 412373 - RNA, 19 nt, Artificial Sequence
  Description of Artificial Sequence: Synthetic oligonucleotide
ggauaccacaagcacacug

SEQ ID NO: 412374 - RNA, 19 nt, Artificial Sequence
  Description of Artificial Sequence: Synthetic oligonucleotide
aauauccuaucaacaaauu

SEQ ID NO: 412375 - RNA, 19 nt, Artificial Sequence
  Description of Artificial Sequence: Synthetic oligonucleotide
gguuuccuaaagaaauagg

SEQ ID NO: 412376 - RNA, 19 nt, Artificial Sequence
  Description of Artificial Sequence: Synthetic oligonucleotide
ggaauagauccaaaagcag

SEQ ID NO: 412377 - RNA, 19 nt, Artificial Sequence
  Description of Artificial Sequence: Synthetic oligonucleotide
ucagauggaaguuguuguu

SEQ ID NO: 412378 - RNA, 19 nt, Artificial Sequence
  Description of Artificial Sequence: Synthetic oligonucleotide
guauaagauugugagccac

SEQ ID NO: 412379 - RNA, 19 nt, Artificial Sequence
  Description of Artificial Sequence: Synthetic oligonucleotide
aguuauuagaaaggucuaa

SEQ ID NO: 412380 - RNA, 19 nt, Artificial Sequence
  Description of Artificial Sequence: Synthetic oligonucleotide
uuagaccaagauguuuugu

SEQ ID NO: 412381 - RNA, 19 nt, Artificial Sequence
  Description of Artificial Sequence: Synthetic oligonucleotide
cuaugugauugaaacugca

SEQ ID NO: 412382 - RNA, 19 nt, Artificial Sequence
  Description of Artificial Sequence: Synthetic oligonucleotide
uucuuagagucaguucaug

SEQ ID NO: 412383 - RNA, 19 nt, Artificial Sequence
  Description of Artificial Sequence: Synthetic oligonucleotide
ucucccaagaucagccgau

SEQ ID NO: 412384 - RNA, 19 nt, Artificial Sequence
  Description of Artificial Sequence: Synthetic oligonucleotide
gaguauacuuuacacacuu

SEQ ID NO: 412385 - RNA, 19 nt, Artificial Sequence
  Description of Artificial Sequence: Synthetic oligonucleotide
guaaacagaaugaguauua

SEQ ID NO: 412386 - RNA, 19 nt, Artificial Sequence
  Description of Artificial Sequence: Synthetic oligonucleotide
aagaauugccagccauuuu

SEQ ID NO: 412387 - RNA, 19 nt, Artificial Sequence
  Description of Artificial Sequence: Synthetic oligonucleotide
augcacuuguaaaaccauc

SEQ ID NO: 412388 - RNA, 19 nt, Artificial Sequence
  Description of Artificial Sequence: Synthetic oligonucleotide
cagcaauaaguaucagaug

SEQ ID NO: 412389 - RNA, 19 nt, Artificial Sequence
  Description of Artificial Sequence: Synthetic oligonucleotide
ccuaaaguccagcaccagg

SEQ ID NO: 412390 - RNA, 19 nt, Artificial Sequence
  Description of Artificial Sequence: Synthetic oligonucleotide
cacucuagguagguguucc

SEQ ID NO: 412391 - RNA, 19 nt, Artificial Sequence
  Description of Artificial Sequence: Synthetic oligonucleotide
cuauggagagugucaaaca

SEQ ID NO: 412392 - RNA, 19 nt, Artificial Sequence
  Description of Artificial Sequence: Synthetic oligonucleotide
auaagauugugagccacau

SEQ ID NO: 412393 - RNA, 19 nt, Artificial Sequence
  Description of Artificial Sequence: Synthetic oligonucleotide
uuguugugacucauauuua

SEQ ID NO: 412394 - RNA, 19 nt, Artificial Sequence
  Description of Artificial Sequence: Synthetic oligonucleotide
ucaagucuauggagagugu

SEQ ID NO: 412395 - RNA, 19 nt, Artificial Sequence
  Description of Artificial Sequence: Synthetic oligonucleotide
guauaagagaugucaagau

SEQ ID NO: 412396 - RNA, 19 nt, Artificial Sequence
  Description of Artificial Sequence: Synthetic oligonucleotide
uaaguguucuagguugguc

SEQ ID NO: 412397 - RNA, 19 nt, Artificial Sequence
  Description of Artificial Sequence: Synthetic oligonucleotide
acauaacagguggcauucc

SEQ ID NO: 412398 - RNA, 19 nt, Artificial Sequence
  Description of Artificial Sequence: Synthetic oligonucleotide
agccgaugcacuuguaaaa

SEQ ID NO: 412399 - RNA, 19 nt, Artificial Sequence
  Description of Artificial Sequence: Synthetic oligonucleotide
caagucuauggagaguguc

SEQ ID NO: 412400 - RNA, 19 nt, Artificial Sequence
  Description of Artificial Sequence: Synthetic oligonucleotide
uuaagguguugagacuggu

SEQ ID NO: 412401 - RNA, 19 nt, Artificial Sequence
  Description of Artificial Sequence: Synthetic oligonucleotide
caagggguaagaacauuga

SEQ ID NO: 412402 - RNA, 19 nt, Artificial Sequence
  Description of Artificial Sequence: Synthetic oligonucleotide
gaccaagauguuuuguccu

SEQ ID NO: 412403 - RNA, 19 nt, Artificial Sequence
  Description of Artificial Sequence: Synthetic oligonucleotide
cauauacaggcaaagggau

SEQ ID NO: 412404 - RNA, 19 nt, Artificial Sequence
  Description of Artificial Sequence: Synthetic oligonucleotide
ucuacagguguugcacaug

SEQ ID NO: 412405 - RNA, 19 nt, Artificial Sequence
  Description of Artificial Sequence: Synthetic oligonucleotide
aacugcaaucaagagucuu

SEQ ID NO: 412406 - RNA, 19 nt, Artificial Sequence
  Description of Artificial Sequence: Synthetic oligonucleotide
gguguuaguauaagagaug

SEQ ID NO: 412407 - RNA, 19 nt, Artificial Sequence
  Description of Artificial Sequence: Synthetic oligonucleotide
uagcggucaaaccuuucua

SEQ ID NO: 412408 - RNA, 19 nt, Artificial Sequence
  Description of Artificial Sequence: Synthetic oligonucleotide
cuaggcgcuuuagauacac

SEQ ID NO: 412409 - RNA, 19 nt, Artificial Sequence
  Description of Artificial Sequence: Synthetic oligonucleotide
uggagccuaauuccuugaa

SEQ ID NO: 412410 - RNA, 19 nt, Artificial Sequence
  Description of Artificial Sequence: Synthetic oligonucleotide
aagugucuagacaccacaa

SEQ ID NO: 412411 - RNA, 19 nt, Artificial Sequence
  Description of Artificial Sequence: Synthetic oligonucleotide
caaucucauauucaaagau

SEQ ID NO: 412412 - RNA, 19 nt, Artificial Sequence
  Description of Artificial Sequence: Synthetic oligonucleotide
uauuccuuuggaggucucu

SEQ ID NO: 412413 - RNA, 19 nt, Artificial Sequence
  Description of Artificial Sequence: Synthetic oligonucleotide
agucuauggagagugucaa

SEQ ID NO: 412414 - RNA, 19 nt, Artificial Sequence
  Description of Artificial Sequence: Synthetic oligonucleotide
cagugauaucuucugaaaa

SEQ ID NO: 412415 - RNA, 19 nt, Artificial Sequence
  Description of Artificial Sequence: Synthetic oligonucleotide
uaagauugugagccacauu

SEQ ID NO: 412416 - RNA, 19 nt, Artificial Sequence
  Description of Artificial Sequence: Synthetic oligonucleotide
aagauacaccagcgacucu

SEQ ID NO: 412417 - RNA, 19 nt, Artificial Sequence
  Description of Artificial Sequence: Synthetic oligonucleotide
auaugggcguuccuagcau

SEQ ID NO: 412418 - RNA, 19 nt, Artificial Sequence
  Description of Artificial Sequence: Synthetic oligonucleotide
ccagcgacucugaauaaag

SEQ ID NO: 412419 - RNA, 19 nt, Artificial Sequence
  Description of Artificial Sequence: Synthetic oligonucleotide
agcucuaaagaaagauuga

SEQ ID NO: 412420 - RNA, 19 nt, Artificial Sequence
  Description of Artificial Sequence: Synthetic oligonucleotide
gauugagcuggggauuuuc

SEQ ID NO: 412421 - RNA, 19 nt, Artificial Sequence
  Description of Artificial Sequence: Synthetic oligonucleotide
agaguauacuuuacacacu

SEQ ID NO: 412422 - RNA, 19 nt, Artificial Sequence
  Description of Artificial Sequence: Synthetic oligonucleotide
cuucuaugacauagcgguc

SEQ ID NO: 412423 - RNA, 19 nt, Artificial Sequence
  Description of Artificial Sequence: Synthetic oligonucleotide
aguauacuuuacacacuug

SEQ ID NO: 412424 - RNA, 19 nt, Artificial Sequence
  Description of Artificial Sequence: Synthetic oligonucleotide
ccucaaauggucaccuuac

SEQ ID NO: 412425 - RNA, 19 nt, Artificial Sequence
  Description of Artificial Sequence: Synthetic oligonucleotide
gaagucgauacagcuccac

SEQ ID NO: 412426 - RNA, 19 nt, Artificial Sequence
  Description of Artificial Sequence: Synthetic oligonucleotide
cauugaaaucaauuuuggu

SEQ ID NO: 412427 - RNA, 19 nt, Artificial Sequence
  Description of Artificial Sequence: Synthetic oligonucleotide
uaagaaggcuagacucuuu

SEQ ID NO: 412428 - RNA, 19 nt, Artificial Sequence
  Description of Artificial Sequence: Synthetic oligonucleotide
uuaguugaauaugggcguu

SEQ ID NO: 412429 - RNA, 19 nt, Artificial Sequence
  Description of Artificial Sequence: Synthetic oligonucleotide
ugagacuggucaagccaaa

SEQ ID NO: 412430 - RNA, 19 nt, Artificial Sequence
  Description of Artificial Sequence: Synthetic oligonucleotide
agaaugaguauuagaccaa

SEQ ID NO: 412431 - RNA, 19 nt, Artificial Sequence
  Description of Artificial Sequence: Synthetic oligonucleotide
cucuagguagguguuccug

SEQ ID NO: 412432 - RNA, 19 nt, Artificial Sequence
  Description of Artificial Sequence: Synthetic oligonucleotide
augcuauaguggauaccac

SEQ ID NO: 412433 - RNA, 19 nt, Artificial Sequence
  Description of Artificial Sequence: Synthetic oligonucleotide
uaugggcguuccuagcaua

SEQ ID NO: 412434 - RNA, 19 nt, Artificial Sequence
  Description of Artificial Sequence: Synthetic oligonucleotide
auacagcauacuaaguauu

SEQ ID NO: 412435 - RNA, 19 nt, Artificial Sequence
  Description of Artificial Sequence: Synthetic oligonucleotide
ccaugagcauguauuaauc

SEQ ID NO: 412436 - RNA, 19 nt, Artificial Sequence
  Description of Artificial Sequence: Synthetic oligonucleotide
ucuaggcgcuuuagauaca

SEQ ID NO: 412437 - RNA, 19 nt, Artificial Sequence
  Description of Artificial Sequence: Synthetic oligonucleotide
ggcuccagguugaauaaag

SEQ ID NO: 412438 - RNA, 19 nt, Artificial Sequence
  Description of Artificial Sequence: Synthetic oligonucleotide
gcauuauuccuuuggaggu

SEQ ID NO: 412439 - RNA, 19 nt, Artificial Sequence
  Description of Artificial Sequence: Synthetic oligonucleotide
ugucaagauagagcaguuu

SEQ ID NO: 412440 - RNA, 19 nt, Artificial Sequence
  Description of Artificial Sequence: Synthetic oligonucleotide
cuuccggcucuuguggaag

SEQ ID NO: 412441 - RNA, 19 nt, Artificial Sequence
  Description of Artificial Sequence: Synthetic oligonucleotide
uaguugaauaugggcguuc

SEQ ID NO: 412442 - RNA, 19 nt, Artificial Sequence
  Description of Artificial Sequence: Synthetic oligonucleotide
uaggcgcuuuagauacaca

SEQ ID NO: 412443 - RNA, 19 nt, Artificial Sequence
  Description of Artificial Sequence: Synthetic oligonucleotide
auuacuucuuagagucagu

SEQ ID NO: 412444 - RNA, 19 nt, Artificial Sequence
  Description of Artificial Sequence: Synthetic oligonucleotide
guggaaugcugaaaaucca

SEQ ID NO: 412445 - RNA, 19 nt, Artificial Sequence
  Description of Artificial Sequence: Synthetic oligonucleotide
ccaagaucagccgaugcac

SEQ ID NO: 412446 - RNA, 19 nt, Artificial Sequence
  Description of Artificial Sequence: Synthetic oligonucleotide
cucaaauggucaccuuaca

SEQ ID NO: 412447 - RNA, 19 nt, Artificial Sequence
  Description of Artificial Sequence: Synthetic oligonucleotide
aaacugcaaucaagagucu

SEQ ID NO: 412448 - RNA, 19 nt, Artificial Sequence
  Description of Artificial Sequence: Synthetic oligonucleotide
caccgacacacugaugaug

SEQ ID NO: 412449 - RNA, 19 nt, Artificial Sequence
  Description of Artificial Sequence: Synthetic oligonucleotide
cauagcggucaaaccuuuc

SEQ ID NO: 412450 - RNA, 19 nt, Artificial Sequence
  Description of Artificial Sequence: Synthetic oligonucleotide
ggauuuucacguaaagucu

SEQ ID NO: 412451 - RNA, 19 nt, Artificial Sequence
  Description of Artificial Sequence: Synthetic oligonucleotide
auaacagguggcauuccua

SEQ ID NO: 412452 - RNA, 19 nt, Artificial Sequence
  Description of Artificial Sequence: Synthetic oligonucleotide
ggugagcuguaauauuuaa

SEQ ID NO: 412453 - RNA, 19 nt, Artificial Sequence
  Description of Artificial Sequence: Synthetic oligonucleotide
uucaagggguaagaacauu

SEQ ID NO: 412454 - RNA, 19 nt, Artificial Sequence
  Description of Artificial Sequence: Synthetic oligonucleotide
cagccuuauuuaugauaug

SEQ ID NO: 412455 - RNA, 19 nt, Artificial Sequence
  Description of Artificial Sequence: Synthetic oligonucleotide
cauaacagguggcauuccu

SEQ ID NO: 412456 - RNA, 19 nt, Artificial Sequence
  Description of Artificial Sequence: Synthetic oligonucleotide
ggaaugcagcuguuuauaa

SEQ ID NO: 412457 - RNA, 19 nt, Artificial Sequence
  Description of Artificial Sequence: Synthetic oligonucleotide
gaaagaauugccagccauu

SEQ ID NO: 412458 - RNA, 19 nt, Artificial Sequence
  Description of Artificial Sequence: Synthetic oligonucleotide
guugugacucauauuuagu

SEQ ID NO: 412459 - RNA, 19 nt, Artificial Sequence
  Description of Artificial Sequence: Synthetic oligonucleotide
ggagccuaauuccuugaaa

SEQ ID NO: 412460 - RNA, 19 nt, Artificial Sequence
  Description of Artificial Sequence: Synthetic oligonucleotide
gacauagcggucaaaccuu

SEQ ID NO: 412461 - RNA, 19 nt, Artificial Sequence
  Description of Artificial Sequence: Synthetic oligonucleotide
ccaagauguuuuguccucc

SEQ ID NO: 412462 - RNA, 19 nt, Artificial Sequence
  Description of Artificial Sequence: Synthetic oligonucleotide
accagcgacucugaauaaa

SEQ ID NO: 412463 - RNA, 19 nt, Artificial Sequence
  Description of Artificial Sequence: Synthetic oligonucleotide
cuagguagguguuccugcu

SEQ ID NO: 412464 - RNA, 19 nt, Artificial Sequence
  Description of Artificial Sequence: Synthetic oligonucleotide
guagaccagaaaugcuaua

SEQ ID NO: 412465 - RNA, 19 nt, Artificial Sequence
  Description of Artificial Sequence: Synthetic oligonucleotide
auacaccagcgacucugaa

SEQ ID NO: 412466 - RNA, 19 nt, Artificial Sequence
  Description of Artificial Sequence: Synthetic oligonucleotide
ggucaccuuacacaguccu

SEQ ID NO: 412467 - RNA, 19 nt, Artificial Sequence
  Description of Artificial Sequence: Synthetic oligonucleotide
gcgcuuuagauacacauuu

SEQ ID NO: 412468 - RNA, 19 nt, Artificial Sequence
  Description of Artificial Sequence: Synthetic oligonucleotide
agacucuuugggaaauguu

SEQ ID NO: 412469 - RNA, 19 nt, Artificial Sequence
  Description of Artificial Sequence: Synthetic oligonucleotide
gguuaugaaugcaaguuuu

SEQ ID NO: 412470 - RNA, 19 nt, Artificial Sequence
  Description of Artificial Sequence: Synthetic oligonucleotide
caagaucagccgaugcacu

SEQ ID NO: 412471 - RNA, 19 nt, Artificial Sequence
  Description of Artificial Sequence: Synthetic oligonucleotide
cagaaacauuugccaagca

SEQ ID NO: 412472 - RNA, 19 nt, Artificial Sequence
  Description of Artificial Sequence: Synthetic oligonucleotide
ccaauagguaggcugucca

SEQ ID NO: 412473 - RNA, 19 nt, Artificial Sequence
  Description of Artificial Sequence: Synthetic oligonucleotide
guugaauaugggcguuccu

SEQ ID NO: 412474 - RNA, 19 nt, Artificial Sequence
  Description of Artificial Sequence: Synthetic oligonucleotide
ugguagccccuuuguuggu

SEQ ID NO: 412475 - RNA, 19 nt, Artificial Sequence
  Description of Artificial Sequence: Synthetic oligonucleotide
gugaaccggaacuccucaa

SEQ ID NO: 412476 - RNA, 19 nt, Artificial Sequence
  Description of Artificial Sequence: Synthetic oligonucleotide
cucccaagaucagccgaug

SEQ ID NO: 412477 - RNA, 19 nt, Artificial Sequence
  Description of Artificial Sequence: Synthetic oligonucleotide
augggcguuccuagcauau

SEQ ID NO: 412478 - RNA, 19 nt, Artificial Sequence
  Description of Artificial Sequence: Synthetic oligonucleotide
guagauuguugugacucau

SEQ ID NO: 412479 - RNA, 19 nt, Artificial Sequence
  Description of Artificial Sequence: Synthetic oligonucleotide
agaagucgauacagcucca

SEQ ID NO: 412480 - RNA, 19 nt, Artificial Sequence
  Description of Artificial Sequence: Synthetic oligonucleotide
ggggauuuucacguaaagu

SEQ ID NO: 412481 - RNA, 19 nt, Artificial Sequence
  Description of Artificial Sequence: Synthetic oligonucleotide
ggaguccuucaucucuaca

SEQ ID NO: 412482 - RNA, 19 nt, Artificial Sequence
  Description of Artificial Sequence: Synthetic oligonucleotide
cgcuuuagauacacauuug

SEQ ID NO: 412483 - RNA, 19 nt, Artificial Sequence
  Description of Artificial Sequence: Synthetic oligonucleotide
ugggcguuccuagcauauc

SEQ ID NO: 412484 - RNA, 19 nt, Artificial Sequence
  Description of Artificial Sequence: Synthetic oligonucleotide
gggaaugcagcuguuuaua

SEQ ID NO: 412485 - RNA, 19 nt, Artificial Sequence
  Description of Artificial Sequence: Synthetic oligonucleotide
gggcguuccuagcauaucu

SEQ ID NO: 412486 - RNA, 19 nt, Artificial Sequence
  Description of Artificial Sequence: Synthetic oligonucleotide
guaaaaccauccagguuau

SEQ ID NO: 412487 - RNA, 19 nt, Artificial Sequence
  Description of Artificial Sequence: Synthetic oligonucleotide
acauagcggucaaaccuuu

SEQ ID NO: 412488 - RNA, 19 nt, Artificial Sequence
  Description of Artificial Sequence: Synthetic oligonucleotide
agccccuuuguugguaaua

SEQ ID NO: 412489 - RNA, 19 nt, Artificial Sequence
  Description of Artificial Sequence: Synthetic oligonucleotide
ggguaagaacauugaaaau

SEQ ID NO: 412490 - RNA, 19 nt, Artificial Sequence
  Description of Artificial Sequence: Synthetic oligonucleotide
ggcguuccuagcauaucuc

SEQ ID NO: 412491 - RNA, 19 nt, Artificial Sequence
  Description of Artificial Sequence: Synthetic oligonucleotide
gcguuccuagcauaucucu

SEQ ID NO: 412492 - RNA, 19 nt, Artificial Sequence
  Description of Artificial Sequence: Synthetic oligonucleotide
ugccuccccagagcauugu

SEQ ID NO: 412493 - RNA, 19 nt, Artificial Sequence
  Description of Artificial Sequence: Synthetic oligonucleotide
ccuuacacaguccuucuau

SEQ ID NO: 412494 - RNA, 19 nt, Artificial Sequence
  Description of Artificial Sequence: Synthetic oligonucleotide
gccccuuuguugguaauaa

SEQ ID NO: 412495 - RNA, 19 nt, Artificial Sequence
  Description of Artificial Sequence: Synthetic oligonucleotide
gugccuccccagagcauug

SEQ ID NO: 412496 - RNA, 19 nt, Artificial Sequence
  Description of Artificial Sequence: Synthetic oligonucleotide
cuaaguguucuagguuggu

SEQ ID NO: 412497 - RNA, 19 nt, Artificial Sequence
  Description of Artificial Sequence: Synthetic oligonucleotide
gccagagacauugcagaaa

SEQ ID NO: 412498 - RNA, 19 nt, Artificial Sequence
  Description of Artificial Sequence: Synthetic oligonucleotide
cuaugacauagcggucaaa

SEQ ID NO: 412499 - RNA, 19 nt, Artificial Sequence
  Description of Artificial Sequence: Synthetic oligonucleotide
cagguugaauaaagucaau

SEQ ID NO: 412500 - RNA, 19 nt, Artificial Sequence
  Description of Artificial Sequence: Synthetic oligonucleotide
caccagcgacucugaauaa

SEQ ID NO: 412501 - RNA, 19 nt, Artificial Sequence
  Description of Artificial Sequence: Synthetic oligonucleotide
cuguugcucccucuggauu

SEQ ID NO: 412502 - RNA, 19 nt, Artificial Sequence
  Description of Artificial Sequence: Synthetic oligonucleotide
ggcucuuguggaagccuuc

SEQ ID NO: 412503 - RNA, 19 nt, Artificial Sequence
  Description of Artificial Sequence: Synthetic oligonucleotide
gcuagacucuuugggaaau

SEQ ID NO: 412504 - RNA, 19 nt, Artificial Sequence
  Description of Artificial Sequence: Synthetic oligonucleotide
cugcuaagguuugccauuu

SEQ ID NO: 412505 - RNA, 19 nt, Artificial Sequence
  Description of Artificial Sequence: Synthetic oligonucleotide
ccacucuagguagguguuc

SEQ ID NO: 412506 - RNA, 19 nt, Artificial Sequence
  Description of Artificial Sequence: Synthetic oligonucleotide
gucaccuuacacaguccuu

SEQ ID NO: 412507 - RNA, 19 nt, Artificial Sequence
  Description of Artificial Sequence: Synthetic oligonucleotide
ccggaacuccucaaauggu

SEQ ID NO: 412508 - RNA, 19 nt, Artificial Sequence
  Description of Artificial Sequence: Synthetic oligonucleotide
ccccuuuguugguaauaaa

SEQ ID NO: 412509 - RNA, 19 nt, Artificial Sequence
  Description of Artificial Sequence: Synthetic oligonucleotide
aucagccgaugcacuugua

SEQ ID NO: 412510 - RNA, 19 nt, Artificial Sequence
  Description of Artificial Sequence: Synthetic oligonucleotide
cuccucaaauggucaccuu

SEQ ID NO: 412511 - RNA, 19 nt, Artificial Sequence
  Description of Artificial Sequence: Synthetic oligonucleotide
caauaaccuuccggcucuu

SEQ ID NO: 412512 - RNA, 19 nt, Artificial Sequence
  Description of Artificial Sequence: Synthetic oligonucleotide
ccgacacacugaugauggu

SEQ ID NO: 412513 - RNA, 19 nt, Artificial Sequence
  Description of Artificial Sequence: Synthetic oligonucleotide
ccaaaacugguagccccuu

SEQ ID NO: 412514 - RNA, 19 nt, Artificial Sequence
  Description of Artificial Sequence: Synthetic oligonucleotide
aaagaugccccuuaguggg

SEQ ID NO: 412515 - RNA, 19 nt, Artificial Sequence
  Description of Artificial Sequence: Synthetic oligonucleotide
acggauaccgauuugggcg

SEQ ID NO: 412516 - RNA, 19 nt, Artificial Sequence
  Description of Artificial Sequence: Synthetic oligonucleotide
ucuacuaccagccucccug

SEQ ID NO: 412517 - RNA, 19 nt, Artificial Sequence
  Description of Artificial Sequence: Synthetic oligonucleotide
ucugguaucggccauggug

SEQ ID NO: 412518 - RNA, 19 nt, Artificial Sequence
  Description of Artificial Sequence: Synthetic oligonucleotide
aucacaacgacccucucgg

SEQ ID NO: 412519 - RNA, 19 nt, Artificial Sequence
  Description of Artificial Sequence: Synthetic oligonucleotide
aaggucauguuuguugugc

SEQ ID NO: 412520 - RNA, 19 nt, Artificial Sequence
  Description of Artificial Sequence: Synthetic oligonucleotide
acacggugagaacagaacc

SEQ ID NO: 412521 - RNA, 19 nt, Artificial Sequence
  Description of Artificial Sequence: Synthetic oligonucleotide
ucgcaguagauccagagcc

SEQ ID NO: 412522 - RNA, 19 nt, Artificial Sequence
  Description of Artificial Sequence: Synthetic oligonucleotide
aaguugacgucacaaccac

SEQ ID NO: 412523 - RNA, 19 nt, Artificial Sequence
  Description of Artificial Sequence: Synthetic oligonucleotide
aagaucugaaugcggucgc

SEQ ID NO: 412524 - RNA, 19 nt, Artificial Sequence
  Description of Artificial Sequence: Synthetic oligonucleotide
agauguagugcaguaaagc

SEQ ID NO: 412525 - RNA, 19 nt, Artificial Sequence
  Description of Artificial Sequence: Synthetic oligonucleotide
ucacacgaagaucugaaug

SEQ ID NO: 412526 - RNA, 19 nt, Artificial Sequence
  Description of Artificial Sequence: Synthetic oligonucleotide
ugcaguguugcccucauca

SEQ ID NO: 412527 - RNA, 19 nt, Artificial Sequence
  Description of Artificial Sequence: Synthetic oligonucleotide
ucuaccuggcccaaguaag

SEQ ID NO: 412528 - RNA, 19 nt, Artificial Sequence
  Description of Artificial Sequence: Synthetic oligonucleotide
ucaacaaugcugcuggcac

SEQ ID NO: 412529 - RNA, 19 nt, Artificial Sequence
  Description of Artificial Sequence: Synthetic oligonucleotide
ucggauuaggaccugggcc

SEQ ID NO: 412530 - RNA, 19 nt, Artificial Sequence
  Description of Artificial Sequence: Synthetic oligonucleotide
aacgcaugccacgaagucc

SEQ ID NO: 412531 - RNA, 19 nt, Artificial Sequence
  Description of Artificial Sequence: Synthetic oligonucleotide
aacacuaggcggauguggc

SEQ ID NO: 412532 - RNA, 19 nt, Artificial Sequence
  Description of Artificial Sequence: Synthetic oligonucleotide
acaccaagcacucggcagc

SEQ ID NO: 412533 - RNA, 19 nt, Artificial Sequence
  Description of Artificial Sequence: Synthetic oligonucleotide
guugucguagagcagcagg

SEQ ID NO: 412534 - RNA, 19 nt, Artificial Sequence
  Description of Artificial Sequence: Synthetic oligonucleotide
aacacgcugccucaccaac

SEQ ID NO: 412535 - RNA, 19 nt, Artificial Sequence
  Description of Artificial Sequence: Synthetic oligonucleotide
uaaagguccaccguugacc

SEQ ID NO: 412536 - RNA, 19 nt, Artificial Sequence
  Description of Artificial Sequence: Synthetic oligonucleotide
ugcgccuacagucagcucu

SEQ ID NO: 412537 - RNA, 19 nt, Artificial Sequence
  Description of Artificial Sequence: Synthetic oligonucleotide
uucgucacgguguugggag

SEQ ID NO: 412538 - RNA, 19 nt, Artificial Sequence
  Description of Artificial Sequence: Synthetic oligonucleotide
uguagugcaguguugcccu

SEQ ID NO: 412539 - RNA, 19 nt, Artificial Sequence
  Description of Artificial Sequence: Synthetic oligonucleotide
guaagcagccaccugcagg

SEQ ID NO: 412540 - RNA, 19 nt, Artificial Sequence
  Description of Artificial Sequence: Synthetic oligonucleotide
gagcacaccaagcacucgg

SEQ ID NO: 412541 - RNA, 19 nt, Artificial Sequence
  Description of Artificial Sequence: Synthetic oligonucleotide
uggaacacuaggcggaugu

SEQ ID NO: 412542 - RNA, 19 nt, Artificial Sequence
  Description of Artificial Sequence: Synthetic oligonucleotide
ugcuucgagugccauuucg

SEQ ID NO: 412543 - RNA, 19 nt, Artificial Sequence
  Description of Artificial Sequence: Synthetic oligonucleotide
ucuaggaagccccucugga

SEQ ID NO: 412544 - RNA, 19 nt, Artificial Sequence
  Description of Artificial Sequence: Synthetic oligonucleotide
agauugaagcuuccgguug

SEQ ID NO: 412545 - RNA, 19 nt, Artificial Sequence
  Description of Artificial Sequence: Synthetic oligonucleotide
gugccuucgcaguagaucc

SEQ ID NO: 412546 - RNA, 19 nt, Artificial Sequence
  Description of Artificial Sequence: Synthetic oligonucleotide
agcugcauaguguagugca

SEQ ID NO: 412547 - RNA, 19 nt, Artificial Sequence
  Description of Artificial Sequence: Synthetic oligonucleotide
uucgcaguagauccagagc

SEQ ID NO: 412548 - RNA, 19 nt, Artificial Sequence
  Description of Artificial Sequence: Synthetic oligonucleotide
guguuuaccaccucugaac

SEQ ID NO: 412549 - RNA, 19 nt, Artificial Sequence
  Description of Artificial Sequence: Synthetic oligonucleotide
accgauuugggcguugucg

SEQ ID NO: 412550 - RNA, 19 nt, Artificial Sequence
  Description of Artificial Sequence: Synthetic oligonucleotide
aggccuguagccucgacag

SEQ ID NO: 412551 - RNA, 19 nt, Artificial Sequence
  Description of Artificial Sequence: Synthetic oligonucleotide
gaucggacaagugaugcgc

SEQ ID NO: 412552 - RNA, 19 nt, Artificial Sequence
  Description of Artificial Sequence: Synthetic oligonucleotide
gacacgacacuuccaacgc

SEQ ID NO: 412553 - RNA, 19 nt, Artificial Sequence
  Description of Artificial Sequence: Synthetic oligonucleotide
ugugcauguagcacugugu

SEQ ID NO: 412554 - RNA, 19 nt, Artificial Sequence
  Description of Artificial Sequence: Synthetic oligonucleotide
uuuaccaccucugaaccgu

SEQ ID NO: 412555 - RNA, 19 nt, Artificial Sequence
  Description of Artificial Sequence: Synthetic oligonucleotide
ucucggauuaggaccuggg

SEQ ID NO: 412556 - RNA, 19 nt, Artificial Sequence
  Description of Artificial Sequence: Synthetic oligonucleotide
ugacugcuagcacauggcc

SEQ ID NO: 412557 - RNA, 19 nt, Artificial Sequence
  Description of Artificial Sequence: Synthetic oligonucleotide
ugggacucgagggagaccc

SEQ ID NO: 412558 - RNA, 19 nt, Artificial Sequence
  Description of Artificial Sequence: Synthetic oligonucleotide
gagcacucgaccuucggug

SEQ ID NO: 412559 - RNA, 19 nt, Artificial Sequence
  Description of Artificial Sequence: Synthetic oligonucleotide
ugucgaugcagaucggaca

SEQ ID NO: 412560 - RNA, 19 nt, Artificial Sequence
  Description of Artificial Sequence: Synthetic oligonucleotide
aaggccuugagcacucgac

SEQ ID NO: 412561 - RNA, 19 nt, Artificial Sequence
  Description of Artificial Sequence: Synthetic oligonucleotide
aacacgcucacacgaagau

SEQ ID NO: 412562 - RNA, 19 nt, Artificial Sequence
  Description of Artificial Sequence: Synthetic oligonucleotide
uugugcauguagcacugug

SEQ ID NO: 412563 - RNA, 19 nt, Artificial Sequence
  Description of Artificial Sequence: Synthetic oligonucleotide
agaucggacaagugaugcg

SEQ ID NO: 412564 - RNA, 19 nt, Artificial Sequence
  Description of Artificial Sequence: Synthetic oligonucleotide
uccgagcacaccaagcacu

SEQ ID NO: 412565 - RNA, 19 nt, Artificial Sequence
  Description of Artificial Sequence: Synthetic oligonucleotide
cuucgcaguagauccagag

SEQ ID NO: 412566 - RNA, 19 nt, Artificial Sequence
  Description of Artificial Sequence: Synthetic oligonucleotide
auaaccaccuggcaccuga

SEQ ID NO: 412567 - RNA, 19 nt, Artificial Sequence
  Description of Artificial Sequence: Synthetic oligonucleotide
caucacaacgacccucucg

SEQ ID NO: 412568 - RNA, 19 nt, Artificial Sequence
  Description of Artificial Sequence: Synthetic oligonucleotide
uucgagugccauuucgagc

SEQ ID NO: 412569 - RNA, 19 nt, Artificial Sequence
  Description of Artificial Sequence: Synthetic oligonucleotide
uaguguagugcaguguugc

SEQ ID NO: 412570 - RNA, 19 nt, Artificial Sequence
  Description of Artificial Sequence: Synthetic oligonucleotide
ugaaugcggucgcggaugg

SEQ ID NO: 412571 - RNA, 19 nt, Artificial Sequence
  Description of Artificial Sequence: Synthetic oligonucleotide
gacggauaccgauuugggc

SEQ ID NO: 412572 - RNA, 19 nt, Artificial Sequence
  Description of Artificial Sequence: Synthetic oligonucleotide
aggggcuaaagguccaccg

SEQ ID NO: 412573 - RNA, 19 nt, Artificial Sequence
  Description of Artificial Sequence: Synthetic oligonucleotide
auggguaaggucauguuug

SEQ ID NO: 412574 - RNA, 19 nt, Artificial Sequence
  Description of Artificial Sequence: Synthetic oligonucleotide
uugaccaccaacugaccac

SEQ ID NO: 412575 - RNA, 19 nt, Artificial Sequence
  Description of Artificial Sequence: Synthetic oligonucleotide
gugacggauaccgauuugg

SEQ ID NO: 412576 - RNA, 19 nt, Artificial Sequence
  Description of Artificial Sequence: Synthetic oligonucleotide
gauuugggcguugucguag

SEQ ID NO: 412577 - RNA, 19 nt, Artificial Sequence
  Description of Artificial Sequence: Synthetic oligonucleotide
ugcgaugcugacacgguga

SEQ ID NO: 412578 - RNA, 19 nt, Artificial Sequence
  Description of Artificial Sequence: Synthetic oligonucleotide
accgucugggcguagcuuc

SEQ ID NO: 412579 - RNA, 19 nt, Artificial Sequence
  Description of Artificial Sequence: Synthetic oligonucleotide
gcaaguugacgucacaacc

SEQ ID NO: 412580 - RNA, 19 nt, Artificial Sequence
  Description of Artificial Sequence: Synthetic oligonucleotide
agguucgucacgguguugg

SEQ ID NO: 412581 - RNA, 19 nt, Artificial Sequence
  Description of Artificial Sequence: Synthetic oligonucleotide
cucgcaaguuuccaucucc

SEQ ID NO: 412582 - RNA, 19 nt, Artificial Sequence
  Description of Artificial Sequence: Synthetic oligonucleotide
cacggugcgaugcugacac

SEQ ID NO: 412583 - RNA, 19 nt, Artificial Sequence
  Description of Artificial Sequence: Synthetic oligonucleotide
acuucuaggaagccccucu

SEQ ID NO: 412584 - RNA, 19 nt, Artificial Sequence
  Description of Artificial Sequence: Synthetic oligonucleotide
auagcgcucaaaggcaugg

SEQ ID NO: 412585 - RNA, 19 nt, Artificial Sequence
  Description of Artificial Sequence: Synthetic oligonucleotide
cuucgagugccauuucgag

SEQ ID NO: 412586 - RNA, 19 nt, Artificial Sequence
  Description of Artificial Sequence: Synthetic oligonucleotide
ugccucaccaacacacuug

SEQ ID NO: 412587 - RNA, 19 nt, Artificial Sequence
  Description of Artificial Sequence: Synthetic oligonucleotide
uccaccguugaccaccaac

SEQ ID NO: 412588 - RNA, 19 nt, Artificial Sequence
  Description of Artificial Sequence: Synthetic oligonucleotide
agcacucgaccuucggugg

SEQ ID NO: 412589 - RNA, 19 nt, Artificial Sequence
  Description of Artificial Sequence: Synthetic oligonucleotide
ucacggugguuguuaagag

SEQ ID NO: 412590 - RNA, 19 nt, Artificial Sequence
  Description of Artificial Sequence: Synthetic oligonucleotide
acgagcagcgguacuagcc

SEQ ID NO: 412591 - RNA, 19 nt, Artificial Sequence
  Description of Artificial Sequence: Synthetic oligonucleotide
cugaccacucgcaaguuuc

SEQ ID NO: 412592 - RNA, 19 nt, Artificial Sequence
  Description of Artificial Sequence: Synthetic oligonucleotide
aggccgauaggccacuaag

SEQ ID NO: 412593 - RNA, 19 nt, Artificial Sequence
  Description of Artificial Sequence: Synthetic oligonucleotide
ugagcacucgaccuucggu

SEQ ID NO: 412594 - RNA, 19 nt, Artificial Sequence
  Description of Artificial Sequence: Synthetic oligonucleotide
caaguugacgucacaacca

SEQ ID NO: 412595 - RNA, 19 nt, Artificial Sequence
  Description of Artificial Sequence: Synthetic oligonucleotide
ugcccgggagaccugaggc

SEQ ID NO: 412596 - RNA, 19 nt, Artificial Sequence
  Description of Artificial Sequence: Synthetic oligonucleotide
agcgguacuagccccaggu

SEQ ID NO: 412597 - RNA, 19 nt, Artificial Sequence
  Description of Artificial Sequence: Synthetic oligonucleotide
ugacgucacaaccacgcuc

SEQ ID NO: 412598 - RNA, 19 nt, Artificial Sequence
  Description of Artificial Sequence: Synthetic oligonucleotide
gaucugaaugcggucgcgg

SEQ ID NO: 412599 - RNA, 19 nt, Artificial Sequence
  Description of Artificial Sequence: Synthetic oligonucleotide
uguuaagagcugccagaug

SEQ ID NO: 412600 - RNA, 19 nt, Artificial Sequence
  Description of Artificial Sequence: Synthetic oligonucleotide
agaaugcaggggcgugucc

SEQ ID NO: 412601 - RNA, 19 nt, Artificial Sequence
  Description of Artificial Sequence: Synthetic oligonucleotide
acggugguuguuaagagcu

SEQ ID NO: 412602 - RNA, 19 nt, Artificial Sequence
  Description of Artificial Sequence: Synthetic oligonucleotide
gcugauaaccaccuggcac

SEQ ID NO: 412603 - RNA, 19 nt, Artificial Sequence
  Description of Artificial Sequence: Synthetic oligonucleotide
cagauguagugcaguaaag

SEQ ID NO: 412604 - RNA, 19 nt, Artificial Sequence
  Description of Artificial Sequence: Synthetic oligonucleotide
acucggcagcaucuggccc

SEQ ID NO: 412605 - RNA, 19 nt, Artificial Sequence
  Description of Artificial Sequence: Synthetic oligonucleotide
gacgcugcagugcaacaug

SEQ ID NO: 412606 - RNA, 19 nt, Artificial Sequence
  Description of Artificial Sequence: Synthetic oligonucleotide
uugagcacucgaccuucgg

SEQ ID NO: 412607 - RNA, 19 nt, Artificial Sequence
  Description of Artificial Sequence: Synthetic oligonucleotide
cugucggggacucagugug

SEQ ID NO: 412608 - RNA, 19 nt, Artificial Sequence
  Description of Artificial Sequence: Synthetic oligonucleotide
ugugcugcccgggagaccu

SEQ ID NO: 412609 - RNA, 19 nt, Artificial Sequence
  Description of Artificial Sequence: Synthetic oligonucleotide
ugguguuuaccaccucuga

SEQ ID NO: 412610 - RNA, 19 nt, Artificial Sequence
  Description of Artificial Sequence: Synthetic oligonucleotide
caaccacgcucacacaggg

SEQ ID NO: 412611 - RNA, 19 nt, Artificial Sequence
  Description of Artificial Sequence: Synthetic oligonucleotide
gacgucacaaccacgcuca

SEQ ID NO: 412612 - RNA, 19 nt, Artificial Sequence
  Description of Artificial Sequence: Synthetic oligonucleotide
ccuuagugggacucgaggg

SEQ ID NO: 412613 - RNA, 19 nt, Artificial Sequence
  Description of Artificial Sequence: Synthetic oligonucleotide
ucuggaacgcucagccaca

SEQ ID NO: 412614 - RNA, 19 nt, Artificial Sequence
  Description of Artificial Sequence: Synthetic oligonucleotide
uggugugccgaacacgcuc

SEQ ID NO: 412615 - RNA, 19 nt, Artificial Sequence
  Description of Artificial Sequence: Synthetic oligonucleotide
ucgcaaguuuccaucucca

SEQ ID NO: 412616 - RNA, 19 nt, Artificial Sequence
  Description of Artificial Sequence: Synthetic oligonucleotide
cucggaccacuuuugcucc

SEQ ID NO: 412617 - RNA, 19 nt, Artificial Sequence
  Description of Artificial Sequence: Synthetic oligonucleotide
cacggugguuguuaagagc

SEQ ID NO: 412618 - RNA, 19 nt, Artificial Sequence
  Description of Artificial Sequence: Synthetic oligonucleotide
ucauagcgcucaaaggcau

SEQ ID NO: 412619 - RNA, 19 nt, Artificial Sequence
  Description of Artificial Sequence: Synthetic oligonucleotide
gugccgaacacgcucacac

SEQ ID NO: 412620 - RNA, 19 nt, Artificial Sequence
  Description of Artificial Sequence: Synthetic oligonucleotide
ucgagcauccaccccacau

SEQ ID NO: 412621 - RNA, 19 nt, Artificial Sequence
  Description of Artificial Sequence: Synthetic oligonucleotide
cucacacagggucuuuacc

SEQ ID NO: 412622 - RNA, 19 nt, Artificial Sequence
  Description of Artificial Sequence: Synthetic oligonucleotide
ucugggcguagcuucuugc

SEQ ID NO: 412623 - RNA, 19 nt, Artificial Sequence
  Description of Artificial Sequence: Synthetic oligonucleotide
cuaccuggcccaaguaagc

SEQ ID NO: 412624 - RNA, 19 nt, Artificial Sequence
  Description of Artificial Sequence: Synthetic oligonucleotide
gaugcauggugcagcagug

SEQ ID NO: 412625 - RNA, 19 nt, Artificial Sequence
  Description of Artificial Sequence: Synthetic oligonucleotide
aggaguacccuuguggccu

SEQ ID NO: 412626 - RNA, 19 nt, Artificial Sequence
  Description of Artificial Sequence: Synthetic oligonucleotide
gggucuuuaccacuucuag

SEQ ID NO: 412627 - RNA, 19 nt, Artificial Sequence
  Description of Artificial Sequence: Synthetic oligonucleotide
cucggauuaggaccugggc

SEQ ID NO: 412628 - RNA, 19 nt, Artificial Sequence
  Description of Artificial Sequence: Synthetic oligonucleotide
gaugacgcugcagugcaac

SEQ ID NO: 412629 - RNA, 19 nt, Artificial Sequence
  Description of Artificial Sequence: Synthetic oligonucleotide
cugucgaugcagaucggac

SEQ ID NO: 412630 - RNA, 19 nt, Artificial Sequence
  Description of Artificial Sequence: Synthetic oligonucleotide
ucugaaugcggucgcggau

SEQ ID NO: 412631 - RNA, 19 nt, Artificial Sequence
  Description of Artificial Sequence: Synthetic oligonucleotide
guaaggucauguuuguugu

SEQ ID NO: 412632 - RNA, 19 nt, Artificial Sequence
  Description of Artificial Sequence: Synthetic oligonucleotide
ugccgaacacgcucacacg

SEQ ID NO: 412633 - RNA, 19 nt, Artificial Sequence
  Description of Artificial Sequence: Synthetic oligonucleotide
cuacuaccagccucccugg

SEQ ID NO: 412634 - RNA, 19 nt, Artificial Sequence
  Description of Artificial Sequence: Synthetic oligonucleotide
guaucggccauggugugcc

SEQ ID NO: 412635 - RNA, 19 nt, Artificial Sequence
  Description of Artificial Sequence: Synthetic oligonucleotide
uucguggcccacacgguac

SEQ ID NO: 412636 - RNA, 19 nt, Artificial Sequence
  Description of Artificial Sequence: Synthetic oligonucleotide
acaacgacccucucggauu

SEQ ID NO: 412637 - RNA, 19 nt, Artificial Sequence
  Description of Artificial Sequence: Synthetic oligonucleotide
acucgcaaguuuccaucuc

SEQ ID NO: 412638 - RNA, 19 nt, Artificial Sequence
  Description of Artificial Sequence: Synthetic oligonucleotide
cuaaagguccaccguugac

SEQ ID NO: 412639 - RNA, 19 nt, Artificial Sequence
  Description of Artificial Sequence: Synthetic oligonucleotide
gagggaugcauggugcagc

SEQ ID NO: 412640 - RNA, 19 nt, Artificial Sequence
  Description of Artificial Sequence: Synthetic oligonucleotide
aaacacgcugccucaccaa

SEQ ID NO: 412641 - RNA, 19 nt, Artificial Sequence
  Description of Artificial Sequence: Synthetic oligonucleotide
aucugaaugcggucgcgga

SEQ ID NO: 412642 - RNA, 19 nt, Artificial Sequence
  Description of Artificial Sequence: Synthetic oligonucleotide
acaaccacgcucacacagg

SEQ ID NO: 412643 - RNA, 19 nt, Artificial Sequence
  Description of Artificial Sequence: Synthetic oligonucleotide
ugguuguuaagagcugcca

SEQ ID NO: 412644 - RNA, 19 nt, Artificial Sequence
  Description of Artificial Sequence: Synthetic oligonucleotide
gcuuaugucagcacccucc

SEQ ID NO: 412645 - RNA, 19 nt, Artificial Sequence
  Description of Artificial Sequence: Synthetic oligonucleotide
gagcccgagcuacauuucc

SEQ ID NO: 412646 - RNA, 19 nt, Artificial Sequence
  Description of Artificial Sequence: Synthetic oligonucleotide
ugugaccgggcgugagugg

SEQ ID NO: 412647 - RNA, 19 nt, Artificial Sequence
  Description of Artificial Sequence: Synthetic oligonucleotide
cacggugagaacagaacca

SEQ ID NO: 412648 - RNA, 19 nt, Artificial Sequence
  Description of Artificial Sequence: Synthetic oligonucleotide
ugucgcucccggaagcgcu

SEQ ID NO: 412649 - RNA, 19 nt, Artificial Sequence
  Description of Artificial Sequence: Synthetic oligonucleotide
agcacaccaagcacucggc

SEQ ID NO: 412650 - RNA, 19 nt, Artificial Sequence
  Description of Artificial Sequence: Synthetic oligonucleotide
aggccacuaagcaggaggg

SEQ ID NO: 412651 - RNA, 19 nt, Artificial Sequence
  Description of Artificial Sequence: Synthetic oligonucleotide
uuugggcguugucguagag

SEQ ID NO: 412652 - RNA, 19 nt, Artificial Sequence
  Description of Artificial Sequence: Synthetic oligonucleotide
ucacaucacaacgacccuc

SEQ ID NO: 412653 - RNA, 19 nt, Artificial Sequence
  Description of Artificial Sequence: Synthetic oligonucleotide
uccgcaugggcauccggca

SEQ ID NO: 412654 - RNA, 19 nt, Artificial Sequence
  Description of Artificial Sequence: Synthetic oligonucleotide
uuucgagcauccaccccac

SEQ ID NO: 412655 - RNA, 19 nt, Artificial Sequence
  Description of Artificial Sequence: Synthetic oligonucleotide
cauguagcacugugugcag

SEQ ID NO: 412656 - RNA, 19 nt, Artificial Sequence
  Description of Artificial Sequence: Synthetic oligonucleotide
cauuucgagcauccacccc

SEQ ID NO: 412657 - RNA, 19 nt, Artificial Sequence
  Description of Artificial Sequence: Synthetic oligonucleotide
uguccgcaugggcauccgg

SEQ ID NO: 412658 - RNA, 19 nt, Artificial Sequence
  Description of Artificial Sequence: Synthetic oligonucleotide
agugcagccucuacuacca

SEQ ID NO: 412659 - RNA, 19 nt, Artificial Sequence
  Description of Artificial Sequence: Synthetic oligonucleotide
aggcggaccgggcaccugg

SEQ ID NO: 412660 - RNA, 19 nt, Artificial Sequence
  Description of Artificial Sequence: Synthetic oligonucleotide
caugccacgaaguccaugu

SEQ ID NO: 412661 - RNA, 19 nt, Artificial Sequence
  Description of Artificial Sequence: Synthetic oligonucleotide
cauccaccccacauccugc

SEQ ID NO: 412662 - RNA, 19 nt, Artificial Sequence
  Description of Artificial Sequence: Synthetic oligonucleotide
uugggcguugucguagagc

SEQ ID NO: 412663 - RNA, 19 nt, Artificial Sequence
  Description of Artificial Sequence: Synthetic oligonucleotide
agcccgagcuacauuuccc

SEQ ID NO: 412664 - RNA, 19 nt, Artificial Sequence
  Description of Artificial Sequence: Synthetic oligonucleotide
cccuucguggcccacacgg

SEQ ID NO: 412665 - RNA, 19 nt, Artificial Sequence
  Description of Artificial Sequence: Synthetic oligonucleotide
agaugccccuuagugggac

SEQ ID NO: 412666 - RNA, 19 nt, Artificial Sequence
  Description of Artificial Sequence: Synthetic oligonucleotide
cuucuaggaagccccucug

SEQ ID NO: 412667 - RNA, 19 nt, Artificial Sequence
  Description of Artificial Sequence: Synthetic oligonucleotide
gucgcggaugggcuggcgg

SEQ ID NO: 412668 - RNA, 19 nt, Artificial Sequence
  Description of Artificial Sequence: Synthetic oligonucleotide
cugguaucggccauggugu

SEQ ID NO: 412669 - RNA, 19 nt, Artificial Sequence
  Description of Artificial Sequence: Synthetic oligonucleotide
acacgcucacacgaagauc

SEQ ID NO: 412670 - RNA, 19 nt, Artificial Sequence
  Description of Artificial Sequence: Synthetic oligonucleotide
auuugggcguugucguaga

SEQ ID NO: 412671 - RNA, 19 nt, Artificial Sequence
  Description of Artificial Sequence: Synthetic oligonucleotide
agggaugcauggugcagca

SEQ ID NO: 412672 - RNA, 19 nt, Artificial Sequence
  Description of Artificial Sequence: Synthetic oligonucleotide
ggcaaguugacgucacaac

SEQ ID NO: 412673 - RNA, 19 nt, Artificial Sequence
  Description of Artificial Sequence: Synthetic oligonucleotide
cuugucgcucccggaagcg

SEQ ID NO: 412674 - RNA, 19 nt, Artificial Sequence
  Description of Artificial Sequence: Synthetic oligonucleotide
uuccgguugcgcacauuca

SEQ ID NO: 412675 - RNA, 19 nt, Artificial Sequence
  Description of Artificial Sequence: Synthetic oligonucleotide
caacgcaugccacgaaguc

SEQ ID NO: 412676 - RNA, 19 nt, Artificial Sequence
  Description of Artificial Sequence: Synthetic oligonucleotide
cauccugcgagcgcacucc

SEQ ID NO: 412677 - RNA, 19 nt, Artificial Sequence
  Description of Artificial Sequence: Synthetic oligonucleotide
ucucuggaacgcucagcca

SEQ ID NO: 412678 - RNA, 19 nt, Artificial Sequence
  Description of Artificial Sequence: Synthetic oligonucleotide
cauagcgcucaaaggcaug

SEQ ID NO: 412679 - RNA, 19 nt, Artificial Sequence
  Description of Artificial Sequence: Synthetic oligonucleotide
ucgcggaugggcuggcggc

SEQ ID NO: 412680 - RNA, 19 nt, Artificial Sequence
  Description of Artificial Sequence: Synthetic oligonucleotide
agugugaccgggcgugagu

SEQ ID NO: 412681 - RNA, 19 nt, Artificial Sequence
  Description of Artificial Sequence: Synthetic oligonucleotide
uggcuauugguagcaguga

SEQ ID NO: 412682 - RNA, 19 nt, Artificial Sequence
  Description of Artificial Sequence: Synthetic oligonucleotide
gugaccgggcgugaguggg

SEQ ID NO: 412683 - RNA, 19 nt, Artificial Sequence
  Description of Artificial Sequence: Synthetic oligonucleotide
auaguguagugcaguguug

SEQ ID NO: 412684 - RNA, 19 nt, Artificial Sequence
  Description of Artificial Sequence: Synthetic oligonucleotide
acgguguugggagugcuca

SEQ ID NO: 412685 - RNA, 19 nt, Artificial Sequence
  Description of Artificial Sequence: Synthetic oligonucleotide
caaacacgcugccucacca

SEQ ID NO: 412686 - RNA, 19 nt, Artificial Sequence
  Description of Artificial Sequence: Synthetic oligonucleotide
ggagauugaagcuuccggu

SEQ ID NO: 412687 - RNA, 19 nt, Artificial Sequence
  Description of Artificial Sequence: Synthetic oligonucleotide
ccaacugaccacucgcaag

SEQ ID NO: 412688 - RNA, 19 nt, Artificial Sequence
  Description of Artificial Sequence: Synthetic oligonucleotide
uccggcaaguugacgucac

SEQ ID NO: 412689 - RNA, 19 nt, Artificial Sequence
  Description of Artificial Sequence: Synthetic oligonucleotide
accacucgcaaguuuccau

SEQ ID NO: 412690 - RNA, 19 nt, Artificial Sequence
  Description of Artificial Sequence: Synthetic oligonucleotide
ugauaaccaccuggcaccu

SEQ ID NO: 412691 - RNA, 19 nt, Artificial Sequence
  Description of Artificial Sequence: Synthetic oligonucleotide
gaacacgcucacacgaaga

SEQ ID NO: 412692 - RNA, 19 nt, Artificial Sequence
  Description of Artificial Sequence: Synthetic oligonucleotide
ccucggaccacuuuugcuc

SEQ ID NO: 412693 - RNA, 19 nt, Artificial Sequence
  Description of Artificial Sequence: Synthetic oligonucleotide
cauaguguagugcaguguu

SEQ ID NO: 412694 - RNA, 19 nt, Artificial Sequence
  Description of Artificial Sequence: Synthetic oligonucleotide
gccgauaggccacuaagca

SEQ ID NO: 412695 - RNA, 19 nt, Artificial Sequence
  Description of Artificial Sequence: Synthetic oligonucleotide
ugcgagcgcacuccucaca

SEQ ID NO: 412696 - RNA, 19 nt, Artificial Sequence
  Description of Artificial Sequence: Synthetic oligonucleotide
uccacgagcagcgguacua

SEQ ID NO: 412697 - RNA, 19 nt, Artificial Sequence
  Description of Artificial Sequence: Synthetic oligonucleotide
cauccggcaaguugacguc

SEQ ID NO: 412698 - RNA, 19 nt, Artificial Sequence
  Description of Artificial Sequence: Synthetic oligonucleotide
gagauugaagcuuccgguu

SEQ ID NO: 412699 - RNA, 19 nt, Artificial Sequence
  Description of Artificial Sequence: Synthetic oligonucleotide
ugguaucggccauggugug

SEQ ID NO: 412700 - RNA, 19 nt, Artificial Sequence
  Description of Artificial Sequence: Synthetic oligonucleotide
ucggacaagugaugcgcuc

SEQ ID NO: 412701 - RNA, 19 nt, Artificial Sequence
  Description of Artificial Sequence: Synthetic oligonucleotide
ucguggcccacacgguaca

SEQ ID NO: 412702 - RNA, 19 nt, Artificial Sequence
  Description of Artificial Sequence: Synthetic oligonucleotide
gugagccccauucccaguc

SEQ ID NO: 412703 - RNA, 19 nt, Artificial Sequence
  Description of Artificial Sequence: Synthetic oligonucleotide
cuagcacauggcccuugag

SEQ ID NO: 412704 - RNA, 19 nt, Artificial Sequence
  Description of Artificial Sequence: Synthetic oligonucleotide
agauccagagcccgagcua

SEQ ID NO: 412705 - RNA, 19 nt, Artificial Sequence
  Description of Artificial Sequence: Synthetic oligonucleotide
augacgcugcagugcaaca

SEQ ID NO: 412706 - RNA, 19 nt, Artificial Sequence
  Description of Artificial Sequence: Synthetic oligonucleotide
ugccuucgcaguagaucca

SEQ ID NO: 412707 - RNA, 19 nt, Artificial Sequence
  Description of Artificial Sequence: Synthetic oligonucleotide
gauaccgauuugggcguug

SEQ ID NO: 412708 - RNA, 19 nt, Artificial Sequence
  Description of Artificial Sequence: Synthetic oligonucleotide
uuaccaccucugaaccguc

SEQ ID NO: 412709 - RNA, 19 nt, Artificial Sequence
  Description of Artificial Sequence: Synthetic oligonucleotide
gugugaccgggcgugagug

SEQ ID NO: 412710 - RNA, 19 nt, Artificial Sequence
  Description of Artificial Sequence: Synthetic oligonucleotide
gaagcgcugggcacauccc

SEQ ID NO: 412711 - RNA, 19 nt, Artificial Sequence
  Description of Artificial Sequence: Synthetic oligonucleotide
guccgcaugggcauccggc

SEQ ID NO: 412712 - RNA, 19 nt, Artificial Sequence
  Description of Artificial Sequence: Synthetic oligonucleotide
ugcugcgccuacagucagc

SEQ ID NO: 412713 - RNA, 19 nt, Artificial Sequence
  Description of Artificial Sequence: Synthetic oligonucleotide
ugggugccuucgcaguaga

SEQ ID NO: 412714 - RNA, 19 nt, Artificial Sequence
  Description of Artificial Sequence: Synthetic oligonucleotide
acgacccucucggauuagg

SEQ ID NO: 412715 - RNA, 19 nt, Artificial Sequence
  Description of Artificial Sequence: Synthetic oligonucleotide
ugccccuuagugggacucg

SEQ ID NO: 412716 - RNA, 19 nt, Artificial Sequence
  Description of Artificial Sequence: Synthetic oligonucleotide
gaggggcuaaagguccacc

SEQ ID NO: 412717 - RNA, 19 nt, Artificial Sequence
  Description of Artificial Sequence: Synthetic oligonucleotide
gagcuacauuucccagugc

SEQ ID NO: 412718 - RNA, 19 nt, Artificial Sequence
  Description of Artificial Sequence: Synthetic oligonucleotide
caccguugaccaccaacug

SEQ ID NO: 412719 - RNA, 19 nt, Artificial Sequence
  Description of Artificial Sequence: Synthetic oligonucleotide
gggagugcucagcacgugc

SEQ ID NO: 412720 - RNA, 19 nt, Artificial Sequence
  Description of Artificial Sequence: Synthetic oligonucleotide
uaucggccauggugugccg

SEQ ID NO: 412721 - RNA, 19 nt, Artificial Sequence
  Description of Artificial Sequence: Synthetic oligonucleotide
uacuagccccaggugggcc

SEQ ID NO: 412722 - RNA, 19 nt, Artificial Sequence
  Description of Artificial Sequence: Synthetic oligonucleotide
ucggggacucagugugacc

SEQ ID NO: 412723 - RNA, 19 nt, Artificial Sequence
  Description of Artificial Sequence: Synthetic oligonucleotide
agccacggauguccaccac

SEQ ID NO: 412724 - RNA, 19 nt, Artificial Sequence
  Description of Artificial Sequence: Synthetic oligonucleotide
ggugccuucgcaguagauc

SEQ ID NO: 412725 - RNA, 19 nt, Artificial Sequence
  Description of Artificial Sequence: Synthetic oligonucleotide
uggcccuugagggaugcau

SEQ ID NO: 412726 - RNA, 19 nt, Artificial Sequence
  Description of Artificial Sequence: Synthetic oligonucleotide
ucggaccacuuuugcuccc

SEQ ID NO: 412727 - RNA, 19 nt, Artificial Sequence
  Description of Artificial Sequence: Synthetic oligonucleotide
gcaggcguugagcgcagcg

SEQ ID NO: 412728 - RNA, 19 nt, Artificial Sequence
  Description of Artificial Sequence: Synthetic oligonucleotide
gccgaacacgcucacacga

SEQ ID NO: 412729 - RNA, 19 nt, Artificial Sequence
  Description of Artificial Sequence: Synthetic oligonucleotide
ugugccgaacacgcucaca

SEQ ID NO: 412730 - RNA, 19 nt, Artificial Sequence
  Description of Artificial Sequence: Synthetic oligonucleotide
uugucgcucccggaagcgc

SEQ ID NO: 412731 - RNA, 19 nt, Artificial Sequence
  Description of Artificial Sequence: Synthetic oligonucleotide
ccgguagcggcucuguagc

SEQ ID NO: 412732 - RNA, 19 nt, Artificial Sequence
  Description of Artificial Sequence: Synthetic oligonucleotide
gguucgucacgguguuggg

SEQ ID NO: 412733 - RNA, 19 nt, Artificial Sequence
  Description of Artificial Sequence: Synthetic oligonucleotide
ccgcacuggaacacuaggc

SEQ ID NO: 412734 - RNA, 19 nt, Artificial Sequence
  Description of Artificial Sequence: Synthetic oligonucleotide
auaccgauuugggcguugu

SEQ ID NO: 412735 - RNA, 19 nt, Artificial Sequence
  Description of Artificial Sequence: Synthetic oligonucleotide
gaacgcucagccacaucca

SEQ ID NO: 412736 - RNA, 19 nt, Artificial Sequence
  Description of Artificial Sequence: Synthetic oligonucleotide
ugaccgggcgugaguggga

SEQ ID NO: 412737 - RNA, 19 nt, Artificial Sequence
  Description of Artificial Sequence: Synthetic oligonucleotide
caagcacucggcagcaucu

SEQ ID NO: 412738 - RNA, 19 nt, Artificial Sequence
  Description of Artificial Sequence: Synthetic oligonucleotide
ggcuaaagguccaccguug

SEQ ID NO: 412739 - RNA, 19 nt, Artificial Sequence
  Description of Artificial Sequence: Synthetic oligonucleotide
gcgaugcugacacggugag

SEQ ID NO: 412740 - RNA, 19 nt, Artificial Sequence
  Description of Artificial Sequence: Synthetic oligonucleotide
ggcaguccugcccugguuc

SEQ ID NO: 412741 - RNA, 19 nt, Artificial Sequence
  Description of Artificial Sequence: Synthetic oligonucleotide
uaccgauuugggcguuguc

SEQ ID NO: 412742 - RNA, 19 nt, Artificial Sequence
  Description of Artificial Sequence: Synthetic oligonucleotide
uggcagaaugcaggggcgu

SEQ ID NO: 412743 - RNA, 19 nt, Artificial Sequence
  Description of Artificial Sequence: Synthetic oligonucleotide
uuccaacgcaugccacgaa

SEQ ID NO: 412744 - RNA, 19 nt, Artificial Sequence
  Description of Artificial Sequence: Synthetic oligonucleotide
cacucgaccuucgguggcc

SEQ ID NO: 412745 - RNA, 19 nt, Artificial Sequence
  Description of Artificial Sequence: Synthetic oligonucleotide
aucggacaagugaugcgcu

SEQ ID NO: 412746 - RNA, 19 nt, Artificial Sequence
  Description of Artificial Sequence: Synthetic oligonucleotide
ucgucacgguguugggagu

SEQ ID NO: 412747 - RNA, 19 nt, Artificial Sequence
  Description of Artificial Sequence: Synthetic oligonucleotide
ggccgauaggccacuaagc

SEQ ID NO: 412748 - RNA, 19 nt, Artificial Sequence
  Description of Artificial Sequence: Synthetic oligonucleotide
agcgcacuccucacacacg

SEQ ID NO: 412749 - RNA, 19 nt, Artificial Sequence
  Description of Artificial Sequence: Synthetic oligonucleotide
acacacggugcgaugcuga

SEQ ID NO: 412750 - RNA, 19 nt, Artificial Sequence
  Description of Artificial Sequence: Synthetic oligonucleotide
ccacucgcaaguuuccauc

SEQ ID NO: 412751 - RNA, 19 nt, Artificial Sequence
  Description of Artificial Sequence: Synthetic oligonucleotide
aacgacccucucggauuag

SEQ ID NO: 412752 - RNA, 19 nt, Artificial Sequence
  Description of Artificial Sequence: Synthetic oligonucleotide
cggggacucagugugaccg

SEQ ID NO: 412753 - RNA, 19 nt, Artificial Sequence
  Description of Artificial Sequence: Synthetic oligonucleotide
ggugacggauaccgauuug

SEQ ID NO: 412754 - RNA, 19 nt, Artificial Sequence
  Description of Artificial Sequence: Synthetic oligonucleotide
ucacgguguugggagugcu

SEQ ID NO: 412755 - RNA, 19 nt, Artificial Sequence
  Description of Artificial Sequence: Synthetic oligonucleotide
accucacggugguuguuaa

SEQ ID NO: 412756 - RNA, 19 nt, Artificial Sequence
  Description of Artificial Sequence: Synthetic oligonucleotide
ugcccgugccagaaucuuu

SEQ ID NO: 412757 - RNA, 19 nt, Artificial Sequence
  Description of Artificial Sequence: Synthetic oligonucleotide
auccggcaaguugacguca

SEQ ID NO: 412758 - RNA, 19 nt, Artificial Sequence
  Description of Artificial Sequence: Synthetic oligonucleotide
cacgguguugggagugcuc

SEQ ID NO: 412759 - RNA, 19 nt, Artificial Sequence
  Description of Artificial Sequence: Synthetic oligonucleotide
gcuauugguagcagugaca

SEQ ID NO: 412760 - RNA, 19 nt, Artificial Sequence
  Description of Artificial Sequence: Synthetic oligonucleotide
gaaugcggucgcggauggg

SEQ ID NO: 412761 - RNA, 19 nt, Artificial Sequence
  Description of Artificial Sequence: Synthetic oligonucleotide
uucugacugcuagcacaug

SEQ ID NO: 412762 - RNA, 19 nt, Artificial Sequence
  Description of Artificial Sequence: Synthetic oligonucleotide
aaccgucugggcguagcuu

SEQ ID NO: 412763 - RNA, 19 nt, Artificial Sequence
  Description of Artificial Sequence: Synthetic oligonucleotide
gugagugggaugucucaua

SEQ ID NO: 412764 - RNA, 19 nt, Artificial Sequence
  Description of Artificial Sequence: Synthetic oligonucleotide
cauccacgagcagcgguac

SEQ ID NO: 412765 - RNA, 19 nt, Artificial Sequence
  Description of Artificial Sequence: Synthetic oligonucleotide
gucggggacucagugugac

SEQ ID NO: 412766 - RNA, 19 nt, Artificial Sequence
  Description of Artificial Sequence: Synthetic oligonucleotide
cagcuccgagcacaccaag

SEQ ID NO: 412767 - RNA, 19 nt, Artificial Sequence
  Description of Artificial Sequence: Synthetic oligonucleotide
uggaacgcucagccacauc

SEQ ID NO: 412768 - RNA, 19 nt, Artificial Sequence
  Description of Artificial Sequence: Synthetic oligonucleotide
guucgucacgguguuggga

SEQ ID NO: 412769 - RNA, 19 nt, Artificial Sequence
  Description of Artificial Sequence: Synthetic oligonucleotide
gaccacucgcaaguuucca

SEQ ID NO: 412770 - RNA, 19 nt, Artificial Sequence
  Description of Artificial Sequence: Synthetic oligonucleotide
cggauuaggaccugggcca

SEQ ID NO: 412771 - RNA, 19 nt, Artificial Sequence
  Description of Artificial Sequence: Synthetic oligonucleotide
gccuguagccucgacagca

SEQ ID NO: 412772 - RNA, 19 nt, Artificial Sequence
  Description of Artificial Sequence: Synthetic oligonucleotide
cugcuugucgcucccggaa

SEQ ID NO: 412773 - RNA, 19 nt, Artificial Sequence
  Description of Artificial Sequence: Synthetic oligonucleotide
cacgacacuuccaacgcau

SEQ ID NO: 412774 - RNA, 19 nt, Artificial Sequence
  Description of Artificial Sequence: Synthetic oligonucleotide
acggugcgaugcugacacg

SEQ ID NO: 412775 - RNA, 19 nt, Artificial Sequence
  Description of Artificial Sequence: Synthetic oligonucleotide
acgacacuuccaacgcaug

SEQ ID NO: 412776 - RNA, 19 nt, Artificial Sequence
  Description of Artificial Sequence: Synthetic oligonucleotide
ugggagugcucagcacgug

SEQ ID NO: 412777 - RNA, 19 nt, Artificial Sequence
  Description of Artificial Sequence: Synthetic oligonucleotide
cuucguggcccacacggua

SEQ ID NO: 412778 - RNA, 19 nt, Artificial Sequence
  Description of Artificial Sequence: Synthetic oligonucleotide
ccauggugugccgaacacg

SEQ ID NO: 412779 - RNA, 19 nt, Artificial Sequence
  Description of Artificial Sequence: Synthetic oligonucleotide
gcgagcgcacuccucacac

SEQ ID NO: 412780 - RNA, 19 nt, Artificial Sequence
  Description of Artificial Sequence: Synthetic oligonucleotide
auccacgagcagcgguacu

SEQ ID NO: 412781 - RNA, 19 nt, Artificial Sequence
  Description of Artificial Sequence: Synthetic oligonucleotide
auccugcgagcgcacuccu

SEQ ID NO: 412782 - RNA, 19 nt, Artificial Sequence
  Description of Artificial Sequence: Synthetic oligonucleotide
gguaucggccauggugugc

SEQ ID NO: 412783 - RNA, 19 nt, Artificial Sequence
  Description of Artificial Sequence: Synthetic oligonucleotide
cucggcagcaucuggcccu

SEQ ID NO: 412784 - RNA, 19 nt, Artificial Sequence
  Description of Artificial Sequence: Synthetic oligonucleotide
acacgcugccucaccaaca

SEQ ID NO: 412785 - RNA, 19 nt, Artificial Sequence
  Description of Artificial Sequence: Synthetic oligonucleotide
cacucgcaaguuuccaucu

SEQ ID NO: 412786 - RNA, 19 nt, Artificial Sequence
  Description of Artificial Sequence: Synthetic oligonucleotide
gaaccgucugggcguagcu

SEQ ID NO: 412787 - RNA, 19 nt, Artificial Sequence
  Description of Artificial Sequence: Synthetic oligonucleotide
ccaagcacucggcagcauc

SEQ ID NO: 412788 - RNA, 19 nt, Artificial Sequence
  Description of Artificial Sequence: Synthetic oligonucleotide
gcuucgagugccauuucga

SEQ ID NO: 412789 - RNA, 19 nt, Artificial Sequence
  Description of Artificial Sequence: Synthetic oligonucleotide
cugcgagcgcacuccucac

SEQ ID NO: 412790 - RNA, 19 nt, Artificial Sequence
  Description of Artificial Sequence: Synthetic oligonucleotide
cgaacacgcucacacgaag

SEQ ID NO: 412791 - RNA, 19 nt, Artificial Sequence
  Description of Artificial Sequence: Synthetic oligonucleotide
acacggugcgaugcugaca

SEQ ID NO: 412792 - RNA, 19 nt, Artificial Sequence
  Description of Artificial Sequence: Synthetic oligonucleotide
gccuucgcaguagauccag

SEQ ID NO: 412793 - RNA, 19 nt, Artificial Sequence
  Description of Artificial Sequence: Synthetic oligonucleotide
ggugugccgaacacgcuca

SEQ ID NO: 412794 - RNA, 19 nt, Artificial Sequence
  Description of Artificial Sequence: Synthetic oligonucleotide
auggccgcacuggaacacu

SEQ ID NO: 412795 - RNA, 19 nt, Artificial Sequence
  Description of Artificial Sequence: Synthetic oligonucleotide
agcagcgguacuagcccca

SEQ ID NO: 412796 - RNA, 19 nt, Artificial Sequence
  Description of Artificial Sequence: Synthetic oligonucleotide
gggcgcgcaugccccaugg

SEQ ID NO: 412797 - RNA, 19 nt, Artificial Sequence
  Description of Artificial Sequence: Synthetic oligonucleotide
ggaacacuaggcggaugug

SEQ ID NO: 412798 - RNA, 19 nt, Artificial Sequence
  Description of Artificial Sequence: Synthetic oligonucleotide
gcucacacgaagaucugaa

SEQ ID NO: 412799 - RNA, 19 nt, Artificial Sequence
  Description of Artificial Sequence: Synthetic oligonucleotide
cacuucuaggaagccccuc

SEQ ID NO: 412800 - RNA, 19 nt, Artificial Sequence
  Description of Artificial Sequence: Synthetic oligonucleotide
ccugcgagcgcacuccuca

SEQ ID NO: 412801 - RNA, 19 nt, Artificial Sequence
  Description of Artificial Sequence: Synthetic oligonucleotide
caacacacuugagguccac

SEQ ID NO: 412802 - RNA, 19 nt, Artificial Sequence
  Description of Artificial Sequence: Synthetic oligonucleotide
ggccauggugugccgaaca

SEQ ID NO: 412803 - RNA, 19 nt, Artificial Sequence
  Description of Artificial Sequence: Synthetic oligonucleotide
gguagcggcucuguagcuc

SEQ ID NO: 412804 - RNA, 19 nt, Artificial Sequence
  Description of Artificial Sequence: Synthetic oligonucleotide
cgaagaucugaaugcgguc

SEQ ID NO: 412805 - RNA, 19 nt, Artificial Sequence
  Description of Artificial Sequence: Synthetic oligonucleotide
cuggaacacuaggcggaug

SEQ ID NO: 412806 - RNA, 19 nt, Artificial Sequence
  Description of Artificial Sequence: Synthetic oligonucleotide
cugggcguagcuucuugcu

SEQ ID NO: 412807 - RNA, 19 nt, Artificial Sequence
  Description of Artificial Sequence: Synthetic oligonucleotide
ccgagcacaccaagcacuc

SEQ ID NO: 412808 - RNA, 19 nt, Artificial Sequence
  Description of Artificial Sequence: Synthetic oligonucleotide
ggcauccggcaaguugacg

SEQ ID NO: 412809 - RNA, 19 nt, Artificial Sequence
  Description of Artificial Sequence: Synthetic oligonucleotide
ccucaggccgauaggccac

SEQ ID NO: 412810 - RNA, 19 nt, Artificial Sequence
  Description of Artificial Sequence: Synthetic oligonucleotide
gcuagcacauggcccuuga

SEQ ID NO: 412811 - RNA, 19 nt, Artificial Sequence
  Description of Artificial Sequence: Synthetic oligonucleotide
uuugcccuucguggcccac

SEQ ID NO: 412812 - RNA, 19 nt, Artificial Sequence
  Description of Artificial Sequence: Synthetic oligonucleotide
ggccuugagcacucgaccu

SEQ ID NO: 412813 - RNA, 19 nt, Artificial Sequence
  Description of Artificial Sequence: Synthetic oligonucleotide
gcugucgaugcagaucgga

SEQ ID NO: 412814 - RNA, 19 nt, Artificial Sequence
  Description of Artificial Sequence: Synthetic oligonucleotide
ccaccguugaccaccaacu

SEQ ID NO: 412815 - RNA, 19 nt, Artificial Sequence
  Description of Artificial Sequence: Synthetic oligonucleotide
cggugcgaugcugacacgg

SEQ ID NO: 412816 - RNA, 19 nt, Artificial Sequence
  Description of Artificial Sequence: Synthetic oligonucleotide
gugugccgaacacgcucac

SEQ ID NO: 412817 - RNA, 19 nt, Artificial Sequence
  Description of Artificial Sequence: Synthetic oligonucleotide
gcccgggagaccugaggcc

SEQ ID NO: 412818 - RNA, 19 nt, Artificial Sequence
  Description of Artificial Sequence: Synthetic oligonucleotide
guguccgcaugggcauccg

SEQ ID NO: 412819 - RNA, 19 nt, Artificial Sequence
  Description of Artificial Sequence: Synthetic oligonucleotide
agggcgcgcaugccccaug

SEQ ID NO: 412820 - RNA, 19 nt, Artificial Sequence
  Description of Artificial Sequence: Synthetic oligonucleotide
caucccugcaaggccuuga

SEQ ID NO: 412821 - RNA, 19 nt, Artificial Sequence
  Description of Artificial Sequence: Synthetic oligonucleotide
auggugugccgaacacgcu

SEQ ID NO: 412822 - RNA, 19 nt, Artificial Sequence
  Description of Artificial Sequence: Synthetic oligonucleotide
gggcguguccgcaugggca

SEQ ID NO: 412823 - RNA, 19 nt, Artificial Sequence
  Description of Artificial Sequence: Synthetic oligonucleotide
gugggacucgagggagacc

SEQ ID NO: 412824 - RNA, 19 nt, Artificial Sequence
  Description of Artificial Sequence: Synthetic oligonucleotide
cgaagcuuguccagggcca

SEQ ID NO: 412825 - RNA, 19 nt, Artificial Sequence
  Description of Artificial Sequence: Synthetic oligonucleotide
gcccgugccagaaucuuuc

SEQ ID NO: 412826 - RNA, 19 nt, Artificial Sequence
  Description of Artificial Sequence: Synthetic oligonucleotide
ggcauggguaaggucaugu

SEQ ID NO: 412827 - RNA, 19 nt, Artificial Sequence
  Description of Artificial Sequence: Synthetic oligonucleotide
ccucacggugguuguuaag

SEQ ID NO: 412828 - RNA, 19 nt, Artificial Sequence
  Description of Artificial Sequence: Synthetic oligonucleotide
ccgugccagaaucuuucug

SEQ ID NO: 412829 - RNA, 19 nt, Artificial Sequence
  Description of Artificial Sequence: Synthetic oligonucleotide
caucugccgguagcggcuc

SEQ ID NO: 412830 - RNA, 19 nt, Artificial Sequence
  Description of Artificial Sequence: Synthetic oligonucleotide
ggggcuaaagguccaccgu

SEQ ID NO: 412831 - RNA, 19 nt, Artificial Sequence
  Description of Artificial Sequence: Synthetic oligonucleotide
cauguuuguugugcaugua

SEQ ID NO: 412832 - RNA, 19 nt, Artificial Sequence
  Description of Artificial Sequence: Synthetic oligonucleotide
ggcgugagugggaugucuc

SEQ ID NO: 412833 - RNA, 19 nt, Artificial Sequence
  Description of Artificial Sequence: Synthetic oligonucleotide
gcggucgcggaugggcugg

SEQ ID NO: 412834 - RNA, 19 nt, Artificial Sequence
  Description of Artificial Sequence: Synthetic oligonucleotide
gugcuucgagugccauuuc

SEQ ID NO: 412835 - RNA, 19 nt, Artificial Sequence
  Description of Artificial Sequence: Synthetic oligonucleotide
ggccgcacuggaacacuag

SEQ ID NO: 412836 - RNA, 19 nt, Artificial Sequence
  Description of Artificial Sequence: Synthetic oligonucleotide
ccucaccaacacacuugag

SEQ ID NO: 412837 - RNA, 19 nt, Artificial Sequence
  Description of Artificial Sequence: Synthetic oligonucleotide
gggcuaaagguccaccguu

SEQ ID NO: 412838 - RNA, 19 nt, Artificial Sequence
  Description of Artificial Sequence: Synthetic oligonucleotide
gcguugagcgcagcgccgc

SEQ ID NO: 412839 - RNA, 19 nt, Artificial Sequence
  Description of Artificial Sequence: Synthetic oligonucleotide
gcgccuacagucagcucug

SEQ ID NO: 412840 - RNA, 19 nt, Artificial Sequence
  Description of Artificial Sequence: Synthetic oligonucleotide
caccucacggugguuguua

SEQ ID NO: 412841 - RNA, 19 nt, Artificial Sequence
  Description of Artificial Sequence: Synthetic oligonucleotide
ggcaagagcugaugacgcu

SEQ ID NO: 412842 - RNA, 19 nt, Artificial Sequence
  Description of Artificial Sequence: Synthetic oligonucleotide
ccucgacagcagcugcaag

SEQ ID NO: 412843 - RNA, 19 nt, Artificial Sequence
  Description of Artificial Sequence: Synthetic oligonucleotide
cggugguuugcauagcuua

SEQ ID NO: 412844 - RNA, 19 nt, Artificial Sequence
  Description of Artificial Sequence: Synthetic oligonucleotide
gaccuucgguggccagguc

SEQ ID NO: 412845 - RNA, 19 nt, Artificial Sequence
  Description of Artificial Sequence: Synthetic oligonucleotide
ccgugcccgugccagaauc

SEQ ID NO: 412846 - RNA, 19 nt, Artificial Sequence
  Description of Artificial Sequence: Synthetic oligonucleotide
caggccgauaggccacuaa

SEQ ID NO: 412847 - RNA, 19 nt, Artificial Sequence
  Description of Artificial Sequence: Synthetic oligonucleotide
ggugguuugcauagcuuau

SEQ ID NO: 412848 - RNA, 19 nt, Artificial Sequence
  Description of Artificial Sequence: Synthetic oligonucleotide
cugcgccuacagucagcuc

SEQ ID NO: 412849 - RNA, 19 nt, Artificial Sequence
  Description of Artificial Sequence: Synthetic oligonucleotide
cagguucgucacgguguug

SEQ ID NO: 412850 - RNA, 19 nt, Artificial Sequence
  Description of Artificial Sequence: Synthetic oligonucleotide
gggaugcauggugcagcag

SEQ ID NO: 412851 - RNA, 19 nt, Artificial Sequence
  Description of Artificial Sequence: Synthetic oligonucleotide
ccaacgcaugccacgaagu

SEQ ID NO: 412852 - RNA, 19 nt, Artificial Sequence
  Description of Artificial Sequence: Synthetic oligonucleotide
ucaggccgauaggccacua

SEQ ID NO: 412853 - RNA, 19 nt, Artificial Sequence
  Description of Artificial Sequence: Synthetic oligonucleotide
gaggcggaccgggcaccug

SEQ ID NO: 412854 - RNA, 19 nt, Artificial Sequence
  Description of Artificial Sequence: Synthetic oligonucleotide
cuccucacacacggugcga

SEQ ID NO: 412855 - RNA, 19 nt, Artificial Sequence
  Description of Artificial Sequence: Synthetic oligonucleotide
gggugacggauaccgauuu

SEQ ID NO: 412856 - RNA, 19 nt, Artificial Sequence
  Description of Artificial Sequence: Synthetic oligonucleotide
gcccuucguggcccacacg

SEQ ID NO: 412857 - RNA, 19 nt, Artificial Sequence
  Description of Artificial Sequence: Synthetic oligonucleotide
ccgagcuacauuucccagu

SEQ ID NO: 412858 - RNA, 19 nt, Artificial Sequence
  Description of Artificial Sequence: Synthetic oligonucleotide
auggcccuugagggaugca

SEQ ID NO: 412859 - RNA, 19 nt, Artificial Sequence
  Description of Artificial Sequence: Synthetic oligonucleotide
accaagcacucggcagcau

SEQ ID NO: 412860 - RNA, 19 nt, Artificial Sequence
  Description of Artificial Sequence: Synthetic oligonucleotide
gggcguugucguagagcag

SEQ ID NO: 412861 - RNA, 19 nt, Artificial Sequence
  Description of Artificial Sequence: Synthetic oligonucleotide
ggucgcggaugggcuggcg

SEQ ID NO: 412862 - RNA, 19 nt, Artificial Sequence
  Description of Artificial Sequence: Synthetic oligonucleotide
gcucuaccuggcccaagua

SEQ ID NO: 412863 - RNA, 19 nt, Artificial Sequence
  Description of Artificial Sequence: Synthetic oligonucleotide
cgucacgguguugggagug

SEQ ID NO: 412864 - RNA, 19 nt, Artificial Sequence
  Description of Artificial Sequence: Synthetic oligonucleotide
ggugcgaugcugacacggu

SEQ ID NO: 412865 - RNA, 19 nt, Artificial Sequence
  Description of Artificial Sequence: Synthetic oligonucleotide
cugugcuucgagugccauu

SEQ ID NO: 412866 - RNA, 19 nt, Artificial Sequence
  Description of Artificial Sequence: Synthetic oligonucleotide
gaccgggcgugagugggau

SEQ ID NO: 412867 - RNA, 19 nt, Artificial Sequence
  Description of Artificial Sequence: Synthetic oligonucleotide
gggcauccggcaaguugac

SEQ ID NO: 412868 - RNA, 19 nt, Artificial Sequence
  Description of Artificial Sequence: Synthetic oligonucleotide
cguugucguagagcagcag

SEQ ID NO: 412869 - RNA, 19 nt, Artificial Sequence
  Description of Artificial Sequence: Synthetic oligonucleotide
gcagguucgucacgguguu

SEQ ID NO: 412870 - RNA, 19 nt, Artificial Sequence
  Description of Artificial Sequence: Synthetic oligonucleotide
cgcaaguuuccaucuccaa

SEQ ID NO: 412871 - RNA, 19 nt, Artificial Sequence
  Description of Artificial Sequence: Synthetic oligonucleotide
caugccccauggccgcacu

SEQ ID NO: 412872 - RNA, 19 nt, Artificial Sequence
  Description of Artificial Sequence: Synthetic oligonucleotide
gcaugccccauggccgcac

SEQ ID NO: 412873 - RNA, 19 nt, Artificial Sequence
  Description of Artificial Sequence: Synthetic oligonucleotide
cggauaccgauuugggcgu

SEQ ID NO: 412874 - RNA, 19 nt, Artificial Sequence
  Description of Artificial Sequence: Synthetic oligonucleotide
cggcaaguugacgucacaa

SEQ ID NO: 412875 - RNA, 19 nt, Artificial Sequence
  Description of Artificial Sequence: Synthetic oligonucleotide
cucaggccgauaggccacu

SEQ ID NO: 412876 - RNA, 19 nt, Artificial Sequence
  Description of Artificial Sequence: Synthetic oligonucleotide
cgaugcagaucggacaagu

SEQ ID NO: 412877 - RNA, 19 nt, Artificial Sequence
  Description of Artificial Sequence: Synthetic oligonucleotide
cuggaacgcucagccacau

SEQ ID NO: 412878 - RNA, 19 nt, Artificial Sequence
  Description of Artificial Sequence: Synthetic oligonucleotide
ccggcaaguugacgucaca

SEQ ID NO: 412879 - RNA, 19 nt, Artificial Sequence
  Description of Artificial Sequence: Synthetic oligonucleotide
guccaccguugaccaccaa

SEQ ID NO: 412880 - RNA, 19 nt, Artificial Sequence
  Description of Artificial Sequence: Synthetic oligonucleotide
cgucacaaccacgcucaca

SEQ ID NO: 412881 - RNA, 19 nt, Artificial Sequence
  Description of Artificial Sequence: Synthetic oligonucleotide
cgauuugggcguugucgua

SEQ ID NO: 412882 - RNA, 19 nt, Artificial Sequence
  Description of Artificial Sequence: Synthetic oligonucleotide
cugccgguagcggcucugu

SEQ ID NO: 412883 - RNA, 19 nt, Artificial Sequence
  Description of Artificial Sequence: Synthetic oligonucleotide
ggguaaggucauguuuguu

SEQ ID NO: 412884 - RNA, 19 nt, Artificial Sequence
  Description of Artificial Sequence: Synthetic oligonucleotide
ggcggaccgggcaccugga

SEQ ID NO: 412885 - RNA, 19 nt, Artificial Sequence
  Description of Artificial Sequence: Synthetic oligonucleotide
cccgugccagaaucuuucu

SEQ ID NO: 412886 - RNA, 19 nt, Artificial Sequence
  Description of Artificial Sequence: Synthetic oligonucleotide
cgugcccgugccagaaucu

SEQ ID NO: 412887 - RNA, 19 nt, Artificial Sequence
  Description of Artificial Sequence: Synthetic oligonucleotide
ccgucugggcguagcuucu

SEQ ID NO: 412888 - RNA, 19 nt, Artificial Sequence
  Description of Artificial Sequence: Synthetic oligonucleotide
ggccacacucagugagcuu

SEQ ID NO: 412889 - RNA, 19 nt, Artificial Sequence
  Description of Artificial Sequence: Synthetic oligonucleotide
cguugagcgcagcgccgca

SEQ ID NO: 412890 - RNA, 19 nt, Artificial Sequence
  Description of Artificial Sequence: Synthetic oligonucleotide
cgugagugggaugucucau

SEQ ID NO: 412891 - RNA, 19 nt, Artificial Sequence
  Description of Artificial Sequence: Synthetic oligonucleotide
ggauaccgauuugggcguu

SEQ ID NO: 412892 - RNA, 19 nt, Artificial Sequence
  Description of Artificial Sequence: Synthetic oligonucleotide
cccugccgugccagacaca

SEQ ID NO: 412893 - RNA, 19 nt, Artificial Sequence
  Description of Artificial Sequence: Synthetic oligonucleotide
cgaccuucgguggccaggu

SEQ ID NO: 412894 - RNA, 19 nt, Artificial Sequence
  Description of Artificial Sequence: Synthetic oligonucleotide
gggugccuucgcaguagau

SEQ ID NO: 412895 - RNA, 19 nt, Artificial Sequence
  Description of Artificial Sequence: Synthetic oligonucleotide
gcggaccgggcaccuggau

SEQ ID NO: 412896 - RNA, 19 nt, Artificial Sequence
  Description of Artificial Sequence: Synthetic oligonucleotide
cgguagcggcucuguagcu

SEQ ID NO: 412897 - RNA, 19 nt, Artificial Sequence
  Description of Artificial Sequence: Synthetic oligonucleotide
cggucgcggaugggcuggc

SEQ ID NO: 412898 - RNA, 19 nt, Artificial Sequence
  Description of Artificial Sequence: Synthetic oligonucleotide
ccaccuguucugggugccu

SEQ ID NO: 412899 - RNA, 19 nt, Artificial Sequence
  Description of Artificial Sequence: Synthetic oligonucleotide
cgagugccauuucgagcau

SEQ ID NO: 412900 - RNA, 19 nt, Artificial Sequence
  Description of Artificial Sequence: Synthetic oligonucleotide
cgcaugccccauggccgca

SEQ ID NO: 412901 - RNA, 19 nt, Artificial Sequence
  Description of Artificial Sequence: Synthetic oligonucleotide
cgaggcggaccgggcaccu

SEQ ID NO: 412902 - RNA, 19 nt, Artificial Sequence
  Description of Artificial Sequence: Synthetic oligonucleotide
aauuacagaaggaagaaac

SEQ ID NO: 412903 - RNA, 19 nt, Artificial Sequence
  Description of Artificial Sequence: Synthetic oligonucleotide
aaguguguugcccauagcc

SEQ ID NO: 412904 - RNA, 19 nt, Artificial Sequence
  Description of Artificial Sequence: Synthetic oligonucleotide
ugugauaucaccguaaucc

SEQ ID NO: 412905 - RNA, 19 nt, Artificial Sequence
  Description of Artificial Sequence: Synthetic oligonucleotide
cugaagauuuguuagaagg

SEQ ID NO: 412906 - RNA, 19 nt, Artificial Sequence
  Description of Artificial Sequence: Synthetic oligonucleotide
aaaucaucauaaccugugc

SEQ ID NO: 412907 - RNA, 19 nt, Artificial Sequence
  Description of Artificial Sequence: Synthetic oligonucleotide
ugaagauuuguuagaaggg

SEQ ID NO: 412908 - RNA, 19 nt, Artificial Sequence
  Description of Artificial Sequence: Synthetic oligonucleotide
uuucuaagggagcugacgg

SEQ ID NO: 412909 - RNA, 19 nt, Artificial Sequence
  Description of Artificial Sequence: Synthetic oligonucleotide
aucaccguaauccauuggc

SEQ ID NO: 412910 - RNA, 19 nt, Artificial Sequence
  Description of Artificial Sequence: Synthetic oligonucleotide
uuaugucucagaauucuag

SEQ ID NO: 412911 - RNA, 19 nt, Artificial Sequence
  Description of Artificial Sequence: Synthetic oligonucleotide
acaguuaugucucagaauu

SEQ ID NO: 412912 - RNA, 19 nt, Artificial Sequence
  Description of Artificial Sequence: Synthetic oligonucleotide
auuagguggaguuugggug

SEQ ID NO: 412913 - RNA, 19 nt, Artificial Sequence
  Description of Artificial Sequence: Synthetic oligonucleotide
ugacaaaaggaucaguuuc

SEQ ID NO: 412914 - RNA, 19 nt, Artificial Sequence
  Description of Artificial Sequence: Synthetic oligonucleotide
aaggaguuggcuucugcgg

SEQ ID NO: 412915 - RNA, 19 nt, Artificial Sequence
  Description of Artificial Sequence: Synthetic oligonucleotide
ucaacaaguaugaaguaau

SEQ ID NO: 412916 - RNA, 19 nt, Artificial Sequence
  Description of Artificial Sequence: Synthetic oligonucleotide
uuuauuagguggaguuugg

SEQ ID NO: 412917 - RNA, 19 nt, Artificial Sequence
  Description of Artificial Sequence: Synthetic oligonucleotide
aaggcaagccccuagggca

SEQ ID NO: 412918 - RNA, 19 nt, Artificial Sequence
  Description of Artificial Sequence: Synthetic oligonucleotide
aagucgugauucuucauug

SEQ ID NO: 412919 - RNA, 19 nt, Artificial Sequence
  Description of Artificial Sequence: Synthetic oligonucleotide
agcgagauaaagaaagucg

SEQ ID NO: 412920 - RNA, 19 nt, Artificial Sequence
  Description of Artificial Sequence: Synthetic oligonucleotide
uaauccauuggcagccucg

SEQ ID NO: 412921 - RNA, 19 nt, Artificial Sequence
  Description of Artificial Sequence: Synthetic oligonucleotide
acacugauacuccuuugcc

SEQ ID NO: 412922 - RNA, 19 nt, Artificial Sequence
  Description of Artificial Sequence: Synthetic oligonucleotide
aguaauuacagaaggaaga

SEQ ID NO: 412923 - RNA, 19 nt, Artificial Sequence
  Description of Artificial Sequence: Synthetic oligonucleotide
auauccauagaucgguaag

SEQ ID NO: 412924 - RNA, 19 nt, Artificial Sequence
  Description of Artificial Sequence: Synthetic oligonucleotide
aagaaagucgugauucuuc

SEQ ID NO: 412925 - RNA, 19 nt, Artificial Sequence
  Description of Artificial Sequence: Synthetic oligonucleotide
accguaauccauuggcagc

SEQ ID NO: 412926 - RNA, 19 nt, Artificial Sequence
  Description of Artificial Sequence: Synthetic oligonucleotide
uagaucgguaagcaggaag

SEQ ID NO: 412927 - RNA, 19 nt, Artificial Sequence
  Description of Artificial Sequence: Synthetic oligonucleotide
aaagucgugauucuucauu

SEQ ID NO: 412928 - RNA, 19 nt, Artificial Sequence
  Description of Artificial Sequence: Synthetic oligonucleotide
aaucccugcuugucaaacg

SEQ ID NO: 412929 - RNA, 19 nt, Artificial Sequence
  Description of Artificial Sequence: Synthetic oligonucleotide
cuuguuauagacagaacca

SEQ ID NO: 412930 - RNA, 19 nt, Artificial Sequence
  Description of Artificial Sequence: Synthetic oligonucleotide
uccauuggcagccucgacc

SEQ ID NO: 412931 - RNA, 19 nt, Artificial Sequence
  Description of Artificial Sequence: Synthetic oligonucleotide
auagaggagccuuuguuug

SEQ ID NO: 412932 - RNA, 19 nt, Artificial Sequence
  Description of Artificial Sequence: Synthetic oligonucleotide
cugauuauguagcagagga

SEQ ID NO: 412933 - RNA, 19 nt, Artificial Sequence
  Description of Artificial Sequence: Synthetic oligonucleotide
uguuauagacagaaccagu

SEQ ID NO: 412934 - RNA, 19 nt, Artificial Sequence
  Description of Artificial Sequence: Synthetic oligonucleotide
ugauuauguagcagaggag

SEQ ID NO: 412935 - RNA, 19 nt, Artificial Sequence
  Description of Artificial Sequence: Synthetic oligonucleotide
uuucaaaggaguuggcuuc

SEQ ID NO: 412936 - RNA, 19 nt, Artificial Sequence
  Description of Artificial Sequence: Synthetic oligonucleotide
guuugggugagagaaaacc

SEQ ID NO: 412937 - RNA, 19 nt, Artificial Sequence
  Description of Artificial Sequence: Synthetic oligonucleotide
caucauauccauagaucgg

SEQ ID NO: 412938 - RNA, 19 nt, Artificial Sequence
  Description of Artificial Sequence: Synthetic oligonucleotide
ucaaaucaucauaaccugu

SEQ ID NO: 412939 - RNA, 19 nt, Artificial Sequence
  Description of Artificial Sequence: Synthetic oligonucleotide
guuggcgggacaaacauag

SEQ ID NO: 412940 - RNA, 19 nt, Artificial Sequence
  Description of Artificial Sequence: Synthetic oligonucleotide
uauuagguggaguuugggu

SEQ ID NO: 412941 - RNA, 19 nt, Artificial Sequence
  Description of Artificial Sequence: Synthetic oligonucleotide
aagccccuagggcaggacc

SEQ ID NO: 412942 - RNA, 19 nt, Artificial Sequence
  Description of Artificial Sequence: Synthetic oligonucleotide
ugcgugaaaucccugcuug

SEQ ID NO: 412943 - RNA, 19 nt, Artificial Sequence
  Description of Artificial Sequence: Synthetic oligonucleotide
cuuuauuagguggaguuug

SEQ ID NO: 412944 - RNA, 19 nt, Artificial Sequence
  Description of Artificial Sequence: Synthetic oligonucleotide
ccauagaucgguaagcagg

SEQ ID NO: 412945 - RNA, 19 nt, Artificial Sequence
  Description of Artificial Sequence: Synthetic oligonucleotide
ucgguaagcaggaagcagu

SEQ ID NO: 412946 - RNA, 19 nt, Artificial Sequence
  Description of Artificial Sequence: Synthetic oligonucleotide
uguccccugggucaaauca

SEQ ID NO: 412947 - RNA, 19 nt, Artificial Sequence
  Description of Artificial Sequence: Synthetic oligonucleotide
uuugugauaucaccguaau

SEQ ID NO: 412948 - RNA, 19 nt, Artificial Sequence
  Description of Artificial Sequence: Synthetic oligonucleotide
aaugcuuugcccaggggug

SEQ ID NO: 412949 - RNA, 19 nt, Artificial Sequence
  Description of Artificial Sequence: Synthetic oligonucleotide
aauaggggaggccaguaua

SEQ ID NO: 412950 - RNA, 19 nt, Artificial Sequence
  Description of Artificial Sequence: Synthetic oligonucleotide
aacauagugggcccauacu

SEQ ID NO: 412951 - RNA, 19 nt, Artificial Sequence
  Description of Artificial Sequence: Synthetic oligonucleotide
gaugcaggaacggugcggg

SEQ ID NO: 412952 - RNA, 19 nt, Artificial Sequence
  Description of Artificial Sequence: Synthetic oligonucleotide
uggcgggacaaacauagug

SEQ ID NO: 412953 - RNA, 19 nt, Artificial Sequence
  Description of Artificial Sequence: Synthetic oligonucleotide
agauaaagaaagucgugau

SEQ ID NO: 412954 - RNA, 19 nt, Artificial Sequence
  Description of Artificial Sequence: Synthetic oligonucleotide
uauccgguaggccaguggu

SEQ ID NO: 412955 - RNA, 19 nt, Artificial Sequence
  Description of Artificial Sequence: Synthetic oligonucleotide
agaaagucgugauucuuca

SEQ ID NO: 412956 - RNA, 19 nt, Artificial Sequence
  Description of Artificial Sequence: Synthetic oligonucleotide
uauccauagaucgguaagc

SEQ ID NO: 412957 - RNA, 19 nt, Artificial Sequence
  Description of Artificial Sequence: Synthetic oligonucleotide
uucuaagggagcugacggg

SEQ ID NO: 412958 - RNA, 19 nt, Artificial Sequence
  Description of Artificial Sequence: Synthetic oligonucleotide
aacgucugugucuuguuau

SEQ ID NO: 412959 - RNA, 19 nt, Artificial Sequence
  Description of Artificial Sequence: Synthetic oligonucleotide
gagguacugauuauguagc

SEQ ID NO: 412960 - RNA, 19 nt, Artificial Sequence
  Description of Artificial Sequence: Synthetic oligonucleotide
uaaccugugcuguaagugu

SEQ ID NO: 412961 - RNA, 19 nt, Artificial Sequence
  Description of Artificial Sequence: Synthetic oligonucleotide
aguuaugucucagaauucu

SEQ ID NO: 412962 - RNA, 19 nt, Artificial Sequence
  Description of Artificial Sequence: Synthetic oligonucleotide
ggagaauaggaguuggcag

SEQ ID NO: 412963 - RNA, 19 nt, Artificial Sequence
  Description of Artificial Sequence: Synthetic oligonucleotide
ucauaaccugugcuguaag

SEQ ID NO: 412964 - RNA, 19 nt, Artificial Sequence
  Description of Artificial Sequence: Synthetic oligonucleotide
uuauuagguggaguuuggg

SEQ ID NO: 412965 - RNA, 19 nt, Artificial Sequence
  Description of Artificial Sequence: Synthetic oligonucleotide
ugcacaagagcccacccuc

SEQ ID NO: 412966 - RNA, 19 nt, Artificial Sequence
  Description of Artificial Sequence: Synthetic oligonucleotide
ugagcagagccacucgggc

SEQ ID NO: 412967 - RNA, 19 nt, Artificial Sequence
  Description of Artificial Sequence: Synthetic oligonucleotide
ugagggucacaccaugcug

SEQ ID NO: 412968 - RNA, 19 nt, Artificial Sequence
  Description of Artificial Sequence: Synthetic oligonucleotide
uggagagagaacugcuaag

SEQ ID NO: 412969 - RNA, 19 nt, Artificial Sequence
  Description of Artificial Sequence: Synthetic oligonucleotide
agugggcccauacuggaag

SEQ ID NO: 412970 - RNA, 19 nt, Artificial Sequence
  Description of Artificial Sequence: Synthetic oligonucleotide
uccauagaucgguaagcag

SEQ ID NO: 412971 - RNA, 19 nt, Artificial Sequence
  Description of Artificial Sequence: Synthetic oligonucleotide
ugcuguguugagaauuugu

SEQ ID NO: 412972 - RNA, 19 nt, Artificial Sequence
  Description of Artificial Sequence: Synthetic oligonucleotide
uguugagggucacaccaug

SEQ ID NO: 412973 - RNA, 19 nt, Artificial Sequence
  Description of Artificial Sequence: Synthetic oligonucleotide
uagaggagccuuuguuugg

SEQ ID NO: 412974 - RNA, 19 nt, Artificial Sequence
  Description of Artificial Sequence: Synthetic oligonucleotide
ucaccguaauccauuggca

SEQ ID NO: 412975 - RNA, 19 nt, Artificial Sequence
  Description of Artificial Sequence: Synthetic oligonucleotide
uaucaccguaauccauugg

SEQ ID NO: 412976 - RNA, 19 nt, Artificial Sequence
  Description of Artificial Sequence: Synthetic oligonucleotide
uucuuucuaagggagcuga

SEQ ID NO: 412977 - RNA, 19 nt, Artificial Sequence
  Description of Artificial Sequence: Synthetic oligonucleotide
gggucaaaucaucauaacc

SEQ ID NO: 412978 - RNA, 19 nt, Artificial Sequence
  Description of Artificial Sequence: Synthetic oligonucleotide
auaucaccguaauccauug

SEQ ID NO: 412979 - RNA, 19 nt, Artificial Sequence
  Description of Artificial Sequence: Synthetic oligonucleotide
augcagagucuccucggcc

SEQ ID NO: 412980 - RNA, 19 nt, Artificial Sequence
  Description of Artificial Sequence: Synthetic oligonucleotide
gaacagacgaggcagugaa

SEQ ID NO: 412981 - RNA, 19 nt, Artificial Sequence
  Description of Artificial Sequence: Synthetic oligonucleotide
gucaccaacgcuguggccc

SEQ ID NO: 412982 - RNA, 19 nt, Artificial Sequence
  Description of Artificial Sequence: Synthetic oligonucleotide
ucaccagacugggacaagg

SEQ ID NO: 412983 - RNA, 19 nt, Artificial Sequence
  Description of Artificial Sequence: Synthetic oligonucleotide
caccguaauccauuggcag

SEQ ID NO: 412984 - RNA, 19 nt, Artificial Sequence
  Description of Artificial Sequence: Synthetic oligonucleotide
ugguguagucuccugccgc

SEQ ID NO: 412985 - RNA, 19 nt, Artificial Sequence
  Description of Artificial Sequence: Synthetic oligonucleotide
gauuucuuucuaagggagc

SEQ ID NO: 412986 - RNA, 19 nt, Artificial Sequence
  Description of Artificial Sequence: Synthetic oligonucleotide
ugucccugcgugaaauccc

SEQ ID NO: 412987 - RNA, 19 nt, Artificial Sequence
  Description of Artificial Sequence: Synthetic oligonucleotide
ucugcuauucccagcugaa

SEQ ID NO: 412988 - RNA, 19 nt, Artificial Sequence
  Description of Artificial Sequence: Synthetic oligonucleotide
accagacugggacaaggag

SEQ ID NO: 412989 - RNA, 19 nt, Artificial Sequence
  Description of Artificial Sequence: Synthetic oligonucleotide
aguuugcccaccugguuug

SEQ ID NO: 412990 - RNA, 19 nt, Artificial Sequence
  Description of Artificial Sequence: Synthetic oligonucleotide
auauccgguaggccagugg

SEQ ID NO: 412991 - RNA, 19 nt, Artificial Sequence
  Description of Artificial Sequence: Synthetic oligonucleotide
ucaaacgucugugucuugu

SEQ ID NO: 412992 - RNA, 19 nt, Artificial Sequence
  Description of Artificial Sequence: Synthetic oligonucleotide
guugagaauuugugaagac

SEQ ID NO: 412993 - RNA, 19 nt, Artificial Sequence
  Description of Artificial Sequence: Synthetic oligonucleotide
cauagaucgguaagcagga

SEQ ID NO: 412994 - RNA, 19 nt, Artificial Sequence
  Description of Artificial Sequence: Synthetic oligonucleotide
guauguggagaggacaagc

SEQ ID NO: 412995 - RNA, 19 nt, Artificial Sequence
  Description of Artificial Sequence: Synthetic oligonucleotide
ucaccaacgcuguggcccg

SEQ ID NO: 412996 - RNA, 19 nt, Artificial Sequence
  Description of Artificial Sequence: Synthetic oligonucleotide
cucaagaacuuuauuaggu

SEQ ID NO: 412997 - RNA, 19 nt, Artificial Sequence
  Description of Artificial Sequence: Synthetic oligonucleotide
cauacaacagugggucugg

SEQ ID NO: 412998 - RNA, 19 nt, Artificial Sequence
  Description of Artificial Sequence: Synthetic oligonucleotide
acggugcgggcgcauaacc

SEQ ID NO: 412999 - RNA, 19 nt, Artificial Sequence
  Description of Artificial Sequence: Synthetic oligonucleotide
acauacaacagugggucug

SEQ ID NO: 413000 - RNA, 19 nt, Artificial Sequence
  Description of Artificial Sequence: Synthetic oligonucleotide
agacgaggcagugaaaacu

SEQ ID NO: 413001 - RNA, 19 nt, Artificial Sequence
  Description of Artificial Sequence: Synthetic oligonucleotide
  modified_base (18)..(18): a, c, u, g, unknown or other
uuauguagcagaggaggna

SEQ ID NO: 413002 - RNA, 19 nt, Artificial Sequence
  Description of Artificial Sequence: Synthetic oligonucleotide
ugagauuggcucugcugug

SEQ ID NO: 413003 - RNA, 19 nt, Artificial Sequence
  Description of Artificial Sequence: Synthetic oligonucleotide
ccugguuugggacaacugg

SEQ ID NO: 413004 - RNA, 19 nt, Artificial Sequence
  Description of Artificial Sequence: Synthetic oligonucleotide
caguauagcuguagccagg

SEQ ID NO: 413005 - RNA, 19 nt, Artificial Sequence
  Description of Artificial Sequence: Synthetic oligonucleotide
uuguccaguacggagaguu

SEQ ID NO: 413006 - RNA, 19 nt, Artificial Sequence
  Description of Artificial Sequence: Synthetic oligonucleotide
auagugggcccauacugga

SEQ ID NO: 413007 - RNA, 19 nt, Artificial Sequence
  Description of Artificial Sequence: Synthetic oligonucleotide
uguauguggagaggacaag

SEQ ID NO: 413008 - RNA, 19 nt, Artificial Sequence
  Description of Artificial Sequence: Synthetic oligonucleotide
acggagaguugccauaggu

SEQ ID NO: 413009 - RNA, 19 nt, Artificial Sequence
  Description of Artificial Sequence: Synthetic oligonucleotide
accacccuucccuuuagug

SEQ ID NO: 413010 - RNA, 19 nt, Artificial Sequence
  Description of Artificial Sequence: Synthetic oligonucleotide
ggucaaaucaucauaaccu

SEQ ID NO: 413011 - RNA, 19 nt, Artificial Sequence
  Description of Artificial Sequence: Synthetic oligonucleotide
ggcgggacaaacauagugg

SEQ ID NO: 413012 - RNA, 19 nt, Artificial Sequence
  Description of Artificial Sequence: Synthetic oligonucleotide
  modified_base (19)..(19): a, c, u, g, unknown or other
auuauguagcagaggaggn

SEQ ID NO: 413013 - RNA, 19 nt, Artificial Sequence
  Description of Artificial Sequence: Synthetic oligonucleotide
auaaccaggggcugcucca

SEQ ID NO: 413014 - RNA, 19 nt, Artificial Sequence
  Description of Artificial Sequence: Synthetic oligonucleotide
aaacaauauuucacaggga

SEQ ID NO: 413015 - RNA, 19 nt, Artificial Sequence
  Description of Artificial Sequence: Synthetic oligonucleotide
uccgguaggccaguggugc

SEQ ID NO: 413016 - RNA, 19 nt, Artificial Sequence
  Description of Artificial Sequence: Synthetic oligonucleotide
auggaagcagaucuuugau

SEQ ID NO: 413017 - RNA, 19 nt, Artificial Sequence
  Description of Artificial Sequence: Synthetic oligonucleotide
ucuccucggccaaacuuug

SEQ ID NO: 413018 - RNA, 19 nt, Artificial Sequence
  Description of Artificial Sequence: Synthetic oligonucleotide
uggggcgcgcuguaugugg

SEQ ID NO: 413019 - RNA, 19 nt, Artificial Sequence
  Description of Artificial Sequence: Synthetic oligonucleotide
cgagguacugauuauguag

SEQ ID NO: 413020 - RNA, 19 nt, Artificial Sequence
  Description of Artificial Sequence: Synthetic oligonucleotide
aauccauuggcagccucga

SEQ ID NO: 413021 - RNA, 19 nt, Artificial Sequence
  Description of Artificial Sequence: Synthetic oligonucleotide
gguugcgcugagcagagcc

SEQ ID NO: 413022 - RNA, 19 nt, Artificial Sequence
  Description of Artificial Sequence: Synthetic oligonucleotide
cacguggaaggccuagagg

SEQ ID NO: 413023 - RNA, 19 nt, Artificial Sequence
  Description of Artificial Sequence: Synthetic oligonucleotide
ggagagagaacugcuaagc

SEQ ID NO: 413024 - RNA, 19 nt, Artificial Sequence
  Description of Artificial Sequence: Synthetic oligonucleotide
aaccugugcuguaagugug

SEQ ID NO: 413025 - RNA, 19 nt, Artificial Sequence
  Description of Artificial Sequence: Synthetic oligonucleotide
cagggagcgagauaaagaa

SEQ ID NO: 413026 - RNA, 19 nt, Artificial Sequence
  Description of Artificial Sequence: Synthetic oligonucleotide
uggucaaaggcaagccccu

SEQ ID NO: 413027 - RNA, 19 nt, Artificial Sequence
  Description of Artificial Sequence: Synthetic oligonucleotide
gcgggacaaacauaguggg

SEQ ID NO: 413028 - RNA, 19 nt, Artificial Sequence
  Description of Artificial Sequence: Synthetic oligonucleotide
gaaccagucauauccggua

SEQ ID NO: 413029 - RNA, 19 nt, Artificial Sequence
  Description of Artificial Sequence: Synthetic oligonucleotide
ugacgggcugaacaucucu

SEQ ID NO: 413030 - RNA, 19 nt, Artificial Sequence
  Description of Artificial Sequence: Synthetic oligonucleotide
cuuugugauaucaccguaa

SEQ ID NO: 413031 - RNA, 19 nt, Artificial Sequence
  Description of Artificial Sequence: Synthetic oligonucleotide
gcuucugcggcuugagugg

SEQ ID NO: 413032 - RNA, 19 nt, Artificial Sequence
  Description of Artificial Sequence: Synthetic oligonucleotide
uugugauaucaccguaauc

SEQ ID NO: 413033 - RNA, 19 nt, Artificial Sequence
  Description of Artificial Sequence: Synthetic oligonucleotide
ggcacacucacuguggucc

SEQ ID NO: 413034 - RNA, 19 nt, Artificial Sequence
  Description of Artificial Sequence: Synthetic oligonucleotide
uguaauaggggaggccagu

SEQ ID NO: 413035 - RNA, 19 nt, Artificial Sequence
  Description of Artificial Sequence: Synthetic oligonucleotide
agaugcaggaacggugcgg

SEQ ID NO: 413036 - RNA, 19 nt, Artificial Sequence
  Description of Artificial Sequence: Synthetic oligonucleotide
acugguauagaggagccuu

SEQ ID NO: 413037 - RNA, 19 nt, Artificial Sequence
  Description of Artificial Sequence: Synthetic oligonucleotide
aucgguaagcaggaagcag

SEQ ID NO: 413038 - RNA, 19 nt, Artificial Sequence
  Description of Artificial Sequence: Synthetic oligonucleotide
gauaaagaaagucgugauu

SEQ ID NO: 413039 - RNA, 19 nt, Artificial Sequence
  Description of Artificial Sequence: Synthetic oligonucleotide
aacggugcgggcgcauaac

SEQ ID NO: 413040 - RNA, 19 nt, Artificial Sequence
  Description of Artificial Sequence: Synthetic oligonucleotide
aggaaagggcaccgggcuc

SEQ ID NO: 413041 - RNA, 19 nt, Artificial Sequence
  Description of Artificial Sequence: Synthetic oligonucleotide
ugcccaguagccacacccc

SEQ ID NO: 413042 - RNA, 19 nt, Artificial Sequence
  Description of Artificial Sequence: Synthetic oligonucleotide
uacggagaguugccauagg

SEQ ID NO: 413043 - RNA, 19 nt, Artificial Sequence
  Description of Artificial Sequence: Synthetic oligonucleotide
ugguuugggacaacuggua

SEQ ID NO: 413044 - RNA, 19 nt, Artificial Sequence
  Description of Artificial Sequence: Synthetic oligonucleotide
ugggucaaaucaucauaac

SEQ ID NO: 413045 - RNA, 19 nt, Artificial Sequence
  Description of Artificial Sequence: Synthetic oligonucleotide
ucauauccauagaucggua

SEQ ID NO: 413046 - RNA, 19 nt, Artificial Sequence
  Description of Artificial Sequence: Synthetic oligonucleotide
aggcagugaaaacuuuggu

SEQ ID NO: 413047 - RNA, 19 nt, Artificial Sequence
  Description of Artificial Sequence: Synthetic oligonucleotide
agguuggcgggacaaacau

SEQ ID NO: 413048 - RNA, 19 nt, Artificial Sequence
  Description of Artificial Sequence: Synthetic oligonucleotide
gaggccaguauagcuguag

SEQ ID NO: 413049 - RNA, 19 nt, Artificial Sequence
  Description of Artificial Sequence: Synthetic oligonucleotide
agagucuccucggccaaac

SEQ ID NO: 413050 - RNA, 19 nt, Artificial Sequence
  Description of Artificial Sequence: Synthetic oligonucleotide
  modified_base (14)..(14): a, c, u, g, unknown or other
guagcagaggaggnacccc

SEQ ID NO: 413051 - RNA, 19 nt, Artificial Sequence
  Description of Artificial Sequence: Synthetic oligonucleotide
acuuugugauaucaccgua

SEQ ID NO: 413052 - RNA, 19 nt, Artificial Sequence
  Description of Artificial Sequence: Synthetic oligonucleotide
ugguauagaggagccuuug

SEQ ID NO: 413053 - RNA, 19 nt, Artificial Sequence
  Description of Artificial Sequence: Synthetic oligonucleotide
guacggagaguugccauag

SEQ ID NO: 413054 - RNA, 19 nt, Artificial Sequence
  Description of Artificial Sequence: Synthetic oligonucleotide
agacacugauacuccuuug

SEQ ID NO: 413055 - RNA, 19 nt, Artificial Sequence
  Description of Artificial Sequence: Synthetic oligonucleotide
aguacggagaguugccaua

SEQ ID NO: 413056 - RNA, 19 nt, Artificial Sequence
  Description of Artificial Sequence: Synthetic oligonucleotide
cgugauucuucauugguac

SEQ ID NO: 413057 - RNA, 19 nt, Artificial Sequence
  Description of Artificial Sequence: Synthetic oligonucleotide
guccaguacggagaguugc

SEQ ID NO: 413058 - RNA, 19 nt, Artificial Sequence
  Description of Artificial Sequence: Synthetic oligonucleotide
cugagauuggcucugcugu

SEQ ID NO: 413059 - RNA, 19 nt, Artificial Sequence
  Description of Artificial Sequence: Synthetic oligonucleotide
ggacaaggagggcaaagug

SEQ ID NO: 413060 - RNA, 19 nt, Artificial Sequence
  Description of Artificial Sequence: Synthetic oligonucleotide
acagggagcgagauaaaga

SEQ ID NO: 413061 - RNA, 19 nt, Artificial Sequence
  Description of Artificial Sequence: Synthetic oligonucleotide
uguggggcgcgcuguaugu

SEQ ID NO: 413062 - RNA, 19 nt, Artificial Sequence
  Description of Artificial Sequence: Synthetic oligonucleotide
ggaugcagagucuccucgg

SEQ ID NO: 413063 - RNA, 19 nt, Artificial Sequence
  Description of Artificial Sequence: Synthetic oligonucleotide
gacaagugcuuggccaaag

SEQ ID NO: 413064 - RNA, 19 nt, Artificial Sequence
  Description of Artificial Sequence: Synthetic oligonucleotide
cauauccauagaucgguaa

SEQ ID NO: 413065 - RNA, 19 nt, Artificial Sequence
  Description of Artificial Sequence: Synthetic oligonucleotide
ugggcacacucacuguggu

SEQ ID NO: 413066 - RNA, 19 nt, Artificial Sequence
  Description of Artificial Sequence: Synthetic oligonucleotide
ccaguauagcuguagccag

SEQ ID NO: 413067 - RNA, 19 nt, Artificial Sequence
  Description of Artificial Sequence: Synthetic oligonucleotide
ggugcgggcgcauaaccag

SEQ ID NO: 413068 - RNA, 19 nt, Artificial Sequence
  Description of Artificial Sequence: Synthetic oligonucleotide
caguuaugucucagaauuc

SEQ ID NO: 413069 - RNA, 19 nt, Artificial Sequence
  Description of Artificial Sequence: Synthetic oligonucleotide
gcuaagcugagaaagggca

SEQ ID NO: 413070 - RNA, 19 nt, Artificial Sequence
  Description of Artificial Sequence: Synthetic oligonucleotide
uguccuguggaagguggug

SEQ ID NO: 413071 - RNA, 19 nt, Artificial Sequence
  Description of Artificial Sequence: Synthetic oligonucleotide
auccauuggcagccucgac

SEQ ID NO: 413072 - RNA, 19 nt, Artificial Sequence
  Description of Artificial Sequence: Synthetic oligonucleotide
cugguugcgcugagcagag

SEQ ID NO: 413073 - RNA, 19 nt, Artificial Sequence
  Description of Artificial Sequence: Synthetic oligonucleotide
cagacgaggcagugaaaac

SEQ ID NO: 413074 - RNA, 19 nt, Artificial Sequence
  Description of Artificial Sequence: Synthetic oligonucleotide
cugacaguuaugucucaga

SEQ ID NO: 413075 - RNA, 19 nt, Artificial Sequence
  Description of Artificial Sequence: Synthetic oligonucleotide
gugggcccauacuggaagg

SEQ ID NO: 413076 - RNA, 19 nt, Artificial Sequence
  Description of Artificial Sequence: Synthetic oligonucleotide
cugugucuuguuauagaca

SEQ ID NO: 413077 - RNA, 19 nt, Artificial Sequence
  Description of Artificial Sequence: Synthetic oligonucleotide
gacgggcugaacaucucug

SEQ ID NO: 413078 - RNA, 19 nt, Artificial Sequence
  Description of Artificial Sequence: Synthetic oligonucleotide
gucugauugcuguguugag

SEQ ID NO: 413079 - RNA, 19 nt, Artificial Sequence
  Description of Artificial Sequence: Synthetic oligonucleotide
cugaggagaauaggaguug

SEQ ID NO: 413080 - RNA, 19 nt, Artificial Sequence
  Description of Artificial Sequence: Synthetic oligonucleotide
ggccaguauagcuguagcc

SEQ ID NO: 413081 - RNA, 19 nt, Artificial Sequence
  Description of Artificial Sequence: Synthetic oligonucleotide
ugcucucaagaacuuuauu

SEQ ID NO: 413082 - RNA, 19 nt, Artificial Sequence
  Description of Artificial Sequence: Synthetic oligonucleotide
acacucacuguggucccac

SEQ ID NO: 413083 - RNA, 19 nt, Artificial Sequence
  Description of Artificial Sequence: Synthetic oligonucleotide
uucccuuuaguggcacacc

SEQ ID NO: 413084 - RNA, 19 nt, Artificial Sequence
  Description of Artificial Sequence: Synthetic oligonucleotide
cuuggccgagguuggcggg

SEQ ID NO: 413085 - RNA, 19 nt, Artificial Sequence
  Description of Artificial Sequence: Synthetic oligonucleotide
ugccugugaugauccacca

SEQ ID NO: 413086 - RNA, 19 nt, Artificial Sequence
  Description of Artificial Sequence: Synthetic oligonucleotide
ugcccaccugguuugggac

SEQ ID NO: 413087 - RNA, 19 nt, Artificial Sequence
  Description of Artificial Sequence: Synthetic oligonucleotide
cauugcuggacaggucacc

SEQ ID NO: 413088 - RNA, 19 nt, Artificial Sequence
  Description of Artificial Sequence: Synthetic oligonucleotide
gaucgguaagcaggaagca

SEQ ID NO: 413089 - RNA, 19 nt, Artificial Sequence
  Description of Artificial Sequence: Synthetic oligonucleotide
ugacuuguuuggugccugu

SEQ ID NO: 413090 - RNA, 19 nt, Artificial Sequence
  Description of Artificial Sequence: Synthetic oligonucleotide
auugcuguguugagaauuu

SEQ ID NO: 413091 - RNA, 19 nt, Artificial Sequence
  Description of Artificial Sequence: Synthetic oligonucleotide
gcuuggccgagguuggcgg

SEQ ID NO: 413092 - RNA, 19 nt, Artificial Sequence
  Description of Artificial Sequence: Synthetic oligonucleotide
gacuuguuuggugccugug

SEQ ID NO: 413093 - RNA, 19 nt, Artificial Sequence
  Description of Artificial Sequence: Synthetic oligonucleotide
gccaguauagcuguagcca

SEQ ID NO: 413094 - RNA, 19 nt, Artificial Sequence
  Description of Artificial Sequence: Synthetic oligonucleotide
acgagguacugauuaugua

SEQ ID NO: 413095 - RNA, 19 nt, Artificial Sequence
  Description of Artificial Sequence: Synthetic oligonucleotide
uagguggaguuugggugag

SEQ ID NO: 413096 - RNA, 19 nt, Artificial Sequence
  Description of Artificial Sequence: Synthetic oligonucleotide
gucgugauucuucauuggu

SEQ ID NO: 413097 - RNA, 19 nt, Artificial Sequence
  Description of Artificial Sequence: Synthetic oligonucleotide
guaauccauuggcagccuc

SEQ ID NO: 413098 - RNA, 19 nt, Artificial Sequence
  Description of Artificial Sequence: Synthetic oligonucleotide
cuucugcggcuugaguggg

SEQ ID NO: 413099 - RNA, 19 nt, Artificial Sequence
  Description of Artificial Sequence: Synthetic oligonucleotide
cccagaaaugugcuccacg

SEQ ID NO: 413100 - RNA, 19 nt, Artificial Sequence
  Description of Artificial Sequence: Synthetic oligonucleotide
ccuugguguagucuccugc

SEQ ID NO: 413101 - RNA, 19 nt, Artificial Sequence
  Description of Artificial Sequence: Synthetic oligonucleotide
cagucauauccgguaggcc

SEQ ID NO: 413102 - RNA, 19 nt, Artificial Sequence
  Description of Artificial Sequence: Synthetic oligonucleotide
ucggccaaacuuugugaua

SEQ ID NO: 413103 - RNA, 19 nt, Artificial Sequence
  Description of Artificial Sequence: Synthetic oligonucleotide
ugauugcuguguugagaau

SEQ ID NO: 413104 - RNA, 19 nt, Artificial Sequence
  Description of Artificial Sequence: Synthetic oligonucleotide
auacaacagugggucuggg

SEQ ID NO: 413105 - RNA, 19 nt, Artificial Sequence
  Description of Artificial Sequence: Synthetic oligonucleotide
uguaaguguguugcccaua

SEQ ID NO: 413106 - RNA, 19 nt, Artificial Sequence
  Description of Artificial Sequence: Synthetic oligonucleotide
cugguuugggacaacuggu

SEQ ID NO: 413107 - RNA, 19 nt, Artificial Sequence
  Description of Artificial Sequence: Synthetic oligonucleotide
agcugacgggcugaacauc

SEQ ID NO: 413108 - RNA, 19 nt, Artificial Sequence
  Description of Artificial Sequence: Synthetic oligonucleotide
ccguaauccauuggcagcc

SEQ ID NO: 413109 - RNA, 19 nt, Artificial Sequence
  Description of Artificial Sequence: Synthetic oligonucleotide
ggcacgccuguguaauagg

SEQ ID NO: 413110 - RNA, 19 nt, Artificial Sequence
  Description of Artificial Sequence: Synthetic oligonucleotide
cacgagguacugauuaugu

SEQ ID NO: 413111 - RNA, 19 nt, Artificial Sequence
  Description of Artificial Sequence: Synthetic oligonucleotide
acgucugugucuuguuaua

SEQ ID NO: 413112 - RNA, 19 nt, Artificial Sequence
  Description of Artificial Sequence: Synthetic oligonucleotide
cugcuauucccagcugaag

SEQ ID NO: 413113 - RNA, 19 nt, Artificial Sequence
  Description of Artificial Sequence: Synthetic oligonucleotide
gaaggccuagaggcagaag

SEQ ID NO: 413114 - RNA, 19 nt, Artificial Sequence
  Description of Artificial Sequence: Synthetic oligonucleotide
gcacgccuguguaauaggg

SEQ ID NO: 413115 - RNA, 19 nt, Artificial Sequence
  Description of Artificial Sequence: Synthetic oligonucleotide
ccagucauauccgguaggc

SEQ ID NO: 413116 - RNA, 19 nt, Artificial Sequence
  Description of Artificial Sequence: Synthetic oligonucleotide
ggucuaguuuguccaguac

SEQ ID NO: 413117 - RNA, 19 nt, Artificial Sequence
  Description of Artificial Sequence: Synthetic oligonucleotide
ccuuuaguggcacaccaga

SEQ ID NO: 413118 - RNA, 19 nt, Artificial Sequence
  Description of Artificial Sequence: Synthetic oligonucleotide
ccguggauggggcacuugg

SEQ ID NO: 413119 - RNA, 19 nt, Artificial Sequence
  Description of Artificial Sequence: Synthetic oligonucleotide
accgggcucccagaaaugu

SEQ ID NO: 413120 - RNA, 19 nt, Artificial Sequence
  Description of Artificial Sequence: Synthetic oligonucleotide
cauaaccugugcuguaagu

SEQ ID NO: 413121 - RNA, 19 nt, Artificial Sequence
  Description of Artificial Sequence: Synthetic oligonucleotide
guuaugucucagaauucua

SEQ ID NO: 413122 - RNA, 19 nt, Artificial Sequence
  Description of Artificial Sequence: Synthetic oligonucleotide
gugcgggcgcauaaccagg

SEQ ID NO: 413123 - RNA, 19 nt, Artificial Sequence
  Description of Artificial Sequence: Synthetic oligonucleotide
uucugcggcuugaguggga

SEQ ID NO: 413124 - RNA, 19 nt, Artificial Sequence
  Description of Artificial Sequence: Synthetic oligonucleotide
guaccugaccccagucccc

SEQ ID NO: 413125 - RNA, 19 nt, Artificial Sequence
  Description of Artificial Sequence: Synthetic oligonucleotide
ucauauccgguaggccagu

SEQ ID NO: 413126 - RNA, 19 nt, Artificial Sequence
  Description of Artificial Sequence: Synthetic oligonucleotide
auggggugcucuccacacu

SEQ ID NO: 413127 - RNA, 19 nt, Artificial Sequence
  Description of Artificial Sequence: Synthetic oligonucleotide
cccugcgugaaaucccugc

SEQ ID NO: 413128 - RNA, 19 nt, Artificial Sequence
  Description of Artificial Sequence: Synthetic oligonucleotide
ucccugcgugaaaucccug

SEQ ID NO: 413129 - RNA, 19 nt, Artificial Sequence
  Description of Artificial Sequence: Synthetic oligonucleotide
caccagacugggacaagga

SEQ ID NO: 413130 - RNA, 19 nt, Artificial Sequence
  Description of Artificial Sequence: Synthetic oligonucleotide
ggucaaugcuuugcccagg

SEQ ID NO: 413131 - RNA, 19 nt, Artificial Sequence
  Description of Artificial Sequence: Synthetic oligonucleotide
gcgagauaaagaaagucgu

SEQ ID NO: 413132 - RNA, 19 nt, Artificial Sequence
  Description of Artificial Sequence: Synthetic oligonucleotide
gcccggguacuguugcugg

SEQ ID NO: 413133 - RNA, 19 nt, Artificial Sequence
  Description of Artificial Sequence: Synthetic oligonucleotide
aggcaagccccuagggcag

SEQ ID NO: 413134 - RNA, 19 nt, Artificial Sequence
  Description of Artificial Sequence: Synthetic oligonucleotide
caucauaaccugugcugua

SEQ ID NO: 413135 - RNA, 19 nt, Artificial Sequence
  Description of Artificial Sequence: Synthetic oligonucleotide
guaauaggggaggccagua

SEQ ID NO: 413136 - RNA, 19 nt, Artificial Sequence
  Description of Artificial Sequence: Synthetic oligonucleotide
gggcacgccuguguaauag

SEQ ID NO: 413137 - RNA, 19 nt, Artificial Sequence
  Description of Artificial Sequence: Synthetic oligonucleotide
aacagacgaggcagugaaa

SEQ ID NO: 413138 - RNA, 19 nt, Artificial Sequence
  Description of Artificial Sequence: Synthetic oligonucleotide
gacgaggcagugaaaacuu

SEQ ID NO: 413139 - RNA, 19 nt, Artificial Sequence
  Description of Artificial Sequence: Synthetic oligonucleotide
ucccagaaaugugcuccac

SEQ ID NO: 413140 - RNA, 19 nt, Artificial Sequence
  Description of Artificial Sequence: Synthetic oligonucleotide
gcugaacaucucugagacc

SEQ ID NO: 413141 - RNA, 19 nt, Artificial Sequence
  Description of Artificial Sequence: Synthetic oligonucleotide
gucaaacgucugugucuug

SEQ ID NO: 413142 - RNA, 19 nt, Artificial Sequence
  Description of Artificial Sequence: Synthetic oligonucleotide
cugacgggcugaacaucuc

SEQ ID NO: 413143 - RNA, 19 nt, Artificial Sequence
  Description of Artificial Sequence: Synthetic oligonucleotide
gagcugacgggcugaacau

SEQ ID NO: 413144 - RNA, 19 nt, Artificial Sequence
  Description of Artificial Sequence: Synthetic oligonucleotide
agccacguggaaggccuag

SEQ ID NO: 413145 - RNA, 19 nt, Artificial Sequence
  Description of Artificial Sequence: Synthetic oligonucleotide
gugcuuguggggcgcgcug

SEQ ID NO: 413146 - RNA, 19 nt, Artificial Sequence
  Description of Artificial Sequence: Synthetic oligonucleotide
ccacguggaaggccuagag

SEQ ID NO: 413147 - RNA, 19 nt, Artificial Sequence
  Description of Artificial Sequence: Synthetic oligonucleotide
gcuauucccagcugaagau

SEQ ID NO: 413148 - RNA, 19 nt, Artificial Sequence
  Description of Artificial Sequence: Synthetic oligonucleotide
cucggccaaacuuugugau

SEQ ID NO: 413149 - RNA, 19 nt, Artificial Sequence
  Description of Artificial Sequence: Synthetic oligonucleotide
cauauccgguaggccagug

SEQ ID NO: 413150 - RNA, 19 nt, Artificial Sequence
  Description of Artificial Sequence: Synthetic oligonucleotide
ggggcgugcuuguggggcg

SEQ ID NO: 413151 - RNA, 19 nt, Artificial Sequence
  Description of Artificial Sequence: Synthetic oligonucleotide
gcgcgcuguauguggagag

SEQ ID NO: 413152 - RNA, 19 nt, Artificial Sequence
  Description of Artificial Sequence: Synthetic oligonucleotide
agggagcgagauaaagaaa

SEQ ID NO: 413153 - RNA, 19 nt, Artificial Sequence
  Description of Artificial Sequence: Synthetic oligonucleotide
cuuugccugaggucaccaa

SEQ ID NO: 413154 - RNA, 19 nt, Artificial Sequence
  Description of Artificial Sequence: Synthetic oligonucleotide
gguauagaggagccuuugu

SEQ ID NO: 413155 - RNA, 19 nt, Artificial Sequence
  Description of Artificial Sequence: Synthetic oligonucleotide
ugggagccacguggaaggc

SEQ ID NO: 413156 - RNA, 19 nt, Artificial Sequence
  Description of Artificial Sequence: Synthetic oligonucleotide
auagaucgguaagcaggaa

SEQ ID NO: 413157 - RNA, 19 nt, Artificial Sequence
  Description of Artificial Sequence: Synthetic oligonucleotide
cuguccccugggucaaauc

SEQ ID NO: 413158 - RNA, 19 nt, Artificial Sequence
  Description of Artificial Sequence: Synthetic oligonucleotide
ggaacagacgaggcaguga

SEQ ID NO: 413159 - RNA, 19 nt, Artificial Sequence
  Description of Artificial Sequence: Synthetic oligonucleotide
auccgguaggccaguggug

SEQ ID NO: 413160 - RNA, 19 nt, Artificial Sequence
  Description of Artificial Sequence: Synthetic oligonucleotide
cccaguggagcccaaggca

SEQ ID NO: 413161 - RNA, 19 nt, Artificial Sequence
  Description of Artificial Sequence: Synthetic oligonucleotide
gggugcuuugccugagguc

SEQ ID NO: 413162 - RNA, 19 nt, Artificial Sequence
  Description of Artificial Sequence: Synthetic oligonucleotide
cccuagggcaggaccagac

SEQ ID NO: 413163 - RNA, 19 nt, Artificial Sequence
  Description of Artificial Sequence: Synthetic oligonucleotide
uggggacagcacacuugua

SEQ ID NO: 413164 - RNA, 19 nt, Artificial Sequence
  Description of Artificial Sequence: Synthetic oligonucleotide
ggcuucuaucacauuuaca

SEQ ID NO: 413165 - RNA, 19 nt, Artificial Sequence
  Description of Artificial Sequence: Synthetic oligonucleotide
gagccacucgggcuguccu

SEQ ID NO: 413166 - RNA, 19 nt, Artificial Sequence
  Description of Artificial Sequence: Synthetic oligonucleotide
gaguguggggcgugcuugu

SEQ ID NO: 413167 - RNA, 19 nt, Artificial Sequence
  Description of Artificial Sequence: Synthetic oligonucleotide
ggugucccugcgugaaauc

SEQ ID NO: 413168 - RNA, 19 nt, Artificial Sequence
  Description of Artificial Sequence: Synthetic oligonucleotide
ugggcacgccuguguaaua

SEQ ID NO: 413169 - RNA, 19 nt, Artificial Sequence
  Description of Artificial Sequence: Synthetic oligonucleotide
cgggcgcauaaccaggggc

SEQ ID NO: 413170 - RNA, 19 nt, Artificial Sequence
  Description of Artificial Sequence: Synthetic oligonucleotide
gucuccucggccaaacuuu

SEQ ID NO: 413171 - RNA, 19 nt, Artificial Sequence
  Description of Artificial Sequence: Synthetic oligonucleotide
ggcgcauaaccaggggcug

SEQ ID NO: 413172 - RNA, 19 nt, Artificial Sequence
  Description of Artificial Sequence: Synthetic oligonucleotide
cgucugugucuuguuauag

SEQ ID NO: 413173 - RNA, 19 nt, Artificial Sequence
  Description of Artificial Sequence: Synthetic oligonucleotide
ccgucugauugcuguguug

SEQ ID NO: 413174 - RNA, 19 nt, Artificial Sequence
  Description of Artificial Sequence: Synthetic oligonucleotide
gcgcuguauguggagagga

SEQ ID NO: 413175 - RNA, 19 nt, Artificial Sequence
  Description of Artificial Sequence: Synthetic oligonucleotide
caguacggagaguugccau

SEQ ID NO: 413176 - RNA, 19 nt, Artificial Sequence
  Description of Artificial Sequence: Synthetic oligonucleotide
cacugagauggaagcagau

SEQ ID NO: 413177 - RNA, 19 nt, Artificial Sequence
  Description of Artificial Sequence: Synthetic oligonucleotide
caagccccuagggcaggac

SEQ ID NO: 413178 - RNA, 19 nt, Artificial Sequence
  Description of Artificial Sequence: Synthetic oligonucleotide
gucugagauuggcucugcu

SEQ ID NO: 413179 - RNA, 19 nt, Artificial Sequence
  Description of Artificial Sequence: Synthetic oligonucleotide
cuguaaguguguugcccau

SEQ ID NO: 413180 - RNA, 19 nt, Artificial Sequence
  Description of Artificial Sequence: Synthetic oligonucleotide
ggucugagauuggcucugc

SEQ ID NO: 413181 - RNA, 19 nt, Artificial Sequence
  Description of Artificial Sequence: Synthetic oligonucleotide
ggaguuggcuucugcggcu

SEQ ID NO: 413182 - RNA, 19 nt, Artificial Sequence
  Description of Artificial Sequence: Synthetic oligonucleotide
guggggcgcgcuguaugug

SEQ ID NO: 413183 - RNA, 19 nt, Artificial Sequence
  Description of Artificial Sequence: Synthetic oligonucleotide
ugguugcgcugagcagagc

SEQ ID NO: 413184 - RNA, 19 nt, Artificial Sequence
  Description of Artificial Sequence: Synthetic oligonucleotide
gcugacgggcugaacaucu

SEQ ID NO: 413185 - RNA, 19 nt, Artificial Sequence
  Description of Artificial Sequence: Synthetic oligonucleotide
gcccaguagccacacccca

SEQ ID NO: 413186 - RNA, 19 nt, Artificial Sequence
  Description of Artificial Sequence: Synthetic oligonucleotide
cacugggcacgccugugua

SEQ ID NO: 413187 - RNA, 19 nt, Artificial Sequence
  Description of Artificial Sequence: Synthetic oligonucleotide
cuugugccgucugauugcu

SEQ ID NO: 413188 - RNA, 19 nt, Artificial Sequence
  Description of Artificial Sequence: Synthetic oligonucleotide
ccgggcucccagaaaugug

SEQ ID NO: 413189 - RNA, 19 nt, Artificial Sequence
  Description of Artificial Sequence: Synthetic oligonucleotide
ggcaugaguguggggcgug

SEQ ID NO: 413190 - RNA, 19 nt, Artificial Sequence
  Description of Artificial Sequence: Synthetic oligonucleotide
gucccugcgugaaaucccu

SEQ ID NO: 413191 - RNA, 19 nt, Artificial Sequence
  Description of Artificial Sequence: Synthetic oligonucleotide
cguguggugggucugagau

SEQ ID NO: 413192 - RNA, 19 nt, Artificial Sequence
  Description of Artificial Sequence: Synthetic oligonucleotide
ccgguaggccaguggugcc

SEQ ID NO: 413193 - RNA, 19 nt, Artificial Sequence
  Description of Artificial Sequence: Synthetic oligonucleotide
caacgcuguggcccgggua

SEQ ID NO: 413194 - RNA, 19 nt, Artificial Sequence
  Description of Artificial Sequence: Synthetic oligonucleotide
cguguucucuccugcacaa

SEQ ID NO: 413195 - RNA, 19 nt, Artificial Sequence
  Description of Artificial Sequence: Synthetic oligonucleotide
agguggaguuugggugaga

SEQ ID NO: 413196 - RNA, 19 nt, Artificial Sequence
  Description of Artificial Sequence: Synthetic oligonucleotide
ggcuugagugggagggaca

SEQ ID NO: 413197 - RNA, 19 nt, Artificial Sequence
  Description of Artificial Sequence: Synthetic oligonucleotide
ggaaggccuagaggcagaa

SEQ ID NO: 413198 - RNA, 19 nt, Artificial Sequence
  Description of Artificial Sequence: Synthetic oligonucleotide
guccccugggucaaaucau

SEQ ID NO: 413199 - RNA, 19 nt, Artificial Sequence
  Description of Artificial Sequence: Synthetic oligonucleotide
caccaacgcuguggcccgg

SEQ ID NO: 413200 - RNA, 19 nt, Artificial Sequence
  Description of Artificial Sequence: Synthetic oligonucleotide
cgcgcuguauguggagagg

SEQ ID NO: 413201 - RNA, 19 nt, Artificial Sequence
  Description of Artificial Sequence: Synthetic oligonucleotide
ccaguacggagaguugcca

SEQ ID NO: 413202 - RNA, 19 nt, Artificial Sequence
  Description of Artificial Sequence: Synthetic oligonucleotide
gccccuagggcaggaccag

SEQ ID NO: 413203 - RNA, 19 nt, Artificial Sequence
  Description of Artificial Sequence: Synthetic oligonucleotide
ggcgugcuuguggggcgcg

SEQ ID NO: 413204 - RNA, 19 nt, Artificial Sequence
  Description of Artificial Sequence: Synthetic oligonucleotide
gcgugaaaucccugcuugu

SEQ ID NO: 413205 - RNA, 19 nt, Artificial Sequence
  Description of Artificial Sequence: Synthetic oligonucleotide
guggcacaccagacagcuc

SEQ ID NO: 413206 - RNA, 19 nt, Artificial Sequence
  Description of Artificial Sequence: Synthetic oligonucleotide
caugaguguggggcgugcu

SEQ ID NO: 413207 - RNA, 19 nt, Artificial Sequence
  Description of Artificial Sequence: Synthetic oligonucleotide
cacuuguaugcugcccagu

SEQ ID NO: 413208 - RNA, 19 nt, Artificial Sequence
  Description of Artificial Sequence: Synthetic oligonucleotide
gccgagguuggcgggacaa

SEQ ID NO: 413209 - RNA, 19 nt, Artificial Sequence
  Description of Artificial Sequence: Synthetic oligonucleotide
gccucgaccugcagcaucu

SEQ ID NO: 413210 - RNA, 19 nt, Artificial Sequence
  Description of Artificial Sequence: Synthetic oligonucleotide
gaguugccauagguggguu

SEQ ID NO: 413211 - RNA, 19 nt, Artificial Sequence
  Description of Artificial Sequence: Synthetic oligonucleotide
gggcgugcuuguggggcgc

SEQ ID NO: 413212 - RNA, 19 nt, Artificial Sequence
  Description of Artificial Sequence: Synthetic oligonucleotide
ggggaguguugagggucac

SEQ ID NO: 413213 - RNA, 19 nt, Artificial Sequence
  Description of Artificial Sequence: Synthetic oligonucleotide
ggggcgcgcuguaugugga

SEQ ID NO: 413214 - RNA, 19 nt, Artificial Sequence
  Description of Artificial Sequence: Synthetic oligonucleotide
cggcuugagugggagggac

SEQ ID NO: 413215 - RNA, 19 nt, Artificial Sequence
  Description of Artificial Sequence: Synthetic oligonucleotide
cggugcgggcgcauaacca

SEQ ID NO: 413216 - RNA, 19 nt, Artificial Sequence
  Description of Artificial Sequence: Synthetic oligonucleotide
cggccaaacuuugugauau

SEQ ID NO: 413217 - RNA, 19 nt, Artificial Sequence
  Description of Artificial Sequence: Synthetic oligonucleotide
gggcaggaccagaccaaaa

SEQ ID NO: 413218 - RNA, 19 nt, Artificial Sequence
  Description of Artificial Sequence: Synthetic oligonucleotide
cuuguggggcgcgcuguau

SEQ ID NO: 413219 - RNA, 19 nt, Artificial Sequence
  Description of Artificial Sequence: Synthetic oligonucleotide
gagccacguggaaggccua

SEQ ID NO: 413220 - RNA, 19 nt, Artificial Sequence
  Description of Artificial Sequence: Synthetic oligonucleotide
ccguguggugggucugaga

SEQ ID NO: 413221 - RNA, 19 nt, Artificial Sequence
  Description of Artificial Sequence: Synthetic oligonucleotide
gcgugcuuguggggcgcgc

SEQ ID NO: 413222 - RNA, 19 nt, Artificial Sequence
  Description of Artificial Sequence: Synthetic oligonucleotide
gccgucugauugcuguguu

SEQ ID NO: 413223 - RNA, 19 nt, Artificial Sequence
  Description of Artificial Sequence: Synthetic oligonucleotide
ggccgagguuggcgggaca

SEQ ID NO: 413224 - RNA, 19 nt, Artificial Sequence
  Description of Artificial Sequence: Synthetic oligonucleotide
cccguggauggggcacuug

SEQ ID NO: 413225 - RNA, 19 nt, Artificial Sequence
  Description of Artificial Sequence: Synthetic oligonucleotide
ccgagguuggcgggacaaa

SEQ ID NO: 413226 - RNA, 19 nt, Artificial Sequence
  Description of Artificial Sequence: Synthetic oligonucleotide
ccaacgcuguggcccgggu

SEQ ID NO: 413227 - RNA, 19 nt, Artificial Sequence
  Description of Artificial Sequence: Synthetic oligonucleotide
cgugcuuguggggcgcgcu

SEQ ID NO: 413228 - RNA, 19 nt, Artificial Sequence
  Description of Artificial Sequence: Synthetic oligonucleotide
ccccguggauggggcacuu

SEQ ID NO: 413229 - RNA, 19 nt, Artificial Sequence
  Description of Artificial Sequence: Synthetic oligonucleotide
aaaacgaucuauuuuaucg

SEQ ID NO: 413230 - RNA, 19 nt, Artificial Sequence
  Description of Artificial Sequence: Synthetic oligonucleotide
uuuacuacuaaaacgaucu

SEQ ID NO: 413231 - RNA, 19 nt, Artificial Sequence
  Description of Artificial Sequence: Synthetic oligonucleotide
uauuuuaucgaaauuccag

SEQ ID NO: 413232 - RNA, 19 nt, Artificial Sequence
  Description of Artificial Sequence: Synthetic oligonucleotide
aaacuauugguccaucuuc

SEQ ID NO: 413233 - RNA, 19 nt, Artificial Sequence
  Description of Artificial Sequence: Synthetic oligonucleotide
uagaguguaauucagaaau

SEQ ID NO: 413234 - RNA, 19 nt, Artificial Sequence
  Description of Artificial Sequence: Synthetic oligonucleotide
uguacaaaagaauaacggc

SEQ ID NO: 413235 - RNA, 19 nt, Artificial Sequence
  Description of Artificial Sequence: Synthetic oligonucleotide
aaaacagggcuucaccggc

SEQ ID NO: 413236 - RNA, 19 nt, Artificial Sequence
  Description of Artificial Sequence: Synthetic oligonucleotide
ucaaaacuaaccuugguga

SEQ ID NO: 413237 - RNA, 19 nt, Artificial Sequence
  Description of Artificial Sequence: Synthetic oligonucleotide
agacuaaugauuaaaauag

SEQ ID NO: 413238 - RNA, 19 nt, Artificial Sequence
  Description of Artificial Sequence: Synthetic oligonucleotide
uguuguaaacuauuggucc

SEQ ID NO: 413239 - RNA, 19 nt, Artificial Sequence
  Description of Artificial Sequence: Synthetic oligonucleotide
uuaucgaaauuccagggag

SEQ ID NO: 413240 - RNA, 19 nt, Artificial Sequence
  Description of Artificial Sequence: Synthetic oligonucleotide
uuuuaucgaaauuccaggg

SEQ ID NO: 413241 - RNA, 19 nt, Artificial Sequence
  Description of Artificial Sequence: Synthetic oligonucleotide
aacaguugcugauuugcgc

SEQ ID NO: 413242 - RNA, 19 nt, Artificial Sequence
  Description of Artificial Sequence: Synthetic oligonucleotide
uauacuagaguguaauuca

SEQ ID NO: 413243 - RNA, 19 nt, Artificial Sequence
  Description of Artificial Sequence: Synthetic oligonucleotide
uuaaaccuagcucugaagu

SEQ ID NO: 413244 - RNA, 19 nt, Artificial Sequence
  Description of Artificial Sequence: Synthetic oligonucleotide
uuacaauguauuaauaguc

SEQ ID NO: 413245 - RNA, 19 nt, Artificial Sequence
  Description of Artificial Sequence: Synthetic oligonucleotide
agaauaacggcacaaauau

SEQ ID NO: 413246 - RNA, 19 nt, Artificial Sequence
  Description of Artificial Sequence: Synthetic oligonucleotide
cauaugaacaccugcaaag

SEQ ID NO: 413247 - RNA, 19 nt, Artificial Sequence
  Description of Artificial Sequence: Synthetic oligonucleotide
ucuaauucagucuugcuuc

SEQ ID NO: 413248 - RNA, 19 nt, Artificial Sequence
  Description of Artificial Sequence: Synthetic oligonucleotide
aacuauuuccugcugcuag

SEQ ID NO: 413249 - RNA, 19 nt, Artificial Sequence
  Description of Artificial Sequence: Synthetic oligonucleotide
acuaaaacgaucuauuuua

SEQ ID NO: 413250 - RNA, 19 nt, Artificial Sequence
  Description of Artificial Sequence: Synthetic oligonucleotide
auauacuagaguguaauuc

SEQ ID NO: 413251 - RNA, 19 nt, Artificial Sequence
  Description of Artificial Sequence: Synthetic oligonucleotide
uguauuaauagucuccuua

SEQ ID NO: 413252 - RNA, 19 nt, Artificial Sequence
  Description of Artificial Sequence: Synthetic oligonucleotide
aaaccuagcucugaagucg

SEQ ID NO: 413253 - RNA, 19 nt, Artificial Sequence
  Description of Artificial Sequence: Synthetic oligonucleotide
uucauuaacagcuauugua

SEQ ID NO: 413254 - RNA, 19 nt, Artificial Sequence
  Description of Artificial Sequence: Synthetic oligonucleotide
aaggcaagcuuccuccacc

SEQ ID NO: 413255 - RNA, 19 nt, Artificial Sequence
  Description of Artificial Sequence: Synthetic oligonucleotide
ugaguuagggaaauuucag

SEQ ID NO: 413256 - RNA, 19 nt, Artificial Sequence
  Description of Artificial Sequence: Synthetic oligonucleotide
aauguauuaauagucuccu

SEQ ID NO: 413257 - RNA, 19 nt, Artificial Sequence
  Description of Artificial Sequence: Synthetic oligonucleotide
uuaauagucuccuuaguaa

SEQ ID NO: 413258 - RNA, 19 nt, Artificial Sequence
  Description of Artificial Sequence: Synthetic oligonucleotide
uugcucauuagaaagacuc

SEQ ID NO: 413259 - RNA, 19 nt, Artificial Sequence
  Description of Artificial Sequence: Synthetic oligonucleotide
ucuuaggucauauuucuga

SEQ ID NO: 413260 - RNA, 19 nt, Artificial Sequence
  Description of Artificial Sequence: Synthetic oligonucleotide
ugaaaggcaagcuuccucc

SEQ ID NO: 413261 - RNA, 19 nt, Artificial Sequence
  Description of Artificial Sequence: Synthetic oligonucleotide
uuagggaaauuucaguugu

SEQ ID NO: 413262 - RNA, 19 nt, Artificial Sequence
  Description of Artificial Sequence: Synthetic oligonucleotide
aggagauacauauaugucu

SEQ ID NO: 413263 - RNA, 19 nt, Artificial Sequence
  Description of Artificial Sequence: Synthetic oligonucleotide
uauugguccaucuucagaa

SEQ ID NO: 413264 - RNA, 19 nt, Artificial Sequence
  Description of Artificial Sequence: Synthetic oligonucleotide
uuuggaauguccuuccuac

SEQ ID NO: 413265 - RNA, 19 nt, Artificial Sequence
  Description of Artificial Sequence: Synthetic oligonucleotide
guauuaauagucuccuuag

SEQ ID NO: 413266 - RNA, 19 nt, Artificial Sequence
  Description of Artificial Sequence: Synthetic oligonucleotide
auacauauuaagguuuuac

SEQ ID NO: 413267 - RNA, 19 nt, Artificial Sequence
  Description of Artificial Sequence: Synthetic oligonucleotide
agaguggugacccauuguc

SEQ ID NO: 413268 - RNA, 19 nt, Artificial Sequence
  Description of Artificial Sequence: Synthetic oligonucleotide
aaacuaaccuuggugaaag

SEQ ID NO: 413269 - RNA, 19 nt, Artificial Sequence
  Description of Artificial Sequence: Synthetic oligonucleotide
uccagucagucuauuaacg

SEQ ID NO: 413270 - RNA, 19 nt, Artificial Sequence
  Description of Artificial Sequence: Synthetic oligonucleotide
uuuaucgaaauuccaggga

SEQ ID NO: 413271 - RNA, 19 nt, Artificial Sequence
  Description of Artificial Sequence: Synthetic oligonucleotide
aaacgaucuauuuuaucga

SEQ ID NO: 413272 - RNA, 19 nt, Artificial Sequence
  Description of Artificial Sequence: Synthetic oligonucleotide
uuucaguaugcgucgaggg

SEQ ID NO: 413273 - RNA, 19 nt, Artificial Sequence
  Description of Artificial Sequence: Synthetic oligonucleotide
uguaccacaagagauaaaa

SEQ ID NO: 413274 - RNA, 19 nt, Artificial Sequence
  Description of Artificial Sequence: Synthetic oligonucleotide
ucauuagaaagacucacau

SEQ ID NO: 413275 - RNA, 19 nt, Artificial Sequence
  Description of Artificial Sequence: Synthetic oligonucleotide
auauuaagguuuuacuacu

SEQ ID NO: 413276 - RNA, 19 nt, Artificial Sequence
  Description of Artificial Sequence: Synthetic oligonucleotide
uggaauguccuuccuacag

SEQ ID NO: 413277 - RNA, 19 nt, Artificial Sequence
  Description of Artificial Sequence: Synthetic oligonucleotide
acagaggauggucugguac

SEQ ID NO: 413278 - RNA, 19 nt, Artificial Sequence
  Description of Artificial Sequence: Synthetic oligonucleotide
aacuguuuuagaaggguuc

SEQ ID NO: 413279 - RNA, 19 nt, Artificial Sequence
  Description of Artificial Sequence: Synthetic oligonucleotide
uuaacgugaguucaaucac

SEQ ID NO: 413280 - RNA, 19 nt, Artificial Sequence
  Description of Artificial Sequence: Synthetic oligonucleotide
agucuauuaacgugaguuc

SEQ ID NO: 413281 - RNA, 19 nt, Artificial Sequence
  Description of Artificial Sequence: Synthetic oligonucleotide
uucaguaugcgucgagggg

SEQ ID NO: 413282 - RNA, 19 nt, Artificial Sequence
  Description of Artificial Sequence: Synthetic oligonucleotide
aaaauguacugugaaccag

SEQ ID NO: 413283 - RNA, 19 nt, Artificial Sequence
  Description of Artificial Sequence: Synthetic oligonucleotide
uuuaaaccuagcucugaag

SEQ ID NO: 413284 - RNA, 19 nt, Artificial Sequence
  Description of Artificial Sequence: Synthetic oligonucleotide
uaauagucuccuuaguaac

SEQ ID NO: 413285 - RNA, 19 nt, Artificial Sequence
  Description of Artificial Sequence: Synthetic oligonucleotide
acuccuagggcacacaaug

SEQ ID NO: 413286 - RNA, 19 nt, Artificial Sequence
  Description of Artificial Sequence: Synthetic oligonucleotide
auuaauagucuccuuagua

SEQ ID NO: 413287 - RNA, 19 nt, Artificial Sequence
  Description of Artificial Sequence: Synthetic oligonucleotide
ucuccuuaguaacaaauau

SEQ ID NO: 413288 - RNA, 19 nt, Artificial Sequence
  Description of Artificial Sequence: Synthetic oligonucleotide
gauuucagaauguaccaca

SEQ ID NO: 413289 - RNA, 19 nt, Artificial Sequence
  Description of Artificial Sequence: Synthetic oligonucleotide
acuuccuacaaguacaaaa

SEQ ID NO: 413290 - RNA, 19 nt, Artificial Sequence
  Description of Artificial Sequence: Synthetic oligonucleotide
uuugauauacuagagugua

SEQ ID NO: 413291 - RNA, 19 nt, Artificial Sequence
  Description of Artificial Sequence: Synthetic oligonucleotide
acauggguaagccaguuca

SEQ ID NO: 413292 - RNA, 19 nt, Artificial Sequence
  Description of Artificial Sequence: Synthetic oligonucleotide
aguuguucuaauucagucu

SEQ ID NO: 413293 - RNA, 19 nt, Artificial Sequence
  Description of Artificial Sequence: Synthetic oligonucleotide
aaauuugcaagggcuuugg

SEQ ID NO: 413294 - RNA, 19 nt, Artificial Sequence
  Description of Artificial Sequence: Synthetic oligonucleotide
uuaagucugagucacugua

SEQ ID NO: 413295 - RNA, 19 nt, Artificial Sequence
  Description of Artificial Sequence: Synthetic oligonucleotide
uuuucaguaugcgucgagg

SEQ ID NO: 413296 - RNA, 19 nt, Artificial Sequence
  Description of Artificial Sequence: Synthetic oligonucleotide
agacaaacauucuauuuga

SEQ ID NO: 413297 - RNA, 19 nt, Artificial Sequence
  Description of Artificial Sequence: Synthetic oligonucleotide
uuaauggcgugugaaaggc

SEQ ID NO: 413298 - RNA, 19 nt, Artificial Sequence
  Description of Artificial Sequence: Synthetic oligonucleotide
acuagaguguaauucagaa

SEQ ID NO: 413299 - RNA, 19 nt, Artificial Sequence
  Description of Artificial Sequence: Synthetic oligonucleotide
gaguugguaagacuaauga

SEQ ID NO: 413300 - RNA, 19 nt, Artificial Sequence
  Description of Artificial Sequence: Synthetic oligonucleotide
uaacggcacaaauauaaca

SEQ ID NO: 413301 - RNA, 19 nt, Artificial Sequence
  Description of Artificial Sequence: Synthetic oligonucleotide
uuucauuucccaagaagaa

SEQ ID NO: 413302 - RNA, 19 nt, Artificial Sequence
  Description of Artificial Sequence: Synthetic oligonucleotide
aaucaaaacuaaccuuggu

SEQ ID NO: 413303 - RNA, 19 nt, Artificial Sequence
  Description of Artificial Sequence: Synthetic oligonucleotide
aguuagggaaauuucaguu

SEQ ID NO: 413304 - RNA, 19 nt, Artificial Sequence
  Description of Artificial Sequence: Synthetic oligonucleotide
guacaaaagaauaacggca

SEQ ID NO: 413305 - RNA, 19 nt, Artificial Sequence
  Description of Artificial Sequence: Synthetic oligonucleotide
uuaggucauauuucugaag

SEQ ID NO: 413306 - RNA, 19 nt, Artificial Sequence
  Description of Artificial Sequence: Synthetic oligonucleotide
aacggcacaaauauaacau

SEQ ID NO: 413307 - RNA, 19 nt, Artificial Sequence
  Description of Artificial Sequence: Synthetic oligonucleotide
gacccauuguccuugaguc

SEQ ID NO: 413308 - RNA, 19 nt, Artificial Sequence
  Description of Artificial Sequence: Synthetic oligonucleotide
cuuccuuauuuaaaccuag

SEQ ID NO: 413309 - RNA, 19 nt, Artificial Sequence
  Description of Artificial Sequence: Synthetic oligonucleotide
aacgaucuauuuuaucgaa

SEQ ID NO: 413310 - RNA, 19 nt, Artificial Sequence
  Description of Artificial Sequence: Synthetic oligonucleotide
aaacgggucaggugcauca

SEQ ID NO: 413311 - RNA, 19 nt, Artificial Sequence
  Description of Artificial Sequence: Synthetic oligonucleotide
aacuaaccuuggugaaagc

SEQ ID NO: 413312 - RNA, 19 nt, Artificial Sequence
  Description of Artificial Sequence: Synthetic oligonucleotide
ugauauacuagaguguaau

SEQ ID NO: 413313 - RNA, 19 nt, Artificial Sequence
  Description of Artificial Sequence: Synthetic oligonucleotide
guguggacaagaaauaccc

SEQ ID NO: 413314 - RNA, 19 nt, Artificial Sequence
  Description of Artificial Sequence: Synthetic oligonucleotide
ucaguaugcgucgaggggc

SEQ ID NO: 413315 - RNA, 19 nt, Artificial Sequence
  Description of Artificial Sequence: Synthetic oligonucleotide
ucuacacagugccugcgag

SEQ ID NO: 413316 - RNA, 19 nt, Artificial Sequence
  Description of Artificial Sequence: Synthetic oligonucleotide
guaauucagaaaugcauga

SEQ ID NO: 413317 - RNA, 19 nt, Artificial Sequence
  Description of Artificial Sequence: Synthetic oligonucleotide
ggucaaacgggucaggugc

SEQ ID NO: 413318 - RNA, 19 nt, Artificial Sequence
  Description of Artificial Sequence: Synthetic oligonucleotide
ugugugcuuaaauauuuuc

SEQ ID NO: 413319 - RNA, 19 nt, Artificial Sequence
  Description of Artificial Sequence: Synthetic oligonucleotide
cuauuguauuucauuuccc

SEQ ID NO: 413320 - RNA, 19 nt, Artificial Sequence
  Description of Artificial Sequence: Synthetic oligonucleotide
aaacaguugcugauuugcg

SEQ ID NO: 413321 - RNA, 19 nt, Artificial Sequence
  Description of Artificial Sequence: Synthetic oligonucleotide
agccucggcacuuugacug

SEQ ID NO: 413322 - RNA, 19 nt, Artificial Sequence
  Description of Artificial Sequence: Synthetic oligonucleotide
caugaguuagggaaauuuc

SEQ ID NO: 413323 - RNA, 19 nt, Artificial Sequence
  Description of Artificial Sequence: Synthetic oligonucleotide
ucuauuaacgugaguucaa

SEQ ID NO: 413324 - RNA, 19 nt, Artificial Sequence
  Description of Artificial Sequence: Synthetic oligonucleotide
cucaguucagacugaaaac

SEQ ID NO: 413325 - RNA, 19 nt, Artificial Sequence
  Description of Artificial Sequence: Synthetic oligonucleotide
agaauguaccacaagagau

SEQ ID NO: 413326 - RNA, 19 nt, Artificial Sequence
  Description of Artificial Sequence: Synthetic oligonucleotide
auguacugugaaccagugc

SEQ ID NO: 413327 - RNA, 19 nt, Artificial Sequence
  Description of Artificial Sequence: Synthetic oligonucleotide
gaaagcuacacuuagccuu

SEQ ID NO: 413328 - RNA, 19 nt, Artificial Sequence
  Description of Artificial Sequence: Synthetic oligonucleotide
uaacgugaguucaaucacu

SEQ ID NO: 413329 - RNA, 19 nt, Artificial Sequence
  Description of Artificial Sequence: Synthetic oligonucleotide
uaagccucggcacuuugac

SEQ ID NO: 413330 - RNA, 19 nt, Artificial Sequence
  Description of Artificial Sequence: Synthetic oligonucleotide
uacuagaguguaauucaga

SEQ ID NO: 413331 - RNA, 19 nt, Artificial Sequence
  Description of Artificial Sequence: Synthetic oligonucleotide
cuuuaagucugagucacug

SEQ ID NO: 413332 - RNA, 19 nt, Artificial Sequence
  Description of Artificial Sequence: Synthetic oligonucleotide
uaucgaaauuccagggaga

SEQ ID NO: 413333 - RNA, 19 nt, Artificial Sequence
  Description of Artificial Sequence: Synthetic oligonucleotide
ugccaguacuccuagggca

SEQ ID NO: 413334 - RNA, 19 nt, Artificial Sequence
  Description of Artificial Sequence: Synthetic oligonucleotide
agggugaagaaagcuacac

SEQ ID NO: 413335 - RNA, 19 nt, Artificial Sequence
  Description of Artificial Sequence: Synthetic oligonucleotide
aagaaaaugcagggugaag

SEQ ID NO: 413336 - RNA, 19 nt, Artificial Sequence
  Description of Artificial Sequence: Synthetic oligonucleotide
uuuaagucugagucacugu

SEQ ID NO: 413337 - RNA, 19 nt, Artificial Sequence
  Description of Artificial Sequence: Synthetic oligonucleotide
uaaaacgaucuauuuuauc

SEQ ID NO: 413338 - RNA, 19 nt, Artificial Sequence
  Description of Artificial Sequence: Synthetic oligonucleotide
auuuaaaccuagcucugaa

SEQ ID NO: 413339 - RNA, 19 nt, Artificial Sequence
  Description of Artificial Sequence: Synthetic oligonucleotide
aacuauugguccaucuuca

SEQ ID NO: 413340 - RNA, 19 nt, Artificial Sequence
  Description of Artificial Sequence: Synthetic oligonucleotide
aaaacuaaccuuggugaaa

SEQ ID NO: 413341 - RNA, 19 nt, Artificial Sequence
  Description of Artificial Sequence: Synthetic oligonucleotide
uaaauuugcaagggcuuug

SEQ ID NO: 413342 - RNA, 19 nt, Artificial Sequence
  Description of Artificial Sequence: Synthetic oligonucleotide
ugcuagacuaggcacuuaa

SEQ ID NO: 413343 - RNA, 19 nt, Artificial Sequence
  Description of Artificial Sequence: Synthetic oligonucleotide
aucgaaauuccagggagag

SEQ ID NO: 413344 - RNA, 19 nt, Artificial Sequence
  Description of Artificial Sequence: Synthetic oligonucleotide
aacgugaguucaaucacug

SEQ ID NO: 413345 - RNA, 19 nt, Artificial Sequence
  Description of Artificial Sequence: Synthetic oligonucleotide
agaaagcuacacuuagccu

SEQ ID NO: 413346 - RNA, 19 nt, Artificial Sequence
  Description of Artificial Sequence: Synthetic oligonucleotide
uauuaagguuuuacuacua

SEQ ID NO: 413347 - RNA, 19 nt, Artificial Sequence
  Description of Artificial Sequence: Synthetic oligonucleotide
uuauucccuccaaauguac

SEQ ID NO: 413348 - RNA, 19 nt, Artificial Sequence
  Description of Artificial Sequence: Synthetic oligonucleotide
uauuaacgugaguucaauc

SEQ ID NO: 413349 - RNA, 19 nt, Artificial Sequence
  Description of Artificial Sequence: Synthetic oligonucleotide
uacuacuaaaacgaucuau

SEQ ID NO: 413350 - RNA, 19 nt, Artificial Sequence
  Description of Artificial Sequence: Synthetic oligonucleotide
ugcaggcucacuauacagu

SEQ ID NO: 413351 - RNA, 19 nt, Artificial Sequence
  Description of Artificial Sequence: Synthetic oligonucleotide
acaaaagaauaacggcaca

SEQ ID NO: 413352 - RNA, 19 nt, Artificial Sequence
  Description of Artificial Sequence: Synthetic oligonucleotide
uucuuaggucauauuucug

SEQ ID NO: 413353 - RNA, 19 nt, Artificial Sequence
  Description of Artificial Sequence: Synthetic oligonucleotide
cuacacuuagccuuugcca

SEQ ID NO: 413354 - RNA, 19 nt, Artificial Sequence
  Description of Artificial Sequence: Synthetic oligonucleotide
auucccuccaaauguacaa

SEQ ID NO: 413355 - RNA, 19 nt, Artificial Sequence
  Description of Artificial Sequence: Synthetic oligonucleotide
agucagucuauuaacguga

SEQ ID NO: 413356 - RNA, 19 nt, Artificial Sequence
  Description of Artificial Sequence: Synthetic oligonucleotide
ucacuguucugccucagua

SEQ ID NO: 413357 - RNA, 19 nt, Artificial Sequence
  Description of Artificial Sequence: Synthetic oligonucleotide
ugcgucgaggggcugaaga

SEQ ID NO: 413358 - RNA, 19 nt, Artificial Sequence
  Description of Artificial Sequence: Synthetic oligonucleotide
aauggcgugugaaaggcaa

SEQ ID NO: 413359 - RNA, 19 nt, Artificial Sequence
  Description of Artificial Sequence: Synthetic oligonucleotide
acuauugguccaucuucag

SEQ ID NO: 413360 - RNA, 19 nt, Artificial Sequence
  Description of Artificial Sequence: Synthetic oligonucleotide
augaguuagggaaauuuca

SEQ ID NO: 413361 - RNA, 19 nt, Artificial Sequence
  Description of Artificial Sequence: Synthetic oligonucleotide
ugcugcuagacuaggcacu

SEQ ID NO: 413362 - RNA, 19 nt, Artificial Sequence
  Description of Artificial Sequence: Synthetic oligonucleotide
uuguguggacaagaaauac

SEQ ID NO: 413363 - RNA, 19 nt, Artificial Sequence
  Description of Artificial Sequence: Synthetic oligonucleotide
cacuaggagcuucacaaug

SEQ ID NO: 413364 - RNA, 19 nt, Artificial Sequence
  Description of Artificial Sequence: Synthetic oligonucleotide
aagaguggugacccauugu

SEQ ID NO: 413365 - RNA, 19 nt, Artificial Sequence
  Description of Artificial Sequence: Synthetic oligonucleotide
cuuuggugauuacaggcuc

SEQ ID NO: 413366 - RNA, 19 nt, Artificial Sequence
  Description of Artificial Sequence: Synthetic oligonucleotide
uugauauacuagaguguaa

SEQ ID NO: 413367 - RNA, 19 nt, Artificial Sequence
  Description of Artificial Sequence: Synthetic oligonucleotide
aaaaugcagggugaagaaa

SEQ ID NO: 413368 - RNA, 19 nt, Artificial Sequence
  Description of Artificial Sequence: Synthetic oligonucleotide
cuccagucagucuauuaac

SEQ ID NO: 413369 - RNA, 19 nt, Artificial Sequence
  Description of Artificial Sequence: Synthetic oligonucleotide
cuggguugagagcugcucc

SEQ ID NO: 413370 - RNA, 19 nt, Artificial Sequence
  Description of Artificial Sequence: Synthetic oligonucleotide
auaacauaggcugucuuuu

SEQ ID NO: 413371 - RNA, 19 nt, Artificial Sequence
  Description of Artificial Sequence: Synthetic oligonucleotide
cuacacagugccugcgagg

SEQ ID NO: 413372 - RNA, 19 nt, Artificial Sequence
  Description of Artificial Sequence: Synthetic oligonucleotide
ucggugguaugaaacaguu

SEQ ID NO: 413373 - RNA, 19 nt, Artificial Sequence
  Description of Artificial Sequence: Synthetic oligonucleotide
aaccuagcucugaagucgg

SEQ ID NO: 413374 - RNA, 19 nt, Artificial Sequence
  Description of Artificial Sequence: Synthetic oligonucleotide
cuuuggcccucuuuaaguc

SEQ ID NO: 413375 - RNA, 19 nt, Artificial Sequence
  Description of Artificial Sequence: Synthetic oligonucleotide
gguaugaaacaguugcuga

SEQ ID NO: 413376 - RNA, 19 nt, Artificial Sequence
  Description of Artificial Sequence: Synthetic oligonucleotide
cucauuagaaagacucaca

SEQ ID NO: 413377 - RNA, 19 nt, Artificial Sequence
  Description of Artificial Sequence: Synthetic oligonucleotide
aacucggccaccacugcag

SEQ ID NO: 413378 - RNA, 19 nt, Artificial Sequence
  Description of Artificial Sequence: Synthetic oligonucleotide
ggcacaaauauaacauagg

SEQ ID NO: 413379 - RNA, 19 nt, Artificial Sequence
  Description of Artificial Sequence: Synthetic oligonucleotide
uaugaaacaguugcugauu

SEQ ID NO: 413380 - RNA, 19 nt, Artificial Sequence
  Description of Artificial Sequence: Synthetic oligonucleotide
gucuauuaacgugaguuca

SEQ ID NO: 413381 - RNA, 19 nt, Artificial Sequence
  Description of Artificial Sequence: Synthetic oligonucleotide
ccucggacagccaagggcg

SEQ ID NO: 413382 - RNA, 19 nt, Artificial Sequence
  Description of Artificial Sequence: Synthetic oligonucleotide
acgagagcaggcuggcuag

SEQ ID NO: 413383 - RNA, 19 nt, Artificial Sequence
  Description of Artificial Sequence: Synthetic oligonucleotide
cuacagaagaguggugacc

SEQ ID NO: 413384 - RNA, 19 nt, Artificial Sequence
  Description of Artificial Sequence: Synthetic oligonucleotide
aaaaucccagccacuccag

SEQ ID NO: 413385 - RNA, 19 nt, Artificial Sequence
  Description of Artificial Sequence: Synthetic oligonucleotide
cuccuagggcacacaaugg

SEQ ID NO: 413386 - RNA, 19 nt, Artificial Sequence
  Description of Artificial Sequence: Synthetic oligonucleotide
cuuaggacuggagccacag

SEQ ID NO: 413387 - RNA, 19 nt, Artificial Sequence
  Description of Artificial Sequence: Synthetic oligonucleotide
acgugaguucaaucacugg

SEQ ID NO: 413388 - RNA, 19 nt, Artificial Sequence
  Description of Artificial Sequence: Synthetic oligonucleotide
gguacugccccuucucuag

SEQ ID NO: 413389 - RNA, 19 nt, Artificial Sequence
  Description of Artificial Sequence: Synthetic oligonucleotide
aaacuguuuuagaaggguu

SEQ ID NO: 413390 - RNA, 19 nt, Artificial Sequence
  Description of Artificial Sequence: Synthetic oligonucleotide
guugguaagacuaaugauu

SEQ ID NO: 413391 - RNA, 19 nt, Artificial Sequence
  Description of Artificial Sequence: Synthetic oligonucleotide
gaauguaccacaagagaua

SEQ ID NO: 413392 - RNA, 19 nt, Artificial Sequence
  Description of Artificial Sequence: Synthetic oligonucleotide
agaguugguaagacuaaug

SEQ ID NO: 413393 - RNA, 19 nt, Artificial Sequence
  Description of Artificial Sequence: Synthetic oligonucleotide
ucggcacuuugacugaguc

SEQ ID NO: 413394 - RNA, 19 nt, Artificial Sequence
  Description of Artificial Sequence: Synthetic oligonucleotide
auauaacauaggcugucuu

SEQ ID NO: 413395 - RNA, 19 nt, Artificial Sequence
  Description of Artificial Sequence: Synthetic oligonucleotide
cacaagaugaaagggucuc

SEQ ID NO: 413396 - RNA, 19 nt, Artificial Sequence
  Description of Artificial Sequence: Synthetic oligonucleotide
uaauggcgugugaaaggca

SEQ ID NO: 413397 - RNA, 19 nt, Artificial Sequence
  Description of Artificial Sequence: Synthetic oligonucleotide
aacgggucaggugcaucac

SEQ ID NO: 413398 - RNA, 19 nt, Artificial Sequence
  Description of Artificial Sequence: Synthetic oligonucleotide
cuuccuacaaguacaaaau

SEQ ID NO: 413399 - RNA, 19 nt, Artificial Sequence
  Description of Artificial Sequence: Synthetic oligonucleotide
aaagcuacacuuagccuuu

SEQ ID NO: 413400 - RNA, 19 nt, Artificial Sequence
  Description of Artificial Sequence: Synthetic oligonucleotide
uuacuacuaaaacgaucua

SEQ ID NO: 413401 - RNA, 19 nt, Artificial Sequence
  Description of Artificial Sequence: Synthetic oligonucleotide
ugccugcgaggacaaaggc

SEQ ID NO: 413402 - RNA, 19 nt, Artificial Sequence
  Description of Artificial Sequence: Synthetic oligonucleotide
agaguguaauucagaaaug

SEQ ID NO: 413403 - RNA, 19 nt, Artificial Sequence
  Description of Artificial Sequence: Synthetic oligonucleotide
gaguggugacccauugucc

SEQ ID NO: 413404 - RNA, 19 nt, Artificial Sequence
  Description of Artificial Sequence: Synthetic oligonucleotide
ccuuccuacagaagagugg

SEQ ID NO: 413405 - RNA, 19 nt, Artificial Sequence
  Description of Artificial Sequence: Synthetic oligonucleotide
cacacggccccuucuacac

SEQ ID NO: 413406 - RNA, 19 nt, Artificial Sequence
  Description of Artificial Sequence: Synthetic oligonucleotide
gguaagacuaaugauuaaa

SEQ ID NO: 413407 - RNA, 19 nt, Artificial Sequence
  Description of Artificial Sequence: Synthetic oligonucleotide
ggugaagaaagcuacacuu

SEQ ID NO: 413408 - RNA, 19 nt, Artificial Sequence
  Description of Artificial Sequence: Synthetic oligonucleotide
caaaacuaaccuuggugaa

SEQ ID NO: 413409 - RNA, 19 nt, Artificial Sequence
  Description of Artificial Sequence: Synthetic oligonucleotide
ggagaguucuguuaagaaa

SEQ ID NO: 413410 - RNA, 19 nt, Artificial Sequence
  Description of Artificial Sequence: Synthetic oligonucleotide
accggcaucggcuugucua

SEQ ID NO: 413411 - RNA, 19 nt, Artificial Sequence
  Description of Artificial Sequence: Synthetic oligonucleotide
ugacuuucuuaggucauau

SEQ ID NO: 413412 - RNA, 19 nt, Artificial Sequence
  Description of Artificial Sequence: Synthetic oligonucleotide
aagccucggcacuuugacu

SEQ ID NO: 413413 - RNA, 19 nt, Artificial Sequence
  Description of Artificial Sequence: Synthetic oligonucleotide
uagcucugaagucgguggu

SEQ ID NO: 413414 - RNA, 19 nt, Artificial Sequence
  Description of Artificial Sequence: Synthetic oligonucleotide
cuuauucccuccaaaugua

SEQ ID NO: 413415 - RNA, 19 nt, Artificial Sequence
  Description of Artificial Sequence: Synthetic oligonucleotide
guucagacugaaaaccauc

SEQ ID NO: 413416 - RNA, 19 nt, Artificial Sequence
  Description of Artificial Sequence: Synthetic oligonucleotide
gguaagccaguucauuaac

SEQ ID NO: 413417 - RNA, 19 nt, Artificial Sequence
  Description of Artificial Sequence: Synthetic oligonucleotide
aggguguuguaaacuauug

SEQ ID NO: 413418 - RNA, 19 nt, Artificial Sequence
  Description of Artificial Sequence: Synthetic oligonucleotide
ugguaagacuaaugauuaa

SEQ ID NO: 413419 - RNA, 19 nt, Artificial Sequence
  Description of Artificial Sequence: Synthetic oligonucleotide
guugccugugcagaauggc

SEQ ID NO: 413420 - RNA, 19 nt, Artificial Sequence
  Description of Artificial Sequence: Synthetic oligonucleotide
gugccaguacuccuagggc

SEQ ID NO: 413421 - RNA, 19 nt, Artificial Sequence
  Description of Artificial Sequence: Synthetic oligonucleotide
ugccaauauccuccuggcu

SEQ ID NO: 413422 - RNA, 19 nt, Artificial Sequence
  Description of Artificial Sequence: Synthetic oligonucleotide
aucuggcauugcuuccaac

SEQ ID NO: 413423 - RNA, 19 nt, Artificial Sequence
  Description of Artificial Sequence: Synthetic oligonucleotide
cuauuuccugcugcuagac

SEQ ID NO: 413424 - RNA, 19 nt, Artificial Sequence
  Description of Artificial Sequence: Synthetic oligonucleotide
uggcuuuccugaacaugug

SEQ ID NO: 413425 - RNA, 19 nt, Artificial Sequence
  Description of Artificial Sequence: Synthetic oligonucleotide
uuccuacagaagaguggug

SEQ ID NO: 413426 - RNA, 19 nt, Artificial Sequence
  Description of Artificial Sequence: Synthetic oligonucleotide
caucggcuugucuaucaac

SEQ ID NO: 413427 - RNA, 19 nt, Artificial Sequence
  Description of Artificial Sequence: Synthetic oligonucleotide
uguaaacuauugguccauc

SEQ ID NO: 413428 - RNA, 19 nt, Artificial Sequence
  Description of Artificial Sequence: Synthetic oligonucleotide
gaaagacucacauccugau

SEQ ID NO: 413429 - RNA, 19 nt, Artificial Sequence
  Description of Artificial Sequence: Synthetic oligonucleotide
ugugaaaggcaagcuuccu

SEQ ID NO: 413430 - RNA, 19 nt, Artificial Sequence
  Description of Artificial Sequence: Synthetic oligonucleotide
acggcacaaauauaacaua

SEQ ID NO: 413431 - RNA, 19 nt, Artificial Sequence
  Description of Artificial Sequence: Synthetic oligonucleotide
gugccugcgaggacaaagg

SEQ ID NO: 413432 - RNA, 19 nt, Artificial Sequence
  Description of Artificial Sequence: Synthetic oligonucleotide
gauuugcgccuggugcugg

SEQ ID NO: 413433 - RNA, 19 nt, Artificial Sequence
  Description of Artificial Sequence: Synthetic oligonucleotide
ggugucacugguucuccag

SEQ ID NO: 413434 - RNA, 19 nt, Artificial Sequence
  Description of Artificial Sequence: Synthetic oligonucleotide
uggugacccauuguccuug

SEQ ID NO: 413435 - RNA, 19 nt, Artificial Sequence
  Description of Artificial Sequence: Synthetic oligonucleotide
cggcacaaauauaacauag

SEQ ID NO: 413436 - RNA, 19 nt, Artificial Sequence
  Description of Artificial Sequence: Synthetic oligonucleotide
guaagccaguucauuaaca

SEQ ID NO: 413437 - RNA, 19 nt, Artificial Sequence
  Description of Artificial Sequence: Synthetic oligonucleotide
gucagucuauuaacgugag

SEQ ID NO: 413438 - RNA, 19 nt, Artificial Sequence
  Description of Artificial Sequence: Synthetic oligonucleotide
gauauacuagaguguaauu

SEQ ID NO: 413439 - RNA, 19 nt, Artificial Sequence
  Description of Artificial Sequence: Synthetic oligonucleotide
ugauuugcgccuggugcug

SEQ ID NO: 413440 - RNA, 19 nt, Artificial Sequence
  Description of Artificial Sequence: Synthetic oligonucleotide
gcucauuagaaagacucac

SEQ ID NO: 413441 - RNA, 19 nt, Artificial Sequence
  Description of Artificial Sequence: Synthetic oligonucleotide
guaugaaacaguugcugau

SEQ ID NO: 413442 - RNA, 19 nt, Artificial Sequence
  Description of Artificial Sequence: Synthetic oligonucleotide
cgugugaaaggcaagcuuc

SEQ ID NO: 413443 - RNA, 19 nt, Artificial Sequence
  Description of Artificial Sequence: Synthetic oligonucleotide
agcgucugcaggcucacua

SEQ ID NO: 413444 - RNA, 19 nt, Artificial Sequence
  Description of Artificial Sequence: Synthetic oligonucleotide
cagggcuacuuccuacaag

SEQ ID NO: 413445 - RNA, 19 nt, Artificial Sequence
  Description of Artificial Sequence: Synthetic oligonucleotide
cugugacuuaggacuggag

SEQ ID NO: 413446 - RNA, 19 nt, Artificial Sequence
  Description of Artificial Sequence: Synthetic oligonucleotide
uacuccuagggcacacaau

SEQ ID NO: 413447 - RNA, 19 nt, Artificial Sequence
  Description of Artificial Sequence: Synthetic oligonucleotide
gacugugggugacuugcuc

SEQ ID NO: 413448 - RNA, 19 nt, Artificial Sequence
  Description of Artificial Sequence: Synthetic oligonucleotide
uuccugcugcuagacuagg

SEQ ID NO: 413449 - RNA, 19 nt, Artificial Sequence
  Description of Artificial Sequence: Synthetic oligonucleotide
aucacuguucugccucagu

SEQ ID NO: 413450 - RNA, 19 nt, Artificial Sequence
  Description of Artificial Sequence: Synthetic oligonucleotide
ucccucucgggaauuuaau

SEQ ID NO: 413451 - RNA, 19 nt, Artificial Sequence
  Description of Artificial Sequence: Synthetic oligonucleotide
auguauuaauagucuccuu

SEQ ID NO: 413452 - RNA, 19 nt, Artificial Sequence
  Description of Artificial Sequence: Synthetic oligonucleotide
auacagugcaacacacaga

SEQ ID NO: 413453 - RNA, 19 nt, Artificial Sequence
  Description of Artificial Sequence: Synthetic oligonucleotide
cacaaugacugugggugac

SEQ ID NO: 413454 - RNA, 19 nt, Artificial Sequence
  Description of Artificial Sequence: Synthetic oligonucleotide
gaaaaccaucaucuggcau

SEQ ID NO: 413455 - RNA, 19 nt, Artificial Sequence
  Description of Artificial Sequence: Synthetic oligonucleotide
guuuagagggcugcaggga

SEQ ID NO: 413456 - RNA, 19 nt, Artificial Sequence
  Description of Artificial Sequence: Synthetic oligonucleotide
ugguacugccccuucucua

SEQ ID NO: 413457 - RNA, 19 nt, Artificial Sequence
  Description of Artificial Sequence: Synthetic oligonucleotide
gacuuaggacuggagccac

SEQ ID NO: 413458 - RNA, 19 nt, Artificial Sequence
  Description of Artificial Sequence: Synthetic oligonucleotide
ucgaaauuccagggagagu

SEQ ID NO: 413459 - RNA, 19 nt, Artificial Sequence
  Description of Artificial Sequence: Synthetic oligonucleotide
gucaggugcaucacuguuc

SEQ ID NO: 413460 - RNA, 19 nt, Artificial Sequence
  Description of Artificial Sequence: Synthetic oligonucleotide
cagcaaauccugggcaggc

SEQ ID NO: 413461 - RNA, 19 nt, Artificial Sequence
  Description of Artificial Sequence: Synthetic oligonucleotide
ggggcugaagacucucugc

SEQ ID NO: 413462 - RNA, 19 nt, Artificial Sequence
  Description of Artificial Sequence: Synthetic oligonucleotide
ccaagggcgagguugucug

SEQ ID NO: 413463 - RNA, 19 nt, Artificial Sequence
  Description of Artificial Sequence: Synthetic oligonucleotide
ccuacagaagaguggugac

SEQ ID NO: 413464 - RNA, 19 nt, Artificial Sequence
  Description of Artificial Sequence: Synthetic oligonucleotide
gguucuuauucccuccaaa

SEQ ID NO: 413465 - RNA, 19 nt, Artificial Sequence
  Description of Artificial Sequence: Synthetic oligonucleotide
acaaugacugugggugacu

SEQ ID NO: 413466 - RNA, 19 nt, Artificial Sequence
  Description of Artificial Sequence: Synthetic oligonucleotide
cuaaaacgaucuauuuuau

SEQ ID NO: 413467 - RNA, 19 nt, Artificial Sequence
  Description of Artificial Sequence: Synthetic oligonucleotide
guggggucaaacgggucag

SEQ ID NO: 413468 - RNA, 19 nt, Artificial Sequence
  Description of Artificial Sequence: Synthetic oligonucleotide
uuugcgccuggugcuggag

SEQ ID NO: 413469 - RNA, 19 nt, Artificial Sequence
  Description of Artificial Sequence: Synthetic oligonucleotide
cugauuugcgccuggugcu

SEQ ID NO: 413470 - RNA, 19 nt, Artificial Sequence
  Description of Artificial Sequence: Synthetic oligonucleotide
acgaucuauuuuaucgaaa

SEQ ID NO: 413471 - RNA, 19 nt, Artificial Sequence
  Description of Artificial Sequence: Synthetic oligonucleotide
gaauaacggcacaaauaua

SEQ ID NO: 413472 - RNA, 19 nt, Artificial Sequence
  Description of Artificial Sequence: Synthetic oligonucleotide
gcucacuauacagugcaac

SEQ ID NO: 413473 - RNA, 19 nt, Artificial Sequence
  Description of Artificial Sequence: Synthetic oligonucleotide
acgggucaggugcaucacu

SEQ ID NO: 413474 - RNA, 19 nt, Artificial Sequence
  Description of Artificial Sequence: Synthetic oligonucleotide
uucgaggcacauggagaug

SEQ ID NO: 413475 - RNA, 19 nt, Artificial Sequence
  Description of Artificial Sequence: Synthetic oligonucleotide
gggagaguucuguuaagaa

SEQ ID NO: 413476 - RNA, 19 nt, Artificial Sequence
  Description of Artificial Sequence: Synthetic oligonucleotide
ggguaagccaguucauuaa

SEQ ID NO: 413477 - RNA, 19 nt, Artificial Sequence
  Description of Artificial Sequence: Synthetic oligonucleotide
auuugcgccuggugcugga

SEQ ID NO: 413478 - RNA, 19 nt, Artificial Sequence
  Description of Artificial Sequence: Synthetic oligonucleotide
uaugcgucgaggggcugaa

SEQ ID NO: 413479 - RNA, 19 nt, Artificial Sequence
  Description of Artificial Sequence: Synthetic oligonucleotide
auggguaagccaguucauu

SEQ ID NO: 413480 - RNA, 19 nt, Artificial Sequence
  Description of Artificial Sequence: Synthetic oligonucleotide
ugccccacgagagcaggcu

SEQ ID NO: 413481 - RNA, 19 nt, Artificial Sequence
  Description of Artificial Sequence: Synthetic oligonucleotide
aagcuacacuuagccuuug

SEQ ID NO: 413482 - RNA, 19 nt, Artificial Sequence
  Description of Artificial Sequence: Synthetic oligonucleotide
cagugccaguacuccuagg

SEQ ID NO: 413483 - RNA, 19 nt, Artificial Sequence
  Description of Artificial Sequence: Synthetic oligonucleotide
ccugcuccgcuguacuucc

SEQ ID NO: 413484 - RNA, 19 nt, Artificial Sequence
  Description of Artificial Sequence: Synthetic oligonucleotide
agcaaauccugggcaggca

SEQ ID NO: 413485 - RNA, 19 nt, Artificial Sequence
  Description of Artificial Sequence: Synthetic oligonucleotide
auggcgugugaaaggcaag

SEQ ID NO: 413486 - RNA, 19 nt, Artificial Sequence
  Description of Artificial Sequence: Synthetic oligonucleotide
gccaauauccuccuggcuu

SEQ ID NO: 413487 - RNA, 19 nt, Artificial Sequence
  Description of Artificial Sequence: Synthetic oligonucleotide
ggagauacauauaugucuu

SEQ ID NO: 413488 - RNA, 19 nt, Artificial Sequence
  Description of Artificial Sequence: Synthetic oligonucleotide
ucaaacgggucaggugcau

SEQ ID NO: 413489 - RNA, 19 nt, Artificial Sequence
  Description of Artificial Sequence: Synthetic oligonucleotide
cucccucucgggaauuuaa

SEQ ID NO: 413490 - RNA, 19 nt, Artificial Sequence
  Description of Artificial Sequence: Synthetic oligonucleotide
ggcaucggcuugucuauca

SEQ ID NO: 413491 - RNA, 19 nt, Artificial Sequence
  Description of Artificial Sequence: Synthetic oligonucleotide
gccugcgaggacaaaggcc

SEQ ID NO: 413492 - RNA, 19 nt, Artificial Sequence
  Description of Artificial Sequence: Synthetic oligonucleotide
ccccacgagagcaggcugg

SEQ ID NO: 413493 - RNA, 19 nt, Artificial Sequence
  Description of Artificial Sequence: Synthetic oligonucleotide
caaacgggucaggugcauc

SEQ ID NO: 413494 - RNA, 19 nt, Artificial Sequence
  Description of Artificial Sequence: Synthetic oligonucleotide
ccacaguuuagagggcugc

SEQ ID NO: 413495 - RNA, 19 nt, Artificial Sequence
  Description of Artificial Sequence: Synthetic oligonucleotide
gcgagguugucuggaagcc

SEQ ID NO: 413496 - RNA, 19 nt, Artificial Sequence
  Description of Artificial Sequence: Synthetic oligonucleotide
uugcccauucgaggcacau

SEQ ID NO: 413497 - RNA, 19 nt, Artificial Sequence
  Description of Artificial Sequence: Synthetic oligonucleotide
guaugcgucgaggggcuga

SEQ ID NO: 413498 - RNA, 19 nt, Artificial Sequence
  Description of Artificial Sequence: Synthetic oligonucleotide
gcgucgaggggcugaagac

SEQ ID NO: 413499 - RNA, 19 nt, Artificial Sequence
  Description of Artificial Sequence: Synthetic oligonucleotide
caggauagcuuuggcccuc

SEQ ID NO: 413500 - RNA, 19 nt, Artificial Sequence
  Description of Artificial Sequence: Synthetic oligonucleotide
ggucucucucaccacauau

SEQ ID NO: 413501 - RNA, 19 nt, Artificial Sequence
  Description of Artificial Sequence: Synthetic oligonucleotide
gugguaugaaacaguugcu

SEQ ID NO: 413502 - RNA, 19 nt, Artificial Sequence
  Description of Artificial Sequence: Synthetic oligonucleotide
ccuagcucugaagucggug

SEQ ID NO: 413503 - RNA, 19 nt, Artificial Sequence
  Description of Artificial Sequence: Synthetic oligonucleotide
cuauuaacgugaguucaau

SEQ ID NO: 413504 - RNA, 19 nt, Artificial Sequence
  Description of Artificial Sequence: Synthetic oligonucleotide
gggauacauauuaagguuu

SEQ ID NO: 413505 - RNA, 19 nt, Artificial Sequence
  Description of Artificial Sequence: Synthetic oligonucleotide
ggaagcgucugcaggcuca

SEQ ID NO: 413506 - RNA, 19 nt, Artificial Sequence
  Description of Artificial Sequence: Synthetic oligonucleotide
caggguguuguaaacuauu

SEQ ID NO: 413507 - RNA, 19 nt, Artificial Sequence
  Description of Artificial Sequence: Synthetic oligonucleotide
cugaagucggugguaugaa

SEQ ID NO: 413508 - RNA, 19 nt, Artificial Sequence
  Description of Artificial Sequence: Synthetic oligonucleotide
caaccacuaggagcuucac

SEQ ID NO: 413509 - RNA, 19 nt, Artificial Sequence
  Description of Artificial Sequence: Synthetic oligonucleotide
uggugauuacaggcucuuu

SEQ ID NO: 413510 - RNA, 19 nt, Artificial Sequence
  Description of Artificial Sequence: Synthetic oligonucleotide
cugccccuucucuaguaaa

SEQ ID NO: 413511 - RNA, 19 nt, Artificial Sequence
  Description of Artificial Sequence: Synthetic oligonucleotide
agcucugaagucgguggua

SEQ ID NO: 413512 - RNA, 19 nt, Artificial Sequence
  Description of Artificial Sequence: Synthetic oligonucleotide
acuuaggacuggagccaca

SEQ ID NO: 413513 - RNA, 19 nt, Artificial Sequence
  Description of Artificial Sequence: Synthetic oligonucleotide
guacaaaaucccagccacu

SEQ ID NO: 413514 - RNA, 19 nt, Artificial Sequence
  Description of Artificial Sequence: Synthetic oligonucleotide
aguaugcgucgaggggcug

SEQ ID NO: 413515 - RNA, 19 nt, Artificial Sequence
  Description of Artificial Sequence: Synthetic oligonucleotide
caguugcugauuugcgccu

SEQ ID NO: 413516 - RNA, 19 nt, Artificial Sequence
  Description of Artificial Sequence: Synthetic oligonucleotide
cuugcccauucgaggcaca

SEQ ID NO: 413517 - RNA, 19 nt, Artificial Sequence
  Description of Artificial Sequence: Synthetic oligonucleotide
cucgggaauuuaauucuuu

SEQ ID NO: 413518 - RNA, 19 nt, Artificial Sequence
  Description of Artificial Sequence: Synthetic oligonucleotide
cauggguaagccaguucau

SEQ ID NO: 413519 - RNA, 19 nt, Artificial Sequence
  Description of Artificial Sequence: Synthetic oligonucleotide
caguaugcgucgaggggcu

SEQ ID NO: 413520 - RNA, 19 nt, Artificial Sequence
  Description of Artificial Sequence: Synthetic oligonucleotide
cucggacagccaagggcga

SEQ ID NO: 413521 - RNA, 19 nt, Artificial Sequence
  Description of Artificial Sequence: Synthetic oligonucleotide
ccagucagucuauuaacgu

SEQ ID NO: 413522 - RNA, 19 nt, Artificial Sequence
  Description of Artificial Sequence: Synthetic oligonucleotide
gcacacggccccuucuaca

SEQ ID NO: 413523 - RNA, 19 nt, Artificial Sequence
  Description of Artificial Sequence: Synthetic oligonucleotide
auguaccacaagagauaaa

SEQ ID NO: 413524 - RNA, 19 nt, Artificial Sequence
  Description of Artificial Sequence: Synthetic oligonucleotide
ccuuagcaacugcccacac

SEQ ID NO: 413525 - RNA, 19 nt, Artificial Sequence
  Description of Artificial Sequence: Synthetic oligonucleotide
cagaguugguaagacuaau

SEQ ID NO: 413526 - RNA, 19 nt, Artificial Sequence
  Description of Artificial Sequence: Synthetic oligonucleotide
ccuucuaagccucggcacu

SEQ ID NO: 413527 - RNA, 19 nt, Artificial Sequence
  Description of Artificial Sequence: Synthetic oligonucleotide
gcuagacuaggcacuuaaa

SEQ ID NO: 413528 - RNA, 19 nt, Artificial Sequence
  Description of Artificial Sequence: Synthetic oligonucleotide
cggugguaugaaacaguug

SEQ ID NO: 413529 - RNA, 19 nt, Artificial Sequence
  Description of Artificial Sequence: Synthetic oligonucleotide
cgcuguacuuccuuuggaa

SEQ ID NO: 413530 - RNA, 19 nt, Artificial Sequence
  Description of Artificial Sequence: Synthetic oligonucleotide
gggugucacugguucucca

SEQ ID NO: 413531 - RNA, 19 nt, Artificial Sequence
  Description of Artificial Sequence: Synthetic oligonucleotide
guacugugaaccagugcuu

SEQ ID NO: 413532 - RNA, 19 nt, Artificial Sequence
  Description of Artificial Sequence: Synthetic oligonucleotide
ggucaugucuguucccauu

SEQ ID NO: 413533 - RNA, 19 nt, Artificial Sequence
  Description of Artificial Sequence: Synthetic oligonucleotide
cagcagugccaguacuccu

SEQ ID NO: 413534 - RNA, 19 nt, Artificial Sequence
  Description of Artificial Sequence: Synthetic oligonucleotide
ccagggugucuccccuugc

SEQ ID NO: 413535 - RNA, 19 nt, Artificial Sequence
  Description of Artificial Sequence: Synthetic oligonucleotide
accuagcucugaagucggu

SEQ ID NO: 413536 - RNA, 19 nt, Artificial Sequence
  Description of Artificial Sequence: Synthetic oligonucleotide
gcacaagaugaaagggucu

SEQ ID NO: 413537 - RNA, 19 nt, Artificial Sequence
  Description of Artificial Sequence: Synthetic oligonucleotide
augcgucgaggggcugaag

SEQ ID NO: 413538 - RNA, 19 nt, Artificial Sequence
  Description of Artificial Sequence: Synthetic oligonucleotide
cacccacgaccacaucaaa

SEQ ID NO: 413539 - RNA, 19 nt, Artificial Sequence
  Description of Artificial Sequence: Synthetic oligonucleotide
gcgugugaaaggcaagcuu

SEQ ID NO: 413540 - RNA, 19 nt, Artificial Sequence
  Description of Artificial Sequence: Synthetic oligonucleotide
gccucggcacuuugacuga

SEQ ID NO: 413541 - RNA, 19 nt, Artificial Sequence
  Description of Artificial Sequence: Synthetic oligonucleotide
cuucuaagccucggcacuu

SEQ ID NO: 413542 - RNA, 19 nt, Artificial Sequence
  Description of Artificial Sequence: Synthetic oligonucleotide
ggcgugugaaaggcaagcu

SEQ ID NO: 413543 - RNA, 19 nt, Artificial Sequence
  Description of Artificial Sequence: Synthetic oligonucleotide
ccugcaaaguuggguguca

SEQ ID NO: 413544 - RNA, 19 nt, Artificial Sequence
  Description of Artificial Sequence: Synthetic oligonucleotide
ggaguccucccauccuccu

SEQ ID NO: 413545 - RNA, 19 nt, Artificial Sequence
  Description of Artificial Sequence: Synthetic oligonucleotide
ccgcuguacuuccuuugga

SEQ ID NO: 413546 - RNA, 19 nt, Artificial Sequence
  Description of Artificial Sequence: Synthetic oligonucleotide
cagccacuccagucagucu

SEQ ID NO: 413547 - RNA, 19 nt, Artificial Sequence
  Description of Artificial Sequence: Synthetic oligonucleotide
cuuugccaucagaguuggu

SEQ ID NO: 413548 - RNA, 19 nt, Artificial Sequence
  Description of Artificial Sequence: Synthetic oligonucleotide
gcugcuagacuaggcacuu

SEQ ID NO: 413549 - RNA, 19 nt, Artificial Sequence
  Description of Artificial Sequence: Synthetic oligonucleotide
cccucucgggaauuuaauu

SEQ ID NO: 413550 - RNA, 19 nt, Artificial Sequence
  Description of Artificial Sequence: Synthetic oligonucleotide
cugcuagacuaggcacuua

SEQ ID NO: 413551 - RNA, 19 nt, Artificial Sequence
  Description of Artificial Sequence: Synthetic oligonucleotide
ggcacacaauggcuugcuu

SEQ ID NO: 413552 - RNA, 19 nt, Artificial Sequence
  Description of Artificial Sequence: Synthetic oligonucleotide
ccggcaucggcuugucuau

SEQ ID NO: 413553 - RNA, 19 nt, Artificial Sequence
  Description of Artificial Sequence: Synthetic oligonucleotide
cgucgaggggcugaagacu

SEQ ID NO: 413554 - RNA, 19 nt, Artificial Sequence
  Description of Artificial Sequence: Synthetic oligonucleotide
ccauuguccuugaguccuu

SEQ ID NO: 413555 - RNA, 19 nt, Artificial Sequence
  Description of Artificial Sequence: Synthetic oligonucleotide
ggcucccucucgggaauuu

SEQ ID NO: 413556 - RNA, 19 nt, Artificial Sequence
  Description of Artificial Sequence: Synthetic oligonucleotide
ugaaguauguucuaggagc

SEQ ID NO: 413557 - RNA, 19 nt, Artificial Sequence
  Description of Artificial Sequence: Synthetic oligonucleotide
aacuaaaugaucccaaaug

SEQ ID NO: 413558 - RNA, 19 nt, Artificial Sequence
  Description of Artificial Sequence: Synthetic oligonucleotide
ucgaucauagaaauuacgg

SEQ ID NO: 413559 - RNA, 19 nt, Artificial Sequence
  Description of Artificial Sequence: Synthetic oligonucleotide
aaaguugggaaaauguacc

SEQ ID NO: 413560 - RNA, 19 nt, Artificial Sequence
  Description of Artificial Sequence: Synthetic oligonucleotide
ugaucaagaaugaaguucc

SEQ ID NO: 413561 - RNA, 19 nt, Artificial Sequence
  Description of Artificial Sequence: Synthetic oligonucleotide
uagaauaagacaauauucu

SEQ ID NO: 413562 - RNA, 19 nt, Artificial Sequence
  Description of Artificial Sequence: Synthetic oligonucleotide
aauaacuuccuucguuggc

SEQ ID NO: 413563 - RNA, 19 nt, Artificial Sequence
  Description of Artificial Sequence: Synthetic oligonucleotide
uauuuuagugcccacuggg

SEQ ID NO: 413564 - RNA, 19 nt, Artificial Sequence
  Description of Artificial Sequence: Synthetic oligonucleotide
aaugaucccaaaugaaguc

SEQ ID NO: 413565 - RNA, 19 nt, Artificial Sequence
  Description of Artificial Sequence: Synthetic oligonucleotide
uguauugucuguaauaguc

SEQ ID NO: 413566 - RNA, 19 nt, Artificial Sequence
  Description of Artificial Sequence: Synthetic oligonucleotide
aagucucuugaugagaggc

SEQ ID NO: 413567 - RNA, 19 nt, Artificial Sequence
  Description of Artificial Sequence: Synthetic oligonucleotide
cuuacuaaggcacugggag

SEQ ID NO: 413568 - RNA, 19 nt, Artificial Sequence
  Description of Artificial Sequence: Synthetic oligonucleotide
uucaccuauguacauaucc

SEQ ID NO: 413569 - RNA, 19 nt, Artificial Sequence
  Description of Artificial Sequence: Synthetic oligonucleotide
uguauucauaaucucgucc

SEQ ID NO: 413570 - RNA, 19 nt, Artificial Sequence
  Description of Artificial Sequence: Synthetic oligonucleotide
aucuguuguauucauaauc

SEQ ID NO: 413571 - RNA, 19 nt, Artificial Sequence
  Description of Artificial Sequence: Synthetic oligonucleotide
uaucgguaaauuuauaaac

SEQ ID NO: 413572 - RNA, 19 nt, Artificial Sequence
  Description of Artificial Sequence: Synthetic oligonucleotide
aaauugaagcucaauauug

SEQ ID NO: 413573 - RNA, 19 nt, Artificial Sequence
  Description of Artificial Sequence: Synthetic oligonucleotide
uguacauauccuaacgcag

SEQ ID NO: 413574 - RNA, 19 nt, Artificial Sequence
  Description of Artificial Sequence: Synthetic oligonucleotide
gaaucgaucauagucaccc

SEQ ID NO: 413575 - RNA, 19 nt, Artificial Sequence
  Description of Artificial Sequence: Synthetic oligonucleotide
acuaaaugaucccaaauga

SEQ ID NO: 413576 - RNA, 19 nt, Artificial Sequence
  Description of Artificial Sequence: Synthetic oligonucleotide
aaauaaccuaacuagguuu

SEQ ID NO: 413577 - RNA, 19 nt, Artificial Sequence
  Description of Artificial Sequence: Synthetic oligonucleotide
acaacuaccaccacuuucc

SEQ ID NO: 413578 - RNA, 19 nt, Artificial Sequence
  Description of Artificial Sequence: Synthetic oligonucleotide
uauguacauauccuaacgc

SEQ ID NO: 413579 - RNA, 19 nt, Artificial Sequence
  Description of Artificial Sequence: Synthetic oligonucleotide
uuagggacaacuaccacca

SEQ ID NO: 413580 - RNA, 19 nt, Artificial Sequence
  Description of Artificial Sequence: Synthetic oligonucleotide
aaaucaacagaccauccaa

SEQ ID NO: 413581 - RNA, 19 nt, Artificial Sequence
  Description of Artificial Sequence: Synthetic oligonucleotide
cuuuauggaacucacugag

SEQ ID NO: 413582 - RNA, 19 nt, Artificial Sequence
  Description of Artificial Sequence: Synthetic oligonucleotide
uuagcuaagcaagauaaug

SEQ ID NO: 413583 - RNA, 19 nt, Artificial Sequence
  Description of Artificial Sequence: Synthetic oligonucleotide
cauaagagaacucaucuuc

SEQ ID NO: 413584 - RNA, 19 nt, Artificial Sequence
  Description of Artificial Sequence: Synthetic oligonucleotide
uauccuaacgcagugaaca

SEQ ID NO: 413585 - RNA, 19 nt, Artificial Sequence
  Description of Artificial Sequence: Synthetic oligonucleotide
acacaauucuuacagagga

SEQ ID NO: 413586 - RNA, 19 nt, Artificial Sequence
  Description of Artificial Sequence: Synthetic oligonucleotide
auaacuuccuucguuggcc

SEQ ID NO: 413587 - RNA, 19 nt, Artificial Sequence
  Description of Artificial Sequence: Synthetic oligonucleotide
caaucuuagcaaaugauuc

SEQ ID NO: 413588 - RNA, 19 nt, Artificial Sequence
  Description of Artificial Sequence: Synthetic oligonucleotide
guauuuaguaacaaugggc

SEQ ID NO: 413589 - RNA, 19 nt, Artificial Sequence
  Description of Artificial Sequence: Synthetic oligonucleotide
uagcuaagcaagauaauga

SEQ ID NO: 413590 - RNA, 19 nt, Artificial Sequence
  Description of Artificial Sequence: Synthetic oligonucleotide
aacauggacgaggacaaac

SEQ ID NO: 413591 - RNA, 19 nt, Artificial Sequence
  Description of Artificial Sequence: Synthetic oligonucleotide
caccucauccauauaaucg

SEQ ID NO: 413592 - RNA, 19 nt, Artificial Sequence
  Description of Artificial Sequence: Synthetic oligonucleotide
aggugaaaacagcaggggc

SEQ ID NO: 413593 - RNA, 19 nt, Artificial Sequence
  Description of Artificial Sequence: Synthetic oligonucleotide
auaaaguaagcugcuauuc

SEQ ID NO: 413594 - RNA, 19 nt, Artificial Sequence
  Description of Artificial Sequence: Synthetic oligonucleotide
uacaacauggacgaggaca

SEQ ID NO: 413595 - RNA, 19 nt, Artificial Sequence
  Description of Artificial Sequence: Synthetic oligonucleotide
ucguccauagaaucgauca

SEQ ID NO: 413596 - RNA, 19 nt, Artificial Sequence
  Description of Artificial Sequence: Synthetic oligonucleotide
aauaacugggaggguaucg

SEQ ID NO: 413597 - RNA, 19 nt, Artificial Sequence
  Description of Artificial Sequence: Synthetic oligonucleotide
aacagguacaacauggaug

SEQ ID NO: 413598 - RNA, 19 nt, Artificial Sequence
  Description of Artificial Sequence: Synthetic oligonucleotide
uguuccggcgauuuguccg

SEQ ID NO: 413599 - RNA, 19 nt, Artificial Sequence
  Description of Artificial Sequence: Synthetic oligonucleotide
aggggcuucaccgauaccc

SEQ ID NO: 413600 - RNA, 19 nt, Artificial Sequence
  Description of Artificial Sequence: Synthetic oligonucleotide
agcugaaacccugagaaac

SEQ ID NO: 413601 - RNA, 19 nt, Artificial Sequence
  Description of Artificial Sequence: Synthetic oligonucleotide
cauuguaucuuuucucagg

SEQ ID NO: 413602 - RNA, 19 nt, Artificial Sequence
  Description of Artificial Sequence: Synthetic oligonucleotide
ugaacuaagaggucucggc

SEQ ID NO: 413603 - RNA, 19 nt, Artificial Sequence
  Description of Artificial Sequence: Synthetic oligonucleotide
cauucaugaacccagcaac

SEQ ID NO: 413604 - RNA, 19 nt, Artificial Sequence
  Description of Artificial Sequence: Synthetic oligonucleotide
gaacuaacugcucagguga

SEQ ID NO: 413605 - RNA, 19 nt, Artificial Sequence
  Description of Artificial Sequence: Synthetic oligonucleotide
agaguuguacacauuacac

SEQ ID NO: 413606 - RNA, 19 nt, Artificial Sequence
  Description of Artificial Sequence: Synthetic oligonucleotide
acggaagcaccccagaagg

SEQ ID NO: 413607 - RNA, 19 nt, Artificial Sequence
  Description of Artificial Sequence: Synthetic oligonucleotide
aauaaccuaacuagguuug

SEQ ID NO: 413608 - RNA, 19 nt, Artificial Sequence
  Description of Artificial Sequence: Synthetic oligonucleotide
gaugagaggccucuuuagg

SEQ ID NO: 413609 - RNA, 19 nt, Artificial Sequence
  Description of Artificial Sequence: Synthetic oligonucleotide
gguuugaaauguuuuauag

SEQ ID NO: 413610 - RNA, 19 nt, Artificial Sequence
  Description of Artificial Sequence: Synthetic oligonucleotide
ucuaugacacaauucuuac

SEQ ID NO: 413611 - RNA, 19 nt, Artificial Sequence
  Description of Artificial Sequence: Synthetic oligonucleotide
ucuaucaacucagaagacc

SEQ ID NO: 413612 - RNA, 19 nt, Artificial Sequence
  Description of Artificial Sequence: Synthetic oligonucleotide
agacaauauucuuuuccac

SEQ ID NO: 413613 - RNA, 19 nt, Artificial Sequence
  Description of Artificial Sequence: Synthetic oligonucleotide
aaugaaguuccucuuugau

SEQ ID NO: 413614 - RNA, 19 nt, Artificial Sequence
  Description of Artificial Sequence: Synthetic oligonucleotide
agcauuauagacucaggca

SEQ ID NO: 413615 - RNA, 19 nt, Artificial Sequence
  Description of Artificial Sequence: Synthetic oligonucleotide
ugaacaucgucuugcugcg

SEQ ID NO: 413616 - RNA, 19 nt, Artificial Sequence
  Description of Artificial Sequence: Synthetic oligonucleotide
accguuaagaggcagacaa

SEQ ID NO: 413617 - RNA, 19 nt, Artificial Sequence
  Description of Artificial Sequence: Synthetic oligonucleotide
auauuuuagugcccacugg

SEQ ID NO: 413618 - RNA, 19 nt, Artificial Sequence
  Description of Artificial Sequence: Synthetic oligonucleotide
auguacauauccuaacgca

SEQ ID NO: 413619 - RNA, 19 nt, Artificial Sequence
  Description of Artificial Sequence: Synthetic oligonucleotide
uuacuaaggcacugggagg

SEQ ID NO: 413620 - RNA, 19 nt, Artificial Sequence
  Description of Artificial Sequence: Synthetic oligonucleotide
agauccaggaagucccacc

SEQ ID NO: 413621 - RNA, 19 nt, Artificial Sequence
  Description of Artificial Sequence: Synthetic oligonucleotide
aaagcagugcacagcaagg

SEQ ID NO: 413622 - RNA, 19 nt, Artificial Sequence
  Description of Artificial Sequence: Synthetic oligonucleotide
uggaccagcuuacuaaggc

SEQ ID NO: 413623 - RNA, 19 nt, Artificial Sequence
  Description of Artificial Sequence: Synthetic oligonucleotide
ucagaaaagcagugcacag

SEQ ID NO: 413624 - RNA, 19 nt, Artificial Sequence
  Description of Artificial Sequence: Synthetic oligonucleotide
aacgcagugaacaucgucu

SEQ ID NO: 413625 - RNA, 19 nt, Artificial Sequence
  Description of Artificial Sequence: Synthetic oligonucleotide
ucaccuauguacauauccu

SEQ ID NO: 413626 - RNA, 19 nt, Artificial Sequence
  Description of Artificial Sequence: Synthetic oligonucleotide
uguaggacacuguugcuga

SEQ ID NO: 413627 - RNA, 19 nt, Artificial Sequence
  Description of Artificial Sequence: Synthetic oligonucleotide
uggaugaacacaaacucuu

SEQ ID NO: 413628 - RNA, 19 nt, Artificial Sequence
  Description of Artificial Sequence: Synthetic oligonucleotide
cagcauuauagacucaggc

SEQ ID NO: 413629 - RNA, 19 nt, Artificial Sequence
  Description of Artificial Sequence: Synthetic oligonucleotide
cauagucaccccuguaucg

SEQ ID NO: 413630 - RNA, 19 nt, Artificial Sequence
  Description of Artificial Sequence: Synthetic oligonucleotide
ugagucuuaacagaccaga

SEQ ID NO: 413631 - RNA, 19 nt, Artificial Sequence
  Description of Artificial Sequence: Synthetic oligonucleotide
aauugaagcucaauauuga

SEQ ID NO: 413632 - RNA, 19 nt, Artificial Sequence
  Description of Artificial Sequence: Synthetic oligonucleotide
gacgggugagucuuaacag

SEQ ID NO: 413633 - RNA, 19 nt, Artificial Sequence
  Description of Artificial Sequence: Synthetic oligonucleotide
uauaaaguaagcugcuauu

SEQ ID NO: 413634 - RNA, 19 nt, Artificial Sequence
  Description of Artificial Sequence: Synthetic oligonucleotide
auuuguccgcuucucagag

SEQ ID NO: 413635 - RNA, 19 nt, Artificial Sequence
  Description of Artificial Sequence: Synthetic oligonucleotide
agauccacgucucagcaca

SEQ ID NO: 413636 - RNA, 19 nt, Artificial Sequence
  Description of Artificial Sequence: Synthetic oligonucleotide
uuuuagugcccacuggguc

SEQ ID NO: 413637 - RNA, 19 nt, Artificial Sequence
  Description of Artificial Sequence: Synthetic oligonucleotide
uauugucuguaauagucuc

SEQ ID NO: 413638 - RNA, 19 nt, Artificial Sequence
  Description of Artificial Sequence: Synthetic oligonucleotide
aaccuaacuagguuugaaa

SEQ ID NO: 413639 - RNA, 19 nt, Artificial Sequence
  Description of Artificial Sequence: Synthetic oligonucleotide
uaaucucguccauagaauc

SEQ ID NO: 413640 - RNA, 19 nt, Artificial Sequence
  Description of Artificial Sequence: Synthetic oligonucleotide
guaguaguaauucugccaa

SEQ ID NO: 413641 - RNA, 19 nt, Artificial Sequence
  Description of Artificial Sequence: Synthetic oligonucleotide
aagacuagggccuggcaaa

SEQ ID NO: 413642 - RNA, 19 nt, Artificial Sequence
  Description of Artificial Sequence: Synthetic oligonucleotide
gaagugaaguauguucuag

SEQ ID NO: 413643 - RNA, 19 nt, Artificial Sequence
  Description of Artificial Sequence: Synthetic oligonucleotide
ucgguaaauuuauaaacua

SEQ ID NO: 413644 - RNA, 19 nt, Artificial Sequence
  Description of Artificial Sequence: Synthetic oligonucleotide
aggacauuguaucuuuucu

SEQ ID NO: 413645 - RNA, 19 nt, Artificial Sequence
  Description of Artificial Sequence: Synthetic oligonucleotide
cugaucaagaaugaaguuc

SEQ ID NO: 413646 - RNA, 19 nt, Artificial Sequence
  Description of Artificial Sequence: Synthetic oligonucleotide
cuugcugcguuucugugag

SEQ ID NO: 413647 - RNA, 19 nt, Artificial Sequence
  Description of Artificial Sequence: Synthetic oligonucleotide
gugaaguauguucuaggag

SEQ ID NO: 413648 - RNA, 19 nt, Artificial Sequence
  Description of Artificial Sequence: Synthetic oligonucleotide
ucccaaaugaagucucuug

SEQ ID NO: 413649 - RNA, 19 nt, Artificial Sequence
  Description of Artificial Sequence: Synthetic oligonucleotide
agcuuacuaaggcacuggg

SEQ ID NO: 413650 - RNA, 19 nt, Artificial Sequence
  Description of Artificial Sequence: Synthetic oligonucleotide
acugccauauccugcccac

SEQ ID NO: 413651 - RNA, 19 nt, Artificial Sequence
  Description of Artificial Sequence: Synthetic oligonucleotide
accuaacuagguuugaaau

SEQ ID NO: 413652 - RNA, 19 nt, Artificial Sequence
  Description of Artificial Sequence: Synthetic oligonucleotide
ggucugaacacucagaaaa

SEQ ID NO: 413653 - RNA, 19 nt, Artificial Sequence
  Description of Artificial Sequence: Synthetic oligonucleotide
aagaaugaaguuccucuuu

SEQ ID NO: 413654 - RNA, 19 nt, Artificial Sequence
  Description of Artificial Sequence: Synthetic oligonucleotide
acaaauaaccuaacuaggu

SEQ ID NO: 413655 - RNA, 19 nt, Artificial Sequence
  Description of Artificial Sequence: Synthetic oligonucleotide
cauuugacugagcacaguc

SEQ ID NO: 413656 - RNA, 19 nt, Artificial Sequence
  Description of Artificial Sequence: Synthetic oligonucleotide
aucaacagaccauccaacu

SEQ ID NO: 413657 - RNA, 19 nt, Artificial Sequence
  Description of Artificial Sequence: Synthetic oligonucleotide
acauuguaucuuuucucag

SEQ ID NO: 413658 - RNA, 19 nt, Artificial Sequence
  Description of Artificial Sequence: Synthetic oligonucleotide
ucaauaacugggaggguau

SEQ ID NO: 413659 - RNA, 19 nt, Artificial Sequence
  Description of Artificial Sequence: Synthetic oligonucleotide
guugucguagccucggcgc

SEQ ID NO: 413660 - RNA, 19 nt, Artificial Sequence
  Description of Artificial Sequence: Synthetic oligonucleotide
aucgguaaauuuauaaacu

SEQ ID NO: 413661 - RNA, 19 nt, Artificial Sequence
  Description of Artificial Sequence: Synthetic oligonucleotide
agcuaagcaagauaaugau

SEQ ID NO: 413662 - RNA, 19 nt, Artificial Sequence
  Description of Artificial Sequence: Synthetic oligonucleotide
auaacugggaggguaucgg

SEQ ID NO: 413663 - RNA, 19 nt, Artificial Sequence
  Description of Artificial Sequence: Synthetic oligonucleotide
uaauagucucuguaucugu

SEQ ID NO: 413664 - RNA, 19 nt, Artificial Sequence
  Description of Artificial Sequence: Synthetic oligonucleotide
ucuguaucuguuguauuca

SEQ ID NO: 413665 - RNA, 19 nt, Artificial Sequence
  Description of Artificial Sequence: Synthetic oligonucleotide
uugggaaaauguaccaaaa

SEQ ID NO: 413666 - RNA, 19 nt, Artificial Sequence
  Description of Artificial Sequence: Synthetic oligonucleotide
guaucgguaaauuuauaaa

SEQ ID NO: 413667 - RNA, 19 nt, Artificial Sequence
  Description of Artificial Sequence: Synthetic oligonucleotide
cucaauauugaagcacugc

SEQ ID NO: 413668 - RNA, 19 nt, Artificial Sequence
  Description of Artificial Sequence: Synthetic oligonucleotide
gaaguggaagugaaguaug

SEQ ID NO: 413669 - RNA, 19 nt, Artificial Sequence
  Description of Artificial Sequence: Synthetic oligonucleotide
gacaacuaccaccacuuuc

SEQ ID NO: 413670 - RNA, 19 nt, Artificial Sequence
  Description of Artificial Sequence: Synthetic oligonucleotide
auacuguauaaaguaagcu

SEQ ID NO: 413671 - RNA, 19 nt, Artificial Sequence
  Description of Artificial Sequence: Synthetic oligonucleotide
ucccucacaccguuaagag

SEQ ID NO: 413672 - RNA, 19 nt, Artificial Sequence
  Description of Artificial Sequence: Synthetic oligonucleotide
uggacgaggacaaacuauu

SEQ ID NO: 413673 - RNA, 19 nt, Artificial Sequence
  Description of Artificial Sequence: Synthetic oligonucleotide
aucgaucauagaaauuacg

SEQ ID NO: 413674 - RNA, 19 nt, Artificial Sequence
  Description of Artificial Sequence: Synthetic oligonucleotide
aggcuugcugaacuaagag

SEQ ID NO: 413675 - RNA, 19 nt, Artificial Sequence
  Description of Artificial Sequence: Synthetic oligonucleotide
accguaguaguuccuguag

SEQ ID NO: 413676 - RNA, 19 nt, Artificial Sequence
  Description of Artificial Sequence: Synthetic oligonucleotide
gauaaugauuuaaauugaa

SEQ ID NO: 413677 - RNA, 19 nt, Artificial Sequence
  Description of Artificial Sequence: Synthetic oligonucleotide
ggacaaacuauucugaucu

SEQ ID NO: 413678 - RNA, 19 nt, Artificial Sequence
  Description of Artificial Sequence: Synthetic oligonucleotide
ucauagaaauuacgguauc

SEQ ID NO: 413679 - RNA, 19 nt, Artificial Sequence
  Description of Artificial Sequence: Synthetic oligonucleotide
cuuguugcgguuguuccgg

SEQ ID NO: 413680 - RNA, 19 nt, Artificial Sequence
  Description of Artificial Sequence: Synthetic oligonucleotide
uuuagcuaagcaagauaau

SEQ ID NO: 413681 - RNA, 19 nt, Artificial Sequence
  Description of Artificial Sequence: Synthetic oligonucleotide
aguuccuguaguaucgguc

SEQ ID NO: 413682 - RNA, 19 nt, Artificial Sequence
  Description of Artificial Sequence: Synthetic oligonucleotide
cucgaagcaaucuggacca

SEQ ID NO: 413683 - RNA, 19 nt, Artificial Sequence
  Description of Artificial Sequence: Synthetic oligonucleotide
aagcaagauaaugauuuaa

SEQ ID NO: 413684 - RNA, 19 nt, Artificial Sequence
  Description of Artificial Sequence: Synthetic oligonucleotide
uauggucuugggaggaacu

SEQ ID NO: 413685 - RNA, 19 nt, Artificial Sequence
  Description of Artificial Sequence: Synthetic oligonucleotide
aaguauguucuaggagcac

SEQ ID NO: 413686 - RNA, 19 nt, Artificial Sequence
  Description of Artificial Sequence: Synthetic oligonucleotide
ugguaaccguaguaguucc

SEQ ID NO: 413687 - RNA, 19 nt, Artificial Sequence
  Description of Artificial Sequence: Synthetic oligonucleotide
agucucuugaugagaggcc

SEQ ID NO: 413688 - RNA, 19 nt, Artificial Sequence
  Description of Artificial Sequence: Synthetic oligonucleotide
ucuugcugcguuucuguga

SEQ ID NO: 413689 - RNA, 19 nt, Artificial Sequence
  Description of Artificial Sequence: Synthetic oligonucleotide
aguauguucuaggagcaca

SEQ ID NO: 413690 - RNA, 19 nt, Artificial Sequence
  Description of Artificial Sequence: Synthetic oligonucleotide
acaccguuaagaggcagac

SEQ ID NO: 413691 - RNA, 19 nt, Artificial Sequence
  Description of Artificial Sequence: Synthetic oligonucleotide
aucgaucauagucaccccu

SEQ ID NO: 413692 - RNA, 19 nt, Artificial Sequence
  Description of Artificial Sequence: Synthetic oligonucleotide
gguaucgguaaauuuauaa

SEQ ID NO: 413693 - RNA, 19 nt, Artificial Sequence
  Description of Artificial Sequence: Synthetic oligonucleotide
aacaucgucuugcugcguu

SEQ ID NO: 413694 - RNA, 19 nt, Artificial Sequence
  Description of Artificial Sequence: Synthetic oligonucleotide
uugguaaccguaguaguuc

SEQ ID NO: 413695 - RNA, 19 nt, Artificial Sequence
  Description of Artificial Sequence: Synthetic oligonucleotide
gaaguauguucuaggagca

SEQ ID NO: 413696 - RNA, 19 nt, Artificial Sequence
  Description of Artificial Sequence: Synthetic oligonucleotide
caaaugauuccagagaucu

SEQ ID NO: 413697 - RNA, 19 nt, Artificial Sequence
  Description of Artificial Sequence: Synthetic oligonucleotide
gguaguaguaauucugcca

SEQ ID NO: 413698 - RNA, 19 nt, Artificial Sequence
  Description of Artificial Sequence: Synthetic oligonucleotide
ucauaaucucguccauaga

SEQ ID NO: 413699 - RNA, 19 nt, Artificial Sequence
  Description of Artificial Sequence: Synthetic oligonucleotide
uauucauaaucucguccau

SEQ ID NO: 413700 - RNA, 19 nt, Artificial Sequence
  Description of Artificial Sequence: Synthetic oligonucleotide
gaaagaguccuuguacuga

SEQ ID NO: 413701 - RNA, 19 nt, Artificial Sequence
  Description of Artificial Sequence: Synthetic oligonucleotide
ucauccauauaaucgcauu

SEQ ID NO: 413702 - RNA, 19 nt, Artificial Sequence
  Description of Artificial Sequence: Synthetic oligonucleotide
ugauccggaaugccuugag

SEQ ID NO: 413703 - RNA, 19 nt, Artificial Sequence
  Description of Artificial Sequence: Synthetic oligonucleotide
acaaucuuagcaaaugauu

SEQ ID NO: 413704 - RNA, 19 nt, Artificial Sequence
  Description of Artificial Sequence: Synthetic oligonucleotide
uuaacagaccagagucaga

SEQ ID NO: 413705 - RNA, 19 nt, Artificial Sequence
  Description of Artificial Sequence: Synthetic oligonucleotide
ucaccucauccauauaauc

SEQ ID NO: 413706 - RNA, 19 nt, Artificial Sequence
  Description of Artificial Sequence: Synthetic oligonucleotide
cucggcuucgguucugccg

SEQ ID NO: 413707 - RNA, 19 nt, Artificial Sequence
  Description of Artificial Sequence: Synthetic oligonucleotide
uuuguccgcuucucagagg

SEQ ID NO: 413708 - RNA, 19 nt, Artificial Sequence
  Description of Artificial Sequence: Synthetic oligonucleotide
uucaugaacccagcaaccu

SEQ ID NO: 413709 - RNA, 19 nt, Artificial Sequence
  Description of Artificial Sequence: Synthetic oligonucleotide
aaaccauaagagaacucau

SEQ ID NO: 413710 - RNA, 19 nt, Artificial Sequence
  Description of Artificial Sequence: Synthetic oligonucleotide
ggugagucuuaacagacca

SEQ ID NO: 413711 - RNA, 19 nt, Artificial Sequence
  Description of Artificial Sequence: Synthetic oligonucleotide
aggaacugcaguccgcaca

SEQ ID NO: 413712 - RNA, 19 nt, Artificial Sequence
  Description of Artificial Sequence: Synthetic oligonucleotide
agcaagauaaugauuuaaa

SEQ ID NO: 413713 - RNA, 19 nt, Artificial Sequence
  Description of Artificial Sequence: Synthetic oligonucleotide
uaacgcagugaacaucguc

SEQ ID NO: 413714 - RNA, 19 nt, Artificial Sequence
  Description of Artificial Sequence: Synthetic oligonucleotide
uaguaucggucucuguccu

SEQ ID NO: 413715 - RNA, 19 nt, Artificial Sequence
  Description of Artificial Sequence: Synthetic oligonucleotide
gaggguaucgguaaauuua

SEQ ID NO: 413716 - RNA, 19 nt, Artificial Sequence
  Description of Artificial Sequence: Synthetic oligonucleotide
ggaaaaucaacagaccauc

SEQ ID NO: 413717 - RNA, 19 nt, Artificial Sequence
  Description of Artificial Sequence: Synthetic oligonucleotide
agucccaccaucagaauca

SEQ ID NO: 413718 - RNA, 19 nt, Artificial Sequence
  Description of Artificial Sequence: Synthetic oligonucleotide
uaagcaagauaaugauuua

SEQ ID NO: 413719 - RNA, 19 nt, Artificial Sequence
  Description of Artificial Sequence: Synthetic oligonucleotide
ccuccuuguauuuaguaac

SEQ ID NO: 413720 - RNA, 19 nt, Artificial Sequence
  Description of Artificial Sequence: Synthetic oligonucleotide
ucacacggaagcaccccag

SEQ ID NO: 413721 - RNA, 19 nt, Artificial Sequence
  Description of Artificial Sequence: Synthetic oligonucleotide
uguugcgguuguuccggcg

SEQ ID NO: 413722 - RNA, 19 nt, Artificial Sequence
  Description of Artificial Sequence: Synthetic oligonucleotide
agaaucgaucauagucacc

SEQ ID NO: 413723 - RNA, 19 nt, Artificial Sequence
  Description of Artificial Sequence: Synthetic oligonucleotide
uaacuuccuucguuggcca

SEQ ID NO: 413724 - RNA, 19 nt, Artificial Sequence
  Description of Artificial Sequence: Synthetic oligonucleotide
cauauccuaacgcagugaa

SEQ ID NO: 413725 - RNA, 19 nt, Artificial Sequence
  Description of Artificial Sequence: Synthetic oligonucleotide
cacucagaaaagcagugca

SEQ ID NO: 413726 - RNA, 19 nt, Artificial Sequence
  Description of Artificial Sequence: Synthetic oligonucleotide
ugcaguccgcacacggucc

SEQ ID NO: 413727 - RNA, 19 nt, Artificial Sequence
  Description of Artificial Sequence: Synthetic oligonucleotide
guaaccguaguaguuccug

SEQ ID NO: 413728 - RNA, 19 nt, Artificial Sequence
  Description of Artificial Sequence: Synthetic oligonucleotide
aacuuccuucguuggccag

SEQ ID NO: 413729 - RNA, 19 nt, Artificial Sequence
  Description of Artificial Sequence: Synthetic oligonucleotide
aaccguaguaguuccugua

SEQ ID NO: 413730 - RNA, 19 nt, Artificial Sequence
  Description of Artificial Sequence: Synthetic oligonucleotide
cuagguuugaaauguuuua

SEQ ID NO: 413731 - RNA, 19 nt, Artificial Sequence
  Description of Artificial Sequence: Synthetic oligonucleotide
acgggugagucuuaacaga

SEQ ID NO: 413732 - RNA, 19 nt, Artificial Sequence
  Description of Artificial Sequence: Synthetic oligonucleotide
acugggaggguaucgguaa

SEQ ID NO: 413733 - RNA, 19 nt, Artificial Sequence
  Description of Artificial Sequence: Synthetic oligonucleotide
ccuaacuagguuugaaaug

SEQ ID NO: 413734 - RNA, 19 nt, Artificial Sequence
  Description of Artificial Sequence: Synthetic oligonucleotide
uguauaaaguaagcugcua

SEQ ID NO: 413735 - RNA, 19 nt, Artificial Sequence
  Description of Artificial Sequence: Synthetic oligonucleotide
uaaccguaguaguuccugu

SEQ ID NO: 413736 - RNA, 19 nt, Artificial Sequence
  Description of Artificial Sequence: Synthetic oligonucleotide
aaggacaucaggacaggaa

SEQ ID NO: 413737 - RNA, 19 nt, Artificial Sequence
  Description of Artificial Sequence: Synthetic oligonucleotide
uaucuguuguauucauaau

SEQ ID NO: 413738 - RNA, 19 nt, Artificial Sequence
  Description of Artificial Sequence: Synthetic oligonucleotide
gaacuaagaggucucggcu

SEQ ID NO: 413739 - RNA, 19 nt, Artificial Sequence
  Description of Artificial Sequence: Synthetic oligonucleotide
ucuuuagggcucacacgga

SEQ ID NO: 413740 - RNA, 19 nt, Artificial Sequence
  Description of Artificial Sequence: Synthetic oligonucleotide
aggaaaaucaacagaccau

SEQ ID NO: 413741 - RNA, 19 nt, Artificial Sequence
  Description of Artificial Sequence: Synthetic oligonucleotide
uccuuguacugacggguga

SEQ ID NO: 413742 - RNA, 19 nt, Artificial Sequence
  Description of Artificial Sequence: Synthetic oligonucleotide
acuagguuugaaauguuuu

SEQ ID NO: 413743 - RNA, 19 nt, Artificial Sequence
  Description of Artificial Sequence: Synthetic oligonucleotide
acaacauggacgaggacaa

SEQ ID NO: 413744 - RNA, 19 nt, Artificial Sequence
  Description of Artificial Sequence: Synthetic oligonucleotide
aguuuuagcuaagcaagau

SEQ ID NO: 413745 - RNA, 19 nt, Artificial Sequence
  Description of Artificial Sequence: Synthetic oligonucleotide
cucagaaaagcagugcaca

SEQ ID NO: 413746 - RNA, 19 nt, Artificial Sequence
  Description of Artificial Sequence: Synthetic oligonucleotide
auaaucucguccauagaau

SEQ ID NO: 413747 - RNA, 19 nt, Artificial Sequence
  Description of Artificial Sequence: Synthetic oligonucleotide
ccuugguuguguuuugggg

SEQ ID NO: 413748 - RNA, 19 nt, Artificial Sequence
  Description of Artificial Sequence: Synthetic oligonucleotide
gaucucuugccucuaucaa

SEQ ID NO: 413749 - RNA, 19 nt, Artificial Sequence
  Description of Artificial Sequence: Synthetic oligonucleotide
aagggcucgaucugccaaa

SEQ ID NO: 413750 - RNA, 19 nt, Artificial Sequence
  Description of Artificial Sequence: Synthetic oligonucleotide
aagaguccuuguacugacg

SEQ ID NO: 413751 - RNA, 19 nt, Artificial Sequence
  Description of Artificial Sequence: Synthetic oligonucleotide
auauccuaacgcagugaac

SEQ ID NO: 413752 - RNA, 19 nt, Artificial Sequence
  Description of Artificial Sequence: Synthetic oligonucleotide
accccuguaucgaucauag

SEQ ID NO: 413753 - RNA, 19 nt, Artificial Sequence
  Description of Artificial Sequence: Synthetic oligonucleotide
uuguaucuuuucucagggu

SEQ ID NO: 413754 - RNA, 19 nt, Artificial Sequence
  Description of Artificial Sequence: Synthetic oligonucleotide
cuggaccagcuuacuaagg

SEQ ID NO: 413755 - RNA, 19 nt, Artificial Sequence
  Description of Artificial Sequence: Synthetic oligonucleotide
acuaacugcucaggugagg

SEQ ID NO: 413756 - RNA, 19 nt, Artificial Sequence
  Description of Artificial Sequence: Synthetic oligonucleotide
auacccuugguaaccguag

SEQ ID NO: 413757 - RNA, 19 nt, Artificial Sequence
  Description of Artificial Sequence: Synthetic oligonucleotide
auuugacugagcacagucu

SEQ ID NO: 413758 - RNA, 19 nt, Artificial Sequence
  Description of Artificial Sequence: Synthetic oligonucleotide
guagaagggcucgaucugc

SEQ ID NO: 413759 - RNA, 19 nt, Artificial Sequence
  Description of Artificial Sequence: Synthetic oligonucleotide
uaauucugccaaucccggu

SEQ ID NO: 413760 - RNA, 19 nt, Artificial Sequence
  Description of Artificial Sequence: Synthetic oligonucleotide
auuauagacucaggcacau

SEQ ID NO: 413761 - RNA, 19 nt, Artificial Sequence
  Description of Artificial Sequence: Synthetic oligonucleotide
gguugucguagccucggcg

SEQ ID NO: 413762 - RNA, 19 nt, Artificial Sequence
  Description of Artificial Sequence: Synthetic oligonucleotide
cuaugacacaauucuuaca

SEQ ID NO: 413763 - RNA, 19 nt, Artificial Sequence
  Description of Artificial Sequence: Synthetic oligonucleotide
uaaccuaacuagguuugaa

SEQ ID NO: 413764 - RNA, 19 nt, Artificial Sequence
  Description of Artificial Sequence: Synthetic oligonucleotide
ugcauauuuuagugcccac

SEQ ID NO: 413765 - RNA, 19 nt, Artificial Sequence
  Description of Artificial Sequence: Synthetic oligonucleotide
auuuuagugcccacugggu

SEQ ID NO: 413766 - RNA, 19 nt, Artificial Sequence
  Description of Artificial Sequence: Synthetic oligonucleotide
agacucagcuucauggcug

SEQ ID NO: 413767 - RNA, 19 nt, Artificial Sequence
  Description of Artificial Sequence: Synthetic oligonucleotide
ucguuggccagaguuguac

SEQ ID NO: 413768 - RNA, 19 nt, Artificial Sequence
  Description of Artificial Sequence: Synthetic oligonucleotide
aaucccgguuguauugucu

SEQ ID NO: 413769 - RNA, 19 nt, Artificial Sequence
  Description of Artificial Sequence: Synthetic oligonucleotide
acauggacgaggacaaacu

SEQ ID NO: 413770 - RNA, 19 nt, Artificial Sequence
  Description of Artificial Sequence: Synthetic oligonucleotide
aaacccugagaaacauucu

SEQ ID NO: 413771 - RNA, 19 nt, Artificial Sequence
  Description of Artificial Sequence: Synthetic oligonucleotide
uuguuccggcgauuugucc

SEQ ID NO: 413772 - RNA, 19 nt, Artificial Sequence
  Description of Artificial Sequence: Synthetic oligonucleotide
guuccggcgauuuguccgc

SEQ ID NO: 413773 - RNA, 19 nt, Artificial Sequence
  Description of Artificial Sequence: Synthetic oligonucleotide
ugaaacccugagaaacauu

SEQ ID NO: 413774 - RNA, 19 nt, Artificial Sequence
  Description of Artificial Sequence: Synthetic oligonucleotide
caagacuagggccuggcaa

SEQ ID NO: 413775 - RNA, 19 nt, Artificial Sequence
  Description of Artificial Sequence: Synthetic oligonucleotide
guuucucaccaggaagugc

SEQ ID NO: 413776 - RNA, 19 nt, Artificial Sequence
  Description of Artificial Sequence: Synthetic oligonucleotide
cccauaugucaccucaucc

SEQ ID NO: 413777 - RNA, 19 nt, Artificial Sequence
  Description of Artificial Sequence: Synthetic oligonucleotide
guugcgguuguuccggcga

SEQ ID NO: 413778 - RNA, 19 nt, Artificial Sequence
  Description of Artificial Sequence: Synthetic oligonucleotide
uaguuccuguaguaucggu

SEQ ID NO: 413779 - RNA, 19 nt, Artificial Sequence
  Description of Artificial Sequence: Synthetic oligonucleotide
uacccuugguaaccguagu

SEQ ID NO: 413780 - RNA, 19 nt, Artificial Sequence
  Description of Artificial Sequence: Synthetic oligonucleotide
gucaauaacugggagggua

SEQ ID NO: 413781 - RNA, 19 nt, Artificial Sequence
  Description of Artificial Sequence: Synthetic oligonucleotide
aggguaucgguaaauuuau

SEQ ID NO: 413782 - RNA, 19 nt, Artificial Sequence
  Description of Artificial Sequence: Synthetic oligonucleotide
aucggucucuguccuguug

SEQ ID NO: 413783 - RNA, 19 nt, Artificial Sequence
  Description of Artificial Sequence: Synthetic oligonucleotide
caugaacccagcaaccugu

SEQ ID NO: 413784 - RNA, 19 nt, Artificial Sequence
  Description of Artificial Sequence: Synthetic oligonucleotide
uccuguaguaucggucucu

SEQ ID NO: 413785 - RNA, 19 nt, Artificial Sequence
  Description of Artificial Sequence: Synthetic oligonucleotide
cagcuuacuaaggcacugg

SEQ ID NO: 413786 - RNA, 19 nt, Artificial Sequence
  Description of Artificial Sequence: Synthetic oligonucleotide
aguaucggucucuguccug

SEQ ID NO: 413787 - RNA, 19 nt, Artificial Sequence
  Description of Artificial Sequence: Synthetic oligonucleotide
aggauucaccuauguacau

SEQ ID NO: 413788 - RNA, 19 nt, Artificial Sequence
  Description of Artificial Sequence: Synthetic oligonucleotide
cucguccauagaaucgauc

SEQ ID NO: 413789 - RNA, 19 nt, Artificial Sequence
  Description of Artificial Sequence: Synthetic oligonucleotide
cccuguaucgaucauagaa

SEQ ID NO: 413790 - RNA, 19 nt, Artificial Sequence
  Description of Artificial Sequence: Synthetic oligonucleotide
ucuucagacugagggcugu

SEQ ID NO: 413791 - RNA, 19 nt, Artificial Sequence
  Description of Artificial Sequence: Synthetic oligonucleotide
guaccuguucugucaauaa

SEQ ID NO: 413792 - RNA, 19 nt, Artificial Sequence
  Description of Artificial Sequence: Synthetic oligonucleotide
auaaccuaacuagguuuga

SEQ ID NO: 413793 - RNA, 19 nt, Artificial Sequence
  Description of Artificial Sequence: Synthetic oligonucleotide
gcuucaccgauacccuugg

SEQ ID NO: 413794 - RNA, 19 nt, Artificial Sequence
  Description of Artificial Sequence: Synthetic oligonucleotide
ccauauccugcccacauuc

SEQ ID NO: 413795 - RNA, 19 nt, Artificial Sequence
  Description of Artificial Sequence: Synthetic oligonucleotide
cuuucccucacaccguuaa

SEQ ID NO: 413796 - RNA, 19 nt, Artificial Sequence
  Description of Artificial Sequence: Synthetic oligonucleotide
auccuaacgcagugaacau

SEQ ID NO: 413797 - RNA, 19 nt, Artificial Sequence
  Description of Artificial Sequence: Synthetic oligonucleotide
ucacaccguuaagaggcag

SEQ ID NO: 413798 - RNA, 19 nt, Artificial Sequence
  Description of Artificial Sequence: Synthetic oligonucleotide
cuguggacaggaaaaucaa

SEQ ID NO: 413799 - RNA, 19 nt, Artificial Sequence
  Description of Artificial Sequence: Synthetic oligonucleotide
ucauuugacugagcacagu

SEQ ID NO: 413800 - RNA, 19 nt, Artificial Sequence
  Description of Artificial Sequence: Synthetic oligonucleotide
auggacgaggacaaacuau

SEQ ID NO: 413801 - RNA, 19 nt, Artificial Sequence
  Description of Artificial Sequence: Synthetic oligonucleotide
caaauaaccuaacuagguu

SEQ ID NO: 413802 - RNA, 19 nt, Artificial Sequence
  Description of Artificial Sequence: Synthetic oligonucleotide
acacggaagcaccccagaa

SEQ ID NO: 413803 - RNA, 19 nt, Artificial Sequence
  Description of Artificial Sequence: Synthetic oligonucleotide
ugggccugacagcccauac

SEQ ID NO: 413804 - RNA, 19 nt, Artificial Sequence
  Description of Artificial Sequence: Synthetic oligonucleotide
ccuguaucgaucauagaaa

SEQ ID NO: 413805 - RNA, 19 nt, Artificial Sequence
  Description of Artificial Sequence: Synthetic oligonucleotide
guauugucuguaauagucu

SEQ ID NO: 413806 - RNA, 19 nt, Artificial Sequence
  Description of Artificial Sequence: Synthetic oligonucleotide
cuguaucgaucauagaaau

SEQ ID NO: 413807 - RNA, 19 nt, Artificial Sequence
  Description of Artificial Sequence: Synthetic oligonucleotide
ccagcauuauagacucagg

SEQ ID NO: 413808 - RNA, 19 nt, Artificial Sequence
  Description of Artificial Sequence: Synthetic oligonucleotide
cugccgguuccucuuguug

SEQ ID NO: 413809 - RNA, 19 nt, Artificial Sequence
  Description of Artificial Sequence: Synthetic oligonucleotide
aacugggaggguaucggua

SEQ ID NO: 413810 - RNA, 19 nt, Artificial Sequence
  Description of Artificial Sequence: Synthetic oligonucleotide
cuguauaaaguaagcugcu

SEQ ID NO: 413811 - RNA, 19 nt, Artificial Sequence
  Description of Artificial Sequence: Synthetic oligonucleotide
ugccaaucccgguuguauu

SEQ ID NO: 413812 - RNA, 19 nt, Artificial Sequence
  Description of Artificial Sequence: Synthetic oligonucleotide
cacaccguuaagaggcaga

SEQ ID NO: 413813 - RNA, 19 nt, Artificial Sequence
  Description of Artificial Sequence: Synthetic oligonucleotide
cuguguucccacucuccuc

SEQ ID NO: 413814 - RNA, 19 nt, Artificial Sequence
  Description of Artificial Sequence: Synthetic oligonucleotide
caccuauguacauauccua

SEQ ID NO: 413815 - RNA, 19 nt, Artificial Sequence
  Description of Artificial Sequence: Synthetic oligonucleotide
gcaagauaaugauuuaaau

SEQ ID NO: 413816 - RNA, 19 nt, Artificial Sequence
  Description of Artificial Sequence: Synthetic oligonucleotide
uucugccaaucccgguugu

SEQ ID NO: 413817 - RNA, 19 nt, Artificial Sequence
  Description of Artificial Sequence: Synthetic oligonucleotide
ucccgguuguauugucugu

SEQ ID NO: 413818 - RNA, 19 nt, Artificial Sequence
  Description of Artificial Sequence: Synthetic oligonucleotide
ggaccagcuuacuaaggca

SEQ ID NO: 413819 - RNA, 19 nt, Artificial Sequence
  Description of Artificial Sequence: Synthetic oligonucleotide
agucaccccuguaucgauc

SEQ ID NO: 413820 - RNA, 19 nt, Artificial Sequence
  Description of Artificial Sequence: Synthetic oligonucleotide
ccuucguuggccagaguug

SEQ ID NO: 413821 - RNA, 19 nt, Artificial Sequence
  Description of Artificial Sequence: Synthetic oligonucleotide
ucuauggucuugggaggaa

SEQ ID NO: 413822 - RNA, 19 nt, Artificial Sequence
  Description of Artificial Sequence: Synthetic oligonucleotide
uuguugcgguuguuccggc

SEQ ID NO: 413823 - RNA, 19 nt, Artificial Sequence
  Description of Artificial Sequence: Synthetic oligonucleotide
uccccauaugucaccucau

SEQ ID NO: 413824 - RNA, 19 nt, Artificial Sequence
  Description of Artificial Sequence: Synthetic oligonucleotide
acccuugguaaccguagua

SEQ ID NO: 413825 - RNA, 19 nt, Artificial Sequence
  Description of Artificial Sequence: Synthetic oligonucleotide
cauaugucaccucauccau

SEQ ID NO: 413826 - RNA, 19 nt, Artificial Sequence
  Description of Artificial Sequence: Synthetic oligonucleotide
cuugguaaccguaguaguu

SEQ ID NO: 413827 - RNA, 19 nt, Artificial Sequence
  Description of Artificial Sequence: Synthetic oligonucleotide
guuguuccggcgauuuguc

SEQ ID NO: 413828 - RNA, 19 nt, Artificial Sequence
  Description of Artificial Sequence: Synthetic oligonucleotide
gcaaaucaccaucuucaga

SEQ ID NO: 413829 - RNA, 19 nt, Artificial Sequence
  Description of Artificial Sequence: Synthetic oligonucleotide
ugucguagccucggcgcug

SEQ ID NO: 413830 - RNA, 19 nt, Artificial Sequence
  Description of Artificial Sequence: Synthetic oligonucleotide
cauggacgaggacaaacua

SEQ ID NO: 413831 - RNA, 19 nt, Artificial Sequence
  Description of Artificial Sequence: Synthetic oligonucleotide
gauccggaaugccuugagu

SEQ ID NO: 413832 - RNA, 19 nt, Artificial Sequence
  Description of Artificial Sequence: Synthetic oligonucleotide
cucacacggaagcacccca

SEQ ID NO: 413833 - RNA, 19 nt, Artificial Sequence
  Description of Artificial Sequence: Synthetic oligonucleotide
guccccaacaguccccguc

SEQ ID NO: 413834 - RNA, 19 nt, Artificial Sequence
  Description of Artificial Sequence: Synthetic oligonucleotide
ggcagacaaucuuagcaaa

SEQ ID NO: 413835 - RNA, 19 nt, Artificial Sequence
  Description of Artificial Sequence: Synthetic oligonucleotide
ucuuucccucacaccguua

SEQ ID NO: 413836 - RNA, 19 nt, Artificial Sequence
  Description of Artificial Sequence: Synthetic oligonucleotide
cacgucucagcacaaauuu

SEQ ID NO: 413837 - RNA, 19 nt, Artificial Sequence
  Description of Artificial Sequence: Synthetic oligonucleotide
cccucacaccguuaagagg

SEQ ID NO: 413838 - RNA, 19 nt, Artificial Sequence
  Description of Artificial Sequence: Synthetic oligonucleotide
uugcgguuguuccggcgau

SEQ ID NO: 413839 - RNA, 19 nt, Artificial Sequence
  Description of Artificial Sequence: Synthetic oligonucleotide
gacaugggguagaagggcu

SEQ ID NO: 413840 - RNA, 19 nt, Artificial Sequence
  Description of Artificial Sequence: Synthetic oligonucleotide
accagcuuacuaaggcacu

SEQ ID NO: 413841 - RNA, 19 nt, Artificial Sequence
  Description of Artificial Sequence: Synthetic oligonucleotide
uccagacuuuauggaacuc

SEQ ID NO: 413842 - RNA, 19 nt, Artificial Sequence
  Description of Artificial Sequence: Synthetic oligonucleotide
uagggacaacuaccaccac

SEQ ID NO: 413843 - RNA, 19 nt, Artificial Sequence
  Description of Artificial Sequence: Synthetic oligonucleotide
acacuguugcugaguaagu

SEQ ID NO: 413844 - RNA, 19 nt, Artificial Sequence
  Description of Artificial Sequence: Synthetic oligonucleotide
gcugauccggaaugccuug

SEQ ID NO: 413845 - RNA, 19 nt, Artificial Sequence
  Description of Artificial Sequence: Synthetic oligonucleotide
aucccaaaugaagucucuu

SEQ ID NO: 413846 - RNA, 19 nt, Artificial Sequence
  Description of Artificial Sequence: Synthetic oligonucleotide
gcaggggcuucaccgauac

SEQ ID NO: 413847 - RNA, 19 nt, Artificial Sequence
  Description of Artificial Sequence: Synthetic oligonucleotide
cucuauggucuugggagga

SEQ ID NO: 413848 - RNA, 19 nt, Artificial Sequence
  Description of Artificial Sequence: Synthetic oligonucleotide
ggaagcaccccagaaggaa

SEQ ID NO: 413849 - RNA, 19 nt, Artificial Sequence
  Description of Artificial Sequence: Synthetic oligonucleotide
ucugccgguuccucuuguu

SEQ ID NO: 413850 - RNA, 19 nt, Artificial Sequence
  Description of Artificial Sequence: Synthetic oligonucleotide
ugggguagaagggcucgau

SEQ ID NO: 413851 - RNA, 19 nt, Artificial Sequence
  Description of Artificial Sequence: Synthetic oligonucleotide
guaucggucucuguccugu

SEQ ID NO: 413852 - RNA, 19 nt, Artificial Sequence
  Description of Artificial Sequence: Synthetic oligonucleotide
cucuuugaucucgaagcaa

SEQ ID NO: 413853 - RNA, 19 nt, Artificial Sequence
  Description of Artificial Sequence: Synthetic oligonucleotide
gcucaauauugaagcacug

SEQ ID NO: 413854 - RNA, 19 nt, Artificial Sequence
  Description of Artificial Sequence: Synthetic oligonucleotide
aguuuccugcugauccgga

SEQ ID NO: 413855 - RNA, 19 nt, Artificial Sequence
  Description of Artificial Sequence: Synthetic oligonucleotide
ucugccaaucccgguugua

SEQ ID NO: 413856 - RNA, 19 nt, Artificial Sequence
  Description of Artificial Sequence: Synthetic oligonucleotide
gucguagccucggcgcugc

SEQ ID NO: 413857 - RNA, 19 nt, Artificial Sequence
  Description of Artificial Sequence: Synthetic oligonucleotide
caacagguacaacauggau

SEQ ID NO: 413858 - RNA, 19 nt, Artificial Sequence
  Description of Artificial Sequence: Synthetic oligonucleotide
cgucucagcacaaauuuaa

SEQ ID NO: 413859 - RNA, 19 nt, Artificial Sequence
  Description of Artificial Sequence: Synthetic oligonucleotide
cucauccauauaaucgcau

SEQ ID NO: 413860 - RNA, 19 nt, Artificial Sequence
  Description of Artificial Sequence: Synthetic oligonucleotide
cccucuguuuccagacugc

SEQ ID NO: 413861 - RNA, 19 nt, Artificial Sequence
  Description of Artificial Sequence: Synthetic oligonucleotide
ggcucgaucugccaaaguu

SEQ ID NO: 413862 - RNA, 19 nt, Artificial Sequence
  Description of Artificial Sequence: Synthetic oligonucleotide
gguuguuccggcgauuugu

SEQ ID NO: 413863 - RNA, 19 nt, Artificial Sequence
  Description of Artificial Sequence: Synthetic oligonucleotide
cacacggaagcaccccaga

SEQ ID NO: 413864 - RNA, 19 nt, Artificial Sequence
  Description of Artificial Sequence: Synthetic oligonucleotide
augauuccagagaucucuu

SEQ ID NO: 413865 - RNA, 19 nt, Artificial Sequence
  Description of Artificial Sequence: Synthetic oligonucleotide
ucaccccuguaucgaucau

SEQ ID NO: 413866 - RNA, 19 nt, Artificial Sequence
  Description of Artificial Sequence: Synthetic oligonucleotide
gaucaagaaugaaguuccu

SEQ ID NO: 413867 - RNA, 19 nt, Artificial Sequence
  Description of Artificial Sequence: Synthetic oligonucleotide
cucaggugaggaaguggaa

SEQ ID NO: 413868 - RNA, 19 nt, Artificial Sequence
  Description of Artificial Sequence: Synthetic oligonucleotide
gcuuacuaaggcacuggga

SEQ ID NO: 413869 - RNA, 19 nt, Artificial Sequence
  Description of Artificial Sequence: Synthetic oligonucleotide
cuugaugagaggccucuuu

SEQ ID NO: 413870 - RNA, 19 nt, Artificial Sequence
  Description of Artificial Sequence: Synthetic oligonucleotide
ccgacagccccuguuuucc

SEQ ID NO: 413871 - RNA, 19 nt, Artificial Sequence
  Description of Artificial Sequence: Synthetic oligonucleotide
ccagcuuacuaaggcacug

SEQ ID NO: 413872 - RNA, 19 nt, Artificial Sequence
  Description of Artificial Sequence: Synthetic oligonucleotide
gcgauuuguccgcuucuca

SEQ ID NO: 413873 - RNA, 19 nt, Artificial Sequence
  Description of Artificial Sequence: Synthetic oligonucleotide
uaucggucucuguccuguu

SEQ ID NO: 413874 - RNA, 19 nt, Artificial Sequence
  Description of Artificial Sequence: Synthetic oligonucleotide
cuguaucuguuguauucau

SEQ ID NO: 413875 - RNA, 19 nt, Artificial Sequence
  Description of Artificial Sequence: Synthetic oligonucleotide
acgucucagcacaaauuua

SEQ ID NO: 413876 - RNA, 19 nt, Artificial Sequence
  Description of Artificial Sequence: Synthetic oligonucleotide
guacugacgggugagucuu

SEQ ID NO: 413877 - RNA, 19 nt, Artificial Sequence
  Description of Artificial Sequence: Synthetic oligonucleotide
cucccaggacauuguaucu

SEQ ID NO: 413878 - RNA, 19 nt, Artificial Sequence
  Description of Artificial Sequence: Synthetic oligonucleotide
uacugacgggugagucuua

SEQ ID NO: 413879 - RNA, 19 nt, Artificial Sequence
  Description of Artificial Sequence: Synthetic oligonucleotide
agccccuguuuuccuuggu

SEQ ID NO: 413880 - RNA, 19 nt, Artificial Sequence
  Description of Artificial Sequence: Synthetic oligonucleotide
cagcccauaccacaggauu

SEQ ID NO: 413881 - RNA, 19 nt, Artificial Sequence
  Description of Artificial Sequence: Synthetic oligonucleotide
ccuguaguaucggucucug

SEQ ID NO: 413882 - RNA, 19 nt, Artificial Sequence
  Description of Artificial Sequence: Synthetic oligonucleotide
gggucugaacacucagaaa

SEQ ID NO: 413883 - RNA, 19 nt, Artificial Sequence
  Description of Artificial Sequence: Synthetic oligonucleotide
ggcucacacggaagcaccc

SEQ ID NO: 413884 - RNA, 19 nt, Artificial Sequence
  Description of Artificial Sequence: Synthetic oligonucleotide
ggaggguaucgguaaauuu

SEQ ID NO: 413885 - RNA, 19 nt, Artificial Sequence
  Description of Artificial Sequence: Synthetic oligonucleotide
gggacaacuaccaccacuu

SEQ ID NO: 413886 - RNA, 19 nt, Artificial Sequence
  Description of Artificial Sequence: Synthetic oligonucleotide
gcucacacggaagcacccc

SEQ ID NO: 413887 - RNA, 19 nt, Artificial Sequence
  Description of Artificial Sequence: Synthetic oligonucleotide
ggcgauuuguccgcuucuc

SEQ ID NO: 413888 - RNA, 19 nt, Artificial Sequence
  Description of Artificial Sequence: Synthetic oligonucleotide
cugaaacccugagaaacau

SEQ ID NO: 413889 - RNA, 19 nt, Artificial Sequence
  Description of Artificial Sequence: Synthetic oligonucleotide
cugauccggaaugccuuga

SEQ ID NO: 413890 - RNA, 19 nt, Artificial Sequence
  Description of Artificial Sequence: Synthetic oligonucleotide
aguccccaacaguccccgu

SEQ ID NO: 413891 - RNA, 19 nt, Artificial Sequence
  Description of Artificial Sequence: Synthetic oligonucleotide
caggggcuucaccgauacc

SEQ ID NO: 413892 - RNA, 19 nt, Artificial Sequence
  Description of Artificial Sequence: Synthetic oligonucleotide
ccgguugucguagccucgg

SEQ ID NO: 413893 - RNA, 19 nt, Artificial Sequence
  Description of Artificial Sequence: Synthetic oligonucleotide
cccaacaguccccgucccc

SEQ ID NO: 413894 - RNA, 19 nt, Artificial Sequence
  Description of Artificial Sequence: Synthetic oligonucleotide
uuccggcgauuuguccgcu

SEQ ID NO: 413895 - RNA, 19 nt, Artificial Sequence
  Description of Artificial Sequence: Synthetic oligonucleotide
ccggcgauuuguccgcuuc

SEQ ID NO: 413896 - RNA, 19 nt, Artificial Sequence
  Description of Artificial Sequence: Synthetic oligonucleotide
caccguuaagaggcagaca

SEQ ID NO: 413897 - RNA, 19 nt, Artificial Sequence
  Description of Artificial Sequence: Synthetic oligonucleotide
uccggcgauuuguccgcuu

SEQ ID NO: 413898 - RNA, 19 nt, Artificial Sequence
  Description of Artificial Sequence: Synthetic oligonucleotide
cgcacacgguccucaacag

SEQ ID NO: 413899 - RNA, 19 nt, Artificial Sequence
  Description of Artificial Sequence: Synthetic oligonucleotide
cuaacgcagugaacaucgu

SEQ ID NO: 413900 - RNA, 19 nt, Artificial Sequence
  Description of Artificial Sequence: Synthetic oligonucleotide
caacuaccaccacuuuccu

SEQ ID NO: 413901 - RNA, 19 nt, Artificial Sequence
  Description of Artificial Sequence: Synthetic oligonucleotide
ugcgguuguuccggcgauu

SEQ ID NO: 413902 - RNA, 19 nt, Artificial Sequence
  Description of Artificial Sequence: Synthetic oligonucleotide
cccgacagccccuguuuuc

SEQ ID NO: 413903 - RNA, 19 nt, Artificial Sequence
  Description of Artificial Sequence: Synthetic oligonucleotide
caccccuguaucgaucaua

SEQ ID NO: 413904 - RNA, 19 nt, Artificial Sequence
  Description of Artificial Sequence: Synthetic oligonucleotide
cuuccucauuagggacaac

SEQ ID NO: 413905 - RNA, 19 nt, Artificial Sequence
  Description of Artificial Sequence: Synthetic oligonucleotide
cuguaguaucggucucugu

SEQ ID NO: 413906 - RNA, 19 nt, Artificial Sequence
  Description of Artificial Sequence: Synthetic oligonucleotide
cugccaaucccgguuguau

SEQ ID NO: 413907 - RNA, 19 nt, Artificial Sequence
  Description of Artificial Sequence: Synthetic oligonucleotide
cugcccgcccacauagccu

SEQ ID NO: 413908 - RNA, 19 nt, Artificial Sequence
  Description of Artificial Sequence: Synthetic oligonucleotide
gcagacaaucuuagcaaau

SEQ ID NO: 413909 - RNA, 19 nt, Artificial Sequence
  Description of Artificial Sequence: Synthetic oligonucleotide
ccgguuguauugucuguaa

SEQ ID NO: 413910 - RNA, 19 nt, Artificial Sequence
  Description of Artificial Sequence: Synthetic oligonucleotide
gcucgaucugccaaaguuu

SEQ ID NO: 413911 - RNA, 19 nt, Artificial Sequence
  Description of Artificial Sequence: Synthetic oligonucleotide
ccccaacaguccccguccc

SEQ ID NO: 413912 - RNA, 19 nt, Artificial Sequence
  Description of Artificial Sequence: Synthetic oligonucleotide
gaacaucgucuugcugcgu

SEQ ID NO: 413913 - RNA, 19 nt, Artificial Sequence
  Description of Artificial Sequence: Synthetic oligonucleotide
caccccuccccagcagcuc

SEQ ID NO: 413914 - RNA, 19 nt, Artificial Sequence
  Description of Artificial Sequence: Synthetic oligonucleotide
gguaaccguaguaguuccu

SEQ ID NO: 413915 - RNA, 19 nt, Artificial Sequence
  Description of Artificial Sequence: Synthetic oligonucleotide
caacauggacgaggacaaa

SEQ ID NO: 413916 - RNA, 19 nt, Artificial Sequence
  Description of Artificial Sequence: Synthetic oligonucleotide
ccguaguaguuccuguagu

SEQ ID NO: 413917 - RNA, 19 nt, Artificial Sequence
  Description of Artificial Sequence: Synthetic oligonucleotide
gccugacagcccauaccac

SEQ ID NO: 413918 - RNA, 19 nt, Artificial Sequence
  Description of Artificial Sequence: Synthetic oligonucleotide
ggguaucgguaaauuuaua

SEQ ID NO: 413919 - RNA, 19 nt, Artificial Sequence
  Description of Artificial Sequence: Synthetic oligonucleotide
ggggcuucaccgauacccu

SEQ ID NO: 413920 - RNA, 19 nt, Artificial Sequence
  Description of Artificial Sequence: Synthetic oligonucleotide
gggaggguaucgguaaauu

SEQ ID NO: 413921 - RNA, 19 nt, Artificial Sequence
  Description of Artificial Sequence: Synthetic oligonucleotide
ccacgucucagcacaaauu

SEQ ID NO: 413922 - RNA, 19 nt, Artificial Sequence
  Description of Artificial Sequence: Synthetic oligonucleotide
gccccuguuuuccuugguu

SEQ ID NO: 413923 - RNA, 19 nt, Artificial Sequence
  Description of Artificial Sequence: Synthetic oligonucleotide
cggaagcaccccagaagga

SEQ ID NO: 413924 - RNA, 19 nt, Artificial Sequence
  Description of Artificial Sequence: Synthetic oligonucleotide
cgguugucguagccucggc

SEQ ID NO: 413925 - RNA, 19 nt, Artificial Sequence
  Description of Artificial Sequence: Synthetic oligonucleotide
cgguuguuccggcgauuug

SEQ ID NO: 413926 - RNA, 19 nt, Artificial Sequence
  Description of Artificial Sequence: Synthetic oligonucleotide
gccauauccugcccacauu

SEQ ID NO: 413927 - RNA, 19 nt, Artificial Sequence
  Description of Artificial Sequence: Synthetic oligonucleotide
ccaaucccgguuguauugu

SEQ ID NO: 413928 - RNA, 19 nt, Artificial Sequence
  Description of Artificial Sequence: Synthetic oligonucleotide
cccaguacugcugcccgua

SEQ ID NO: 413929 - RNA, 19 nt, Artificial Sequence
  Description of Artificial Sequence: Synthetic oligonucleotide
ccccuguaucgaucauaga

SEQ ID NO: 413930 - RNA, 19 nt, Artificial Sequence
  Description of Artificial Sequence: Synthetic oligonucleotide
ccguuaagaggcagacaau

SEQ ID NO: 413931 - RNA, 19 nt, Artificial Sequence
  Description of Artificial Sequence: Synthetic oligonucleotide
gcgguuguuccggcgauuu

SEQ ID NO: 413932 - RNA, 19 nt, Artificial Sequence
  Description of Artificial Sequence: Synthetic oligonucleotide
cgauacccuugguaaccgu

SEQ ID NO: 413933 - RNA, 19 nt, Artificial Sequence
  Description of Artificial Sequence: Synthetic oligonucleotide
cggcgauuuguccgcuucu

SEQ ID NO: 413934 - RNA, 19 nt, Artificial Sequence
  Description of Artificial Sequence: Synthetic oligonucleotide
ccaucggccugggaauuuu

SEQ ID NO: 413935 - RNA, 19 nt, Artificial Sequence
  Description of Artificial Sequence: Synthetic oligonucleotide
cgacagccccuguuuuccu

SEQ ID NO: 413936 - RNA, 19 nt, Artificial Sequence
  Description of Artificial Sequence: Synthetic oligonucleotide
ccccgacagccccuguuuu

SEQ ID NO: 413937 - RNA, 19 nt, Artificial Sequence
  Description of Artificial Sequence: Synthetic oligonucleotide
ccccaucggccugggaauu

SEQ ID NO: 413938 - RNA, 19 nt, Artificial Sequence
  Description of Artificial Sequence: Synthetic oligonucleotide
ccccuccguugcacacccu

SEQ ID NO: 413939 - RNA, 19 nt, Artificial Sequence
  Description of Artificial Sequence: Synthetic oligonucleotide
uguacaacaaucuaguuga

SEQ ID NO: 413940 - RNA, 19 nt, Artificial Sequence
  Description of Artificial Sequence: Synthetic oligonucleotide
aaacuuaccacuuuaccag

SEQ ID NO: 413941 - RNA, 19 nt, Artificial Sequence
  Description of Artificial Sequence: Synthetic oligonucleotide
uuauauaaguacaugcucc

SEQ ID NO: 413942 - RNA, 19 nt, Artificial Sequence
  Description of Artificial Sequence: Synthetic oligonucleotide
acguuauauaaguacaugc

SEQ ID NO: 413943 - RNA, 19 nt, Artificial Sequence
  Description of Artificial Sequence: Synthetic oligonucleotide
uaaaugauaauuaguggcc

SEQ ID NO: 413944 - RNA, 19 nt, Artificial Sequence
  Description of Artificial Sequence: Synthetic oligonucleotide
uaagaucccauaaacacag

SEQ ID NO: 413945 - RNA, 19 nt, Artificial Sequence
  Description of Artificial Sequence: Synthetic oligonucleotide
uguaagaucccauaaacac

SEQ ID NO: 413946 - RNA, 19 nt, Artificial Sequence
  Description of Artificial Sequence: Synthetic oligonucleotide
augauucggaauuacaugg

SEQ ID NO: 413947 - RNA, 19 nt, Artificial Sequence
  Description of Artificial Sequence: Synthetic oligonucleotide
agcauuaaggauuaaaacu

SEQ ID NO: 413948 - RNA, 19 nt, Artificial Sequence
  Description of Artificial Sequence: Synthetic oligonucleotide
aaugauucggaauuacaug

SEQ ID NO: 413949 - RNA, 19 nt, Artificial Sequence
  Description of Artificial Sequence: Synthetic oligonucleotide
uuaucuauugguuuacuca

SEQ ID NO: 413950 - RNA, 19 nt, Artificial Sequence
  Description of Artificial Sequence: Synthetic oligonucleotide
ugcacuuagauuuacauua

SEQ ID NO: 413951 - RNA, 19 nt, Artificial Sequence
  Description of Artificial Sequence: Synthetic oligonucleotide
uacacuagugguauagggg

SEQ ID NO: 413952 - RNA, 19 nt, Artificial Sequence
  Description of Artificial Sequence: Synthetic oligonucleotide
uuaaggauuaaaacuuacc

SEQ ID NO: 413953 - RNA, 19 nt, Artificial Sequence
  Description of Artificial Sequence: Synthetic oligonucleotide
augacauuuguaugugucc

SEQ ID NO: 413954 - RNA, 19 nt, Artificial Sequence
  Description of Artificial Sequence: Synthetic oligonucleotide
uuaguaacuagauucaguu

SEQ ID NO: 413955 - RNA, 19 nt, Artificial Sequence
  Description of Artificial Sequence: Synthetic oligonucleotide
gauagguaacacuuacagg

SEQ ID NO: 413956 - RNA, 19 nt, Artificial Sequence
  Description of Artificial Sequence: Synthetic oligonucleotide
uaauuaguggccaucugug

SEQ ID NO: 413957 - RNA, 19 nt, Artificial Sequence
  Description of Artificial Sequence: Synthetic oligonucleotide
ugacuauacagucuucaag

SEQ ID NO: 413958 - RNA, 19 nt, Artificial Sequence
  Description of Artificial Sequence: Synthetic oligonucleotide
uguacuguuugcucgaucu

SEQ ID NO: 413959 - RNA, 19 nt, Artificial Sequence
  Description of Artificial Sequence: Synthetic oligonucleotide
acuaggaaaaggcuuuccg

SEQ ID NO: 413960 - RNA, 19 nt, Artificial Sequence
  Description of Artificial Sequence: Synthetic oligonucleotide
aaucuaguugaguggugcg

SEQ ID NO: 413961 - RNA, 19 nt, Artificial Sequence
  Description of Artificial Sequence: Synthetic oligonucleotide
agauguuugacuuuagcau

SEQ ID NO: 413962 - RNA, 19 nt, Artificial Sequence
  Description of Artificial Sequence: Synthetic oligonucleotide
gaaaggaccagacugucac

SEQ ID NO: 413963 - RNA, 19 nt, Artificial Sequence
  Description of Artificial Sequence: Synthetic oligonucleotide
uauaaguacaugcucccac

SEQ ID NO: 413964 - RNA, 19 nt, Artificial Sequence
  Description of Artificial Sequence: Synthetic oligonucleotide
cauuguaccgugcagcucc

SEQ ID NO: 413965 - RNA, 19 nt, Artificial Sequence
  Description of Artificial Sequence: Synthetic oligonucleotide
uuaaaacuuaccacuuuac

SEQ ID NO: 413966 - RNA, 19 nt, Artificial Sequence
  Description of Artificial Sequence: Synthetic oligonucleotide
aacuuaccacuuuaccagg

SEQ ID NO: 413967 - RNA, 19 nt, Artificial Sequence
  Description of Artificial Sequence: Synthetic oligonucleotide
aauggccccguccaugacg

SEQ ID NO: 413968 - RNA, 19 nt, Artificial Sequence
  Description of Artificial Sequence: Synthetic oligonucleotide
uaauugucauaaaaugacu

SEQ ID NO: 413969 - RNA, 19 nt, Artificial Sequence
  Description of Artificial Sequence: Synthetic oligonucleotide
guuauauaaguacaugcuc

SEQ ID NO: 413970 - RNA, 19 nt, Artificial Sequence
  Description of Artificial Sequence: Synthetic oligonucleotide
uaucuauugguuuacucaa

SEQ ID NO: 413971 - RNA, 19 nt, Artificial Sequence
  Description of Artificial Sequence: Synthetic oligonucleotide
accgauagguaacacuuac

SEQ ID NO: 413972 - RNA, 19 nt, Artificial Sequence
  Description of Artificial Sequence: Synthetic oligonucleotide
aaaugauucggaauuacau

SEQ ID NO: 413973 - RNA, 19 nt, Artificial Sequence
  Description of Artificial Sequence: Synthetic oligonucleotide
uguaaguggaauagucuga

SEQ ID NO: 413974 - RNA, 19 nt, Artificial Sequence
  Description of Artificial Sequence: Synthetic oligonucleotide
aaucaacccugaugaacac

SEQ ID NO: 413975 - RNA, 19 nt, Artificial Sequence
  Description of Artificial Sequence: Synthetic oligonucleotide
aaguauggcucugaugcac

SEQ ID NO: 413976 - RNA, 19 nt, Artificial Sequence
  Description of Artificial Sequence: Synthetic oligonucleotide
cuacacuagugguauaggg

SEQ ID NO: 413977 - RNA, 19 nt, Artificial Sequence
  Description of Artificial Sequence: Synthetic oligonucleotide
aaucccuccugacaagcag

SEQ ID NO: 413978 - RNA, 19 nt, Artificial Sequence
  Description of Artificial Sequence: Synthetic oligonucleotide
aacacguuguuccuaaguu

SEQ ID NO: 413979 - RNA, 19 nt, Artificial Sequence
  Description of Artificial Sequence: Synthetic oligonucleotide
cacguuguuccuaaguuag

SEQ ID NO: 413980 - RNA, 19 nt, Artificial Sequence
  Description of Artificial Sequence: Synthetic oligonucleotide
aaaugauaauuaguggcca

SEQ ID NO: 413981 - RNA, 19 nt, Artificial Sequence
  Description of Artificial Sequence: Synthetic oligonucleotide
caacaaucuaguugagugg

SEQ ID NO: 413982 - RNA, 19 nt, Artificial Sequence
  Description of Artificial Sequence: Synthetic oligonucleotide
gucguugagguuuacgaag

SEQ ID NO: 413983 - RNA, 19 nt, Artificial Sequence
  Description of Artificial Sequence: Synthetic oligonucleotide
aaccaaaccgauagguaac

SEQ ID NO: 413984 - RNA, 19 nt, Artificial Sequence
  Description of Artificial Sequence: Synthetic oligonucleotide
ugcuccacguuauauaagu

SEQ ID NO: 413985 - RNA, 19 nt, Artificial Sequence
  Description of Artificial Sequence: Synthetic oligonucleotide
aauugucauaaaaugacua

SEQ ID NO: 413986 - RNA, 19 nt, Artificial Sequence
  Description of Artificial Sequence: Synthetic oligonucleotide
uucuacacuagugguauag

SEQ ID NO: 413987 - RNA, 19 nt, Artificial Sequence
  Description of Artificial Sequence: Synthetic oligonucleotide
guggaauagucugagacag

SEQ ID NO: 413988 - RNA, 19 nt, Artificial Sequence
  Description of Artificial Sequence: Synthetic oligonucleotide
gaaccaaaccgauagguaa

SEQ ID NO: 413989 - RNA, 19 nt, Artificial Sequence
  Description of Artificial Sequence: Synthetic oligonucleotide
aaaccgauagguaacacuu

SEQ ID NO: 413990 - RNA, 19 nt, Artificial Sequence
  Description of Artificial Sequence: Synthetic oligonucleotide
aucccugcgaguugaaggg

SEQ ID NO: 413991 - RNA, 19 nt, Artificial Sequence
  Description of Artificial Sequence: Synthetic oligonucleotide
cuaacaaggggacaucuuc

SEQ ID NO: 413992 - RNA, 19 nt, Artificial Sequence
  Description of Artificial Sequence: Synthetic oligonucleotide
uauuggaccguggcaaugg

SEQ ID NO: 413993 - RNA, 19 nt, Artificial Sequence
  Description of Artificial Sequence: Synthetic oligonucleotide
agguaacacuuacagggcg

SEQ ID NO: 413994 - RNA, 19 nt, Artificial Sequence
  Description of Artificial Sequence: Synthetic oligonucleotide
aguggaauagucugagaca

SEQ ID NO: 413995 - RNA, 19 nt, Artificial Sequence
  Description of Artificial Sequence: Synthetic oligonucleotide
uauauacccagagggauga

SEQ ID NO: 413996 - RNA, 19 nt, Artificial Sequence
  Description of Artificial Sequence: Synthetic oligonucleotide
gucacgauuucccuguaag

SEQ ID NO: 413997 - RNA, 19 nt, Artificial Sequence
  Description of Artificial Sequence: Synthetic oligonucleotide
ugugcuccacguuauauaa

SEQ ID NO: 413998 - RNA, 19 nt, Artificial Sequence
  Description of Artificial Sequence: Synthetic oligonucleotide
gacagaguugcaaacuugc

SEQ ID NO: 413999 - RNA, 19 nt, Artificial Sequence
  Description of Artificial Sequence: Synthetic oligonucleotide
ucaaucaacccugaugaac

SEQ ID NO: 414000 - RNA, 19 nt, Artificial Sequence
  Description of Artificial Sequence: Synthetic oligonucleotide
ugucuauuagucuuuccuc

SEQ ID NO: 414001 - RNA, 19 nt, Artificial Sequence
  Description of Artificial Sequence: Synthetic oligonucleotide
cuagucaaguucuagaucu

SEQ ID NO: 414002 - RNA, 19 nt, Artificial Sequence
  Description of Artificial Sequence: Synthetic oligonucleotide
aaugcucuaagguggguua

SEQ ID NO: 414003 - RNA, 19 nt, Artificial Sequence
  Description of Artificial Sequence: Synthetic oligonucleotide
uucuguaagaucccauaaa

SEQ ID NO: 414004 - RNA, 19 nt, Artificial Sequence
  Description of Artificial Sequence: Synthetic oligonucleotide
agaguuuuagcaggguccg

SEQ ID NO: 414005 - RNA, 19 nt, Artificial Sequence
  Description of Artificial Sequence: Synthetic oligonucleotide
uacauggcaugcaguaucc

SEQ ID NO: 414006 - RNA, 19 nt, Artificial Sequence
  Description of Artificial Sequence: Synthetic oligonucleotide
uggugcagcauuaaggauu

SEQ ID NO: 414007 - RNA, 19 nt, Artificial Sequence
  Description of Artificial Sequence: Synthetic oligonucleotide
aauaucaaucaacccugau

SEQ ID NO: 414008 - RNA, 19 nt, Artificial Sequence
  Description of Artificial Sequence: Synthetic oligonucleotide
uucauuguaccgugcagcu

SEQ ID NO: 414009 - RNA, 19 nt, Artificial Sequence
  Description of Artificial Sequence: Synthetic oligonucleotide
ggugaauugggucuuaauc

SEQ ID NO: 414010 - RNA, 19 nt, Artificial Sequence
  Description of Artificial Sequence: Synthetic oligonucleotide
aguuccccgguguagugac

SEQ ID NO: 414011 - RNA, 19 nt, Artificial Sequence
  Description of Artificial Sequence: Synthetic oligonucleotide
ggaauuacauggcaugcag

SEQ ID NO: 414012 - RNA, 19 nt, Artificial Sequence
  Description of Artificial Sequence: Synthetic oligonucleotide
ucuucuacacuagugguau

SEQ ID NO: 414013 - RNA, 19 nt, Artificial Sequence
  Description of Artificial Sequence: Synthetic oligonucleotide
aucuaguugaguggugcgc

SEQ ID NO: 414014 - RNA, 19 nt, Artificial Sequence
  Description of Artificial Sequence: Synthetic oligonucleotide
uaccuagucaaguucuaga

SEQ ID NO: 414015 - RNA, 19 nt, Artificial Sequence
  Description of Artificial Sequence: Synthetic oligonucleotide
cauugcuuccggcaggcgg

SEQ ID NO: 414016 - RNA, 19 nt, Artificial Sequence
  Description of Artificial Sequence: Synthetic oligonucleotide
cuauauacccagagggaug

SEQ ID NO: 414017 - RNA, 19 nt, Artificial Sequence
  Description of Artificial Sequence: Synthetic oligonucleotide
ugacauuuguauguguccu

SEQ ID NO: 414018 - RNA, 19 nt, Artificial Sequence
  Description of Artificial Sequence: Synthetic oligonucleotide
augauaauuaguggccauc

SEQ ID NO: 414019 - RNA, 19 nt, Artificial Sequence
  Description of Artificial Sequence: Synthetic oligonucleotide
aaguagcuuuucauuguac

SEQ ID NO: 414020 - RNA, 19 nt, Artificial Sequence
  Description of Artificial Sequence: Synthetic oligonucleotide
ucccauacuaugauuucgu

SEQ ID NO: 414021 - RNA, 19 nt, Artificial Sequence
  Description of Artificial Sequence: Synthetic oligonucleotide
gugaauugggucuuaaucu

SEQ ID NO: 414022 - RNA, 19 nt, Artificial Sequence
  Description of Artificial Sequence: Synthetic oligonucleotide
gauucggaauuacauggca

SEQ ID NO: 414023 - RNA, 19 nt, Artificial Sequence
  Description of Artificial Sequence: Synthetic oligonucleotide
caaucuaguugaguggugc

SEQ ID NO: 414024 - RNA, 19 nt, Artificial Sequence
  Description of Artificial Sequence: Synthetic oligonucleotide
gcuuguacagaccuucccg

SEQ ID NO: 414025 - RNA, 19 nt, Artificial Sequence
  Description of Artificial Sequence: Synthetic oligonucleotide
uccuaaguuagauuucaua

SEQ ID NO: 414026 - RNA, 19 nt, Artificial Sequence
  Description of Artificial Sequence: Synthetic oligonucleotide
uauaggggucaaaugccac

SEQ ID NO: 414027 - RNA, 19 nt, Artificial Sequence
  Description of Artificial Sequence: Synthetic oligonucleotide
uggaauagucugagacagg

SEQ ID NO: 414028 - RNA, 19 nt, Artificial Sequence
  Description of Artificial Sequence: Synthetic oligonucleotide
aguuuaugguuuaagguaa

SEQ ID NO: 414029 - RNA, 19 nt, Artificial Sequence
  Description of Artificial Sequence: Synthetic oligonucleotide
uccaccugucacaauguac

SEQ ID NO: 414030 - RNA, 19 nt, Artificial Sequence
  Description of Artificial Sequence: Synthetic oligonucleotide
accuagucaaguucuagau

SEQ ID NO: 414031 - RNA, 19 nt, Artificial Sequence
  Description of Artificial Sequence: Synthetic oligonucleotide
ugaugcacuuagauuuaca

SEQ ID NO: 414032 - RNA, 19 nt, Artificial Sequence
  Description of Artificial Sequence: Synthetic oligonucleotide
uauuacucggcagucuaga

SEQ ID NO: 414033 - RNA, 19 nt, Artificial Sequence
  Description of Artificial Sequence: Synthetic oligonucleotide
agugacuauacagucuuca

SEQ ID NO: 414034 - RNA, 19 nt, Artificial Sequence
  Description of Artificial Sequence: Synthetic oligonucleotide
gccguugccagacuggucg

SEQ ID NO: 414035 - RNA, 19 nt, Artificial Sequence
  Description of Artificial Sequence: Synthetic oligonucleotide
ucggaauuacauggcaugc

SEQ ID NO: 414036 - RNA, 19 nt, Artificial Sequence
  Description of Artificial Sequence: Synthetic oligonucleotide
uggccugcggaaaagccca

SEQ ID NO: 414037 - RNA, 19 nt, Artificial Sequence
  Description of Artificial Sequence: Synthetic oligonucleotide
uuacgaaggagacgcggac

SEQ ID NO: 414038 - RNA, 19 nt, Artificial Sequence
  Description of Artificial Sequence: Synthetic oligonucleotide
auauagaaguagagcuccc

SEQ ID NO: 414039 - RNA, 19 nt, Artificial Sequence
  Description of Artificial Sequence: Synthetic oligonucleotide
aaccaggaacccauuugac

SEQ ID NO: 414040 - RNA, 19 nt, Artificial Sequence
  Description of Artificial Sequence: Synthetic oligonucleotide
ggaaaugugucccauacua

SEQ ID NO: 414041 - RNA, 19 nt, Artificial Sequence
  Description of Artificial Sequence: Synthetic oligonucleotide
cuggggagaaagcaaacuc

SEQ ID NO: 414042 - RNA, 19 nt, Artificial Sequence
  Description of Artificial Sequence: Synthetic oligonucleotide
gaugcacuuagauuuacau

SEQ ID NO: 414043 - RNA, 19 nt, Artificial Sequence
  Description of Artificial Sequence: Synthetic oligonucleotide
uacagaccuucccgggugg

SEQ ID NO: 414044 - RNA, 19 nt, Artificial Sequence
  Description of Artificial Sequence: Synthetic oligonucleotide
uguaccgugcagcuccacu

SEQ ID NO: 414045 - RNA, 19 nt, Artificial Sequence
  Description of Artificial Sequence: Synthetic oligonucleotide
aucacuaccuagucaaguu

SEQ ID NO: 414046 - RNA, 19 nt, Artificial Sequence
  Description of Artificial Sequence: Synthetic oligonucleotide
cucugaugcacuuagauuu

SEQ ID NO: 414047 - RNA, 19 nt, Artificial Sequence
  Description of Artificial Sequence: Synthetic oligonucleotide
uugcccaugugcaaauaaa

SEQ ID NO: 414048 - RNA, 19 nt, Artificial Sequence
  Description of Artificial Sequence: Synthetic oligonucleotide
aaggcuuuccgaaccagga

SEQ ID NO: 414049 - RNA, 19 nt, Artificial Sequence
  Description of Artificial Sequence: Synthetic oligonucleotide
aaaugcucuaagguggguu

SEQ ID NO: 414050 - RNA, 19 nt, Artificial Sequence
  Description of Artificial Sequence: Synthetic oligonucleotide
cuauuacucggcagucuag

SEQ ID NO: 414051 - RNA, 19 nt, Artificial Sequence
  Description of Artificial Sequence: Synthetic oligonucleotide
cuguaagaucccauaaaca

SEQ ID NO: 414052 - RNA, 19 nt, Artificial Sequence
  Description of Artificial Sequence: Synthetic oligonucleotide
guaccgugcagcuccacug

SEQ ID NO: 414053 - RNA, 19 nt, Artificial Sequence
  Description of Artificial Sequence: Synthetic oligonucleotide
cgauagguaacacuuacag

SEQ ID NO: 414054 - RNA, 19 nt, Artificial Sequence
  Description of Artificial Sequence: Synthetic oligonucleotide
gugguauaggggucaaaug

SEQ ID NO: 414055 - RNA, 19 nt, Artificial Sequence
  Description of Artificial Sequence: Synthetic oligonucleotide
auacccagagggaugacug

SEQ ID NO: 414056 - RNA, 19 nt, Artificial Sequence
  Description of Artificial Sequence: Synthetic oligonucleotide
cucgugacuugucuauuag

SEQ ID NO: 414057 - RNA, 19 nt, Artificial Sequence
  Description of Artificial Sequence: Synthetic oligonucleotide
uagucaaguucuagaucug

SEQ ID NO: 414058 - RNA, 19 nt, Artificial Sequence
  Description of Artificial Sequence: Synthetic oligonucleotide
uuuuaucuauugguuuacu

SEQ ID NO: 414059 - RNA, 19 nt, Artificial Sequence
  Description of Artificial Sequence: Synthetic oligonucleotide
acugccacuaaacuccaua

SEQ ID NO: 414060 - RNA, 19 nt, Artificial Sequence
  Description of Artificial Sequence: Synthetic oligonucleotide
gguauaggggucaaaugcc

SEQ ID NO: 414061 - RNA, 19 nt, Artificial Sequence
  Description of Artificial Sequence: Synthetic oligonucleotide
acuuggccugcggaaaagc

SEQ ID NO: 414062 - RNA, 19 nt, Artificial Sequence
  Description of Artificial Sequence: Synthetic oligonucleotide
acagaucagcggcucuaac

SEQ ID NO: 414063 - RNA, 19 nt, Artificial Sequence
  Description of Artificial Sequence: Synthetic oligonucleotide
cacuuaaggagaggguucc

SEQ ID NO: 414064 - RNA, 19 nt, Artificial Sequence
  Description of Artificial Sequence: Synthetic oligonucleotide
ucuaacaaggggacaucuu

SEQ ID NO: 414065 - RNA, 19 nt, Artificial Sequence
  Description of Artificial Sequence: Synthetic oligonucleotide
guuggacuauaaaugauaa

SEQ ID NO: 414066 - RNA, 19 nt, Artificial Sequence
  Description of Artificial Sequence: Synthetic oligonucleotide
ugcgaguugaagggcaccc

SEQ ID NO: 414067 - RNA, 19 nt, Artificial Sequence
  Description of Artificial Sequence: Synthetic oligonucleotide
ugcacggcaaagcuuucuc

SEQ ID NO: 414068 - RNA, 19 nt, Artificial Sequence
  Description of Artificial Sequence: Synthetic oligonucleotide
uaaguggaauagucugaga

SEQ ID NO: 414069 - RNA, 19 nt, Artificial Sequence
  Description of Artificial Sequence: Synthetic oligonucleotide
gaucagcggcucuaacaag

SEQ ID NO: 414070 - RNA, 19 nt, Artificial Sequence
  Description of Artificial Sequence: Synthetic oligonucleotide
aguuggacuauaaaugaua

SEQ ID NO: 414071 - RNA, 19 nt, Artificial Sequence
  Description of Artificial Sequence: Synthetic oligonucleotide
acgcggacaggguuggauc

SEQ ID NO: 414072 - RNA, 19 nt, Artificial Sequence
  Description of Artificial Sequence: Synthetic oligonucleotide
aucaacccugaugaacacg

SEQ ID NO: 414073 - RNA, 19 nt, Artificial Sequence
  Description of Artificial Sequence: Synthetic oligonucleotide
acacgcuaagaacuugcca

SEQ ID NO: 414074 - RNA, 19 nt, Artificial Sequence
  Description of Artificial Sequence: Synthetic oligonucleotide
acuagugguauagggguca

SEQ ID NO: 414075 - RNA, 19 nt, Artificial Sequence
  Description of Artificial Sequence: Synthetic oligonucleotide
uuggacuauaaaugauaau

SEQ ID NO: 414076 - RNA, 19 nt, Artificial Sequence
  Description of Artificial Sequence: Synthetic oligonucleotide
ugucccauacuaugauuuc

SEQ ID NO: 414077 - RNA, 19 nt, Artificial Sequence
  Description of Artificial Sequence: Synthetic oligonucleotide
caagugugcacggcaaagc

SEQ ID NO: 414078 - RNA, 19 nt, Artificial Sequence
  Description of Artificial Sequence: Synthetic oligonucleotide
cuugcaagugugcacggca

SEQ ID NO: 414079 - RNA, 19 nt, Artificial Sequence
  Description of Artificial Sequence: Synthetic oligonucleotide
acagguuacucgugacuug

SEQ ID NO: 414080 - RNA, 19 nt, Artificial Sequence
  Description of Artificial Sequence: Synthetic oligonucleotide
ugaacacguuguuccuaag

SEQ ID NO: 414081 - RNA, 19 nt, Artificial Sequence
  Description of Artificial Sequence: Synthetic oligonucleotide
guaacacuuacagggcggc

SEQ ID NO: 414082 - RNA, 19 nt, Artificial Sequence
  Description of Artificial Sequence: Synthetic oligonucleotide
uuuuagcaggguccguuuu

SEQ ID NO: 414083 - RNA, 19 nt, Artificial Sequence
  Description of Artificial Sequence: Synthetic oligonucleotide
uguguacaacaaucuaguu

SEQ ID NO: 414084 - RNA, 19 nt, Artificial Sequence
  Description of Artificial Sequence: Synthetic oligonucleotide
agcggcucuaacaagggga

SEQ ID NO: 414085 - RNA, 19 nt, Artificial Sequence
  Description of Artificial Sequence: Synthetic oligonucleotide
uuggaucccugcgaguuga

SEQ ID NO: 414086 - RNA, 19 nt, Artificial Sequence
  Description of Artificial Sequence: Synthetic oligonucleotide
ggcuuuccgaaccaggaac

SEQ ID NO: 414087 - RNA, 19 nt, Artificial Sequence
  Description of Artificial Sequence: Synthetic oligonucleotide
uuggggcucuauauaccca

SEQ ID NO: 414088 - RNA, 19 nt, Artificial Sequence
  Description of Artificial Sequence: Synthetic oligonucleotide
cuaccuagucaaguucuag

SEQ ID NO: 414089 - RNA, 19 nt, Artificial Sequence
  Description of Artificial Sequence: Synthetic oligonucleotide
cacgcuaagaacuugccau

SEQ ID NO: 414090 - RNA, 19 nt, Artificial Sequence
  Description of Artificial Sequence: Synthetic oligonucleotide
auuacucggcagucuagaa

SEQ ID NO: 414091 - RNA, 19 nt, Artificial Sequence
  Description of Artificial Sequence: Synthetic oligonucleotide
acacgugugcuccacguua

SEQ ID NO: 414092 - RNA, 19 nt, Artificial Sequence
  Description of Artificial Sequence: Synthetic oligonucleotide
cauuguacagcccaccccu

SEQ ID NO: 414093 - RNA, 19 nt, Artificial Sequence
  Description of Artificial Sequence: Synthetic oligonucleotide
cuagaaaggaccagacugu

SEQ ID NO: 414094 - RNA, 19 nt, Artificial Sequence
  Description of Artificial Sequence: Synthetic oligonucleotide
gaguugcaaacuugcugac

SEQ ID NO: 414095 - RNA, 19 nt, Artificial Sequence
  Description of Artificial Sequence: Synthetic oligonucleotide
uggcuuuaguaacuagauu

SEQ ID NO: 414096 - RNA, 19 nt, Artificial Sequence
  Description of Artificial Sequence: Synthetic oligonucleotide
cuaacuuuggggcucuaua

SEQ ID NO: 414097 - RNA, 19 nt, Artificial Sequence
  Description of Artificial Sequence: Synthetic oligonucleotide
agacuggucguugagguuu

SEQ ID NO: 414098 - RNA, 19 nt, Artificial Sequence
  Description of Artificial Sequence: Synthetic oligonucleotide
uacgaaggagacgcggaca

SEQ ID NO: 414099 - RNA, 19 nt, Artificial Sequence
  Description of Artificial Sequence: Synthetic oligonucleotide
cuguuaggugguugaaguc

SEQ ID NO: 414100 - RNA, 19 nt, Artificial Sequence
  Description of Artificial Sequence: Synthetic oligonucleotide
acccugaugaacacguugu

SEQ ID NO: 414101 - RNA, 19 nt, Artificial Sequence
  Description of Artificial Sequence: Synthetic oligonucleotide
gaacacguuguuccuaagu

SEQ ID NO: 414102 - RNA, 19 nt, Artificial Sequence
  Description of Artificial Sequence: Synthetic oligonucleotide
aguuuuagcaggguccguu

SEQ ID NO: 414103 - RNA, 19 nt, Artificial Sequence
  Description of Artificial Sequence: Synthetic oligonucleotide
uuacagaucagcggcucua

SEQ ID NO: 414104 - RNA, 19 nt, Artificial Sequence
  Description of Artificial Sequence: Synthetic oligonucleotide
agaguuccccgguguagug

SEQ ID NO: 414105 - RNA, 19 nt, Artificial Sequence
  Description of Artificial Sequence: Synthetic oligonucleotide
agcauuggagacugcugaa

SEQ ID NO: 414106 - RNA, 19 nt, Artificial Sequence
  Description of Artificial Sequence: Synthetic oligonucleotide
agaguuccguuuggacagc

SEQ ID NO: 414107 - RNA, 19 nt, Artificial Sequence
  Description of Artificial Sequence: Synthetic oligonucleotide
uggugaauugggucuuaau

SEQ ID NO: 414108 - RNA, 19 nt, Artificial Sequence
  Description of Artificial Sequence: Synthetic oligonucleotide
ggacuauaaaugauaauua

SEQ ID NO: 414109 - RNA, 19 nt, Artificial Sequence
  Description of Artificial Sequence: Synthetic oligonucleotide
accaaaccgauagguaaca

SEQ ID NO: 414110 - RNA, 19 nt, Artificial Sequence
  Description of Artificial Sequence: Synthetic oligonucleotide
acucgugacuugucuauua

SEQ ID NO: 414111 - RNA, 19 nt, Artificial Sequence
  Description of Artificial Sequence: Synthetic oligonucleotide
gugacuugucuauuagucu

SEQ ID NO: 414112 - RNA, 19 nt, Artificial Sequence
  Description of Artificial Sequence: Synthetic oligonucleotide
caaaccgauagguaacacu

SEQ ID NO: 414113 - RNA, 19 nt, Artificial Sequence
  Description of Artificial Sequence: Synthetic oligonucleotide
uacccagagggaugacuga

SEQ ID NO: 414114 - RNA, 19 nt, Artificial Sequence
  Description of Artificial Sequence: Synthetic oligonucleotide
cacgcagaaacccguccug

SEQ ID NO: 414115 - RNA, 19 nt, Artificial Sequence
  Description of Artificial Sequence: Synthetic oligonucleotide
cuggucguugagguuuacg

SEQ ID NO: 414116 - RNA, 19 nt, Artificial Sequence
  Description of Artificial Sequence: Synthetic oligonucleotide
gaugacugacuuggcuggc

SEQ ID NO: 414117 - RNA, 19 nt, Artificial Sequence
  Description of Artificial Sequence: Synthetic oligonucleotide
ccguuuuggcuuuaguaac

SEQ ID NO: 414118 - RNA, 19 nt, Artificial Sequence
  Description of Artificial Sequence: Synthetic oligonucleotide
gggcucuauauacccagag

SEQ ID NO: 414119 - RNA, 19 nt, Artificial Sequence
  Description of Artificial Sequence: Synthetic oligonucleotide
cacuagugguauagggguc

SEQ ID NO: 414120 - RNA, 19 nt, Artificial Sequence
  Description of Artificial Sequence: Synthetic oligonucleotide
uuccccgguguagugacac

SEQ ID NO: 414121 - RNA, 19 nt, Artificial Sequence
  Description of Artificial Sequence: Synthetic oligonucleotide
agaaccaaaccgauaggua

SEQ ID NO: 414122 - RNA, 19 nt, Artificial Sequence
  Description of Artificial Sequence: Synthetic oligonucleotide
acagguaggcuguguuccu

SEQ ID NO: 414123 - RNA, 19 nt, Artificial Sequence
  Description of Artificial Sequence: Synthetic oligonucleotide
cagucuagaaaggaccaga

SEQ ID NO: 414124 - RNA, 19 nt, Artificial Sequence
  Description of Artificial Sequence: Synthetic oligonucleotide
uagcuauuacucggcaguc

SEQ ID NO: 414125 - RNA, 19 nt, Artificial Sequence
  Description of Artificial Sequence: Synthetic oligonucleotide
uacagaucagcggcucuaa

SEQ ID NO: 414126 - RNA, 19 nt, Artificial Sequence
  Description of Artificial Sequence: Synthetic oligonucleotide
agcuauuacucggcagucu

SEQ ID NO: 414127 - RNA, 19 nt, Artificial Sequence
  Description of Artificial Sequence: Synthetic oligonucleotide
auuguacagcccaccccuc

SEQ ID NO: 414128 - RNA, 19 nt, Artificial Sequence
  Description of Artificial Sequence: Synthetic oligonucleotide
aggagacgcggacaggguu

SEQ ID NO: 414129 - RNA, 19 nt, Artificial Sequence
  Description of Artificial Sequence: Synthetic oligonucleotide
aggcuuuccgaaccaggaa

SEQ ID NO: 414130 - RNA, 19 nt, Artificial Sequence
  Description of Artificial Sequence: Synthetic oligonucleotide
gcuuuccgaaccaggaacc

SEQ ID NO: 414131 - RNA, 19 nt, Artificial Sequence
  Description of Artificial Sequence: Synthetic oligonucleotide
cuucccggguggugaauug

SEQ ID NO: 414132 - RNA, 19 nt, Artificial Sequence
  Description of Artificial Sequence: Synthetic oligonucleotide
gugugcuccacguuauaua

SEQ ID NO: 414133 - RNA, 19 nt, Artificial Sequence
  Description of Artificial Sequence: Synthetic oligonucleotide
gcuauuacucggcagucua

SEQ ID NO: 414134 - RNA, 19 nt, Artificial Sequence
  Description of Artificial Sequence: Synthetic oligonucleotide
uaacacuuacagggcggcu

SEQ ID NO: 414135 - RNA, 19 nt, Artificial Sequence
  Description of Artificial Sequence: Synthetic oligonucleotide
gagugcuaacuuuggggcu

SEQ ID NO: 414136 - RNA, 19 nt, Artificial Sequence
  Description of Artificial Sequence: Synthetic oligonucleotide
cguccacuuaaggagaggg

SEQ ID NO: 414137 - RNA, 19 nt, Artificial Sequence
  Description of Artificial Sequence: Synthetic oligonucleotide
cucuagcuauuacucggca

SEQ ID NO: 414138 - RNA, 19 nt, Artificial Sequence
  Description of Artificial Sequence: Synthetic oligonucleotide
ccacuuaaggagaggguuc

SEQ ID NO: 414139 - RNA, 19 nt, Artificial Sequence
  Description of Artificial Sequence: Synthetic oligonucleotide
aaccgauagguaacacuua

SEQ ID NO: 414140 - RNA, 19 nt, Artificial Sequence
  Description of Artificial Sequence: Synthetic oligonucleotide
caccguccacuuaaggaga

SEQ ID NO: 414141 - RNA, 19 nt, Artificial Sequence
  Description of Artificial Sequence: Synthetic oligonucleotide
gucuagaaaggaccagacu

SEQ ID NO: 414142 - RNA, 19 nt, Artificial Sequence
  Description of Artificial Sequence: Synthetic oligonucleotide
agguaggcuguguuccuuu

SEQ ID NO: 414143 - RNA, 19 nt, Artificial Sequence
  Description of Artificial Sequence: Synthetic oligonucleotide
ugcucuaagguggguuauc

SEQ ID NO: 414144 - RNA, 19 nt, Artificial Sequence
  Description of Artificial Sequence: Synthetic oligonucleotide
gaggguuccuuguggauuu

SEQ ID NO: 414145 - RNA, 19 nt, Artificial Sequence
  Description of Artificial Sequence: Synthetic oligonucleotide
ggagacgcggacaggguug

SEQ ID NO: 414146 - RNA, 19 nt, Artificial Sequence
  Description of Artificial Sequence: Synthetic oligonucleotide
gcaauuagucugauuaugu

SEQ ID NO: 414147 - RNA, 19 nt, Artificial Sequence
  Description of Artificial Sequence: Synthetic oligonucleotide
agguuacucgugacuuguc

SEQ ID NO: 414148 - RNA, 19 nt, Artificial Sequence
  Description of Artificial Sequence: Synthetic oligonucleotide
gguuacucgugacuugucu

SEQ ID NO: 414149 - RNA, 19 nt, Artificial Sequence
  Description of Artificial Sequence: Synthetic oligonucleotide
guguacuguuugcucgauc

SEQ ID NO: 414150 - RNA, 19 nt, Artificial Sequence
  Description of Artificial Sequence: Synthetic oligonucleotide
cccaccguccacuuaagga

SEQ ID NO: 414151 - RNA, 19 nt, Artificial Sequence
  Description of Artificial Sequence: Synthetic oligonucleotide
cuguacuccgagugcggca

SEQ ID NO: 414152 - RNA, 19 nt, Artificial Sequence
  Description of Artificial Sequence: Synthetic oligonucleotide
cugcgaguugaagggcacc

SEQ ID NO: 414153 - RNA, 19 nt, Artificial Sequence
  Description of Artificial Sequence: Synthetic oligonucleotide
gcagucuagaaaggaccag

SEQ ID NO: 414154 - RNA, 19 nt, Artificial Sequence
  Description of Artificial Sequence: Synthetic oligonucleotide
ggugcagcauuaaggauua

SEQ ID NO: 414155 - RNA, 19 nt, Artificial Sequence
  Description of Artificial Sequence: Synthetic oligonucleotide
gcucuaagguggguuauca

SEQ ID NO: 414156 - RNA, 19 nt, Artificial Sequence
  Description of Artificial Sequence: Synthetic oligonucleotide
guuuuagcaggguccguuu

SEQ ID NO: 414157 - RNA, 19 nt, Artificial Sequence
  Description of Artificial Sequence: Synthetic oligonucleotide
ggucuaugagcuggacuug

SEQ ID NO: 414158 - RNA, 19 nt, Artificial Sequence
  Description of Artificial Sequence: Synthetic oligonucleotide
gcccacauugaagcagagg

SEQ ID NO: 414159 - RNA, 19 nt, Artificial Sequence
  Description of Artificial Sequence: Synthetic oligonucleotide
guguauccugacccacaga

SEQ ID NO: 414160 - RNA, 19 nt, Artificial Sequence
  Description of Artificial Sequence: Synthetic oligonucleotide
augcucuaagguggguuau

SEQ ID NO: 414161 - RNA, 19 nt, Artificial Sequence
  Description of Artificial Sequence: Synthetic oligonucleotide
acgcugcuuuugcuaccag

SEQ ID NO: 414162 - RNA, 19 nt, Artificial Sequence
  Description of Artificial Sequence: Synthetic oligonucleotide
acguuguuccuaaguuaga

SEQ ID NO: 414163 - RNA, 19 nt, Artificial Sequence
  Description of Artificial Sequence: Synthetic oligonucleotide
ccggguggugaauuggguc

SEQ ID NO: 414164 - RNA, 19 nt, Artificial Sequence
  Description of Artificial Sequence: Synthetic oligonucleotide
ccaagucguccucuccacc

SEQ ID NO: 414165 - RNA, 19 nt, Artificial Sequence
  Description of Artificial Sequence: Synthetic oligonucleotide
uccccgguguagugacacu

SEQ ID NO: 414166 - RNA, 19 nt, Artificial Sequence
  Description of Artificial Sequence: Synthetic oligonucleotide
auuguaccgugcagcucca

SEQ ID NO: 414167 - RNA, 19 nt, Artificial Sequence
  Description of Artificial Sequence: Synthetic oligonucleotide
cagaccuucccggguggug

SEQ ID NO: 414168 - RNA, 19 nt, Artificial Sequence
  Description of Artificial Sequence: Synthetic oligonucleotide
cacuaggagagagacacuu

SEQ ID NO: 414169 - RNA, 19 nt, Artificial Sequence
  Description of Artificial Sequence: Synthetic oligonucleotide
cgcggacaggguuggaucc

SEQ ID NO: 414170 - RNA, 19 nt, Artificial Sequence
  Description of Artificial Sequence: Synthetic oligonucleotide
cagguuacucgugacuugu

SEQ ID NO: 414171 - RNA, 19 nt, Artificial Sequence
  Description of Artificial Sequence: Synthetic oligonucleotide
gucgugcagugacagaguu

SEQ ID NO: 414172 - RNA, 19 nt, Artificial Sequence
  Description of Artificial Sequence: Synthetic oligonucleotide
ccggcaggcgggcuugugg

SEQ ID NO: 414173 - RNA, 19 nt, Artificial Sequence
  Description of Artificial Sequence: Synthetic oligonucleotide
ccgauagguaacacuuaca

SEQ ID NO: 414174 - RNA, 19 nt, Artificial Sequence
  Description of Artificial Sequence: Synthetic oligonucleotide
acagaccuucccggguggu

SEQ ID NO: 414175 - RNA, 19 nt, Artificial Sequence
  Description of Artificial Sequence: Synthetic oligonucleotide
cuuaaggagaggguuccuu

SEQ ID NO: 414176 - RNA, 19 nt, Artificial Sequence
  Description of Artificial Sequence: Synthetic oligonucleotide
uuguaccgugcagcuccac

SEQ ID NO: 414177 - RNA, 19 nt, Artificial Sequence
  Description of Artificial Sequence: Synthetic oligonucleotide
ccaaaccgauagguaacac

SEQ ID NO: 414178 - RNA, 19 nt, Artificial Sequence
  Description of Artificial Sequence: Synthetic oligonucleotide
ccauacuaugauuucguuu

SEQ ID NO: 414179 - RNA, 19 nt, Artificial Sequence
  Description of Artificial Sequence: Synthetic oligonucleotide
acgugugcuccacguuaua

SEQ ID NO: 414180 - RNA, 19 nt, Artificial Sequence
  Description of Artificial Sequence: Synthetic oligonucleotide
gacgcggacaggguuggau

SEQ ID NO: 414181 - RNA, 19 nt, Artificial Sequence
  Description of Artificial Sequence: Synthetic oligonucleotide
cuccaccugucacaaugua

SEQ ID NO: 414182 - RNA, 19 nt, Artificial Sequence
  Description of Artificial Sequence: Synthetic oligonucleotide
gacuggucguugagguuua

SEQ ID NO: 414183 - RNA, 19 nt, Artificial Sequence
  Description of Artificial Sequence: Synthetic oligonucleotide
ccguccuggcucacacacg

SEQ ID NO: 414184 - RNA, 19 nt, Artificial Sequence
  Description of Artificial Sequence: Synthetic oligonucleotide
gugcggcagcagcuuguac

SEQ ID NO: 414185 - RNA, 19 nt, Artificial Sequence
  Description of Artificial Sequence: Synthetic oligonucleotide
cacgugugcuccacguuau

SEQ ID NO: 414186 - RNA, 19 nt, Artificial Sequence
  Description of Artificial Sequence: Synthetic oligonucleotide
cccugcgaguugaagggca

SEQ ID NO: 414187 - RNA, 19 nt, Artificial Sequence
  Description of Artificial Sequence: Synthetic oligonucleotide
ccacuuuaccaggccuugc

SEQ ID NO: 414188 - RNA, 19 nt, Artificial Sequence
  Description of Artificial Sequence: Synthetic oligonucleotide
ccacguuauauaaguacau

SEQ ID NO: 414189 - RNA, 19 nt, Artificial Sequence
  Description of Artificial Sequence: Synthetic oligonucleotide
gaguuuuagcaggguccgu

SEQ ID NO: 414190 - RNA, 19 nt, Artificial Sequence
  Description of Artificial Sequence: Synthetic oligonucleotide
gcuauuggaccguggcaau

SEQ ID NO: 414191 - RNA, 19 nt, Artificial Sequence
  Description of Artificial Sequence: Synthetic oligonucleotide
ggggcucuauauacccaga

SEQ ID NO: 414192 - RNA, 19 nt, Artificial Sequence
  Description of Artificial Sequence: Synthetic oligonucleotide
gcuccacguuauauaagua

SEQ ID NO: 414193 - RNA, 19 nt, Artificial Sequence
  Description of Artificial Sequence: Synthetic oligonucleotide
gcauuggagacugcugaau

SEQ ID NO: 414194 - RNA, 19 nt, Artificial Sequence
  Description of Artificial Sequence: Synthetic oligonucleotide
cagacuggucguugagguu

SEQ ID NO: 414195 - RNA, 19 nt, Artificial Sequence
  Description of Artificial Sequence: Synthetic oligonucleotide
cacacgugugcuccacguu

SEQ ID NO: 414196 - RNA, 19 nt, Artificial Sequence
  Description of Artificial Sequence: Synthetic oligonucleotide
ggucgugcagugacagagu

SEQ ID NO: 414197 - RNA, 19 nt, Artificial Sequence
  Description of Artificial Sequence: Synthetic oligonucleotide
ccucgucacugccacuaaa

SEQ ID NO: 414198 - RNA, 19 nt, Artificial Sequence
  Description of Artificial Sequence: Synthetic oligonucleotide
gcccacuaggagagagaca

SEQ ID NO: 414199 - RNA, 19 nt, Artificial Sequence
  Description of Artificial Sequence: Synthetic oligonucleotide
cccauacuaugauuucguu

SEQ ID NO: 414200 - RNA, 19 nt, Artificial Sequence
  Description of Artificial Sequence: Synthetic oligonucleotide
ggccugcggaaaagcccac

SEQ ID NO: 414201 - RNA, 19 nt, Artificial Sequence
  Description of Artificial Sequence: Synthetic oligonucleotide
aggguccguuuuggcuuua

SEQ ID NO: 414202 - RNA, 19 nt, Artificial Sequence
  Description of Artificial Sequence: Synthetic oligonucleotide
cgccguugccagacugguc

SEQ ID NO: 414203 - RNA, 19 nt, Artificial Sequence
  Description of Artificial Sequence: Synthetic oligonucleotide
ggcgggcuuguggcauuca

SEQ ID NO: 414204 - RNA, 19 nt, Artificial Sequence
  Description of Artificial Sequence: Synthetic oligonucleotide
ccgaaccaggaacccauuu

SEQ ID NO: 414205 - RNA, 19 nt, Artificial Sequence
  Description of Artificial Sequence: Synthetic oligonucleotide
cgugugcuccacguuauau

SEQ ID NO: 414206 - RNA, 19 nt, Artificial Sequence
  Description of Artificial Sequence: Synthetic oligonucleotide
cccugaugaacacguuguu

SEQ ID NO: 414207 - RNA, 19 nt, Artificial Sequence
  Description of Artificial Sequence: Synthetic oligonucleotide
ccuucccggguggugaauu

SEQ ID NO: 414208 - RNA, 19 nt, Artificial Sequence
  Description of Artificial Sequence: Synthetic oligonucleotide
ccgagugcggcagcagcuu

SEQ ID NO: 414209 - RNA, 19 nt, Artificial Sequence
  Description of Artificial Sequence: Synthetic oligonucleotide
aagagauucaggccaauuc

SEQ ID NO: 414210 - RNA, 19 nt, Artificial Sequence
  Description of Artificial Sequence: Synthetic oligonucleotide
agagauucaggccaauucg

SEQ ID NO: 414211 - RNA, 19 nt, Artificial Sequence
  Description of Artificial Sequence: Synthetic oligonucleotide
aagccgacaauauuuaaug

SEQ ID NO: 414212 - RNA, 19 nt, Artificial Sequence
  Description of Artificial Sequence: Synthetic oligonucleotide
agcguugaaguuuauuagc

SEQ ID NO: 414213 - RNA, 19 nt, Artificial Sequence
  Description of Artificial Sequence: Synthetic oligonucleotide
aaugguuggccccagcaag

SEQ ID NO: 414214 - RNA, 19 nt, Artificial Sequence
  Description of Artificial Sequence: Synthetic oligonucleotide
aguaaucagacucagacuu

SEQ ID NO: 414215 - RNA, 19 nt, Artificial Sequence
  Description of Artificial Sequence: Synthetic oligonucleotide
ugaugcagggauccaaucg

SEQ ID NO: 414216 - RNA, 19 nt, Artificial Sequence
  Description of Artificial Sequence: Synthetic oligonucleotide
ugucuuucugugcagauga

SEQ ID NO: 414217 - RNA, 19 nt, Artificial Sequence
  Description of Artificial Sequence: Synthetic oligonucleotide
gaacucaccgaucaucugg

SEQ ID NO: 414218 - RNA, 19 nt, Artificial Sequence
  Description of Artificial Sequence: Synthetic oligonucleotide
gauccaaucggcuucuugc

SEQ ID NO: 414219 - RNA, 19 nt, Artificial Sequence
  Description of Artificial Sequence: Synthetic oligonucleotide
ucaugguuaacuuaccacu

SEQ ID NO: 414220 - RNA, 19 nt, Artificial Sequence
  Description of Artificial Sequence: Synthetic oligonucleotide
gacaagagaaggaugagcc

SEQ ID NO: 414221 - RNA, 19 nt, Artificial Sequence
  Description of Artificial Sequence: Synthetic oligonucleotide
uaucuaauggccaugucuc

SEQ ID NO: 414222 - RNA, 19 nt, Artificial Sequence
  Description of Artificial Sequence: Synthetic oligonucleotide
guagcgaugggccagacug

SEQ ID NO: 414223 - RNA, 19 nt, Artificial Sequence
  Description of Artificial Sequence: Synthetic oligonucleotide
ucucgugucagccuugucc

SEQ ID NO: 414224 - RNA, 19 nt, Artificial Sequence
  Description of Artificial Sequence: Synthetic oligonucleotide
uucgguauggugucguugg

SEQ ID NO: 414225 - RNA, 19 nt, Artificial Sequence
  Description of Artificial Sequence: Synthetic oligonucleotide
ugcagagauacaaagugcu

SEQ ID NO: 414226 - RNA, 19 nt, Artificial Sequence
  Description of Artificial Sequence: Synthetic oligonucleotide
aacacugauguauuuugca

SEQ ID NO: 414227 - RNA, 19 nt, Artificial Sequence
  Description of Artificial Sequence: Synthetic oligonucleotide
cugaaugccucgaugagcc

SEQ ID NO: 414228 - RNA, 19 nt, Artificial Sequence
  Description of Artificial Sequence: Synthetic oligonucleotide
ugagcggucacugaguucc

SEQ ID NO: 414229 - RNA, 19 nt, Artificial Sequence
  Description of Artificial Sequence: Synthetic oligonucleotide
guuaacuuaccacuggcug

SEQ ID NO: 414230 - RNA, 19 nt, Artificial Sequence
  Description of Artificial Sequence: Synthetic oligonucleotide
agagaguacacagccaagc

SEQ ID NO: 414231 - RNA, 19 nt, Artificial Sequence
  Description of Artificial Sequence: Synthetic oligonucleotide
ucauagacucccaauccag

SEQ ID NO: 414232 - RNA, 19 nt, Artificial Sequence
  Description of Artificial Sequence: Synthetic oligonucleotide
aaagggacuccgcgcaggc

SEQ ID NO: 414233 - RNA, 19 nt, Artificial Sequence
  Description of Artificial Sequence: Synthetic oligonucleotide
ugauaucugcuccagggac

SEQ ID NO: 414234 - RNA, 19 nt, Artificial Sequence
  Description of Artificial Sequence: Synthetic oligonucleotide
uucaugguuaacuuaccac

SEQ ID NO: 414235 - RNA, 19 nt, Artificial Sequence
  Description of Artificial Sequence: Synthetic oligonucleotide
aauccagugucuccccggg

SEQ ID NO: 414236 - RNA, 19 nt, Artificial Sequence
  Description of Artificial Sequence: Synthetic oligonucleotide
gagcguugaaguuuauuag

SEQ ID NO: 414237 - RNA, 19 nt, Artificial Sequence
  Description of Artificial Sequence: Synthetic oligonucleotide
ucaaugguaagcaggggaa

SEQ ID NO: 414238 - RNA, 19 nt, Artificial Sequence
  Description of Artificial Sequence: Synthetic oligonucleotide
uaugucaccgaguucuucu

SEQ ID NO: 414239 - RNA, 19 nt, Artificial Sequence
  Description of Artificial Sequence: Synthetic oligonucleotide
aacucaccgaucaucuggc

SEQ ID NO: 414240 - RNA, 19 nt, Artificial Sequence
  Description of Artificial Sequence: Synthetic oligonucleotide
ugggacauugccugggccg

SEQ ID NO: 414241 - RNA, 19 nt, Artificial Sequence
  Description of Artificial Sequence: Synthetic oligonucleotide
gacagcagacgucagccgg

SEQ ID NO: 414242 - RNA, 19 nt, Artificial Sequence
  Description of Artificial Sequence: Synthetic oligonucleotide
uaacuuaccacuggcuggg

SEQ ID NO: 414243 - RNA, 19 nt, Artificial Sequence
  Description of Artificial Sequence: Synthetic oligonucleotide
aguaguccugggcuguacc

SEQ ID NO: 414244 - RNA, 19 nt, Artificial Sequence
  Description of Artificial Sequence: Synthetic oligonucleotide
agagauggugugcuucggc

SEQ ID NO: 414245 - RNA, 19 nt, Artificial Sequence
  Description of Artificial Sequence: Synthetic oligonucleotide
ucgaaaagccggcaguagc

SEQ ID NO: 414246 - RNA, 19 nt, Artificial Sequence
  Description of Artificial Sequence: Synthetic oligonucleotide
caucucguccacaacacag

SEQ ID NO: 414247 - RNA, 19 nt, Artificial Sequence
  Description of Artificial Sequence: Synthetic oligonucleotide
ugguuaacuuaccacuggc

SEQ ID NO: 414248 - RNA, 19 nt, Artificial Sequence
  Description of Artificial Sequence: Synthetic oligonucleotide
cuucaguucccgcuuacgg

SEQ ID NO: 414249 - RNA, 19 nt, Artificial Sequence
  Description of Artificial Sequence: Synthetic oligonucleotide
guuuauuaggguccggaac

SEQ ID NO: 414250 - RNA, 19 nt, Artificial Sequence
  Description of Artificial Sequence: Synthetic oligonucleotide
accucggagguucuugacc

SEQ ID NO: 414251 - RNA, 19 nt, Artificial Sequence
  Description of Artificial Sequence: Synthetic oligonucleotide
cuuaccacuggcugggaag

SEQ ID NO: 414252 - RNA, 19 nt, Artificial Sequence
  Description of Artificial Sequence: Synthetic oligonucleotide
uaaucagacucagacuugc

SEQ ID NO: 414253 - RNA, 19 nt, Artificial Sequence
  Description of Artificial Sequence: Synthetic oligonucleotide
uacgugaccucgacgauga

SEQ ID NO: 414254 - RNA, 19 nt, Artificial Sequence
  Description of Artificial Sequence: Synthetic oligonucleotide
caugguuaacuuaccacug

SEQ ID NO: 414255 - RNA, 19 nt, Artificial Sequence
  Description of Artificial Sequence: Synthetic oligonucleotide
acugauguauuuugcaaau

SEQ ID NO: 414256 - RNA, 19 nt, Artificial Sequence
  Description of Artificial Sequence: Synthetic oligonucleotide
uugauaucugcuccaggga

SEQ ID NO: 414257 - RNA, 19 nt, Artificial Sequence
  Description of Artificial Sequence: Synthetic oligonucleotide
accacuccaacuguuugcc

SEQ ID NO: 414258 - RNA, 19 nt, Artificial Sequence
  Description of Artificial Sequence: Synthetic oligonucleotide
aguucccgcuuacggaucc

SEQ ID NO: 414259 - RNA, 19 nt, Artificial Sequence
  Description of Artificial Sequence: Synthetic oligonucleotide
agauacaaagugcucaguu

SEQ ID NO: 414260 - RNA, 19 nt, Artificial Sequence
  Description of Artificial Sequence: Synthetic oligonucleotide
guaguacugguucucgaag

SEQ ID NO: 414261 - RNA, 19 nt, Artificial Sequence
  Description of Artificial Sequence: Synthetic oligonucleotide
ucgacgaugacgacaggac

SEQ ID NO: 414262 - RNA, 19 nt, Artificial Sequence
  Description of Artificial Sequence: Synthetic oligonucleotide
ugaaccauugauggccagg

SEQ ID NO: 414263 - RNA, 19 nt, Artificial Sequence
  Description of Artificial Sequence: Synthetic oligonucleotide
ucagccggaugccauuggg

SEQ ID NO: 414264 - RNA, 19 nt, Artificial Sequence
  Description of Artificial Sequence: Synthetic oligonucleotide
uggcgugucaggcacgaag

SEQ ID NO: 414265 - RNA, 19 nt, Artificial Sequence
  Description of Artificial Sequence: Synthetic oligonucleotide
ccuucgauggggaagagag

SEQ ID NO: 414266 - RNA, 19 nt, Artificial Sequence
  Description of Artificial Sequence: Synthetic oligonucleotide
acugccguacaccccaggg

SEQ ID NO: 414267 - RNA, 19 nt, Artificial Sequence
  Description of Artificial Sequence: Synthetic oligonucleotide
aaagccgacaauauuuaau

SEQ ID NO: 414268 - RNA, 19 nt, Artificial Sequence
  Description of Artificial Sequence: Synthetic oligonucleotide
aaccucgaaaagccggcag

SEQ ID NO: 414269 - RNA, 19 nt, Artificial Sequence
  Description of Artificial Sequence: Synthetic oligonucleotide
gaucgcgaaggccaggaug

SEQ ID NO: 414270 - RNA, 19 nt, Artificial Sequence
  Description of Artificial Sequence: Synthetic oligonucleotide
uucaguucccgcuuacgga

SEQ ID NO: 414271 - RNA, 19 nt, Artificial Sequence
  Description of Artificial Sequence: Synthetic oligonucleotide
acgguugaacugcuucugc

SEQ ID NO: 414272 - RNA, 19 nt, Artificial Sequence
  Description of Artificial Sequence: Synthetic oligonucleotide
aagcccgugaugcagggau

SEQ ID NO: 414273 - RNA, 19 nt, Artificial Sequence
  Description of Artificial Sequence: Synthetic oligonucleotide
cuuaggagcacagcacugg

SEQ ID NO: 414274 - RNA, 19 nt, Artificial Sequence
  Description of Artificial Sequence: Synthetic oligonucleotide
aaaagccgacaauauuuaa

SEQ ID NO: 414275 - RNA, 19 nt, Artificial Sequence
  Description of Artificial Sequence: Synthetic oligonucleotide
gaugacgacaggacagggg

SEQ ID NO: 414276 - RNA, 19 nt, Artificial Sequence
  Description of Artificial Sequence: Synthetic oligonucleotide
uccuagacgcagcccacgg

SEQ ID NO: 414277 - RNA, 19 nt, Artificial Sequence
  Description of Artificial Sequence: Synthetic oligonucleotide
gacgacaggacaggggagg

SEQ ID NO: 414278 - RNA, 19 nt, Artificial Sequence
  Description of Artificial Sequence: Synthetic oligonucleotide
uaccacuccaacuguuugc

SEQ ID NO: 414279 - RNA, 19 nt, Artificial Sequence
  Description of Artificial Sequence: Synthetic oligonucleotide
gugucguuggaguuggaug

SEQ ID NO: 414280 - RNA, 19 nt, Artificial Sequence
  Description of Artificial Sequence: Synthetic oligonucleotide
acacugauguauuuugcaa

SEQ ID NO: 414281 - RNA, 19 nt, Artificial Sequence
  Description of Artificial Sequence: Synthetic oligonucleotide
agggacuccgcgcaggcag

SEQ ID NO: 414282 - RNA, 19 nt, Artificial Sequence
  Description of Artificial Sequence: Synthetic oligonucleotide
acauuggggcuguacaugu

SEQ ID NO: 414283 - RNA, 19 nt, Artificial Sequence
  Description of Artificial Sequence: Synthetic oligonucleotide
cuuugauaucugcuccagg

SEQ ID NO: 414284 - RNA, 19 nt, Artificial Sequence
  Description of Artificial Sequence: Synthetic oligonucleotide
aguaucuaauggccauguc

SEQ ID NO: 414285 - RNA, 19 nt, Artificial Sequence
  Description of Artificial Sequence: Synthetic oligonucleotide
uccaaucggcuucuugccc

SEQ ID NO: 414286 - RNA, 19 nt, Artificial Sequence
  Description of Artificial Sequence: Synthetic oligonucleotide
agcuguaugucaccgaguu

SEQ ID NO: 414287 - RNA, 19 nt, Artificial Sequence
  Description of Artificial Sequence: Synthetic oligonucleotide
ggacuugcaugccauagag

SEQ ID NO: 414288 - RNA, 19 nt, Artificial Sequence
  Description of Artificial Sequence: Synthetic oligonucleotide
ucacgguugaacugcuucu

SEQ ID NO: 414289 - RNA, 19 nt, Artificial Sequence
  Description of Artificial Sequence: Synthetic oligonucleotide
aggauugggagcguugaag

SEQ ID NO: 414290 - RNA, 19 nt, Artificial Sequence
  Description of Artificial Sequence: Synthetic oligonucleotide
aagguccuagacgcagccc

SEQ ID NO: 414291 - RNA, 19 nt, Artificial Sequence
  Description of Artificial Sequence: Synthetic oligonucleotide
cuagacgcagcccacgguc

SEQ ID NO: 414292 - RNA, 19 nt, Artificial Sequence
  Description of Artificial Sequence: Synthetic oligonucleotide
augugugccuggaacuucc

SEQ ID NO: 414293 - RNA, 19 nt, Artificial Sequence
  Description of Artificial Sequence: Synthetic oligonucleotide
cucuauccgguguuucucc

SEQ ID NO: 414294 - RNA, 19 nt, Artificial Sequence
  Description of Artificial Sequence: Synthetic oligonucleotide
caauccagugucuccccgg

SEQ ID NO: 414295 - RNA, 19 nt, Artificial Sequence
  Description of Artificial Sequence: Synthetic oligonucleotide
aacagaggacagacaguac

SEQ ID NO: 414296 - RNA, 19 nt, Artificial Sequence
  Description of Artificial Sequence: Synthetic oligonucleotide
ggaugagccaugccgacag

SEQ ID NO: 414297 - RNA, 19 nt, Artificial Sequence
  Description of Artificial Sequence: Synthetic oligonucleotide
uuauuagcacuuugauauc

SEQ ID NO: 414298 - RNA, 19 nt, Artificial Sequence
  Description of Artificial Sequence: Synthetic oligonucleotide
ucgagcacaucacgguuga

SEQ ID NO: 414299 - RNA, 19 nt, Artificial Sequence
  Description of Artificial Sequence: Synthetic oligonucleotide
ugaggauugggagcguuga

SEQ ID NO: 414300 - RNA, 19 nt, Artificial Sequence
  Description of Artificial Sequence: Synthetic oligonucleotide
ugggguuuauuaggguccg

SEQ ID NO: 414301 - RNA, 19 nt, Artificial Sequence
  Description of Artificial Sequence: Synthetic oligonucleotide
aagagaaggaugagccaug

SEQ ID NO: 414302 - RNA, 19 nt, Artificial Sequence
  Description of Artificial Sequence: Synthetic oligonucleotide
auagagggagaaggacugc

SEQ ID NO: 414303 - RNA, 19 nt, Artificial Sequence
  Description of Artificial Sequence: Synthetic oligonucleotide
acucuauccgguguuucuc

SEQ ID NO: 414304 - RNA, 19 nt, Artificial Sequence
  Description of Artificial Sequence: Synthetic oligonucleotide
uuacggauccgcucauaga

SEQ ID NO: 414305 - RNA, 19 nt, Artificial Sequence
  Description of Artificial Sequence: Synthetic oligonucleotide
cacaugguccucauugguc

SEQ ID NO: 414306 - RNA, 19 nt, Artificial Sequence
  Description of Artificial Sequence: Synthetic oligonucleotide
accucgacgaugacgacag

SEQ ID NO: 414307 - RNA, 19 nt, Artificial Sequence
  Description of Artificial Sequence: Synthetic oligonucleotide
uggggaagagagaguacac

SEQ ID NO: 414308 - RNA, 19 nt, Artificial Sequence
  Description of Artificial Sequence: Synthetic oligonucleotide
uuaggguccggaaccucga

SEQ ID NO: 414309 - RNA, 19 nt, Artificial Sequence
  Description of Artificial Sequence: Synthetic oligonucleotide
aguagcagaccagccuucg

SEQ ID NO: 414310 - RNA, 19 nt, Artificial Sequence
  Description of Artificial Sequence: Synthetic oligonucleotide
caguacucagggccuaagg

SEQ ID NO: 414311 - RNA, 19 nt, Artificial Sequence
  Description of Artificial Sequence: Synthetic oligonucleotide
gacuugcaugccauagagg

SEQ ID NO: 414312 - RNA, 19 nt, Artificial Sequence
  Description of Artificial Sequence: Synthetic oligonucleotide
uuaccacuggcugggaaga

SEQ ID NO: 414313 - RNA, 19 nt, Artificial Sequence
  Description of Artificial Sequence: Synthetic oligonucleotide
agccgacaauauuuaaugu

SEQ ID NO: 414314 - RNA, 19 nt, Artificial Sequence
  Description of Artificial Sequence: Synthetic oligonucleotide
ucuauccgguguuucucca

SEQ ID NO: 414315 - RNA, 19 nt, Artificial Sequence
  Description of Artificial Sequence: Synthetic oligonucleotide
uugggagcguugaaguuua

SEQ ID NO: 414316 - RNA, 19 nt, Artificial Sequence
  Description of Artificial Sequence: Synthetic oligonucleotide
caagguccuagacgcagcc

SEQ ID NO: 414317 - RNA, 19 nt, Artificial Sequence
  Description of Artificial Sequence: Synthetic oligonucleotide
ucgaucugagcggucacug

SEQ ID NO: 414318 - RNA, 19 nt, Artificial Sequence
  Description of Artificial Sequence: Synthetic oligonucleotide
uucggcagcucgugucucg

SEQ ID NO: 414319 - RNA, 19 nt, Artificial Sequence
  Description of Artificial Sequence: Synthetic oligonucleotide
ugcgcucauaggcacucug

SEQ ID NO: 414320 - RNA, 19 nt, Artificial Sequence
  Description of Artificial Sequence: Synthetic oligonucleotide
aucgcgaaggccaggauga

SEQ ID NO: 414321 - RNA, 19 nt, Artificial Sequence
  Description of Artificial Sequence: Synthetic oligonucleotide
acgaugacgacaggacagg

SEQ ID NO: 414322 - RNA, 19 nt, Artificial Sequence
  Description of Artificial Sequence: Synthetic oligonucleotide
ugccuuuggagggccaccg

SEQ ID NO: 414323 - RNA, 19 nt, Artificial Sequence
  Description of Artificial Sequence: Synthetic oligonucleotide
uaggcacucugccucuuga

SEQ ID NO: 414324 - RNA, 19 nt, Artificial Sequence
  Description of Artificial Sequence: Synthetic oligonucleotide
ggagggaaaugguuggccc

SEQ ID NO: 414325 - RNA, 19 nt, Artificial Sequence
  Description of Artificial Sequence: Synthetic oligonucleotide
agaugacaagagaaggaug

SEQ ID NO: 414326 - RNA, 19 nt, Artificial Sequence
  Description of Artificial Sequence: Synthetic oligonucleotide
uguuaccacuccaacuguu

SEQ ID NO: 414327 - RNA, 19 nt, Artificial Sequence
  Description of Artificial Sequence: Synthetic oligonucleotide
ucagacuugcucugccggu

SEQ ID NO: 414328 - RNA, 19 nt, Artificial Sequence
  Description of Artificial Sequence: Synthetic oligonucleotide
caugcuugggcugcuuugc

SEQ ID NO: 414329 - RNA, 19 nt, Artificial Sequence
  Description of Artificial Sequence: Synthetic oligonucleotide
caaugagauacuggaugcc

SEQ ID NO: 414330 - RNA, 19 nt, Artificial Sequence
  Description of Artificial Sequence: Synthetic oligonucleotide
ugaaugccucgaugagccg

SEQ ID NO: 414331 - RNA, 19 nt, Artificial Sequence
  Description of Artificial Sequence: Synthetic oligonucleotide
uggcuggaagggcugaaaa

SEQ ID NO: 414332 - RNA, 19 nt, Artificial Sequence
  Description of Artificial Sequence: Synthetic oligonucleotide
aggacuugcaugccauaga

SEQ ID NO: 414333 - RNA, 19 nt, Artificial Sequence
  Description of Artificial Sequence: Synthetic oligonucleotide
ugggcucaugaucucuugu

SEQ ID NO: 414334 - RNA, 19 nt, Artificial Sequence
  Description of Artificial Sequence: Synthetic oligonucleotide
auugggagcguugaaguuu

SEQ ID NO: 414335 - RNA, 19 nt, Artificial Sequence
  Description of Artificial Sequence: Synthetic oligonucleotide
cucucgagagggucugggg

SEQ ID NO: 414336 - RNA, 19 nt, Artificial Sequence
  Description of Artificial Sequence: Synthetic oligonucleotide
uggguuccggaacugccgu

SEQ ID NO: 414337 - RNA, 19 nt, Artificial Sequence
  Description of Artificial Sequence: Synthetic oligonucleotide
uagacgcagcccacgguca

SEQ ID NO: 414338 - RNA, 19 nt, Artificial Sequence
  Description of Artificial Sequence: Synthetic oligonucleotide
agaguaucuaauggccaug

SEQ ID NO: 414339 - RNA, 19 nt, Artificial Sequence
  Description of Artificial Sequence: Synthetic oligonucleotide
auguuaccacuccaacugu

SEQ ID NO: 414340 - RNA, 19 nt, Artificial Sequence
  Description of Artificial Sequence: Synthetic oligonucleotide
ugaaguuuauuagcacuuu

SEQ ID NO: 414341 - RNA, 19 nt, Artificial Sequence
  Description of Artificial Sequence: Synthetic oligonucleotide
gaguuggaugugcuguuga

SEQ ID NO: 414342 - RNA, 19 nt, Artificial Sequence
  Description of Artificial Sequence: Synthetic oligonucleotide
cagggauccaaucggcuuc

SEQ ID NO: 414343 - RNA, 19 nt, Artificial Sequence
  Description of Artificial Sequence: Synthetic oligonucleotide
gacucggaugugugccugg

SEQ ID NO: 414344 - RNA, 19 nt, Artificial Sequence
  Description of Artificial Sequence: Synthetic oligonucleotide
cagccggaugccauugggg

SEQ ID NO: 414345 - RNA, 19 nt, Artificial Sequence
  Description of Artificial Sequence: Synthetic oligonucleotide
guaaucagacucagacuug

SEQ ID NO: 414346 - RNA, 19 nt, Artificial Sequence
  Description of Artificial Sequence: Synthetic oligonucleotide
aucugaguaaucagacuca

SEQ ID NO: 414347 - RNA, 19 nt, Artificial Sequence
  Description of Artificial Sequence: Synthetic oligonucleotide
aguuggaugugcuguugau

SEQ ID NO: 414348 - RNA, 19 nt, Artificial Sequence
  Description of Artificial Sequence: Synthetic oligonucleotide
ugagcaggaugaucgcgaa

SEQ ID NO: 414349 - RNA, 19 nt, Artificial Sequence
  Description of Artificial Sequence: Synthetic oligonucleotide
guccggaaccucgaaaagc

SEQ ID NO: 414350 - RNA, 19 nt, Artificial Sequence
  Description of Artificial Sequence: Synthetic oligonucleotide
ggguugcagacacaguacc

SEQ ID NO: 414351 - RNA, 19 nt, Artificial Sequence
  Description of Artificial Sequence: Synthetic oligonucleotide
auugccugggccgcacgac

SEQ ID NO: 414352 - RNA, 19 nt, Artificial Sequence
  Description of Artificial Sequence: Synthetic oligonucleotide
cucgugucucgugucagcc

SEQ ID NO: 414353 - RNA, 19 nt, Artificial Sequence
  Description of Artificial Sequence: Synthetic oligonucleotide
uggcugaaccauugauggc

SEQ ID NO: 414354 - RNA, 19 nt, Artificial Sequence
  Description of Artificial Sequence: Synthetic oligonucleotide
ggccuaaggaaagcaaggg

SEQ ID NO: 414355 - RNA, 19 nt, Artificial Sequence
  Description of Artificial Sequence: Synthetic oligonucleotide
acucaaguucaugguuaac

SEQ ID NO: 414356 - RNA, 19 nt, Artificial Sequence
  Description of Artificial Sequence: Synthetic oligonucleotide
agggagaaggacugccgga

SEQ ID NO: 414357 - RNA, 19 nt, Artificial Sequence
  Description of Artificial Sequence: Synthetic oligonucleotide
cuaaggcccaguaguccug

SEQ ID NO: 414358 - RNA, 19 nt, Artificial Sequence
  Description of Artificial Sequence: Synthetic oligonucleotide
ucguuggaguuggaugugc

SEQ ID NO: 414359 - RNA, 19 nt, Artificial Sequence
  Description of Artificial Sequence: Synthetic oligonucleotide
augguaagcaggggaaggu

SEQ ID NO: 414360 - RNA, 19 nt, Artificial Sequence
  Description of Artificial Sequence: Synthetic oligonucleotide
uccgacucuauccgguguu

SEQ ID NO: 414361 - RNA, 19 nt, Artificial Sequence
  Description of Artificial Sequence: Synthetic oligonucleotide
agaacaaacucaaguucau

SEQ ID NO: 414362 - RNA, 19 nt, Artificial Sequence
  Description of Artificial Sequence: Synthetic oligonucleotide
agcaagccagcaggguagc

SEQ ID NO: 414363 - RNA, 19 nt, Artificial Sequence
  Description of Artificial Sequence: Synthetic oligonucleotide
ccagcuccgacucuauccg

SEQ ID NO: 414364 - RNA, 19 nt, Artificial Sequence
  Description of Artificial Sequence: Synthetic oligonucleotide
acgcucaaugagauacugg

SEQ ID NO: 414365 - RNA, 19 nt, Artificial Sequence
  Description of Artificial Sequence: Synthetic oligonucleotide
cacuuugauaucugcucca

SEQ ID NO: 414366 - RNA, 19 nt, Artificial Sequence
  Description of Artificial Sequence: Synthetic oligonucleotide
gggccuaaggaaagcaagg

SEQ ID NO: 414367 - RNA, 19 nt, Artificial Sequence
  Description of Artificial Sequence: Synthetic oligonucleotide
uggaugugcuguugaugcu

SEQ ID NO: 414368 - RNA, 19 nt, Artificial Sequence
  Description of Artificial Sequence: Synthetic oligonucleotide
aaucagacucagacuugcu

SEQ ID NO: 414369 - RNA, 19 nt, Artificial Sequence
  Description of Artificial Sequence: Synthetic oligonucleotide
cuaggcuuaggagcacagc

SEQ ID NO: 414370 - RNA, 19 nt, Artificial Sequence
  Description of Artificial Sequence: Synthetic oligonucleotide
gagcaggaugaucgcgaag

SEQ ID NO: 414371 - RNA, 19 nt, Artificial Sequence
  Description of Artificial Sequence: Synthetic oligonucleotide
augaucgcgaaggccagga

SEQ ID NO: 414372 - RNA, 19 nt, Artificial Sequence
  Description of Artificial Sequence: Synthetic oligonucleotide
aagccacgcucaaugagau

SEQ ID NO: 414373 - RNA, 19 nt, Artificial Sequence
  Description of Artificial Sequence: Synthetic oligonucleotide
uguaugucaccgaguucuu

SEQ ID NO: 414374 - RNA, 19 nt, Artificial Sequence
  Description of Artificial Sequence: Synthetic oligonucleotide
cagaucugcugguacguga

SEQ ID NO: 414375 - RNA, 19 nt, Artificial Sequence
  Description of Artificial Sequence: Synthetic oligonucleotide
agacgcagcccacggucag

SEQ ID NO: 414376 - RNA, 19 nt, Artificial Sequence
  Description of Artificial Sequence: Synthetic oligonucleotide
uggacucggaugugugccu

SEQ ID NO: 414377 - RNA, 19 nt, Artificial Sequence
  Description of Artificial Sequence: Synthetic oligonucleotide
aaucggcuucuugcccacg

SEQ ID NO: 414378 - RNA, 19 nt, Artificial Sequence
  Description of Artificial Sequence: Synthetic oligonucleotide
acuuaccacuggcugggaa

SEQ ID NO: 414379 - RNA, 19 nt, Artificial Sequence
  Description of Artificial Sequence: Synthetic oligonucleotide
uaccgcuggcugaaugccu

SEQ ID NO: 414380 - RNA, 19 nt, Artificial Sequence
  Description of Artificial Sequence: Synthetic oligonucleotide
gacucuauccgguguuucu

SEQ ID NO: 414381 - RNA, 19 nt, Artificial Sequence
  Description of Artificial Sequence: Synthetic oligonucleotide
augaucucuugugguuggg

SEQ ID NO: 414382 - RNA, 19 nt, Artificial Sequence
  Description of Artificial Sequence: Synthetic oligonucleotide
gaccucgacgaugacgaca

SEQ ID NO: 414383 - RNA, 19 nt, Artificial Sequence
  Description of Artificial Sequence: Synthetic oligonucleotide
ggaaccucgaaaagccggc

SEQ ID NO: 414384 - RNA, 19 nt, Artificial Sequence
  Description of Artificial Sequence: Synthetic oligonucleotide
gcugaaugccucgaugagc

SEQ ID NO: 414385 - RNA, 19 nt, Artificial Sequence
  Description of Artificial Sequence: Synthetic oligonucleotide
ucuuccgguccugaggauu

SEQ ID NO: 414386 - RNA, 19 nt, Artificial Sequence
  Description of Artificial Sequence: Synthetic oligonucleotide
cacgguugaacugcuucug

SEQ ID NO: 414387 - RNA, 19 nt, Artificial Sequence
  Description of Artificial Sequence: Synthetic oligonucleotide
gucagccggaugccauugg

SEQ ID NO: 414388 - RNA, 19 nt, Artificial Sequence
  Description of Artificial Sequence: Synthetic oligonucleotide
ucgugucucgugucagccu

SEQ ID NO: 414389 - RNA, 19 nt, Artificial Sequence
  Description of Artificial Sequence: Synthetic oligonucleotide
ggauccaaucggcuucuug

SEQ ID NO: 414390 - RNA, 19 nt, Artificial Sequence
  Description of Artificial Sequence: Synthetic oligonucleotide
ucucagccgugguucuggc

SEQ ID NO: 414391 - RNA, 19 nt, Artificial Sequence
  Description of Artificial Sequence: Synthetic oligonucleotide
gguuuauuaggguccggaa

SEQ ID NO: 414392 - RNA, 19 nt, Artificial Sequence
  Description of Artificial Sequence: Synthetic oligonucleotide
cucgugucagccuuguccu

SEQ ID NO: 414393 - RNA, 19 nt, Artificial Sequence
  Description of Artificial Sequence: Synthetic oligonucleotide
cuucgaucugagcggucac

SEQ ID NO: 414394 - RNA, 19 nt, Artificial Sequence
  Description of Artificial Sequence: Synthetic oligonucleotide
caggcacgaagccacgcuc

SEQ ID NO: 414395 - RNA, 19 nt, Artificial Sequence
  Description of Artificial Sequence: Synthetic oligonucleotide
cugaaccauugauggccag

SEQ ID NO: 414396 - RNA, 19 nt, Artificial Sequence
  Description of Artificial Sequence: Synthetic oligonucleotide
caaucggcuucuugcccac

SEQ ID NO: 414397 - RNA, 19 nt, Artificial Sequence
  Description of Artificial Sequence: Synthetic oligonucleotide
gguccggaaccucgaaaag

SEQ ID NO: 414398 - RNA, 19 nt, Artificial Sequence
  Description of Artificial Sequence: Synthetic oligonucleotide
ggauugggagcguugaagu

SEQ ID NO: 414399 - RNA, 19 nt, Artificial Sequence
  Description of Artificial Sequence: Synthetic oligonucleotide
cacaccucggagguucuug

SEQ ID NO: 414400 - RNA, 19 nt, Artificial Sequence
  Description of Artificial Sequence: Synthetic oligonucleotide
ucccgcuuacggauccgcu

SEQ ID NO: 414401 - RNA, 19 nt, Artificial Sequence
  Description of Artificial Sequence: Synthetic oligonucleotide
cugaguaaucagacucaga

SEQ ID NO: 414402 - RNA, 19 nt, Artificial Sequence
  Description of Artificial Sequence: Synthetic oligonucleotide
uggcuggcgggauuugcuc

SEQ ID NO: 414403 - RNA, 19 nt, Artificial Sequence
  Description of Artificial Sequence: Synthetic oligonucleotide
gcguugaaguuuauuagca

SEQ ID NO: 414404 - RNA, 19 nt, Artificial Sequence
  Description of Artificial Sequence: Synthetic oligonucleotide
caguaccgcuggcugaaug

SEQ ID NO: 414405 - RNA, 19 nt, Artificial Sequence
  Description of Artificial Sequence: Synthetic oligonucleotide
ggcgugucaggcacgaagc

SEQ ID NO: 414406 - RNA, 19 nt, Artificial Sequence
  Description of Artificial Sequence: Synthetic oligonucleotide
uucccgcuuacggauccgc

SEQ ID NO: 414407 - RNA, 19 nt, Artificial Sequence
  Description of Artificial Sequence: Synthetic oligonucleotide
ucuggccgcuccagagaug

SEQ ID NO: 414408 - RNA, 19 nt, Artificial Sequence
  Description of Artificial Sequence: Synthetic oligonucleotide
agcucgugucucgugucag

SEQ ID NO: 414409 - RNA, 19 nt, Artificial Sequence
  Description of Artificial Sequence: Synthetic oligonucleotide
gggguaguacugguucucg

SEQ ID NO: 414410 - RNA, 19 nt, Artificial Sequence
  Description of Artificial Sequence: Synthetic oligonucleotide
cagagauggugugcuucgg

SEQ ID NO: 414411 - RNA, 19 nt, Artificial Sequence
  Description of Artificial Sequence: Synthetic oligonucleotide
guccuagacgcagcccacg

SEQ ID NO: 414412 - RNA, 19 nt, Artificial Sequence
  Description of Artificial Sequence: Synthetic oligonucleotide
uaagcaggggaaggugcuc

SEQ ID NO: 414413 - RNA, 19 nt, Artificial Sequence
  Description of Artificial Sequence: Synthetic oligonucleotide
ggguccggaaccucgaaaa

SEQ ID NO: 414414 - RNA, 19 nt, Artificial Sequence
  Description of Artificial Sequence: Synthetic oligonucleotide
gacgcagcccacggucagg

SEQ ID NO: 414415 - RNA, 19 nt, Artificial Sequence
  Description of Artificial Sequence: Synthetic oligonucleotide
aggguccggaaccucgaaa

SEQ ID NO: 414416 - RNA, 19 nt, Artificial Sequence
  Description of Artificial Sequence: Synthetic oligonucleotide
guacaccccaggguugcag

SEQ ID NO: 414417 - RNA, 19 nt, Artificial Sequence
  Description of Artificial Sequence: Synthetic oligonucleotide
ugcuaucauuguccccauc

SEQ ID NO: 414418 - RNA, 19 nt, Artificial Sequence
  Description of Artificial Sequence: Synthetic oligonucleotide
ggaacucaccgaucaucug

SEQ ID NO: 414419 - RNA, 19 nt, Artificial Sequence
  Description of Artificial Sequence: Synthetic oligonucleotide
cuucgauggggaagagaga

SEQ ID NO: 414420 - RNA, 19 nt, Artificial Sequence
  Description of Artificial Sequence: Synthetic oligonucleotide
uuccgguccugaggauugg

SEQ ID NO: 414421 - RNA, 19 nt, Artificial Sequence
  Description of Artificial Sequence: Synthetic oligonucleotide
acuggcgugucaggcacga

SEQ ID NO: 414422 - RNA, 19 nt, Artificial Sequence
  Description of Artificial Sequence: Synthetic oligonucleotide
uaggguccggaaccucgaa

SEQ ID NO: 414423 - RNA, 19 nt, Artificial Sequence
  Description of Artificial Sequence: Synthetic oligonucleotide
gaggauugggagcguugaa

SEQ ID NO: 414424 - RNA, 19 nt, Artificial Sequence
  Description of Artificial Sequence: Synthetic oligonucleotide
gcuucucaacccuucugca

SEQ ID NO: 414425 - RNA, 19 nt, Artificial Sequence
  Description of Artificial Sequence: Synthetic oligonucleotide
ccuaggcuuaggagcacag

SEQ ID NO: 414426 - RNA, 19 nt, Artificial Sequence
  Description of Artificial Sequence: Synthetic oligonucleotide
gauugggagcguugaaguu

SEQ ID NO: 414427 - RNA, 19 nt, Artificial Sequence
  Description of Artificial Sequence: Synthetic oligonucleotide
agcuccgacucuauccggu

SEQ ID NO: 414428 - RNA, 19 nt, Artificial Sequence
  Description of Artificial Sequence: Synthetic oligonucleotide
agggauccaaucggcuucu

SEQ ID NO: 414429 - RNA, 19 nt, Artificial Sequence
  Description of Artificial Sequence: Synthetic oligonucleotide
guagcagaccagccuucga

SEQ ID NO: 414430 - RNA, 19 nt, Artificial Sequence
  Description of Artificial Sequence: Synthetic oligonucleotide
ggaaaugguuggccccagc

SEQ ID NO: 414431 - RNA, 19 nt, Artificial Sequence
  Description of Artificial Sequence: Synthetic oligonucleotide
guaugucaccgaguucuuc

SEQ ID NO: 414432 - RNA, 19 nt, Artificial Sequence
  Description of Artificial Sequence: Synthetic oligonucleotide
ggccaauucgguauggugu

SEQ ID NO: 414433 - RNA, 19 nt, Artificial Sequence
  Description of Artificial Sequence: Synthetic oligonucleotide
augcuaucauuguccccau

SEQ ID NO: 414434 - RNA, 19 nt, Artificial Sequence
  Description of Artificial Sequence: Synthetic oligonucleotide
ccggaugccauugggguag

SEQ ID NO: 414435 - RNA, 19 nt, Artificial Sequence
  Description of Artificial Sequence: Synthetic oligonucleotide
aggcacgaagccacgcuca

SEQ ID NO: 414436 - RNA, 19 nt, Artificial Sequence
  Description of Artificial Sequence: Synthetic oligonucleotide
aacuuaccacuggcuggga

SEQ ID NO: 414437 - RNA, 19 nt, Artificial Sequence
  Description of Artificial Sequence: Synthetic oligonucleotide
gccgacaauauuuaauguu

SEQ ID NO: 414438 - RNA, 19 nt, Artificial Sequence
  Description of Artificial Sequence: Synthetic oligonucleotide
ccaaucggcuucuugccca

SEQ ID NO: 414439 - RNA, 19 nt, Artificial Sequence
  Description of Artificial Sequence: Synthetic oligonucleotide
gacaugcagcgcaguuccc

SEQ ID NO: 414440 - RNA, 19 nt, Artificial Sequence
  Description of Artificial Sequence: Synthetic oligonucleotide
ugaccucgacgaugacgac

SEQ ID NO: 414441 - RNA, 19 nt, Artificial Sequence
  Description of Artificial Sequence: Synthetic oligonucleotide
acgugaccucgacgaugac

SEQ ID NO: 414442 - RNA, 19 nt, Artificial Sequence
  Description of Artificial Sequence: Synthetic oligonucleotide
gaugugcuguugaugcuau

SEQ ID NO: 414443 - RNA, 19 nt, Artificial Sequence
  Description of Artificial Sequence: Synthetic oligonucleotide
guucccgcuuacggauccg

SEQ ID NO: 414444 - RNA, 19 nt, Artificial Sequence
  Description of Artificial Sequence: Synthetic oligonucleotide
ucgugucagccuuguccuc

SEQ ID NO: 414445 - RNA, 19 nt, Artificial Sequence
  Description of Artificial Sequence: Synthetic oligonucleotide
gcucaugaucucuuguggu

SEQ ID NO: 414446 - RNA, 19 nt, Artificial Sequence
  Description of Artificial Sequence: Synthetic oligonucleotide
aggccgcaacucaggcucc

SEQ ID NO: 414447 - RNA, 19 nt, Artificial Sequence
  Description of Artificial Sequence: Synthetic oligonucleotide
gcgugucaggcacgaagcc

SEQ ID NO: 414448 - RNA, 19 nt, Artificial Sequence
  Description of Artificial Sequence: Synthetic oligonucleotide
cacaguaccgcuggcugaa

SEQ ID NO: 414449 - RNA, 19 nt, Artificial Sequence
  Description of Artificial Sequence: Synthetic oligonucleotide
gguuggcugaaccauugau

SEQ ID NO: 414450 - RNA, 19 nt, Artificial Sequence
  Description of Artificial Sequence: Synthetic oligonucleotide
gcuccgacucuauccggug

SEQ ID NO: 414451 - RNA, 19 nt, Artificial Sequence
  Description of Artificial Sequence: Synthetic oligonucleotide
gcucgugucucgugucagc

SEQ ID NO: 414452 - RNA, 19 nt, Artificial Sequence
  Description of Artificial Sequence: Synthetic oligonucleotide
ggggaaauaucuucaccau

SEQ ID NO: 414453 - RNA, 19 nt, Artificial Sequence
  Description of Artificial Sequence: Synthetic oligonucleotide
ccaauucgguauggugucg

SEQ ID NO: 414454 - RNA, 19 nt, Artificial Sequence
  Description of Artificial Sequence: Synthetic oligonucleotide
ccgcaggucaucagugaac

SEQ ID NO: 414455 - RNA, 19 nt, Artificial Sequence
  Description of Artificial Sequence: Synthetic oligonucleotide
cccacggucaggcggcagc

SEQ ID NO: 414456 - RNA, 19 nt, Artificial Sequence
  Description of Artificial Sequence: Synthetic oligonucleotide
ccgacaggggauggggugg

SEQ ID NO: 414457 - RNA, 19 nt, Artificial Sequence
  Description of Artificial Sequence: Synthetic oligonucleotide
ggauccgcucauagacucc

SEQ ID NO: 414458 - RNA, 19 nt, Artificial Sequence
  Description of Artificial Sequence: Synthetic oligonucleotide
ccggagggcuucaucuagc

SEQ ID NO: 414459 - RNA, 19 nt, Artificial Sequence
  Description of Artificial Sequence: Synthetic oligonucleotide
gcugaaccauugauggcca

SEQ ID NO: 414460 - RNA, 19 nt, Artificial Sequence
  Description of Artificial Sequence: Synthetic oligonucleotide
aggguagcgaugggccaga

SEQ ID NO: 414461 - RNA, 19 nt, Artificial Sequence
  Description of Artificial Sequence: Synthetic oligonucleotide
gcgcucauaggcacucugc

SEQ ID NO: 414462 - RNA, 19 nt, Artificial Sequence
  Description of Artificial Sequence: Synthetic oligonucleotide
cccgcuuacggauccgcuc

SEQ ID NO: 414463 - RNA, 19 nt, Artificial Sequence
  Description of Artificial Sequence: Synthetic oligonucleotide
gaccagccuucgaugggga

SEQ ID NO: 414464 - RNA, 19 nt, Artificial Sequence
  Description of Artificial Sequence: Synthetic oligonucleotide
ggacucggaugugugccug

SEQ ID NO: 414465 - RNA, 19 nt, Artificial Sequence
  Description of Artificial Sequence: Synthetic oligonucleotide
gugucucgugucagccuug

SEQ ID NO: 414466 - RNA, 19 nt, Artificial Sequence
  Description of Artificial Sequence: Synthetic oligonucleotide
gggguuuauuaggguccgg

SEQ ID NO: 414467 - RNA, 19 nt, Artificial Sequence
  Description of Artificial Sequence: Synthetic oligonucleotide
ccgcuuacggauccgcuca

SEQ ID NO: 414468 - RNA, 19 nt, Artificial Sequence
  Description of Artificial Sequence: Synthetic oligonucleotide
accgaucaucuggcggcug

SEQ ID NO: 414469 - RNA, 19 nt, Artificial Sequence
  Description of Artificial Sequence: Synthetic oligonucleotide
ugggagcguugaaguuuau

SEQ ID NO: 414470 - RNA, 19 nt, Artificial Sequence
  Description of Artificial Sequence: Synthetic oligonucleotide
gaccagugccaggugacau

SEQ ID NO: 414471 - RNA, 19 nt, Artificial Sequence
  Description of Artificial Sequence: Synthetic oligonucleotide
cagccaagcccgugaugca

SEQ ID NO: 414472 - RNA, 19 nt, Artificial Sequence
  Description of Artificial Sequence: Synthetic oligonucleotide
cagacucccgcaggucauc

SEQ ID NO: 414473 - RNA, 19 nt, Artificial Sequence
  Description of Artificial Sequence: Synthetic oligonucleotide
cugccguacaccccagggu

SEQ ID NO: 414474 - RNA, 19 nt, Artificial Sequence
  Description of Artificial Sequence: Synthetic oligonucleotide
agccacgcucaaugagaua

SEQ ID NO: 414475 - RNA, 19 nt, Artificial Sequence
  Description of Artificial Sequence: Synthetic oligonucleotide
gcguugcagcaggaagugg

SEQ ID NO: 414476 - RNA, 19 nt, Artificial Sequence
  Description of Artificial Sequence: Synthetic oligonucleotide
ggccgcacgaccaccuuuc

SEQ ID NO: 414477 - RNA, 19 nt, Artificial Sequence
  Description of Artificial Sequence: Synthetic oligonucleotide
cuauccgguguuucuccau

SEQ ID NO: 414478 - RNA, 19 nt, Artificial Sequence
  Description of Artificial Sequence: Synthetic oligonucleotide
gguccuagacgcagcccac

SEQ ID NO: 414479 - RNA, 19 nt, Artificial Sequence
  Description of Artificial Sequence: Synthetic oligonucleotide
ccgugguucuggccgcucc

SEQ ID NO: 414480 - RNA, 19 nt, Artificial Sequence
  Description of Artificial Sequence: Synthetic oligonucleotide
gucucgugucagccuuguc

SEQ ID NO: 414481 - RNA, 19 nt, Artificial Sequence
  Description of Artificial Sequence: Synthetic oligonucleotide
ucgcgaaggccaggaugaa

SEQ ID NO: 414482 - RNA, 19 nt, Artificial Sequence
  Description of Artificial Sequence: Synthetic oligonucleotide
gcuucggcagcucgugucu

SEQ ID NO: 414483 - RNA, 19 nt, Artificial Sequence
  Description of Artificial Sequence: Synthetic oligonucleotide
ggcacgaagccacgcucaa

SEQ ID NO: 414484 - RNA, 19 nt, Artificial Sequence
  Description of Artificial Sequence: Synthetic oligonucleotide
ccgcuggcugaaugccucg

SEQ ID NO: 414485 - RNA, 19 nt, Artificial Sequence
  Description of Artificial Sequence: Synthetic oligonucleotide
gcagggauccaaucggcuu

SEQ ID NO: 414486 - RNA, 19 nt, Artificial Sequence
  Description of Artificial Sequence: Synthetic oligonucleotide
gacucccaauccagugucu

SEQ ID NO: 414487 - RNA, 19 nt, Artificial Sequence
  Description of Artificial Sequence: Synthetic oligonucleotide
cuccgacucuauccggugu

SEQ ID NO: 414488 - RNA, 19 nt, Artificial Sequence
  Description of Artificial Sequence: Synthetic oligonucleotide
gccguacaccccaggguug

SEQ ID NO: 414489 - RNA, 19 nt, Artificial Sequence
  Description of Artificial Sequence: Synthetic oligonucleotide
ccuugugggcuaaggccca

SEQ ID NO: 414490 - RNA, 19 nt, Artificial Sequence
  Description of Artificial Sequence: Synthetic oligonucleotide
ggaccagugccaggugaca

SEQ ID NO: 414491 - RNA, 19 nt, Artificial Sequence
  Description of Artificial Sequence: Synthetic oligonucleotide
acaguaccgcuggcugaau

SEQ ID NO: 414492 - RNA, 19 nt, Artificial Sequence
  Description of Artificial Sequence: Synthetic oligonucleotide
cauugauggccagguggcu

SEQ ID NO: 414493 - RNA, 19 nt, Artificial Sequence
  Description of Artificial Sequence: Synthetic oligonucleotide
gguagcgaugggccagacu

SEQ ID NO: 414494 - RNA, 19 nt, Artificial Sequence
  Description of Artificial Sequence: Synthetic oligonucleotide
ccgcacgaccaccuuucug

SEQ ID NO: 414495 - RNA, 19 nt, Artificial Sequence
  Description of Artificial Sequence: Synthetic oligonucleotide
gguacgugaccucgacgau

SEQ ID NO: 414496 - RNA, 19 nt, Artificial Sequence
  Description of Artificial Sequence: Synthetic oligonucleotide
ccgguuucccaggaacuca

SEQ ID NO: 414497 - RNA, 19 nt, Artificial Sequence
  Description of Artificial Sequence: Synthetic oligonucleotide
gugcuucggcagcucgugu

SEQ ID NO: 414498 - RNA, 19 nt, Artificial Sequence
  Description of Artificial Sequence: Synthetic oligonucleotide
ccacuccaacuguuugcca

SEQ ID NO: 414499 - RNA, 19 nt, Artificial Sequence
  Description of Artificial Sequence: Synthetic oligonucleotide
cgucagccggaugccauug

SEQ ID NO: 414500 - RNA, 19 nt, Artificial Sequence
  Description of Artificial Sequence: Synthetic oligonucleotide
cgacucuauccgguguuuc

SEQ ID NO: 414501 - RNA, 19 nt, Artificial Sequence
  Description of Artificial Sequence: Synthetic oligonucleotide
gggacuccgcgcaggcaga

SEQ ID NO: 414502 - RNA, 19 nt, Artificial Sequence
  Description of Artificial Sequence: Synthetic oligonucleotide
cacguggcuggcgggauuu

SEQ ID NO: 414503 - RNA, 19 nt, Artificial Sequence
  Description of Artificial Sequence: Synthetic oligonucleotide
gggagcguugaaguuuauu

SEQ ID NO: 414504 - RNA, 19 nt, Artificial Sequence
  Description of Artificial Sequence: Synthetic oligonucleotide
ccuugcguugcagcaggaa

SEQ ID NO: 414505 - RNA, 19 nt, Artificial Sequence
  Description of Artificial Sequence: Synthetic oligonucleotide
gcuuacggauccgcucaua

SEQ ID NO: 414506 - RNA, 19 nt, Artificial Sequence
  Description of Artificial Sequence: Synthetic oligonucleotide
ccuagacgcagcccacggu

SEQ ID NO: 414507 - RNA, 19 nt, Artificial Sequence
  Description of Artificial Sequence: Synthetic oligonucleotide
ccgcaacucaggcuccucu

SEQ ID NO: 414508 - RNA, 19 nt, Artificial Sequence
  Description of Artificial Sequence: Synthetic oligonucleotide
gccgcaacucaggcuccuc

SEQ ID NO: 414509 - RNA, 19 nt, Artificial Sequence
  Description of Artificial Sequence: Synthetic oligonucleotide
ggccccagccagauacacu

SEQ ID NO: 414510 - RNA, 19 nt, Artificial Sequence
  Description of Artificial Sequence: Synthetic oligonucleotide
gcaagggacuuggggcacu

SEQ ID NO: 414511 - RNA, 19 nt, Artificial Sequence
  Description of Artificial Sequence: Synthetic oligonucleotide
gcccacggucaggcggcag

SEQ ID NO: 414512 - RNA, 19 nt, Artificial Sequence
  Description of Artificial Sequence: Synthetic oligonucleotide
cuggcgugucaggcacgaa

SEQ ID NO: 414513 - RNA, 19 nt, Artificial Sequence
  Description of Artificial Sequence: Synthetic oligonucleotide
gggccgcacgaccaccuuu

SEQ ID NO: 414514 - RNA, 19 nt, Artificial Sequence
  Description of Artificial Sequence: Synthetic oligonucleotide
cugcgcucauaggcacucu

SEQ ID NO: 414515 - RNA, 19 nt, Artificial Sequence
  Description of Artificial Sequence: Synthetic oligonucleotide
gccgcacgaccaccuuucu

SEQ ID NO: 414516 - RNA, 19 nt, Artificial Sequence
  Description of Artificial Sequence: Synthetic oligonucleotide
gccgugguucuggccgcuc

SEQ ID NO: 414517 - RNA, 19 nt, Artificial Sequence
  Description of Artificial Sequence: Synthetic oligonucleotide
cguacaccccaggguugca

SEQ ID NO: 414518 - RNA, 19 nt, Artificial Sequence
  Description of Artificial Sequence: Synthetic oligonucleotide
ccgacucuauccgguguuu

SEQ ID NO: 414519 - RNA, 19 nt, Artificial Sequence
  Description of Artificial Sequence: Synthetic oligonucleotide
gggauccaaucggcuucuu

SEQ ID NO: 414520 - RNA, 19 nt, Artificial Sequence
  Description of Artificial Sequence: Synthetic oligonucleotide
cgagcacaucacgguugaa

SEQ ID NO: 414521 - RNA, 19 nt, Artificial Sequence
  Description of Artificial Sequence: Synthetic oligonucleotide
cgcuuacggauccgcucau

SEQ ID NO: 414522 - RNA, 19 nt, Artificial Sequence
  Description of Artificial Sequence: Synthetic oligonucleotide
aagaguauaaaccugagac

SEQ ID NO: 414523 - RNA, 19 nt, Artificial Sequence
  Description of Artificial Sequence: Synthetic oligonucleotide
aauaaauccauaaaguccc

SEQ ID NO: 414524 - RNA, 19 nt, Artificial Sequence
  Description of Artificial Sequence: Synthetic oligonucleotide
uuaguauuuauauaggugg

SEQ ID NO: 414525 - RNA, 19 nt, Artificial Sequence
  Description of Artificial Sequence: Synthetic oligonucleotide
uaaucuauuaucaauggca

SEQ ID NO: 414526 - RNA, 19 nt, Artificial Sequence
  Description of Artificial Sequence: Synthetic oligonucleotide
uaaguuaagaugaacaacu

SEQ ID NO: 414527 - RNA, 19 nt, Artificial Sequence
  Description of Artificial Sequence: Synthetic oligonucleotide
uguagaaguaucuugcagg

SEQ ID NO: 414528 - RNA, 19 nt, Artificial Sequence
  Description of Artificial Sequence: Synthetic oligonucleotide
uugaaaagcacaauacucc

SEQ ID NO: 414529 - RNA, 19 nt, Artificial Sequence
  Description of Artificial Sequence: Synthetic oligonucleotide
uucagcuaaguuaagauga

SEQ ID NO: 414530 - RNA, 19 nt, Artificial Sequence
  Description of Artificial Sequence: Synthetic oligonucleotide
aaccauauuaauaauuggg

SEQ ID NO: 414531 - RNA, 19 nt, Artificial Sequence
  Description of Artificial Sequence: Synthetic oligonucleotide
uguaacaguaauagaaugc

SEQ ID NO: 414532 - RNA, 19 nt, Artificial Sequence
  Description of Artificial Sequence: Synthetic oligonucleotide
cucaauugguaguagaucg

SEQ ID NO: 414533 - RNA, 19 nt, Artificial Sequence
  Description of Artificial Sequence: Synthetic oligonucleotide
agaaguacacuugaaaagc

SEQ ID NO: 414534 - RNA, 19 nt, Artificial Sequence
  Description of Artificial Sequence: Synthetic oligonucleotide
uuuaguugaacauauuaac

SEQ ID NO: 414535 - RNA, 19 nt, Artificial Sequence
  Description of Artificial Sequence: Synthetic oligonucleotide
uuaguuucuaacuugagua

SEQ ID NO: 414536 - RNA, 19 nt, Artificial Sequence
  Description of Artificial Sequence: Synthetic oligonucleotide
aguuuuacccuuuacuagg

SEQ ID NO: 414537 - RNA, 19 nt, Artificial Sequence
  Description of Artificial Sequence: Synthetic oligonucleotide
ucuaaucuauuaucaaugg

SEQ ID NO: 414538 - RNA, 19 nt, Artificial Sequence
  Description of Artificial Sequence: Synthetic oligonucleotide
uuuauaaucucuucauuca

SEQ ID NO: 414539 - RNA, 19 nt, Artificial Sequence
  Description of Artificial Sequence: Synthetic oligonucleotide
aauuccuccaauuacgaaa

SEQ ID NO: 414540 - RNA, 19 nt, Artificial Sequence
  Description of Artificial Sequence: Synthetic oligonucleotide
ucuuauaccucacuccagg

SEQ ID NO: 414541 - RNA, 19 nt, Artificial Sequence
  Description of Artificial Sequence: Synthetic oligonucleotide
cuucuuauugacuuggagc

SEQ ID NO: 414542 - RNA, 19 nt, Artificial Sequence
  Description of Artificial Sequence: Synthetic oligonucleotide
agagguuuacucuuauacc

SEQ ID NO: 414543 - RNA, 19 nt, Artificial Sequence
  Description of Artificial Sequence: Synthetic oligonucleotide
uuuaaguuaugacagcaac

SEQ ID NO: 414544 - RNA, 19 nt, Artificial Sequence
  Description of Artificial Sequence: Synthetic oligonucleotide
uagagguuuacucuuauac

SEQ ID NO: 414545 - RNA, 19 nt, Artificial Sequence
  Description of Artificial Sequence: Synthetic oligonucleotide
ugaaguauauauacgcagc

SEQ ID NO: 414546 - RNA, 19 nt, Artificial Sequence
  Description of Artificial Sequence: Synthetic oligonucleotide
uuaauaauugggauuauuu

SEQ ID NO: 414547 - RNA, 19 nt, Artificial Sequence
  Description of Artificial Sequence: Synthetic oligonucleotide
aaucuaaucuauuaucaau

SEQ ID NO: 414548 - RNA, 19 nt, Artificial Sequence
  Description of Artificial Sequence: Synthetic oligonucleotide
uguauuucagccuaaguau

SEQ ID NO: 414549 - RNA, 19 nt, Artificial Sequence
  Description of Artificial Sequence: Synthetic oligonucleotide
aaugaguuuuacccuuuac

SEQ ID NO: 414550 - RNA, 19 nt, Artificial Sequence
  Description of Artificial Sequence: Synthetic oligonucleotide
aaauaguuagcucuggguu

SEQ ID NO: 414551 - RNA, 19 nt, Artificial Sequence
  Description of Artificial Sequence: Synthetic oligonucleotide
uuuaguuucuaacuugagu

SEQ ID NO: 414552 - RNA, 19 nt, Artificial Sequence
  Description of Artificial Sequence: Synthetic oligonucleotide
uauauacgcagccuuauac

SEQ ID NO: 414553 - RNA, 19 nt, Artificial Sequence
  Description of Artificial Sequence: Synthetic oligonucleotide
guaacaguaauagaaugcg

SEQ ID NO: 414554 - RNA, 19 nt, Artificial Sequence
  Description of Artificial Sequence: Synthetic oligonucleotide
aguaauagaaugcgucugg

SEQ ID NO: 414555 - RNA, 19 nt, Artificial Sequence
  Description of Artificial Sequence: Synthetic oligonucleotide
auuauuaagagcugggaau

SEQ ID NO: 414556 - RNA, 19 nt, Artificial Sequence
  Description of Artificial Sequence: Synthetic oligonucleotide
uuaagaaguacacuugaaa

SEQ ID NO: 414557 - RNA, 19 nt, Artificial Sequence
  Description of Artificial Sequence: Synthetic oligonucleotide
ugauaaaggguguccaccg

SEQ ID NO: 414558 - RNA, 19 nt, Artificial Sequence
  Description of Artificial Sequence: Synthetic oligonucleotide
uuaaugucauaucuuaguc

SEQ ID NO: 414559 - RNA, 19 nt, Artificial Sequence
  Description of Artificial Sequence: Synthetic oligonucleotide
auuacuaggguccggacug

SEQ ID NO: 414560 - RNA, 19 nt, Artificial Sequence
  Description of Artificial Sequence: Synthetic oligonucleotide
aguagacaugaucucaaac

SEQ ID NO: 414561 - RNA, 19 nt, Artificial Sequence
  Description of Artificial Sequence: Synthetic oligonucleotide
uuugucgcaguugucaugg

SEQ ID NO: 414562 - RNA, 19 nt, Artificial Sequence
  Description of Artificial Sequence: Synthetic oligonucleotide
uaaucccgaagauauagag

SEQ ID NO: 414563 - RNA, 19 nt, Artificial Sequence
  Description of Artificial Sequence: Synthetic oligonucleotide
aauuacgaaaauaaucagu

SEQ ID NO: 414564 - RNA, 19 nt, Artificial Sequence
  Description of Artificial Sequence: Synthetic oligonucleotide
auuaaucccgaagauauag

SEQ ID NO: 414565 - RNA, 19 nt, Artificial Sequence
  Description of Artificial Sequence: Synthetic oligonucleotide
uauccagugaguaauuagu

SEQ ID NO: 414566 - RNA, 19 nt, Artificial Sequence
  Description of Artificial Sequence: Synthetic oligonucleotide
ucuguauuuguauguauca

SEQ ID NO: 414567 - RNA, 19 nt, Artificial Sequence
  Description of Artificial Sequence: Synthetic oligonucleotide
aaccucacaggauuuaugu

SEQ ID NO: 414568 - RNA, 19 nt, Artificial Sequence
  Description of Artificial Sequence: Synthetic oligonucleotide
uuguggaucagucugucca

SEQ ID NO: 414569 - RNA, 19 nt, Artificial Sequence
  Description of Artificial Sequence: Synthetic oligonucleotide
ugaguaauuaguauuuaua

SEQ ID NO: 414570 - RNA, 19 nt, Artificial Sequence
  Description of Artificial Sequence: Synthetic oligonucleotide
ucuaacuugaguagacaug

SEQ ID NO: 414571 - RNA, 19 nt, Artificial Sequence
  Description of Artificial Sequence: Synthetic oligonucleotide
acggucaauuauuaagagc

SEQ ID NO: 414572 - RNA, 19 nt, Artificial Sequence
  Description of Artificial Sequence: Synthetic oligonucleotide
gguguuaaaauaugugugg

SEQ ID NO: 414573 - RNA, 19 nt, Artificial Sequence
  Description of Artificial Sequence: Synthetic oligonucleotide
uggguguuaaaauaugugu

SEQ ID NO: 414574 - RNA, 19 nt, Artificial Sequence
  Description of Artificial Sequence: Synthetic oligonucleotide
agaaguaucuugcagguaa

SEQ ID NO: 414575 - RNA, 19 nt, Artificial Sequence
  Description of Artificial Sequence: Synthetic oligonucleotide
aaaagcacaauacuccaua

SEQ ID NO: 414576 - RNA, 19 nt, Artificial Sequence
  Description of Artificial Sequence: Synthetic oligonucleotide
cuuagaauguucaugauua

SEQ ID NO: 414577 - RNA, 19 nt, Artificial Sequence
  Description of Artificial Sequence: Synthetic oligonucleotide
guagacaugaucucaaaca

SEQ ID NO: 414578 - RNA, 19 nt, Artificial Sequence
  Description of Artificial Sequence: Synthetic oligonucleotide
auaauaaccucacaggauu

SEQ ID NO: 414579 - RNA, 19 nt, Artificial Sequence
  Description of Artificial Sequence: Synthetic oligonucleotide
agauuuugauguuggagag

SEQ ID NO: 414580 - RNA, 19 nt, Artificial Sequence
  Description of Artificial Sequence: Synthetic oligonucleotide
uguucucacguuuacuucc

SEQ ID NO: 414581 - RNA, 19 nt, Artificial Sequence
  Description of Artificial Sequence: Synthetic oligonucleotide
uaaaauauguguggaacca

SEQ ID NO: 414582 - RNA, 19 nt, Artificial Sequence
  Description of Artificial Sequence: Synthetic oligonucleotide
ugaguuuuacccuuuacua

SEQ ID NO: 414583 - RNA, 19 nt, Artificial Sequence
  Description of Artificial Sequence: Synthetic oligonucleotide
gaucguaugccauugccug

SEQ ID NO: 414584 - RNA, 19 nt, Artificial Sequence
  Description of Artificial Sequence: Synthetic oligonucleotide
uugguaguagaucguaugc

SEQ ID NO: 414585 - RNA, 19 nt, Artificial Sequence
  Description of Artificial Sequence: Synthetic oligonucleotide
aaagcuacucuuccuuaag

SEQ ID NO: 414586 - RNA, 19 nt, Artificial Sequence
  Description of Artificial Sequence: Synthetic oligonucleotide
acuaagugacgucuucccc

SEQ ID NO: 414587 - RNA, 19 nt, Artificial Sequence
  Description of Artificial Sequence: Synthetic oligonucleotide
uuuggaaucuaaucuauua

SEQ ID NO: 414588 - RNA, 19 nt, Artificial Sequence
  Description of Artificial Sequence: Synthetic oligonucleotide
uaaguuuuggaauuuccuc

SEQ ID NO: 414589 - RNA, 19 nt, Artificial Sequence
  Description of Artificial Sequence: Synthetic oligonucleotide
uuauuaagagcugggaaug

SEQ ID NO: 414590 - RNA, 19 nt, Artificial Sequence
  Description of Artificial Sequence: Synthetic oligonucleotide
ucucagaguauguaauucc

SEQ ID NO: 414591 - RNA, 19 nt, Artificial Sequence
  Description of Artificial Sequence: Synthetic oligonucleotide
uaguauuuauauagguggc

SEQ ID NO: 414592 - RNA, 19 nt, Artificial Sequence
  Description of Artificial Sequence: Synthetic oligonucleotide
auugacuuggagcaagaug

SEQ ID NO: 414593 - RNA, 19 nt, Artificial Sequence
  Description of Artificial Sequence: Synthetic oligonucleotide
uugggauuauuuuauacau

SEQ ID NO: 414594 - RNA, 19 nt, Artificial Sequence
  Description of Artificial Sequence: Synthetic oligonucleotide
auaaaggguguccaccggg

SEQ ID NO: 414595 - RNA, 19 nt, Artificial Sequence
  Description of Artificial Sequence: Synthetic oligonucleotide
auugguaguagaucguaug

SEQ ID NO: 414596 - RNA, 19 nt, Artificial Sequence
  Description of Artificial Sequence: Synthetic oligonucleotide
uaauaauugggauuauuuu

SEQ ID NO: 414597 - RNA, 19 nt, Artificial Sequence
  Description of Artificial Sequence: Synthetic oligonucleotide
aaauccauaaagucccuua

SEQ ID NO: 414598 - RNA, 19 nt, Artificial Sequence
  Description of Artificial Sequence: Synthetic oligonucleotide
cuaaucuauuaucaauggc

SEQ ID NO: 414599 - RNA, 19 nt, Artificial Sequence
  Description of Artificial Sequence: Synthetic oligonucleotide
uuuacuuccgaagucucgc

SEQ ID NO: 414600 - RNA, 19 nt, Artificial Sequence
  Description of Artificial Sequence: Synthetic oligonucleotide
aucuaaucuauuaucaaug

SEQ ID NO: 414601 - RNA, 19 nt, Artificial Sequence
  Description of Artificial Sequence: Synthetic oligonucleotide
uuuacccuuuacuaggccu

SEQ ID NO: 414602 - RNA, 19 nt, Artificial Sequence
  Description of Artificial Sequence: Synthetic oligonucleotide
acaguaauagaaugcgucu

SEQ ID NO: 414603 - RNA, 19 nt, Artificial Sequence
  Description of Artificial Sequence: Synthetic oligonucleotide
ccaauaauaaccucacagg

SEQ ID NO: 414604 - RNA, 19 nt, Artificial Sequence
  Description of Artificial Sequence: Synthetic oligonucleotide
agaguauaaaccugagacu

SEQ ID NO: 414605 - RNA, 19 nt, Artificial Sequence
  Description of Artificial Sequence: Synthetic oligonucleotide
uagaucguaugccauugcc

SEQ ID NO: 414606 - RNA, 19 nt, Artificial Sequence
  Description of Artificial Sequence: Synthetic oligonucleotide
agcucuaaauaguuagcuc

SEQ ID NO: 414607 - RNA, 19 nt, Artificial Sequence
  Description of Artificial Sequence: Synthetic oligonucleotide
ugguacaucaagaguauaa

SEQ ID NO: 414608 - RNA, 19 nt, Artificial Sequence
  Description of Artificial Sequence: Synthetic oligonucleotide
aagagcacuaagugacguc

SEQ ID NO: 414609 - RNA, 19 nt, Artificial Sequence
  Description of Artificial Sequence: Synthetic oligonucleotide
uauguguggaaccaauaau

SEQ ID NO: 414610 - RNA, 19 nt, Artificial Sequence
  Description of Artificial Sequence: Synthetic oligonucleotide
aauccauaaagucccuuaa

SEQ ID NO: 414611 - RNA, 19 nt, Artificial Sequence
  Description of Artificial Sequence: Synthetic oligonucleotide
aaacacuguauuucagccu

SEQ ID NO: 414612 - RNA, 19 nt, Artificial Sequence
  Description of Artificial Sequence: Synthetic oligonucleotide
uuuauaucauccagcaguu

SEQ ID NO: 414613 - RNA, 19 nt, Artificial Sequence
  Description of Artificial Sequence: Synthetic oligonucleotide
uauuuauauagguggcugu

SEQ ID NO: 414614 - RNA, 19 nt, Artificial Sequence
  Description of Artificial Sequence: Synthetic oligonucleotide
uuauauagguggcuguaaa

SEQ ID NO: 414615 - RNA, 19 nt, Artificial Sequence
  Description of Artificial Sequence: Synthetic oligonucleotide
ucuaaauaguuagcucugg

SEQ ID NO: 414616 - RNA, 19 nt, Artificial Sequence
  Description of Artificial Sequence: Synthetic oligonucleotide
ccaauuacgaaaauaauca

SEQ ID NO: 414617 - RNA, 19 nt, Artificial Sequence
  Description of Artificial Sequence: Synthetic oligonucleotide
ucauccauuuuguaguagu

SEQ ID NO: 414618 - RNA, 19 nt, Artificial Sequence
  Description of Artificial Sequence: Synthetic oligonucleotide
aauaauaaccucacaggau

SEQ ID NO: 414619 - RNA, 19 nt, Artificial Sequence
  Description of Artificial Sequence: Synthetic oligonucleotide
ucacguuuacuuccgaagu

SEQ ID NO: 414620 - RNA, 19 nt, Artificial Sequence
  Description of Artificial Sequence: Synthetic oligonucleotide
caauaauaaccucacagga

SEQ ID NO: 414621 - RNA, 19 nt, Artificial Sequence
  Description of Artificial Sequence: Synthetic oligonucleotide
aguugaacauauuaacaaa

SEQ ID NO: 414622 - RNA, 19 nt, Artificial Sequence
  Description of Artificial Sequence: Synthetic oligonucleotide
uauaccucacuccaggguu

SEQ ID NO: 414623 - RNA, 19 nt, Artificial Sequence
  Description of Artificial Sequence: Synthetic oligonucleotide
ucuacagauuuugauguug

SEQ ID NO: 414624 - RNA, 19 nt, Artificial Sequence
  Description of Artificial Sequence: Synthetic oligonucleotide
uuaagagcugggaaugagu

SEQ ID NO: 414625 - RNA, 19 nt, Artificial Sequence
  Description of Artificial Sequence: Synthetic oligonucleotide
guuacuaucuguucagcca

SEQ ID NO: 414626 - RNA, 19 nt, Artificial Sequence
  Description of Artificial Sequence: Synthetic oligonucleotide
agauauagagcaggacugc

SEQ ID NO: 414627 - RNA, 19 nt, Artificial Sequence
  Description of Artificial Sequence: Synthetic oligonucleotide
ucaugcaaucuucagcuaa

SEQ ID NO: 414628 - RNA, 19 nt, Artificial Sequence
  Description of Artificial Sequence: Synthetic oligonucleotide
uuacuaucuguucagccau

SEQ ID NO: 414629 - RNA, 19 nt, Artificial Sequence
  Description of Artificial Sequence: Synthetic oligonucleotide
cuucagcuaaguuaagaug

SEQ ID NO: 414630 - RNA, 19 nt, Artificial Sequence
  Description of Artificial Sequence: Synthetic oligonucleotide
cucacguuuacuuccgaag

SEQ ID NO: 414631 - RNA, 19 nt, Artificial Sequence
  Description of Artificial Sequence: Synthetic oligonucleotide
uugauaaaggguguccacc

SEQ ID NO: 414632 - RNA, 19 nt, Artificial Sequence
  Description of Artificial Sequence: Synthetic oligonucleotide
ugauuagaaagcacuuuaa

SEQ ID NO: 414633 - RNA, 19 nt, Artificial Sequence
  Description of Artificial Sequence: Synthetic oligonucleotide
cucacaggauuuaugugcc

SEQ ID NO: 414634 - RNA, 19 nt, Artificial Sequence
  Description of Artificial Sequence: Synthetic oligonucleotide
gaaugcgucugguacauca

SEQ ID NO: 414635 - RNA, 19 nt, Artificial Sequence
  Description of Artificial Sequence: Synthetic oligonucleotide
ucuaucauacauacauuua

SEQ ID NO: 414636 - RNA, 19 nt, Artificial Sequence
  Description of Artificial Sequence: Synthetic oligonucleotide
uucucaauugguaguagau

SEQ ID NO: 414637 - RNA, 19 nt, Artificial Sequence
  Description of Artificial Sequence: Synthetic oligonucleotide
gguaagagcacuaagugac

SEQ ID NO: 414638 - RNA, 19 nt, Artificial Sequence
  Description of Artificial Sequence: Synthetic oligonucleotide
auauacgcagccuuauacu

SEQ ID NO: 414639 - RNA, 19 nt, Artificial Sequence
  Description of Artificial Sequence: Synthetic oligonucleotide
guauccagugaguaauuag

SEQ ID NO: 414640 - RNA, 19 nt, Artificial Sequence
  Description of Artificial Sequence: Synthetic oligonucleotide
agucucgcaagaaacaauc

SEQ ID NO: 414641 - RNA, 19 nt, Artificial Sequence
  Description of Artificial Sequence: Synthetic oligonucleotide
aucauucucaauugguagu

SEQ ID NO: 414642 - RNA, 19 nt, Artificial Sequence
  Description of Artificial Sequence: Synthetic oligonucleotide
uauaacaguuauccccucu

SEQ ID NO: 414643 - RNA, 19 nt, Artificial Sequence
  Description of Artificial Sequence: Synthetic oligonucleotide
ugugcaagcuuacuggcau

SEQ ID NO: 414644 - RNA, 19 nt, Artificial Sequence
  Description of Artificial Sequence: Synthetic oligonucleotide
caguuguuccauuaauccc

SEQ ID NO: 414645 - RNA, 19 nt, Artificial Sequence
  Description of Artificial Sequence: Synthetic oligonucleotide
accauauuaauaauuggga

SEQ ID NO: 414646 - RNA, 19 nt, Artificial Sequence
  Description of Artificial Sequence: Synthetic oligonucleotide
guauguaucauucucaauu

SEQ ID NO: 414647 - RNA, 19 nt, Artificial Sequence
  Description of Artificial Sequence: Synthetic oligonucleotide
agaauguucaugauuauuu

SEQ ID NO: 414648 - RNA, 19 nt, Artificial Sequence
  Description of Artificial Sequence: Synthetic oligonucleotide
aucucagaguauguaauuc

SEQ ID NO: 414649 - RNA, 19 nt, Artificial Sequence
  Description of Artificial Sequence: Synthetic oligonucleotide
uuacuggcauuaucuagag

SEQ ID NO: 414650 - RNA, 19 nt, Artificial Sequence
  Description of Artificial Sequence: Synthetic oligonucleotide
auaucucuaacagauucug

SEQ ID NO: 414651 - RNA, 19 nt, Artificial Sequence
  Description of Artificial Sequence: Synthetic oligonucleotide
uauauagguggcuguaaaa

SEQ ID NO: 414652 - RNA, 19 nt, Artificial Sequence
  Description of Artificial Sequence: Synthetic oligonucleotide
cuuauugacuuggagcaag

SEQ ID NO: 414653 - RNA, 19 nt, Artificial Sequence
  Description of Artificial Sequence: Synthetic oligonucleotide
auagaaugcgucugguaca

SEQ ID NO: 414654 - RNA, 19 nt, Artificial Sequence
  Description of Artificial Sequence: Synthetic oligonucleotide
aaguauauauacgcagccu

SEQ ID NO: 414655 - RNA, 19 nt, Artificial Sequence
  Description of Artificial Sequence: Synthetic oligonucleotide
guacaucaagaguauaaac

SEQ ID NO: 414656 - RNA, 19 nt, Artificial Sequence
  Description of Artificial Sequence: Synthetic oligonucleotide
uaacaguaauagaaugcgu

SEQ ID NO: 414657 - RNA, 19 nt, Artificial Sequence
  Description of Artificial Sequence: Synthetic oligonucleotide
ucaauugguaguagaucgu

SEQ ID NO: 414658 - RNA, 19 nt, Artificial Sequence
  Description of Artificial Sequence: Synthetic oligonucleotide
gaaucuaaucuauuaucaa

SEQ ID NO: 414659 - RNA, 19 nt, Artificial Sequence
  Description of Artificial Sequence: Synthetic oligonucleotide
ggaaacuuuauccuuugac

SEQ ID NO: 414660 - RNA, 19 nt, Artificial Sequence
  Description of Artificial Sequence: Synthetic oligonucleotide
ugcaggacaguggacacag

SEQ ID NO: 414661 - RNA, 19 nt, Artificial Sequence
  Description of Artificial Sequence: Synthetic oligonucleotide
gacccggacccacaggucg

SEQ ID NO: 414662 - RNA, 19 nt, Artificial Sequence
  Description of Artificial Sequence: Synthetic oligonucleotide
uuuuacccuuuacuaggcc

SEQ ID NO: 414663 - RNA, 19 nt, Artificial Sequence
  Description of Artificial Sequence: Synthetic oligonucleotide
uuaagaaacugcacuuaua

SEQ ID NO: 414664 - RNA, 19 nt, Artificial Sequence
  Description of Artificial Sequence: Synthetic oligonucleotide
auaguuagcucuggguuuc

SEQ ID NO: 414665 - RNA, 19 nt, Artificial Sequence
  Description of Artificial Sequence: Synthetic oligonucleotide
ggauuuaugugccugagaa

SEQ ID NO: 414666 - RNA, 19 nt, Artificial Sequence
  Description of Artificial Sequence: Synthetic oligonucleotide
ucuagaaggucugucauuu

SEQ ID NO: 414667 - RNA, 19 nt, Artificial Sequence
  Description of Artificial Sequence: Synthetic oligonucleotide
caucaagaguauaaaccug

SEQ ID NO: 414668 - RNA, 19 nt, Artificial Sequence
  Description of Artificial Sequence: Synthetic oligonucleotide
agaguauguaauuccucca

SEQ ID NO: 414669 - RNA, 19 nt, Artificial Sequence
  Description of Artificial Sequence: Synthetic oligonucleotide
agcaagaugccuuaaucuu

SEQ ID NO: 414670 - RNA, 19 nt, Artificial Sequence
  Description of Artificial Sequence: Synthetic oligonucleotide
auucucaauugguaguaga

SEQ ID NO: 414671 - RNA, 19 nt, Artificial Sequence
  Description of Artificial Sequence: Synthetic oligonucleotide
uucucaauauucagcuuaa

SEQ ID NO: 414672 - RNA, 19 nt, Artificial Sequence
  Description of Artificial Sequence: Synthetic oligonucleotide
ccucacaggauuuaugugc

SEQ ID NO: 414673 - RNA, 19 nt, Artificial Sequence
  Description of Artificial Sequence: Synthetic oligonucleotide
agacucauguggaauaaag

SEQ ID NO: 414674 - RNA, 19 nt, Artificial Sequence
  Description of Artificial Sequence: Synthetic oligonucleotide
uuuuaagaaacugcacuua

SEQ ID NO: 414675 - RNA, 19 nt, Artificial Sequence
  Description of Artificial Sequence: Synthetic oligonucleotide
aaccacccauaucucuaac

SEQ ID NO: 414676 - RNA, 19 nt, Artificial Sequence
  Description of Artificial Sequence: Synthetic oligonucleotide
acaauacuccauaaaauau

SEQ ID NO: 414677 - RNA, 19 nt, Artificial Sequence
  Description of Artificial Sequence: Synthetic oligonucleotide
ugguaguagaucguaugcc

SEQ ID NO: 414678 - RNA, 19 nt, Artificial Sequence
  Description of Artificial Sequence: Synthetic oligonucleotide
cacucacagcuccagagcc

SEQ ID NO: 414679 - RNA, 19 nt, Artificial Sequence
  Description of Artificial Sequence: Synthetic oligonucleotide
aguagaucguaugccauug

SEQ ID NO: 414680 - RNA, 19 nt, Artificial Sequence
  Description of Artificial Sequence: Synthetic oligonucleotide
augacagaagcuugguggu

SEQ ID NO: 414681 - RNA, 19 nt, Artificial Sequence
  Description of Artificial Sequence: Synthetic oligonucleotide
aaagccacggucaauuauu

SEQ ID NO: 414682 - RNA, 19 nt, Artificial Sequence
  Description of Artificial Sequence: Synthetic oligonucleotide
agagcacuaagugacgucu

SEQ ID NO: 414683 - RNA, 19 nt, Artificial Sequence
  Description of Artificial Sequence: Synthetic oligonucleotide
aguauguaauuccuccaau

SEQ ID NO: 414684 - RNA, 19 nt, Artificial Sequence
  Description of Artificial Sequence: Synthetic oligonucleotide
cacggucaauuauuaagag

SEQ ID NO: 414685 - RNA, 19 nt, Artificial Sequence
  Description of Artificial Sequence: Synthetic oligonucleotide
ucugacggguucccgauuc

SEQ ID NO: 414686 - RNA, 19 nt, Artificial Sequence
  Description of Artificial Sequence: Synthetic oligonucleotide
ugaaaacuuccugauuaga

SEQ ID NO: 414687 - RNA, 19 nt, Artificial Sequence
  Description of Artificial Sequence: Synthetic oligonucleotide
agugaaguauauauacgca

SEQ ID NO: 414688 - RNA, 19 nt, Artificial Sequence
  Description of Artificial Sequence: Synthetic oligonucleotide
ucagcuaaguuaagaugaa

SEQ ID NO: 414689 - RNA, 19 nt, Artificial Sequence
  Description of Artificial Sequence: Synthetic oligonucleotide
cucauguggaauaaaggaa

SEQ ID NO: 414690 - RNA, 19 nt, Artificial Sequence
  Description of Artificial Sequence: Synthetic oligonucleotide
ggaaccaauaauaaccuca

SEQ ID NO: 414691 - RNA, 19 nt, Artificial Sequence
  Description of Artificial Sequence: Synthetic oligonucleotide
uuuugucgcaguugucaug

SEQ ID NO: 414692 - RNA, 19 nt, Artificial Sequence
  Description of Artificial Sequence: Synthetic oligonucleotide
uauaaaccugagacucaug

SEQ ID NO: 414693 - RNA, 19 nt, Artificial Sequence
  Description of Artificial Sequence: Synthetic oligonucleotide
auaacaguuauccccucuu

SEQ ID NO: 414694 - RNA, 19 nt, Artificial Sequence
  Description of Artificial Sequence: Synthetic oligonucleotide
ucucaauugguaguagauc

SEQ ID NO: 414695 - RNA, 19 nt, Artificial Sequence
  Description of Artificial Sequence: Synthetic oligonucleotide
uuuauauagguggcuguaa

SEQ ID NO: 414696 - RNA, 19 nt, Artificial Sequence
  Description of Artificial Sequence: Synthetic oligonucleotide
uccgaagucucgcaagaaa

SEQ ID NO: 414697 - RNA, 19 nt, Artificial Sequence
  Description of Artificial Sequence: Synthetic oligonucleotide
ccugcuggcauuacuaggg

SEQ ID NO: 414698 - RNA, 19 nt, Artificial Sequence
  Description of Artificial Sequence: Synthetic oligonucleotide
ggaaucuaaucuauuauca

SEQ ID NO: 414699 - RNA, 19 nt, Artificial Sequence
  Description of Artificial Sequence: Synthetic oligonucleotide
aacaacuugcuuugucauu

SEQ ID NO: 414700 - RNA, 19 nt, Artificial Sequence
  Description of Artificial Sequence: Synthetic oligonucleotide
gaaggucugucauuuugca

SEQ ID NO: 414701 - RNA, 19 nt, Artificial Sequence
  Description of Artificial Sequence: Synthetic oligonucleotide
aaggugacuccaguuacga

SEQ ID NO: 414702 - RNA, 19 nt, Artificial Sequence
  Description of Artificial Sequence: Synthetic oligonucleotide
uuccauuaaucccgaagau

SEQ ID NO: 414703 - RNA, 19 nt, Artificial Sequence
  Description of Artificial Sequence: Synthetic oligonucleotide
gaguauguaauuccuccaa

SEQ ID NO: 414704 - RNA, 19 nt, Artificial Sequence
  Description of Artificial Sequence: Synthetic oligonucleotide
caguugugcaagcuuacug

SEQ ID NO: 414705 - RNA, 19 nt, Artificial Sequence
  Description of Artificial Sequence: Synthetic oligonucleotide
ugacuuggagcaagaugcc

SEQ ID NO: 414706 - RNA, 19 nt, Artificial Sequence
  Description of Artificial Sequence: Synthetic oligonucleotide
uuacccuuuacuaggccuu

SEQ ID NO: 414707 - RNA, 19 nt, Artificial Sequence
  Description of Artificial Sequence: Synthetic oligonucleotide
caguauggccauucuuugg

SEQ ID NO: 414708 - RNA, 19 nt, Artificial Sequence
  Description of Artificial Sequence: Synthetic oligonucleotide
uugugcaagcuuacuggca

SEQ ID NO: 414709 - RNA, 19 nt, Artificial Sequence
  Description of Artificial Sequence: Synthetic oligonucleotide
uaauagaaugcgucuggua

SEQ ID NO: 414710 - RNA, 19 nt, Artificial Sequence
  Description of Artificial Sequence: Synthetic oligonucleotide
caguuacgaaucaugucac

SEQ ID NO: 414711 - RNA, 19 nt, Artificial Sequence
  Description of Artificial Sequence: Synthetic oligonucleotide
cacaagugcgaugugccgg

SEQ ID NO: 414712 - RNA, 19 nt, Artificial Sequence
  Description of Artificial Sequence: Synthetic oligonucleotide
ugggauuauuuuauacaua

SEQ ID NO: 414713 - RNA, 19 nt, Artificial Sequence
  Description of Artificial Sequence: Synthetic oligonucleotide
ccgauucuuauaaauauuc

SEQ ID NO: 414714 - RNA, 19 nt, Artificial Sequence
  Description of Artificial Sequence: Synthetic oligonucleotide
uaagagcacuaagugacgu

SEQ ID NO: 414715 - RNA, 19 nt, Artificial Sequence
  Description of Artificial Sequence: Synthetic oligonucleotide
auuuugucgcaguugucau

SEQ ID NO: 414716 - RNA, 19 nt, Artificial Sequence
  Description of Artificial Sequence: Synthetic oligonucleotide
ccaguuacgaaucauguca

SEQ ID NO: 414717 - RNA, 19 nt, Artificial Sequence
  Description of Artificial Sequence: Synthetic oligonucleotide
uccaguuacgaaucauguc

SEQ ID NO: 414718 - RNA, 19 nt, Artificial Sequence
  Description of Artificial Sequence: Synthetic oligonucleotide
uaaucagucuugauccauu

SEQ ID NO: 414719 - RNA, 19 nt, Artificial Sequence
  Description of Artificial Sequence: Synthetic oligonucleotide
aguuauccccucuucuaga

SEQ ID NO: 414720 - RNA, 19 nt, Artificial Sequence
  Description of Artificial Sequence: Synthetic oligonucleotide
uaauaaccucacaggauuu

SEQ ID NO: 414721 - RNA, 19 nt, Artificial Sequence
  Description of Artificial Sequence: Synthetic oligonucleotide
ggguguuaaaauaugugug

SEQ ID NO: 414722 - RNA, 19 nt, Artificial Sequence
  Description of Artificial Sequence: Synthetic oligonucleotide
caccgggagagcuggaagg

SEQ ID NO: 414723 - RNA, 19 nt, Artificial Sequence
  Description of Artificial Sequence: Synthetic oligonucleotide
gguaguagaucguaugcca

SEQ ID NO: 414724 - RNA, 19 nt, Artificial Sequence
  Description of Artificial Sequence: Synthetic oligonucleotide
cuaggguccggacuguaac

SEQ ID NO: 414725 - RNA, 19 nt, Artificial Sequence
  Description of Artificial Sequence: Synthetic oligonucleotide
agagcugggaaugaguuuu

SEQ ID NO: 414726 - RNA, 19 nt, Artificial Sequence
  Description of Artificial Sequence: Synthetic oligonucleotide
uuauacuuguucucacguu

SEQ ID NO: 414727 - RNA, 19 nt, Artificial Sequence
  Description of Artificial Sequence: Synthetic oligonucleotide
uacuuguucucacguuuac

SEQ ID NO: 414728 - RNA, 19 nt, Artificial Sequence
  Description of Artificial Sequence: Synthetic oligonucleotide
uccauuaaucccgaagaua

SEQ ID NO: 414729 - RNA, 19 nt, Artificial Sequence
  Description of Artificial Sequence: Synthetic oligonucleotide
uuaugugccugagaaacuu

SEQ ID NO: 414730 - RNA, 19 nt, Artificial Sequence
  Description of Artificial Sequence: Synthetic oligonucleotide
cugauuagaaagcacuuua

SEQ ID NO: 414731 - RNA, 19 nt, Artificial Sequence
  Description of Artificial Sequence: Synthetic oligonucleotide
accggcuuggcuuguuggg

SEQ ID NO: 414732 - RNA, 19 nt, Artificial Sequence
  Description of Artificial Sequence: Synthetic oligonucleotide
agcacgaugacagaagcuu

SEQ ID NO: 414733 - RNA, 19 nt, Artificial Sequence
  Description of Artificial Sequence: Synthetic oligonucleotide
uugucugacggguucccga

SEQ ID NO: 414734 - RNA, 19 nt, Artificial Sequence
  Description of Artificial Sequence: Synthetic oligonucleotide
uuagaauguucaugauuau

SEQ ID NO: 414735 - RNA, 19 nt, Artificial Sequence
  Description of Artificial Sequence: Synthetic oligonucleotide
guaagagcacuaagugacg

SEQ ID NO: 414736 - RNA, 19 nt, Artificial Sequence
  Description of Artificial Sequence: Synthetic oligonucleotide
uaauuccuccaauuacgaa

SEQ ID NO: 414737 - RNA, 19 nt, Artificial Sequence
  Description of Artificial Sequence: Synthetic oligonucleotide
aauugguaguagaucguau

SEQ ID NO: 414738 - RNA, 19 nt, Artificial Sequence
  Description of Artificial Sequence: Synthetic oligonucleotide
acguuuacuuccgaagucu

SEQ ID NO: 414739 - RNA, 19 nt, Artificial Sequence
  Description of Artificial Sequence: Synthetic oligonucleotide
uuugucugacggguucccg

SEQ ID NO: 414740 - RNA, 19 nt, Artificial Sequence
  Description of Artificial Sequence: Synthetic oligonucleotide
cuaaguauccagugaguaa

SEQ ID NO: 414741 - RNA, 19 nt, Artificial Sequence
  Description of Artificial Sequence: Synthetic oligonucleotide
caguaauagaaugcgucug

SEQ ID NO: 414742 - RNA, 19 nt, Artificial Sequence
  Description of Artificial Sequence: Synthetic oligonucleotide
uguucuguagaaguaucuu

SEQ ID NO: 414743 - RNA, 19 nt, Artificial Sequence
  Description of Artificial Sequence: Synthetic oligonucleotide
caacgcaucucagaguaug

SEQ ID NO: 414744 - RNA, 19 nt, Artificial Sequence
  Description of Artificial Sequence: Synthetic oligonucleotide
agaugccuuaaucuuguua

SEQ ID NO: 414745 - RNA, 19 nt, Artificial Sequence
  Description of Artificial Sequence: Synthetic oligonucleotide
acaagugcgaugugccggu

SEQ ID NO: 414746 - RNA, 19 nt, Artificial Sequence
  Description of Artificial Sequence: Synthetic oligonucleotide
ucucacguuuacuuccgaa

SEQ ID NO: 414747 - RNA, 19 nt, Artificial Sequence
  Description of Artificial Sequence: Synthetic oligonucleotide
cuuaagaaguacacuugaa

SEQ ID NO: 414748 - RNA, 19 nt, Artificial Sequence
  Description of Artificial Sequence: Synthetic oligonucleotide
guuuuacccuuuacuaggc

SEQ ID NO: 414749 - RNA, 19 nt, Artificial Sequence
  Description of Artificial Sequence: Synthetic oligonucleotide
aguuacgaaucaugucacu

SEQ ID NO: 414750 - RNA, 19 nt, Artificial Sequence
  Description of Artificial Sequence: Synthetic oligonucleotide
uccgguccagcucuaaaua

SEQ ID NO: 414751 - RNA, 19 nt, Artificial Sequence
  Description of Artificial Sequence: Synthetic oligonucleotide
ggaauaaaggaaauguuua

SEQ ID NO: 414752 - RNA, 19 nt, Artificial Sequence
  Description of Artificial Sequence: Synthetic oligonucleotide
ucccgaagauauagagcag

SEQ ID NO: 414753 - RNA, 19 nt, Artificial Sequence
  Description of Artificial Sequence: Synthetic oligonucleotide
cacaacgcaucucagagua

SEQ ID NO: 414754 - RNA, 19 nt, Artificial Sequence
  Description of Artificial Sequence: Synthetic oligonucleotide
gaagucucgcaagaaacaa

SEQ ID NO: 414755 - RNA, 19 nt, Artificial Sequence
  Description of Artificial Sequence: Synthetic oligonucleotide
ccuccaauuacgaaaauaa

SEQ ID NO: 414756 - RNA, 19 nt, Artificial Sequence
  Description of Artificial Sequence: Synthetic oligonucleotide
guucucacguuuacuuccg

SEQ ID NO: 414757 - RNA, 19 nt, Artificial Sequence
  Description of Artificial Sequence: Synthetic oligonucleotide
guauuucagccuaaguauc

SEQ ID NO: 414758 - RNA, 19 nt, Artificial Sequence
  Description of Artificial Sequence: Synthetic oligonucleotide
guguuaaaauaugugugga

SEQ ID NO: 414759 - RNA, 19 nt, Artificial Sequence
  Description of Artificial Sequence: Synthetic oligonucleotide
uuccgguccagcucuaaau

SEQ ID NO: 414760 - RNA, 19 nt, Artificial Sequence
  Description of Artificial Sequence: Synthetic oligonucleotide
auuccuccaauuacgaaaa

SEQ ID NO: 414761 - RNA, 19 nt, Artificial Sequence
  Description of Artificial Sequence: Synthetic oligonucleotide
aggauuuaugugccugaga

SEQ ID NO: 414762 - RNA, 19 nt, Artificial Sequence
  Description of Artificial Sequence: Synthetic oligonucleotide
aaccugagacucaugugga

SEQ ID NO: 414763 - RNA, 19 nt, Artificial Sequence
  Description of Artificial Sequence: Synthetic oligonucleotide
ccacccauaucucuaacag

SEQ ID NO: 414764 - RNA, 19 nt, Artificial Sequence
  Description of Artificial Sequence: Synthetic oligonucleotide
uggaaccaauaauaaccuc

SEQ ID NO: 414765 - RNA, 19 nt, Artificial Sequence
  Description of Artificial Sequence: Synthetic oligonucleotide
ugccauugccugaaagguc

SEQ ID NO: 414766 - RNA, 19 nt, Artificial Sequence
  Description of Artificial Sequence: Synthetic oligonucleotide
agaucguaugccauugccu

SEQ ID NO: 414767 - RNA, 19 nt, Artificial Sequence
  Description of Artificial Sequence: Synthetic oligonucleotide
cacguuuacuuccgaaguc

SEQ ID NO: 414768 - RNA, 19 nt, Artificial Sequence
  Description of Artificial Sequence: Synthetic oligonucleotide
uaguagaucguaugccauu

SEQ ID NO: 414769 - RNA, 19 nt, Artificial Sequence
  Description of Artificial Sequence: Synthetic oligonucleotide
auugccugaaaggucaguu

SEQ ID NO: 414770 - RNA, 19 nt, Artificial Sequence
  Description of Artificial Sequence: Synthetic oligonucleotide
gguuuacucuuauaccuca

SEQ ID NO: 414771 - RNA, 19 nt, Artificial Sequence
  Description of Artificial Sequence: Synthetic oligonucleotide
uccggacuguaacaguaau

SEQ ID NO: 414772 - RNA, 19 nt, Artificial Sequence
  Description of Artificial Sequence: Synthetic oligonucleotide
auauauacgcagccuuaua

SEQ ID NO: 414773 - RNA, 19 nt, Artificial Sequence
  Description of Artificial Sequence: Synthetic oligonucleotide
guaucauucucaauuggua

SEQ ID NO: 414774 - RNA, 19 nt, Artificial Sequence
  Description of Artificial Sequence: Synthetic oligonucleotide
guagaucguaugccauugc

SEQ ID NO: 414775 - RNA, 19 nt, Artificial Sequence
  Description of Artificial Sequence: Synthetic oligonucleotide
uucauuugucugacggguu

SEQ ID NO: 414776 - RNA, 19 nt, Artificial Sequence
  Description of Artificial Sequence: Synthetic oligonucleotide
uuuccgguccagcucuaaa

SEQ ID NO: 414777 - RNA, 19 nt, Artificial Sequence
  Description of Artificial Sequence: Synthetic oligonucleotide
guuacgaaucaugucacua

SEQ ID NO: 414778 - RNA, 19 nt, Artificial Sequence
  Description of Artificial Sequence: Synthetic oligonucleotide
cagguaauauacacaguaa

SEQ ID NO: 414779 - RNA, 19 nt, Artificial Sequence
  Description of Artificial Sequence: Synthetic oligonucleotide
uagaaugcgucugguacau

SEQ ID NO: 414780 - RNA, 19 nt, Artificial Sequence
  Description of Artificial Sequence: Synthetic oligonucleotide
cucaauauucagcuuaaau

SEQ ID NO: 414781 - RNA, 19 nt, Artificial Sequence
  Description of Artificial Sequence: Synthetic oligonucleotide
cauucucaauugguaguag

SEQ ID NO: 414782 - RNA, 19 nt, Artificial Sequence
  Description of Artificial Sequence: Synthetic oligonucleotide
aacgcaucucagaguaugu

SEQ ID NO: 414783 - RNA, 19 nt, Artificial Sequence
  Description of Artificial Sequence: Synthetic oligonucleotide
guuauccccucuucuagaa

SEQ ID NO: 414784 - RNA, 19 nt, Artificial Sequence
  Description of Artificial Sequence: Synthetic oligonucleotide
aucguaugccauugccuga

SEQ ID NO: 414785 - RNA, 19 nt, Artificial Sequence
  Description of Artificial Sequence: Synthetic oligonucleotide
aggguccggacuguaacag

SEQ ID NO: 414786 - RNA, 19 nt, Artificial Sequence
  Description of Artificial Sequence: Synthetic oligonucleotide
ugucugacggguucccgau

SEQ ID NO: 414787 - RNA, 19 nt, Artificial Sequence
  Description of Artificial Sequence: Synthetic oligonucleotide
aagucucgcaagaaacaau

SEQ ID NO: 414788 - RNA, 19 nt, Artificial Sequence
  Description of Artificial Sequence: Synthetic oligonucleotide
gugacuccaguuacgaauc

SEQ ID NO: 414789 - RNA, 19 nt, Artificial Sequence
  Description of Artificial Sequence: Synthetic oligonucleotide
ggguaagagcacuaaguga

SEQ ID NO: 414790 - RNA, 19 nt, Artificial Sequence
  Description of Artificial Sequence: Synthetic oligonucleotide
acgaaucaugucacuauca

SEQ ID NO: 414791 - RNA, 19 nt, Artificial Sequence
  Description of Artificial Sequence: Synthetic oligonucleotide
ucuuauugacuuggagcaa

SEQ ID NO: 414792 - RNA, 19 nt, Artificial Sequence
  Description of Artificial Sequence: Synthetic oligonucleotide
ugucauuuugcagcacgau

SEQ ID NO: 414793 - RNA, 19 nt, Artificial Sequence
  Description of Artificial Sequence: Synthetic oligonucleotide
gaauuuccuccaacacaag

SEQ ID NO: 414794 - RNA, 19 nt, Artificial Sequence
  Description of Artificial Sequence: Synthetic oligonucleotide
ucaccggcuuggcuuguug

SEQ ID NO: 414795 - RNA, 19 nt, Artificial Sequence
  Description of Artificial Sequence: Synthetic oligonucleotide
auaccucacuccaggguuc

SEQ ID NO: 414796 - RNA, 19 nt, Artificial Sequence
  Description of Artificial Sequence: Synthetic oligonucleotide
gcagucaucaaacaccgcu

SEQ ID NO: 414797 - RNA, 19 nt, Artificial Sequence
  Description of Artificial Sequence: Synthetic oligonucleotide
ucguaugccauugccugaa

SEQ ID NO: 414798 - RNA, 19 nt, Artificial Sequence
  Description of Artificial Sequence: Synthetic oligonucleotide
caggauuuaugugccugag

SEQ ID NO: 414799 - RNA, 19 nt, Artificial Sequence
  Description of Artificial Sequence: Synthetic oligonucleotide
aaugcgucugguacaucaa

SEQ ID NO: 414800 - RNA, 19 nt, Artificial Sequence
  Description of Artificial Sequence: Synthetic oligonucleotide
cggucaauuauuaagagcu

SEQ ID NO: 414801 - RNA, 19 nt, Artificial Sequence
  Description of Artificial Sequence: Synthetic oligonucleotide
uauugacuuggagcaagau

SEQ ID NO: 414802 - RNA, 19 nt, Artificial Sequence
  Description of Artificial Sequence: Synthetic oligonucleotide
gcuggguaagagcacuaag

SEQ ID NO: 414803 - RNA, 19 nt, Artificial Sequence
  Description of Artificial Sequence: Synthetic oligonucleotide
cuauaacaguuauccccuc

SEQ ID NO: 414804 - RNA, 19 nt, Artificial Sequence
  Description of Artificial Sequence: Synthetic oligonucleotide
ugcucggauuuugucgcag

SEQ ID NO: 414805 - RNA, 19 nt, Artificial Sequence
  Description of Artificial Sequence: Synthetic oligonucleotide
guauguaauuccuccaauu

SEQ ID NO: 414806 - RNA, 19 nt, Artificial Sequence
  Description of Artificial Sequence: Synthetic oligonucleotide
uucucacguuuacuuccga

SEQ ID NO: 414807 - RNA, 19 nt, Artificial Sequence
  Description of Artificial Sequence: Synthetic oligonucleotide
cuuccgaagucucgcaaga

SEQ ID NO: 414808 - RNA, 19 nt, Artificial Sequence
  Description of Artificial Sequence: Synthetic oligonucleotide
ggugacuccaguuacgaau

SEQ ID NO: 414809 - RNA, 19 nt, Artificial Sequence
  Description of Artificial Sequence: Synthetic oligonucleotide
caccgggaacaguauggcc

SEQ ID NO: 414810 - RNA, 19 nt, Artificial Sequence
  Description of Artificial Sequence: Synthetic oligonucleotide
gugaguaauuaguauuuau

SEQ ID NO: 414811 - RNA, 19 nt, Artificial Sequence
  Description of Artificial Sequence: Synthetic oligonucleotide
ccauuaaucccgaagauau

SEQ ID NO: 414812 - RNA, 19 nt, Artificial Sequence
  Description of Artificial Sequence: Synthetic oligonucleotide
gacaguggacacaggguca

SEQ ID NO: 414813 - RNA, 19 nt, Artificial Sequence
  Description of Artificial Sequence: Synthetic oligonucleotide
gaguagacaugaucucaaa

SEQ ID NO: 414814 - RNA, 19 nt, Artificial Sequence
  Description of Artificial Sequence: Synthetic oligonucleotide
cugagacucauguggaaua

SEQ ID NO: 414815 - RNA, 19 nt, Artificial Sequence
  Description of Artificial Sequence: Synthetic oligonucleotide
aucuacagauuuugauguu

SEQ ID NO: 414816 - RNA, 19 nt, Artificial Sequence
  Description of Artificial Sequence: Synthetic oligonucleotide
uucaugcaaucuucagcua

SEQ ID NO: 414817 - RNA, 19 nt, Artificial Sequence
  Description of Artificial Sequence: Synthetic oligonucleotide
aguauccagugaguaauua

SEQ ID NO: 414818 - RNA, 19 nt, Artificial Sequence
  Description of Artificial Sequence: Synthetic oligonucleotide
ggggacaccaaggugacuc

SEQ ID NO: 414819 - RNA, 19 nt, Artificial Sequence
  Description of Artificial Sequence: Synthetic oligonucleotide
aggugaaaacuuccugauu

SEQ ID NO: 414820 - RNA, 19 nt, Artificial Sequence
  Description of Artificial Sequence: Synthetic oligonucleotide
ccacggucaauuauuaaga

SEQ ID NO: 414821 - RNA, 19 nt, Artificial Sequence
  Description of Artificial Sequence: Synthetic oligonucleotide
cgcaagaaacaaucuacag

SEQ ID NO: 414822 - RNA, 19 nt, Artificial Sequence
  Description of Artificial Sequence: Synthetic oligonucleotide
cagagcggucuuuucucac

SEQ ID NO: 414823 - RNA, 19 nt, Artificial Sequence
  Description of Artificial Sequence: Synthetic oligonucleotide
uggaguccuucacccgcug

SEQ ID NO: 414824 - RNA, 19 nt, Artificial Sequence
  Description of Artificial Sequence: Synthetic oligonucleotide
cuuggagcaagaugccuua

SEQ ID NO: 414825 - RNA, 19 nt, Artificial Sequence
  Description of Artificial Sequence: Synthetic oligonucleotide
acugcacuuauaagaaaua

SEQ ID NO: 414826 - RNA, 19 nt, Artificial Sequence
  Description of Artificial Sequence: Synthetic oligonucleotide
cauuacuaggguccggacu

SEQ ID NO: 414827 - RNA, 19 nt, Artificial Sequence
  Description of Artificial Sequence: Synthetic oligonucleotide
auccagugaguaauuagua

SEQ ID NO: 414828 - RNA, 19 nt, Artificial Sequence
  Description of Artificial Sequence: Synthetic oligonucleotide
ggcgagcacucacagcucc

SEQ ID NO: 414829 - RNA, 19 nt, Artificial Sequence
  Description of Artificial Sequence: Synthetic oligonucleotide
uguagcuuucuugguugau

SEQ ID NO: 414830 - RNA, 19 nt, Artificial Sequence
  Description of Artificial Sequence: Synthetic oligonucleotide
uggcauuacuaggguccgg

SEQ ID NO: 414831 - RNA, 19 nt, Artificial Sequence
  Description of Artificial Sequence: Synthetic oligonucleotide
cagccuaaguauccaguga

SEQ ID NO: 414832 - RNA, 19 nt, Artificial Sequence
  Description of Artificial Sequence: Synthetic oligonucleotide
aagccacggucaauuauua

SEQ ID NO: 414833 - RNA, 19 nt, Artificial Sequence
  Description of Artificial Sequence: Synthetic oligonucleotide
ggguucccgauucuuauaa

SEQ ID NO: 414834 - RNA, 19 nt, Artificial Sequence
  Description of Artificial Sequence: Synthetic oligonucleotide
guauggccauucuuuggaa

SEQ ID NO: 414835 - RNA, 19 nt, Artificial Sequence
  Description of Artificial Sequence: Synthetic oligonucleotide
caauugguaguagaucgua

SEQ ID NO: 414836 - RNA, 19 nt, Artificial Sequence
  Description of Artificial Sequence: Synthetic oligonucleotide
guauaaaccugagacucau

SEQ ID NO: 414837 - RNA, 19 nt, Artificial Sequence
  Description of Artificial Sequence: Synthetic oligonucleotide
gaacaguauggccauucuu

SEQ ID NO: 414838 - RNA, 19 nt, Artificial Sequence
  Description of Artificial Sequence: Synthetic oligonucleotide
ccgguccagcucuaaauag

SEQ ID NO: 414839 - RNA, 19 nt, Artificial Sequence
  Description of Artificial Sequence: Synthetic oligonucleotide
ggacuguaacaguaauaga

SEQ ID NO: 414840 - RNA, 19 nt, Artificial Sequence
  Description of Artificial Sequence: Synthetic oligonucleotide
cauuaaucccgaagauaua

SEQ ID NO: 414841 - RNA, 19 nt, Artificial Sequence
  Description of Artificial Sequence: Synthetic oligonucleotide
uuccuccaauuacgaaaau

SEQ ID NO: 414842 - RNA, 19 nt, Artificial Sequence
  Description of Artificial Sequence: Synthetic oligonucleotide
uuccgaagucucgcaagaa

SEQ ID NO: 414843 - RNA, 19 nt, Artificial Sequence
  Description of Artificial Sequence: Synthetic oligonucleotide
agccacggucaauuauuaa

SEQ ID NO: 414844 - RNA, 19 nt, Artificial Sequence
  Description of Artificial Sequence: Synthetic oligonucleotide
ugacagaagcuugguggua

SEQ ID NO: 414845 - RNA, 19 nt, Artificial Sequence
  Description of Artificial Sequence: Synthetic oligonucleotide
aggugacuccaguuacgaa

SEQ ID NO: 414846 - RNA, 19 nt, Artificial Sequence
  Description of Artificial Sequence: Synthetic oligonucleotide
cagcucuaaauaguuagcu

SEQ ID NO: 414847 - RNA, 19 nt, Artificial Sequence
  Description of Artificial Sequence: Synthetic oligonucleotide
gggaacaguauggccauuc

SEQ ID NO: 414848 - RNA, 19 nt, Artificial Sequence
  Description of Artificial Sequence: Synthetic oligonucleotide
agaaugcgucugguacauc

SEQ ID NO: 414849 - RNA, 19 nt, Artificial Sequence
  Description of Artificial Sequence: Synthetic oligonucleotide
gagacucauguggaauaaa

SEQ ID NO: 414850 - RNA, 19 nt, Artificial Sequence
  Description of Artificial Sequence: Synthetic oligonucleotide
caucaaacaccgcuguuuu

SEQ ID NO: 414851 - RNA, 19 nt, Artificial Sequence
  Description of Artificial Sequence: Synthetic oligonucleotide
ggguucucguccagagugg

SEQ ID NO: 414852 - RNA, 19 nt, Artificial Sequence
  Description of Artificial Sequence: Synthetic oligonucleotide
guguucuguagaaguaucu

SEQ ID NO: 414853 - RNA, 19 nt, Artificial Sequence
  Description of Artificial Sequence: Synthetic oligonucleotide
agcuggguaagagcacuaa

SEQ ID NO: 414854 - RNA, 19 nt, Artificial Sequence
  Description of Artificial Sequence: Synthetic oligonucleotide
ucguccagaguggcacaca

SEQ ID NO: 414855 - RNA, 19 nt, Artificial Sequence
  Description of Artificial Sequence: Synthetic oligonucleotide
guugggauggaggaacaau

SEQ ID NO: 414856 - RNA, 19 nt, Artificial Sequence
  Description of Artificial Sequence: Synthetic oligonucleotide
cuauuaucaauggcauccu

SEQ ID NO: 414857 - RNA, 19 nt, Artificial Sequence
  Description of Artificial Sequence: Synthetic oligonucleotide
gacuuggagcaagaugccu

SEQ ID NO: 414858 - RNA, 19 nt, Artificial Sequence
  Description of Artificial Sequence: Synthetic oligonucleotide
ggacugcucggauuuuguc

SEQ ID NO: 414859 - RNA, 19 nt, Artificial Sequence
  Description of Artificial Sequence: Synthetic oligonucleotide
guaguagaucguaugccau

SEQ ID NO: 414860 - RNA, 19 nt, Artificial Sequence
  Description of Artificial Sequence: Synthetic oligonucleotide
ccgaagauauagagcagga

SEQ ID NO: 414861 - RNA, 19 nt, Artificial Sequence
  Description of Artificial Sequence: Synthetic oligonucleotide
uugucgcaguugucauggu

SEQ ID NO: 414862 - RNA, 19 nt, Artificial Sequence
  Description of Artificial Sequence: Synthetic oligonucleotide
caucucagaguauguaauu

SEQ ID NO: 414863 - RNA, 19 nt, Artificial Sequence
  Description of Artificial Sequence: Synthetic oligonucleotide
gcauuacuaggguccggac

SEQ ID NO: 414864 - RNA, 19 nt, Artificial Sequence
  Description of Artificial Sequence: Synthetic oligonucleotide
gaaguaucuugcagguaau

SEQ ID NO: 414865 - RNA, 19 nt, Artificial Sequence
  Description of Artificial Sequence: Synthetic oligonucleotide
acuaggguccggacuguaa

SEQ ID NO: 414866 - RNA, 19 nt, Artificial Sequence
  Description of Artificial Sequence: Synthetic oligonucleotide
gacccacaggucgucaucu

SEQ ID NO: 414867 - RNA, 19 nt, Artificial Sequence
  Description of Artificial Sequence: Synthetic oligonucleotide
ugacggguucccgauucuu

SEQ ID NO: 414868 - RNA, 19 nt, Artificial Sequence
  Description of Artificial Sequence: Synthetic oligonucleotide
cuuuccugcuggcauuacu

SEQ ID NO: 414869 - RNA, 19 nt, Artificial Sequence
  Description of Artificial Sequence: Synthetic oligonucleotide
acgcaucucagaguaugua

SEQ ID NO: 414870 - RNA, 19 nt, Artificial Sequence
  Description of Artificial Sequence: Synthetic oligonucleotide
uacccuuuacuaggccuuu

SEQ ID NO: 414871 - RNA, 19 nt, Artificial Sequence
  Description of Artificial Sequence: Synthetic oligonucleotide
ccagugaguaauuaguauu

SEQ ID NO: 414872 - RNA, 19 nt, Artificial Sequence
  Description of Artificial Sequence: Synthetic oligonucleotide
ugccggacccggacccaca

SEQ ID NO: 414873 - RNA, 19 nt, Artificial Sequence
  Description of Artificial Sequence: Synthetic oligonucleotide
ccuaaguauccagugagua

SEQ ID NO: 414874 - RNA, 19 nt, Artificial Sequence
  Description of Artificial Sequence: Synthetic oligonucleotide
gugccggugccggacccgg

SEQ ID NO: 414875 - RNA, 19 nt, Artificial Sequence
  Description of Artificial Sequence: Synthetic oligonucleotide
gcaccgggaacaguauggc

SEQ ID NO: 414876 - RNA, 19 nt, Artificial Sequence
  Description of Artificial Sequence: Synthetic oligonucleotide
gguccggacuguaacagua

SEQ ID NO: 414877 - RNA, 19 nt, Artificial Sequence
  Description of Artificial Sequence: Synthetic oligonucleotide
ggacccacaggucgucauc

SEQ ID NO: 414878 - RNA, 19 nt, Artificial Sequence
  Description of Artificial Sequence: Synthetic oligonucleotide
guuuucggaaguggggcau

SEQ ID NO: 414879 - RNA, 19 nt, Artificial Sequence
  Description of Artificial Sequence: Synthetic oligonucleotide
gcaucucagaguauguaau

SEQ ID NO: 414880 - RNA, 19 nt, Artificial Sequence
  Description of Artificial Sequence: Synthetic oligonucleotide
cgauucuuauaaauauucu

SEQ ID NO: 414881 - RNA, 19 nt, Artificial Sequence
  Description of Artificial Sequence: Synthetic oligonucleotide
acaacgcaucucagaguau

SEQ ID NO: 414882 - RNA, 19 nt, Artificial Sequence
  Description of Artificial Sequence: Synthetic oligonucleotide
guccggacuguaacaguaa

SEQ ID NO: 414883 - RNA, 19 nt, Artificial Sequence
  Description of Artificial Sequence: Synthetic oligonucleotide
ggauuuugucgcaguuguc

SEQ ID NO: 414884 - RNA, 19 nt, Artificial Sequence
  Description of Artificial Sequence: Synthetic oligonucleotide
caagugcgaugugccggug

SEQ ID NO: 414885 - RNA, 19 nt, Artificial Sequence
  Description of Artificial Sequence: Synthetic oligonucleotide
cggauuuugucgcaguugu

SEQ ID NO: 414886 - RNA, 19 nt, Artificial Sequence
  Description of Artificial Sequence: Synthetic oligonucleotide
acccggacccacaggucgu

SEQ ID NO: 414887 - RNA, 19 nt, Artificial Sequence
  Description of Artificial Sequence: Synthetic oligonucleotide
acccuuuacuaggccuuuu

SEQ ID NO: 414888 - RNA, 19 nt, Artificial Sequence
  Description of Artificial Sequence: Synthetic oligonucleotide
ccggacuguaacaguaaua

SEQ ID NO: 414889 - RNA, 19 nt, Artificial Sequence
  Description of Artificial Sequence: Synthetic oligonucleotide
cgaaucaugucacuaucau

SEQ ID NO: 414890 - RNA, 19 nt, Artificial Sequence
  Description of Artificial Sequence: Synthetic oligonucleotide
gugccggacccggacccac

SEQ ID NO: 414891 - RNA, 19 nt, Artificial Sequence
  Description of Artificial Sequence: Synthetic oligonucleotide
gagcacuaagugacgucuu

SEQ ID NO: 414892 - RNA, 19 nt, Artificial Sequence
  Description of Artificial Sequence: Synthetic oligonucleotide
gcucggauuuugucgcagu

SEQ ID NO: 414893 - RNA, 19 nt, Artificial Sequence
  Description of Artificial Sequence: Synthetic oligonucleotide
ccggugccggacccggacc

SEQ ID NO: 414894 - RNA, 19 nt, Artificial Sequence
  Description of Artificial Sequence: Synthetic oligonucleotide
cccgauucuuauaaauauu

SEQ ID NO: 414895 - RNA, 19 nt, Artificial Sequence
  Description of Artificial Sequence: Synthetic oligonucleotide
ggaaugaguuuuacccuuu

SEQ ID NO: 414896 - RNA, 19 nt, Artificial Sequence
  Description of Artificial Sequence: Synthetic oligonucleotide
ggaccgggaggagcaccag

SEQ ID NO: 414897 - RNA, 19 nt, Artificial Sequence
  Description of Artificial Sequence: Synthetic oligonucleotide
cugacggguucccgauucu

SEQ ID NO: 414898 - RNA, 19 nt, Artificial Sequence
  Description of Artificial Sequence: Synthetic oligonucleotide
ggguccggacuguaacagu

SEQ ID NO: 414899 - RNA, 19 nt, Artificial Sequence
  Description of Artificial Sequence: Synthetic oligonucleotide
ccugagacucauguggaau

SEQ ID NO: 414900 - RNA, 19 nt, Artificial Sequence
  Description of Artificial Sequence: Synthetic oligonucleotide
ggacccggacccacagguc

SEQ ID NO: 414901 - RNA, 19 nt, Artificial Sequence
  Description of Artificial Sequence: Synthetic oligonucleotide
gcgagcacucacagcucca

SEQ ID NO: 414902 - RNA, 19 nt, Artificial Sequence
  Description of Artificial Sequence: Synthetic oligonucleotide
ccgggaacaguauggccau

SEQ ID NO: 414903 - RNA, 19 nt, Artificial Sequence
  Description of Artificial Sequence: Synthetic oligonucleotide
ccaguugugcaagcuuacu

SEQ ID NO: 414904 - RNA, 19 nt, Artificial Sequence
  Description of Artificial Sequence: Synthetic oligonucleotide
guccaccgggagagcugga

SEQ ID NO: 414905 - RNA, 19 nt, Artificial Sequence
  Description of Artificial Sequence: Synthetic oligonucleotide
cggguucccgauucuuaua

SEQ ID NO: 414906 - RNA, 19 nt, Artificial Sequence
  Description of Artificial Sequence: Synthetic oligonucleotide
cggcuuggcuuguugggau

SEQ ID NO: 414907 - RNA, 19 nt, Artificial Sequence
  Description of Artificial Sequence: Synthetic oligonucleotide
gcaggacugcucggauuuu

SEQ ID NO: 414908 - RNA, 19 nt, Artificial Sequence
  Description of Artificial Sequence: Synthetic oligonucleotide
cggacccacaggucgucau

SEQ ID NO: 414909 - RNA, 19 nt, Artificial Sequence
  Description of Artificial Sequence: Synthetic oligonucleotide
aaucucacuugcuaggugc

SEQ ID NO: 414910 - RNA, 19 nt, Artificial Sequence
  Description of Artificial Sequence: Synthetic oligonucleotide
agaagcauuagccuugucc

SEQ ID NO: 414911 - RNA, 19 nt, Artificial Sequence
  Description of Artificial Sequence: Synthetic oligonucleotide
gaaauuugaauguuugagg

SEQ ID NO: 414912 - RNA, 19 nt, Artificial Sequence
  Description of Artificial Sequence: Synthetic oligonucleotide
uguacgagcagccaagucc

SEQ ID NO: 414913 - RNA, 19 nt, Artificial Sequence
  Description of Artificial Sequence: Synthetic oligonucleotide
uuugcuaacuguuugcggc

SEQ ID NO: 414914 - RNA, 19 nt, Artificial Sequence
  Description of Artificial Sequence: Synthetic oligonucleotide
agaaauuugaauguuugag

SEQ ID NO: 414915 - RNA, 19 nt, Artificial Sequence
  Description of Artificial Sequence: Synthetic oligonucleotide
uucuaacugagucaggcgc

SEQ ID NO: 414916 - RNA, 19 nt, Artificial Sequence
  Description of Artificial Sequence: Synthetic oligonucleotide
ugagauuaagcgcaagccc

SEQ ID NO: 414917 - RNA, 19 nt, Artificial Sequence
  Description of Artificial Sequence: Synthetic oligonucleotide
uacaacacgaucccaaucu

SEQ ID NO: 414918 - RNA, 19 nt, Artificial Sequence
  Description of Artificial Sequence: Synthetic oligonucleotide
ucauuuaugccugucaggc

SEQ ID NO: 414919 - RNA, 19 nt, Artificial Sequence
  Description of Artificial Sequence: Synthetic oligonucleotide
gagauuaagcgcaagcccg

SEQ ID NO: 414920 - RNA, 19 nt, Artificial Sequence
  Description of Artificial Sequence: Synthetic oligonucleotide
ugugagauuaagcgcaagc

SEQ ID NO: 414921 - RNA, 19 nt, Artificial Sequence
  Description of Artificial Sequence: Synthetic oligonucleotide
aauacugucaggaucggcu

SEQ ID NO: 414922 - RNA, 19 nt, Artificial Sequence
  Description of Artificial Sequence: Synthetic oligonucleotide
gaagcauuagccuugucca

SEQ ID NO: 414923 - RNA, 19 nt, Artificial Sequence
  Description of Artificial Sequence: Synthetic oligonucleotide
guaguagccgcucagcccg

SEQ ID NO: 414924 - RNA, 19 nt, Artificial Sequence
  Description of Artificial Sequence: Synthetic oligonucleotide
acaagcacggcacugcagg

SEQ ID NO: 414925 - RNA, 19 nt, Artificial Sequence
  Description of Artificial Sequence: Synthetic oligonucleotide
gugaaguuccaccaaagcc

SEQ ID NO: 414926 - RNA, 19 nt, Artificial Sequence
  Description of Artificial Sequence: Synthetic oligonucleotide
gaucacaaucacaagcacg

SEQ ID NO: 414927 - RNA, 19 nt, Artificial Sequence
  Description of Artificial Sequence: Synthetic oligonucleotide
aggauugguccccuggugc

SEQ ID NO: 414928 - RNA, 19 nt, Artificial Sequence
  Description of Artificial Sequence: Synthetic oligonucleotide
acgcguguggaucagugcc

SEQ ID NO: 414929 - RNA, 19 nt, Artificial Sequence
  Description of Artificial Sequence: Synthetic oligonucleotide
agcucuuuaauguguggac

SEQ ID NO: 414930 - RNA, 19 nt, Artificial Sequence
  Description of Artificial Sequence: Synthetic oligonucleotide
aagaugcucucaaaggcac

SEQ ID NO: 414931 - RNA, 19 nt, Artificial Sequence
  Description of Artificial Sequence: Synthetic oligonucleotide
aauuugaauguuugaggau

SEQ ID NO: 414932 - RNA, 19 nt, Artificial Sequence
  Description of Artificial Sequence: Synthetic oligonucleotide
aagccggcaugacaguggc

SEQ ID NO: 414933 - RNA, 19 nt, Artificial Sequence
  Description of Artificial Sequence: Synthetic oligonucleotide
ucuggauaaguucccgaag

SEQ ID NO: 414934 - RNA, 19 nt, Artificial Sequence
  Description of Artificial Sequence: Synthetic oligonucleotide
ugcaugguuggcauugaag

SEQ ID NO: 414935 - RNA, 19 nt, Artificial Sequence
  Description of Artificial Sequence: Synthetic oligonucleotide
caggagagcauccaauugc

SEQ ID NO: 414936 - RNA, 19 nt, Artificial Sequence
  Description of Artificial Sequence: Synthetic oligonucleotide
gccucuacaagcuuggcgg

SEQ ID NO: 414937 - RNA, 19 nt, Artificial Sequence
  Description of Artificial Sequence: Synthetic oligonucleotide
gaauguuugaggaugucca

SEQ ID NO: 414938 - RNA, 19 nt, Artificial Sequence
  Description of Artificial Sequence: Synthetic oligonucleotide
aguuugguacuggucaccc

SEQ ID NO: 414939 - RNA, 19 nt, Artificial Sequence
  Description of Artificial Sequence: Synthetic oligonucleotide
uguaguagccgcucagccc

SEQ ID NO: 414940 - RNA, 19 nt, Artificial Sequence
  Description of Artificial Sequence: Synthetic oligonucleotide
uccuguacaacacgauccc

SEQ ID NO: 414941 - RNA, 19 nt, Artificial Sequence
  Description of Artificial Sequence: Synthetic oligonucleotide
ugaagcacacugcgcaucc

SEQ ID NO: 414942 - RNA, 19 nt, Artificial Sequence
  Description of Artificial Sequence: Synthetic oligonucleotide
uguagaugcugccaggcua

SEQ ID NO: 414943 - RNA, 19 nt, Artificial Sequence
  Description of Artificial Sequence: Synthetic oligonucleotide
ucuaacugagucaggcgcu

SEQ ID NO: 414944 - RNA, 19 nt, Artificial Sequence
  Description of Artificial Sequence: Synthetic oligonucleotide
guuugcuaacuguuugcgg

SEQ ID NO: 414945 - RNA, 19 nt, Artificial Sequence
  Description of Artificial Sequence: Synthetic oligonucleotide
gaggguugucuauuccucg

SEQ ID NO: 414946 - RNA, 19 nt, Artificial Sequence
  Description of Artificial Sequence: Synthetic oligonucleotide
cuucuaacugagucaggcg

SEQ ID NO: 414947 - RNA, 19 nt, Artificial Sequence
  Description of Artificial Sequence: Synthetic oligonucleotide
acggcagcuacaauggccc

SEQ ID NO: 414948 - RNA, 19 nt, Artificial Sequence
  Description of Artificial Sequence: Synthetic oligonucleotide
cucagcccgacgcacaucg

SEQ ID NO: 414949 - RNA, 19 nt, Artificial Sequence
  Description of Artificial Sequence: Synthetic oligonucleotide
aagcauuagccuuguccag

SEQ ID NO: 414950 - RNA, 19 nt, Artificial Sequence
  Description of Artificial Sequence: Synthetic oligonucleotide
gagucucagacacucggcc

SEQ ID NO: 414951 - RNA, 19 nt, Artificial Sequence
  Description of Artificial Sequence: Synthetic oligonucleotide
cacaguuugguacugguca

SEQ ID NO: 414952 - RNA, 19 nt, Artificial Sequence
  Description of Artificial Sequence: Synthetic oligonucleotide
gugagauuaagcgcaagcc

SEQ ID NO: 414953 - RNA, 19 nt, Artificial Sequence
  Description of Artificial Sequence: Synthetic oligonucleotide
gaauugcucacugggcugg

SEQ ID NO: 414954 - RNA, 19 nt, Artificial Sequence
  Description of Artificial Sequence: Synthetic oligonucleotide
auugcguccacauccgcca

SEQ ID NO: 414955 - RNA, 19 nt, Artificial Sequence
  Description of Artificial Sequence: Synthetic oligonucleotide
ucguguacgagcagccaag

SEQ ID NO: 414956 - RNA, 19 nt, Artificial Sequence
  Description of Artificial Sequence: Synthetic oligonucleotide
aacacgaucccaaucucca

SEQ ID NO: 414957 - RNA, 19 nt, Artificial Sequence
  Description of Artificial Sequence: Synthetic oligonucleotide
uuccucgaggaucacaauc

SEQ ID NO: 414958 - RNA, 19 nt, Artificial Sequence
  Description of Artificial Sequence: Synthetic oligonucleotide
ugcuuuauugaaagcacuu

SEQ ID NO: 414959 - RNA, 19 nt, Artificial Sequence
  Description of Artificial Sequence: Synthetic oligonucleotide
ucuacaagcuuggcgguag

SEQ ID NO: 414960 - RNA, 19 nt, Artificial Sequence
  Description of Artificial Sequence: Synthetic oligonucleotide
ugguuugcuaacuguuugc

SEQ ID NO: 414961 - RNA, 19 nt, Artificial Sequence
  Description of Artificial Sequence: Synthetic oligonucleotide
aguccgcucacuugcagag

SEQ ID NO: 414962 - RNA, 19 nt, Artificial Sequence
  Description of Artificial Sequence: Synthetic oligonucleotide
auaguaugugccaggauug

SEQ ID NO: 414963 - RNA, 19 nt, Artificial Sequence
  Description of Artificial Sequence: Synthetic oligonucleotide
uuaagcgcaagcccgucuc

SEQ ID NO: 414964 - RNA, 19 nt, Artificial Sequence
  Description of Artificial Sequence: Synthetic oligonucleotide
uucuggauaaguucccgaa

SEQ ID NO: 414965 - RNA, 19 nt, Artificial Sequence
  Description of Artificial Sequence: Synthetic oligonucleotide
uuugguuugcuaacuguuu

SEQ ID NO: 414966 - RNA, 19 nt, Artificial Sequence
  Description of Artificial Sequence: Synthetic oligonucleotide
cuuuaauguguggacacac

SEQ ID NO: 414967 - RNA, 19 nt, Artificial Sequence
  Description of Artificial Sequence: Synthetic oligonucleotide
acaacacgaucccaaucuc

SEQ ID NO: 414968 - RNA, 19 nt, Artificial Sequence
  Description of Artificial Sequence: Synthetic oligonucleotide
agcucggccugugugagcc

SEQ ID NO: 414969 - RNA, 19 nt, Artificial Sequence
  Description of Artificial Sequence: Synthetic oligonucleotide
guccuguacaacacgaucc

SEQ ID NO: 414970 - RNA, 19 nt, Artificial Sequence
  Description of Artificial Sequence: Synthetic oligonucleotide
uaggcaccuaagaaauuug

SEQ ID NO: 414971 - RNA, 19 nt, Artificial Sequence
  Description of Artificial Sequence: Synthetic oligonucleotide
aagcacggcacugcaggcc

SEQ ID NO: 414972 - RNA, 19 nt, Artificial Sequence
  Description of Artificial Sequence: Synthetic oligonucleotide
acgaucccaaucuccaaag

SEQ ID NO: 414973 - RNA, 19 nt, Artificial Sequence
  Description of Artificial Sequence: Synthetic oligonucleotide
uggacacacacgcgugugg

SEQ ID NO: 414974 - RNA, 19 nt, Artificial Sequence
  Description of Artificial Sequence: Synthetic oligonucleotide
ugucuauuccucgaggauc

SEQ ID NO: 414975 - RNA, 19 nt, Artificial Sequence
  Description of Artificial Sequence: Synthetic oligonucleotide
ugaggguugucuauuccuc

SEQ ID NO: 414976 - RNA, 19 nt, Artificial Sequence
  Description of Artificial Sequence: Synthetic oligonucleotide
caacacgaucccaaucucc

SEQ ID NO: 414977 - RNA, 19 nt, Artificial Sequence
  Description of Artificial Sequence: Synthetic oligonucleotide
acgcacaucgcccauagua

SEQ ID NO: 414978 - RNA, 19 nt, Artificial Sequence
  Description of Artificial Sequence: Synthetic oligonucleotide
aucgcccauaguaugugcc

SEQ ID NO: 414979 - RNA, 19 nt, Artificial Sequence
  Description of Artificial Sequence: Synthetic oligonucleotide
uguacaacacgaucccaau

SEQ ID NO: 414980 - RNA, 19 nt, Artificial Sequence
  Description of Artificial Sequence: Synthetic oligonucleotide
ugugagccgagcccggccc

SEQ ID NO: 414981 - RNA, 19 nt, Artificial Sequence
  Description of Artificial Sequence: Synthetic oligonucleotide
gauugcguccacauccgcc

SEQ ID NO: 414982 - RNA, 19 nt, Artificial Sequence
  Description of Artificial Sequence: Synthetic oligonucleotide
aguuguucugcccgggccu

SEQ ID NO: 414983 - RNA, 19 nt, Artificial Sequence
  Description of Artificial Sequence: Synthetic oligonucleotide
cuagcacaggauugguccc

SEQ ID NO: 414984 - RNA, 19 nt, Artificial Sequence
  Description of Artificial Sequence: Synthetic oligonucleotide
aggaucggcucccuccugg

SEQ ID NO: 414985 - RNA, 19 nt, Artificial Sequence
  Description of Artificial Sequence: Synthetic oligonucleotide
ucuuuaauguguggacaca

SEQ ID NO: 414986 - RNA, 19 nt, Artificial Sequence
  Description of Artificial Sequence: Synthetic oligonucleotide
aaacaccugagaagccacg

SEQ ID NO: 414987 - RNA, 19 nt, Artificial Sequence
  Description of Artificial Sequence: Synthetic oligonucleotide
caucucaauacugucagga

SEQ ID NO: 414988 - RNA, 19 nt, Artificial Sequence
  Description of Artificial Sequence: Synthetic oligonucleotide
cucacuugcuaggugcugg

SEQ ID NO: 414989 - RNA, 19 nt, Artificial Sequence
  Description of Artificial Sequence: Synthetic oligonucleotide
ugcaaccaaggccaccgca

SEQ ID NO: 414990 - RNA, 19 nt, Artificial Sequence
  Description of Artificial Sequence: Synthetic oligonucleotide
gacggcagcuacaauggcc

SEQ ID NO: 414991 - RNA, 19 nt, Artificial Sequence
  Description of Artificial Sequence: Synthetic oligonucleotide
uaugugccaggauugcguc

SEQ ID NO: 414992 - RNA, 19 nt, Artificial Sequence
  Description of Artificial Sequence: Synthetic oligonucleotide
ucaagcugccucaguguga

SEQ ID NO: 414993 - RNA, 19 nt, Artificial Sequence
  Description of Artificial Sequence: Synthetic oligonucleotide
uacgggaagagagcugucc

SEQ ID NO: 414994 - RNA, 19 nt, Artificial Sequence
  Description of Artificial Sequence: Synthetic oligonucleotide
acuguuugcggcugaaguu

SEQ ID NO: 414995 - RNA, 19 nt, Artificial Sequence
  Description of Artificial Sequence: Synthetic oligonucleotide
gguuugcuaacuguuugcg

SEQ ID NO: 414996 - RNA, 19 nt, Artificial Sequence
  Description of Artificial Sequence: Synthetic oligonucleotide
ucacaguuugguacugguc

SEQ ID NO: 414997 - RNA, 19 nt, Artificial Sequence
  Description of Artificial Sequence: Synthetic oligonucleotide
acacacacgcguguggauc

SEQ ID NO: 414998 - RNA, 19 nt, Artificial Sequence
  Description of Artificial Sequence: Synthetic oligonucleotide
auuaagcgcaagcccgucu

SEQ ID NO: 414999 - RNA, 19 nt, Artificial Sequence
  Description of Artificial Sequence: Synthetic oligonucleotide
uugcuaacuguuugcggcu

SEQ ID NO: 415000 - RNA, 19 nt, Artificial Sequence
  Description of Artificial Sequence: Synthetic oligonucleotide
ugaguccgcucacuugcag

SEQ ID NO: 415001 - RNA, 19 nt, Artificial Sequence
  Description of Artificial Sequence: Synthetic oligonucleotide
caagcugccucagugugag

SEQ ID NO: 415002 - RNA, 19 nt, Artificial Sequence
  Description of Artificial Sequence: Synthetic oligonucleotide
uucuguccgacgccgggug

SEQ ID NO: 415003 - RNA, 19 nt, Artificial Sequence
  Description of Artificial Sequence: Synthetic oligonucleotide
agucucagacacucggcca

SEQ ID NO: 415004 - RNA, 19 nt, Artificial Sequence
  Description of Artificial Sequence: Synthetic oligonucleotide
guuagcucugcuucuaacu

SEQ ID NO: 415005 - RNA, 19 nt, Artificial Sequence
  Description of Artificial Sequence: Synthetic oligonucleotide
cauaguaugugccaggauu

SEQ ID NO: 415006 - RNA, 19 nt, Artificial Sequence
  Description of Artificial Sequence: Synthetic oligonucleotide
caucccgacauccggcacc

SEQ ID NO: 415007 - RNA, 19 nt, Artificial Sequence
  Description of Artificial Sequence: Synthetic oligonucleotide
uggguacgggaagagagcu

SEQ ID NO: 415008 - RNA, 19 nt, Artificial Sequence
  Description of Artificial Sequence: Synthetic oligonucleotide
gcgagucucagacacucgg

SEQ ID NO: 415009 - RNA, 19 nt, Artificial Sequence
  Description of Artificial Sequence: Synthetic oligonucleotide
agcccgucucucuccagac

SEQ ID NO: 415010 - RNA, 19 nt, Artificial Sequence
  Description of Artificial Sequence: Synthetic oligonucleotide
agcuacaauggcccgugga

SEQ ID NO: 415011 - RNA, 19 nt, Artificial Sequence
  Description of Artificial Sequence: Synthetic oligonucleotide
guacuggucacccacuugu

SEQ ID NO: 415012 - RNA, 19 nt, Artificial Sequence
  Description of Artificial Sequence: Synthetic oligonucleotide
gacgcguucugcaaucuca

SEQ ID NO: 415013 - RNA, 19 nt, Artificial Sequence
  Description of Artificial Sequence: Synthetic oligonucleotide
aucccgacauccggcaccc

SEQ ID NO: 415014 - RNA, 19 nt, Artificial Sequence
  Description of Artificial Sequence: Synthetic oligonucleotide
cugugggcaugucggaugc

SEQ ID NO: 415015 - RNA, 19 nt, Artificial Sequence
  Description of Artificial Sequence: Synthetic oligonucleotide
acauccgccaggcuucgga

SEQ ID NO: 415016 - RNA, 19 nt, Artificial Sequence
  Description of Artificial Sequence: Synthetic oligonucleotide
cuguacaacacgaucccaa

SEQ ID NO: 415017 - RNA, 19 nt, Artificial Sequence
  Description of Artificial Sequence: Synthetic oligonucleotide
ugcuagcacaggauugguc

SEQ ID NO: 415018 - RNA, 19 nt, Artificial Sequence
  Description of Artificial Sequence: Synthetic oligonucleotide
accuucuaccagugcccgc

SEQ ID NO: 415019 - RNA, 19 nt, Artificial Sequence
  Description of Artificial Sequence: Synthetic oligonucleotide
accgcaacggggcugccca

SEQ ID NO: 415020 - RNA, 19 nt, Artificial Sequence
  Description of Artificial Sequence: Synthetic oligonucleotide
aggauugcguccacauccg

SEQ ID NO: 415021 - RNA, 19 nt, Artificial Sequence
  Description of Artificial Sequence: Synthetic oligonucleotide
caucgcccauaguaugugc

SEQ ID NO: 415022 - RNA, 19 nt, Artificial Sequence
  Description of Artificial Sequence: Synthetic oligonucleotide
agcccgacgcacaucgccc

SEQ ID NO: 415023 - RNA, 19 nt, Artificial Sequence
  Description of Artificial Sequence: Synthetic oligonucleotide
agcacacugcgcauccugg

SEQ ID NO: 415024 - RNA, 19 nt, Artificial Sequence
  Description of Artificial Sequence: Synthetic oligonucleotide
uaagcgcaagcccgucucu

SEQ ID NO: 415025 - RNA, 19 nt, Artificial Sequence
  Description of Artificial Sequence: Synthetic oligonucleotide
uucggacgcguucugcaau

SEQ ID NO: 415026 - RNA, 19 nt, Artificial Sequence
  Description of Artificial Sequence: Synthetic oligonucleotide
aggagagcauccaauugcu

SEQ ID NO: 415027 - RNA, 19 nt, Artificial Sequence
  Description of Artificial Sequence: Synthetic oligonucleotide
ucacccacuuguucccgca

SEQ ID NO: 415028 - RNA, 19 nt, Artificial Sequence
  Description of Artificial Sequence: Synthetic oligonucleotide
ccaugagcacuucuguccg

SEQ ID NO: 415029 - RNA, 19 nt, Artificial Sequence
  Description of Artificial Sequence: Synthetic oligonucleotide
gugcaucuuguaguagccg

SEQ ID NO: 415030 - RNA, 19 nt, Artificial Sequence
  Description of Artificial Sequence: Synthetic oligonucleotide
acacccguuugcugcaacu

SEQ ID NO: 415031 - RNA, 19 nt, Artificial Sequence
  Description of Artificial Sequence: Synthetic oligonucleotide
cagcccgacgcacaucgcc

SEQ ID NO: 415032 - RNA, 19 nt, Artificial Sequence
  Description of Artificial Sequence: Synthetic oligonucleotide
acgcguucugcaaucucac

SEQ ID NO: 415033 - RNA, 19 nt, Artificial Sequence
  Description of Artificial Sequence: Synthetic oligonucleotide
ugcuaacuguuugcggcug

SEQ ID NO: 415034 - RNA, 19 nt, Artificial Sequence
  Description of Artificial Sequence: Synthetic oligonucleotide
cacgcguguggaucagugc

SEQ ID NO: 415035 - RNA, 19 nt, Artificial Sequence
  Description of Artificial Sequence: Synthetic oligonucleotide
ugccacccgcucuuguacc

SEQ ID NO: 415036 - RNA, 19 nt, Artificial Sequence
  Description of Artificial Sequence: Synthetic oligonucleotide
gccugaagcacacugcgca

SEQ ID NO: 415037 - RNA, 19 nt, Artificial Sequence
  Description of Artificial Sequence: Synthetic oligonucleotide
caaagccggcaugacagug

SEQ ID NO: 415038 - RNA, 19 nt, Artificial Sequence
  Description of Artificial Sequence: Synthetic oligonucleotide
uaaguucccgaagcuccug

SEQ ID NO: 415039 - RNA, 19 nt, Artificial Sequence
  Description of Artificial Sequence: Synthetic oligonucleotide
agauuaagcgcaagcccgu

SEQ ID NO: 415040 - RNA, 19 nt, Artificial Sequence
  Description of Artificial Sequence: Synthetic oligonucleotide
acaucgcccauaguaugug

SEQ ID NO: 415041 - RNA, 19 nt, Artificial Sequence
  Description of Artificial Sequence: Synthetic oligonucleotide
cacccgcucuuguaccugg

SEQ ID NO: 415042 - RNA, 19 nt, Artificial Sequence
  Description of Artificial Sequence: Synthetic oligonucleotide
cccgcaguuguucugcccg

SEQ ID NO: 415043 - RNA, 19 nt, Artificial Sequence
  Description of Artificial Sequence: Synthetic oligonucleotide
caggauugguccccuggug

SEQ ID NO: 415044 - RNA, 19 nt, Artificial Sequence
  Description of Artificial Sequence: Synthetic oligonucleotide
uuggccccuagaagcauua

SEQ ID NO: 415045 - RNA, 19 nt, Artificial Sequence
  Description of Artificial Sequence: Synthetic oligonucleotide
ucaucccgacauccggcac

SEQ ID NO: 415046 - RNA, 19 nt, Artificial Sequence
  Description of Artificial Sequence: Synthetic oligonucleotide
gucguguacgagcagccaa

SEQ ID NO: 415047 - RNA, 19 nt, Artificial Sequence
  Description of Artificial Sequence: Synthetic oligonucleotide
agcgcaagcccgucucucu

SEQ ID NO: 415048 - RNA, 19 nt, Artificial Sequence
  Description of Artificial Sequence: Synthetic oligonucleotide
cagcgcacgccagacacgc

SEQ ID NO: 415049 - RNA, 19 nt, Artificial Sequence
  Description of Artificial Sequence: Synthetic oligonucleotide
ccaggcgucguguacgagc

SEQ ID NO: 415050 - RNA, 19 nt, Artificial Sequence
  Description of Artificial Sequence: Synthetic oligonucleotide
cauccgccaggcuucggac

SEQ ID NO: 415051 - RNA, 19 nt, Artificial Sequence
  Description of Artificial Sequence: Synthetic oligonucleotide
caggcgucguguacgagca

SEQ ID NO: 415052 - RNA, 19 nt, Artificial Sequence
  Description of Artificial Sequence: Synthetic oligonucleotide
guggguacgggaagagagc

SEQ ID NO: 415053 - RNA, 19 nt, Artificial Sequence
  Description of Artificial Sequence: Synthetic oligonucleotide
guacugcaaggguagaggu

SEQ ID NO: 415054 - RNA, 19 nt, Artificial Sequence
  Description of Artificial Sequence: Synthetic oligonucleotide
ggccccuagaagcauuagc

SEQ ID NO: 415055 - RNA, 19 nt, Artificial Sequence
  Description of Artificial Sequence: Synthetic oligonucleotide
cauuagccuuguccagggc

SEQ ID NO: 415056 - RNA, 19 nt, Artificial Sequence
  Description of Artificial Sequence: Synthetic oligonucleotide
cuaacugagucaggcgcuc

SEQ ID NO: 415057 - RNA, 19 nt, Artificial Sequence
  Description of Artificial Sequence: Synthetic oligonucleotide
cacacacgcguguggauca

SEQ ID NO: 415058 - RNA, 19 nt, Artificial Sequence
  Description of Artificial Sequence: Synthetic oligonucleotide
guagccgcucagcccgacg

SEQ ID NO: 415059 - RNA, 19 nt, Artificial Sequence
  Description of Artificial Sequence: Synthetic oligonucleotide
cugaggguugucuauuccu

SEQ ID NO: 415060 - RNA, 19 nt, Artificial Sequence
  Description of Artificial Sequence: Synthetic oligonucleotide
gcacaucgcccauaguaug

SEQ ID NO: 415061 - RNA, 19 nt, Artificial Sequence
  Description of Artificial Sequence: Synthetic oligonucleotide
ucuguccgacgccgggugu

SEQ ID NO: 415062 - RNA, 19 nt, Artificial Sequence
  Description of Artificial Sequence: Synthetic oligonucleotide
cacgaucccaaucuccaaa

SEQ ID NO: 415063 - RNA, 19 nt, Artificial Sequence
  Description of Artificial Sequence: Synthetic oligonucleotide
acacgcguguggaucagug

SEQ ID NO: 415064 - RNA, 19 nt, Artificial Sequence
  Description of Artificial Sequence: Synthetic oligonucleotide
cugugugagccgagcccgg

SEQ ID NO: 415065 - RNA, 19 nt, Artificial Sequence
  Description of Artificial Sequence: Synthetic oligonucleotide
guaugugccaggauugcgu

SEQ ID NO: 415066 - RNA, 19 nt, Artificial Sequence
  Description of Artificial Sequence: Synthetic oligonucleotide
uuaugccugucaggcucag

SEQ ID NO: 415067 - RNA, 19 nt, Artificial Sequence
  Description of Artificial Sequence: Synthetic oligonucleotide
uggcacggcucugagcacu

SEQ ID NO: 415068 - RNA, 19 nt, Artificial Sequence
  Description of Artificial Sequence: Synthetic oligonucleotide
guacgagcagccaaguccu

SEQ ID NO: 415069 - RNA, 19 nt, Artificial Sequence
  Description of Artificial Sequence: Synthetic oligonucleotide
ucgucccgcaguuguucug

SEQ ID NO: 415070 - RNA, 19 nt, Artificial Sequence
  Description of Artificial Sequence: Synthetic oligonucleotide
uccccuggugccccacaca

SEQ ID NO: 415071 - RNA, 19 nt, Artificial Sequence
  Description of Artificial Sequence: Synthetic oligonucleotide
uacgagcagccaaguccug

SEQ ID NO: 415072 - RNA, 19 nt, Artificial Sequence
  Description of Artificial Sequence: Synthetic oligonucleotide
guuugguacuggucaccca

SEQ ID NO: 415073 - RNA, 19 nt, Artificial Sequence
  Description of Artificial Sequence: Synthetic oligonucleotide
ugucaggaucggcucccuc

SEQ ID NO: 415074 - RNA, 19 nt, Artificial Sequence
  Description of Artificial Sequence: Synthetic oligonucleotide
agcgcccucacaguuuggu

SEQ ID NO: 415075 - RNA, 19 nt, Artificial Sequence
  Description of Artificial Sequence: Synthetic oligonucleotide
gacguucauucucuucaua

SEQ ID NO: 415076 - RNA, 19 nt, Artificial Sequence
  Description of Artificial Sequence: Synthetic oligonucleotide
ccgcucuuguaccuggugc

SEQ ID NO: 415077 - RNA, 19 nt, Artificial Sequence
  Description of Artificial Sequence: Synthetic oligonucleotide
acagcggcgcccaaccacu

SEQ ID NO: 415078 - RNA, 19 nt, Artificial Sequence
  Description of Artificial Sequence: Synthetic oligonucleotide
cacccagcacacccguuug

SEQ ID NO: 415079 - RNA, 19 nt, Artificial Sequence
  Description of Artificial Sequence: Synthetic oligonucleotide
cucacaguuugguacuggu

SEQ ID NO: 415080 - RNA, 19 nt, Artificial Sequence
  Description of Artificial Sequence: Synthetic oligonucleotide
ucagcccgacgcacaucgc

SEQ ID NO: 415081 - RNA, 19 nt, Artificial Sequence
  Description of Artificial Sequence: Synthetic oligonucleotide
guguacgagcagccaaguc

SEQ ID NO: 415082 - RNA, 19 nt, Artificial Sequence
  Description of Artificial Sequence: Synthetic oligonucleotide
uugcggcugaaguuuucuu

SEQ ID NO: 415083 - RNA, 19 nt, Artificial Sequence
  Description of Artificial Sequence: Synthetic oligonucleotide
gugcccgcugugcaucuug

SEQ ID NO: 415084 - RNA, 19 nt, Artificial Sequence
  Description of Artificial Sequence: Synthetic oligonucleotide
agucaggcgcucagugguc

SEQ ID NO: 415085 - RNA, 19 nt, Artificial Sequence
  Description of Artificial Sequence: Synthetic oligonucleotide
ggcgucguguacgagcagc

SEQ ID NO: 415086 - RNA, 19 nt, Artificial Sequence
  Description of Artificial Sequence: Synthetic oligonucleotide
gcuaccaucucaauacugu

SEQ ID NO: 415087 - RNA, 19 nt, Artificial Sequence
  Description of Artificial Sequence: Synthetic oligonucleotide
gagcccggcccagagccag

SEQ ID NO: 415088 - RNA, 19 nt, Artificial Sequence
  Description of Artificial Sequence: Synthetic oligonucleotide
ggggugacaagcaggaaaa

SEQ ID NO: 415089 - RNA, 19 nt, Artificial Sequence
  Description of Artificial Sequence: Synthetic oligonucleotide
cauaguagccaggggcaca

SEQ ID NO: 415090 - RNA, 19 nt, Artificial Sequence
  Description of Artificial Sequence: Synthetic oligonucleotide
gguacgggaagagagcugu

SEQ ID NO: 415091 - RNA, 19 nt, Artificial Sequence
  Description of Artificial Sequence: Synthetic oligonucleotide
cacaucgcccauaguaugu

SEQ ID NO: 415092 - RNA, 19 nt, Artificial Sequence
  Description of Artificial Sequence: Synthetic oligonucleotide
gcagcuacaauggcccgug

SEQ ID NO: 415093 - RNA, 19 nt, Artificial Sequence
  Description of Artificial Sequence: Synthetic oligonucleotide
uagaagcauuagccuuguc

SEQ ID NO: 415094 - RNA, 19 nt, Artificial Sequence
  Description of Artificial Sequence: Synthetic oligonucleotide
cacccguuugcugcaacuc

SEQ ID NO: 415095 - RNA, 19 nt, Artificial Sequence
  Description of Artificial Sequence: Synthetic oligonucleotide
acggugacacugaggguug

SEQ ID NO: 415096 - RNA, 19 nt, Artificial Sequence
  Description of Artificial Sequence: Synthetic oligonucleotide
ggcacucagaacaaguccu

SEQ ID NO: 415097 - RNA, 19 nt, Artificial Sequence
  Description of Artificial Sequence: Synthetic oligonucleotide
ccgggugucugcugaauug

SEQ ID NO: 415098 - RNA, 19 nt, Artificial Sequence
  Description of Artificial Sequence: Synthetic oligonucleotide
uucucacccucagcacggc

SEQ ID NO: 415099 - RNA, 19 nt, Artificial Sequence
  Description of Artificial Sequence: Synthetic oligonucleotide
ccguggaacggugacacug

SEQ ID NO: 415100 - RNA, 19 nt, Artificial Sequence
  Description of Artificial Sequence: Synthetic oligonucleotide
ggagcuuuuggcacucaga

SEQ ID NO: 415101 - RNA, 19 nt, Artificial Sequence
  Description of Artificial Sequence: Synthetic oligonucleotide
gcgcccaaccacuccaggc

SEQ ID NO: 415102 - RNA, 19 nt, Artificial Sequence
  Description of Artificial Sequence: Synthetic oligonucleotide
uaguagccgcucagcccga

SEQ ID NO: 415103 - RNA, 19 nt, Artificial Sequence
  Description of Artificial Sequence: Synthetic oligonucleotide
agccagcgcccucacaguu

SEQ ID NO: 415104 - RNA, 19 nt, Artificial Sequence
  Description of Artificial Sequence: Synthetic oligonucleotide
uccgugcccgcugugcauc

SEQ ID NO: 415105 - RNA, 19 nt, Artificial Sequence
  Description of Artificial Sequence: Synthetic oligonucleotide
cuucggacgcguucugcaa

SEQ ID NO: 415106 - RNA, 19 nt, Artificial Sequence
  Description of Artificial Sequence: Synthetic oligonucleotide
uguccgacgccgggugucu

SEQ ID NO: 415107 - RNA, 19 nt, Artificial Sequence
  Description of Artificial Sequence: Synthetic oligonucleotide
uggccccuagaagcauuag

SEQ ID NO: 415108 - RNA, 19 nt, Artificial Sequence
  Description of Artificial Sequence: Synthetic oligonucleotide
uggguacugcaaggguaga

SEQ ID NO: 415109 - RNA, 19 nt, Artificial Sequence
  Description of Artificial Sequence: Synthetic oligonucleotide
agccacgagcacacugguc

SEQ ID NO: 415110 - RNA, 19 nt, Artificial Sequence
  Description of Artificial Sequence: Synthetic oligonucleotide
gaucagugccuggggacaa

SEQ ID NO: 415111 - RNA, 19 nt, Artificial Sequence
  Description of Artificial Sequence: Synthetic oligonucleotide
uccuuucagccagcgcccu

SEQ ID NO: 415112 - RNA, 19 nt, Artificial Sequence
  Description of Artificial Sequence: Synthetic oligonucleotide
ggauugcguccacauccgc

SEQ ID NO: 415113 - RNA, 19 nt, Artificial Sequence
  Description of Artificial Sequence: Synthetic oligonucleotide
ggccugugugagccgagcc

SEQ ID NO: 415114 - RNA, 19 nt, Artificial Sequence
  Description of Artificial Sequence: Synthetic oligonucleotide
cagcuacaauggcccgugg

SEQ ID NO: 415115 - RNA, 19 nt, Artificial Sequence
  Description of Artificial Sequence: Synthetic oligonucleotide
caagcccgucucucuccag

SEQ ID NO: 415116 - RNA, 19 nt, Artificial Sequence
  Description of Artificial Sequence: Synthetic oligonucleotide
uuguccugugcggcuugca

SEQ ID NO: 415117 - RNA, 19 nt, Artificial Sequence
  Description of Artificial Sequence: Synthetic oligonucleotide
cacacccguuugcugcaac

SEQ ID NO: 415118 - RNA, 19 nt, Artificial Sequence
  Description of Artificial Sequence: Synthetic oligonucleotide
cgagucucagacacucggc

SEQ ID NO: 415119 - RNA, 19 nt, Artificial Sequence
  Description of Artificial Sequence: Synthetic oligonucleotide
ggaucagugccuggggaca

SEQ ID NO: 415120 - RNA, 19 nt, Artificial Sequence
  Description of Artificial Sequence: Synthetic oligonucleotide
gaggcauugcgggcacuca

SEQ ID NO: 415121 - RNA, 19 nt, Artificial Sequence
  Description of Artificial Sequence: Synthetic oligonucleotide
cgccagacacgccuggacg

SEQ ID NO: 415122 - RNA, 19 nt, Artificial Sequence
  Description of Artificial Sequence: Synthetic oligonucleotide
cugaguccgcucacuugca

SEQ ID NO: 415123 - RNA, 19 nt, Artificial Sequence
  Description of Artificial Sequence: Synthetic oligonucleotide
auugcucacugggcugggu

SEQ ID NO: 415124 - RNA, 19 nt, Artificial Sequence
  Description of Artificial Sequence: Synthetic oligonucleotide
ggcgcccaaccacuccagg

SEQ ID NO: 415125 - RNA, 19 nt, Artificial Sequence
  Description of Artificial Sequence: Synthetic oligonucleotide
uccaggcgucguguacgag

SEQ ID NO: 415126 - RNA, 19 nt, Artificial Sequence
  Description of Artificial Sequence: Synthetic oligonucleotide
cagacacucggccaaggau

SEQ ID NO: 415127 - RNA, 19 nt, Artificial Sequence
  Description of Artificial Sequence: Synthetic oligonucleotide
gcugugcaucuuguaguag

SEQ ID NO: 415128 - RNA, 19 nt, Artificial Sequence
  Description of Artificial Sequence: Synthetic oligonucleotide
ggagguucacacugcuuua

SEQ ID NO: 415129 - RNA, 19 nt, Artificial Sequence
  Description of Artificial Sequence: Synthetic oligonucleotide
ggcaugucggaugcuguca

SEQ ID NO: 415130 - RNA, 19 nt, Artificial Sequence
  Description of Artificial Sequence: Synthetic oligonucleotide
cuacaagcuuggcgguaga

SEQ ID NO: 415131 - RNA, 19 nt, Artificial Sequence
  Description of Artificial Sequence: Synthetic oligonucleotide
gcuaacuguuugcggcuga

SEQ ID NO: 415132 - RNA, 19 nt, Artificial Sequence
  Description of Artificial Sequence: Synthetic oligonucleotide
gcaaccaaggccaccgcaa

SEQ ID NO: 415133 - RNA, 19 nt, Artificial Sequence
  Description of Artificial Sequence: Synthetic oligonucleotide
guuugcggcugaaguuuuc

SEQ ID NO: 415134 - RNA, 19 nt, Artificial Sequence
  Description of Artificial Sequence: Synthetic oligonucleotide
agccacggccacuggugaa

SEQ ID NO: 415135 - RNA, 19 nt, Artificial Sequence
  Description of Artificial Sequence: Synthetic oligonucleotide
cuccaggcgucguguacga

SEQ ID NO: 415136 - RNA, 19 nt, Artificial Sequence
  Description of Artificial Sequence: Synthetic oligonucleotide
aggcgucguguacgagcag

SEQ ID NO: 415137 - RNA, 19 nt, Artificial Sequence
  Description of Artificial Sequence: Synthetic oligonucleotide
gcacgccagacacgccugg

SEQ ID NO: 415138 - RNA, 19 nt, Artificial Sequence
  Description of Artificial Sequence: Synthetic oligonucleotide
agcgcacgccagacacgcc

SEQ ID NO: 415139 - RNA, 19 nt, Artificial Sequence
  Description of Artificial Sequence: Synthetic oligonucleotide
ggcgagucucagacacucg

SEQ ID NO: 415140 - RNA, 19 nt, Artificial Sequence
  Description of Artificial Sequence: Synthetic oligonucleotide
ccucacaguuugguacugg

SEQ ID NO: 415141 - RNA, 19 nt, Artificial Sequence
  Description of Artificial Sequence: Synthetic oligonucleotide
cagcucggccugugugagc

SEQ ID NO: 415142 - RNA, 19 nt, Artificial Sequence
  Description of Artificial Sequence: Synthetic oligonucleotide
ccucagcacggcuccgugc

SEQ ID NO: 415143 - RNA, 19 nt, Artificial Sequence
  Description of Artificial Sequence: Synthetic oligonucleotide
gcgucguguacgagcagcc

SEQ ID NO: 415144 - RNA, 19 nt, Artificial Sequence
  Description of Artificial Sequence: Synthetic oligonucleotide
caccgcaacggggcugccc

SEQ ID NO: 415145 - RNA, 19 nt, Artificial Sequence
  Description of Artificial Sequence: Synthetic oligonucleotide
gaucggcucccuccuggcu

SEQ ID NO: 415146 - RNA, 19 nt, Artificial Sequence
  Description of Artificial Sequence: Synthetic oligonucleotide
caggaucggcucccuccug

SEQ ID NO: 415147 - RNA, 19 nt, Artificial Sequence
  Description of Artificial Sequence: Synthetic oligonucleotide
gcgcaguccuucuguggcc

SEQ ID NO: 415148 - RNA, 19 nt, Artificial Sequence
  Description of Artificial Sequence: Synthetic oligonucleotide
uugguccccuggugcccca

SEQ ID NO: 415149 - RNA, 19 nt, Artificial Sequence
  Description of Artificial Sequence: Synthetic oligonucleotide
ccgcaguuguucugcccgg

SEQ ID NO: 415150 - RNA, 19 nt, Artificial Sequence
  Description of Artificial Sequence: Synthetic oligonucleotide
ggacgcguucugcaaucuc

SEQ ID NO: 415151 - RNA, 19 nt, Artificial Sequence
  Description of Artificial Sequence: Synthetic oligonucleotide
cagcgcccucacaguuugg

SEQ ID NO: 415152 - RNA, 19 nt, Artificial Sequence
  Description of Artificial Sequence: Synthetic oligonucleotide
cgacgcacaucgcccauag

SEQ ID NO: 415153 - RNA, 19 nt, Artificial Sequence
  Description of Artificial Sequence: Synthetic oligonucleotide
gcaaucucacuugcuaggu

SEQ ID NO: 415154 - RNA, 19 nt, Artificial Sequence
  Description of Artificial Sequence: Synthetic oligonucleotide
ggcuucggacgcguucugc

SEQ ID NO: 415155 - RNA, 19 nt, Artificial Sequence
  Description of Artificial Sequence: Synthetic oligonucleotide
gcggcugaaguuuucuuuu

SEQ ID NO: 415156 - RNA, 19 nt, Artificial Sequence
  Description of Artificial Sequence: Synthetic oligonucleotide
cuccccggauggcucccug

SEQ ID NO: 415157 - RNA, 19 nt, Artificial Sequence
  Description of Artificial Sequence: Synthetic oligonucleotide
cugugcggccagcacaccu

SEQ ID NO: 415158 - RNA, 19 nt, Artificial Sequence
  Description of Artificial Sequence: Synthetic oligonucleotide
ccagacacgccuggacggc

SEQ ID NO: 415159 - RNA, 19 nt, Artificial Sequence
  Description of Artificial Sequence: Synthetic oligonucleotide
cucgucccgcaguuguucu

SEQ ID NO: 415160 - RNA, 19 nt, Artificial Sequence
  Description of Artificial Sequence: Synthetic oligonucleotide
cgcaagcccgucucucucc

SEQ ID NO: 415161 - RNA, 19 nt, Artificial Sequence
  Description of Artificial Sequence: Synthetic oligonucleotide
ggugacacugaggguuguc

SEQ ID NO: 415162 - RNA, 19 nt, Artificial Sequence
  Description of Artificial Sequence: Synthetic oligonucleotide
guacgggaagagagcuguc

SEQ ID NO: 415163 - RNA, 19 nt, Artificial Sequence
  Description of Artificial Sequence: Synthetic oligonucleotide
cucuacaagcuuggcggua

SEQ ID NO: 415164 - RNA, 19 nt, Artificial Sequence
  Description of Artificial Sequence: Synthetic oligonucleotide
gcccugguuggguggcaag

SEQ ID NO: 415165 - RNA, 19 nt, Artificial Sequence
  Description of Artificial Sequence: Synthetic oligonucleotide
aggcuauuuccugcccguu

SEQ ID NO: 415166 - RNA, 19 nt, Artificial Sequence
  Description of Artificial Sequence: Synthetic oligonucleotide
ggccgccuugcccuccagc

SEQ ID NO: 415167 - RNA, 19 nt, Artificial Sequence
  Description of Artificial Sequence: Synthetic oligonucleotide
cgucccgcaguuguucugc

SEQ ID NO: 415168 - RNA, 19 nt, Artificial Sequence
  Description of Artificial Sequence: Synthetic oligonucleotide
cacauccgccaggcuucgg

SEQ ID NO: 415169 - RNA, 19 nt, Artificial Sequence
  Description of Artificial Sequence: Synthetic oligonucleotide
cacccucagcacggcuccg

SEQ ID NO: 415170 - RNA, 19 nt, Artificial Sequence
  Description of Artificial Sequence: Synthetic oligonucleotide
gcgcucaguggucuuccca

SEQ ID NO: 415171 - RNA, 19 nt, Artificial Sequence
  Description of Artificial Sequence: Synthetic oligonucleotide
cguggaacggugacacuga

SEQ ID NO: 415172 - RNA, 19 nt, Artificial Sequence
  Description of Artificial Sequence: Synthetic oligonucleotide
cagacacgccuggacggca

SEQ ID NO: 415173 - RNA, 19 nt, Artificial Sequence
  Description of Artificial Sequence: Synthetic oligonucleotide
gucaggcgcucaguggucu

SEQ ID NO: 415174 - RNA, 19 nt, Artificial Sequence
  Description of Artificial Sequence: Synthetic oligonucleotide
cccgcucuuguaccuggug

SEQ ID NO: 415175 - RNA, 19 nt, Artificial Sequence
  Description of Artificial Sequence: Synthetic oligonucleotide
cagcggcgcccaaccacuc

SEQ ID NO: 415176 - RNA, 19 nt, Artificial Sequence
  Description of Artificial Sequence: Synthetic oligonucleotide
gugcggcuugcagcaggcc

SEQ ID NO: 415177 - RNA, 19 nt, Artificial Sequence
  Description of Artificial Sequence: Synthetic oligonucleotide
gcgcacgccagacacgccu

SEQ ID NO: 415178 - RNA, 19 nt, Artificial Sequence
  Description of Artificial Sequence: Synthetic oligonucleotide
ccucgucccgcaguuguuc

SEQ ID NO: 415179 - RNA, 19 nt, Artificial Sequence
  Description of Artificial Sequence: Synthetic oligonucleotide
ccuguacaacacgauccca

SEQ ID NO: 415180 - RNA, 19 nt, Artificial Sequence
  Description of Artificial Sequence: Synthetic oligonucleotide
cggcgagucucagacacuc

SEQ ID NO: 415181 - RNA, 19 nt, Artificial Sequence
  Description of Artificial Sequence: Synthetic oligonucleotide
cgggaagagagcuguccca

SEQ ID NO: 415182 - RNA, 19 nt, Artificial Sequence
  Description of Artificial Sequence: Synthetic oligonucleotide
acccgcucuuguaccuggu

SEQ ID NO: 415183 - RNA, 19 nt, Artificial Sequence
  Description of Artificial Sequence: Synthetic oligonucleotide
ccgcucacuugcagaguuc

SEQ ID NO: 415184 - RNA, 19 nt, Artificial Sequence
  Description of Artificial Sequence: Synthetic oligonucleotide
ggcaaggcacaaggccuga

SEQ ID NO: 415185 - RNA, 19 nt, Artificial Sequence
  Description of Artificial Sequence: Synthetic oligonucleotide
cggcagcuacaauggcccg

SEQ ID NO: 415186 - RNA, 19 nt, Artificial Sequence
  Description of Artificial Sequence: Synthetic oligonucleotide
cugcuagcacaggauuggu

SEQ ID NO: 415187 - RNA, 19 nt, Artificial Sequence
  Description of Artificial Sequence: Synthetic oligonucleotide
ucccgacauccggcacccc

SEQ ID NO: 415188 - RNA, 19 nt, Artificial Sequence
  Description of Artificial Sequence: Synthetic oligonucleotide
cgcacgccagacacgccug

SEQ ID NO: 415189 - RNA, 19 nt, Artificial Sequence
  Description of Artificial Sequence: Synthetic oligonucleotide
agccggcaugacaguggca

SEQ ID NO: 415190 - RNA, 19 nt, Artificial Sequence
  Description of Artificial Sequence: Synthetic oligonucleotide
cgcacaucgcccauaguau

SEQ ID NO: 415191 - RNA, 19 nt, Artificial Sequence
  Description of Artificial Sequence: Synthetic oligonucleotide
cgcugugcaucuuguagua

SEQ ID NO: 415192 - RNA, 19 nt, Artificial Sequence
  Description of Artificial Sequence: Synthetic oligonucleotide
ccugccggcgagucucaga

SEQ ID NO: 415193 - RNA, 19 nt, Artificial Sequence
  Description of Artificial Sequence: Synthetic oligonucleotide
gccacccgcucuuguaccu

SEQ ID NO: 415194 - RNA, 19 nt, Artificial Sequence
  Description of Artificial Sequence: Synthetic oligonucleotide
gcgcccucacaguuuggua

SEQ ID NO: 415195 - RNA, 19 nt, Artificial Sequence
  Description of Artificial Sequence: Synthetic oligonucleotide
ccacccgcucuuguaccug

SEQ ID NO: 415196 - RNA, 19 nt, Artificial Sequence
  Description of Artificial Sequence: Synthetic oligonucleotide
gcacggcacugcaggccag

SEQ ID NO: 415197 - RNA, 19 nt, Artificial Sequence
  Description of Artificial Sequence: Synthetic oligonucleotide
ggcacucacgauggccugu

SEQ ID NO: 415198 - RNA, 19 nt, Artificial Sequence
  Description of Artificial Sequence: Synthetic oligonucleotide
gcacucagaacaaguccuu

SEQ ID NO: 415199 - RNA, 19 nt, Artificial Sequence
  Description of Artificial Sequence: Synthetic oligonucleotide
cacacgcguguggaucagu

SEQ ID NO: 415200 - RNA, 19 nt, Artificial Sequence
  Description of Artificial Sequence: Synthetic oligonucleotide
ccauaguaugugccaggau

SEQ ID NO: 415201 - RNA, 19 nt, Artificial Sequence
  Description of Artificial Sequence: Synthetic oligonucleotide
gcucagcccgacgcacauc

SEQ ID NO: 415202 - RNA, 19 nt, Artificial Sequence
  Description of Artificial Sequence: Synthetic oligonucleotide
cugucaggaucggcucccu

SEQ ID NO: 415203 - RNA, 19 nt, Artificial Sequence
  Description of Artificial Sequence: Synthetic oligonucleotide
gcccgcugugcaucuugua

SEQ ID NO: 415204 - RNA, 19 nt, Artificial Sequence
  Description of Artificial Sequence: Synthetic oligonucleotide
cgcguguggaucagugccu

SEQ ID NO: 415205 - RNA, 19 nt, Artificial Sequence
  Description of Artificial Sequence: Synthetic oligonucleotide
cacggccacuggugaaguu

SEQ ID NO: 415206 - RNA, 19 nt, Artificial Sequence
  Description of Artificial Sequence: Synthetic oligonucleotide
cgcaacggggcugcccauc

SEQ ID NO: 415207 - RNA, 19 nt, Artificial Sequence
  Description of Artificial Sequence: Synthetic oligonucleotide
cgucguguacgagcagcca

SEQ ID NO: 415208 - RNA, 19 nt, Artificial Sequence
  Description of Artificial Sequence: Synthetic oligonucleotide
cccggcccagagccagauc

SEQ ID NO: 415209 - RNA, 19 nt, Artificial Sequence
  Description of Artificial Sequence: Synthetic oligonucleotide
gcacacccguuugcugcaa

SEQ ID NO: 415210 - RNA, 19 nt, Artificial Sequence
  Description of Artificial Sequence: Synthetic oligonucleotide
cgcguucugcaaucucacu

SEQ ID NO: 415211 - RNA, 19 nt, Artificial Sequence
  Description of Artificial Sequence: Synthetic oligonucleotide
cguguacgagcagccaagu

SEQ ID NO: 415212 - RNA, 19 nt, Artificial Sequence
  Description of Artificial Sequence: Synthetic oligonucleotide
ccggcgagucucagacacu

SEQ ID NO: 415213 - RNA, 19 nt, Artificial Sequence
  Description of Artificial Sequence: Synthetic oligonucleotide
ccgacgcacaucgcccaua

SEQ ID NO: 415214 - RNA, 19 nt, Artificial Sequence
  Description of Artificial Sequence: Synthetic oligonucleotide
ccaccgcaacggggcugcc

SEQ ID NO: 415215 - RNA, 19 nt, Artificial Sequence
  Description of Artificial Sequence: Synthetic oligonucleotide
cccguggaacggugacacu

SEQ ID NO: 415216 - RNA, 19 nt, Artificial Sequence
  Description of Artificial Sequence: Synthetic oligonucleotide
ccgugcccgcugugcaucu

SEQ ID NO: 415217 - RNA, 19 nt, Artificial Sequence
  Description of Artificial Sequence: Synthetic oligonucleotide
ccgacgccgggugucugcu

SEQ ID NO: 415218 - RNA, 19 nt, Artificial Sequence
  Description of Artificial Sequence: Synthetic oligonucleotide
cgcucagcccgacgcacau

SEQ ID NO: 415219 - RNA, 19 nt, Artificial Sequence
  Description of Artificial Sequence: Synthetic oligonucleotide
gccucgucccgcaguuguu

SEQ ID NO: 415220 - RNA, 19 nt, Artificial Sequence
  Description of Artificial Sequence: Synthetic oligonucleotide
cggacgcguucugcaaucu

SEQ ID NO: 415221 - RNA, 19 nt, Artificial Sequence
  Description of Artificial Sequence: Synthetic oligonucleotide
ccgcaacggggcugcccau

SEQ ID NO: 415222 - RNA, 19 nt, Artificial Sequence
  Description of Artificial Sequence: Synthetic oligonucleotide
cgugcccgcugugcaucuu

SEQ ID NO: 415223 - RNA, 19 nt, Artificial Sequence
  Description of Artificial Sequence: Synthetic oligonucleotide
acuguuacaacuuauaugg

SEQ ID NO: 415224 - RNA, 19 nt, Artificial Sequence
  Description of Artificial Sequence: Synthetic oligonucleotide
aacacacagacacacacac

SEQ ID NO: 415225 - RNA, 19 nt, Artificial Sequence
  Description of Artificial Sequence: Synthetic oligonucleotide
uuugguuagauuuaaguca

SEQ ID NO: 415226 - RNA, 19 nt, Artificial Sequence
  Description of Artificial Sequence: Synthetic oligonucleotide
auaaucaugucuaaugucc

SEQ ID NO: 415227 - RNA, 19 nt, Artificial Sequence
  Description of Artificial Sequence: Synthetic oligonucleotide
aagaacaaccucuaaaugu

SEQ ID NO: 415228 - RNA, 19 nt, Artificial Sequence
  Description of Artificial Sequence: Synthetic oligonucleotide
ucugauaacggcuauauuc

SEQ ID NO: 415229 - RNA, 19 nt, Artificial Sequence
  Description of Artificial Sequence: Synthetic oligonucleotide
uuaacgauaauaccuacac

SEQ ID NO: 415230 - RNA, 19 nt, Artificial Sequence
  Description of Artificial Sequence: Synthetic oligonucleotide
aauaaauguauacguaacu

SEQ ID NO: 415231 - RNA, 19 nt, Artificial Sequence
  Description of Artificial Sequence: Synthetic oligonucleotide
auaacggcuauauucuugc

SEQ ID NO: 415232 - RNA, 19 nt, Artificial Sequence
  Description of Artificial Sequence: Synthetic oligonucleotide
uaaauguauacguaacucc

SEQ ID NO: 415233 - RNA, 19 nt, Artificial Sequence
  Description of Artificial Sequence: Synthetic oligonucleotide
auugucgugcaucaaauuc

SEQ ID NO: 415234 - RNA, 19 nt, Artificial Sequence
  Description of Artificial Sequence: Synthetic oligonucleotide
uuuuaagugaguuaaccaa

SEQ ID NO: 415235 - RNA, 19 nt, Artificial Sequence
  Description of Artificial Sequence: Synthetic oligonucleotide
ugaauaucaccuuacuuug

SEQ ID NO: 415236 - RNA, 19 nt, Artificial Sequence
  Description of Artificial Sequence: Synthetic oligonucleotide
cuaaccauaauugucgugc

SEQ ID NO: 415237 - RNA, 19 nt, Artificial Sequence
  Description of Artificial Sequence: Synthetic oligonucleotide
acaacggcggcccaggacc

SEQ ID NO: 415238 - RNA, 19 nt, Artificial Sequence
  Description of Artificial Sequence: Synthetic oligonucleotide
uucuuugcuaaacugcugc

SEQ ID NO: 415239 - RNA, 19 nt, Artificial Sequence
  Description of Artificial Sequence: Synthetic oligonucleotide
aucaccuuacuuuggaagg

SEQ ID NO: 415240 - RNA, 19 nt, Artificial Sequence
  Description of Artificial Sequence: Synthetic oligonucleotide
uauuuaacgauaauaccua

SEQ ID NO: 415241 - RNA, 19 nt, Artificial Sequence
  Description of Artificial Sequence: Synthetic oligonucleotide
uauauggucaccaaacauu

SEQ ID NO: 415242 - RNA, 19 nt, Artificial Sequence
  Description of Artificial Sequence: Synthetic oligonucleotide
aacuccacguguugagugc

SEQ ID NO: 415243 - RNA, 19 nt, Artificial Sequence
  Description of Artificial Sequence: Synthetic oligonucleotide
uuuaacgauaauaccuaca

SEQ ID NO: 415244 - RNA, 19 nt, Artificial Sequence
  Description of Artificial Sequence: Synthetic oligonucleotide
aaacucaagaguuuuccaa

SEQ ID NO: 415245 - RNA, 19 nt, Artificial Sequence
  Description of Artificial Sequence: Synthetic oligonucleotide
auuuaacgauaauaccuac

SEQ ID NO: 415246 - RNA, 19 nt, Artificial Sequence
  Description of Artificial Sequence: Synthetic oligonucleotide
uaauuauugaaagagcgau

SEQ ID NO: 415247 - RNA, 19 nt, Artificial Sequence
  Description of Artificial Sequence: Synthetic oligonucleotide
agauguuuaguggaugagc

SEQ ID NO: 415248 - RNA, 19 nt, Artificial Sequence
  Description of Artificial Sequence: Synthetic oligonucleotide
aacgaugagaaggugaagu

SEQ ID NO: 415249 - RNA, 19 nt, Artificial Sequence
  Description of Artificial Sequence: Synthetic oligonucleotide
augugaauaccccagaaau

SEQ ID NO: 415250 - RNA, 19 nt, Artificial Sequence
  Description of Artificial Sequence: Synthetic oligonucleotide
uguuacaacuuauaugguc

SEQ ID NO: 415251 - RNA, 19 nt, Artificial Sequence
  Description of Artificial Sequence: Synthetic oligonucleotide
cacacagacacacacacac

SEQ ID NO: 415252 - RNA, 19 nt, Artificial Sequence
  Description of Artificial Sequence: Synthetic oligonucleotide
gguauuuuaaggcuuggag

SEQ ID NO: 415253 - RNA, 19 nt, Artificial Sequence
  Description of Artificial Sequence: Synthetic oligonucleotide
ggagacaagacgcagacgc

SEQ ID NO: 415254 - RNA, 19 nt, Artificial Sequence
  Description of Artificial Sequence: Synthetic oligonucleotide
uuugcaacuaagcuuguua

SEQ ID NO: 415255 - RNA, 19 nt, Artificial Sequence
  Description of Artificial Sequence: Synthetic oligonucleotide
uguccauccuaacuuauga

SEQ ID NO: 415256 - RNA, 19 nt, Artificial Sequence
  Description of Artificial Sequence: Synthetic oligonucleotide
aaugugaauaccccagaaa

SEQ ID NO: 415257 - RNA, 19 nt, Artificial Sequence
  Description of Artificial Sequence: Synthetic oligonucleotide
acauuuaaguguucucagg

SEQ ID NO: 415258 - RNA, 19 nt, Artificial Sequence
  Description of Artificial Sequence: Synthetic oligonucleotide
gacacacacacacacacac

SEQ ID NO: 415259 - RNA, 19 nt, Artificial Sequence
  Description of Artificial Sequence: Synthetic oligonucleotide
aauaccccagaaauguccg

SEQ ID NO: 415260 - RNA, 19 nt, Artificial Sequence
  Description of Artificial Sequence: Synthetic oligonucleotide
uuaacagacgcucgcauau

SEQ ID NO: 415261 - RNA, 19 nt, Artificial Sequence
  Description of Artificial Sequence: Synthetic oligonucleotide
uuauauggucaccaaacau

SEQ ID NO: 415262 - RNA, 19 nt, Artificial Sequence
  Description of Artificial Sequence: Synthetic oligonucleotide
cauaucgccgcauaauuug

SEQ ID NO: 415263 - RNA, 19 nt, Artificial Sequence
  Description of Artificial Sequence: Synthetic oligonucleotide
uguuucuaaccauaauugu

SEQ ID NO: 415264 - RNA, 19 nt, Artificial Sequence
  Description of Artificial Sequence: Synthetic oligonucleotide
uguuuaguggaugagcaga

SEQ ID NO: 415265 - RNA, 19 nt, Artificial Sequence
  Description of Artificial Sequence: Synthetic oligonucleotide
aacuaagcuuguuaacacu

SEQ ID NO: 415266 - RNA, 19 nt, Artificial Sequence
  Description of Artificial Sequence: Synthetic oligonucleotide
aaagauccagauucuuugu

SEQ ID NO: 415267 - RNA, 19 nt, Artificial Sequence
  Description of Artificial Sequence: Synthetic oligonucleotide
gauacauagcuuguuggcc

SEQ ID NO: 415268 - RNA, 19 nt, Artificial Sequence
  Description of Artificial Sequence: Synthetic oligonucleotide
auaauugucgugcaucaaa

SEQ ID NO: 415269 - RNA, 19 nt, Artificial Sequence
  Description of Artificial Sequence: Synthetic oligonucleotide
gaacacggacaccuuaggg

SEQ ID NO: 415270 - RNA, 19 nt, Artificial Sequence
  Description of Artificial Sequence: Synthetic oligonucleotide
uccgagcacacccugaugu

SEQ ID NO: 415271 - RNA, 19 nt, Artificial Sequence
  Description of Artificial Sequence: Synthetic oligonucleotide
cauauuauccccacuuguc

SEQ ID NO: 415272 - RNA, 19 nt, Artificial Sequence
  Description of Artificial Sequence: Synthetic oligonucleotide
guuacaacuuauaugguca

SEQ ID NO: 415273 - RNA, 19 nt, Artificial Sequence
  Description of Artificial Sequence: Synthetic oligonucleotide
aagccguaauuaauaaaac

SEQ ID NO: 415274 - RNA, 19 nt, Artificial Sequence
  Description of Artificial Sequence: Synthetic oligonucleotide
auacauagcuuguuggccu

SEQ ID NO: 415275 - RNA, 19 nt, Artificial Sequence
  Description of Artificial Sequence: Synthetic oligonucleotide
auaauuugaucauguguga

SEQ ID NO: 415276 - RNA, 19 nt, Artificial Sequence
  Description of Artificial Sequence: Synthetic oligonucleotide
acacacacacacuucucac

SEQ ID NO: 415277 - RNA, 19 nt, Artificial Sequence
  Description of Artificial Sequence: Synthetic oligonucleotide
uugaaagagcgaugguggg

SEQ ID NO: 415278 - RNA, 19 nt, Artificial Sequence
  Description of Artificial Sequence: Synthetic oligonucleotide
ugaacacggacaccuuagg

SEQ ID NO: 415279 - RNA, 19 nt, Artificial Sequence
  Description of Artificial Sequence: Synthetic oligonucleotide
uaauugucgugcaucaaau

SEQ ID NO: 415280 - RNA, 19 nt, Artificial Sequence
  Description of Artificial Sequence: Synthetic oligonucleotide
agguuguugaacuauggaa

SEQ ID NO: 415281 - RNA, 19 nt, Artificial Sequence
  Description of Artificial Sequence: Synthetic oligonucleotide
aacaacggcggcccaggac

SEQ ID NO: 415282 - RNA, 19 nt, Artificial Sequence
  Description of Artificial Sequence: Synthetic oligonucleotide
aagugaguuaaccaaucuu

SEQ ID NO: 415283 - RNA, 19 nt, Artificial Sequence
  Description of Artificial Sequence: Synthetic oligonucleotide
agccguaauuaauaaaacu

SEQ ID NO: 415284 - RNA, 19 nt, Artificial Sequence
  Description of Artificial Sequence: Synthetic oligonucleotide
aauucugugccuggaaaca

SEQ ID NO: 415285 - RNA, 19 nt, Artificial Sequence
  Description of Artificial Sequence: Synthetic oligonucleotide
acaacuuauauggucacca

SEQ ID NO: 415286 - RNA, 19 nt, Artificial Sequence
  Description of Artificial Sequence: Synthetic oligonucleotide
cacacacacacacacacac

SEQ ID NO: 415287 - RNA, 19 nt, Artificial Sequence
  Description of Artificial Sequence: Synthetic oligonucleotide
agacgcucgcauauuaucc

SEQ ID NO: 415288 - RNA, 19 nt, Artificial Sequence
  Description of Artificial Sequence: Synthetic oligonucleotide
cagacacacacacacacac

SEQ ID NO: 415289 - RNA, 19 nt, Artificial Sequence
  Description of Artificial Sequence: Synthetic oligonucleotide
auaaagccguaauuaauaa

SEQ ID NO: 415290 - RNA, 19 nt, Artificial Sequence
  Description of Artificial Sequence: Synthetic oligonucleotide
uaacgauaauaccuacaca

SEQ ID NO: 415291 - RNA, 19 nt, Artificial Sequence
  Description of Artificial Sequence: Synthetic oligonucleotide
cacagacacacacacacac

SEQ ID NO: 415292 - RNA, 19 nt, Artificial Sequence
  Description of Artificial Sequence: Synthetic oligonucleotide
gauaacggcuauauucuug

SEQ ID NO: 415293 - RNA, 19 nt, Artificial Sequence
  Description of Artificial Sequence: Synthetic oligonucleotide
uugcaacuaagcuuguuaa

SEQ ID NO: 415294 - RNA, 19 nt, Artificial Sequence
  Description of Artificial Sequence: Synthetic oligonucleotide
uggagcugaaaugugauau

SEQ ID NO: 415295 - RNA, 19 nt, Artificial Sequence
  Description of Artificial Sequence: Synthetic oligonucleotide
gacgcgguaacaacggcgg

SEQ ID NO: 415296 - RNA, 19 nt, Artificial Sequence
  Description of Artificial Sequence: Synthetic oligonucleotide
ucgccgcauaauuugauca

SEQ ID NO: 415297 - RNA, 19 nt, Artificial Sequence
  Description of Artificial Sequence: Synthetic oligonucleotide
uguauacguaacucccacc

SEQ ID NO: 415298 - RNA, 19 nt, Artificial Sequence
  Description of Artificial Sequence: Synthetic oligonucleotide
aauguauacguaacuccca

SEQ ID NO: 415299 - RNA, 19 nt, Artificial Sequence
  Description of Artificial Sequence: Synthetic oligonucleotide
ucgcauauuauccccacuu

SEQ ID NO: 415300 - RNA, 19 nt, Artificial Sequence
  Description of Artificial Sequence: Synthetic oligonucleotide
ucuaaccauaauugucgug

SEQ ID NO: 415301 - RNA, 19 nt, Artificial Sequence
  Description of Artificial Sequence: Synthetic oligonucleotide
acgcucgcauauuaucccc

SEQ ID NO: 415302 - RNA, 19 nt, Artificial Sequence
  Description of Artificial Sequence: Synthetic oligonucleotide
gacgcucgcauauuauccc

SEQ ID NO: 415303 - RNA, 19 nt, Artificial Sequence
  Description of Artificial Sequence: Synthetic oligonucleotide
gguacagauguuuagugga

SEQ ID NO: 415304 - RNA, 19 nt, Artificial Sequence
  Description of Artificial Sequence: Synthetic oligonucleotide
ugauucaaauucugugccu

SEQ ID NO: 415305 - RNA, 19 nt, Artificial Sequence
  Description of Artificial Sequence: Synthetic oligonucleotide
agacaagacgcagacgcgg

SEQ ID NO: 415306 - RNA, 19 nt, Artificial Sequence
  Description of Artificial Sequence: Synthetic oligonucleotide
uccauaucgccgcauaauu

SEQ ID NO: 415307 - RNA, 19 nt, Artificial Sequence
  Description of Artificial Sequence: Synthetic oligonucleotide
aucgccgcauaauuugauc

SEQ ID NO: 415308 - RNA, 19 nt, Artificial Sequence
  Description of Artificial Sequence: Synthetic oligonucleotide
uuauugaaagagcgauggu

SEQ ID NO: 415309 - RNA, 19 nt, Artificial Sequence
  Description of Artificial Sequence: Synthetic oligonucleotide
caucggaucucaacaacug

SEQ ID NO: 415310 - RNA, 19 nt, Artificial Sequence
  Description of Artificial Sequence: Synthetic oligonucleotide
ugcaacuaagcuuguuaac

SEQ ID NO: 415311 - RNA, 19 nt, Artificial Sequence
  Description of Artificial Sequence: Synthetic oligonucleotide
ggauacauagcuuguuggc

SEQ ID NO: 415312 - RNA, 19 nt, Artificial Sequence
  Description of Artificial Sequence: Synthetic oligonucleotide
guugagugccacugaaggc

SEQ ID NO: 415313 - RNA, 19 nt, Artificial Sequence
  Description of Artificial Sequence: Synthetic oligonucleotide
aauugucgugcaucaaauu

SEQ ID NO: 415314 - RNA, 19 nt, Artificial Sequence
  Description of Artificial Sequence: Synthetic oligonucleotide
uucuaaccauaauugucgu

SEQ ID NO: 415315 - RNA, 19 nt, Artificial Sequence
  Description of Artificial Sequence: Synthetic oligonucleotide
guaugaaugaggugagcuc

SEQ ID NO: 415316 - RNA, 19 nt, Artificial Sequence
  Description of Artificial Sequence: Synthetic oligonucleotide
aaauguccguagccaucgg

SEQ ID NO: 415317 - RNA, 19 nt, Artificial Sequence
  Description of Artificial Sequence: Synthetic oligonucleotide
uaauuugaucaugugugaa

SEQ ID NO: 415318 - RNA, 19 nt, Artificial Sequence
  Description of Artificial Sequence: Synthetic oligonucleotide
cuuauauggucaccaaaca

SEQ ID NO: 415319 - RNA, 19 nt, Artificial Sequence
  Description of Artificial Sequence: Synthetic oligonucleotide
agucccuguauuuaacgau

SEQ ID NO: 415320 - RNA, 19 nt, Artificial Sequence
  Description of Artificial Sequence: Synthetic oligonucleotide
uaauguccauccuaacuua

SEQ ID NO: 415321 - RNA, 19 nt, Artificial Sequence
  Description of Artificial Sequence: Synthetic oligonucleotide
ugcaucugaaacggcggcg

SEQ ID NO: 415322 - RNA, 19 nt, Artificial Sequence
  Description of Artificial Sequence: Synthetic oligonucleotide
guauacguaacucccaccu

SEQ ID NO: 415323 - RNA, 19 nt, Artificial Sequence
  Description of Artificial Sequence: Synthetic oligonucleotide
aaacacacagacacacaca

SEQ ID NO: 415324 - RNA, 19 nt, Artificial Sequence
  Description of Artificial Sequence: Synthetic oligonucleotide
guagccaucggaucucaac

SEQ ID NO: 415325 - RNA, 19 nt, Artificial Sequence
  Description of Artificial Sequence: Synthetic oligonucleotide
uauacguaacucccaccuc

SEQ ID NO: 415326 - RNA, 19 nt, Artificial Sequence
  Description of Artificial Sequence: Synthetic oligonucleotide
gucuuuuaacagacgcucg

SEQ ID NO: 415327 - RNA, 19 nt, Artificial Sequence
  Description of Artificial Sequence: Synthetic oligonucleotide
uccuaacuuaugauucaaa

SEQ ID NO: 415328 - RNA, 19 nt, Artificial Sequence
  Description of Artificial Sequence: Synthetic oligonucleotide
cugauaacggcuauauucu

SEQ ID NO: 415329 - RNA, 19 nt, Artificial Sequence
  Description of Artificial Sequence: Synthetic oligonucleotide
gguuauagcagucucagau

SEQ ID NO: 415330 - RNA, 19 nt, Artificial Sequence
  Description of Artificial Sequence: Synthetic oligonucleotide
uacaacuuauauggucacc

SEQ ID NO: 415331 - RNA, 19 nt, Artificial Sequence
  Description of Artificial Sequence: Synthetic oligonucleotide
caggguauuuuaaggcuug

SEQ ID NO: 415332 - RNA, 19 nt, Artificial Sequence
  Description of Artificial Sequence: Synthetic oligonucleotide
acuccacguguugagugcc

SEQ ID NO: 415333 - RNA, 19 nt, Artificial Sequence
  Description of Artificial Sequence: Synthetic oligonucleotide
agucaaagacauucauuaa

SEQ ID NO: 415334 - RNA, 19 nt, Artificial Sequence
  Description of Artificial Sequence: Synthetic oligonucleotide
ugcgagcuugguacugagg

SEQ ID NO: 415335 - RNA, 19 nt, Artificial Sequence
  Description of Artificial Sequence: Synthetic oligonucleotide
acuguaugaaugaggugag

SEQ ID NO: 415336 - RNA, 19 nt, Artificial Sequence
  Description of Artificial Sequence: Synthetic oligonucleotide
ccaaacauuaaugaucuuc

SEQ ID NO: 415337 - RNA, 19 nt, Artificial Sequence
  Description of Artificial Sequence: Synthetic oligonucleotide
aucggaucucaacaacugu

SEQ ID NO: 415338 - RNA, 19 nt, Artificial Sequence
  Description of Artificial Sequence: Synthetic oligonucleotide
agacgcgguaacaacggcg

SEQ ID NO: 415339 - RNA, 19 nt, Artificial Sequence
  Description of Artificial Sequence: Synthetic oligonucleotide
auauggucaccaaacauua

SEQ ID NO: 415340 - RNA, 19 nt, Artificial Sequence
  Description of Artificial Sequence: Synthetic oligonucleotide
ggaaccggggcucagcagc

SEQ ID NO: 415341 - RNA, 19 nt, Artificial Sequence
  Description of Artificial Sequence: Synthetic oligonucleotide
gccgccucgaacuccaugg

SEQ ID NO: 415342 - RNA, 19 nt, Artificial Sequence
  Description of Artificial Sequence: Synthetic oligonucleotide
agcgauggugggcucuagg

SEQ ID NO: 415343 - RNA, 19 nt, Artificial Sequence
  Description of Artificial Sequence: Synthetic oligonucleotide
caugggucgcuucagcguc

SEQ ID NO: 415344 - RNA, 19 nt, Artificial Sequence
  Description of Artificial Sequence: Synthetic oligonucleotide
caagcuccaacaguugaac

SEQ ID NO: 415345 - RNA, 19 nt, Artificial Sequence
  Description of Artificial Sequence: Synthetic oligonucleotide
ugcacucuccuguguuagg

SEQ ID NO: 415346 - RNA, 19 nt, Artificial Sequence
  Description of Artificial Sequence: Synthetic oligonucleotide
gcaacuaagcuuguuaaca

SEQ ID NO: 415347 - RNA, 19 nt, Artificial Sequence
  Description of Artificial Sequence: Synthetic oligonucleotide
cagacgcucgcauauuauc

SEQ ID NO: 415348 - RNA, 19 nt, Artificial Sequence
  Description of Artificial Sequence: Synthetic oligonucleotide
uggagacucgucgacggca

SEQ ID NO: 415349 - RNA, 19 nt, Artificial Sequence
  Description of Artificial Sequence: Synthetic oligonucleotide
aauguccauccuaacuuau

SEQ ID NO: 415350 - RNA, 19 nt, Artificial Sequence
  Description of Artificial Sequence: Synthetic oligonucleotide
ucugaaacggcggcggcuc

SEQ ID NO: 415351 - RNA, 19 nt, Artificial Sequence
  Description of Artificial Sequence: Synthetic oligonucleotide
cuaacuuaugauucaaauu

SEQ ID NO: 415352 - RNA, 19 nt, Artificial Sequence
  Description of Artificial Sequence: Synthetic oligonucleotide
cacguguugagugccacug

SEQ ID NO: 415353 - RNA, 19 nt, Artificial Sequence
  Description of Artificial Sequence: Synthetic oligonucleotide
cacacacacacacuucuca

SEQ ID NO: 415354 - RNA, 19 nt, Artificial Sequence
  Description of Artificial Sequence: Synthetic oligonucleotide
gaaaugguuauagcagucu

SEQ ID NO: 415355 - RNA, 19 nt, Artificial Sequence
  Description of Artificial Sequence: Synthetic oligonucleotide
uguccguagccaucggauc

SEQ ID NO: 415356 - RNA, 19 nt, Artificial Sequence
  Description of Artificial Sequence: Synthetic oligonucleotide
uuccauaucgccgcauaau

SEQ ID NO: 415357 - RNA, 19 nt, Artificial Sequence
  Description of Artificial Sequence: Synthetic oligonucleotide
uaucgccgcauaauuugau

SEQ ID NO: 415358 - RNA, 19 nt, Artificial Sequence
  Description of Artificial Sequence: Synthetic oligonucleotide
cagaguccguguauugaug

SEQ ID NO: 415359 - RNA, 19 nt, Artificial Sequence
  Description of Artificial Sequence: Synthetic oligonucleotide
ugauaacggcuauauucuu

SEQ ID NO: 415360 - RNA, 19 nt, Artificial Sequence
  Description of Artificial Sequence: Synthetic oligonucleotide
agcagucucagaugaguua

SEQ ID NO: 415361 - RNA, 19 nt, Artificial Sequence
  Description of Artificial Sequence: Synthetic oligonucleotide
ucguacuccucccggacuu

SEQ ID NO: 415362 - RNA, 19 nt, Artificial Sequence
  Description of Artificial Sequence: Synthetic oligonucleotide
cuuguggcaaccagaaagu

SEQ ID NO: 415363 - RNA, 19 nt, Artificial Sequence
  Description of Artificial Sequence: Synthetic oligonucleotide
uuuaguggaugagcagaaa

SEQ ID NO: 415364 - RNA, 19 nt, Artificial Sequence
  Description of Artificial Sequence: Synthetic oligonucleotide
acacacacacacacacuuc

SEQ ID NO: 415365 - RNA, 19 nt, Artificial Sequence
  Description of Artificial Sequence: Synthetic oligonucleotide
guccguguauugauggccc

SEQ ID NO: 415366 - RNA, 19 nt, Artificial Sequence
  Description of Artificial Sequence: Synthetic oligonucleotide
gaaccggggcucagcagcg

SEQ ID NO: 415367 - RNA, 19 nt, Artificial Sequence
  Description of Artificial Sequence: Synthetic oligonucleotide
uguuugcaacuaagcuugu

SEQ ID NO: 415368 - RNA, 19 nt, Artificial Sequence
  Description of Artificial Sequence: Synthetic oligonucleotide
ucgucgacggcaucugcau

SEQ ID NO: 415369 - RNA, 19 nt, Artificial Sequence
  Description of Artificial Sequence: Synthetic oligonucleotide
gaaguacaggcuucacucu

SEQ ID NO: 415370 - RNA, 19 nt, Artificial Sequence
  Description of Artificial Sequence: Synthetic oligonucleotide
gcagaccuucccuacauca

SEQ ID NO: 415371 - RNA, 19 nt, Artificial Sequence
  Description of Artificial Sequence: Synthetic oligonucleotide
cagucccuguauuuaacga

SEQ ID NO: 415372 - RNA, 19 nt, Artificial Sequence
  Description of Artificial Sequence: Synthetic oligonucleotide
uccguguauugauggccca

SEQ ID NO: 415373 - RNA, 19 nt, Artificial Sequence
  Description of Artificial Sequence: Synthetic oligonucleotide
gauaugcuuguggcaacca

SEQ ID NO: 415374 - RNA, 19 nt, Artificial Sequence
  Description of Artificial Sequence: Synthetic oligonucleotide
gccuuguuccauaucgccg

SEQ ID NO: 415375 - RNA, 19 nt, Artificial Sequence
  Description of Artificial Sequence: Synthetic oligonucleotide
ccuguguuaggcuccgagc

SEQ ID NO: 415376 - RNA, 19 nt, Artificial Sequence
  Description of Artificial Sequence: Synthetic oligonucleotide
acacacacacacacuucuc

SEQ ID NO: 415377 - RNA, 19 nt, Artificial Sequence
  Description of Artificial Sequence: Synthetic oligonucleotide
cgagcuacggcucccaagc

SEQ ID NO: 415378 - RNA, 19 nt, Artificial Sequence
  Description of Artificial Sequence: Synthetic oligonucleotide
ccucgaacuccaugggucg

SEQ ID NO: 415379 - RNA, 19 nt, Artificial Sequence
  Description of Artificial Sequence: Synthetic oligonucleotide
auguccauccuaacuuaug

SEQ ID NO: 415380 - RNA, 19 nt, Artificial Sequence
  Description of Artificial Sequence: Synthetic oligonucleotide
auaucgccgcauaauuuga

SEQ ID NO: 415381 - RNA, 19 nt, Artificial Sequence
  Description of Artificial Sequence: Synthetic oligonucleotide
caucugaaacggcggcggc

SEQ ID NO: 415382 - RNA, 19 nt, Artificial Sequence
  Description of Artificial Sequence: Synthetic oligonucleotide
uacggcucccaagccaagc

SEQ ID NO: 415383 - RNA, 19 nt, Artificial Sequence
  Description of Artificial Sequence: Synthetic oligonucleotide
acgccaucccgcgaagggg

SEQ ID NO: 415384 - RNA, 19 nt, Artificial Sequence
  Description of Artificial Sequence: Synthetic oligonucleotide
cacacacacacacacuucu

SEQ ID NO: 415385 - RNA, 19 nt, Artificial Sequence
  Description of Artificial Sequence: Synthetic oligonucleotide
cuguaugaaugaggugagc

SEQ ID NO: 415386 - RNA, 19 nt, Artificial Sequence
  Description of Artificial Sequence: Synthetic oligonucleotide
auccuaacuuaugauucaa

SEQ ID NO: 415387 - RNA, 19 nt, Artificial Sequence
  Description of Artificial Sequence: Synthetic oligonucleotide
acagacacacacacacaca

SEQ ID NO: 415388 - RNA, 19 nt, Artificial Sequence
  Description of Artificial Sequence: Synthetic oligonucleotide
uaacaacggcggcccagga

SEQ ID NO: 415389 - RNA, 19 nt, Artificial Sequence
  Description of Artificial Sequence: Synthetic oligonucleotide
aauuugcucgggaguugga

SEQ ID NO: 415390 - RNA, 19 nt, Artificial Sequence
  Description of Artificial Sequence: Synthetic oligonucleotide
cucgucgacggcaucugca

SEQ ID NO: 415391 - RNA, 19 nt, Artificial Sequence
  Description of Artificial Sequence: Synthetic oligonucleotide
ucgaacuccaugggucgcu

SEQ ID NO: 415392 - RNA, 19 nt, Artificial Sequence
  Description of Artificial Sequence: Synthetic oligonucleotide
cacagcgucgccgcuucgg

SEQ ID NO: 415393 - RNA, 19 nt, Artificial Sequence
  Description of Artificial Sequence: Synthetic oligonucleotide
guuccauaucgccgcauaa

SEQ ID NO: 415394 - RNA, 19 nt, Artificial Sequence
  Description of Artificial Sequence: Synthetic oligonucleotide
cugcgagcuugguacugag

SEQ ID NO: 415395 - RNA, 19 nt, Artificial Sequence
  Description of Artificial Sequence: Synthetic oligonucleotide
gguaacaacggcggcccag

SEQ ID NO: 415396 - RNA, 19 nt, Artificial Sequence
  Description of Artificial Sequence: Synthetic oligonucleotide
gagcuacggcucccaagcc

SEQ ID NO: 415397 - RNA, 19 nt, Artificial Sequence
  Description of Artificial Sequence: Synthetic oligonucleotide
aucugaaacggcggcggcu

SEQ ID NO: 415398 - RNA, 19 nt, Artificial Sequence
  Description of Artificial Sequence: Synthetic oligonucleotide
guguuaggcuccgagcaca

SEQ ID NO: 415399 - RNA, 19 nt, Artificial Sequence
  Description of Artificial Sequence: Synthetic oligonucleotide
cuggagacucgucgacggc

SEQ ID NO: 415400 - RNA, 19 nt, Artificial Sequence
  Description of Artificial Sequence: Synthetic oligonucleotide
cacacacacacacacacuu

SEQ ID NO: 415401 - RNA, 19 nt, Artificial Sequence
  Description of Artificial Sequence: Synthetic oligonucleotide
aggcgacgcucgcugcugg

SEQ ID NO: 415402 - RNA, 19 nt, Artificial Sequence
  Description of Artificial Sequence: Synthetic oligonucleotide
gcauauuauccccacuugu

SEQ ID NO: 415403 - RNA, 19 nt, Artificial Sequence
  Description of Artificial Sequence: Synthetic oligonucleotide
cucgggaguuggaaggcga

SEQ ID NO: 415404 - RNA, 19 nt, Artificial Sequence
  Description of Artificial Sequence: Synthetic oligonucleotide
agacacacacacacacaca

SEQ ID NO: 415405 - RNA, 19 nt, Artificial Sequence
  Description of Artificial Sequence: Synthetic oligonucleotide
cugaaacggcggcggcucg

SEQ ID NO: 415406 - RNA, 19 nt, Artificial Sequence
  Description of Artificial Sequence: Synthetic oligonucleotide
cucgaacuccaugggucgc

SEQ ID NO: 415407 - RNA, 19 nt, Artificial Sequence
  Description of Artificial Sequence: Synthetic oligonucleotide
ccggagacaagacgcagac

SEQ ID NO: 415408 - RNA, 19 nt, Artificial Sequence
  Description of Artificial Sequence: Synthetic oligonucleotide
ucgacggcaucugcaucug

SEQ ID NO: 415409 - RNA, 19 nt, Artificial Sequence
  Description of Artificial Sequence: Synthetic oligonucleotide
acacacacacacacacaca

SEQ ID NO: 415410 - RNA, 19 nt, Artificial Sequence
  Description of Artificial Sequence: Synthetic oligonucleotide
acacacacacacacacacu

SEQ ID NO: 415411 - RNA, 19 nt, Artificial Sequence
  Description of Artificial Sequence: Synthetic oligonucleotide
acacagacacacacacaca

SEQ ID NO: 415412 - RNA, 19 nt, Artificial Sequence
  Description of Artificial Sequence: Synthetic oligonucleotide
ccguaauuaauaaaacuau

SEQ ID NO: 415413 - RNA, 19 nt, Artificial Sequence
  Description of Artificial Sequence: Synthetic oligonucleotide
caucccgcgaaggggccgg

SEQ ID NO: 415414 - RNA, 19 nt, Artificial Sequence
  Description of Artificial Sequence: Synthetic oligonucleotide
gccaucggaucucaacaac

SEQ ID NO: 415415 - RNA, 19 nt, Artificial Sequence
  Description of Artificial Sequence: Synthetic oligonucleotide
gcgguaacaacggcggccc

SEQ ID NO: 415416 - RNA, 19 nt, Artificial Sequence
  Description of Artificial Sequence: Synthetic oligonucleotide
gccgcauaauuugaucaug

SEQ ID NO: 415417 - RNA, 19 nt, Artificial Sequence
  Description of Artificial Sequence: Synthetic oligonucleotide
acagacgcucgcauauuau

SEQ ID NO: 415418 - RNA, 19 nt, Artificial Sequence
  Description of Artificial Sequence: Synthetic oligonucleotide
guugaacuauggaaauggu

SEQ ID NO: 415419 - RNA, 19 nt, Artificial Sequence
  Description of Artificial Sequence: Synthetic oligonucleotide
acacacagacacacacaca

SEQ ID NO: 415420 - RNA, 19 nt, Artificial Sequence
  Description of Artificial Sequence: Synthetic oligonucleotide
gaaggcgacgcucgcugcu

SEQ ID NO: 415421 - RNA, 19 nt, Artificial Sequence
  Description of Artificial Sequence: Synthetic oligonucleotide
cuacggcucccaagccaag

SEQ ID NO: 415422 - RNA, 19 nt, Artificial Sequence
  Description of Artificial Sequence: Synthetic oligonucleotide
gcucgcauauuauccccac

SEQ ID NO: 415423 - RNA, 19 nt, Artificial Sequence
  Description of Artificial Sequence: Synthetic oligonucleotide
accuuacuuuggaaggcau

SEQ ID NO: 415424 - RNA, 19 nt, Artificial Sequence
  Description of Artificial Sequence: Synthetic oligonucleotide
cauaauugucgugcaucaa

SEQ ID NO: 415425 - RNA, 19 nt, Artificial Sequence
  Description of Artificial Sequence: Synthetic oligonucleotide
cgcauauuauccccacuug

SEQ ID NO: 415426 - RNA, 19 nt, Artificial Sequence
  Description of Artificial Sequence: Synthetic oligonucleotide
ggaaggcgacgcucgcugc

SEQ ID NO: 415427 - RNA, 19 nt, Artificial Sequence
  Description of Artificial Sequence: Synthetic oligonucleotide
cuguuacaacuuauauggu

SEQ ID NO: 415428 - RNA, 19 nt, Artificial Sequence
  Description of Artificial Sequence: Synthetic oligonucleotide
acgcucgcugcugggcagg

SEQ ID NO: 415429 - RNA, 19 nt, Artificial Sequence
  Description of Artificial Sequence: Synthetic oligonucleotide
ccgagcuacggcucccaag

SEQ ID NO: 415430 - RNA, 19 nt, Artificial Sequence
  Description of Artificial Sequence: Synthetic oligonucleotide
ggcaaccagaaaguuuuaa

SEQ ID NO: 415431 - RNA, 19 nt, Artificial Sequence
  Description of Artificial Sequence: Synthetic oligonucleotide
ggcgacgcucgcugcuggg

SEQ ID NO: 415432 - RNA, 19 nt, Artificial Sequence
  Description of Artificial Sequence: Synthetic oligonucleotide
cagaccuucccuacaucau

SEQ ID NO: 415433 - RNA, 19 nt, Artificial Sequence
  Description of Artificial Sequence: Synthetic oligonucleotide
ccaucggaucucaacaacu

SEQ ID NO: 415434 - RNA, 19 nt, Artificial Sequence
  Description of Artificial Sequence: Synthetic oligonucleotide
cgcgguaacaacggcggcc

SEQ ID NO: 415435 - RNA, 19 nt, Artificial Sequence
  Description of Artificial Sequence: Synthetic oligonucleotide
cucguacuccucccggacu

SEQ ID NO: 415436 - RNA, 19 nt, Artificial Sequence
  Description of Artificial Sequence: Synthetic oligonucleotide
ccacuguuacaacuuauau

SEQ ID NO: 415437 - RNA, 19 nt, Artificial Sequence
  Description of Artificial Sequence: Synthetic oligonucleotide
cuucagcgucgccccgcac

SEQ ID NO: 415438 - RNA, 19 nt, Artificial Sequence
  Description of Artificial Sequence: Synthetic oligonucleotide
ggaccugcagaaacauuua

SEQ ID NO: 415439 - RNA, 19 nt, Artificial Sequence
  Description of Artificial Sequence: Synthetic oligonucleotide
gcacgccaucccgcgaagg

SEQ ID NO: 415440 - RNA, 19 nt, Artificial Sequence
  Description of Artificial Sequence: Synthetic oligonucleotide
gcgaaggggccggagacaa

SEQ ID NO: 415441 - RNA, 19 nt, Artificial Sequence
  Description of Artificial Sequence: Synthetic oligonucleotide
ccauaucgccgcauaauuu

SEQ ID NO: 415442 - RNA, 19 nt, Artificial Sequence
  Description of Artificial Sequence: Synthetic oligonucleotide
ccaucccgcgaaggggccg

SEQ ID NO: 415443 - RNA, 19 nt, Artificial Sequence
  Description of Artificial Sequence: Synthetic oligonucleotide
ccugcacucuccuguguua

SEQ ID NO: 415444 - RNA, 19 nt, Artificial Sequence
  Description of Artificial Sequence: Synthetic oligonucleotide
cgcucgcauauuaucccca

SEQ ID NO: 415445 - RNA, 19 nt, Artificial Sequence
  Description of Artificial Sequence: Synthetic oligonucleotide
gggucgcuucagcgucgcc

SEQ ID NO: 415446 - RNA, 19 nt, Artificial Sequence
  Description of Artificial Sequence: Synthetic oligonucleotide
aucccgcgaaggggccgga

SEQ ID NO: 415447 - RNA, 19 nt, Artificial Sequence
  Description of Artificial Sequence: Synthetic oligonucleotide
cgcacgccaucccgcgaag

SEQ ID NO: 415448 - RNA, 19 nt, Artificial Sequence
  Description of Artificial Sequence: Synthetic oligonucleotide
cccuguauuuaacgauaau

SEQ ID NO: 415449 - RNA, 19 nt, Artificial Sequence
  Description of Artificial Sequence: Synthetic oligonucleotide
ccacguguugagugccacu

SEQ ID NO: 415450 - RNA, 19 nt, Artificial Sequence
  Description of Artificial Sequence: Synthetic oligonucleotide
gcgucgccgcuucggggaa

SEQ ID NO: 415451 - RNA, 19 nt, Artificial Sequence
  Description of Artificial Sequence: Synthetic oligonucleotide
cggcuauauucuugcuuua

SEQ ID NO: 415452 - RNA, 19 nt, Artificial Sequence
  Description of Artificial Sequence: Synthetic oligonucleotide
ccgagcacacccugauguu

SEQ ID NO: 415453 - RNA, 19 nt, Artificial Sequence
  Description of Artificial Sequence: Synthetic oligonucleotide
ccguguauugauggcccau

SEQ ID NO: 415454 - RNA, 19 nt, Artificial Sequence
  Description of Artificial Sequence: Synthetic oligonucleotide
ggggcacagcgucgccgcu

SEQ ID NO: 415455 - RNA, 19 nt, Artificial Sequence
  Description of Artificial Sequence: Synthetic oligonucleotide
ggacaccuuaggggaguuu

SEQ ID NO: 415456 - RNA, 19 nt, Artificial Sequence
  Description of Artificial Sequence: Synthetic oligonucleotide
cgucgccccgcacgccauc

SEQ ID NO: 415457 - RNA, 19 nt, Artificial Sequence
  Description of Artificial Sequence: Synthetic oligonucleotide
cgucgccgcuucggggaac

SEQ ID NO: 415458 - RNA, 19 nt, Artificial Sequence
  Description of Artificial Sequence: Synthetic oligonucleotide
gcgucgccccgcacgccau

SEQ ID NO: 415459 - RNA, 19 nt, Artificial Sequence
  Description of Artificial Sequence: Synthetic oligonucleotide
gcgccgccucgaacuccau

SEQ ID NO: 415460 - RNA, 19 nt, Artificial Sequence
  Description of Artificial Sequence: Synthetic oligonucleotide
uggguuguaagacucagcg

SEQ ID NO: 415461 - RNA, 19 nt, Artificial Sequence
  Description of Artificial Sequence: Synthetic oligonucleotide
acuuuauauggcuuggugg

SEQ ID NO: 415462 - RNA, 19 nt, Artificial Sequence
  Description of Artificial Sequence: Synthetic oligonucleotide
aaacuuuuguggcaggaag

SEQ ID NO: 415463 - RNA, 19 nt, Artificial Sequence
  Description of Artificial Sequence: Synthetic oligonucleotide
aagcauaucaauaccacuc

SEQ ID NO: 415464 - RNA, 19 nt, Artificial Sequence
  Description of Artificial Sequence: Synthetic oligonucleotide
auccaacccaucuugaugg

SEQ ID NO: 415465 - RNA, 19 nt, Artificial Sequence
  Description of Artificial Sequence: Synthetic oligonucleotide
ucuugguaagcucuuggcg

SEQ ID NO: 415466 - RNA, 19 nt, Artificial Sequence
  Description of Artificial Sequence: Synthetic oligonucleotide
acugccagagucuucaagg

SEQ ID NO: 415467 - RNA, 19 nt, Artificial Sequence
  Description of Artificial Sequence: Synthetic oligonucleotide
uguauaggcacacccaccc

SEQ ID NO: 415468 - RNA, 19 nt, Artificial Sequence
  Description of Artificial Sequence: Synthetic oligonucleotide
auucggauccuccugggcc

SEQ ID NO: 415469 - RNA, 19 nt, Artificial Sequence
  Description of Artificial Sequence: Synthetic oligonucleotide
uggaaugaaacuacgcuug

SEQ ID NO: 415470 - RNA, 19 nt, Artificial Sequence
  Description of Artificial Sequence: Synthetic oligonucleotide
aaugcggacacuucgcuga

SEQ ID NO: 415471 - RNA, 19 nt, Artificial Sequence
  Description of Artificial Sequence: Synthetic oligonucleotide
gcagcuauuaggcauaugg

SEQ ID NO: 415472 - RNA, 19 nt, Artificial Sequence
  Description of Artificial Sequence: Synthetic oligonucleotide
aacuacgcuugucagcugg

SEQ ID NO: 415473 - RNA, 19 nt, Artificial Sequence
  Description of Artificial Sequence: Synthetic oligonucleotide
uucuauugagucuguauag

SEQ ID NO: 415474 - RNA, 19 nt, Artificial Sequence
  Description of Artificial Sequence: Synthetic oligonucleotide
uguaccugcaccucagagg

SEQ ID NO: 415475 - RNA, 19 nt, Artificial Sequence
  Description of Artificial Sequence: Synthetic oligonucleotide
aucguaccaugccagaggc

SEQ ID NO: 415476 - RNA, 19 nt, Artificial Sequence
  Description of Artificial Sequence: Synthetic oligonucleotide
gauacguuugccauccagg

SEQ ID NO: 415477 - RNA, 19 nt, Artificial Sequence
  Description of Artificial Sequence: Synthetic oligonucleotide
auuagggauggaaugaaac

SEQ ID NO: 415478 - RNA, 19 nt, Artificial Sequence
  Description of Artificial Sequence: Synthetic oligonucleotide
gguuguaagacucagcgug

SEQ ID NO: 415479 - RNA, 19 nt, Artificial Sequence
  Description of Artificial Sequence: Synthetic oligonucleotide
uccuuuucaauuagggaug

SEQ ID NO: 415480 - RNA, 19 nt, Artificial Sequence
  Description of Artificial Sequence: Synthetic oligonucleotide
ucuauugagucuguauagg

SEQ ID NO: 415481 - RNA, 19 nt, Artificial Sequence
  Description of Artificial Sequence: Synthetic oligonucleotide
aggaaguuaagcuuccucu

SEQ ID NO: 415482 - RNA, 19 nt, Artificial Sequence
  Description of Artificial Sequence: Synthetic oligonucleotide
accucaguaggugacaagc

SEQ ID NO: 415483 - RNA, 19 nt, Artificial Sequence
  Description of Artificial Sequence: Synthetic oligonucleotide
aaacgcuccuggaugaagc

SEQ ID NO: 415484 - RNA, 19 nt, Artificial Sequence
  Description of Artificial Sequence: Synthetic oligonucleotide
cuauugagucuguauaggc

SEQ ID NO: 415485 - RNA, 19 nt, Artificial Sequence
  Description of Artificial Sequence: Synthetic oligonucleotide
ucuguauaggcacacccac

SEQ ID NO: 415486 - RNA, 19 nt, Artificial Sequence
  Description of Artificial Sequence: Synthetic oligonucleotide
gguaaaugcggacacuucg

SEQ ID NO: 415487 - RNA, 19 nt, Artificial Sequence
  Description of Artificial Sequence: Synthetic oligonucleotide
cuauuaggcauauggcagg

SEQ ID NO: 415488 - RNA, 19 nt, Artificial Sequence
  Description of Artificial Sequence: Synthetic oligonucleotide
agauacguagucgcaagcc

SEQ ID NO: 415489 - RNA, 19 nt, Artificial Sequence
  Description of Artificial Sequence: Synthetic oligonucleotide
gauacguagucgcaagccc

SEQ ID NO: 415490 - RNA, 19 nt, Artificial Sequence
  Description of Artificial Sequence: Synthetic oligonucleotide
gauacccacuugcaguugg

SEQ ID NO: 415491 - RNA, 19 nt, Artificial Sequence
  Description of Artificial Sequence: Synthetic oligonucleotide
cuuuauauggcuuggugga

SEQ ID NO: 415492 - RNA, 19 nt, Artificial Sequence
  Description of Artificial Sequence: Synthetic oligonucleotide
ucaauuagggauggaauga

SEQ ID NO: 415493 - RNA, 19 nt, Artificial Sequence
  Description of Artificial Sequence: Synthetic oligonucleotide
aagucaucguaccaugcca

SEQ ID NO: 415494 - RNA, 19 nt, Artificial Sequence
  Description of Artificial Sequence: Synthetic oligonucleotide
ugaagagucggaugguacc

SEQ ID NO: 415495 - RNA, 19 nt, Artificial Sequence
  Description of Artificial Sequence: Synthetic oligonucleotide
auucuauugagucuguaua

SEQ ID NO: 415496 - RNA, 19 nt, Artificial Sequence
  Description of Artificial Sequence: Synthetic oligonucleotide
aaagccacgcacugcaccu

SEQ ID NO: 415497 - RNA, 19 nt, Artificial Sequence
  Description of Artificial Sequence: Synthetic oligonucleotide
ugaaacuacgcuugucagc

SEQ ID NO: 415498 - RNA, 19 nt, Artificial Sequence
  Description of Artificial Sequence: Synthetic oligonucleotide
uggggauaaggucuucagg

SEQ ID NO: 415499 - RNA, 19 nt, Artificial Sequence
  Description of Artificial Sequence: Synthetic oligonucleotide
guacagcuaggcuagauac

SEQ ID NO: 415500 - RNA, 19 nt, Artificial Sequence
  Description of Artificial Sequence: Synthetic oligonucleotide
uuauccugcacagugcgcc

SEQ ID NO: 415501 - RNA, 19 nt, Artificial Sequence
  Description of Artificial Sequence: Synthetic oligonucleotide
gauccaacccaucuugaug

SEQ ID NO: 415502 - RNA, 19 nt, Artificial Sequence
  Description of Artificial Sequence: Synthetic oligonucleotide
gauacaagucaaggcagcg

SEQ ID NO: 415503 - RNA, 19 nt, Artificial Sequence
  Description of Artificial Sequence: Synthetic oligonucleotide
caucguccgaaccugaagc

SEQ ID NO: 415504 - RNA, 19 nt, Artificial Sequence
  Description of Artificial Sequence: Synthetic oligonucleotide
ucagccuagcugaagaguc

SEQ ID NO: 415505 - RNA, 19 nt, Artificial Sequence
  Description of Artificial Sequence: Synthetic oligonucleotide
ucuugugaugccuuagcac

SEQ ID NO: 415506 - RNA, 19 nt, Artificial Sequence
  Description of Artificial Sequence: Synthetic oligonucleotide
cagauacaagucaaggcag

SEQ ID NO: 415507 - RNA, 19 nt, Artificial Sequence
  Description of Artificial Sequence: Synthetic oligonucleotide
augaaacuacgcuugucag

SEQ ID NO: 415508 - RNA, 19 nt, Artificial Sequence
  Description of Artificial Sequence: Synthetic oligonucleotide
uggccgguuggucacaggg

SEQ ID NO: 415509 - RNA, 19 nt, Artificial Sequence
  Description of Artificial Sequence: Synthetic oligonucleotide
aucguccgaaccugaagcc

SEQ ID NO: 415510 - RNA, 19 nt, Artificial Sequence
  Description of Artificial Sequence: Synthetic oligonucleotide
cucaaugagccaucguccg

SEQ ID NO: 415511 - RNA, 19 nt, Artificial Sequence
  Description of Artificial Sequence: Synthetic oligonucleotide
uaacacuaccgucaucuga

SEQ ID NO: 415512 - RNA, 19 nt, Artificial Sequence
  Description of Artificial Sequence: Synthetic oligonucleotide
uucuugugaugccuuagca

SEQ ID NO: 415513 - RNA, 19 nt, Artificial Sequence
  Description of Artificial Sequence: Synthetic oligonucleotide
guagauacguuugccaucc

SEQ ID NO: 415514 - RNA, 19 nt, Artificial Sequence
  Description of Artificial Sequence: Synthetic oligonucleotide
uacgcuugucagcuggccg

SEQ ID NO: 415515 - RNA, 19 nt, Artificial Sequence
  Description of Artificial Sequence: Synthetic oligonucleotide
gucaucuuauccugcacag

SEQ ID NO: 415516 - RNA, 19 nt, Artificial Sequence
  Description of Artificial Sequence: Synthetic oligonucleotide
ggucauagcccacaugugg

SEQ ID NO: 415517 - RNA, 19 nt, Artificial Sequence
  Description of Artificial Sequence: Synthetic oligonucleotide
auacguagucgcaagcccc

SEQ ID NO: 415518 - RNA, 19 nt, Artificial Sequence
  Description of Artificial Sequence: Synthetic oligonucleotide
ugggcacagauacaaguca

SEQ ID NO: 415519 - RNA, 19 nt, Artificial Sequence
  Description of Artificial Sequence: Synthetic oligonucleotide
ggaugaagcggccauaagc

SEQ ID NO: 415520 - RNA, 19 nt, Artificial Sequence
  Description of Artificial Sequence: Synthetic oligonucleotide
ucauagaagcuaggggugg

SEQ ID NO: 415521 - RNA, 19 nt, Artificial Sequence
  Description of Artificial Sequence: Synthetic oligonucleotide
aaugagccaucguccgaac

SEQ ID NO: 415522 - RNA, 19 nt, Artificial Sequence
  Description of Artificial Sequence: Synthetic oligonucleotide
acuaccgucaucugagcca

SEQ ID NO: 415523 - RNA, 19 nt, Artificial Sequence
  Description of Artificial Sequence: Synthetic oligonucleotide
ucgcugagaggccacaagc

SEQ ID NO: 415524 - RNA, 19 nt, Artificial Sequence
  Description of Artificial Sequence: Synthetic oligonucleotide
uuaggcauauggcaggauu

SEQ ID NO: 415525 - RNA, 19 nt, Artificial Sequence
  Description of Artificial Sequence: Synthetic oligonucleotide
agauacaagucaaggcagc

SEQ ID NO: 415526 - RNA, 19 nt, Artificial Sequence
  Description of Artificial Sequence: Synthetic oligonucleotide
uaaaugcggacacuucgcu

SEQ ID NO: 415527 - RNA, 19 nt, Artificial Sequence
  Description of Artificial Sequence: Synthetic oligonucleotide
cuuguggcgccccagcacg

SEQ ID NO: 415528 - RNA, 19 nt, Artificial Sequence
  Description of Artificial Sequence: Synthetic oligonucleotide
guggcagauacguagucgc

SEQ ID NO: 415529 - RNA, 19 nt, Artificial Sequence
  Description of Artificial Sequence: Synthetic oligonucleotide
ucgcuaguaucacugccag

SEQ ID NO: 415530 - RNA, 19 nt, Artificial Sequence
  Description of Artificial Sequence: Synthetic oligonucleotide
uugacggguaccagcagug

SEQ ID NO: 415531 - RNA, 19 nt, Artificial Sequence
  Description of Artificial Sequence: Synthetic oligonucleotide
uuggggauaaggucuucag

SEQ ID NO: 415532 - RNA, 19 nt, Artificial Sequence
  Description of Artificial Sequence: Synthetic oligonucleotide
acgcccugucaucuuaucc

SEQ ID NO: 415533 - RNA, 19 nt, Artificial Sequence
  Description of Artificial Sequence: Synthetic oligonucleotide
ucuuggccgaggaagcuug

SEQ ID NO: 415534 - RNA, 19 nt, Artificial Sequence
  Description of Artificial Sequence: Synthetic oligonucleotide
agggauggaaugaaacuac

SEQ ID NO: 415535 - RNA, 19 nt, Artificial Sequence
  Description of Artificial Sequence: Synthetic oligonucleotide
aacgccgcuuccccgacag

SEQ ID NO: 415536 - RNA, 19 nt, Artificial Sequence
  Description of Artificial Sequence: Synthetic oligonucleotide
uguacagcuaggcuagaua

SEQ ID NO: 415537 - RNA, 19 nt, Artificial Sequence
  Description of Artificial Sequence: Synthetic oligonucleotide
caucguaccaugccagagg

SEQ ID NO: 415538 - RNA, 19 nt, Artificial Sequence
  Description of Artificial Sequence: Synthetic oligonucleotide
auccgggucauccauuuug

SEQ ID NO: 415539 - RNA, 19 nt, Artificial Sequence
  Description of Artificial Sequence: Synthetic oligonucleotide
uccccgacagcgauucugg

SEQ ID NO: 415540 - RNA, 19 nt, Artificial Sequence
  Description of Artificial Sequence: Synthetic oligonucleotide
uacagcuaggcuagauacc

SEQ ID NO: 415541 - RNA, 19 nt, Artificial Sequence
  Description of Artificial Sequence: Synthetic oligonucleotide
cuuguagauacguuugcca

SEQ ID NO: 415542 - RNA, 19 nt, Artificial Sequence
  Description of Artificial Sequence: Synthetic oligonucleotide
cacaggucauagaagcuag

SEQ ID NO: 415543 - RNA, 19 nt, Artificial Sequence
  Description of Artificial Sequence: Synthetic oligonucleotide
uacaccaugccauggcaga

SEQ ID NO: 415544 - RNA, 19 nt, Artificial Sequence
  Description of Artificial Sequence: Synthetic oligonucleotide
aaaacgcuccuggaugaag

SEQ ID NO: 415545 - RNA, 19 nt, Artificial Sequence
  Description of Artificial Sequence: Synthetic oligonucleotide
uguaagacucagcguggcc

SEQ ID NO: 415546 - RNA, 19 nt, Artificial Sequence
  Description of Artificial Sequence: Synthetic oligonucleotide
gacggguaccagcaguggg

SEQ ID NO: 415547 - RNA, 19 nt, Artificial Sequence
  Description of Artificial Sequence: Synthetic oligonucleotide
gcagacaauaacacuaccg

SEQ ID NO: 415548 - RNA, 19 nt, Artificial Sequence
  Description of Artificial Sequence: Synthetic oligonucleotide
gaaacuacgcuugucagcu

SEQ ID NO: 415549 - RNA, 19 nt, Artificial Sequence
  Description of Artificial Sequence: Synthetic oligonucleotide
acgcuugucagcuggccgg

SEQ ID NO: 415550 - RNA, 19 nt, Artificial Sequence
  Description of Artificial Sequence: Synthetic oligonucleotide
uugguaagcucuuggcgca

SEQ ID NO: 415551 - RNA, 19 nt, Artificial Sequence
  Description of Artificial Sequence: Synthetic oligonucleotide
aaauccgggucauccauuu

SEQ ID NO: 415552 - RNA, 19 nt, Artificial Sequence
  Description of Artificial Sequence: Synthetic oligonucleotide
gaugcaaagaguggguauc

SEQ ID NO: 415553 - RNA, 19 nt, Artificial Sequence
  Description of Artificial Sequence: Synthetic oligonucleotide
ccuuaucacaaucugcucc

SEQ ID NO: 415554 - RNA, 19 nt, Artificial Sequence
  Description of Artificial Sequence: Synthetic oligonucleotide
agcgauucuggugacaugu

SEQ ID NO: 415555 - RNA, 19 nt, Artificial Sequence
  Description of Artificial Sequence: Synthetic oligonucleotide
cagaucucgggucagugug

SEQ ID NO: 415556 - RNA, 19 nt, Artificial Sequence
  Description of Artificial Sequence: Synthetic oligonucleotide
uucacccucaucuugcguu

SEQ ID NO: 415557 - RNA, 19 nt, Artificial Sequence
  Description of Artificial Sequence: Synthetic oligonucleotide
uaggcuagauacccacuug

SEQ ID NO: 415558 - RNA, 19 nt, Artificial Sequence
  Description of Artificial Sequence: Synthetic oligonucleotide
auuguacaccaugccaugg

SEQ ID NO: 415559 - RNA, 19 nt, Artificial Sequence
  Description of Artificial Sequence: Synthetic oligonucleotide
ucaucacucagccgcagau

SEQ ID NO: 415560 - RNA, 19 nt, Artificial Sequence
  Description of Artificial Sequence: Synthetic oligonucleotide
cuugugaugccuuagcacu

SEQ ID NO: 415561 - RNA, 19 nt, Artificial Sequence
  Description of Artificial Sequence: Synthetic oligonucleotide
ucuggggauucuauugagu

SEQ ID NO: 415562 - RNA, 19 nt, Artificial Sequence
  Description of Artificial Sequence: Synthetic oligonucleotide
caugccagaggcacauugc

SEQ ID NO: 415563 - RNA, 19 nt, Artificial Sequence
  Description of Artificial Sequence: Synthetic oligonucleotide
gguuaaagcccaaaucucc

SEQ ID NO: 415564 - RNA, 19 nt, Artificial Sequence
  Description of Artificial Sequence: Synthetic oligonucleotide
uucgcugagaggccacaag

SEQ ID NO: 415565 - RNA, 19 nt, Artificial Sequence
  Description of Artificial Sequence: Synthetic oligonucleotide
cacugaagaaauccacggc

SEQ ID NO: 415566 - RNA, 19 nt, Artificial Sequence
  Description of Artificial Sequence: Synthetic oligonucleotide
agcacuuuauauggcuugg

SEQ ID NO: 415567 - RNA, 19 nt, Artificial Sequence
  Description of Artificial Sequence: Synthetic oligonucleotide
gaagaaauccacggcuggc

SEQ ID NO: 415568 - RNA, 19 nt, Artificial Sequence
  Description of Artificial Sequence: Synthetic oligonucleotide
uuccaaacgccgcuucccc

SEQ ID NO: 415569 - RNA, 19 nt, Artificial Sequence
  Description of Artificial Sequence: Synthetic oligonucleotide
ugcgccagaaauccggguc

SEQ ID NO: 415570 - RNA, 19 nt, Artificial Sequence
  Description of Artificial Sequence: Synthetic oligonucleotide
uggugccccaauuuauugc

SEQ ID NO: 415571 - RNA, 19 nt, Artificial Sequence
  Description of Artificial Sequence: Synthetic oligonucleotide
uguaguccucgcuaguauc

SEQ ID NO: 415572 - RNA, 19 nt, Artificial Sequence
  Description of Artificial Sequence: Synthetic oligonucleotide
ucaucguaccaugccagag

SEQ ID NO: 415573 - RNA, 19 nt, Artificial Sequence
  Description of Artificial Sequence: Synthetic oligonucleotide
ucuugcguugccgugggca

SEQ ID NO: 415574 - RNA, 19 nt, Artificial Sequence
  Description of Artificial Sequence: Synthetic oligonucleotide
guaaaugcggacacuucgc

SEQ ID NO: 415575 - RNA, 19 nt, Artificial Sequence
  Description of Artificial Sequence: Synthetic oligonucleotide
gaagccagccacuggcccc

SEQ ID NO: 415576 - RNA, 19 nt, Artificial Sequence
  Description of Artificial Sequence: Synthetic oligonucleotide
uugauccaacccaucuuga

SEQ ID NO: 415577 - RNA, 19 nt, Artificial Sequence
  Description of Artificial Sequence: Synthetic oligonucleotide
ccacuuacaccucaguagg

SEQ ID NO: 415578 - RNA, 19 nt, Artificial Sequence
  Description of Artificial Sequence: Synthetic oligonucleotide
uggcguucuuccucggagg

SEQ ID NO: 415579 - RNA, 19 nt, Artificial Sequence
  Description of Artificial Sequence: Synthetic oligonucleotide
cagcacggcauucggaucc

SEQ ID NO: 415580 - RNA, 19 nt, Artificial Sequence
  Description of Artificial Sequence: Synthetic oligonucleotide
gauggcgugcaccaugcga

SEQ ID NO: 415581 - RNA, 19 nt, Artificial Sequence
  Description of Artificial Sequence: Synthetic oligonucleotide
guaccaucugccccagagg

SEQ ID NO: 415582 - RNA, 19 nt, Artificial Sequence
  Description of Artificial Sequence: Synthetic oligonucleotide
agaugcaaagaguggguau

SEQ ID NO: 415583 - RNA, 19 nt, Artificial Sequence
  Description of Artificial Sequence: Synthetic oligonucleotide
acacuaccgucaucugagc

SEQ ID NO: 415584 - RNA, 19 nt, Artificial Sequence
  Description of Artificial Sequence: Synthetic oligonucleotide
cuagauacccacuugcagu

SEQ ID NO: 415585 - RNA, 19 nt, Artificial Sequence
  Description of Artificial Sequence: Synthetic oligonucleotide
gauucuauugagucuguau

SEQ ID NO: 415586 - RNA, 19 nt, Artificial Sequence
  Description of Artificial Sequence: Synthetic oligonucleotide
ggugccccaauuuauugcc

SEQ ID NO: 415587 - RNA, 19 nt, Artificial Sequence
  Description of Artificial Sequence: Synthetic oligonucleotide
cugaaaacacacucuccuc

SEQ ID NO: 415588 - RNA, 19 nt, Artificial Sequence
  Description of Artificial Sequence: Synthetic oligonucleotide
ucgaggcuugauccaaccc

SEQ ID NO: 415589 - RNA, 19 nt, Artificial Sequence
  Description of Artificial Sequence: Synthetic oligonucleotide
cuauugcuguccuuaucac

SEQ ID NO: 415590 - RNA, 19 nt, Artificial Sequence
  Description of Artificial Sequence: Synthetic oligonucleotide
uggcucauauggguuaaag

SEQ ID NO: 415591 - RNA, 19 nt, Artificial Sequence
  Description of Artificial Sequence: Synthetic oligonucleotide
cuggucggguuccaaacgc

SEQ ID NO: 415592 - RNA, 19 nt, Artificial Sequence
  Description of Artificial Sequence: Synthetic oligonucleotide
auggcgugcaccaugcgag

SEQ ID NO: 415593 - RNA, 19 nt, Artificial Sequence
  Description of Artificial Sequence: Synthetic oligonucleotide
ugccccaauuuauugccca

SEQ ID NO: 415594 - RNA, 19 nt, Artificial Sequence
  Description of Artificial Sequence: Synthetic oligonucleotide
cauucacccucaucuugcg

SEQ ID NO: 415595 - RNA, 19 nt, Artificial Sequence
  Description of Artificial Sequence: Synthetic oligonucleotide
guaagacucagcguggcca

SEQ ID NO: 415596 - RNA, 19 nt, Artificial Sequence
  Description of Artificial Sequence: Synthetic oligonucleotide
cucaucucguguccgcagg

SEQ ID NO: 415597 - RNA, 19 nt, Artificial Sequence
  Description of Artificial Sequence: Synthetic oligonucleotide
cucggaggccucuagccag

SEQ ID NO: 415598 - RNA, 19 nt, Artificial Sequence
  Description of Artificial Sequence: Synthetic oligonucleotide
auaacacuaccgucaucug

SEQ ID NO: 415599 - RNA, 19 nt, Artificial Sequence
  Description of Artificial Sequence: Synthetic oligonucleotide
caggccgcccacaauagug

SEQ ID NO: 415600 - RNA, 19 nt, Artificial Sequence
  Description of Artificial Sequence: Synthetic oligonucleotide
uccgggucauccauuuugu

SEQ ID NO: 415601 - RNA, 19 nt, Artificial Sequence
  Description of Artificial Sequence: Synthetic oligonucleotide
cuuauccugcacagugcgc

SEQ ID NO: 415602 - RNA, 19 nt, Artificial Sequence
  Description of Artificial Sequence: Synthetic oligonucleotide
ggcauucggauccuccugg

SEQ ID NO: 415603 - RNA, 19 nt, Artificial Sequence
  Description of Artificial Sequence: Synthetic oligonucleotide
agucaucguaccaugccag

SEQ ID NO: 415604 - RNA, 19 nt, Artificial Sequence
  Description of Artificial Sequence: Synthetic oligonucleotide
auagaagcuaggggugggg

SEQ ID NO: 415605 - RNA, 19 nt, Artificial Sequence
  Description of Artificial Sequence: Synthetic oligonucleotide
cacucagccgcagaucacg

SEQ ID NO: 415606 - RNA, 19 nt, Artificial Sequence
  Description of Artificial Sequence: Synthetic oligonucleotide
ugauccaacccaucuugau

SEQ ID NO: 415607 - RNA, 19 nt, Artificial Sequence
  Description of Artificial Sequence: Synthetic oligonucleotide
gaagcagcacugcaucguc

SEQ ID NO: 415608 - RNA, 19 nt, Artificial Sequence
  Description of Artificial Sequence: Synthetic oligonucleotide
caccuugacggguaccagc

SEQ ID NO: 415609 - RNA, 19 nt, Artificial Sequence
  Description of Artificial Sequence: Synthetic oligonucleotide
cacuaccgucaucugagcc

SEQ ID NO: 415610 - RNA, 19 nt, Artificial Sequence
  Description of Artificial Sequence: Synthetic oligonucleotide
ucggguuccaaacgccgcu

SEQ ID NO: 415611 - RNA, 19 nt, Artificial Sequence
  Description of Artificial Sequence: Synthetic oligonucleotide
gcauauggcaggauugggg

SEQ ID NO: 415612 - RNA, 19 nt, Artificial Sequence
  Description of Artificial Sequence: Synthetic oligonucleotide
gaagagucggaugguacca

SEQ ID NO: 415613 - RNA, 19 nt, Artificial Sequence
  Description of Artificial Sequence: Synthetic oligonucleotide
cauagaagcuagggguggg

SEQ ID NO: 415614 - RNA, 19 nt, Artificial Sequence
  Description of Artificial Sequence: Synthetic oligonucleotide
cagauacguagucgcaagc

SEQ ID NO: 415615 - RNA, 19 nt, Artificial Sequence
  Description of Artificial Sequence: Synthetic oligonucleotide
aagcaccuugacggguacc

SEQ ID NO: 415616 - RNA, 19 nt, Artificial Sequence
  Description of Artificial Sequence: Synthetic oligonucleotide
cuaccgucaucugagccag

SEQ ID NO: 415617 - RNA, 19 nt, Artificial Sequence
  Description of Artificial Sequence: Synthetic oligonucleotide
uuuauauggcuugguggaa

SEQ ID NO: 415618 - RNA, 19 nt, Artificial Sequence
  Description of Artificial Sequence: Synthetic oligonucleotide
agccuagcugaagagucgg

SEQ ID NO: 415619 - RNA, 19 nt, Artificial Sequence
  Description of Artificial Sequence: Synthetic oligonucleotide
cuugcguugccgugggcac

SEQ ID NO: 415620 - RNA, 19 nt, Artificial Sequence
  Description of Artificial Sequence: Synthetic oligonucleotide
cagccuagcugaagagucg

SEQ ID NO: 415621 - RNA, 19 nt, Artificial Sequence
  Description of Artificial Sequence: Synthetic oligonucleotide
cucgcuaguaucacugcca

SEQ ID NO: 415622 - RNA, 19 nt, Artificial Sequence
  Description of Artificial Sequence: Synthetic oligonucleotide
ggaaguuaagcuuccucuc

SEQ ID NO: 415623 - RNA, 19 nt, Artificial Sequence
  Description of Artificial Sequence: Synthetic oligonucleotide
auggcugcggcggaauggg

SEQ ID NO: 415624 - RNA, 19 nt, Artificial Sequence
  Description of Artificial Sequence: Synthetic oligonucleotide
cacggcauucggauccucc

SEQ ID NO: 415625 - RNA, 19 nt, Artificial Sequence
  Description of Artificial Sequence: Synthetic oligonucleotide
ucaaggcagcgcucaaaac

SEQ ID NO: 415626 - RNA, 19 nt, Artificial Sequence
  Description of Artificial Sequence: Synthetic oligonucleotide
cauauggcaggauuggggu

SEQ ID NO: 415627 - RNA, 19 nt, Artificial Sequence
  Description of Artificial Sequence: Synthetic oligonucleotide
aaacuacgcuugucagcug

SEQ ID NO: 415628 - RNA, 19 nt, Artificial Sequence
  Description of Artificial Sequence: Synthetic oligonucleotide
caucuugcguugccguggg

SEQ ID NO: 415629 - RNA, 19 nt, Artificial Sequence
  Description of Artificial Sequence: Synthetic oligonucleotide
uggcagauacguagucgca

SEQ ID NO: 415630 - RNA, 19 nt, Artificial Sequence
  Description of Artificial Sequence: Synthetic oligonucleotide
uuccccgacagcgauucug

SEQ ID NO: 415631 - RNA, 19 nt, Artificial Sequence
  Description of Artificial Sequence: Synthetic oligonucleotide
ugaugccuuagcacuuuau

SEQ ID NO: 415632 - RNA, 19 nt, Artificial Sequence
  Description of Artificial Sequence: Synthetic oligonucleotide
aucucgggucagugugugc

SEQ ID NO: 415633 - RNA, 19 nt, Artificial Sequence
  Description of Artificial Sequence: Synthetic oligonucleotide
gcagguacucaggaggugg

SEQ ID NO: 415634 - RNA, 19 nt, Artificial Sequence
  Description of Artificial Sequence: Synthetic oligonucleotide
uccguccuuggaccagagg

SEQ ID NO: 415635 - RNA, 19 nt, Artificial Sequence
  Description of Artificial Sequence: Synthetic oligonucleotide
cacggcuggcucauauggg

SEQ ID NO: 415636 - RNA, 19 nt, Artificial Sequence
  Description of Artificial Sequence: Synthetic oligonucleotide
ggauaaggucuucaggguc

SEQ ID NO: 415637 - RNA, 19 nt, Artificial Sequence
  Description of Artificial Sequence: Synthetic oligonucleotide
agcggacaaggucacugug

SEQ ID NO: 415638 - RNA, 19 nt, Artificial Sequence
  Description of Artificial Sequence: Synthetic oligonucleotide
acggcauucggauccuccu

SEQ ID NO: 415639 - RNA, 19 nt, Artificial Sequence
  Description of Artificial Sequence: Synthetic oligonucleotide
uccucgcuaguaucacugc

SEQ ID NO: 415640 - RNA, 19 nt, Artificial Sequence
  Description of Artificial Sequence: Synthetic oligonucleotide
aggccgcccacaauagugc

SEQ ID NO: 415641 - RNA, 19 nt, Artificial Sequence
  Description of Artificial Sequence: Synthetic oligonucleotide
acuacgcuugucagcuggc

SEQ ID NO: 415642 - RNA, 19 nt, Artificial Sequence
  Description of Artificial Sequence: Synthetic oligonucleotide
gaaacuuuuguggcaggaa

SEQ ID NO: 415643 - RNA, 19 nt, Artificial Sequence
  Description of Artificial Sequence: Synthetic oligonucleotide
agcaccuugacggguacca

SEQ ID NO: 415644 - RNA, 19 nt, Artificial Sequence
  Description of Artificial Sequence: Synthetic oligonucleotide
gcccaauaaagccacuuac

SEQ ID NO: 415645 - RNA, 19 nt, Artificial Sequence
  Description of Artificial Sequence: Synthetic oligonucleotide
cauucggauccuccugggc

SEQ ID NO: 415646 - RNA, 19 nt, Artificial Sequence
  Description of Artificial Sequence: Synthetic oligonucleotide
uccgcaggggcuuguagau

SEQ ID NO: 415647 - RNA, 19 nt, Artificial Sequence
  Description of Artificial Sequence: Synthetic oligonucleotide
ugacggguaccagcagugg

SEQ ID NO: 415648 - RNA, 19 nt, Artificial Sequence
  Description of Artificial Sequence: Synthetic oligonucleotide
ggauggaaugaaacuacgc

SEQ ID NO: 415649 - RNA, 19 nt, Artificial Sequence
  Description of Artificial Sequence: Synthetic oligonucleotide
guacaccaugccauggcag

SEQ ID NO: 415650 - RNA, 19 nt, Artificial Sequence
  Description of Artificial Sequence: Synthetic oligonucleotide
uccuuggaccagaggggcc

SEQ ID NO: 415651 - RNA, 19 nt, Artificial Sequence
  Description of Artificial Sequence: Synthetic oligonucleotide
agaucacgcccugucaucu

SEQ ID NO: 415652 - RNA, 19 nt, Artificial Sequence
  Description of Artificial Sequence: Synthetic oligonucleotide
aucagccuagcugaagagu

SEQ ID NO: 415653 - RNA, 19 nt, Artificial Sequence
  Description of Artificial Sequence: Synthetic oligonucleotide
uauccugcacagugcgcca

SEQ ID NO: 415654 - RNA, 19 nt, Artificial Sequence
  Description of Artificial Sequence: Synthetic oligonucleotide
gcggacacuucgcugagag

SEQ ID NO: 415655 - RNA, 19 nt, Artificial Sequence
  Description of Artificial Sequence: Synthetic oligonucleotide
gggauggaaugaaacuacg

SEQ ID NO: 415656 - RNA, 19 nt, Artificial Sequence
  Description of Artificial Sequence: Synthetic oligonucleotide
ugaguguguccugggcuag

SEQ ID NO: 415657 - RNA, 19 nt, Artificial Sequence
  Description of Artificial Sequence: Synthetic oligonucleotide
uccaacccaucuugauggc

SEQ ID NO: 415658 - RNA, 19 nt, Artificial Sequence
  Description of Artificial Sequence: Synthetic oligonucleotide
acucagccgcagaucacgc

SEQ ID NO: 415659 - RNA, 19 nt, Artificial Sequence
  Description of Artificial Sequence: Synthetic oligonucleotide
guaguccucgcuaguauca

SEQ ID NO: 415660 - RNA, 19 nt, Artificial Sequence
  Description of Artificial Sequence: Synthetic oligonucleotide
auagcccacauguggggaa

SEQ ID NO: 415661 - RNA, 19 nt, Artificial Sequence
  Description of Artificial Sequence: Synthetic oligonucleotide
uuguggcgccccagcacgg

SEQ ID NO: 415662 - RNA, 19 nt, Artificial Sequence
  Description of Artificial Sequence: Synthetic oligonucleotide
ucguccgaaccugaagcca

SEQ ID NO: 415663 - RNA, 19 nt, Artificial Sequence
  Description of Artificial Sequence: Synthetic oligonucleotide
gagccucaaugagccaucg

SEQ ID NO: 415664 - RNA, 19 nt, Artificial Sequence
  Description of Artificial Sequence: Synthetic oligonucleotide
ggccgucgaggcuugaucc

SEQ ID NO: 415665 - RNA, 19 nt, Artificial Sequence
  Description of Artificial Sequence: Synthetic oligonucleotide
gcggaaugggcucuggcug

SEQ ID NO: 415666 - RNA, 19 nt, Artificial Sequence
  Description of Artificial Sequence: Synthetic oligonucleotide
ugcaccucagagguuuccu

SEQ ID NO: 415667 - RNA, 19 nt, Artificial Sequence
  Description of Artificial Sequence: Synthetic oligonucleotide
gccauaagcaggcacuguc

SEQ ID NO: 415668 - RNA, 19 nt, Artificial Sequence
  Description of Artificial Sequence: Synthetic oligonucleotide
cucagccgcagaucacgcc

SEQ ID NO: 415669 - RNA, 19 nt, Artificial Sequence
  Description of Artificial Sequence: Synthetic oligonucleotide
gauccaggucaaaccacac

SEQ ID NO: 415670 - RNA, 19 nt, Artificial Sequence
  Description of Artificial Sequence: Synthetic oligonucleotide
acaggucauagaagcuagg

SEQ ID NO: 415671 - RNA, 19 nt, Artificial Sequence
  Description of Artificial Sequence: Synthetic oligonucleotide
cuuggccgaggaagcuugg

SEQ ID NO: 415672 - RNA, 19 nt, Artificial Sequence
  Description of Artificial Sequence: Synthetic oligonucleotide
cagaucacgcccugucauc

SEQ ID NO: 415673 - RNA, 19 nt, Artificial Sequence
  Description of Artificial Sequence: Synthetic oligonucleotide
uccgaaccugaagccagcc

SEQ ID NO: 415674 - RNA, 19 nt, Artificial Sequence
  Description of Artificial Sequence: Synthetic oligonucleotide
auagugcaucagccuagcu

SEQ ID NO: 415675 - RNA, 19 nt, Artificial Sequence
  Description of Artificial Sequence: Synthetic oligonucleotide
auauggcaggauugggguu

SEQ ID NO: 415676 - RNA, 19 nt, Artificial Sequence
  Description of Artificial Sequence: Synthetic oligonucleotide
caucucguguccgcagggg

SEQ ID NO: 415677 - RNA, 19 nt, Artificial Sequence
  Description of Artificial Sequence: Synthetic oligonucleotide
aagagucggaugguaccau

SEQ ID NO: 415678 - RNA, 19 nt, Artificial Sequence
  Description of Artificial Sequence: Synthetic oligonucleotide
cagaaauccgggucaucca

SEQ ID NO: 415679 - RNA, 19 nt, Artificial Sequence
  Description of Artificial Sequence: Synthetic oligonucleotide
auacccacuugcaguuggg

SEQ ID NO: 415680 - RNA, 19 nt, Artificial Sequence
  Description of Artificial Sequence: Synthetic oligonucleotide
caucguccauggcugcagc

SEQ ID NO: 415681 - RNA, 19 nt, Artificial Sequence
  Description of Artificial Sequence: Synthetic oligonucleotide
cuacgcuugucagcuggcc

SEQ ID NO: 415682 - RNA, 19 nt, Artificial Sequence
  Description of Artificial Sequence: Synthetic oligonucleotide
guccgcaggggcuuguaga

SEQ ID NO: 415683 - RNA, 19 nt, Artificial Sequence
  Description of Artificial Sequence: Synthetic oligonucleotide
ggucggguuccaaacgccg

SEQ ID NO: 415684 - RNA, 19 nt, Artificial Sequence
  Description of Artificial Sequence: Synthetic oligonucleotide
gccgguuggucacagggug

SEQ ID NO: 415685 - RNA, 19 nt, Artificial Sequence
  Description of Artificial Sequence: Synthetic oligonucleotide
aauccgggucauccauuuu

SEQ ID NO: 415686 - RNA, 19 nt, Artificial Sequence
  Description of Artificial Sequence: Synthetic oligonucleotide
ggcauauggcaggauuggg

SEQ ID NO: 415687 - RNA, 19 nt, Artificial Sequence
  Description of Artificial Sequence: Synthetic oligonucleotide
aucuugcguugccgugggc

SEQ ID NO: 415688 - RNA, 19 nt, Artificial Sequence
  Description of Artificial Sequence: Synthetic oligonucleotide
ccuuagcacuuuauauggc

SEQ ID NO: 415689 - RNA, 19 nt, Artificial Sequence
  Description of Artificial Sequence: Synthetic oligonucleotide
acggguaccagcagugggu

SEQ ID NO: 415690 - RNA, 19 nt, Artificial Sequence
  Description of Artificial Sequence: Synthetic oligonucleotide
augcggacacuucgcugag

SEQ ID NO: 415691 - RNA, 19 nt, Artificial Sequence
  Description of Artificial Sequence: Synthetic oligonucleotide
ccgacagcgauucugguga

SEQ ID NO: 415692 - RNA, 19 nt, Artificial Sequence
  Description of Artificial Sequence: Synthetic oligonucleotide
uaguccucgcuaguaucac

SEQ ID NO: 415693 - RNA, 19 nt, Artificial Sequence
  Description of Artificial Sequence: Synthetic oligonucleotide
gucaucguaccaugccaga

SEQ ID NO: 415694 - RNA, 19 nt, Artificial Sequence
  Description of Artificial Sequence: Synthetic oligonucleotide
cagguaguccccucgccca

SEQ ID NO: 415695 - RNA, 19 nt, Artificial Sequence
  Description of Artificial Sequence: Synthetic oligonucleotide
aucacgcccugucaucuua

SEQ ID NO: 415696 - RNA, 19 nt, Artificial Sequence
  Description of Artificial Sequence: Synthetic oligonucleotide
aggccucuagccagcgggc

SEQ ID NO: 415697 - RNA, 19 nt, Artificial Sequence
  Description of Artificial Sequence: Synthetic oligonucleotide
ggcguucuuccucggaggc

SEQ ID NO: 415698 - RNA, 19 nt, Artificial Sequence
  Description of Artificial Sequence: Synthetic oligonucleotide
ugcaucguccauggcugca

SEQ ID NO: 415699 - RNA, 19 nt, Artificial Sequence
  Description of Artificial Sequence: Synthetic oligonucleotide
cuguggcagauacguaguc

SEQ ID NO: 415700 - RNA, 19 nt, Artificial Sequence
  Description of Artificial Sequence: Synthetic oligonucleotide
ucgggucagugugugcccc

SEQ ID NO: 415701 - RNA, 19 nt, Artificial Sequence
  Description of Artificial Sequence: Synthetic oligonucleotide
gcauucggauccuccuggg

SEQ ID NO: 415702 - RNA, 19 nt, Artificial Sequence
  Description of Artificial Sequence: Synthetic oligonucleotide
guggguuguaagacucagc

SEQ ID NO: 415703 - RNA, 19 nt, Artificial Sequence
  Description of Artificial Sequence: Synthetic oligonucleotide
aaacgccgcuuccccgaca

SEQ ID NO: 415704 - RNA, 19 nt, Artificial Sequence
  Description of Artificial Sequence: Synthetic oligonucleotide
ccagguaguccccucgccc

SEQ ID NO: 415705 - RNA, 19 nt, Artificial Sequence
  Description of Artificial Sequence: Synthetic oligonucleotide
uagauacguuugccaucca

SEQ ID NO: 415706 - RNA, 19 nt, Artificial Sequence
  Description of Artificial Sequence: Synthetic oligonucleotide
gucggguuccaaacgccgc

SEQ ID NO: 415707 - RNA, 19 nt, Artificial Sequence
  Description of Artificial Sequence: Synthetic oligonucleotide
ccuggucggguuccaaacg

SEQ ID NO: 415708 - RNA, 19 nt, Artificial Sequence
  Description of Artificial Sequence: Synthetic oligonucleotide
cuugacggguaccagcagu

SEQ ID NO: 415709 - RNA, 19 nt, Artificial Sequence
  Description of Artificial Sequence: Synthetic oligonucleotide
ccucgcuaguaucacugcc

SEQ ID NO: 415710 - RNA, 19 nt, Artificial Sequence
  Description of Artificial Sequence: Synthetic oligonucleotide
cguccuuggaccagagggg

SEQ ID NO: 415711 - RNA, 19 nt, Artificial Sequence
  Description of Artificial Sequence: Synthetic oligonucleotide
auacagcgggcaguggcca

SEQ ID NO: 415712 - RNA, 19 nt, Artificial Sequence
  Description of Artificial Sequence: Synthetic oligonucleotide
agccacgcacugcaccugu

SEQ ID NO: 415713 - RNA, 19 nt, Artificial Sequence
  Description of Artificial Sequence: Synthetic oligonucleotide
aagccacgcacugcaccug

SEQ ID NO: 415714 - RNA, 19 nt, Artificial Sequence
  Description of Artificial Sequence: Synthetic oligonucleotide
uggcgcagcaggugguaaa

SEQ ID NO: 415715 - RNA, 19 nt, Artificial Sequence
  Description of Artificial Sequence: Synthetic oligonucleotide
uuaucacaaucugcuccau

SEQ ID NO: 415716 - RNA, 19 nt, Artificial Sequence
  Description of Artificial Sequence: Synthetic oligonucleotide
caucacucagccgcagauc

SEQ ID NO: 415717 - RNA, 19 nt, Artificial Sequence
  Description of Artificial Sequence: Synthetic oligonucleotide
caagcacaguccucauaca

SEQ ID NO: 415718 - RNA, 19 nt, Artificial Sequence
  Description of Artificial Sequence: Synthetic oligonucleotide
augcuccggaccacacccc

SEQ ID NO: 415719 - RNA, 19 nt, Artificial Sequence
  Description of Artificial Sequence: Synthetic oligonucleotide
ggugcaggcacgugcaucu

SEQ ID NO: 415720 - RNA, 19 nt, Artificial Sequence
  Description of Artificial Sequence: Synthetic oligonucleotide
uccuccguccuuggaccag

SEQ ID NO: 415721 - RNA, 19 nt, Artificial Sequence
  Description of Artificial Sequence: Synthetic oligonucleotide
agcucaucucguguccgca

SEQ ID NO: 415722 - RNA, 19 nt, Artificial Sequence
  Description of Artificial Sequence: Synthetic oligonucleotide
agcgcucaaaacgcuccug

SEQ ID NO: 415723 - RNA, 19 nt, Artificial Sequence
  Description of Artificial Sequence: Synthetic oligonucleotide
ccaauuuauugcccaauaa

SEQ ID NO: 415724 - RNA, 19 nt, Artificial Sequence
  Description of Artificial Sequence: Synthetic oligonucleotide
cacuucgcugagaggccac

SEQ ID NO: 415725 - RNA, 19 nt, Artificial Sequence
  Description of Artificial Sequence: Synthetic oligonucleotide
cacgcacugcaccugucca

SEQ ID NO: 415726 - RNA, 19 nt, Artificial Sequence
  Description of Artificial Sequence: Synthetic oligonucleotide
agccucaaugagccaucgu

SEQ ID NO: 415727 - RNA, 19 nt, Artificial Sequence
  Description of Artificial Sequence: Synthetic oligonucleotide
cgcaggggcuuguagauac

SEQ ID NO: 415728 - RNA, 19 nt, Artificial Sequence
  Description of Artificial Sequence: Synthetic oligonucleotide
cacgugcaucuuguggcgc

SEQ ID NO: 415729 - RNA, 19 nt, Artificial Sequence
  Description of Artificial Sequence: Synthetic oligonucleotide
agucaaggcagcgcucaaa

SEQ ID NO: 415730 - RNA, 19 nt, Artificial Sequence
  Description of Artificial Sequence: Synthetic oligonucleotide
ggacaaggucacuguggcc

SEQ ID NO: 415731 - RNA, 19 nt, Artificial Sequence
  Description of Artificial Sequence: Synthetic oligonucleotide
agaucucgggucagugugu

SEQ ID NO: 415732 - RNA, 19 nt, Artificial Sequence
  Description of Artificial Sequence: Synthetic oligonucleotide
cuaggcuagauacccacuu

SEQ ID NO: 415733 - RNA, 19 nt, Artificial Sequence
  Description of Artificial Sequence: Synthetic oligonucleotide
ccaucguccgaaccugaag

SEQ ID NO: 415734 - RNA, 19 nt, Artificial Sequence
  Description of Artificial Sequence: Synthetic oligonucleotide
ggcaggauugggguuccag

SEQ ID NO: 415735 - RNA, 19 nt, Artificial Sequence
  Description of Artificial Sequence: Synthetic oligonucleotide
caaacgccgcuuccccgac

SEQ ID NO: 415736 - RNA, 19 nt, Artificial Sequence
  Description of Artificial Sequence: Synthetic oligonucleotide
cguccgaaccugaagccag

SEQ ID NO: 415737 - RNA, 19 nt, Artificial Sequence
  Description of Artificial Sequence: Synthetic oligonucleotide
cagcgauucuggugacaug

SEQ ID NO: 415738 - RNA, 19 nt, Artificial Sequence
  Description of Artificial Sequence: Synthetic oligonucleotide
cucgcccaugccaggucac

SEQ ID NO: 415739 - RNA, 19 nt, Artificial Sequence
  Description of Artificial Sequence: Synthetic oligonucleotide
ucgcccaugccaggucacc

SEQ ID NO: 415740 - RNA, 19 nt, Artificial Sequence
  Description of Artificial Sequence: Synthetic oligonucleotide
cccgacagcgauucuggug

SEQ ID NO: 415741 - RNA, 19 nt, Artificial Sequence
  Description of Artificial Sequence: Synthetic oligonucleotide
gugacauguggggcuuacc

SEQ ID NO: 415742 - RNA, 19 nt, Artificial Sequence
  Description of Artificial Sequence: Synthetic oligonucleotide
aggcagcggacaaggucac

SEQ ID NO: 415743 - RNA, 19 nt, Artificial Sequence
  Description of Artificial Sequence: Synthetic oligonucleotide
gugccccaauuuauugccc

SEQ ID NO: 415744 - RNA, 19 nt, Artificial Sequence
  Description of Artificial Sequence: Synthetic oligonucleotide
guucuauugcuguccuuau

SEQ ID NO: 415745 - RNA, 19 nt, Artificial Sequence
  Description of Artificial Sequence: Synthetic oligonucleotide
acuucgcugagaggccaca

SEQ ID NO: 415746 - RNA, 19 nt, Artificial Sequence
  Description of Artificial Sequence: Synthetic oligonucleotide
aggucucuuggccgaggaa

SEQ ID NO: 415747 - RNA, 19 nt, Artificial Sequence
  Description of Artificial Sequence: Synthetic oligonucleotide
caggcacgugcaucuugug

SEQ ID NO: 415748 - RNA, 19 nt, Artificial Sequence
  Description of Artificial Sequence: Synthetic oligonucleotide
cuccguccuuggaccagag

SEQ ID NO: 415749 - RNA, 19 nt, Artificial Sequence
  Description of Artificial Sequence: Synthetic oligonucleotide
agguaguccccucgcccau

SEQ ID NO: 415750 - RNA, 19 nt, Artificial Sequence
  Description of Artificial Sequence: Synthetic oligonucleotide
gacagcgauucuggugaca

SEQ ID NO: 415751 - RNA, 19 nt, Artificial Sequence
  Description of Artificial Sequence: Synthetic oligonucleotide
ccgguuggucacagggugg

SEQ ID NO: 415752 - RNA, 19 nt, Artificial Sequence
  Description of Artificial Sequence: Synthetic oligonucleotide
ggaaugaaacuacgcuugu

SEQ ID NO: 415753 - RNA, 19 nt, Artificial Sequence
  Description of Artificial Sequence: Synthetic oligonucleotide
cuggccgguuggucacagg

SEQ ID NO: 415754 - RNA, 19 nt, Artificial Sequence
  Description of Artificial Sequence: Synthetic oligonucleotide
ggcuagauacccacuugca

SEQ ID NO: 415755 - RNA, 19 nt, Artificial Sequence
  Description of Artificial Sequence: Synthetic oligonucleotide
gcaucguccauggcugcag

SEQ ID NO: 415756 - RNA, 19 nt, Artificial Sequence
  Description of Artificial Sequence: Synthetic oligonucleotide
gcgccagaaauccggguca

SEQ ID NO: 415757 - RNA, 19 nt, Artificial Sequence
  Description of Artificial Sequence: Synthetic oligonucleotide
ggcagauacguagucgcaa

SEQ ID NO: 415758 - RNA, 19 nt, Artificial Sequence
  Description of Artificial Sequence: Synthetic oligonucleotide
ggcggaaugggcucuggcu

SEQ ID NO: 415759 - RNA, 19 nt, Artificial Sequence
  Description of Artificial Sequence: Synthetic oligonucleotide
cagcuaggcuagauaccca

SEQ ID NO: 415760 - RNA, 19 nt, Artificial Sequence
  Description of Artificial Sequence: Synthetic oligonucleotide
gcugcggcggaaugggcuc

SEQ ID NO: 415761 - RNA, 19 nt, Artificial Sequence
  Description of Artificial Sequence: Synthetic oligonucleotide
cacccucaucuugcguugc

SEQ ID NO: 415762 - RNA, 19 nt, Artificial Sequence
  Description of Artificial Sequence: Synthetic oligonucleotide
ggugacauguggggcuuac

SEQ ID NO: 415763 - RNA, 19 nt, Artificial Sequence
  Description of Artificial Sequence: Synthetic oligonucleotide
ugcggacacuucgcugaga

SEQ ID NO: 415764 - RNA, 19 nt, Artificial Sequence
  Description of Artificial Sequence: Synthetic oligonucleotide
ccgggugggguggaaagcc

SEQ ID NO: 415765 - RNA, 19 nt, Artificial Sequence
  Description of Artificial Sequence: Synthetic oligonucleotide
gaaaggcugaaggucucuu

SEQ ID NO: 415766 - RNA, 19 nt, Artificial Sequence
  Description of Artificial Sequence: Synthetic oligonucleotide
ccaaacgccgcuuccccga

SEQ ID NO: 415767 - RNA, 19 nt, Artificial Sequence
  Description of Artificial Sequence: Synthetic oligonucleotide
gugcaucuuguggcgcccc

SEQ ID NO: 415768 - RNA, 19 nt, Artificial Sequence
  Description of Artificial Sequence: Synthetic oligonucleotide
gggcacagauacaagucaa

SEQ ID NO: 415769 - RNA, 19 nt, Artificial Sequence
  Description of Artificial Sequence: Synthetic oligonucleotide
agcacggcauucggauccu

SEQ ID NO: 415770 - RNA, 19 nt, Artificial Sequence
  Description of Artificial Sequence: Synthetic oligonucleotide
cccaauuuauugcccaaua

SEQ ID NO: 415771 - RNA, 19 nt, Artificial Sequence
  Description of Artificial Sequence: Synthetic oligonucleotide
gaaauccgggucauccauu

SEQ ID NO: 415772 - RNA, 19 nt, Artificial Sequence
  Description of Artificial Sequence: Synthetic oligonucleotide
cacuuacaccucaguaggu

SEQ ID NO: 415773 - RNA, 19 nt, Artificial Sequence
  Description of Artificial Sequence: Synthetic oligonucleotide
ccguaaggcuuucuuguga

SEQ ID NO: 415774 - RNA, 19 nt, Artificial Sequence
  Description of Artificial Sequence: Synthetic oligonucleotide
gggccgucgaggcuugauc

SEQ ID NO: 415775 - RNA, 19 nt, Artificial Sequence
  Description of Artificial Sequence: Synthetic oligonucleotide
ggguuguaagacucagcgu

SEQ ID NO: 415776 - RNA, 19 nt, Artificial Sequence
  Description of Artificial Sequence: Synthetic oligonucleotide
acagcccguaaggcuuucu

SEQ ID NO: 415777 - RNA, 19 nt, Artificial Sequence
  Description of Artificial Sequence: Synthetic oligonucleotide
ccgcccacaauagugcauc

SEQ ID NO: 415778 - RNA, 19 nt, Artificial Sequence
  Description of Artificial Sequence: Synthetic oligonucleotide
gcgugcaccaugcgagaca

SEQ ID NO: 415779 - RNA, 19 nt, Artificial Sequence
  Description of Artificial Sequence: Synthetic oligonucleotide
gcacauugcccacaguguu

SEQ ID NO: 415780 - RNA, 19 nt, Artificial Sequence
  Description of Artificial Sequence: Synthetic oligonucleotide
cacaccaguuugcugucau

SEQ ID NO: 415781 - RNA, 19 nt, Artificial Sequence
  Description of Artificial Sequence: Synthetic oligonucleotide
aggcagcgcucaaaacgcu

SEQ ID NO: 415782 - RNA, 19 nt, Artificial Sequence
  Description of Artificial Sequence: Synthetic oligonucleotide
ggggaagucaucguaccau

SEQ ID NO: 415783 - RNA, 19 nt, Artificial Sequence
  Description of Artificial Sequence: Synthetic oligonucleotide
cagcggacaaggucacugu

SEQ ID NO: 415784 - RNA, 19 nt, Artificial Sequence
  Description of Artificial Sequence: Synthetic oligonucleotide
ggccgcccacaauagugca

SEQ ID NO: 415785 - RNA, 19 nt, Artificial Sequence
  Description of Artificial Sequence: Synthetic oligonucleotide
gccgucgaggcuugaucca

SEQ ID NO: 415786 - RNA, 19 nt, Artificial Sequence
  Description of Artificial Sequence: Synthetic oligonucleotide
gguaguccccucgcccaug

SEQ ID NO: 415787 - RNA, 19 nt, Artificial Sequence
  Description of Artificial Sequence: Synthetic oligonucleotide
cuucgcugagaggccacaa

SEQ ID NO: 415788 - RNA, 19 nt, Artificial Sequence
  Description of Artificial Sequence: Synthetic oligonucleotide
gcguucuuccucggaggcc

SEQ ID NO: 415789 - RNA, 19 nt, Artificial Sequence
  Description of Artificial Sequence: Synthetic oligonucleotide
cccaucuugauggcgugca

SEQ ID NO: 415790 - RNA, 19 nt, Artificial Sequence
  Description of Artificial Sequence: Synthetic oligonucleotide
gcauaucaauaccacucuu

SEQ ID NO: 415791 - RNA, 19 nt, Artificial Sequence
  Description of Artificial Sequence: Synthetic oligonucleotide
cugcacagugcgccagaaa

SEQ ID NO: 415792 - RNA, 19 nt, Artificial Sequence
  Description of Artificial Sequence: Synthetic oligonucleotide
gaucacgcccugucaucuu

SEQ ID NO: 415793 - RNA, 19 nt, Artificial Sequence
  Description of Artificial Sequence: Synthetic oligonucleotide
gccccaauuuauugcccaa

SEQ ID NO: 415794 - RNA, 19 nt, Artificial Sequence
  Description of Artificial Sequence: Synthetic oligonucleotide
cggacacuucgcugagagg

SEQ ID NO: 415795 - RNA, 19 nt, Artificial Sequence
  Description of Artificial Sequence: Synthetic oligonucleotide
caggggcuuguagauacgu

SEQ ID NO: 415796 - RNA, 19 nt, Artificial Sequence
  Description of Artificial Sequence: Synthetic oligonucleotide
gcggccauaagcaggcacu

SEQ ID NO: 415797 - RNA, 19 nt, Artificial Sequence
  Description of Artificial Sequence: Synthetic oligonucleotide
ccucggaggccucuagcca

SEQ ID NO: 415798 - RNA, 19 nt, Artificial Sequence
  Description of Artificial Sequence: Synthetic oligonucleotide
ccacuugcaguugggcauc

SEQ ID NO: 415799 - RNA, 19 nt, Artificial Sequence
  Description of Artificial Sequence: Synthetic oligonucleotide
cuuggcgcagcagguggua

SEQ ID NO: 415800 - RNA, 19 nt, Artificial Sequence
  Description of Artificial Sequence: Synthetic oligonucleotide
cccacauguggggaaguca

SEQ ID NO: 415801 - RNA, 19 nt, Artificial Sequence
  Description of Artificial Sequence: Synthetic oligonucleotide
ccgggucauccauuuuguc

SEQ ID NO: 415802 - RNA, 19 nt, Artificial Sequence
  Description of Artificial Sequence: Synthetic oligonucleotide
gugcgccagaaauccgggu

SEQ ID NO: 415803 - RNA, 19 nt, Artificial Sequence
  Description of Artificial Sequence: Synthetic oligonucleotide
cgucgaggcuugauccaac

SEQ ID NO: 415804 - RNA, 19 nt, Artificial Sequence
  Description of Artificial Sequence: Synthetic oligonucleotide
ugugccccuuaagcaccuu

SEQ ID NO: 415805 - RNA, 19 nt, Artificial Sequence
  Description of Artificial Sequence: Synthetic oligonucleotide
ccucgcccaugccagguca

SEQ ID NO: 415806 - RNA, 19 nt, Artificial Sequence
  Description of Artificial Sequence: Synthetic oligonucleotide
uggcaggauugggguucca

SEQ ID NO: 415807 - RNA, 19 nt, Artificial Sequence
  Description of Artificial Sequence: Synthetic oligonucleotide
gccggucucccagggcggg

SEQ ID NO: 415808 - RNA, 19 nt, Artificial Sequence
  Description of Artificial Sequence: Synthetic oligonucleotide
agcuggccgguuggucaca

SEQ ID NO: 415809 - RNA, 19 nt, Artificial Sequence
  Description of Artificial Sequence: Synthetic oligonucleotide
cagcgcucaaaacgcuccu

SEQ ID NO: 415810 - RNA, 19 nt, Artificial Sequence
  Description of Artificial Sequence: Synthetic oligonucleotide
cacagcccguaaggcuuuc

SEQ ID NO: 415811 - RNA, 19 nt, Artificial Sequence
  Description of Artificial Sequence: Synthetic oligonucleotide
ccgaaccugaagccagcca

SEQ ID NO: 415812 - RNA, 19 nt, Artificial Sequence
  Description of Artificial Sequence: Synthetic oligonucleotide
cgugcaucuuguggcgccc

SEQ ID NO: 415813 - RNA, 19 nt, Artificial Sequence
  Description of Artificial Sequence: Synthetic oligonucleotide
gcuaggcuagauacccacu

SEQ ID NO: 415814 - RNA, 19 nt, Artificial Sequence
  Description of Artificial Sequence: Synthetic oligonucleotide
cccuggcguucuuccucgg

SEQ ID NO: 415815 - RNA, 19 nt, Artificial Sequence
  Description of Artificial Sequence: Synthetic oligonucleotide
gcggcggaaugggcucugg

SEQ ID NO: 415816 - RNA, 19 nt, Artificial Sequence
  Description of Artificial Sequence: Synthetic oligonucleotide
gccagaaauccgggucauc

SEQ ID NO: 415817 - RNA, 19 nt, Artificial Sequence
  Description of Artificial Sequence: Synthetic oligonucleotide
cggcggaaugggcucuggc

SEQ ID NO: 415818 - RNA, 19 nt, Artificial Sequence
  Description of Artificial Sequence: Synthetic oligonucleotide
guggaaggccacagcccgu

SEQ ID NO: 415819 - RNA, 19 nt, Artificial Sequence
  Description of Artificial Sequence: Synthetic oligonucleotide
gccgcuuccccgacagcga

SEQ ID NO: 415820 - RNA, 19 nt, Artificial Sequence
  Description of Artificial Sequence: Synthetic oligonucleotide
gggauucuauugagucugu

SEQ ID NO: 415821 - RNA, 19 nt, Artificial Sequence
  Description of Artificial Sequence: Synthetic oligonucleotide
cgacagcgauucuggugac

SEQ ID NO: 415822 - RNA, 19 nt, Artificial Sequence
  Description of Artificial Sequence: Synthetic oligonucleotide
ggcgcagcaggugguaaau

SEQ ID NO: 415823 - RNA, 19 nt, Artificial Sequence
  Description of Artificial Sequence: Synthetic oligonucleotide
uggggccgucgaggcuuga

SEQ ID NO: 415824 - RNA, 19 nt, Artificial Sequence
  Description of Artificial Sequence: Synthetic oligonucleotide
cccucgcccaugccagguc

SEQ ID NO: 415825 - RNA, 19 nt, Artificial Sequence
  Description of Artificial Sequence: Synthetic oligonucleotide
ggccgguuggucacagggu

SEQ ID NO: 415826 - RNA, 19 nt, Artificial Sequence
  Description of Artificial Sequence: Synthetic oligonucleotide
gcgagacaccuucuccuuu

SEQ ID NO: 415827 - RNA, 19 nt, Artificial Sequence
  Description of Artificial Sequence: Synthetic oligonucleotide
cgcuaguaucacugccaga

SEQ ID NO: 415828 - RNA, 19 nt, Artificial Sequence
  Description of Artificial Sequence: Synthetic oligonucleotide
ccgucgaggcuugauccaa

SEQ ID NO: 415829 - RNA, 19 nt, Artificial Sequence
  Description of Artificial Sequence: Synthetic oligonucleotide
ccgaggaagcuuggggaua

SEQ ID NO: 415830 - RNA, 19 nt, Artificial Sequence
  Description of Artificial Sequence: Synthetic oligonucleotide
cuuccccgacagcgauucu

SEQ ID NO: 415831 - RNA, 19 nt, Artificial Sequence
  Description of Artificial Sequence: Synthetic oligonucleotide
cgcccacaauagugcauca

SEQ ID NO: 415832 - RNA, 19 nt, Artificial Sequence
  Description of Artificial Sequence: Synthetic oligonucleotide
ccacaccaguuugcuguca

SEQ ID NO: 415833 - RNA, 19 nt, Artificial Sequence
  Description of Artificial Sequence: Synthetic oligonucleotide
cugcggcggaaugggcucu

SEQ ID NO: 415834 - RNA, 19 nt, Artificial Sequence
  Description of Artificial Sequence: Synthetic oligonucleotide
gcacggcauucggauccuc

SEQ ID NO: 415835 - RNA, 19 nt, Artificial Sequence
  Description of Artificial Sequence: Synthetic oligonucleotide
ggcagcggacaaggucacu

SEQ ID NO: 415836 - RNA, 19 nt, Artificial Sequence
  Description of Artificial Sequence: Synthetic oligonucleotide
ggggccgucgaggcuugau

SEQ ID NO: 415837 - RNA, 19 nt, Artificial Sequence
  Description of Artificial Sequence: Synthetic oligonucleotide
ccacagcccguaaggcuuu

SEQ ID NO: 415838 - RNA, 19 nt, Artificial Sequence
  Description of Artificial Sequence: Synthetic oligonucleotide
ccgcuuccccgacagcgau

SEQ ID NO: 415839 - RNA, 19 nt, Artificial Sequence
  Description of Artificial Sequence: Synthetic oligonucleotide
ccgcaggggcuuguagaua

SEQ ID NO: 415840 - RNA, 19 nt, Artificial Sequence
  Description of Artificial Sequence: Synthetic oligonucleotide
ccguucuauugcuguccuu

SEQ ID NO: 415841 - RNA, 19 nt, Artificial Sequence
  Description of Artificial Sequence: Synthetic oligonucleotide
cgcccaugccaggucaccu

SEQ ID NO: 415842 - RNA, 19 nt, Artificial Sequence
  Description of Artificial Sequence: Synthetic oligonucleotide
cgccagaaauccgggucau

SEQ ID NO: 415843 - RNA, 19 nt, Artificial Sequence
  Description of Artificial Sequence: Synthetic oligonucleotide
aauaaggcaaaaucccugc

SEQ ID NO: 415844 - RNA, 19 nt, Artificial Sequence
  Description of Artificial Sequence: Synthetic oligonucleotide
uaucagucgacauacaugg

SEQ ID NO: 415845 - RNA, 19 nt, Artificial Sequence
  Description of Artificial Sequence: Synthetic oligonucleotide
ucuagaaaugaauuuacgg

SEQ ID NO: 415846 - RNA, 19 nt, Artificial Sequence
  Description of Artificial Sequence: Synthetic oligonucleotide
cauuacuacauccaaaucc

SEQ ID NO: 415847 - RNA, 19 nt, Artificial Sequence
  Description of Artificial Sequence: Synthetic oligonucleotide
aauuacuuaguuguggagg

SEQ ID NO: 415848 - RNA, 19 nt, Artificial Sequence
  Description of Artificial Sequence: Synthetic oligonucleotide
uguaauaaacuccuugccc

SEQ ID NO: 415849 - RNA, 19 nt, Artificial Sequence
  Description of Artificial Sequence: Synthetic oligonucleotide
uagaaaugaauuuacggug

SEQ ID NO: 415850 - RNA, 19 nt, Artificial Sequence
  Description of Artificial Sequence: Synthetic oligonucleotide
aacuuaucgaacgagguag

SEQ ID NO: 415851 - RNA, 19 nt, Artificial Sequence
  Description of Artificial Sequence: Synthetic oligonucleotide
auuacuuaguuguggaggg

SEQ ID NO: 415852 - RNA, 19 nt, Artificial Sequence
  Description of Artificial Sequence: Synthetic oligonucleotide
ugaauuuacggugugaucu

SEQ ID NO: 415853 - RNA, 19 nt, Artificial Sequence
  Description of Artificial Sequence: Synthetic oligonucleotide
uggaccaagagauaaacca

SEQ ID NO: 415854 - RNA, 19 nt, Artificial Sequence
  Description of Artificial Sequence: Synthetic oligonucleotide
aaugaauagggauguaacu

SEQ ID NO: 415855 - RNA, 19 nt, Artificial Sequence
  Description of Artificial Sequence: Synthetic oligonucleotide
aacuugaucguacugacuu

SEQ ID NO: 415856 - RNA, 19 nt, Artificial Sequence
  Description of Artificial Sequence: Synthetic oligonucleotide
  modified_base (10)..(10): a, c, u, g, unknown or other
gaaacugggngaaaauucc

SEQ ID NO: 415857 - RNA, 19 nt, Artificial Sequence
  Description of Artificial Sequence: Synthetic oligonucleotide
ucuugucuuagcaauggag

SEQ ID NO: 415858 - RNA, 19 nt, Artificial Sequence
  Description of Artificial Sequence: Synthetic oligonucleotide
agugagauagcuccuggac

SEQ ID NO: 415859 - RNA, 19 nt, Artificial Sequence
  Description of Artificial Sequence: Synthetic oligonucleotide
ucuaaucacagucaacaac

SEQ ID NO: 415860 - RNA, 19 nt, Artificial Sequence
  Description of Artificial Sequence: Synthetic oligonucleotide
uaucgaacgagguagacau

SEQ ID NO: 415861 - RNA, 19 nt, Artificial Sequence
  Description of Artificial Sequence: Synthetic oligonucleotide
ucuaugauuaauacacuaa

SEQ ID NO: 415862 - RNA, 19 nt, Artificial Sequence
  Description of Artificial Sequence: Synthetic oligonucleotide
guagacaugagcuccauac

SEQ ID NO: 415863 - RNA, 19 nt, Artificial Sequence
  Description of Artificial Sequence: Synthetic oligonucleotide
gaucuaaucacagucaaca

SEQ ID NO: 415864 - RNA, 19 nt, Artificial Sequence
  Description of Artificial Sequence: Synthetic oligonucleotide
acaacuugaucguacugac

SEQ ID NO: 415865 - RNA, 19 nt, Artificial Sequence
  Description of Artificial Sequence: Synthetic oligonucleotide
ugaucagucagguauuaca

SEQ ID NO: 415866 - RNA, 19 nt, Artificial Sequence
  Description of Artificial Sequence: Synthetic oligonucleotide
ugugaucuaaucacaguca

SEQ ID NO: 415867 - RNA, 19 nt, Artificial Sequence
  Description of Artificial Sequence: Synthetic oligonucleotide
aauaucagaucaggaaauc

SEQ ID NO: 415868 - RNA, 19 nt, Artificial Sequence
  Description of Artificial Sequence: Synthetic oligonucleotide
cugugaacacuauacaccc

SEQ ID NO: 415869 - RNA, 19 nt, Artificial Sequence
  Description of Artificial Sequence: Synthetic oligonucleotide
ucuccauuugcauaauggc

SEQ ID NO: 415870 - RNA, 19 nt, Artificial Sequence
  Description of Artificial Sequence: Synthetic oligonucleotide
ucagucgacauacauggga

SEQ ID NO: 415871 - RNA, 19 nt, Artificial Sequence
  Description of Artificial Sequence: Synthetic oligonucleotide
cuugucgugaugcacuugg

SEQ ID NO: 415872 - RNA, 19 nt, Artificial Sequence
  Description of Artificial Sequence: Synthetic oligonucleotide
aacaacuugaucguacuga

SEQ ID NO: 415873 - RNA, 19 nt, Artificial Sequence
  Description of Artificial Sequence: Synthetic oligonucleotide
aaugaauuuacggugugau

SEQ ID NO: 415874 - RNA, 19 nt, Artificial Sequence
  Description of Artificial Sequence: Synthetic oligonucleotide
  modified_base (9)..(9): a, c, u, g, unknown or other
aaacugggngaaaauuccc

SEQ ID NO: 415875 - RNA, 19 nt, Artificial Sequence
  Description of Artificial Sequence: Synthetic oligonucleotide
  modified_base (2)..(2): a, c, u, g, unknown or other
gngaaaauucccuuucuuc

SEQ ID NO: 415876 - RNA, 19 nt, Artificial Sequence
  Description of Artificial Sequence: Synthetic oligonucleotide
uacacuauuccacuuugga

SEQ ID NO: 415877 - RNA, 19 nt, Artificial Sequence
  Description of Artificial Sequence: Synthetic oligonucleotide
agcaguaccuaccagguca

SEQ ID NO: 415878 - RNA, 19 nt, Artificial Sequence
  Description of Artificial Sequence: Synthetic oligonucleotide
aacgagguagacaugagcu

SEQ ID NO: 415879 - RNA, 19 nt, Artificial Sequence
  Description of Artificial Sequence: Synthetic oligonucleotide
ugagagacacagcaguacc

SEQ ID NO: 415880 - RNA, 19 nt, Artificial Sequence
  Description of Artificial Sequence: Synthetic oligonucleotide
uacggugugaucuaaucac

SEQ ID NO: 415881 - RNA, 19 nt, Artificial Sequence
  Description of Artificial Sequence: Synthetic oligonucleotide
agguuuugagucuagaaau

SEQ ID NO: 415882 - RNA, 19 nt, Artificial Sequence
  Description of Artificial Sequence: Synthetic oligonucleotide
gcuauacugagccagacag

SEQ ID NO: 415883 - RNA, 19 nt, Artificial Sequence
  Description of Artificial Sequence: Synthetic oligonucleotide
uuacaaacauagcaugcga

SEQ ID NO: 415884 - RNA, 19 nt, Artificial Sequence
  Description of Artificial Sequence: Synthetic oligonucleotide
ugggcaaucacuacuccgc

SEQ ID NO: 415885 - RNA, 19 nt, Artificial Sequence
  Description of Artificial Sequence: Synthetic oligonucleotide
aaaacuuaucgaacgaggu

SEQ ID NO: 415886 - RNA, 19 nt, Artificial Sequence
  Description of Artificial Sequence: Synthetic oligonucleotide
acuccgcauuacuacaucc

SEQ ID NO: 415887 - RNA, 19 nt, Artificial Sequence
  Description of Artificial Sequence: Synthetic oligonucleotide
ucgggugccauauauggcc

SEQ ID NO: 415888 - RNA, 19 nt, Artificial Sequence
  Description of Artificial Sequence: Synthetic oligonucleotide
acugccauuaucugcccac

SEQ ID NO: 415889 - RNA, 19 nt, Artificial Sequence
  Description of Artificial Sequence: Synthetic oligonucleotide
aguucuuacacuauuuuca

SEQ ID NO: 415890 - RNA, 19 nt, Artificial Sequence
  Description of Artificial Sequence: Synthetic oligonucleotide
cuaggugacagaaguauac

SEQ ID NO: 415891 - RNA, 19 nt, Artificial Sequence
  Description of Artificial Sequence: Synthetic oligonucleotide
uuuaugagugccacucuga

SEQ ID NO: 415892 - RNA, 19 nt, Artificial Sequence
  Description of Artificial Sequence: Synthetic oligonucleotide
uauaauaaucuaugauuaa

SEQ ID NO: 415893 - RNA, 19 nt, Artificial Sequence
  Description of Artificial Sequence: Synthetic oligonucleotide
acaauguaugggcaaucac

SEQ ID NO: 415894 - RNA, 19 nt, Artificial Sequence
  Description of Artificial Sequence: Synthetic oligonucleotide
uuacggugugaucuaauca

SEQ ID NO: 415895 - RNA, 19 nt, Artificial Sequence
  Description of Artificial Sequence: Synthetic oligonucleotide
uacaaacauagcaugcgac

SEQ ID NO: 415896 - RNA, 19 nt, Artificial Sequence
  Description of Artificial Sequence: Synthetic oligonucleotide
cacgucaugaauauguuca

SEQ ID NO: 415897 - RNA, 19 nt, Artificial Sequence
  Description of Artificial Sequence: Synthetic oligonucleotide
agucuagaaaugaauuuac

SEQ ID NO: 415898 - RNA, 19 nt, Artificial Sequence
  Description of Artificial Sequence: Synthetic oligonucleotide
agacauacaguaaugucuc

SEQ ID NO: 415899 - RNA, 19 nt, Artificial Sequence
  Description of Artificial Sequence: Synthetic oligonucleotide
ugaggcuauacugagccag

SEQ ID NO: 415900 - RNA, 19 nt, Artificial Sequence
  Description of Artificial Sequence: Synthetic oligonucleotide
auaauaaucuaugauuaau

SEQ ID NO: 415901 - RNA, 19 nt, Artificial Sequence
  Description of Artificial Sequence: Synthetic oligonucleotide
guaacuuugaacagcacca

SEQ ID NO: 415902 - RNA, 19 nt, Artificial Sequence
  Description of Artificial Sequence: Synthetic oligonucleotide
cuagaaaugaauuuacggu

SEQ ID NO: 415903 - RNA, 19 nt, Artificial Sequence
  Description of Artificial Sequence: Synthetic oligonucleotide
auaaagggauguuucagaa

SEQ ID NO: 415904 - RNA, 19 nt, Artificial Sequence
  Description of Artificial Sequence: Synthetic oligonucleotide
aaacuuaucgaacgaggua

SEQ ID NO: 415905 - RNA, 19 nt, Artificial Sequence
  Description of Artificial Sequence: Synthetic oligonucleotide
ugugaauaauuuucaaguu

SEQ ID NO: 415906 - RNA, 19 nt, Artificial Sequence
  Description of Artificial Sequence: Synthetic oligonucleotide
guauuuaugagugccacuc

SEQ ID NO: 415907 - RNA, 19 nt, Artificial Sequence
  Description of Artificial Sequence: Synthetic oligonucleotide
gaaaugaauuuacggugug

SEQ ID NO: 415908 - RNA, 19 nt, Artificial Sequence
  Description of Artificial Sequence: Synthetic oligonucleotide
uucuaugacaagugguaga

SEQ ID NO: 415909 - RNA, 19 nt, Artificial Sequence
  Description of Artificial Sequence: Synthetic oligonucleotide
ucggccaacucguacaaug

SEQ ID NO: 415910 - RNA, 19 nt, Artificial Sequence
  Description of Artificial Sequence: Synthetic oligonucleotide
aauguaugggcaaucacua

SEQ ID NO: 415911 - RNA, 19 nt, Artificial Sequence
  Description of Artificial Sequence: Synthetic oligonucleotide
augaauuuacggugugauc

SEQ ID NO: 415912 - RNA, 19 nt, Artificial Sequence
  Description of Artificial Sequence: Synthetic oligonucleotide
ugaccguauucuuuuaacu

SEQ ID NO: 415913 - RNA, 19 nt, Artificial Sequence
  Description of Artificial Sequence: Synthetic oligonucleotide
augggcaaucacuacuccg

SEQ ID NO: 415914 - RNA, 19 nt, Artificial Sequence
  Description of Artificial Sequence: Synthetic oligonucleotide
aacucuuuacgucuugcuu

SEQ ID NO: 415915 - RNA, 19 nt, Artificial Sequence
  Description of Artificial Sequence: Synthetic oligonucleotide
uuggauucguccuucguaa

SEQ ID NO: 415916 - RNA, 19 nt, Artificial Sequence
  Description of Artificial Sequence: Synthetic oligonucleotide
ugucuuagcaauggagucc

SEQ ID NO: 415917 - RNA, 19 nt, Artificial Sequence
  Description of Artificial Sequence: Synthetic oligonucleotide
gauucguccuucguaaggc

SEQ ID NO: 415918 - RNA, 19 nt, Artificial Sequence
  Description of Artificial Sequence: Synthetic oligonucleotide
uugggucuauucuuucggg

SEQ ID NO: 415919 - RNA, 19 nt, Artificial Sequence
  Description of Artificial Sequence: Synthetic oligonucleotide
aaucacuacuccgcauuac

SEQ ID NO: 415920 - RNA, 19 nt, Artificial Sequence
  Description of Artificial Sequence: Synthetic oligonucleotide
auagcaugcgaccucgaca

SEQ ID NO: 415921 - RNA, 19 nt, Artificial Sequence
  Description of Artificial Sequence: Synthetic oligonucleotide
aguacguucuucauacauc

SEQ ID NO: 415922 - RNA, 19 nt, Artificial Sequence
  Description of Artificial Sequence: Synthetic oligonucleotide
ucacucaagcccaagucuc

SEQ ID NO: 415923 - RNA, 19 nt, Artificial Sequence
  Description of Artificial Sequence: Synthetic oligonucleotide
cagucgacauacaugggag

SEQ ID NO: 415924 - RNA, 19 nt, Artificial Sequence
  Description of Artificial Sequence: Synthetic oligonucleotide
ugcuacuagcuacuucucc

SEQ ID NO: 415925 - RNA, 19 nt, Artificial Sequence
  Description of Artificial Sequence: Synthetic oligonucleotide
  modified_base (5)..(5): a, c, u, g, unknown or other
ugggngaaaauucccuuuc

SEQ ID NO: 415926 - RNA, 19 nt, Artificial Sequence
  Description of Artificial Sequence: Synthetic oligonucleotide
aaaugaauuuacgguguga

SEQ ID NO: 415927 - RNA, 19 nt, Artificial Sequence
  Description of Artificial Sequence: Synthetic oligonucleotide
uauuuaugagugccacucu

SEQ ID NO: 415928 - RNA, 19 nt, Artificial Sequence
  Description of Artificial Sequence: Synthetic oligonucleotide
acuauuccacuuuggauaa

SEQ ID NO: 415929 - RNA, 19 nt, Artificial Sequence
  Description of Artificial Sequence: Synthetic oligonucleotide
uagacaugagcuccauaca

SEQ ID NO: 415930 - RNA, 19 nt, Artificial Sequence
  Description of Artificial Sequence: Synthetic oligonucleotide
uuaucgaacgagguagaca

SEQ ID NO: 415931 - RNA, 19 nt, Artificial Sequence
  Description of Artificial Sequence: Synthetic oligonucleotide
auguaugggcaaucacuac

SEQ ID NO: 415932 - RNA, 19 nt, Artificial Sequence
  Description of Artificial Sequence: Synthetic oligonucleotide
uccucguaccaauuucucc

SEQ ID NO: 415933 - RNA, 19 nt, Artificial Sequence
  Description of Artificial Sequence: Synthetic oligonucleotide
agucugauguagcagcggu

SEQ ID NO: 415934 - RNA, 19 nt, Artificial Sequence
  Description of Artificial Sequence: Synthetic oligonucleotide
uaguauuuaugagugccac

SEQ ID NO: 415935 - RNA, 19 nt, Artificial Sequence
  Description of Artificial Sequence: Synthetic oligonucleotide
cuacaaacuguucuggaga

SEQ ID NO: 415936 - RNA, 19 nt, Artificial Sequence
  Description of Artificial Sequence: Synthetic oligonucleotide
ggauaaggaaaucggcccg

SEQ ID NO: 415937 - RNA, 19 nt, Artificial Sequence
  Description of Artificial Sequence: Synthetic oligonucleotide
aguauuuaugagugccacu

SEQ ID NO: 415938 - RNA, 19 nt, Artificial Sequence
  Description of Artificial Sequence: Synthetic oligonucleotide
ucggaauuacuuaguugug

SEQ ID NO: 415939 - RNA, 19 nt, Artificial Sequence
  Description of Artificial Sequence: Synthetic oligonucleotide
augaauagggauguaacuu

SEQ ID NO: 415940 - RNA, 19 nt, Artificial Sequence
  Description of Artificial Sequence: Synthetic oligonucleotide
uccggaauaacaucaucua

SEQ ID NO: 415941 - RNA, 19 nt, Artificial Sequence
  Description of Artificial Sequence: Synthetic oligonucleotide
ugacaagugguagacuugu

SEQ ID NO: 415942 - RNA, 19 nt, Artificial Sequence
  Description of Artificial Sequence: Synthetic oligonucleotide
gcuacuagcuacuucuccc

SEQ ID NO: 415943 - RNA, 19 nt, Artificial Sequence
  Description of Artificial Sequence: Synthetic oligonucleotide
auuugcauaauggcggagu

SEQ ID NO: 415944 - RNA, 19 nt, Artificial Sequence
  Description of Artificial Sequence: Synthetic oligonucleotide
ugucuccuagugaaacuca

SEQ ID NO: 415945 - RNA, 19 nt, Artificial Sequence
  Description of Artificial Sequence: Synthetic oligonucleotide
aagucugauguagcagcgg

SEQ ID NO: 415946 - RNA, 19 nt, Artificial Sequence
  Description of Artificial Sequence: Synthetic oligonucleotide
ucuaggugacagaaguaua

SEQ ID NO: 415947 - RNA, 19 nt, Artificial Sequence
  Description of Artificial Sequence: Synthetic oligonucleotide
cuucuaugacaagugguag

SEQ ID NO: 415948 - RNA, 19 nt, Artificial Sequence
  Description of Artificial Sequence: Synthetic oligonucleotide
  modified_base (8)..(8): a, c, u, g, unknown or other
aacugggngaaaauucccu

SEQ ID NO: 415949 - RNA, 19 nt, Artificial Sequence
  Description of Artificial Sequence: Synthetic oligonucleotide
ggcuugguacaacuuaagg

SEQ ID NO: 415950 - RNA, 19 nt, Artificial Sequence
  Description of Artificial Sequence: Synthetic oligonucleotide
gucgacauacaugggagag

SEQ ID NO: 415951 - RNA, 19 nt, Artificial Sequence
  Description of Artificial Sequence: Synthetic oligonucleotide
  modified_base (7)..(7): a, c, u, g, unknown or other
acugggngaaaauucccuu

SEQ ID NO: 415952 - RNA, 19 nt, Artificial Sequence
  Description of Artificial Sequence: Synthetic oligonucleotide
uaccuaccaggucaucaag

SEQ ID NO: 415953 - RNA, 19 nt, Artificial Sequence
  Description of Artificial Sequence: Synthetic oligonucleotide
uggccuacacccagcaucu

SEQ ID NO: 415954 - RNA, 19 nt, Artificial Sequence
  Description of Artificial Sequence: Synthetic oligonucleotide
aaacgaacaccaaucuuau

SEQ ID NO: 415955 - RNA, 19 nt, Artificial Sequence
  Description of Artificial Sequence: Synthetic oligonucleotide
caauguaugggcaaucacu

SEQ ID NO: 415956 - RNA, 19 nt, Artificial Sequence
  Description of Artificial Sequence: Synthetic oligonucleotide
uucguccuucguaaggcac

SEQ ID NO: 415957 - RNA, 19 nt, Artificial Sequence
  Description of Artificial Sequence: Synthetic oligonucleotide
acauacaguaaugucuccu

SEQ ID NO: 415958 - RNA, 19 nt, Artificial Sequence
  Description of Artificial Sequence: Synthetic oligonucleotide
uccacgguugaccguauuc

SEQ ID NO: 415959 - RNA, 19 nt, Artificial Sequence
  Description of Artificial Sequence: Synthetic oligonucleotide
aauagggauguaacuuuga

SEQ ID NO: 415960 - RNA, 19 nt, Artificial Sequence
  Description of Artificial Sequence: Synthetic oligonucleotide
uugucgugaugcacuuggg

SEQ ID NO: 415961 - RNA, 19 nt, Artificial Sequence
  Description of Artificial Sequence: Synthetic oligonucleotide
cagaaccauaagcuccucg

SEQ ID NO: 415962 - RNA, 19 nt, Artificial Sequence
  Description of Artificial Sequence: Synthetic oligonucleotide
ggauucguccuucguaagg

SEQ ID NO: 415963 - RNA, 19 nt, Artificial Sequence
  Description of Artificial Sequence: Synthetic oligonucleotide
gacauacaguaaugucucc

SEQ ID NO: 415964 - RNA, 19 nt, Artificial Sequence
  Description of Artificial Sequence: Synthetic oligonucleotide
caaggcacauugcuacuag

SEQ ID NO: 415965 - RNA, 19 nt, Artificial Sequence
  Description of Artificial Sequence: Synthetic oligonucleotide
cagguuuugagucuagaaa

SEQ ID NO: 415966 - RNA, 19 nt, Artificial Sequence
  Description of Artificial Sequence: Synthetic oligonucleotide
uacuuaguuguggaggguc

SEQ ID NO: 415967 - RNA, 19 nt, Artificial Sequence
  Description of Artificial Sequence: Synthetic oligonucleotide
caaagagucuaaggguuag

SEQ ID NO: 415968 - RNA, 19 nt, Artificial Sequence
  Description of Artificial Sequence: Synthetic oligonucleotide
ucucuuccggaauaacauc

SEQ ID NO: 415969 - RNA, 19 nt, Artificial Sequence
  Description of Artificial Sequence: Synthetic oligonucleotide
aucuaacacacuauauaca

SEQ ID NO: 415970 - RNA, 19 nt, Artificial Sequence
  Description of Artificial Sequence: Synthetic oligonucleotide
aucuaaucacagucaacaa

SEQ ID NO: 415971 - RNA, 19 nt, Artificial Sequence
  Description of Artificial Sequence: Synthetic oligonucleotide
ucuccuagugaaacucaaa

SEQ ID NO: 415972 - RNA, 19 nt, Artificial Sequence
  Description of Artificial Sequence: Synthetic oligonucleotide
ucguaccaauuucuccaag

SEQ ID NO: 415973 - RNA, 19 nt, Artificial Sequence
  Description of Artificial Sequence: Synthetic oligonucleotide
gugaucuaaucacagucaa

SEQ ID NO: 415974 - RNA, 19 nt, Artificial Sequence
  Description of Artificial Sequence: Synthetic oligonucleotide
uugaucguacugacuucca

SEQ ID NO: 415975 - RNA, 19 nt, Artificial Sequence
  Description of Artificial Sequence: Synthetic oligonucleotide
cucgacaguacguucuuca

SEQ ID NO: 415976 - RNA, 19 nt, Artificial Sequence
  Description of Artificial Sequence: Synthetic oligonucleotide
uggauucguccuucguaag

SEQ ID NO: 415977 - RNA, 19 nt, Artificial Sequence
  Description of Artificial Sequence: Synthetic oligonucleotide
caugcgaccucgacaguac

SEQ ID NO: 415978 - RNA, 19 nt, Artificial Sequence
  Description of Artificial Sequence: Synthetic oligonucleotide
cauagcaugcgaccucgac

SEQ ID NO: 415979 - RNA, 19 nt, Artificial Sequence
  Description of Artificial Sequence: Synthetic oligonucleotide
ucgacauacaugggagagc

SEQ ID NO: 415980 - RNA, 19 nt, Artificial Sequence
  Description of Artificial Sequence: Synthetic oligonucleotide
auacacuauuccacuuugg

SEQ ID NO: 415981 - RNA, 19 nt, Artificial Sequence
  Description of Artificial Sequence: Synthetic oligonucleotide
gugguuuagugcuuucaca

SEQ ID NO: 415982 - RNA, 19 nt, Artificial Sequence
  Description of Artificial Sequence: Synthetic oligonucleotide
aacagucgcccucucugaa

SEQ ID NO: 415983 - RNA, 19 nt, Artificial Sequence
  Description of Artificial Sequence: Synthetic oligonucleotide
uuaagugguuuagugcuuu

SEQ ID NO: 415984 - RNA, 19 nt, Artificial Sequence
  Description of Artificial Sequence: Synthetic oligonucleotide
gaauuuacggugugaucua

SEQ ID NO: 415985 - RNA, 19 nt, Artificial Sequence
  Description of Artificial Sequence: Synthetic oligonucleotide
uuacuacauccaaauccau

SEQ ID NO: 415986 - RNA, 19 nt, Artificial Sequence
  Description of Artificial Sequence: Synthetic oligonucleotide
gaauaucagaucaggaaau

SEQ ID NO: 415987 - RNA, 19 nt, Artificial Sequence
  Description of Artificial Sequence: Synthetic oligonucleotide
ugcgaccucgacaguacgu

SEQ ID NO: 415988 - RNA, 19 nt, Artificial Sequence
  Description of Artificial Sequence: Synthetic oligonucleotide
agucgacauacaugggaga

SEQ ID NO: 415989 - RNA, 19 nt, Artificial Sequence
  Description of Artificial Sequence: Synthetic oligonucleotide
agcgguaucagucgacaua

SEQ ID NO: 415990 - RNA, 19 nt, Artificial Sequence
  Description of Artificial Sequence: Synthetic oligonucleotide
cauauauggccuacaccca

SEQ ID NO: 415991 - RNA, 19 nt, Artificial Sequence
  Description of Artificial Sequence: Synthetic oligonucleotide
uccuuuguucaguccuggc

SEQ ID NO: 415992 - RNA, 19 nt, Artificial Sequence
  Description of Artificial Sequence: Synthetic oligonucleotide
gaaaucggcccgucggcca

SEQ ID NO: 415993 - RNA, 19 nt, Artificial Sequence
  Description of Artificial Sequence: Synthetic oligonucleotide
gcucuuuauacuuuggccu

SEQ ID NO: 415994 - RNA, 19 nt, Artificial Sequence
  Description of Artificial Sequence: Synthetic oligonucleotide
caucaucuaacacacuaua

SEQ ID NO: 415995 - RNA, 19 nt, Artificial Sequence
  Description of Artificial Sequence: Synthetic oligonucleotide
ugucugggcgagcaauaaa

SEQ ID NO: 415996 - RNA, 19 nt, Artificial Sequence
  Description of Artificial Sequence: Synthetic oligonucleotide
uacuccgcauuacuacauc

SEQ ID NO: 415997 - RNA, 19 nt, Artificial Sequence
  Description of Artificial Sequence: Synthetic oligonucleotide
uugcauaauggcggaguga

SEQ ID NO: 415998 - RNA, 19 nt, Artificial Sequence
  Description of Artificial Sequence: Synthetic oligonucleotide
augcgaccucgacaguacg

SEQ ID NO: 415999 - RNA, 19 nt, Artificial Sequence
  Description of Artificial Sequence: Synthetic oligonucleotide
ucgacaguacguucuucau

SEQ ID NO: 416000 - RNA, 19 nt, Artificial Sequence
  Description of Artificial Sequence: Synthetic oligonucleotide
agcaucaaguuggcagcac

SEQ ID NO: 416001 - RNA, 19 nt, Artificial Sequence
  Description of Artificial Sequence: Synthetic oligonucleotide
ccagaaucgaaaacaucug

SEQ ID NO: 416002 - RNA, 19 nt, Artificial Sequence
  Description of Artificial Sequence: Synthetic oligonucleotide
gggaugcacauucuaggug

SEQ ID NO: 416003 - RNA, 19 nt, Artificial Sequence
  Description of Artificial Sequence: Synthetic oligonucleotide
acgucaugaauauguucau

SEQ ID NO: 416004 - RNA, 19 nt, Artificial Sequence
  Description of Artificial Sequence: Synthetic oligonucleotide
augacaagugguagacuug

SEQ ID NO: 416005 - RNA, 19 nt, Artificial Sequence
  Description of Artificial Sequence: Synthetic oligonucleotide
guugaccguauucuuuuaa

SEQ ID NO: 416006 - RNA, 19 nt, Artificial Sequence
  Description of Artificial Sequence: Synthetic oligonucleotide
guaccuaccaggucaucaa

SEQ ID NO: 416007 - RNA, 19 nt, Artificial Sequence
  Description of Artificial Sequence: Synthetic oligonucleotide
gucugggcgagcaauaaaa

SEQ ID NO: 416008 - RNA, 19 nt, Artificial Sequence
  Description of Artificial Sequence: Synthetic oligonucleotide
gaaccauaagcuccucgua

SEQ ID NO: 416009 - RNA, 19 nt, Artificial Sequence
  Description of Artificial Sequence: Synthetic oligonucleotide
aacgaacaccaaucuuauu

SEQ ID NO: 416010 - RNA, 19 nt, Artificial Sequence
  Description of Artificial Sequence: Synthetic oligonucleotide
uguggaccauuuuguugac

SEQ ID NO: 416011 - RNA, 19 nt, Artificial Sequence
  Description of Artificial Sequence: Synthetic oligonucleotide
acuuaguuguggagggucu

SEQ ID NO: 416012 - RNA, 19 nt, Artificial Sequence
  Description of Artificial Sequence: Synthetic oligonucleotide
gguacaacuuaaggaagac

SEQ ID NO: 416013 - RNA, 19 nt, Artificial Sequence
  Description of Artificial Sequence: Synthetic oligonucleotide
cuccgcauuacuacaucca

SEQ ID NO: 416014 - RNA, 19 nt, Artificial Sequence
  Description of Artificial Sequence: Synthetic oligonucleotide
uacguucuucauacaucaa

SEQ ID NO: 416015 - RNA, 19 nt, Artificial Sequence
  Description of Artificial Sequence: Synthetic oligonucleotide
ugugaucagucagguauua

SEQ ID NO: 416016 - RNA, 19 nt, Artificial Sequence
  Description of Artificial Sequence: Synthetic oligonucleotide
ucauacccuugucgugaug

SEQ ID NO: 416017 - RNA, 19 nt, Artificial Sequence
  Description of Artificial Sequence: Synthetic oligonucleotide
cuccucguaccaauuucuc

SEQ ID NO: 416018 - RNA, 19 nt, Artificial Sequence
  Description of Artificial Sequence: Synthetic oligonucleotide
gcgguaucagucgacauac

SEQ ID NO: 416019 - RNA, 19 nt, Artificial Sequence
  Description of Artificial Sequence: Synthetic oligonucleotide
cuuaguuguggagggucuc

SEQ ID NO: 416020 - RNA, 19 nt, Artificial Sequence
  Description of Artificial Sequence: Synthetic oligonucleotide
uacccuugucgugaugcac

SEQ ID NO: 416021 - RNA, 19 nt, Artificial Sequence
  Description of Artificial Sequence: Synthetic oligonucleotide
acuuaucgaacgagguaga

SEQ ID NO: 416022 - RNA, 19 nt, Artificial Sequence
  Description of Artificial Sequence: Synthetic oligonucleotide
aucagucgacauacauggg

SEQ ID NO: 416023 - RNA, 19 nt, Artificial Sequence
  Description of Artificial Sequence: Synthetic oligonucleotide
gauaaggaaaucggcccgu

SEQ ID NO: 416024 - RNA, 19 nt, Artificial Sequence
  Description of Artificial Sequence: Synthetic oligonucleotide
uggaggacgauggcuuggu

SEQ ID NO: 416025 - RNA, 19 nt, Artificial Sequence
  Description of Artificial Sequence: Synthetic oligonucleotide
ccagagcucacaauguaca

SEQ ID NO: 416026 - RNA, 19 nt, Artificial Sequence
  Description of Artificial Sequence: Synthetic oligonucleotide
aucauacccuugucgugau

SEQ ID NO: 416027 - RNA, 19 nt, Artificial Sequence
  Description of Artificial Sequence: Synthetic oligonucleotide
acggugugaucuaaucaca

SEQ ID NO: 416028 - RNA, 19 nt, Artificial Sequence
  Description of Artificial Sequence: Synthetic oligonucleotide
gcucacaauguacaguucu

SEQ ID NO: 416029 - RNA, 19 nt, Artificial Sequence
  Description of Artificial Sequence: Synthetic oligonucleotide
ugccauuaucugcccacuu

SEQ ID NO: 416030 - RNA, 19 nt, Artificial Sequence
  Description of Artificial Sequence: Synthetic oligonucleotide
ggccaacucguacaaugug

SEQ ID NO: 416031 - RNA, 19 nt, Artificial Sequence
  Description of Artificial Sequence: Synthetic oligonucleotide
uuuggccuuuuggauucgu

SEQ ID NO: 416032 - RNA, 19 nt, Artificial Sequence
  Description of Artificial Sequence: Synthetic oligonucleotide
cagucgcccucucugaaga

SEQ ID NO: 416033 - RNA, 19 nt, Artificial Sequence
  Description of Artificial Sequence: Synthetic oligonucleotide
caauggaggacgauggcuu

SEQ ID NO: 416034 - RNA, 19 nt, Artificial Sequence
  Description of Artificial Sequence: Synthetic oligonucleotide
auacaggaugaaaacucuu

SEQ ID NO: 416035 - RNA, 19 nt, Artificial Sequence
  Description of Artificial Sequence: Synthetic oligonucleotide
gaggcuauacugagccaga

SEQ ID NO: 416036 - RNA, 19 nt, Artificial Sequence
  Description of Artificial Sequence: Synthetic oligonucleotide
cuacuagcuacuucucccu

SEQ ID NO: 416037 - RNA, 19 nt, Artificial Sequence
  Description of Artificial Sequence: Synthetic oligonucleotide
gugaucagucagguauuac

SEQ ID NO: 416038 - RNA, 19 nt, Artificial Sequence
  Description of Artificial Sequence: Synthetic oligonucleotide
caacagucgcccucucuga

SEQ ID NO: 416039 - RNA, 19 nt, Artificial Sequence
  Description of Artificial Sequence: Synthetic oligonucleotide
ggaaaucggcccgucggcc

SEQ ID NO: 416040 - RNA, 19 nt, Artificial Sequence
  Description of Artificial Sequence: Synthetic oligonucleotide
ggcuauacugagccagaca

SEQ ID NO: 416041 - RNA, 19 nt, Artificial Sequence
  Description of Artificial Sequence: Synthetic oligonucleotide
gacauacaugggagagcug

SEQ ID NO: 416042 - RNA, 19 nt, Artificial Sequence
  Description of Artificial Sequence: Synthetic oligonucleotide
agguucagacauaguacau

SEQ ID NO: 416043 - RNA, 19 nt, Artificial Sequence
  Description of Artificial Sequence: Synthetic oligonucleotide
caaucacuacuccgcauua

SEQ ID NO: 416044 - RNA, 19 nt, Artificial Sequence
  Description of Artificial Sequence: Synthetic oligonucleotide
gaccucgacaguacguucu

SEQ ID NO: 416045 - RNA, 19 nt, Artificial Sequence
  Description of Artificial Sequence: Synthetic oligonucleotide
ggugccauauauggccuac

SEQ ID NO: 416046 - RNA, 19 nt, Artificial Sequence
  Description of Artificial Sequence: Synthetic oligonucleotide
accucgacaguacguucuu

SEQ ID NO: 416047 - RNA, 19 nt, Artificial Sequence
  Description of Artificial Sequence: Synthetic oligonucleotide
ugcaaugaauagggaugua

SEQ ID NO: 416048 - RNA, 19 nt, Artificial Sequence
  Description of Artificial Sequence: Synthetic oligonucleotide
gucuccuagugaaacucaa

SEQ ID NO: 416049 - RNA, 19 nt, Artificial Sequence
  Description of Artificial Sequence: Synthetic oligonucleotide
acgguugaccguauucuuu

SEQ ID NO: 416050 - RNA, 19 nt, Artificial Sequence
  Description of Artificial Sequence: Synthetic oligonucleotide
  modified_base (3)..(3): a, c, u, g, unknown or other
ggngaaaauucccuuucuu

SEQ ID NO: 416051 - RNA, 19 nt, Artificial Sequence
  Description of Artificial Sequence: Synthetic oligonucleotide
ccagguuuugagucuagaa

SEQ ID NO: 416052 - RNA, 19 nt, Artificial Sequence
  Description of Artificial Sequence: Synthetic oligonucleotide
  modified_base (4)..(4): a, c, u, g, unknown or other
gggngaaaauucccuuucu

SEQ ID NO: 416053 - RNA, 19 nt, Artificial Sequence
  Description of Artificial Sequence: Synthetic oligonucleotide
cccuuaaguuuauaguuua

SEQ ID NO: 416054 - RNA, 19 nt, Artificial Sequence
  Description of Artificial Sequence: Synthetic oligonucleotide
gcccacuugguuuguggac

SEQ ID NO: 416055 - RNA, 19 nt, Artificial Sequence
  Description of Artificial Sequence: Synthetic oligonucleotide
cauaagcuccucguaccaa

SEQ ID NO: 416056 - RNA, 19 nt, Artificial Sequence
  Description of Artificial Sequence: Synthetic oligonucleotide
  modified_base (6)..(6): a, c, u, g, unknown or other
cugggngaaaauucccuuu

SEQ ID NO: 416057 - RNA, 19 nt, Artificial Sequence
  Description of Artificial Sequence: Synthetic oligonucleotide
gcaaucacuacuccgcauu

SEQ ID NO: 416058 - RNA, 19 nt, Artificial Sequence
  Description of Artificial Sequence: Synthetic oligonucleotide
gcacauucuaggugacaga

SEQ ID NO: 416059 - RNA, 19 nt, Artificial Sequence
  Description of Artificial Sequence: Synthetic oligonucleotide
aucgaacgagguagacaug

SEQ ID NO: 416060 - RNA, 19 nt, Artificial Sequence
  Description of Artificial Sequence: Synthetic oligonucleotide
ccauuugcauaauggcgga

SEQ ID NO: 416061 - RNA, 19 nt, Artificial Sequence
  Description of Artificial Sequence: Synthetic oligonucleotide
gcggacaucauacccuugu

SEQ ID NO: 416062 - RNA, 19 nt, Artificial Sequence
  Description of Artificial Sequence: Synthetic oligonucleotide
ccggaauaacaucaucuaa

SEQ ID NO: 416063 - RNA, 19 nt, Artificial Sequence
  Description of Artificial Sequence: Synthetic oligonucleotide
gugccauauauggccuaca

SEQ ID NO: 416064 - RNA, 19 nt, Artificial Sequence
  Description of Artificial Sequence: Synthetic oligonucleotide
cacacgucaugaauauguu

SEQ ID NO: 416065 - RNA, 19 nt, Artificial Sequence
  Description of Artificial Sequence: Synthetic oligonucleotide
cggcccgucggccaacucg

SEQ ID NO: 416066 - RNA, 19 nt, Artificial Sequence
  Description of Artificial Sequence: Synthetic oligonucleotide
gguagacaugagcuccaua

SEQ ID NO: 416067 - RNA, 19 nt, Artificial Sequence
  Description of Artificial Sequence: Synthetic oligonucleotide
cccuucuaugacaaguggu

SEQ ID NO: 416068 - RNA, 19 nt, Artificial Sequence
  Description of Artificial Sequence: Synthetic oligonucleotide
cagguauuacagggaugca

SEQ ID NO: 416069 - RNA, 19 nt, Artificial Sequence
  Description of Artificial Sequence: Synthetic oligonucleotide
cuaugacaagugguagacu

SEQ ID NO: 416070 - RNA, 19 nt, Artificial Sequence
  Description of Artificial Sequence: Synthetic oligonucleotide
gguugaccguauucuuuua

SEQ ID NO: 416071 - RNA, 19 nt, Artificial Sequence
  Description of Artificial Sequence: Synthetic oligonucleotide
cacugugaucagucaggua

SEQ ID NO: 416072 - RNA, 19 nt, Artificial Sequence
  Description of Artificial Sequence: Synthetic oligonucleotide
gcaugcgaccucgacagua

SEQ ID NO: 416073 - RNA, 19 nt, Artificial Sequence
  Description of Artificial Sequence: Synthetic oligonucleotide
cacaguugcuaaagugauu

SEQ ID NO: 416074 - RNA, 19 nt, Artificial Sequence
  Description of Artificial Sequence: Synthetic oligonucleotide
cacgguugaccguauucuu

SEQ ID NO: 416075 - RNA, 19 nt, Artificial Sequence
  Description of Artificial Sequence: Synthetic oligonucleotide
cuuuauacuuuggccuuuu

SEQ ID NO: 416076 - RNA, 19 nt, Artificial Sequence
  Description of Artificial Sequence: Synthetic oligonucleotide
ucggcccgucggccaacuc

SEQ ID NO: 416077 - RNA, 19 nt, Artificial Sequence
  Description of Artificial Sequence: Synthetic oligonucleotide
ggcaaucacuacuccgcau

SEQ ID NO: 416078 - RNA, 19 nt, Artificial Sequence
  Description of Artificial Sequence: Synthetic oligonucleotide
cccuguuagugagucacaa

SEQ ID NO: 416079 - RNA, 19 nt, Artificial Sequence
  Description of Artificial Sequence: Synthetic oligonucleotide
cgaccucgacaguacguuc

SEQ ID NO: 416080 - RNA, 19 nt, Artificial Sequence
  Description of Artificial Sequence: Synthetic oligonucleotide
ccacgguugaccguauucu

SEQ ID NO: 416081 - RNA, 19 nt, Artificial Sequence
  Description of Artificial Sequence: Synthetic oligonucleotide
ccucgacaguacguucuuc

SEQ ID NO: 416082 - RNA, 19 nt, Artificial Sequence
  Description of Artificial Sequence: Synthetic oligonucleotide
gcgaccucgacaguacguu

SEQ ID NO: 416083 - RNA, 19 nt, Artificial Sequence
  Description of Artificial Sequence: Synthetic oligonucleotide
cgguugaccguauucuuuu

SEQ ID NO: 416084 - RNA, 19 nt, Artificial Sequence
  Description of Artificial Sequence: Synthetic oligonucleotide
gucggccaacucguacaau

SEQ ID NO: 416085 - RNA, 19 nt, Artificial Sequence
  Description of Artificial Sequence: Synthetic oligonucleotide
cguccuucguaaggcacaa

SEQ ID NO: 416086 - RNA, 19 nt, Artificial Sequence
  Description of Artificial Sequence: Synthetic oligonucleotide
gcccgucggccaacucgua

SEQ ID NO: 416087 - RNA, 19 nt, Artificial Sequence
  Description of Artificial Sequence: Synthetic oligonucleotide
aauaagccaacuuuaauag

SEQ ID NO: 416088 - RNA, 19 nt, Artificial Sequence
  Description of Artificial Sequence: Synthetic oligonucleotide
aacuuuagaaaauuagggg

SEQ ID NO: 416089 - RNA, 19 nt, Artificial Sequence
  Description of Artificial Sequence: Synthetic oligonucleotide
aaacuagugagauaugcuc

SEQ ID NO: 416090 - RNA, 19 nt, Artificial Sequence
  Description of Artificial Sequence: Synthetic oligonucleotide
aaagcauccuuacacaaag

SEQ ID NO: 416091 - RNA, 19 nt, Artificial Sequence
  Description of Artificial Sequence: Synthetic oligonucleotide
aaauuaggggcucaucaac

SEQ ID NO: 416092 - RNA, 19 nt, Artificial Sequence
  Description of Artificial Sequence: Synthetic oligonucleotide
aaauaagccaacuuuaaua

SEQ ID NO: 416093 - RNA, 19 nt, Artificial Sequence
  Description of Artificial Sequence: Synthetic oligonucleotide
uguccuaauauacaaaacu

SEQ ID NO: 416094 - RNA, 19 nt, Artificial Sequence
  Description of Artificial Sequence: Synthetic oligonucleotide
aaaucgagaagcuuggaga

SEQ ID NO: 416095 - RNA, 19 nt, Artificial Sequence
  Description of Artificial Sequence: Synthetic oligonucleotide
ugacuaauccaaaauagug

SEQ ID NO: 416096 - RNA, 19 nt, Artificial Sequence
  Description of Artificial Sequence: Synthetic oligonucleotide
uacgauaauucauagaaac

SEQ ID NO: 416097 - RNA, 19 nt, Artificial Sequence
  Description of Artificial Sequence: Synthetic oligonucleotide
aaaaucgagaagcuuggag

SEQ ID NO: 416098 - RNA, 19 nt, Artificial Sequence
  Description of Artificial Sequence: Synthetic oligonucleotide
ucaaaaugcgugcugggcg

SEQ ID NO: 416099 - RNA, 19 nt, Artificial Sequence
  Description of Artificial Sequence: Synthetic oligonucleotide
auuacucccauuuacaaga

SEQ ID NO: 416100 - RNA, 19 nt, Artificial Sequence
  Description of Artificial Sequence: Synthetic oligonucleotide
aagguaaaauuccuaugac

SEQ ID NO: 416101 - RNA, 19 nt, Artificial Sequence
  Description of Artificial Sequence: Synthetic oligonucleotide
guuacgauaauucauagaa

SEQ ID NO: 416102 - RNA, 19 nt, Artificial Sequence
  Description of Artificial Sequence: Synthetic oligonucleotide
cuuccuacggccaucaagg

SEQ ID NO: 416103 - RNA, 19 nt, Artificial Sequence
  Description of Artificial Sequence: Synthetic oligonucleotide
aauuacacggcggcuagcc

SEQ ID NO: 416104 - RNA, 19 nt, Artificial Sequence
  Description of Artificial Sequence: Synthetic oligonucleotide
acuacuucugcugacaaac

SEQ ID NO: 416105 - RNA, 19 nt, Artificial Sequence
  Description of Artificial Sequence: Synthetic oligonucleotide
acaaacuagugagauaugc

SEQ ID NO: 416106 - RNA, 19 nt, Artificial Sequence
  Description of Artificial Sequence: Synthetic oligonucleotide
uccuaauauacaaaacuug

SEQ ID NO: 416107 - RNA, 19 nt, Artificial Sequence
  Description of Artificial Sequence: Synthetic oligonucleotide
uuuaguuacgauaauucau

SEQ ID NO: 416108 - RNA, 19 nt, Artificial Sequence
  Description of Artificial Sequence: Synthetic oligonucleotide
acuaauccaaaauagugcu

SEQ ID NO: 416109 - RNA, 19 nt, Artificial Sequence
  Description of Artificial Sequence: Synthetic oligonucleotide
acuuuaauagauauuaucu

SEQ ID NO: 416110 - RNA, 19 nt, Artificial Sequence
  Description of Artificial Sequence: Synthetic oligonucleotide
uauuaagcagauaauuuaa

SEQ ID NO: 416111 - RNA, 19 nt, Artificial Sequence
  Description of Artificial Sequence: Synthetic oligonucleotide
ugacuuuuaguuacgauaa

SEQ ID NO: 416112 - RNA, 19 nt, Artificial Sequence
  Description of Artificial Sequence: Synthetic oligonucleotide
augaucauuacaaagcuag

SEQ ID NO: 416113 - RNA, 19 nt, Artificial Sequence
  Description of Artificial Sequence: Synthetic oligonucleotide
aagguaagcaucucgugug

SEQ ID NO: 416114 - RNA, 19 nt, Artificial Sequence
  Description of Artificial Sequence: Synthetic oligonucleotide
aucaccucaaaaugcgugc

SEQ ID NO: 416115 - RNA, 19 nt, Artificial Sequence
  Description of Artificial Sequence: Synthetic oligonucleotide
uuaguuacgauaauucaua

SEQ ID NO: 416116 - RNA, 19 nt, Artificial Sequence
  Description of Artificial Sequence: Synthetic oligonucleotide
uuagaauauugacuuuuag

SEQ ID NO: 416117 - RNA, 19 nt, Artificial Sequence
  Description of Artificial Sequence: Synthetic oligonucleotide
gguaaaauuccuaugacag

SEQ ID NO: 416118 - RNA, 19 nt, Artificial Sequence
  Description of Artificial Sequence: Synthetic oligonucleotide
agguauuacucccauuuac

SEQ ID NO: 416119 - RNA, 19 nt, Artificial Sequence
  Description of Artificial Sequence: Synthetic oligonucleotide
cuuaaguaaccuucuaaag

SEQ ID NO: 416120 - RNA, 19 nt, Artificial Sequence
  Description of Artificial Sequence: Synthetic oligonucleotide
uaaaacgauuuacagacau

SEQ ID NO: 416121 - RNA, 19 nt, Artificial Sequence
  Description of Artificial Sequence: Synthetic oligonucleotide
agcuaagggacccuguuac

SEQ ID NO: 416122 - RNA, 19 nt, Artificial Sequence
  Description of Artificial Sequence: Synthetic oligonucleotide
auugacuaauccaaaauag

SEQ ID NO: 416123 - RNA, 19 nt, Artificial Sequence
  Description of Artificial Sequence: Synthetic oligonucleotide
uacacuaucacacgcuucu

SEQ ID NO: 416124 - RNA, 19 nt, Artificial Sequence
  Description of Artificial Sequence: Synthetic oligonucleotide
uuugaaaguuuauugaguu

SEQ ID NO: 416125 - RNA, 19 nt, Artificial Sequence
  Description of Artificial Sequence: Synthetic oligonucleotide
uggggcuuaacuuagaaua

SEQ ID NO: 416126 - RNA, 19 nt, Artificial Sequence
  Description of Artificial Sequence: Synthetic oligonucleotide
ugacaaacuagugagauau

SEQ ID NO: 416127 - RNA, 19 nt, Artificial Sequence
  Description of Artificial Sequence: Synthetic oligonucleotide
gacgacagaaauaaagugc

SEQ ID NO: 416128 - RNA, 19 nt, Artificial Sequence
  Description of Artificial Sequence: Synthetic oligonucleotide
acuuagguccaucugcaac

SEQ ID NO: 416129 - RNA, 19 nt, Artificial Sequence
  Description of Artificial Sequence: Synthetic oligonucleotide
ucuguccuaauauacaaaa

SEQ ID NO: 416130 - RNA, 19 nt, Artificial Sequence
  Description of Artificial Sequence: Synthetic oligonucleotide
agauaaaagucauuuccug

SEQ ID NO: 416131 - RNA, 19 nt, Artificial Sequence
  Description of Artificial Sequence: Synthetic oligonucleotide
uggacgacagaaauaaagu

SEQ ID NO: 416132 - RNA, 19 nt, Artificial Sequence
  Description of Artificial Sequence: Synthetic oligonucleotide
uugacuaauccaaaauagu

SEQ ID NO: 416133 - RNA, 19 nt, Artificial Sequence
  Description of Artificial Sequence: Synthetic oligonucleotide
aaagguacuuuguguaugu

SEQ ID NO: 416134 - RNA, 19 nt, Artificial Sequence
  Description of Artificial Sequence: Synthetic oligonucleotide
aaaauuaggggcucaucaa

SEQ ID NO: 416135 - RNA, 19 nt, Artificial Sequence
  Description of Artificial Sequence: Synthetic oligonucleotide
agcucaaagguacagaaaa

SEQ ID NO: 416136 - RNA, 19 nt, Artificial Sequence
  Description of Artificial Sequence: Synthetic oligonucleotide
uauagcgccuucuucaaga

SEQ ID NO: 416137 - RNA, 19 nt, Artificial Sequence
  Description of Artificial Sequence: Synthetic oligonucleotide
aacuguucccucccuguac

SEQ ID NO: 416138 - RNA, 19 nt, Artificial Sequence
  Description of Artificial Sequence: Synthetic oligonucleotide
ugaucauuacaaagcuagg

SEQ ID NO: 416139 - RNA, 19 nt, Artificial Sequence
  Description of Artificial Sequence: Synthetic oligonucleotide
aguuagagccaacagccag

SEQ ID NO: 416140 - RNA, 19 nt, Artificial Sequence
  Description of Artificial Sequence: Synthetic oligonucleotide
uucuaaagguaaaauuccu

SEQ ID NO: 416141 - RNA, 19 nt, Artificial Sequence
  Description of Artificial Sequence: Synthetic oligonucleotide
uaaugcuuggacuccacca

SEQ ID NO: 416142 - RNA, 19 nt, Artificial Sequence
  Description of Artificial Sequence: Synthetic oligonucleotide
aaaauagugcucguugacu

SEQ ID NO: 416143 - RNA, 19 nt, Artificial Sequence
  Description of Artificial Sequence: Synthetic oligonucleotide
uucucuaaugccgaguggc

SEQ ID NO: 416144 - RNA, 19 nt, Artificial Sequence
  Description of Artificial Sequence: Synthetic oligonucleotide
acaaaucugcuuaugggac

SEQ ID NO: 416145 - RNA, 19 nt, Artificial Sequence
  Description of Artificial Sequence: Synthetic oligonucleotide
acgaagagaaucuguaaug

SEQ ID NO: 416146 - RNA, 19 nt, Artificial Sequence
  Description of Artificial Sequence: Synthetic oligonucleotide
uugacuauagucuuccauu

SEQ ID NO: 416147 - RNA, 19 nt, Artificial Sequence
  Description of Artificial Sequence: Synthetic oligonucleotide
cauucuaagucuuccacuc

SEQ ID NO: 416148 - RNA, 19 nt, Artificial Sequence
  Description of Artificial Sequence: Synthetic oligonucleotide
ugagauaugcucagaucug

SEQ ID NO: 416149 - RNA, 19 nt, Artificial Sequence
  Description of Artificial Sequence: Synthetic oligonucleotide
uaccacuugaugcucagac

SEQ ID NO: 416150 - RNA, 19 nt, Artificial Sequence
  Description of Artificial Sequence: Synthetic oligonucleotide
uuugacuauagucuuccau

SEQ ID NO: 416151 - RNA, 19 nt, Artificial Sequence
  Description of Artificial Sequence: Synthetic oligonucleotide
uccaguaaugcuuggacuc

SEQ ID NO: 416152 - RNA, 19 nt, Artificial Sequence
  Description of Artificial Sequence: Synthetic oligonucleotide
ugugcgucaaggaaggcaa

SEQ ID NO: 416153 - RNA, 19 nt, Artificial Sequence
  Description of Artificial Sequence: Synthetic oligonucleotide
agguaaaauuccuaugaca

SEQ ID NO: 416154 - RNA, 19 nt, Artificial Sequence
  Description of Artificial Sequence: Synthetic oligonucleotide
auaauuacacggcggcuag

SEQ ID NO: 416155 - RNA, 19 nt, Artificial Sequence
  Description of Artificial Sequence: Synthetic oligonucleotide
aaguucacuggagagcuag

SEQ ID NO: 416156 - RNA, 19 nt, Artificial Sequence
  Description of Artificial Sequence: Synthetic oligonucleotide
acuagugagauaugcucag

SEQ ID NO: 416157 - RNA, 19 nt, Artificial Sequence
  Description of Artificial Sequence: Synthetic oligonucleotide
ucuaaagguaaaauuccua

SEQ ID NO: 416158 - RNA, 19 nt, Artificial Sequence
  Description of Artificial Sequence: Synthetic oligonucleotide
aggacuaugugaaagugag

SEQ ID NO: 416159 - RNA, 19 nt, Artificial Sequence
  Description of Artificial Sequence: Synthetic oligonucleotide
aagagaaucuguaaugaaa

SEQ ID NO: 416160 - RNA, 19 nt, Artificial Sequence
  Description of Artificial Sequence: Synthetic oligonucleotide
ucuaaugccgaguggcgcc

SEQ ID NO: 416161 - RNA, 19 nt, Artificial Sequence
  Description of Artificial Sequence: Synthetic oligonucleotide
cugcaaguuacauucaguc

SEQ ID NO: 416162 - RNA, 19 nt, Artificial Sequence
  Description of Artificial Sequence: Synthetic oligonucleotide
ugguaauaauagcagcaca

SEQ ID NO: 416163 - RNA, 19 nt, Artificial Sequence
  Description of Artificial Sequence: Synthetic oligonucleotide
uuguucgcaacuugcaucu

SEQ ID NO: 416164 - RNA, 19 nt, Artificial Sequence
  Description of Artificial Sequence: Synthetic oligonucleotide
acuaugugaaagugagguc

SEQ ID NO: 416165 - RNA, 19 nt, Artificial Sequence
  Description of Artificial Sequence: Synthetic oligonucleotide
caaaaugcgugcugggcgg

SEQ ID NO: 416166 - RNA, 19 nt, Artificial Sequence
  Description of Artificial Sequence: Synthetic oligonucleotide
uaguuacgauaauucauag

SEQ ID NO: 416167 - RNA, 19 nt, Artificial Sequence
  Description of Artificial Sequence: Synthetic oligonucleotide
uagauauuaucuuguauuu

SEQ ID NO: 416168 - RNA, 19 nt, Artificial Sequence
  Description of Artificial Sequence: Synthetic oligonucleotide
auggacgacagaaauaaag

SEQ ID NO: 416169 - RNA, 19 nt, Artificial Sequence
  Description of Artificial Sequence: Synthetic oligonucleotide
uucacuuacuauacccuga

SEQ ID NO: 416170 - RNA, 19 nt, Artificial Sequence
  Description of Artificial Sequence: Synthetic oligonucleotide
aaaaguagaguuagagcca

SEQ ID NO: 416171 - RNA, 19 nt, Artificial Sequence
  Description of Artificial Sequence: Synthetic oligonucleotide
aaucaccucaaaaugcgug

SEQ ID NO: 416172 - RNA, 19 nt, Artificial Sequence
  Description of Artificial Sequence: Synthetic oligonucleotide
uuuaagaauucaugggcau

SEQ ID NO: 416173 - RNA, 19 nt, Artificial Sequence
  Description of Artificial Sequence: Synthetic oligonucleotide
aguuuacucaaacuuuaga

SEQ ID NO: 416174 - RNA, 19 nt, Artificial Sequence
  Description of Artificial Sequence: Synthetic oligonucleotide
auacucacaggcaaagaac

SEQ ID NO: 416175 - RNA, 19 nt, Artificial Sequence
  Description of Artificial Sequence: Synthetic oligonucleotide
ucauuacaaagcuaggcuu

SEQ ID NO: 416176 - RNA, 19 nt, Artificial Sequence
  Description of Artificial Sequence: Synthetic oligonucleotide
ucauuaggauuuccauccg

SEQ ID NO: 416177 - RNA, 19 nt, Artificial Sequence
  Description of Artificial Sequence: Synthetic oligonucleotide
gccacuauagcacauuucc

SEQ ID NO: 416178 - RNA, 19 nt, Artificial Sequence
  Description of Artificial Sequence: Synthetic oligonucleotide
guagaguuagagccaacag

SEQ ID NO: 416179 - RNA, 19 nt, Artificial Sequence
  Description of Artificial Sequence: Synthetic oligonucleotide
ugcuuaugggacaaacaga

SEQ ID NO: 416180 - RNA, 19 nt, Artificial Sequence
  Description of Artificial Sequence: Synthetic oligonucleotide
uaugucugaaagaccacuc

SEQ ID NO: 416181 - RNA, 19 nt, Artificial Sequence
  Description of Artificial Sequence: Synthetic oligonucleotide
uucgcaacuugcaucugcc

SEQ ID NO: 416182 - RNA, 19 nt, Artificial Sequence
  Description of Artificial Sequence: Synthetic oligonucleotide
uacuauacccugacauucc

SEQ ID NO: 416183 - RNA, 19 nt, Artificial Sequence
  Description of Artificial Sequence: Synthetic oligonucleotide
auuuaagaauucaugggca

SEQ ID NO: 416184 - RNA, 19 nt, Artificial Sequence
  Description of Artificial Sequence: Synthetic oligonucleotide
cacucaacugcucccaucc

SEQ ID NO: 416185 - RNA, 19 nt, Artificial Sequence
  Description of Artificial Sequence: Synthetic oligonucleotide
ugucugaaagaccacucaa

SEQ ID NO: 416186 - RNA, 19 nt, Artificial Sequence
  Description of Artificial Sequence: Synthetic oligonucleotide
gaugaauuucuugggcggg

SEQ ID NO: 416187 - RNA, 19 nt, Artificial Sequence
  Description of Artificial Sequence: Synthetic oligonucleotide
ucuaagucuuccacucgcc

SEQ ID NO: 416188 - RNA, 19 nt, Artificial Sequence
  Description of Artificial Sequence: Synthetic oligonucleotide
uuugccguuugccucucag

SEQ ID NO: 416189 - RNA, 19 nt, Artificial Sequence
  Description of Artificial Sequence: Synthetic oligonucleotide
cuuguucgcaacuugcauc

SEQ ID NO: 416190 - RNA, 19 nt, Artificial Sequence
  Description of Artificial Sequence: Synthetic oligonucleotide
uuacgauaauucauagaaa

SEQ ID NO: 416191 - RNA, 19 nt, Artificial Sequence
  Description of Artificial Sequence: Synthetic oligonucleotide
ucacuuacuauacccugac

SEQ ID NO: 416192 - RNA, 19 nt, Artificial Sequence
  Description of Artificial Sequence: Synthetic oligonucleotide
guauccuugacuuccugac

SEQ ID NO: 416193 - RNA, 19 nt, Artificial Sequence
  Description of Artificial Sequence: Synthetic oligonucleotide
agacguacauggaaacucc

SEQ ID NO: 416194 - RNA, 19 nt, Artificial Sequence
  Description of Artificial Sequence: Synthetic oligonucleotide
aucaacaggccaccccacc

SEQ ID NO: 416195 - RNA, 19 nt, Artificial Sequence
  Description of Artificial Sequence: Synthetic oligonucleotide
uuaaaacgauuuacagaca

SEQ ID NO: 416196 - RNA, 19 nt, Artificial Sequence
  Description of Artificial Sequence: Synthetic oligonucleotide
gugagauaugcucagaucu

SEQ ID NO: 416197 - RNA, 19 nt, Artificial Sequence
  Description of Artificial Sequence: Synthetic oligonucleotide
gacuaugugaaagugaggu

SEQ ID NO: 416198 - RNA, 19 nt, Artificial Sequence
  Description of Artificial Sequence: Synthetic oligonucleotide
uggacuacccagagcuugg

SEQ ID NO: 416199 - RNA, 19 nt, Artificial Sequence
  Description of Artificial Sequence: Synthetic oligonucleotide
agguacuuuguguaugucu

SEQ ID NO: 416200 - RNA, 19 nt, Artificial Sequence
  Description of Artificial Sequence: Synthetic oligonucleotide
agaaguggggcuuaacuua

SEQ ID NO: 416201 - RNA, 19 nt, Artificial Sequence
  Description of Artificial Sequence: Synthetic oligonucleotide
ggcgccaucuuccagacag

SEQ ID NO: 416202 - RNA, 19 nt, Artificial Sequence
  Description of Artificial Sequence: Synthetic oligonucleotide
agcccgauuagcuaaggga

SEQ ID NO: 416203 - RNA, 19 nt, Artificial Sequence
  Description of Artificial Sequence: Synthetic oligonucleotide
cucugugcgucaaggaagg

SEQ ID NO: 416204 - RNA, 19 nt, Artificial Sequence
  Description of Artificial Sequence: Synthetic oligonucleotide
aguuacgauaauucauaga

SEQ ID NO: 416205 - RNA, 19 nt, Artificial Sequence
  Description of Artificial Sequence: Synthetic oligonucleotide
uccuaagccauguggcucc

SEQ ID NO: 416206 - RNA, 19 nt, Artificial Sequence
  Description of Artificial Sequence: Synthetic oligonucleotide
uacccugacauuccuaguc

SEQ ID NO: 416207 - RNA, 19 nt, Artificial Sequence
  Description of Artificial Sequence: Synthetic oligonucleotide
uucuuuucgcaaccgugug

SEQ ID NO: 416208 - RNA, 19 nt, Artificial Sequence
  Description of Artificial Sequence: Synthetic oligonucleotide
ucucccagcacaucugucu

SEQ ID NO: 416209 - RNA, 19 nt, Artificial Sequence
  Description of Artificial Sequence: Synthetic oligonucleotide
aaccgugugaugaauuucu

SEQ ID NO: 416210 - RNA, 19 nt, Artificial Sequence
  Description of Artificial Sequence: Synthetic oligonucleotide
aaaguagaguuagagccaa

SEQ ID NO: 416211 - RNA, 19 nt, Artificial Sequence
  Description of Artificial Sequence: Synthetic oligonucleotide
cugaaagaccacucaacug

SEQ ID NO: 416212 - RNA, 19 nt, Artificial Sequence
  Description of Artificial Sequence: Synthetic oligonucleotide
aacccuacccuaauggcug

SEQ ID NO: 416213 - RNA, 19 nt, Artificial Sequence
  Description of Artificial Sequence: Synthetic oligonucleotide
uccaauuaauccccacaac

SEQ ID NO: 416214 - RNA, 19 nt, Artificial Sequence
  Description of Artificial Sequence: Synthetic oligonucleotide
aauccaaaauagugcucgu

SEQ ID NO: 416215 - RNA, 19 nt, Artificial Sequence
  Description of Artificial Sequence: Synthetic oligonucleotide
aguauccuugacuuccuga

SEQ ID NO: 416216 - RNA, 19 nt, Artificial Sequence
  Description of Artificial Sequence: Synthetic oligonucleotide
uccuacggccaucaaggag

SEQ ID NO: 416217 - RNA, 19 nt, Artificial Sequence
  Description of Artificial Sequence: Synthetic oligonucleotide
ugcucagacguacauggaa

SEQ ID NO: 416218 - RNA, 19 nt, Artificial Sequence
  Description of Artificial Sequence: Synthetic oligonucleotide
aaacccuacccuaauggcu

SEQ ID NO: 416219 - RNA, 19 nt, Artificial Sequence
  Description of Artificial Sequence: Synthetic oligonucleotide
cauuccuaguccccaaccc

SEQ ID NO: 416220 - RNA, 19 nt, Artificial Sequence
  Description of Artificial Sequence: Synthetic oligonucleotide
ucuuuucgcaaccguguga

SEQ ID NO: 416221 - RNA, 19 nt, Artificial Sequence
  Description of Artificial Sequence: Synthetic oligonucleotide
cuacccuaauggcugaggc

SEQ ID NO: 416222 - RNA, 19 nt, Artificial Sequence
  Description of Artificial Sequence: Synthetic oligonucleotide
uguacacuaucacacgcuu

SEQ ID NO: 416223 - RNA, 19 nt, Artificial Sequence
  Description of Artificial Sequence: Synthetic oligonucleotide
aucugcuuaugggacaaac

SEQ ID NO: 416224 - RNA, 19 nt, Artificial Sequence
  Description of Artificial Sequence: Synthetic oligonucleotide
uuacucccauuuacaagag

SEQ ID NO: 416225 - RNA, 19 nt, Artificial Sequence
  Description of Artificial Sequence: Synthetic oligonucleotide
uauauagcgccuucuucaa

SEQ ID NO: 416226 - RNA, 19 nt, Artificial Sequence
  Description of Artificial Sequence: Synthetic oligonucleotide
agcauccuuacacaaagua

SEQ ID NO: 416227 - RNA, 19 nt, Artificial Sequence
  Description of Artificial Sequence: Synthetic oligonucleotide
acaagguaagcaucucgug

SEQ ID NO: 416228 - RNA, 19 nt, Artificial Sequence
  Description of Artificial Sequence: Synthetic oligonucleotide
agccaacuuuaauagauau

SEQ ID NO: 416229 - RNA, 19 nt, Artificial Sequence
  Description of Artificial Sequence: Synthetic oligonucleotide
cuaagucuuccacucgccc

SEQ ID NO: 416230 - RNA, 19 nt, Artificial Sequence
  Description of Artificial Sequence: Synthetic oligonucleotide
auaagccaacuuuaauaga

SEQ ID NO: 416231 - RNA, 19 nt, Artificial Sequence
  Description of Artificial Sequence: Synthetic oligonucleotide
acuuagaauauugacuuuu

SEQ ID NO: 416232 - RNA, 19 nt, Artificial Sequence
  Description of Artificial Sequence: Synthetic oligonucleotide
agcagauaauuuaagaauu

SEQ ID NO: 416233 - RNA, 19 nt, Artificial Sequence
  Description of Artificial Sequence: Synthetic oligonucleotide
ucugcgaagcccgauuagc

SEQ ID NO: 416234 - RNA, 19 nt, Artificial Sequence
  Description of Artificial Sequence: Synthetic oligonucleotide
guaaaauuccuaugacaga

SEQ ID NO: 416235 - RNA, 19 nt, Artificial Sequence
  Description of Artificial Sequence: Synthetic oligonucleotide
aaagcuaggcuuuccccuu

SEQ ID NO: 416236 - RNA, 19 nt, Artificial Sequence
  Description of Artificial Sequence: Synthetic oligonucleotide
cugaccaacuguucccucc

SEQ ID NO: 416237 - RNA, 19 nt, Artificial Sequence
  Description of Artificial Sequence: Synthetic oligonucleotide
aacuagaaaaugaguuugu

SEQ ID NO: 416238 - RNA, 19 nt, Artificial Sequence
  Description of Artificial Sequence: Synthetic oligonucleotide
aucccucacgaagagaauc

SEQ ID NO: 416239 - RNA, 19 nt, Artificial Sequence
  Description of Artificial Sequence: Synthetic oligonucleotide
ugucaaaaggucaccuuuu

SEQ ID NO: 416240 - RNA, 19 nt, Artificial Sequence
  Description of Artificial Sequence: Synthetic oligonucleotide
ucuuguaugcuagaacuuu

SEQ ID NO: 416241 - RNA, 19 nt, Artificial Sequence
  Description of Artificial Sequence: Synthetic oligonucleotide
ggacgacagaaauaaagug

SEQ ID NO: 416242 - RNA, 19 nt, Artificial Sequence
  Description of Artificial Sequence: Synthetic oligonucleotide
uguauuuauauagcgccuu

SEQ ID NO: 416243 - RNA, 19 nt, Artificial Sequence
  Description of Artificial Sequence: Synthetic oligonucleotide
cuagcucugugcgucaagg

SEQ ID NO: 416244 - RNA, 19 nt, Artificial Sequence
  Description of Artificial Sequence: Synthetic oligonucleotide
cagaucugcugacagacuc

SEQ ID NO: 416245 - RNA, 19 nt, Artificial Sequence
  Description of Artificial Sequence: Synthetic oligonucleotide
uguuacaaaucugcuuaug

SEQ ID NO: 416246 - RNA, 19 nt, Artificial Sequence
  Description of Artificial Sequence: Synthetic oligonucleotide
cauacucacaggcaaagaa

SEQ ID NO: 416247 - RNA, 19 nt, Artificial Sequence
  Description of Artificial Sequence: Synthetic oligonucleotide
uucuguccuaauauacaaa

SEQ ID NO: 416248 - RNA, 19 nt, Artificial Sequence
  Description of Artificial Sequence: Synthetic oligonucleotide
gugaggucuuccuacggcc

SEQ ID NO: 416249 - RNA, 19 nt, Artificial Sequence
  Description of Artificial Sequence: Synthetic oligonucleotide
uuagcuaagggacccuguu

SEQ ID NO: 416250 - RNA, 19 nt, Artificial Sequence
  Description of Artificial Sequence: Synthetic oligonucleotide
aagagugcagcgugaugga

SEQ ID NO: 416251 - RNA, 19 nt, Artificial Sequence
  Description of Artificial Sequence: Synthetic oligonucleotide
ucugcuagcucugugcguc

SEQ ID NO: 416252 - RNA, 19 nt, Artificial Sequence
  Description of Artificial Sequence: Synthetic oligonucleotide
uuucccgaaauggacgaca

SEQ ID NO: 416253 - RNA, 19 nt, Artificial Sequence
  Description of Artificial Sequence: Synthetic oligonucleotide
acaguuaaguucacuggag

SEQ ID NO: 416254 - RNA, 19 nt, Artificial Sequence
  Description of Artificial Sequence: Synthetic oligonucleotide
guauuacucccauuuacaa

SEQ ID NO: 416255 - RNA, 19 nt, Artificial Sequence
  Description of Artificial Sequence: Synthetic oligonucleotide
uuugucaaaaggucaccuu

SEQ ID NO: 416256 - RNA, 19 nt, Artificial Sequence
  Description of Artificial Sequence: Synthetic oligonucleotide
cucagacguacauggaaac

SEQ ID NO: 416257 - RNA, 19 nt, Artificial Sequence
  Description of Artificial Sequence: Synthetic oligonucleotide
ucccugacuguaacaaaca

SEQ ID NO: 416258 - RNA, 19 nt, Artificial Sequence
  Description of Artificial Sequence: Synthetic oligonucleotide
guugacuggaaacuguucu

SEQ ID NO: 416259 - RNA, 19 nt, Artificial Sequence
  Description of Artificial Sequence: Synthetic oligonucleotide
uacccuaauggcugaggcc

SEQ ID NO: 416260 - RNA, 19 nt, Artificial Sequence
  Description of Artificial Sequence: Synthetic oligonucleotide
gagagaaaacccuacccua

SEQ ID NO: 416261 - RNA, 19 nt, Artificial Sequence
  Description of Artificial Sequence: Synthetic oligonucleotide
uugcagaauaucagcaauu

SEQ ID NO: 416262 - RNA, 19 nt, Artificial Sequence
  Description of Artificial Sequence: Synthetic oligonucleotide
acuuuuaguuacgauaauu

SEQ ID NO: 416263 - RNA, 19 nt, Artificial Sequence
  Description of Artificial Sequence: Synthetic oligonucleotide
cuaauccaaaauagugcuc

SEQ ID NO: 416264 - RNA, 19 nt, Artificial Sequence
  Description of Artificial Sequence: Synthetic oligonucleotide
ugcucguugacuggaaacu

SEQ ID NO: 416265 - RNA, 19 nt, Artificial Sequence
  Description of Artificial Sequence: Synthetic oligonucleotide
ucguuguguucucugugca

SEQ ID NO: 416266 - RNA, 19 nt, Artificial Sequence
  Description of Artificial Sequence: Synthetic oligonucleotide
ugccucucagucaacaguu

SEQ ID NO: 416267 - RNA, 19 nt, Artificial Sequence
  Description of Artificial Sequence: Synthetic oligonucleotide
ucacgaagagaaucuguaa

SEQ ID NO: 416268 - RNA, 19 nt, Artificial Sequence
  Description of Artificial Sequence: Synthetic oligonucleotide
uaagcaucucgugugcgca

SEQ ID NO: 416269 - RNA, 19 nt, Artificial Sequence
  Description of Artificial Sequence: Synthetic oligonucleotide
acuauacccugacauuccu

SEQ ID NO: 416270 - RNA, 19 nt, Artificial Sequence
  Description of Artificial Sequence: Synthetic oligonucleotide
aacgauuuacagacauucu

SEQ ID NO: 416271 - RNA, 19 nt, Artificial Sequence
  Description of Artificial Sequence: Synthetic oligonucleotide
guucgcaacuugcaucugc

SEQ ID NO: 416272 - RNA, 19 nt, Artificial Sequence
  Description of Artificial Sequence: Synthetic oligonucleotide
aagccacacgccucagaag

SEQ ID NO: 416273 - RNA, 19 nt, Artificial Sequence
  Description of Artificial Sequence: Synthetic oligonucleotide
caaagguacuuuguguaug

SEQ ID NO: 416274 - RNA, 19 nt, Artificial Sequence
  Description of Artificial Sequence: Synthetic oligonucleotide
gauuagcuaagggacccug

SEQ ID NO: 416275 - RNA, 19 nt, Artificial Sequence
  Description of Artificial Sequence: Synthetic oligonucleotide
aaaaugcgugcugggcggg

SEQ ID NO: 416276 - RNA, 19 nt, Artificial Sequence
  Description of Artificial Sequence: Synthetic oligonucleotide
uccuuacacaaaguaucag

SEQ ID NO: 416277 - RNA, 19 nt, Artificial Sequence
  Description of Artificial Sequence: Synthetic oligonucleotide
acaucccucacgaagagaa

SEQ ID NO: 416278 - RNA, 19 nt, Artificial Sequence
  Description of Artificial Sequence: Synthetic oligonucleotide
guauuuauauagcgccuuc

SEQ ID NO: 416279 - RNA, 19 nt, Artificial Sequence
  Description of Artificial Sequence: Synthetic oligonucleotide
aagguacuuuguguauguc

SEQ ID NO: 416280 - RNA, 19 nt, Artificial Sequence
  Description of Artificial Sequence: Synthetic oligonucleotide
acgauaauucauagaaacu

SEQ ID NO: 416281 - RNA, 19 nt, Artificial Sequence
  Description of Artificial Sequence: Synthetic oligonucleotide
auauagcgccuucuucaag

SEQ ID NO: 416282 - RNA, 19 nt, Artificial Sequence
  Description of Artificial Sequence: Synthetic oligonucleotide
cuaugugaaagugaggucu

SEQ ID NO: 416283 - RNA, 19 nt, Artificial Sequence
  Description of Artificial Sequence: Synthetic oligonucleotide
ugaugcucagacguacaug

SEQ ID NO: 416284 - RNA, 19 nt, Artificial Sequence
  Description of Artificial Sequence: Synthetic oligonucleotide
gguaauaauagcagcacaa

SEQ ID NO: 416285 - RNA, 19 nt, Artificial Sequence
  Description of Artificial Sequence: Synthetic oligonucleotide
cagauaauuuaagaauuca

SEQ ID NO: 416286 - RNA, 19 nt, Artificial Sequence
  Description of Artificial Sequence: Synthetic oligonucleotide
aucacaaaccccagccagg

SEQ ID NO: 416287 - RNA, 19 nt, Artificial Sequence
  Description of Artificial Sequence: Synthetic oligonucleotide
cuaugacagaagccacacg

SEQ ID NO: 416288 - RNA, 19 nt, Artificial Sequence
  Description of Artificial Sequence: Synthetic oligonucleotide
uuacaagagggagacugaa

SEQ ID NO: 416289 - RNA, 19 nt, Artificial Sequence
  Description of Artificial Sequence: Synthetic oligonucleotide
ucagacguacauggaaacu

SEQ ID NO: 416290 - RNA, 19 nt, Artificial Sequence
  Description of Artificial Sequence: Synthetic oligonucleotide
ggcuuaacuuagaauauug

SEQ ID NO: 416291 - RNA, 19 nt, Artificial Sequence
  Description of Artificial Sequence: Synthetic oligonucleotide
uuacacggcggcuagccuu

SEQ ID NO: 416292 - RNA, 19 nt, Artificial Sequence
  Description of Artificial Sequence: Synthetic oligonucleotide
ucgugugcgcacagcagug

SEQ ID NO: 416293 - RNA, 19 nt, Artificial Sequence
  Description of Artificial Sequence: Synthetic oligonucleotide
aguggggcuuaacuuagaa

SEQ ID NO: 416294 - RNA, 19 nt, Artificial Sequence
  Description of Artificial Sequence: Synthetic oligonucleotide
aaugcgugcugggcggguc

SEQ ID NO: 416295 - RNA, 19 nt, Artificial Sequence
  Description of Artificial Sequence: Synthetic oligonucleotide
auguuuacuuagguccauc

SEQ ID NO: 416296 - RNA, 19 nt, Artificial Sequence
  Description of Artificial Sequence: Synthetic oligonucleotide
ucguugacuggaaacuguu

SEQ ID NO: 416297 - RNA, 19 nt, Artificial Sequence
  Description of Artificial Sequence: Synthetic oligonucleotide
cuccaauuaauccccacaa

SEQ ID NO: 416298 - RNA, 19 nt, Artificial Sequence
  Description of Artificial Sequence: Synthetic oligonucleotide
aaaacgauuuacagacauu

SEQ ID NO: 416299 - RNA, 19 nt, Artificial Sequence
  Description of Artificial Sequence: Synthetic oligonucleotide
gguuaagugacuugcccga

SEQ ID NO: 416300 - RNA, 19 nt, Artificial Sequence
  Description of Artificial Sequence: Synthetic oligonucleotide
cuuagaauauugacuuuua

SEQ ID NO: 416301 - RNA, 19 nt, Artificial Sequence
  Description of Artificial Sequence: Synthetic oligonucleotide
ucuugggcgggaucacgcc

SEQ ID NO: 416302 - RNA, 19 nt, Artificial Sequence
  Description of Artificial Sequence: Synthetic oligonucleotide
ugcagacuguccagcgcag

SEQ ID NO: 416303 - RNA, 19 nt, Artificial Sequence
  Description of Artificial Sequence: Synthetic oligonucleotide
aguaaugcuuggacuccac

SEQ ID NO: 416304 - RNA, 19 nt, Artificial Sequence
  Description of Artificial Sequence: Synthetic oligonucleotide
cucuaaugccgaguggcgc

SEQ ID NO: 416305 - RNA, 19 nt, Artificial Sequence
  Description of Artificial Sequence: Synthetic oligonucleotide
caaaucugcuuaugggaca

SEQ ID NO: 416306 - RNA, 19 nt, Artificial Sequence
  Description of Artificial Sequence: Synthetic oligonucleotide
gcucucacggcucugacuc

SEQ ID NO: 416307 - RNA, 19 nt, Artificial Sequence
  Description of Artificial Sequence: Synthetic oligonucleotide
agugcagcgugauggacua

SEQ ID NO: 416308 - RNA, 19 nt, Artificial Sequence
  Description of Artificial Sequence: Synthetic oligonucleotide
uucccucccuguacaaaca

SEQ ID NO: 416309 - RNA, 19 nt, Artificial Sequence
  Description of Artificial Sequence: Synthetic oligonucleotide
gguauuacucccauuuaca

SEQ ID NO: 416310 - RNA, 19 nt, Artificial Sequence
  Description of Artificial Sequence: Synthetic oligonucleotide
gacguacauggaaacuccc

SEQ ID NO: 416311 - RNA, 19 nt, Artificial Sequence
  Description of Artificial Sequence: Synthetic oligonucleotide
agagugcagcgugauggac

SEQ ID NO: 416312 - RNA, 19 nt, Artificial Sequence
  Description of Artificial Sequence: Synthetic oligonucleotide
cacgccucagaaguggggc

SEQ ID NO: 416313 - RNA, 19 nt, Artificial Sequence
  Description of Artificial Sequence: Synthetic oligonucleotide
ugcccgaggucacacaguu

SEQ ID NO: 416314 - RNA, 19 nt, Artificial Sequence
  Description of Artificial Sequence: Synthetic oligonucleotide
caguuaaguucacuggaga

SEQ ID NO: 416315 - RNA, 19 nt, Artificial Sequence
  Description of Artificial Sequence: Synthetic oligonucleotide
uagcuaagggacccuguua

SEQ ID NO: 416316 - RNA, 19 nt, Artificial Sequence
  Description of Artificial Sequence: Synthetic oligonucleotide
ugcgucaaggaaggcaacu

SEQ ID NO: 416317 - RNA, 19 nt, Artificial Sequence
  Description of Artificial Sequence: Synthetic oligonucleotide
ccuguuacaaaucugcuua

SEQ ID NO: 416318 - RNA, 19 nt, Artificial Sequence
  Description of Artificial Sequence: Synthetic oligonucleotide
auagugcucguugacugga

SEQ ID NO: 416319 - RNA, 19 nt, Artificial Sequence
  Description of Artificial Sequence: Synthetic oligonucleotide
caggacuaugugaaaguga

SEQ ID NO: 416320 - RNA, 19 nt, Artificial Sequence
  Description of Artificial Sequence: Synthetic oligonucleotide
ucaccucaaaaugcgugcu

SEQ ID NO: 416321 - RNA, 19 nt, Artificial Sequence
  Description of Artificial Sequence: Synthetic oligonucleotide
gcuccuaucuuaaguaacc

SEQ ID NO: 416322 - RNA, 19 nt, Artificial Sequence
  Description of Artificial Sequence: Synthetic oligonucleotide
acauaauuacacggcggcu

SEQ ID NO: 416323 - RNA, 19 nt, Artificial Sequence
  Description of Artificial Sequence: Synthetic oligonucleotide
cuaucuuaaguaaccuucu

SEQ ID NO: 416324 - RNA, 19 nt, Artificial Sequence
  Description of Artificial Sequence: Synthetic oligonucleotide
cacaggcaaagaacaauca

SEQ ID NO: 416325 - RNA, 19 nt, Artificial Sequence
  Description of Artificial Sequence: Synthetic oligonucleotide
gaagcccgauuagcuaagg

SEQ ID NO: 416326 - RNA, 19 nt, Artificial Sequence
  Description of Artificial Sequence: Synthetic oligonucleotide
gaguauccuugacuuccug

SEQ ID NO: 416327 - RNA, 19 nt, Artificial Sequence
  Description of Artificial Sequence: Synthetic oligonucleotide
ugcgaagcccgauuagcua

SEQ ID NO: 416328 - RNA, 19 nt, Artificial Sequence
  Description of Artificial Sequence: Synthetic oligonucleotide
ucgcaacuugcaucugccc

SEQ ID NO: 416329 - RNA, 19 nt, Artificial Sequence
  Description of Artificial Sequence: Synthetic oligonucleotide
caaagagugcagcgugaug

SEQ ID NO: 416330 - RNA, 19 nt, Artificial Sequence
  Description of Artificial Sequence: Synthetic oligonucleotide
auuacacggcggcuagccu

SEQ ID NO: 416331 - RNA, 19 nt, Artificial Sequence
  Description of Artificial Sequence: Synthetic oligonucleotide
cuacggccaucaaggagag

SEQ ID NO: 416332 - RNA, 19 nt, Artificial Sequence
  Description of Artificial Sequence: Synthetic oligonucleotide
ucacggcucugacucugcc

SEQ ID NO: 416333 - RNA, 19 nt, Artificial Sequence
  Description of Artificial Sequence: Synthetic oligonucleotide
ucucacggcucugacucug

SEQ ID NO: 416334 - RNA, 19 nt, Artificial Sequence
  Description of Artificial Sequence: Synthetic oligonucleotide
ggccguaaggccacuauag

SEQ ID NO: 416335 - RNA, 19 nt, Artificial Sequence
  Description of Artificial Sequence: Synthetic oligonucleotide
uuuucgcaaccgugugaug

SEQ ID NO: 416336 - RNA, 19 nt, Artificial Sequence
  Description of Artificial Sequence: Synthetic oligonucleotide
ugugcaaugcuggcagauc

SEQ ID NO: 416337 - RNA, 19 nt, Artificial Sequence
  Description of Artificial Sequence: Synthetic oligonucleotide
cugaguugcaguagcaggu

SEQ ID NO: 416338 - RNA, 19 nt, Artificial Sequence
  Description of Artificial Sequence: Synthetic oligonucleotide
aggggcucaucaacaggcc

SEQ ID NO: 416339 - RNA, 19 nt, Artificial Sequence
  Description of Artificial Sequence: Synthetic oligonucleotide
auagcgccuucuucaagaa

SEQ ID NO: 416340 - RNA, 19 nt, Artificial Sequence
  Description of Artificial Sequence: Synthetic oligonucleotide
aggacuacuucugcugaca

SEQ ID NO: 416341 - RNA, 19 nt, Artificial Sequence
  Description of Artificial Sequence: Synthetic oligonucleotide
aagccaacuuuaauagaua

SEQ ID NO: 416342 - RNA, 19 nt, Artificial Sequence
  Description of Artificial Sequence: Synthetic oligonucleotide
gacuuugacuauagucuuc

SEQ ID NO: 416343 - RNA, 19 nt, Artificial Sequence
  Description of Artificial Sequence: Synthetic oligonucleotide
cauagaaacuucuguccua

SEQ ID NO: 416344 - RNA, 19 nt, Artificial Sequence
  Description of Artificial Sequence: Synthetic oligonucleotide
acgugagaagguuuuccuu

SEQ ID NO: 416345 - RNA, 19 nt, Artificial Sequence
  Description of Artificial Sequence: Synthetic oligonucleotide
cacuauagcacauuuccuu

SEQ ID NO: 416346 - RNA, 19 nt, Artificial Sequence
  Description of Artificial Sequence: Synthetic oligonucleotide
gucugcgaagcccgauuag

SEQ ID NO: 416347 - RNA, 19 nt, Artificial Sequence
  Description of Artificial Sequence: Synthetic oligonucleotide
uaauuacacggcggcuagc

SEQ ID NO: 416348 - RNA, 19 nt, Artificial Sequence
  Description of Artificial Sequence: Synthetic oligonucleotide
uuccuacggccaucaagga

SEQ ID NO: 416349 - RNA, 19 nt, Artificial Sequence
  Description of Artificial Sequence: Synthetic oligonucleotide
ccaacccaaacccuguaug

SEQ ID NO: 416350 - RNA, 19 nt, Artificial Sequence
  Description of Artificial Sequence: Synthetic oligonucleotide
gacuacuucugcugacaaa

SEQ ID NO: 416351 - RNA, 19 nt, Artificial Sequence
  Description of Artificial Sequence: Synthetic oligonucleotide
ugaguugcaguagcaggua

SEQ ID NO: 416352 - RNA, 19 nt, Artificial Sequence
  Description of Artificial Sequence: Synthetic oligonucleotide
cuaaugccgaguggcgccc

SEQ ID NO: 416353 - RNA, 19 nt, Artificial Sequence
  Description of Artificial Sequence: Synthetic oligonucleotide
ucccgaaauggacgacaga

SEQ ID NO: 416354 - RNA, 19 nt, Artificial Sequence
  Description of Artificial Sequence: Synthetic oligonucleotide
cacgaagagaaucuguaau

SEQ ID NO: 416355 - RNA, 19 nt, Artificial Sequence
  Description of Artificial Sequence: Synthetic oligonucleotide
aauggacgacagaaauaaa

SEQ ID NO: 416356 - RNA, 19 nt, Artificial Sequence
  Description of Artificial Sequence: Synthetic oligonucleotide
gcccgauuagcuaagggac

SEQ ID NO: 416357 - RNA, 19 nt, Artificial Sequence
  Description of Artificial Sequence: Synthetic oligonucleotide
acguacauggaaacucccu

SEQ ID NO: 416358 - RNA, 19 nt, Artificial Sequence
  Description of Artificial Sequence: Synthetic oligonucleotide
guccuaauauacaaaacuu

SEQ ID NO: 416359 - RNA, 19 nt, Artificial Sequence
  Description of Artificial Sequence: Synthetic oligonucleotide
caaauaagccaacuuuaau

SEQ ID NO: 416360 - RNA, 19 nt, Artificial Sequence
  Description of Artificial Sequence: Synthetic oligonucleotide
ccucaaaaugcgugcuggg

SEQ ID NO: 416361 - RNA, 19 nt, Artificial Sequence
  Description of Artificial Sequence: Synthetic oligonucleotide
cccgauuagcuaagggacc

SEQ ID NO: 416362 - RNA, 19 nt, Artificial Sequence
  Description of Artificial Sequence: Synthetic oligonucleotide
gguauucccaaaauugacu

SEQ ID NO: 416363 - RNA, 19 nt, Artificial Sequence
  Description of Artificial Sequence: Synthetic oligonucleotide
acucaacugcucccaucca

SEQ ID NO: 416364 - RNA, 19 nt, Artificial Sequence
  Description of Artificial Sequence: Synthetic oligonucleotide
uaaguucacuggagagcua

SEQ ID NO: 416365 - RNA, 19 nt, Artificial Sequence
  Description of Artificial Sequence: Synthetic oligonucleotide
cugugcgucaaggaaggca

SEQ ID NO: 416366 - RNA, 19 nt, Artificial Sequence
  Description of Artificial Sequence: Synthetic oligonucleotide
ccgauuagcuaagggaccc

SEQ ID NO: 416367 - RNA, 19 nt, Artificial Sequence
  Description of Artificial Sequence: Synthetic oligonucleotide
gccguaaggccacuauagc

SEQ ID NO: 416368 - RNA, 19 nt, Artificial Sequence
  Description of Artificial Sequence: Synthetic oligonucleotide
caacccaaacccuguaugu

SEQ ID NO: 416369 - RNA, 19 nt, Artificial Sequence
  Description of Artificial Sequence: Synthetic oligonucleotide
ggacuaugugaaagugagg

SEQ ID NO: 416370 - RNA, 19 nt, Artificial Sequence
  Description of Artificial Sequence: Synthetic oligonucleotide
gaccacucaacugcuccca

SEQ ID NO: 416371 - RNA, 19 nt, Artificial Sequence
  Description of Artificial Sequence: Synthetic oligonucleotide
acgccucagaaguggggcu

SEQ ID NO: 416372 - RNA, 19 nt, Artificial Sequence
  Description of Artificial Sequence: Synthetic oligonucleotide
agaguauccuugacuuccu

SEQ ID NO: 416373 - RNA, 19 nt, Artificial Sequence
  Description of Artificial Sequence: Synthetic oligonucleotide
gaauuuggagacugucauu

SEQ ID NO: 416374 - RNA, 19 nt, Artificial Sequence
  Description of Artificial Sequence: Synthetic oligonucleotide
uuuugccguuugccucuca

SEQ ID NO: 416375 - RNA, 19 nt, Artificial Sequence
  Description of Artificial Sequence: Synthetic oligonucleotide
aggccguaaggccacuaua

SEQ ID NO: 416376 - RNA, 19 nt, Artificial Sequence
  Description of Artificial Sequence: Synthetic oligonucleotide
cuuaugggacaaacagaua

SEQ ID NO: 416377 - RNA, 19 nt, Artificial Sequence
  Description of Artificial Sequence: Synthetic oligonucleotide
cuuuucgcaaccgugugau

SEQ ID NO: 416378 - RNA, 19 nt, Artificial Sequence
  Description of Artificial Sequence: Synthetic oligonucleotide
ccaguaaugcuuggacucc

SEQ ID NO: 416379 - RNA, 19 nt, Artificial Sequence
  Description of Artificial Sequence: Synthetic oligonucleotide
cuugggcgggaucacgcca

SEQ ID NO: 416380 - RNA, 19 nt, Artificial Sequence
  Description of Artificial Sequence: Synthetic oligonucleotide
agcaucucgugugcgcaca

SEQ ID NO: 416381 - RNA, 19 nt, Artificial Sequence
  Description of Artificial Sequence: Synthetic oligonucleotide
uugcaucugcccuccucau

SEQ ID NO: 416382 - RNA, 19 nt, Artificial Sequence
  Description of Artificial Sequence: Synthetic oligonucleotide
cccgaaauggacgacagaa

SEQ ID NO: 416383 - RNA, 19 nt, Artificial Sequence
  Description of Artificial Sequence: Synthetic oligonucleotide
gcgaagcccgauuagcuaa

SEQ ID NO: 416384 - RNA, 19 nt, Artificial Sequence
  Description of Artificial Sequence: Synthetic oligonucleotide
cacuuacuauacccugaca

SEQ ID NO: 416385 - RNA, 19 nt, Artificial Sequence
  Description of Artificial Sequence: Synthetic oligonucleotide
caucucgugugcgcacagc

SEQ ID NO: 416386 - RNA, 19 nt, Artificial Sequence
  Description of Artificial Sequence: Synthetic oligonucleotide
ccugagcucaaagguacag

SEQ ID NO: 416387 - RNA, 19 nt, Artificial Sequence
  Description of Artificial Sequence: Synthetic oligonucleotide
cgaguggcgcccaugguac

SEQ ID NO: 416388 - RNA, 19 nt, Artificial Sequence
  Description of Artificial Sequence: Synthetic oligonucleotide
cugcgaagcccgauuagcu

SEQ ID NO: 416389 - RNA, 19 nt, Artificial Sequence
  Description of Artificial Sequence: Synthetic oligonucleotide
caguaguccuuucccugca

SEQ ID NO: 416390 - RNA, 19 nt, Artificial Sequence
  Description of Artificial Sequence: Synthetic oligonucleotide
agucacugccauaccacuu

SEQ ID NO: 416391 - RNA, 19 nt, Artificial Sequence
  Description of Artificial Sequence: Synthetic oligonucleotide
ccucguuguguucucugug

SEQ ID NO: 416392 - RNA, 19 nt, Artificial Sequence
  Description of Artificial Sequence: Synthetic oligonucleotide
gaguugcaguagcagguau

SEQ ID NO: 416393 - RNA, 19 nt, Artificial Sequence
  Description of Artificial Sequence: Synthetic oligonucleotide
aguccccaacccaaacccu

SEQ ID NO: 416394 - RNA, 19 nt, Artificial Sequence
  Description of Artificial Sequence: Synthetic oligonucleotide
ggagacugucauuaggauu

SEQ ID NO: 416395 - RNA, 19 nt, Artificial Sequence
  Description of Artificial Sequence: Synthetic oligonucleotide
gcucagacguacauggaaa

SEQ ID NO: 416396 - RNA, 19 nt, Artificial Sequence
  Description of Artificial Sequence: Synthetic oligonucleotide
ggacuacuucugcugacaa

SEQ ID NO: 416397 - RNA, 19 nt, Artificial Sequence
  Description of Artificial Sequence: Synthetic oligonucleotide
caguaaugcuuggacucca

SEQ ID NO: 416398 - RNA, 19 nt, Artificial Sequence
  Description of Artificial Sequence: Synthetic oligonucleotide
gccccagcaaacauguaca

SEQ ID NO: 416399 - RNA, 19 nt, Artificial Sequence
  Description of Artificial Sequence: Synthetic oligonucleotide
ccuacccuaauggcugagg

SEQ ID NO: 416400 - RNA, 19 nt, Artificial Sequence
  Description of Artificial Sequence: Synthetic oligonucleotide
cuggcucuuguaugcuaga

SEQ ID NO: 416401 - RNA, 19 nt, Artificial Sequence
  Description of Artificial Sequence: Synthetic oligonucleotide
gguccaucugcaacuaaaa

SEQ ID NO: 416402 - RNA, 19 nt, Artificial Sequence
  Description of Artificial Sequence: Synthetic oligonucleotide
ggcgggaucacgccaaccu

SEQ ID NO: 416403 - RNA, 19 nt, Artificial Sequence
  Description of Artificial Sequence: Synthetic oligonucleotide
caguagcagguauucccaa

SEQ ID NO: 416404 - RNA, 19 nt, Artificial Sequence
  Description of Artificial Sequence: Synthetic oligonucleotide
guggggcuuaacuuagaau

SEQ ID NO: 416405 - RNA, 19 nt, Artificial Sequence
  Description of Artificial Sequence: Synthetic oligonucleotide
ggggcucaucaacaggcca

SEQ ID NO: 416406 - RNA, 19 nt, Artificial Sequence
  Description of Artificial Sequence: Synthetic oligonucleotide
ucgcaaccgugugaugaau

SEQ ID NO: 416407 - RNA, 19 nt, Artificial Sequence
  Description of Artificial Sequence: Synthetic oligonucleotide
ugcuagcucugugcgucaa

SEQ ID NO: 416408 - RNA, 19 nt, Artificial Sequence
  Description of Artificial Sequence: Synthetic oligonucleotide
ugggcgggucacccuuuuc

SEQ ID NO: 416409 - RNA, 19 nt, Artificial Sequence
  Description of Artificial Sequence: Synthetic oligonucleotide
gcccucccgauucugaaaa

SEQ ID NO: 416410 - RNA, 19 nt, Artificial Sequence
  Description of Artificial Sequence: Synthetic oligonucleotide
caagaaccuuaaaacgauu

SEQ ID NO: 416411 - RNA, 19 nt, Artificial Sequence
  Description of Artificial Sequence: Synthetic oligonucleotide
gaggccguaaggccacuau

SEQ ID NO: 416412 - RNA, 19 nt, Artificial Sequence
  Description of Artificial Sequence: Synthetic oligonucleotide
ugacucugccaugcuccuc

SEQ ID NO: 416413 - RNA, 19 nt, Artificial Sequence
  Description of Artificial Sequence: Synthetic oligonucleotide
cuccuaucuuaaguaaccu

SEQ ID NO: 416414 - RNA, 19 nt, Artificial Sequence
  Description of Artificial Sequence: Synthetic oligonucleotide
gaguggcgcccaugguaca

SEQ ID NO: 416415 - RNA, 19 nt, Artificial Sequence
  Description of Artificial Sequence: Synthetic oligonucleotide
cuaauggcugaggccguaa

SEQ ID NO: 416416 - RNA, 19 nt, Artificial Sequence
  Description of Artificial Sequence: Synthetic oligonucleotide
ccauguggcuccuaucuua

SEQ ID NO: 416417 - RNA, 19 nt, Artificial Sequence
  Description of Artificial Sequence: Synthetic oligonucleotide
ggucuuccuacggccauca

SEQ ID NO: 416418 - RNA, 19 nt, Artificial Sequence
  Description of Artificial Sequence: Synthetic oligonucleotide
cguugacuggaaacuguuc

SEQ ID NO: 416419 - RNA, 19 nt, Artificial Sequence
  Description of Artificial Sequence: Synthetic oligonucleotide
ccacucgcccucccgauuc

SEQ ID NO: 416420 - RNA, 19 nt, Artificial Sequence
  Description of Artificial Sequence: Synthetic oligonucleotide
cgaaauggacgacagaaau

SEQ ID NO: 416421 - RNA, 19 nt, Artificial Sequence
  Description of Artificial Sequence: Synthetic oligonucleotide
ugcgaguuguugggcccaa

SEQ ID NO: 416422 - RNA, 19 nt, Artificial Sequence
  Description of Artificial Sequence: Synthetic oligonucleotide
ccguuugccucucagucaa

SEQ ID NO: 416423 - RNA, 19 nt, Artificial Sequence
  Description of Artificial Sequence: Synthetic oligonucleotide
cgaagcccgauuagcuaag

SEQ ID NO: 416424 - RNA, 19 nt, Artificial Sequence
  Description of Artificial Sequence: Synthetic oligonucleotide
ccgaaauggacgacagaaa

SEQ ID NO: 416425 - RNA, 19 nt, Artificial Sequence
  Description of Artificial Sequence: Synthetic oligonucleotide
ggccacuauagcacauuuc

SEQ ID NO: 416426 - RNA, 19 nt, Artificial Sequence
  Description of Artificial Sequence: Synthetic oligonucleotide
gagaagcuuggagaagcuu

SEQ ID NO: 416427 - RNA, 19 nt, Artificial Sequence
  Description of Artificial Sequence: Synthetic oligonucleotide
cacaucccucacgaagaga

SEQ ID NO: 416428 - RNA, 19 nt, Artificial Sequence
  Description of Artificial Sequence: Synthetic oligonucleotide
aggcgaauuuggagacugu

SEQ ID NO: 416429 - RNA, 19 nt, Artificial Sequence
  Description of Artificial Sequence: Synthetic oligonucleotide
caauuguauuaagcagaua

SEQ ID NO: 416430 - RNA, 19 nt, Artificial Sequence
  Description of Artificial Sequence: Synthetic oligonucleotide
accgugugaugaauuucuu

SEQ ID NO: 416431 - RNA, 19 nt, Artificial Sequence
  Description of Artificial Sequence: Synthetic oligonucleotide
gcaaccgugugaugaauuu

SEQ ID NO: 416432 - RNA, 19 nt, Artificial Sequence
  Description of Artificial Sequence: Synthetic oligonucleotide
cugcuagcucugugcguca

SEQ ID NO: 416433 - RNA, 19 nt, Artificial Sequence
  Description of Artificial Sequence: Synthetic oligonucleotide
agcgcagaccugagcugug

SEQ ID NO: 416434 - RNA, 19 nt, Artificial Sequence
  Description of Artificial Sequence: Synthetic oligonucleotide
gugcuccauccacccuugc

SEQ ID NO: 416435 - RNA, 19 nt, Artificial Sequence
  Description of Artificial Sequence: Synthetic oligonucleotide
gcaucuuguugcauguagu

SEQ ID NO: 416436 - RNA, 19 nt, Artificial Sequence
  Description of Artificial Sequence: Synthetic oligonucleotide
gcugaccaacuguucccuc

SEQ ID NO: 416437 - RNA, 19 nt, Artificial Sequence
  Description of Artificial Sequence: Synthetic oligonucleotide
gugcgucaaggaaggcaac

SEQ ID NO: 416438 - RNA, 19 nt, Artificial Sequence
  Description of Artificial Sequence: Synthetic oligonucleotide
gccauaccacuugaugcuc

SEQ ID NO: 416439 - RNA, 19 nt, Artificial Sequence
  Description of Artificial Sequence: Synthetic oligonucleotide
ggcuagccuuguucgcaac

SEQ ID NO: 416440 - RNA, 19 nt, Artificial Sequence
  Description of Artificial Sequence: Synthetic oligonucleotide
gcucaucaacaggccaccc

SEQ ID NO: 416441 - RNA, 19 nt, Artificial Sequence
  Description of Artificial Sequence: Synthetic oligonucleotide
cugcgaguuguugggccca

SEQ ID NO: 416442 - RNA, 19 nt, Artificial Sequence
  Description of Artificial Sequence: Synthetic oligonucleotide
cccauccacaagguaagca

SEQ ID NO: 416443 - RNA, 19 nt, Artificial Sequence
  Description of Artificial Sequence: Synthetic oligonucleotide
cacaaaguaucaggacuau

SEQ ID NO: 416444 - RNA, 19 nt, Artificial Sequence
  Description of Artificial Sequence: Synthetic oligonucleotide
ggggcuuaacuuagaauau

SEQ ID NO: 416445 - RNA, 19 nt, Artificial Sequence
  Description of Artificial Sequence: Synthetic oligonucleotide
uacggccaucaaggagaga

SEQ ID NO: 416446 - RNA, 19 nt, Artificial Sequence
  Description of Artificial Sequence: Synthetic oligonucleotide
ccacuauagcacauuuccu

SEQ ID NO: 416447 - RNA, 19 nt, Artificial Sequence
  Description of Artificial Sequence: Synthetic oligonucleotide
ggggaggcuucagaaacua

SEQ ID NO: 416448 - RNA, 19 nt, Artificial Sequence
  Description of Artificial Sequence: Synthetic oligonucleotide
caggcacgugagaagguuu

SEQ ID NO: 416449 - RNA, 19 nt, Artificial Sequence
  Description of Artificial Sequence: Synthetic oligonucleotide
ccgaguggcgcccauggua

SEQ ID NO: 416450 - RNA, 19 nt, Artificial Sequence
  Description of Artificial Sequence: Synthetic oligonucleotide
ggaaacuguucuggaccaa

SEQ ID NO: 416451 - RNA, 19 nt, Artificial Sequence
  Description of Artificial Sequence: Synthetic oligonucleotide
caucugcccuccucauacu

SEQ ID NO: 416452 - RNA, 19 nt, Artificial Sequence
  Description of Artificial Sequence: Synthetic oligonucleotide
cgcaacuugcaucugcccu

SEQ ID NO: 416453 - RNA, 19 nt, Artificial Sequence
  Description of Artificial Sequence: Synthetic oligonucleotide
ccuuguucgcaacuugcau

SEQ ID NO: 416454 - RNA, 19 nt, Artificial Sequence
  Description of Artificial Sequence: Synthetic oligonucleotide
gggcuuaacuuagaauauu

SEQ ID NO: 416455 - RNA, 19 nt, Artificial Sequence
  Description of Artificial Sequence: Synthetic oligonucleotide
cccuguuacaaaucugcuu

SEQ ID NO: 416456 - RNA, 19 nt, Artificial Sequence
  Description of Artificial Sequence: Synthetic oligonucleotide
gggcgggaucacgccaacc

SEQ ID NO: 416457 - RNA, 19 nt, Artificial Sequence
  Description of Artificial Sequence: Synthetic oligonucleotide
gguacagauggaggcgaau

SEQ ID NO: 416458 - RNA, 19 nt, Artificial Sequence
  Description of Artificial Sequence: Synthetic oligonucleotide
gugcagcgugauggacuac

SEQ ID NO: 416459 - RNA, 19 nt, Artificial Sequence
  Description of Artificial Sequence: Synthetic oligonucleotide
cauccgcccggcgccaucu

SEQ ID NO: 416460 - RNA, 19 nt, Artificial Sequence
  Description of Artificial Sequence: Synthetic oligonucleotide
cguuugccucucagucaac

SEQ ID NO: 416461 - RNA, 19 nt, Artificial Sequence
  Description of Artificial Sequence: Synthetic oligonucleotide
gcgccuucuucaagaaccu

SEQ ID NO: 416462 - RNA, 19 nt, Artificial Sequence
  Description of Artificial Sequence: Synthetic oligonucleotide
gcgggaucacgccaaccuu

SEQ ID NO: 416463 - RNA, 19 nt, Artificial Sequence
  Description of Artificial Sequence: Synthetic oligonucleotide
ccccuuggggagccaagaa

SEQ ID NO: 416464 - RNA, 19 nt, Artificial Sequence
  Description of Artificial Sequence: Synthetic oligonucleotide
cccaacccaaacccuguau

SEQ ID NO: 416465 - RNA, 19 nt, Artificial Sequence
  Description of Artificial Sequence: Synthetic oligonucleotide
gcgugcugggcgggucacc

SEQ ID NO: 416466 - RNA, 19 nt, Artificial Sequence
  Description of Artificial Sequence: Synthetic oligonucleotide
ccuaauggcugaggccgua

SEQ ID NO: 416467 - RNA, 19 nt, Artificial Sequence
  Description of Artificial Sequence: Synthetic oligonucleotide
cggccaucaaggagagaaa

SEQ ID NO: 416468 - RNA, 19 nt, Artificial Sequence
  Description of Artificial Sequence: Synthetic oligonucleotide
ccauccgcccggcgccauc

SEQ ID NO: 416469 - RNA, 19 nt, Artificial Sequence
  Description of Artificial Sequence: Synthetic oligonucleotide
cggcuagccuuguucgcaa

SEQ ID NO: 416470 - RNA, 19 nt, Artificial Sequence
  Description of Artificial Sequence: Synthetic oligonucleotide
ggaucacgccaaccuucuu

SEQ ID NO: 416471 - RNA, 19 nt, Artificial Sequence
  Description of Artificial Sequence: Synthetic oligonucleotide
cugggcgggucacccuuuu

SEQ ID NO: 416472 - RNA, 19 nt, Artificial Sequence
  Description of Artificial Sequence: Synthetic oligonucleotide
ccaggcacgugagaagguu

SEQ ID NO: 416473 - RNA, 19 nt, Artificial Sequence
  Description of Artificial Sequence: Synthetic oligonucleotide
gcgaguuguugggcccaaa

SEQ ID NO: 416474 - RNA, 19 nt, Artificial Sequence
  Description of Artificial Sequence: Synthetic oligonucleotide
cugaggccguaaggccacu

SEQ ID NO: 416475 - RNA, 19 nt, Artificial Sequence
  Description of Artificial Sequence: Synthetic oligonucleotide
gcccgaggucacacaguua

SEQ ID NO: 416476 - RNA, 19 nt, Artificial Sequence
  Description of Artificial Sequence: Synthetic oligonucleotide
cgauuagcuaagggacccu

SEQ ID NO: 416477 - RNA, 19 nt, Artificial Sequence
  Description of Artificial Sequence: Synthetic oligonucleotide
gcugggcgggucacccuuu

SEQ ID NO: 416478 - RNA, 19 nt, Artificial Sequence
  Description of Artificial Sequence: Synthetic oligonucleotide
aaacacauaguguugaccc

SEQ ID NO: 416479 - RNA, 19 nt, Artificial Sequence
  Description of Artificial Sequence: Synthetic oligonucleotide
aacaguuagaaaucaaggc

SEQ ID NO: 416480 - RNA, 19 nt, Artificial Sequence
  Description of Artificial Sequence: Synthetic oligonucleotide
aaugacuauagguaguagc

SEQ ID NO: 416481 - RNA, 19 nt, Artificial Sequence
  Description of Artificial Sequence: Synthetic oligonucleotide
aaacaagcgaucaaaaugc

SEQ ID NO: 416482 - RNA, 19 nt, Artificial Sequence
  Description of Artificial Sequence: Synthetic oligonucleotide
cuagcauugacuuaggucc

SEQ ID NO: 416483 - RNA, 19 nt, Artificial Sequence
  Description of Artificial Sequence: Synthetic oligonucleotide
auugauguaaaacugugac

SEQ ID NO: 416484 - RNA, 19 nt, Artificial Sequence
  Description of Artificial Sequence: Synthetic oligonucleotide
aaugcgagcaccuugaaca

SEQ ID NO: 416485 - RNA, 19 nt, Artificial Sequence
  Description of Artificial Sequence: Synthetic oligonucleotide
aaugcaaaacaccugucac

SEQ ID NO: 416486 - RNA, 19 nt, Artificial Sequence
  Description of Artificial Sequence: Synthetic oligonucleotide
uuauuuaggaguuugagaa

SEQ ID NO: 416487 - RNA, 19 nt, Artificial Sequence
  Description of Artificial Sequence: Synthetic oligonucleotide
aacuauguugcuuaagguc

SEQ ID NO: 416488 - RNA, 19 nt, Artificial Sequence
  Description of Artificial Sequence: Synthetic oligonucleotide
ugcaauuucaaacugaauc

SEQ ID NO: 416489 - RNA, 19 nt, Artificial Sequence
  Description of Artificial Sequence: Synthetic oligonucleotide
aaaucuaacggucucaagu

SEQ ID NO: 416490 - RNA, 19 nt, Artificial Sequence
  Description of Artificial Sequence: Synthetic oligonucleotide
uuaacaguuagaaaucaag

SEQ ID NO: 416491 - RNA, 19 nt, Artificial Sequence
  Description of Artificial Sequence: Synthetic oligonucleotide
uaacaguuagaaaucaagg

SEQ ID NO: 416492 - RNA, 19 nt, Artificial Sequence
  Description of Artificial Sequence: Synthetic oligonucleotide
aucugcuuaagucagggcc

SEQ ID NO: 416493 - RNA, 19 nt, Artificial Sequence
  Description of Artificial Sequence: Synthetic oligonucleotide
uuuacuaaguucuaacuca

SEQ ID NO: 416494 - RNA, 19 nt, Artificial Sequence
  Description of Artificial Sequence: Synthetic oligonucleotide
aguuccaaacuguacagcc

SEQ ID NO: 416495 - RNA, 19 nt, Artificial Sequence
  Description of Artificial Sequence: Synthetic oligonucleotide
cauaguaacagguucuucg

SEQ ID NO: 416496 - RNA, 19 nt, Artificial Sequence
  Description of Artificial Sequence: Synthetic oligonucleotide
aauuuacauaauuagguau

SEQ ID NO: 416497 - RNA, 19 nt, Artificial Sequence
  Description of Artificial Sequence: Synthetic oligonucleotide
aacucgaucaccgcaagcc

SEQ ID NO: 416498 - RNA, 19 nt, Artificial Sequence
  Description of Artificial Sequence: Synthetic oligonucleotide
aguaacagguucuucgacc

SEQ ID NO: 416499 - RNA, 19 nt, Artificial Sequence
  Description of Artificial Sequence: Synthetic oligonucleotide
ucuagcauggcuauucugc

SEQ ID NO: 416500 - RNA, 19 nt, Artificial Sequence
  Description of Artificial Sequence: Synthetic oligonucleotide
aaugugugagucaggaucc

SEQ ID NO: 416501 - RNA, 19 nt, Artificial Sequence
  Description of Artificial Sequence: Synthetic oligonucleotide
uaaucgacaauaaauuugu

SEQ ID NO: 416502 - RNA, 19 nt, Artificial Sequence
  Description of Artificial Sequence: Synthetic oligonucleotide
gugaguuucacaguaaucg

SEQ ID NO: 416503 - RNA, 19 nt, Artificial Sequence
  Description of Artificial Sequence: Synthetic oligonucleotide
uuauugauguaaaacugug

SEQ ID NO: 416504 - RNA, 19 nt, Artificial Sequence
  Description of Artificial Sequence: Synthetic oligonucleotide
uuuauuuaggaguuugaga

SEQ ID NO: 416505 - RNA, 19 nt, Artificial Sequence
  Description of Artificial Sequence: Synthetic oligonucleotide
augacuauagguaguagcc

SEQ ID NO: 416506 - RNA, 19 nt, Artificial Sequence
  Description of Artificial Sequence: Synthetic oligonucleotide
aguaacauacccaucaauc

SEQ ID NO: 416507 - RNA, 19 nt, Artificial Sequence
  Description of Artificial Sequence: Synthetic oligonucleotide
agugccgacuuauucaggc

SEQ ID NO: 416508 - RNA, 19 nt, Artificial Sequence
  Description of Artificial Sequence: Synthetic oligonucleotide
agcuacucggaacuuagcc

SEQ ID NO: 416509 - RNA, 19 nt, Artificial Sequence
  Description of Artificial Sequence: Synthetic oligonucleotide
uaaguucuaacucaacuuc

SEQ ID NO: 416510 - RNA, 19 nt, Artificial Sequence
  Description of Artificial Sequence: Synthetic oligonucleotide
uacuaguugaaacaaguaa

SEQ ID NO: 416511 - RNA, 19 nt, Artificial Sequence
  Description of Artificial Sequence: Synthetic oligonucleotide
guauugauuguacagugcc

SEQ ID NO: 416512 - RNA, 19 nt, Artificial Sequence
  Description of Artificial Sequence: Synthetic oligonucleotide
acuaaguucuaacucaacu

SEQ ID NO: 416513 - RNA, 19 nt, Artificial Sequence
  Description of Artificial Sequence: Synthetic oligonucleotide
uaacauacccaucaaucug

SEQ ID NO: 416514 - RNA, 19 nt, Artificial Sequence
  Description of Artificial Sequence: Synthetic oligonucleotide
auuuaggaguuugagaaag

SEQ ID NO: 416515 - RNA, 19 nt, Artificial Sequence
  Description of Artificial Sequence: Synthetic oligonucleotide
auuguguucaagcuggcgu

SEQ ID NO: 416516 - RNA, 19 nt, Artificial Sequence
  Description of Artificial Sequence: Synthetic oligonucleotide
ugccuguugaccaacaggu

SEQ ID NO: 416517 - RNA, 19 nt, Artificial Sequence
  Description of Artificial Sequence: Synthetic oligonucleotide
agacugaccaucucuuuac

SEQ ID NO: 416518 - RNA, 19 nt, Artificial Sequence
  Description of Artificial Sequence: Synthetic oligonucleotide
auugauuguacagugccuc

SEQ ID NO: 416519 - RNA, 19 nt, Artificial Sequence
  Description of Artificial Sequence: Synthetic oligonucleotide
guaaucgacaauaaauuug

SEQ ID NO: 416520 - RNA, 19 nt, Artificial Sequence
  Description of Artificial Sequence: Synthetic oligonucleotide
aaucuaacggucucaagua

SEQ ID NO: 416521 - RNA, 19 nt, Artificial Sequence
  Description of Artificial Sequence: Synthetic oligonucleotide
aacggucucaaguaucuca

SEQ ID NO: 416522 - RNA, 19 nt, Artificial Sequence
  Description of Artificial Sequence: Synthetic oligonucleotide
uguauugauuguacagugc

SEQ ID NO: 416523 - RNA, 19 nt, Artificial Sequence
  Description of Artificial Sequence: Synthetic oligonucleotide
uauugauguaaaacuguga

SEQ ID NO: 416524 - RNA, 19 nt, Artificial Sequence
  Description of Artificial Sequence: Synthetic oligonucleotide
uugaugguaaagcucuggc

SEQ ID NO: 416525 - RNA, 19 nt, Artificial Sequence
  Description of Artificial Sequence: Synthetic oligonucleotide
ggaaagauuuauuuaggag

SEQ ID NO: 416526 - RNA, 19 nt, Artificial Sequence
  Description of Artificial Sequence: Synthetic oligonucleotide
acaguaaucgacaauaaau

SEQ ID NO: 416527 - RNA, 19 nt, Artificial Sequence
  Description of Artificial Sequence: Synthetic oligonucleotide
ucuucgaccaggcacacua

SEQ ID NO: 416528 - RNA, 19 nt, Artificial Sequence
  Description of Artificial Sequence: Synthetic oligonucleotide
ucugcuuaagucagggcca

SEQ ID NO: 416529 - RNA, 19 nt, Artificial Sequence
  Description of Artificial Sequence: Synthetic oligonucleotide
aaaaucuaacggucucaag

SEQ ID NO: 416530 - RNA, 19 nt, Artificial Sequence
  Description of Artificial Sequence: Synthetic oligonucleotide
uggauguagagagacacgc

SEQ ID NO: 416531 - RNA, 19 nt, Artificial Sequence
  Description of Artificial Sequence: Synthetic oligonucleotide
uugagugccgacuuauuca

SEQ ID NO: 416532 - RNA, 19 nt, Artificial Sequence
  Description of Artificial Sequence: Synthetic oligonucleotide
ucaagcuggcguuuuagug

SEQ ID NO: 416533 - RNA, 19 nt, Artificial Sequence
  Description of Artificial Sequence: Synthetic oligonucleotide
ugagugccgacuuauucag

SEQ ID NO: 416534 - RNA, 19 nt, Artificial Sequence
  Description of Artificial Sequence: Synthetic oligonucleotide
aucgacaauaaauuuguaa

SEQ ID NO: 416535 - RNA, 19 nt, Artificial Sequence
  Description of Artificial Sequence: Synthetic oligonucleotide
uugauguaaaacugugaca

SEQ ID NO: 416536 - RNA, 19 nt, Artificial Sequence
  Description of Artificial Sequence: Synthetic oligonucleotide
ugaguguaaaccuucucaa

SEQ ID NO: 416537 - RNA, 19 nt, Artificial Sequence
  Description of Artificial Sequence: Synthetic oligonucleotide
agagacacgcagccgagcg

SEQ ID NO: 416538 - RNA, 19 nt, Artificial Sequence
  Description of Artificial Sequence: Synthetic oligonucleotide
ucaaagaaugcgagcaccu

SEQ ID NO: 416539 - RNA, 19 nt, Artificial Sequence
  Description of Artificial Sequence: Synthetic oligonucleotide
uucaaaaucuaacggucuc

SEQ ID NO: 416540 - RNA, 19 nt, Artificial Sequence
  Description of Artificial Sequence: Synthetic oligonucleotide
cacacaacucgccaguucc

SEQ ID NO: 416541 - RNA, 19 nt, Artificial Sequence
  Description of Artificial Sequence: Synthetic oligonucleotide
aguaaucgacaauaaauuu

SEQ ID NO: 416542 - RNA, 19 nt, Artificial Sequence
  Description of Artificial Sequence: Synthetic oligonucleotide
acuuguacggcuccuucuc

SEQ ID NO: 416543 - RNA, 19 nt, Artificial Sequence
  Description of Artificial Sequence: Synthetic oligonucleotide
aagaggcggacucccaauc

SEQ ID NO: 416544 - RNA, 19 nt, Artificial Sequence
  Description of Artificial Sequence: Synthetic oligonucleotide
uguguuguuucuaguguga

SEQ ID NO: 416545 - RNA, 19 nt, Artificial Sequence
  Description of Artificial Sequence: Synthetic oligonucleotide
aagguggaacucgaucacc

SEQ ID NO: 416546 - RNA, 19 nt, Artificial Sequence
  Description of Artificial Sequence: Synthetic oligonucleotide
aagguccuagcauugacuu

SEQ ID NO: 416547 - RNA, 19 nt, Artificial Sequence
  Description of Artificial Sequence: Synthetic oligonucleotide
acuaguugaaacaaguaaa

SEQ ID NO: 416548 - RNA, 19 nt, Artificial Sequence
  Description of Artificial Sequence: Synthetic oligonucleotide
uaacuauguugcuuaaggu

SEQ ID NO: 416549 - RNA, 19 nt, Artificial Sequence
  Description of Artificial Sequence: Synthetic oligonucleotide
agaacguccuccccgaugu

SEQ ID NO: 416550 - RNA, 19 nt, Artificial Sequence
  Description of Artificial Sequence: Synthetic oligonucleotide
auaguaacagguucuucga

SEQ ID NO: 416551 - RNA, 19 nt, Artificial Sequence
  Description of Artificial Sequence: Synthetic oligonucleotide
uauugauuguacagugccu

SEQ ID NO: 416552 - RNA, 19 nt, Artificial Sequence
  Description of Artificial Sequence: Synthetic oligonucleotide
gaugauaggcauuguguuc

SEQ ID NO: 416553 - RNA, 19 nt, Artificial Sequence
  Description of Artificial Sequence: Synthetic oligonucleotide
uuaagguccuagcauugac

SEQ ID NO: 416554 - RNA, 19 nt, Artificial Sequence
  Description of Artificial Sequence: Synthetic oligonucleotide
uuucuagugugaaauccaa

SEQ ID NO: 416555 - RNA, 19 nt, Artificial Sequence
  Description of Artificial Sequence: Synthetic oligonucleotide
uuaugaguguaaaccuucu

SEQ ID NO: 416556 - RNA, 19 nt, Artificial Sequence
  Description of Artificial Sequence: Synthetic oligonucleotide
ucuaacggucucaaguauc

SEQ ID NO: 416557 - RNA, 19 nt, Artificial Sequence
  Description of Artificial Sequence: Synthetic oligonucleotide
cuuagcaaggcaauuuaca

SEQ ID NO: 416558 - RNA, 19 nt, Artificial Sequence
  Description of Artificial Sequence: Synthetic oligonucleotide
ugacccagaaggaaaaguu

SEQ ID NO: 416559 - RNA, 19 nt, Artificial Sequence
  Description of Artificial Sequence: Synthetic oligonucleotide
cguacuuagacuuguacgg

SEQ ID NO: 416560 - RNA, 19 nt, Artificial Sequence
  Description of Artificial Sequence: Synthetic oligonucleotide
aacacauaguguugaccca

SEQ ID NO: 416561 - RNA, 19 nt, Artificial Sequence
  Description of Artificial Sequence: Synthetic oligonucleotide
cauaguguugacccagaag

SEQ ID NO: 416562 - RNA, 19 nt, Artificial Sequence
  Description of Artificial Sequence: Synthetic oligonucleotide
ucggaacuuagccaacaug

SEQ ID NO: 416563 - RNA, 19 nt, Artificial Sequence
  Description of Artificial Sequence: Synthetic oligonucleotide
acauaauuagguauaaauu

SEQ ID NO: 416564 - RNA, 19 nt, Artificial Sequence
  Description of Artificial Sequence: Synthetic oligonucleotide
ggcauuguguucaagcugg

SEQ ID NO: 416565 - RNA, 19 nt, Artificial Sequence
  Description of Artificial Sequence: Synthetic oligonucleotide
gccaucuuuguucugaacc

SEQ ID NO: 416566 - RNA, 19 nt, Artificial Sequence
  Description of Artificial Sequence: Synthetic oligonucleotide
aaagacgagcuacucggaa

SEQ ID NO: 416567 - RNA, 19 nt, Artificial Sequence
  Description of Artificial Sequence: Synthetic oligonucleotide
agcaccuugaacagagcgc

SEQ ID NO: 416568 - RNA, 19 nt, Artificial Sequence
  Description of Artificial Sequence: Synthetic oligonucleotide
uguugacccagaaggaaaa

SEQ ID NO: 416569 - RNA, 19 nt, Artificial Sequence
  Description of Artificial Sequence: Synthetic oligonucleotide
cggaacuuagccaacaugg

SEQ ID NO: 416570 - RNA, 19 nt, Artificial Sequence
  Description of Artificial Sequence: Synthetic oligonucleotide
cagaggacuuaacaguuag

SEQ ID NO: 416571 - RNA, 19 nt, Artificial Sequence
  Description of Artificial Sequence: Synthetic oligonucleotide
ggacuuaacaguuagaaau

SEQ ID NO: 416572 - RNA, 19 nt, Artificial Sequence
  Description of Artificial Sequence: Synthetic oligonucleotide
agcgaucaaaaugcaaaac

SEQ ID NO: 416573 - RNA, 19 nt, Artificial Sequence
  Description of Artificial Sequence: Synthetic oligonucleotide
caguacuugauccaacauc

SEQ ID NO: 416574 - RNA, 19 nt, Artificial Sequence
  Description of Artificial Sequence: Synthetic oligonucleotide
uuuaggaguuugagaaagu

SEQ ID NO: 416575 - RNA, 19 nt, Artificial Sequence
  Description of Artificial Sequence: Synthetic oligonucleotide
gguaauacagguuaugagu

SEQ ID NO: 416576 - RNA, 19 nt, Artificial Sequence
  Description of Artificial Sequence: Synthetic oligonucleotide
uacuuagacuuguacggcu

SEQ ID NO: 416577 - RNA, 19 nt, Artificial Sequence
  Description of Artificial Sequence: Synthetic oligonucleotide
aagaaugcgagcaccuuga

SEQ ID NO: 416578 - RNA, 19 nt, Artificial Sequence
  Description of Artificial Sequence: Synthetic oligonucleotide
acucgaucaccgcaagccg

SEQ ID NO: 416579 - RNA, 19 nt, Artificial Sequence
  Description of Artificial Sequence: Synthetic oligonucleotide
cagguaauacuguggauuc

SEQ ID NO: 416580 - RNA, 19 nt, Artificial Sequence
  Description of Artificial Sequence: Synthetic oligonucleotide
cucaaagaaugcgagcacc

SEQ ID NO: 416581 - RNA, 19 nt, Artificial Sequence
  Description of Artificial Sequence: Synthetic oligonucleotide
auguggccaaauuuucuag

SEQ ID NO: 416582 - RNA, 19 nt, Artificial Sequence
  Description of Artificial Sequence: Synthetic oligonucleotide
aauacagguuaugagugua

SEQ ID NO: 416583 - RNA, 19 nt, Artificial Sequence
  Description of Artificial Sequence: Synthetic oligonucleotide
guaacagguucuucgacca

SEQ ID NO: 416584 - RNA, 19 nt, Artificial Sequence
  Description of Artificial Sequence: Synthetic oligonucleotide
agcgacaggcaccugacca

SEQ ID NO: 416585 - RNA, 19 nt, Artificial Sequence
  Description of Artificial Sequence: Synthetic oligonucleotide
uucuaacucaacuucuauu

SEQ ID NO: 416586 - RNA, 19 nt, Artificial Sequence
  Description of Artificial Sequence: Synthetic oligonucleotide
aaguucuaacucaacuucu

SEQ ID NO: 416587 - RNA, 19 nt, Artificial Sequence
  Description of Artificial Sequence: Synthetic oligonucleotide
cuugagugccgacuuauuc

SEQ ID NO: 416588 - RNA, 19 nt, Artificial Sequence
  Description of Artificial Sequence: Synthetic oligonucleotide
gacuuaacaguuagaaauc

SEQ ID NO: 416589 - RNA, 19 nt, Artificial Sequence
  Description of Artificial Sequence: Synthetic oligonucleotide
uuuuagugugcuguggcaa

SEQ ID NO: 416590 - RNA, 19 nt, Artificial Sequence
  Description of Artificial Sequence: Synthetic oligonucleotide
acuuagcaaggcaauuuac

SEQ ID NO: 416591 - RNA, 19 nt, Artificial Sequence
  Description of Artificial Sequence: Synthetic oligonucleotide
ugcuuaagguccuagcauu

SEQ ID NO: 416592 - RNA, 19 nt, Artificial Sequence
  Description of Artificial Sequence: Synthetic oligonucleotide
auuaacuauguugcuuaag

SEQ ID NO: 416593 - RNA, 19 nt, Artificial Sequence
  Description of Artificial Sequence: Synthetic oligonucleotide
uucuagugugaaauccaac

SEQ ID NO: 416594 - RNA, 19 nt, Artificial Sequence
  Description of Artificial Sequence: Synthetic oligonucleotide
aacaccugucacuuagcaa

SEQ ID NO: 416595 - RNA, 19 nt, Artificial Sequence
  Description of Artificial Sequence: Synthetic oligonucleotide
ugugagucaggaucccuga

SEQ ID NO: 416596 - RNA, 19 nt, Artificial Sequence
  Description of Artificial Sequence: Synthetic oligonucleotide
uucgaccaggcacacuacc

SEQ ID NO: 416597 - RNA, 19 nt, Artificial Sequence
  Description of Artificial Sequence: Synthetic oligonucleotide
caacucgccaguuccaaac

SEQ ID NO: 416598 - RNA, 19 nt, Artificial Sequence
  Description of Artificial Sequence: Synthetic oligonucleotide
acuuaacaguuagaaauca

SEQ ID NO: 416599 - RNA, 19 nt, Artificial Sequence
  Description of Artificial Sequence: Synthetic oligonucleotide
ucugccuguugaccaacag

SEQ ID NO: 416600 - RNA, 19 nt, Artificial Sequence
  Description of Artificial Sequence: Synthetic oligonucleotide
guaacauacccaucaaucu

SEQ ID NO: 416601 - RNA, 19 nt, Artificial Sequence
  Description of Artificial Sequence: Synthetic oligonucleotide
cugccuguugaccaacagg

SEQ ID NO: 416602 - RNA, 19 nt, Artificial Sequence
  Description of Artificial Sequence: Synthetic oligonucleotide
gguccuagcauugacuuag

SEQ ID NO: 416603 - RNA, 19 nt, Artificial Sequence
  Description of Artificial Sequence: Synthetic oligonucleotide
agacacgcagccgagcgac

SEQ ID NO: 416604 - RNA, 19 nt, Artificial Sequence
  Description of Artificial Sequence: Synthetic oligonucleotide
uuaggaguuugagaaagua

SEQ ID NO: 416605 - RNA, 19 nt, Artificial Sequence
  Description of Artificial Sequence: Synthetic oligonucleotide
acacauaguguugacccag

SEQ ID NO: 416606 - RNA, 19 nt, Artificial Sequence
  Description of Artificial Sequence: Synthetic oligonucleotide
cuaacucaacuucuauuuc

SEQ ID NO: 416607 - RNA, 19 nt, Artificial Sequence
  Description of Artificial Sequence: Synthetic oligonucleotide
caacagguaauacugugga

SEQ ID NO: 416608 - RNA, 19 nt, Artificial Sequence
  Description of Artificial Sequence: Synthetic oligonucleotide
aacucgccaguuccaaacu

SEQ ID NO: 416609 - RNA, 19 nt, Artificial Sequence
  Description of Artificial Sequence: Synthetic oligonucleotide
cauggcggggcggagaacg

SEQ ID NO: 416610 - RNA, 19 nt, Artificial Sequence
  Description of Artificial Sequence: Synthetic oligonucleotide
cuugcaucgccucuccaug

SEQ ID NO: 416611 - RNA, 19 nt, Artificial Sequence
  Description of Artificial Sequence: Synthetic oligonucleotide
acuauagguaguagccuuc

SEQ ID NO: 416612 - RNA, 19 nt, Artificial Sequence
  Description of Artificial Sequence: Synthetic oligonucleotide
ucgaccaggcacacuaccu

SEQ ID NO: 416613 - RNA, 19 nt, Artificial Sequence
  Description of Artificial Sequence: Synthetic oligonucleotide
acggucucaaguaucucac

SEQ ID NO: 416614 - RNA, 19 nt, Artificial Sequence
  Description of Artificial Sequence: Synthetic oligonucleotide
cucgaucaccgcaagccgc

SEQ ID NO: 416615 - RNA, 19 nt, Artificial Sequence
  Description of Artificial Sequence: Synthetic oligonucleotide
gaaugcgagcaccuugaac

SEQ ID NO: 416616 - RNA, 19 nt, Artificial Sequence
  Description of Artificial Sequence: Synthetic oligonucleotide
uucacgccaagguggaacu

SEQ ID NO: 416617 - RNA, 19 nt, Artificial Sequence
  Description of Artificial Sequence: Synthetic oligonucleotide
uuagguccuggcugcaucu

SEQ ID NO: 416618 - RNA, 19 nt, Artificial Sequence
  Description of Artificial Sequence: Synthetic oligonucleotide
uucaagcuggcguuuuagu

SEQ ID NO: 416619 - RNA, 19 nt, Artificial Sequence
  Description of Artificial Sequence: Synthetic oligonucleotide
acucccaaucucuuucaug

SEQ ID NO: 416620 - RNA, 19 nt, Artificial Sequence
  Description of Artificial Sequence: Synthetic oligonucleotide
ugacuauagguaguagccu

SEQ ID NO: 416621 - RNA, 19 nt, Artificial Sequence
  Description of Artificial Sequence: Synthetic oligonucleotide
aacauggcggggcggagaa

SEQ ID NO: 416622 - RNA, 19 nt, Artificial Sequence
  Description of Artificial Sequence: Synthetic oligonucleotide
ucgaucaccgcaagccgca

SEQ ID NO: 416623 - RNA, 19 nt, Artificial Sequence
  Description of Artificial Sequence: Synthetic oligonucleotide
ccaacagguaauacugugg

SEQ ID NO: 416624 - RNA, 19 nt, Artificial Sequence
  Description of Artificial Sequence: Synthetic oligonucleotide
uauucugcgcuugugcauc

SEQ ID NO: 416625 - RNA, 19 nt, Artificial Sequence
  Description of Artificial Sequence: Synthetic oligonucleotide
gaaugacuauagguaguag

SEQ ID NO: 416626 - RNA, 19 nt, Artificial Sequence
  Description of Artificial Sequence: Synthetic oligonucleotide
uccgugucgaugugguuca

SEQ ID NO: 416627 - RNA, 19 nt, Artificial Sequence
  Description of Artificial Sequence: Synthetic oligonucleotide
auaguaagugugugcaauu

SEQ ID NO: 416628 - RNA, 19 nt, Artificial Sequence
  Description of Artificial Sequence: Synthetic oligonucleotide
cuacucggaacuuagccaa

SEQ ID NO: 416629 - RNA, 19 nt, Artificial Sequence
  Description of Artificial Sequence: Synthetic oligonucleotide
uaucucacuuucuccucca

SEQ ID NO: 416630 - RNA, 19 nt, Artificial Sequence
  Description of Artificial Sequence: Synthetic oligonucleotide
uuguguucaagcuggcguu

SEQ ID NO: 416631 - RNA, 19 nt, Artificial Sequence
  Description of Artificial Sequence: Synthetic oligonucleotide
uggcaucacacaacucgcc

SEQ ID NO: 416632 - RNA, 19 nt, Artificial Sequence
  Description of Artificial Sequence: Synthetic oligonucleotide
ugccgacuuauucaggcua

SEQ ID NO: 416633 - RNA, 19 nt, Artificial Sequence
  Description of Artificial Sequence: Synthetic oligonucleotide
gguaggaccgugcaguuuc

SEQ ID NO: 416634 - RNA, 19 nt, Artificial Sequence
  Description of Artificial Sequence: Synthetic oligonucleotide
ucccggaucuccgugcccg

SEQ ID NO: 416635 - RNA, 19 nt, Artificial Sequence
  Description of Artificial Sequence: Synthetic oligonucleotide
uaacagguucuucgaccag

SEQ ID NO: 416636 - RNA, 19 nt, Artificial Sequence
  Description of Artificial Sequence: Synthetic oligonucleotide
augucauaguaagugugug

SEQ ID NO: 416637 - RNA, 19 nt, Artificial Sequence
  Description of Artificial Sequence: Synthetic oligonucleotide
gagaacguccuccccgaug

SEQ ID NO: 416638 - RNA, 19 nt, Artificial Sequence
  Description of Artificial Sequence: Synthetic oligonucleotide
guuuuagugugcuguggca

SEQ ID NO: 416639 - RNA, 19 nt, Artificial Sequence
  Description of Artificial Sequence: Synthetic oligonucleotide
cauugacuuagguccuggc

SEQ ID NO: 416640 - RNA, 19 nt, Artificial Sequence
  Description of Artificial Sequence: Synthetic oligonucleotide
ccaacaaguacuagucagc

SEQ ID NO: 416641 - RNA, 19 nt, Artificial Sequence
  Description of Artificial Sequence: Synthetic oligonucleotide
cuuguacggcuccuucucc

SEQ ID NO: 416642 - RNA, 19 nt, Artificial Sequence
  Description of Artificial Sequence: Synthetic oligonucleotide
guacuuagacuuguacggc

SEQ ID NO: 416643 - RNA, 19 nt, Artificial Sequence
  Description of Artificial Sequence: Synthetic oligonucleotide
uagcauugacuuagguccu

SEQ ID NO: 416644 - RNA, 19 nt, Artificial Sequence
  Description of Artificial Sequence: Synthetic oligonucleotide
ccuagcauugacuuagguc

SEQ ID NO: 416645 - RNA, 19 nt, Artificial Sequence
  Description of Artificial Sequence: Synthetic oligonucleotide
ucugcgccuggauguagag

SEQ ID NO: 416646 - RNA, 19 nt, Artificial Sequence
  Description of Artificial Sequence: Synthetic oligonucleotide
ggaucccugagcuugucug

SEQ ID NO: 416647 - RNA, 19 nt, Artificial Sequence
  Description of Artificial Sequence: Synthetic oligonucleotide
cacgccaagguggaacucg

SEQ ID NO: 416648 - RNA, 19 nt, Artificial Sequence
  Description of Artificial Sequence: Synthetic oligonucleotide
gacuugagccagguaauac

SEQ ID NO: 416649 - RNA, 19 nt, Artificial Sequence
  Description of Artificial Sequence: Synthetic oligonucleotide
uacagguuaugaguguaaa

SEQ ID NO: 416650 - RNA, 19 nt, Artificial Sequence
  Description of Artificial Sequence: Synthetic oligonucleotide
cauuguguucaagcuggcg

SEQ ID NO: 416651 - RNA, 19 nt, Artificial Sequence
  Description of Artificial Sequence: Synthetic oligonucleotide
caccugucacuuagcaagg

SEQ ID NO: 416652 - RNA, 19 nt, Artificial Sequence
  Description of Artificial Sequence: Synthetic oligonucleotide
augcgagcaccuugaacag

SEQ ID NO: 416653 - RNA, 19 nt, Artificial Sequence
  Description of Artificial Sequence: Synthetic oligonucleotide
caagguggaacucgaucac

SEQ ID NO: 416654 - RNA, 19 nt, Artificial Sequence
  Description of Artificial Sequence: Synthetic oligonucleotide
uauuugggucccucaggga

SEQ ID NO: 416655 - RNA, 19 nt, Artificial Sequence
  Description of Artificial Sequence: Synthetic oligonucleotide
gaacucgaucaccgcaagc

SEQ ID NO: 416656 - RNA, 19 nt, Artificial Sequence
  Description of Artificial Sequence: Synthetic oligonucleotide
cauugcggccucaggagac

SEQ ID NO: 416657 - RNA, 19 nt, Artificial Sequence
  Description of Artificial Sequence: Synthetic oligonucleotide
cucaaacacauaguguuga

SEQ ID NO: 416658 - RNA, 19 nt, Artificial Sequence
  Description of Artificial Sequence: Synthetic oligonucleotide
aucuaacggucucaaguau

SEQ ID NO: 416659 - RNA, 19 nt, Artificial Sequence
  Description of Artificial Sequence: Synthetic oligonucleotide
ggaccgugcaguuucaauc

SEQ ID NO: 416660 - RNA, 19 nt, Artificial Sequence
  Description of Artificial Sequence: Synthetic oligonucleotide
ucacacaacucgccaguuc

SEQ ID NO: 416661 - RNA, 19 nt, Artificial Sequence
  Description of Artificial Sequence: Synthetic oligonucleotide
cuuagguccuggcugcauc

SEQ ID NO: 416662 - RNA, 19 nt, Artificial Sequence
  Description of Artificial Sequence: Synthetic oligonucleotide
aguguugacccagaaggaa

SEQ ID NO: 416663 - RNA, 19 nt, Artificial Sequence
  Description of Artificial Sequence: Synthetic oligonucleotide
caguaaucgacaauaaauu

SEQ ID NO: 416664 - RNA, 19 nt, Artificial Sequence
  Description of Artificial Sequence: Synthetic oligonucleotide
gugugcuguggcaauaaug

SEQ ID NO: 416665 - RNA, 19 nt, Artificial Sequence
  Description of Artificial Sequence: Synthetic oligonucleotide
cagguaauacagguuauga

SEQ ID NO: 416666 - RNA, 19 nt, Artificial Sequence
  Description of Artificial Sequence: Synthetic oligonucleotide
guacuagucagcagaggac

SEQ ID NO: 416667 - RNA, 19 nt, Artificial Sequence
  Description of Artificial Sequence: Synthetic oligonucleotide
caacaaguacuagucagca

SEQ ID NO: 416668 - RNA, 19 nt, Artificial Sequence
  Description of Artificial Sequence: Synthetic oligonucleotide
cuaacggucucaaguaucu

SEQ ID NO: 416669 - RNA, 19 nt, Artificial Sequence
  Description of Artificial Sequence: Synthetic oligonucleotide
acaaugucuggccuccaua

SEQ ID NO: 416670 - RNA, 19 nt, Artificial Sequence
  Description of Artificial Sequence: Synthetic oligonucleotide
guucacgccaagguggaac

SEQ ID NO: 416671 - RNA, 19 nt, Artificial Sequence
  Description of Artificial Sequence: Synthetic oligonucleotide
agaggcggacucccaaucu

SEQ ID NO: 416672 - RNA, 19 nt, Artificial Sequence
  Description of Artificial Sequence: Synthetic oligonucleotide
accugucacuuagcaaggc

SEQ ID NO: 416673 - RNA, 19 nt, Artificial Sequence
  Description of Artificial Sequence: Synthetic oligonucleotide
uaguaagugugugcaauuu

SEQ ID NO: 416674 - RNA, 19 nt, Artificial Sequence
  Description of Artificial Sequence: Synthetic oligonucleotide
cauguauugauuguacagu

SEQ ID NO: 416675 - RNA, 19 nt, Artificial Sequence
  Description of Artificial Sequence: Synthetic oligonucleotide
caucuugcaucgccucucc

SEQ ID NO: 416676 - RNA, 19 nt, Artificial Sequence
  Description of Artificial Sequence: Synthetic oligonucleotide
gaccgugcaguuucaaucu

SEQ ID NO: 416677 - RNA, 19 nt, Artificial Sequence
  Description of Artificial Sequence: Synthetic oligonucleotide
caagcuggcguuuuagugu

SEQ ID NO: 416678 - RNA, 19 nt, Artificial Sequence
  Description of Artificial Sequence: Synthetic oligonucleotide
gcuacucggaacuuagcca

SEQ ID NO: 416679 - RNA, 19 nt, Artificial Sequence
  Description of Artificial Sequence: Synthetic oligonucleotide
uuguugggagaagacugac

SEQ ID NO: 416680 - RNA, 19 nt, Artificial Sequence
  Description of Artificial Sequence: Synthetic oligonucleotide
gacuauagguaguagccuu

SEQ ID NO: 416681 - RNA, 19 nt, Artificial Sequence
  Description of Artificial Sequence: Synthetic oligonucleotide
gcggagaacguccuccccg

SEQ ID NO: 416682 - RNA, 19 nt, Artificial Sequence
  Description of Artificial Sequence: Synthetic oligonucleotide
gugugagucaggaucccug

SEQ ID NO: 416683 - RNA, 19 nt, Artificial Sequence
  Description of Artificial Sequence: Synthetic oligonucleotide
uuccgacuguuugucaaga

SEQ ID NO: 416684 - RNA, 19 nt, Artificial Sequence
  Description of Artificial Sequence: Synthetic oligonucleotide
auggcuauucugcgcuugu

SEQ ID NO: 416685 - RNA, 19 nt, Artificial Sequence
  Description of Artificial Sequence: Synthetic oligonucleotide
uugcaucgccucuccaugu

SEQ ID NO: 416686 - RNA, 19 nt, Artificial Sequence
  Description of Artificial Sequence: Synthetic oligonucleotide
gaggcggacucccaaucuc

SEQ ID NO: 416687 - RNA, 19 nt, Artificial Sequence
  Description of Artificial Sequence: Synthetic oligonucleotide
gaaucugccuguugaccaa

SEQ ID NO: 416688 - RNA, 19 nt, Artificial Sequence
  Description of Artificial Sequence: Synthetic oligonucleotide
auugcggccucaggagacg

SEQ ID NO: 416689 - RNA, 19 nt, Artificial Sequence
  Description of Artificial Sequence: Synthetic oligonucleotide
guugacccagaaggaaaag

SEQ ID NO: 416690 - RNA, 19 nt, Artificial Sequence
  Description of Artificial Sequence: Synthetic oligonucleotide
ucgccaguuccaaacugua

SEQ ID NO: 416691 - RNA, 19 nt, Artificial Sequence
  Description of Artificial Sequence: Synthetic oligonucleotide
gguaguagccuucucaaau

SEQ ID NO: 416692 - RNA, 19 nt, Artificial Sequence
  Description of Artificial Sequence: Synthetic oligonucleotide
ugugugagucaggaucccu

SEQ ID NO: 416693 - RNA, 19 nt, Artificial Sequence
  Description of Artificial Sequence: Synthetic oligonucleotide
caaaaucuaacggucucaa

SEQ ID NO: 416694 - RNA, 19 nt, Artificial Sequence
  Description of Artificial Sequence: Synthetic oligonucleotide
uccccuuuccguugauggu

SEQ ID NO: 416695 - RNA, 19 nt, Artificial Sequence
  Description of Artificial Sequence: Synthetic oligonucleotide
uacucggaacuuagccaac

SEQ ID NO: 416696 - RNA, 19 nt, Artificial Sequence
  Description of Artificial Sequence: Synthetic oligonucleotide
aaugcucagucgggucaag

SEQ ID NO: 416697 - RNA, 19 nt, Artificial Sequence
  Description of Artificial Sequence: Synthetic oligonucleotide
gccauugcggccucaggag

SEQ ID NO: 416698 - RNA, 19 nt, Artificial Sequence
  Description of Artificial Sequence: Synthetic oligonucleotide
gguucuucgaccaggcaca

SEQ ID NO: 416699 - RNA, 19 nt, Artificial Sequence
  Description of Artificial Sequence: Synthetic oligonucleotide
cagagcuuauugauguaaa

SEQ ID NO: 416700 - RNA, 19 nt, Artificial Sequence
  Description of Artificial Sequence: Synthetic oligonucleotide
aggagacggccaccucccc

SEQ ID NO: 416701 - RNA, 19 nt, Artificial Sequence
  Description of Artificial Sequence: Synthetic oligonucleotide
aggaccgugcaguuucaau

SEQ ID NO: 416702 - RNA, 19 nt, Artificial Sequence
  Description of Artificial Sequence: Synthetic oligonucleotide
gcgagcaccuugaacagag

SEQ ID NO: 416703 - RNA, 19 nt, Artificial Sequence
  Description of Artificial Sequence: Synthetic oligonucleotide
ugguagacuugagccaggu

SEQ ID NO: 416704 - RNA, 19 nt, Artificial Sequence
  Description of Artificial Sequence: Synthetic oligonucleotide
agguaguagccuucucaaa

SEQ ID NO: 416705 - RNA, 19 nt, Artificial Sequence
  Description of Artificial Sequence: Synthetic oligonucleotide
uccccgaugugcucaggaa

SEQ ID NO: 416706 - RNA, 19 nt, Artificial Sequence
  Description of Artificial Sequence: Synthetic oligonucleotide
cacuuagcaaggcaauuua

SEQ ID NO: 416707 - RNA, 19 nt, Artificial Sequence
  Description of Artificial Sequence: Synthetic oligonucleotide
cauggcuauucugcgcuug

SEQ ID NO: 416708 - RNA, 19 nt, Artificial Sequence
  Description of Artificial Sequence: Synthetic oligonucleotide
acaacucgccaguuccaaa

SEQ ID NO: 416709 - RNA, 19 nt, Artificial Sequence
  Description of Artificial Sequence: Synthetic oligonucleotide
ucggggugaguuucacagu

SEQ ID NO: 416710 - RNA, 19 nt, Artificial Sequence
  Description of Artificial Sequence: Synthetic oligonucleotide
accgcaagccgcagcgccc

SEQ ID NO: 416711 - RNA, 19 nt, Artificial Sequence
  Description of Artificial Sequence: Synthetic oligonucleotide
ggaacucgaucaccgcaag

SEQ ID NO: 416712 - RNA, 19 nt, Artificial Sequence
  Description of Artificial Sequence: Synthetic oligonucleotide
cccgaugugcucaggaaac

SEQ ID NO: 416713 - RNA, 19 nt, Artificial Sequence
  Description of Artificial Sequence: Synthetic oligonucleotide
ggcguuuuagugugcugug

SEQ ID NO: 416714 - RNA, 19 nt, Artificial Sequence
  Description of Artificial Sequence: Synthetic oligonucleotide
uccgacuguuugucaagau

SEQ ID NO: 416715 - RNA, 19 nt, Artificial Sequence
  Description of Artificial Sequence: Synthetic oligonucleotide
gagugccgacuuauucagg

SEQ ID NO: 416716 - RNA, 19 nt, Artificial Sequence
  Description of Artificial Sequence: Synthetic oligonucleotide
cuuaagguccuagcauuga

SEQ ID NO: 416717 - RNA, 19 nt, Artificial Sequence
  Description of Artificial Sequence: Synthetic oligonucleotide
gguggaacucgaucaccgc

SEQ ID NO: 416718 - RNA, 19 nt, Artificial Sequence
  Description of Artificial Sequence: Synthetic oligonucleotide
guaguacuugagugccgac

SEQ ID NO: 416719 - RNA, 19 nt, Artificial Sequence
  Description of Artificial Sequence: Synthetic oligonucleotide
gagcgacaggcggaagggg

SEQ ID NO: 416720 - RNA, 19 nt, Artificial Sequence
  Description of Artificial Sequence: Synthetic oligonucleotide
guguugacccagaaggaaa

SEQ ID NO: 416721 - RNA, 19 nt, Artificial Sequence
  Description of Artificial Sequence: Synthetic oligonucleotide
auucugcgcuugugcaucu

SEQ ID NO: 416722 - RNA, 19 nt, Artificial Sequence
  Description of Artificial Sequence: Synthetic oligonucleotide
cauaguaagugugugcaau

SEQ ID NO: 416723 - RNA, 19 nt, Artificial Sequence
  Description of Artificial Sequence: Synthetic oligonucleotide
caagcaguacuugauccaa

SEQ ID NO: 416724 - RNA, 19 nt, Artificial Sequence
  Description of Artificial Sequence: Synthetic oligonucleotide
gaguuugagaaaguauuuu

SEQ ID NO: 416725 - RNA, 19 nt, Artificial Sequence
  Description of Artificial Sequence: Synthetic oligonucleotide
agguaauacuguggauuca

SEQ ID NO: 416726 - RNA, 19 nt, Artificial Sequence
  Description of Artificial Sequence: Synthetic oligonucleotide
gaguuccgacuguuuguca

SEQ ID NO: 416727 - RNA, 19 nt, Artificial Sequence
  Description of Artificial Sequence: Synthetic oligonucleotide
agaaugcgagcaccuugaa

SEQ ID NO: 416728 - RNA, 19 nt, Artificial Sequence
  Description of Artificial Sequence: Synthetic oligonucleotide
agaggacuuaacaguuaga

SEQ ID NO: 416729 - RNA, 19 nt, Artificial Sequence
  Description of Artificial Sequence: Synthetic oligonucleotide
uggcuauucugcgcuugug

SEQ ID NO: 416730 - RNA, 19 nt, Artificial Sequence
  Description of Artificial Sequence: Synthetic oligonucleotide
uauucugcgccuggaugua

SEQ ID NO: 416731 - RNA, 19 nt, Artificial Sequence
  Description of Artificial Sequence: Synthetic oligonucleotide
uguguucaagcuggcguuu

SEQ ID NO: 416732 - RNA, 19 nt, Artificial Sequence
  Description of Artificial Sequence: Synthetic oligonucleotide
ucgccucuccaugucaguc

SEQ ID NO: 416733 - RNA, 19 nt, Artificial Sequence
  Description of Artificial Sequence: Synthetic oligonucleotide
guaguagccuucucaaauu

SEQ ID NO: 416734 - RNA, 19 nt, Artificial Sequence
  Description of Artificial Sequence: Synthetic oligonucleotide
cacauaguguugacccaga

SEQ ID NO: 416735 - RNA, 19 nt, Artificial Sequence
  Description of Artificial Sequence: Synthetic oligonucleotide
cgagcuacucggaacuuag

SEQ ID NO: 416736 - RNA, 19 nt, Artificial Sequence
  Description of Artificial Sequence: Synthetic oligonucleotide
cuaggaagagcugguagua

SEQ ID NO: 416737 - RNA, 19 nt, Artificial Sequence
  Description of Artificial Sequence: Synthetic oligonucleotide
gcuuaagguccuagcauug

SEQ ID NO: 416738 - RNA, 19 nt, Artificial Sequence
  Description of Artificial Sequence: Synthetic oligonucleotide
ccgugcaguuucaaucucc

SEQ ID NO: 416739 - RNA, 19 nt, Artificial Sequence
  Description of Artificial Sequence: Synthetic oligonucleotide
cacgcagccgagcgacagg

SEQ ID NO: 416740 - RNA, 19 nt, Artificial Sequence
  Description of Artificial Sequence: Synthetic oligonucleotide
ggucaagaggcggacuccc

SEQ ID NO: 416741 - RNA, 19 nt, Artificial Sequence
  Description of Artificial Sequence: Synthetic oligonucleotide
ugcgagcaccuugaacaga

SEQ ID NO: 416742 - RNA, 19 nt, Artificial Sequence
  Description of Artificial Sequence: Synthetic oligonucleotide
ccgacuguuugucaagauc

SEQ ID NO: 416743 - RNA, 19 nt, Artificial Sequence
  Description of Artificial Sequence: Synthetic oligonucleotide
cugaguuccgacuguuugu

SEQ ID NO: 416744 - RNA, 19 nt, Artificial Sequence
  Description of Artificial Sequence: Synthetic oligonucleotide
aucgccucuccaugucagu

SEQ ID NO: 416745 - RNA, 19 nt, Artificial Sequence
  Description of Artificial Sequence: Synthetic oligonucleotide
guggauucaaguccacaau

SEQ ID NO: 416746 - RNA, 19 nt, Artificial Sequence
  Description of Artificial Sequence: Synthetic oligonucleotide
agagcgcgcaccuccucaa

SEQ ID NO: 416747 - RNA, 19 nt, Artificial Sequence
  Description of Artificial Sequence: Synthetic oligonucleotide
gggaugauaggcauugugu

SEQ ID NO: 416748 - RNA, 19 nt, Artificial Sequence
  Description of Artificial Sequence: Synthetic oligonucleotide
cuauguugcuuaagguccu

SEQ ID NO: 416749 - RNA, 19 nt, Artificial Sequence
  Description of Artificial Sequence: Synthetic oligonucleotide
ccgagcgacaggcggaagg

SEQ ID NO: 416750 - RNA, 19 nt, Artificial Sequence
  Description of Artificial Sequence: Synthetic oligonucleotide
cagugccucugaugacucc

SEQ ID NO: 416751 - RNA, 19 nt, Artificial Sequence
  Description of Artificial Sequence: Synthetic oligonucleotide
agguuauucugcgccugga

SEQ ID NO: 416752 - RNA, 19 nt, Artificial Sequence
  Description of Artificial Sequence: Synthetic oligonucleotide
gaucuccgugcccggcgug

SEQ ID NO: 416753 - RNA, 19 nt, Artificial Sequence
  Description of Artificial Sequence: Synthetic oligonucleotide
cccguacuuagacuuguac

SEQ ID NO: 416754 - RNA, 19 nt, Artificial Sequence
  Description of Artificial Sequence: Synthetic oligonucleotide
agucgggucaagaggcgga

SEQ ID NO: 416755 - RNA, 19 nt, Artificial Sequence
  Description of Artificial Sequence: Synthetic oligonucleotide
gagcgcgcaccuccucaag

SEQ ID NO: 416756 - RNA, 19 nt, Artificial Sequence
  Description of Artificial Sequence: Synthetic oligonucleotide
uaacggucucaaguaucuc

SEQ ID NO: 416757 - RNA, 19 nt, Artificial Sequence
  Description of Artificial Sequence: Synthetic oligonucleotide
aggggcucuagcauggcua

SEQ ID NO: 416758 - RNA, 19 nt, Artificial Sequence
  Description of Artificial Sequence: Synthetic oligonucleotide
gaacguccuccccgaugug

SEQ ID NO: 416759 - RNA, 19 nt, Artificial Sequence
  Description of Artificial Sequence: Synthetic oligonucleotide
cuccagguaggaccgugca

SEQ ID NO: 416760 - RNA, 19 nt, Artificial Sequence
  Description of Artificial Sequence: Synthetic oligonucleotide
caccuugaacagagcgcug

SEQ ID NO: 416761 - RNA, 19 nt, Artificial Sequence
  Description of Artificial Sequence: Synthetic oligonucleotide
ggggcggagaacguccucc

SEQ ID NO: 416762 - RNA, 19 nt, Artificial Sequence
  Description of Artificial Sequence: Synthetic oligonucleotide
aggcggacucccaaucucu

SEQ ID NO: 416763 - RNA, 19 nt, Artificial Sequence
  Description of Artificial Sequence: Synthetic oligonucleotide
agacuugagccagguaaua

SEQ ID NO: 416764 - RNA, 19 nt, Artificial Sequence
  Description of Artificial Sequence: Synthetic oligonucleotide
acacaacucgccaguucca

SEQ ID NO: 416765 - RNA, 19 nt, Artificial Sequence
  Description of Artificial Sequence: Synthetic oligonucleotide
cuccucucuuucagaccac

SEQ ID NO: 416766 - RNA, 19 nt, Artificial Sequence
  Description of Artificial Sequence: Synthetic oligonucleotide
cuccccgaugugcucagga

SEQ ID NO: 416767 - RNA, 19 nt, Artificial Sequence
  Description of Artificial Sequence: Synthetic oligonucleotide
gcuuaagucagggccaucu

SEQ ID NO: 416768 - RNA, 19 nt, Artificial Sequence
  Description of Artificial Sequence: Synthetic oligonucleotide
ggacucccaaucucuuuca

SEQ ID NO: 416769 - RNA, 19 nt, Artificial Sequence
  Description of Artificial Sequence: Synthetic oligonucleotide
agagcgcugugguccugga

SEQ ID NO: 416770 - RNA, 19 nt, Artificial Sequence
  Description of Artificial Sequence: Synthetic oligonucleotide
augcucagucgggucaaga

SEQ ID NO: 416771 - RNA, 19 nt, Artificial Sequence
  Description of Artificial Sequence: Synthetic oligonucleotide
agcuggcguuuuagugugc

SEQ ID NO: 416772 - RNA, 19 nt, Artificial Sequence
  Description of Artificial Sequence: Synthetic oligonucleotide
ucaccgcaagccgcagcgc

SEQ ID NO: 416773 - RNA, 19 nt, Artificial Sequence
  Description of Artificial Sequence: Synthetic oligonucleotide
caguaacauacccaucaau

SEQ ID NO: 416774 - RNA, 19 nt, Artificial Sequence
  Description of Artificial Sequence: Synthetic oligonucleotide
cuauagguaguagccuucu

SEQ ID NO: 416775 - RNA, 19 nt, Artificial Sequence
  Description of Artificial Sequence: Synthetic oligonucleotide
aucacacaacucgccaguu

SEQ ID NO: 416776 - RNA, 19 nt, Artificial Sequence
  Description of Artificial Sequence: Synthetic oligonucleotide
acgagcuacucggaacuua

SEQ ID NO: 416777 - RNA, 19 nt, Artificial Sequence
  Description of Artificial Sequence: Synthetic oligonucleotide
agccaacauggcggggcgg

SEQ ID NO: 416778 - RNA, 19 nt, Artificial Sequence
  Description of Artificial Sequence: Synthetic oligonucleotide
ucgggucaagaggcggacu

SEQ ID NO: 416779 - RNA, 19 nt, Artificial Sequence
  Description of Artificial Sequence: Synthetic oligonucleotide
cucaagcagcgcgcgcgcc

SEQ ID NO: 416780 - RNA, 19 nt, Artificial Sequence
  Description of Artificial Sequence: Synthetic oligonucleotide
ccauaaagacgagcuacuc

SEQ ID NO: 416781 - RNA, 19 nt, Artificial Sequence
  Description of Artificial Sequence: Synthetic oligonucleotide
ggcgugcccgccauugcgg

SEQ ID NO: 416782 - RNA, 19 nt, Artificial Sequence
  Description of Artificial Sequence: Synthetic oligonucleotide
uucuucgaccaggcacacu

SEQ ID NO: 416783 - RNA, 19 nt, Artificial Sequence
  Description of Artificial Sequence: Synthetic oligonucleotide
gucgggucaagaggcggac

SEQ ID NO: 416784 - RNA, 19 nt, Artificial Sequence
  Description of Artificial Sequence: Synthetic oligonucleotide
gggcggagaacguccuccc

SEQ ID NO: 416785 - RNA, 19 nt, Artificial Sequence
  Description of Artificial Sequence: Synthetic oligonucleotide
ggcggggcggagaacgucc

SEQ ID NO: 416786 - RNA, 19 nt, Artificial Sequence
  Description of Artificial Sequence: Synthetic oligonucleotide
cacacuaccuguguuguuu

SEQ ID NO: 416787 - RNA, 19 nt, Artificial Sequence
  Description of Artificial Sequence: Synthetic oligonucleotide
gggucaagaggcggacucc

SEQ ID NO: 416788 - RNA, 19 nt, Artificial Sequence
  Description of Artificial Sequence: Synthetic oligonucleotide
acgccaagguggaacucga

SEQ ID NO: 416789 - RNA, 19 nt, Artificial Sequence
  Description of Artificial Sequence: Synthetic oligonucleotide
cacaacucgccaguuccaa

SEQ ID NO: 416790 - RNA, 19 nt, Artificial Sequence
  Description of Artificial Sequence: Synthetic oligonucleotide
ucacgccaagguggaacuc

SEQ ID NO: 416791 - RNA, 19 nt, Artificial Sequence
  Description of Artificial Sequence: Synthetic oligonucleotide
cgagcgacaggcggaaggg

SEQ ID NO: 416792 - RNA, 19 nt, Artificial Sequence
  Description of Artificial Sequence: Synthetic oligonucleotide
gacuuagguccuggcugca

SEQ ID NO: 416793 - RNA, 19 nt, Artificial Sequence
  Description of Artificial Sequence: Synthetic oligonucleotide
ggcggagaacguccucccc

SEQ ID NO: 416794 - RNA, 19 nt, Artificial Sequence
  Description of Artificial Sequence: Synthetic oligonucleotide
ggaguuugagaaaguauuu

SEQ ID NO: 416795 - RNA, 19 nt, Artificial Sequence
  Description of Artificial Sequence: Synthetic oligonucleotide
gggagucuaggaagagcug

SEQ ID NO: 416796 - RNA, 19 nt, Artificial Sequence
  Description of Artificial Sequence: Synthetic oligonucleotide
ggcaccugaccagaugcuc

SEQ ID NO: 416797 - RNA, 19 nt, Artificial Sequence
  Description of Artificial Sequence: Synthetic oligonucleotide
gcaucgccucuccauguca

SEQ ID NO: 416798 - RNA, 19 nt, Artificial Sequence
  Description of Artificial Sequence: Synthetic oligonucleotide
cugcaauagcaaccuucaa

SEQ ID NO: 416799 - RNA, 19 nt, Artificial Sequence
  Description of Artificial Sequence: Synthetic oligonucleotide
gugccgacuuauucaggcu

SEQ ID NO: 416800 - RNA, 19 nt, Artificial Sequence
  Description of Artificial Sequence: Synthetic oligonucleotide
gguuauucugcgccuggau

SEQ ID NO: 416801 - RNA, 19 nt, Artificial Sequence
  Description of Artificial Sequence: Synthetic oligonucleotide
cccgucauccgcagccggc

SEQ ID NO: 416802 - RNA, 19 nt, Artificial Sequence
  Description of Artificial Sequence: Synthetic oligonucleotide
ugcuuaagucagggccauc

SEQ ID NO: 416803 - RNA, 19 nt, Artificial Sequence
  Description of Artificial Sequence: Synthetic oligonucleotide
guguggcggcauugauggc

SEQ ID NO: 416804 - RNA, 19 nt, Artificial Sequence
  Description of Artificial Sequence: Synthetic oligonucleotide
guaggaccgugcaguuuca

SEQ ID NO: 416805 - RNA, 19 nt, Artificial Sequence
  Description of Artificial Sequence: Synthetic oligonucleotide
caagaggcggacucccaau

SEQ ID NO: 416806 - RNA, 19 nt, Artificial Sequence
  Description of Artificial Sequence: Synthetic oligonucleotide
cgcgacagggccagcgccg

SEQ ID NO: 416807 - RNA, 19 nt, Artificial Sequence
  Description of Artificial Sequence: Synthetic oligonucleotide
cuuaagucagggccaucuu

SEQ ID NO: 416808 - RNA, 19 nt, Artificial Sequence
  Description of Artificial Sequence: Synthetic oligonucleotide
cgggucaagaggcggacuc

SEQ ID NO: 416809 - RNA, 19 nt, Artificial Sequence
  Description of Artificial Sequence: Synthetic oligonucleotide
gcauuguguucaagcuggc

SEQ ID NO: 416810 - RNA, 19 nt, Artificial Sequence
  Description of Artificial Sequence: Synthetic oligonucleotide
gccauaaagacgagcuacu

SEQ ID NO: 416811 - RNA, 19 nt, Artificial Sequence
  Description of Artificial Sequence: Synthetic oligonucleotide
gcgcgcgccccguacuuag

SEQ ID NO: 416812 - RNA, 19 nt, Artificial Sequence
  Description of Artificial Sequence: Synthetic oligonucleotide
agguaggaccgugcaguuu

SEQ ID NO: 416813 - RNA, 19 nt, Artificial Sequence
  Description of Artificial Sequence: Synthetic oligonucleotide
uggcggggcggagaacguc

SEQ ID NO: 416814 - RNA, 19 nt, Artificial Sequence
  Description of Artificial Sequence: Synthetic oligonucleotide
gguagacuugagccaggua

SEQ ID NO: 416815 - RNA, 19 nt, Artificial Sequence
  Description of Artificial Sequence: Synthetic oligonucleotide
gacaggcggaaggggcgca

SEQ ID NO: 416816 - RNA, 19 nt, Artificial Sequence
  Description of Artificial Sequence: Synthetic oligonucleotide
ggcacacuaccuguguugu

SEQ ID NO: 416817 - RNA, 19 nt, Artificial Sequence
  Description of Artificial Sequence: Synthetic oligonucleotide
cuuuucgaucucucuuguu

SEQ ID NO: 416818 - RNA, 19 nt, Artificial Sequence
  Description of Artificial Sequence: Synthetic oligonucleotide
gcgugcccgccauugcggc

SEQ ID NO: 416819 - RNA, 19 nt, Artificial Sequence
  Description of Artificial Sequence: Synthetic oligonucleotide
gguaaagcucuggcacauc

SEQ ID NO: 416820 - RNA, 19 nt, Artificial Sequence
  Description of Artificial Sequence: Synthetic oligonucleotide
cgccaguuccaaacuguac

SEQ ID NO: 416821 - RNA, 19 nt, Artificial Sequence
  Description of Artificial Sequence: Synthetic oligonucleotide
ccauugcggccucaggaga

SEQ ID NO: 416822 - RNA, 19 nt, Artificial Sequence
  Description of Artificial Sequence: Synthetic oligonucleotide
caaagaaugcgagcaccuu

SEQ ID NO: 416823 - RNA, 19 nt, Artificial Sequence
  Description of Artificial Sequence: Synthetic oligonucleotide
gcgcgccccguacuuagac

SEQ ID NO: 416824 - RNA, 19 nt, Artificial Sequence
  Description of Artificial Sequence: Synthetic oligonucleotide
ccaucaugucauaguaagu

SEQ ID NO: 416825 - RNA, 19 nt, Artificial Sequence
  Description of Artificial Sequence: Synthetic oligonucleotide
uucugcgcuugugcaucuu

SEQ ID NO: 416826 - RNA, 19 nt, Artificial Sequence
  Description of Artificial Sequence: Synthetic oligonucleotide
cagcgcgcgcgccccguac

SEQ ID NO: 416827 - RNA, 19 nt, Artificial Sequence
  Description of Artificial Sequence: Synthetic oligonucleotide
ccccgaugugcucaggaaa

SEQ ID NO: 416828 - RNA, 19 nt, Artificial Sequence
  Description of Artificial Sequence: Synthetic oligonucleotide
cggcgugcccgccauugcg

SEQ ID NO: 416829 - RNA, 19 nt, Artificial Sequence
  Description of Artificial Sequence: Synthetic oligonucleotide
auggcggggcggagaacgu

SEQ ID NO: 416830 - RNA, 19 nt, Artificial Sequence
  Description of Artificial Sequence: Synthetic oligonucleotide
cccuuuccguugaugguaa

SEQ ID NO: 416831 - RNA, 19 nt, Artificial Sequence
  Description of Artificial Sequence: Synthetic oligonucleotide
ccgcaagccgcagcgcccg

SEQ ID NO: 416832 - RNA, 19 nt, Artificial Sequence
  Description of Artificial Sequence: Synthetic oligonucleotide
ggggcucuagcauggcuau

SEQ ID NO: 416833 - RNA, 19 nt, Artificial Sequence
  Description of Artificial Sequence: Synthetic oligonucleotide
gcagaggacuuaacaguua

SEQ ID NO: 416834 - RNA, 19 nt, Artificial Sequence
  Description of Artificial Sequence: Synthetic oligonucleotide
cccggaucuccgugcccgg

SEQ ID NO: 416835 - RNA, 19 nt, Artificial Sequence
  Description of Artificial Sequence: Synthetic oligonucleotide
ccacccgcgacagggccag

SEQ ID NO: 416836 - RNA, 19 nt, Artificial Sequence
  Description of Artificial Sequence: Synthetic oligonucleotide
gcgccccguacuuagacuu

SEQ ID NO: 416837 - RNA, 19 nt, Artificial Sequence
  Description of Artificial Sequence: Synthetic oligonucleotide
gacgagcuacucggaacuu

SEQ ID NO: 416838 - RNA, 19 nt, Artificial Sequence
  Description of Artificial Sequence: Synthetic oligonucleotide
cggagaacguccuccccga

SEQ ID NO: 416839 - RNA, 19 nt, Artificial Sequence
  Description of Artificial Sequence: Synthetic oligonucleotide
cagguaggaccgugcaguu

SEQ ID NO: 416840 - RNA, 19 nt, Artificial Sequence
  Description of Artificial Sequence: Synthetic oligonucleotide
ccccuuuccguugauggua

SEQ ID NO: 416841 - RNA, 19 nt, Artificial Sequence
  Description of Artificial Sequence: Synthetic oligonucleotide
ucccgcggcucggccgcgc

SEQ ID NO: 416842 - RNA, 19 nt, Artificial Sequence
  Description of Artificial Sequence: Synthetic oligonucleotide
gccgacuuauucaggcuau

SEQ ID NO: 416843 - RNA, 19 nt, Artificial Sequence
  Description of Artificial Sequence: Synthetic oligonucleotide
cgccccguacuuagacuug

SEQ ID NO: 416844 - RNA, 19 nt, Artificial Sequence
  Description of Artificial Sequence: Synthetic oligonucleotide
ccggcgugcccgccauugc

SEQ ID NO: 416845 - RNA, 19 nt, Artificial Sequence
  Description of Artificial Sequence: Synthetic oligonucleotide
ccggaucuccgugcccggc

SEQ ID NO: 416846 - RNA, 19 nt, Artificial Sequence
  Description of Artificial Sequence: Synthetic oligonucleotide
gccccguacuuagacuugu

SEQ ID NO: 416847 - RNA, 19 nt, Artificial Sequence
  Description of Artificial Sequence: Synthetic oligonucleotide
gcggacucccaaucucuuu

SEQ ID NO: 416848 - RNA, 19 nt, Artificial Sequence
  Description of Artificial Sequence: Synthetic oligonucleotide
gcgccuggauguagagaga

SEQ ID NO: 416849 - RNA, 19 nt, Artificial Sequence
  Description of Artificial Sequence: Synthetic oligonucleotide
gccgagcgacaggcggaag

SEQ ID NO: 416850 - RNA, 19 nt, Artificial Sequence
  Description of Artificial Sequence: Synthetic oligonucleotide
gccggcucgucgucguccu

SEQ ID NO: 416851 - RNA, 19 nt, Artificial Sequence
  Description of Artificial Sequence: Synthetic oligonucleotide
cgacaggcaccugaccaga

SEQ ID NO: 416852 - RNA, 19 nt, Artificial Sequence
  Description of Artificial Sequence: Synthetic oligonucleotide
cgucauccgcagccggcuc

SEQ ID NO: 416853 - RNA, 19 nt, Artificial Sequence
  Description of Artificial Sequence: Synthetic oligonucleotide
cgaucaccgcaagccgcag

SEQ ID NO: 416854 - RNA, 19 nt, Artificial Sequence
  Description of Artificial Sequence: Synthetic oligonucleotide
gcauggcuauucugcgcuu

SEQ ID NO: 416855 - RNA, 19 nt, Artificial Sequence
  Description of Artificial Sequence: Synthetic oligonucleotide
gcacacuaccuguguuguu

SEQ ID NO: 416856 - RNA, 19 nt, Artificial Sequence
  Description of Artificial Sequence: Synthetic oligonucleotide
ccgugcccggcgugcccgc

SEQ ID NO: 416857 - RNA, 19 nt, Artificial Sequence
  Description of Artificial Sequence: Synthetic oligonucleotide
ggcggacucccaaucucuu

SEQ ID NO: 416858 - RNA, 19 nt, Artificial Sequence
  Description of Artificial Sequence: Synthetic oligonucleotide
ccgugucgaugugguucac

SEQ ID NO: 416859 - RNA, 19 nt, Artificial Sequence
  Description of Artificial Sequence: Synthetic oligonucleotide
cggggcggagaacguccuc

SEQ ID NO: 416860 - RNA, 19 nt, Artificial Sequence
  Description of Artificial Sequence: Synthetic oligonucleotide
cgcgccccguacuuagacu

SEQ ID NO: 416861 - RNA, 19 nt, Artificial Sequence
  Description of Artificial Sequence: Synthetic oligonucleotide
gcggggcggagaacguccu

SEQ ID NO: 416862 - RNA, 19 nt, Artificial Sequence
  Description of Artificial Sequence: Synthetic oligonucleotide
gcccacuccaugggaugau

SEQ ID NO: 416863 - RNA, 19 nt, Artificial Sequence
  Description of Artificial Sequence: Synthetic oligonucleotide
ccucgggcgccgggcccag

SEQ ID NO: 416864 - RNA, 19 nt, Artificial Sequence
  Description of Artificial Sequence: Synthetic oligonucleotide
gcgccgccuggaacuucuc

SEQ ID NO: 416865 - RNA, 19 nt, Artificial Sequence
  Description of Artificial Sequence: Synthetic oligonucleotide
cgcgcgccccguacuuaga

SEQ ID NO: 416866 - RNA, 19 nt, Artificial Sequence
  Description of Artificial Sequence: Synthetic oligonucleotide
ccgacuuauucaggcuauu

SEQ ID NO: 416867 - RNA, 19 nt, Artificial Sequence
  Description of Artificial Sequence: Synthetic oligonucleotide
aaauuauuggcuuucgacc

SEQ ID NO: 416868 - RNA, 19 nt, Artificial Sequence
  Description of Artificial Sequence: Synthetic oligonucleotide
acuaaauuaaggcaagccc

SEQ ID NO: 416869 - RNA, 19 nt, Artificial Sequence
  Description of Artificial Sequence: Synthetic oligonucleotide
aaaacguuagcucccaaac

SEQ ID NO: 416870 - RNA, 19 nt, Artificial Sequence
  Description of Artificial Sequence: Synthetic oligonucleotide
auauuuagcagugacagcc

SEQ ID NO: 416871 - RNA, 19 nt, Artificial Sequence
  Description of Artificial Sequence: Synthetic oligonucleotide
aaauagugcaaucccaagg

SEQ ID NO: 416872 - RNA, 19 nt, Artificial Sequence
  Description of Artificial Sequence: Synthetic oligonucleotide
aguccauucuuuuacauac

SEQ ID NO: 416873 - RNA, 19 nt, Artificial Sequence
  Description of Artificial Sequence: Synthetic oligonucleotide
uguucuugcacuuuggugc

SEQ ID NO: 416874 - RNA, 19 nt, Artificial Sequence
  Description of Artificial Sequence: Synthetic oligonucleotide
uuuguaaauggacacauga

SEQ ID NO: 416875 - RNA, 19 nt, Artificial Sequence
  Description of Artificial Sequence: Synthetic oligonucleotide
aaaacagugcaugaaauag

SEQ ID NO: 416876 - RNA, 19 nt, Artificial Sequence
  Description of Artificial Sequence: Synthetic oligonucleotide
aaauccaagcuguagugac

SEQ ID NO: 416877 - RNA, 19 nt, Artificial Sequence
  Description of Artificial Sequence: Synthetic oligonucleotide
uuuaaaauuaccuucccaa

SEQ ID NO: 416878 - RNA, 19 nt, Artificial Sequence
  Description of Artificial Sequence: Synthetic oligonucleotide
uauguauuaaacuuaauuu

SEQ ID NO: 416879 - RNA, 19 nt, Artificial Sequence
  Description of Artificial Sequence: Synthetic oligonucleotide
ucuauugcaaaguaaggag

SEQ ID NO: 416880 - RNA, 19 nt, Artificial Sequence
  Description of Artificial Sequence: Synthetic oligonucleotide
acaaacuuaacacaucauc

SEQ ID NO: 416881 - RNA, 19 nt, Artificial Sequence
  Description of Artificial Sequence: Synthetic oligonucleotide
ucauauuuagcagugacag

SEQ ID NO: 416882 - RNA, 19 nt, Artificial Sequence
  Description of Artificial Sequence: Synthetic oligonucleotide
aauagugcaaucccaaggu

SEQ ID NO: 416883 - RNA, 19 nt, Artificial Sequence
  Description of Artificial Sequence: Synthetic oligonucleotide
uacacgguaaaucucauca

SEQ ID NO: 416884 - RNA, 19 nt, Artificial Sequence
  Description of Artificial Sequence: Synthetic oligonucleotide
aaggaugccaaccacaaga

SEQ ID NO: 416885 - RNA, 19 nt, Artificial Sequence
  Description of Artificial Sequence: Synthetic oligonucleotide
uuuaaaauccguauguaau

SEQ ID NO: 416886 - RNA, 19 nt, Artificial Sequence
  Description of Artificial Sequence: Synthetic oligonucleotide
aauuauuggcuuucgaccu

SEQ ID NO: 416887 - RNA, 19 nt, Artificial Sequence
  Description of Artificial Sequence: Synthetic oligonucleotide
aacugauugagacaggagu

SEQ ID NO: 416888 - RNA, 19 nt, Artificial Sequence
  Description of Artificial Sequence: Synthetic oligonucleotide
aaauccguauguaaugugc

SEQ ID NO: 416889 - RNA, 19 nt, Artificial Sequence
  Description of Artificial Sequence: Synthetic oligonucleotide
uuuaacuugcuucugacau

SEQ ID NO: 416890 - RNA, 19 nt, Artificial Sequence
  Description of Artificial Sequence: Synthetic oligonucleotide
aaacuuaacacaucaucug

SEQ ID NO: 416891 - RNA, 19 nt, Artificial Sequence
  Description of Artificial Sequence: Synthetic oligonucleotide
uguagugacaccuuuuagc

SEQ ID NO: 416892 - RNA, 19 nt, Artificial Sequence
  Description of Artificial Sequence: Synthetic oligonucleotide
uuaaacucuuguuuuaccc

SEQ ID NO: 416893 - RNA, 19 nt, Artificial Sequence
  Description of Artificial Sequence: Synthetic oligonucleotide
uauuuaggcauuaaacucu

SEQ ID NO: 416894 - RNA, 19 nt, Artificial Sequence
  Description of Artificial Sequence: Synthetic oligonucleotide
uugcuucugacauagauug

SEQ ID NO: 416895 - RNA, 19 nt, Artificial Sequence
  Description of Artificial Sequence: Synthetic oligonucleotide
uuauuuaggcauuaaacuc

SEQ ID NO: 416896 - RNA, 19 nt, Artificial Sequence
  Description of Artificial Sequence: Synthetic oligonucleotide
agcaccguugguuuuaacc

SEQ ID NO: 416897 - RNA, 19 nt, Artificial Sequence
  Description of Artificial Sequence: Synthetic oligonucleotide
uuaaaauccguauguaaug

SEQ ID NO: 416898 - RNA, 19 nt, Artificial Sequence
  Description of Artificial Sequence: Synthetic oligonucleotide
guaagcuguguucugaucg

SEQ ID NO: 416899 - RNA, 19 nt, Artificial Sequence
  Description of Artificial Sequence: Synthetic oligonucleotide
ugugcauauaugcugaaac

SEQ ID NO: 416900 - RNA, 19 nt, Artificial Sequence
  Description of Artificial Sequence: Synthetic oligonucleotide
uaaaauuaccuucccaaca

SEQ ID NO: 416901 - RNA, 19 nt, Artificial Sequence
  Description of Artificial Sequence: Synthetic oligonucleotide
uuucuuuggaggcuaaaag

SEQ ID NO: 416902 - RNA, 19 nt, Artificial Sequence
  Description of Artificial Sequence: Synthetic oligonucleotide
uuuagucugucaagaaugg

SEQ ID NO: 416903 - RNA, 19 nt, Artificial Sequence
  Description of Artificial Sequence: Synthetic oligonucleotide
aaacacacuacauuuguaa

SEQ ID NO: 416904 - RNA, 19 nt, Artificial Sequence
  Description of Artificial Sequence: Synthetic oligonucleotide
aaacuaacucagcauagug

SEQ ID NO: 416905 - RNA, 19 nt, Artificial Sequence
  Description of Artificial Sequence: Synthetic oligonucleotide
gaugccaaccacaagagcc

SEQ ID NO: 416906 - RNA, 19 nt, Artificial Sequence
  Description of Artificial Sequence: Synthetic oligonucleotide
uguaaauggacacaugaua

SEQ ID NO: 416907 - RNA, 19 nt, Artificial Sequence
  Description of Artificial Sequence: Synthetic oligonucleotide
accaaguccauucuuuuac

SEQ ID NO: 416908 - RNA, 19 nt, Artificial Sequence
  Description of Artificial Sequence: Synthetic oligonucleotide
cuauugcaaaguaaggagg

SEQ ID NO: 416909 - RNA, 19 nt, Artificial Sequence
  Description of Artificial Sequence: Synthetic oligonucleotide
uugauuccaaauuauuggc

SEQ ID NO: 416910 - RNA, 19 nt, Artificial Sequence
  Description of Artificial Sequence: Synthetic oligonucleotide
guaaauggacacaugauag

SEQ ID NO: 416911 - RNA, 19 nt, Artificial Sequence
  Description of Artificial Sequence: Synthetic oligonucleotide
uuggcuuucgaccuggggc

SEQ ID NO: 416912 - RNA, 19 nt, Artificial Sequence
  Description of Artificial Sequence: Synthetic oligonucleotide
uggagcuacaacuacauuc

SEQ ID NO: 416913 - RNA, 19 nt, Artificial Sequence
  Description of Artificial Sequence: Synthetic oligonucleotide
aacguuagcucccaaacau

SEQ ID NO: 416914 - RNA, 19 nt, Artificial Sequence
  Description of Artificial Sequence: Synthetic oligonucleotide
agaucuauugcaaaguaag

SEQ ID NO: 416915 - RNA, 19 nt, Artificial Sequence
  Description of Artificial Sequence: Synthetic oligonucleotide
ugcgcauacaucuucaaac

SEQ ID NO: 416916 - RNA, 19 nt, Artificial Sequence
  Description of Artificial Sequence: Synthetic oligonucleotide
uuacauaccaggcggagcu

SEQ ID NO: 416917 - RNA, 19 nt, Artificial Sequence
  Description of Artificial Sequence: Synthetic oligonucleotide
gaaugagcgcacuaagagg

SEQ ID NO: 416918 - RNA, 19 nt, Artificial Sequence
  Description of Artificial Sequence: Synthetic oligonucleotide
uguuuuacccacucuuggg

SEQ ID NO: 416919 - RNA, 19 nt, Artificial Sequence
  Description of Artificial Sequence: Synthetic oligonucleotide
aaugagcgcacuaagagga

SEQ ID NO: 416920 - RNA, 19 nt, Artificial Sequence
  Description of Artificial Sequence: Synthetic oligonucleotide
agucuauggcuucuguugc

SEQ ID NO: 416921 - RNA, 19 nt, Artificial Sequence
  Description of Artificial Sequence: Synthetic oligonucleotide
uaaacucccagucaugggu

SEQ ID NO: 416922 - RNA, 19 nt, Artificial Sequence
  Description of Artificial Sequence: Synthetic oligonucleotide
aaccucuugucuugaaggg

SEQ ID NO: 416923 - RNA, 19 nt, Artificial Sequence
  Description of Artificial Sequence: Synthetic oligonucleotide
uuaguacagaucuauugca

SEQ ID NO: 416924 - RNA, 19 nt, Artificial Sequence
  Description of Artificial Sequence: Synthetic oligonucleotide
ugcugaaacaaacaaacuu

SEQ ID NO: 416925 - RNA, 19 nt, Artificial Sequence
  Description of Artificial Sequence: Synthetic oligonucleotide
agaauauuugcgcauacau

SEQ ID NO: 416926 - RNA, 19 nt, Artificial Sequence
  Description of Artificial Sequence: Synthetic oligonucleotide
ucgucguaggacaugaagc

SEQ ID NO: 416927 - RNA, 19 nt, Artificial Sequence
  Description of Artificial Sequence: Synthetic oligonucleotide
aaccaugaaacauuuggau

SEQ ID NO: 416928 - RNA, 19 nt, Artificial Sequence
  Description of Artificial Sequence: Synthetic oligonucleotide
aaucccugauucaacauuc

SEQ ID NO: 416929 - RNA, 19 nt, Artificial Sequence
  Description of Artificial Sequence: Synthetic oligonucleotide
agaagcgcgaaaaggaugc

SEQ ID NO: 416930 - RNA, 19 nt, Artificial Sequence
  Description of Artificial Sequence: Synthetic oligonucleotide
aauuucacgccugaggaca

SEQ ID NO: 416931 - RNA, 19 nt, Artificial Sequence
  Description of Artificial Sequence: Synthetic oligonucleotide
agggacgccauguugcucc

SEQ ID NO: 416932 - RNA, 19 nt, Artificial Sequence
  Description of Artificial Sequence: Synthetic oligonucleotide
guuuuacccacucuugggg

SEQ ID NO: 416933 - RNA, 19 nt, Artificial Sequence
  Description of Artificial Sequence: Synthetic oligonucleotide
aacuacuaaauuaaggcaa

SEQ ID NO: 416934 - RNA, 19 nt, Artificial Sequence
  Description of Artificial Sequence: Synthetic oligonucleotide
cuaagggacgccauguugc

SEQ ID NO: 416935 - RNA, 19 nt, Artificial Sequence
  Description of Artificial Sequence: Synthetic oligonucleotide
caugacgagcuaaagaaug

SEQ ID NO: 416936 - RNA, 19 nt, Artificial Sequence
  Description of Artificial Sequence: Synthetic oligonucleotide
ugucuuaggaaugagcgca

SEQ ID NO: 416937 - RNA, 19 nt, Artificial Sequence
  Description of Artificial Sequence: Synthetic oligonucleotide
guugacauaucucaguaca

SEQ ID NO: 416938 - RNA, 19 nt, Artificial Sequence
  Description of Artificial Sequence: Synthetic oligonucleotide
uuccuaagagagucuaugg

SEQ ID NO: 416939 - RNA, 19 nt, Artificial Sequence
  Description of Artificial Sequence: Synthetic oligonucleotide
auaaguugauuccaaauua

SEQ ID NO: 416940 - RNA, 19 nt, Artificial Sequence
  Description of Artificial Sequence: Synthetic oligonucleotide
auagaauauuugcgcauac

SEQ ID NO: 416941 - RNA, 19 nt, Artificial Sequence
  Description of Artificial Sequence: Synthetic oligonucleotide
uggcugacaaucuuuuagg

SEQ ID NO: 416942 - RNA, 19 nt, Artificial Sequence
  Description of Artificial Sequence: Synthetic oligonucleotide
cacucuuggggcuacauag

SEQ ID NO: 416943 - RNA, 19 nt, Artificial Sequence
  Description of Artificial Sequence: Synthetic oligonucleotide
ucgguuggaaaccagcuga

SEQ ID NO: 416944 - RNA, 19 nt, Artificial Sequence
  Description of Artificial Sequence: Synthetic oligonucleotide
cuuaaacucccagucaugg

SEQ ID NO: 416945 - RNA, 19 nt, Artificial Sequence
  Description of Artificial Sequence: Synthetic oligonucleotide
uccuaagagagucuauggc

SEQ ID NO: 416946 - RNA, 19 nt, Artificial Sequence
  Description of Artificial Sequence: Synthetic oligonucleotide
acccaugucgguuggaaac

SEQ ID NO: 416947 - RNA, 19 nt, Artificial Sequence
  Description of Artificial Sequence: Synthetic oligonucleotide
uauggcuacguccuagggc

SEQ ID NO: 416948 - RNA, 19 nt, Artificial Sequence
  Description of Artificial Sequence: Synthetic oligonucleotide
auggcuacguccuagggcu

SEQ ID NO: 416949 - RNA, 19 nt, Artificial Sequence
  Description of Artificial Sequence: Synthetic oligonucleotide
aaggaugucugcaugacga

SEQ ID NO: 416950 - RNA, 19 nt, Artificial Sequence
  Description of Artificial Sequence: Synthetic oligonucleotide
agcuaaggaaacuaacuca

SEQ ID NO: 416951 - RNA, 19 nt, Artificial Sequence
  Description of Artificial Sequence: Synthetic oligonucleotide
cauuuggaugucauguuag

SEQ ID NO: 416952 - RNA, 19 nt, Artificial Sequence
  Description of Artificial Sequence: Synthetic oligonucleotide
aggaccuuuauggaugacc

SEQ ID NO: 416953 - RNA, 19 nt, Artificial Sequence
  Description of Artificial Sequence: Synthetic oligonucleotide
ugauuccaaauuauuggcu

SEQ ID NO: 416954 - RNA, 19 nt, Artificial Sequence
  Description of Artificial Sequence: Synthetic oligonucleotide
agggcuacugcuaauugcc

SEQ ID NO: 416955 - RNA, 19 nt, Artificial Sequence
  Description of Artificial Sequence: Synthetic oligonucleotide
aguugauuccaaauuauug

SEQ ID NO: 416956 - RNA, 19 nt, Artificial Sequence
  Description of Artificial Sequence: Synthetic oligonucleotide
gaucuauugcaaaguaagg

SEQ ID NO: 416957 - RNA, 19 nt, Artificial Sequence
  Description of Artificial Sequence: Synthetic oligonucleotide
ucuauuccgaagucguuug

SEQ ID NO: 416958 - RNA, 19 nt, Artificial Sequence
  Description of Artificial Sequence: Synthetic oligonucleotide
uuaaacucccagucauggg

SEQ ID NO: 416959 - RNA, 19 nt, Artificial Sequence
  Description of Artificial Sequence: Synthetic oligonucleotide
agaaaucccugauucaaca

SEQ ID NO: 416960 - RNA, 19 nt, Artificial Sequence
  Description of Artificial Sequence: Synthetic oligonucleotide
aaacguuagcucccaaaca

SEQ ID NO: 416961 - RNA, 19 nt, Artificial Sequence
  Description of Artificial Sequence: Synthetic oligonucleotide
ggaaugagcgcacuaagag

SEQ ID NO: 416962 - RNA, 19 nt, Artificial Sequence
  Description of Artificial Sequence: Synthetic oligonucleotide
uaaaauccguauguaaugu

SEQ ID NO: 416963 - RNA, 19 nt, Artificial Sequence
  Description of Artificial Sequence: Synthetic oligonucleotide
ugaaacauuuggaugucau

SEQ ID NO: 416964 - RNA, 19 nt, Artificial Sequence
  Description of Artificial Sequence: Synthetic oligonucleotide
auagcaugggucugguuag

SEQ ID NO: 416965 - RNA, 19 nt, Artificial Sequence
  Description of Artificial Sequence: Synthetic oligonucleotide
cuuaacacaucaucugcac

SEQ ID NO: 416966 - RNA, 19 nt, Artificial Sequence
  Description of Artificial Sequence: Synthetic oligonucleotide
ugacaaucuuuuaggaaac

SEQ ID NO: 416967 - RNA, 19 nt, Artificial Sequence
  Description of Artificial Sequence: Synthetic oligonucleotide
uuagcucccaaacaugaua

SEQ ID NO: 416968 - RNA, 19 nt, Artificial Sequence
  Description of Artificial Sequence: Synthetic oligonucleotide
ugcauauaugcugaaacaa

SEQ ID NO: 416969 - RNA, 19 nt, Artificial Sequence
  Description of Artificial Sequence: Synthetic oligonucleotide
aacuaacucagcauaguga

SEQ ID NO: 416970 - RNA, 19 nt, Artificial Sequence
  Description of Artificial Sequence: Synthetic oligonucleotide
ucgaaguacuccauugcca

SEQ ID NO: 416971 - RNA, 19 nt, Artificial Sequence
  Description of Artificial Sequence: Synthetic oligonucleotide
cagugcaugaaauagugca

SEQ ID NO: 416972 - RNA, 19 nt, Artificial Sequence
  Description of Artificial Sequence: Synthetic oligonucleotide
ucauguuagggcuucucac

SEQ ID NO: 416973 - RNA, 19 nt, Artificial Sequence
  Description of Artificial Sequence: Synthetic oligonucleotide
ucuagaaaaggaccuuuau

SEQ ID NO: 416974 - RNA, 19 nt, Artificial Sequence
  Description of Artificial Sequence: Synthetic oligonucleotide
aagaggaacgggcaccaca

SEQ ID NO: 416975 - RNA, 19 nt, Artificial Sequence
  Description of Artificial Sequence: Synthetic oligonucleotide
guuggaaaccagcugagca

SEQ ID NO: 416976 - RNA, 19 nt, Artificial Sequence
  Description of Artificial Sequence: Synthetic oligonucleotide
accuuuauggaugaccuug

SEQ ID NO: 416977 - RNA, 19 nt, Artificial Sequence
  Description of Artificial Sequence: Synthetic oligonucleotide
aggaaacuaacucagcaua

SEQ ID NO: 416978 - RNA, 19 nt, Artificial Sequence
  Description of Artificial Sequence: Synthetic oligonucleotide
ugugcaucggcuccaccag

SEQ ID NO: 416979 - RNA, 19 nt, Artificial Sequence
  Description of Artificial Sequence: Synthetic oligonucleotide
auuuagcagugacagccuc

SEQ ID NO: 416980 - RNA, 19 nt, Artificial Sequence
  Description of Artificial Sequence: Synthetic oligonucleotide
agaguugacauaucucagu

SEQ ID NO: 416981 - RNA, 19 nt, Artificial Sequence
  Description of Artificial Sequence: Synthetic oligonucleotide
uccuagggcugcaaaagug

SEQ ID NO: 416982 - RNA, 19 nt, Artificial Sequence
  Description of Artificial Sequence: Synthetic oligonucleotide
guuuaaaauccguauguaa

SEQ ID NO: 416983 - RNA, 19 nt, Artificial Sequence
  Description of Artificial Sequence: Synthetic oligonucleotide
agucguuuggauuuccuaa

SEQ ID NO: 416984 - RNA, 19 nt, Artificial Sequence
  Description of Artificial Sequence: Synthetic oligonucleotide
ugagcacugucuuaggaau

SEQ ID NO: 416985 - RNA, 19 nt, Artificial Sequence
  Description of Artificial Sequence: Synthetic oligonucleotide
accccaaucgucuuuacaa

SEQ ID NO: 416986 - RNA, 19 nt, Artificial Sequence
  Description of Artificial Sequence: Synthetic oligonucleotide
uuuuacauaccaggcggag

SEQ ID NO: 416987 - RNA, 19 nt, Artificial Sequence
  Description of Artificial Sequence: Synthetic oligonucleotide
uauuugcgcauacaucuuc

SEQ ID NO: 416988 - RNA, 19 nt, Artificial Sequence
  Description of Artificial Sequence: Synthetic oligonucleotide
ucuggagcuacaacuacau

SEQ ID NO: 416989 - RNA, 19 nt, Artificial Sequence
  Description of Artificial Sequence: Synthetic oligonucleotide
ucuguugccuuccuucgcu

SEQ ID NO: 416990 - RNA, 19 nt, Artificial Sequence
  Description of Artificial Sequence: Synthetic oligonucleotide
guucucggauccuaggaag

SEQ ID NO: 416991 - RNA, 19 nt, Artificial Sequence
  Description of Artificial Sequence: Synthetic oligonucleotide
cuaauugccccauuaccuc

SEQ ID NO: 416992 - RNA, 19 nt, Artificial Sequence
  Description of Artificial Sequence: Synthetic oligonucleotide
uccgaagucguuuggauuu

SEQ ID NO: 416993 - RNA, 19 nt, Artificial Sequence
  Description of Artificial Sequence: Synthetic oligonucleotide
acuacuaaauuaaggcaag

SEQ ID NO: 416994 - RNA, 19 nt, Artificial Sequence
  Description of Artificial Sequence: Synthetic oligonucleotide
guaaccucuugucuugaag

SEQ ID NO: 416995 - RNA, 19 nt, Artificial Sequence
  Description of Artificial Sequence: Synthetic oligonucleotide
cuaaggaaacuaacucagc

SEQ ID NO: 416996 - RNA, 19 nt, Artificial Sequence
  Description of Artificial Sequence: Synthetic oligonucleotide
ugaggauguuccuacugca

SEQ ID NO: 416997 - RNA, 19 nt, Artificial Sequence
  Description of Artificial Sequence: Synthetic oligonucleotide
uaguacagaucuauugcaa

SEQ ID NO: 416998 - RNA, 19 nt, Artificial Sequence
  Description of Artificial Sequence: Synthetic oligonucleotide
cuaaucucgucguaggaca

SEQ ID NO: 416999 - RNA, 19 nt, Artificial Sequence
  Description of Artificial Sequence: Synthetic oligonucleotide
uagggcuacugcuaauugc

SEQ ID NO: 417000 - RNA, 19 nt, Artificial Sequence
  Description of Artificial Sequence: Synthetic oligonucleotide
aggaacgggcaccacacag

SEQ ID NO: 417001 - RNA, 19 nt, Artificial Sequence
  Description of Artificial Sequence: Synthetic oligonucleotide
acacacuacauuuguaaau

SEQ ID NO: 417002 - RNA, 19 nt, Artificial Sequence
  Description of Artificial Sequence: Synthetic oligonucleotide
cuuggggcuacauagaaua

SEQ ID NO: 417003 - RNA, 19 nt, Artificial Sequence
  Description of Artificial Sequence: Synthetic oligonucleotide
cauauuuagcagugacagc

SEQ ID NO: 417004 - RNA, 19 nt, Artificial Sequence
  Description of Artificial Sequence: Synthetic oligonucleotide
agaggaacgggcaccacac

SEQ ID NO: 417005 - RNA, 19 nt, Artificial Sequence
  Description of Artificial Sequence: Synthetic oligonucleotide
aauccguauguaaugugca

SEQ ID NO: 417006 - RNA, 19 nt, Artificial Sequence
  Description of Artificial Sequence: Synthetic oligonucleotide
uuuacauaccaggcggagc

SEQ ID NO: 417007 - RNA, 19 nt, Artificial Sequence
  Description of Artificial Sequence: Synthetic oligonucleotide
cagcuaaggaaacuaacuc

SEQ ID NO: 417008 - RNA, 19 nt, Artificial Sequence
  Description of Artificial Sequence: Synthetic oligonucleotide
auauggcuacguccuaggg

SEQ ID NO: 417009 - RNA, 19 nt, Artificial Sequence
  Description of Artificial Sequence: Synthetic oligonucleotide
aaccgugcauucuguucac

SEQ ID NO: 417010 - RNA, 19 nt, Artificial Sequence
  Description of Artificial Sequence: Synthetic oligonucleotide
acgguaaaucucaucaauc

SEQ ID NO: 417011 - RNA, 19 nt, Artificial Sequence
  Description of Artificial Sequence: Synthetic oligonucleotide
uucgcuuccgaggagacuc

SEQ ID NO: 417012 - RNA, 19 nt, Artificial Sequence
  Description of Artificial Sequence: Synthetic oligonucleotide
agcuaaagaaugguuucuc

SEQ ID NO: 417013 - RNA, 19 nt, Artificial Sequence
  Description of Artificial Sequence: Synthetic oligonucleotide
uggcuuucgaccuggggca

SEQ ID NO: 417014 - RNA, 19 nt, Artificial Sequence
  Description of Artificial Sequence: Synthetic oligonucleotide
ugcaggcuaugaaauggcc

SEQ ID NO: 417015 - RNA, 19 nt, Artificial Sequence
  Description of Artificial Sequence: Synthetic oligonucleotide
gaaggucauauuuagcagu

SEQ ID NO: 417016 - RNA, 19 nt, Artificial Sequence
  Description of Artificial Sequence: Synthetic oligonucleotide
ucaguacacgguaaaucuc

SEQ ID NO: 417017 - RNA, 19 nt, Artificial Sequence
  Description of Artificial Sequence: Synthetic oligonucleotide
guagugacaccuuuuagcu

SEQ ID NO: 417018 - RNA, 19 nt, Artificial Sequence
  Description of Artificial Sequence: Synthetic oligonucleotide
uaauugccccauuaccucu

SEQ ID NO: 417019 - RNA, 19 nt, Artificial Sequence
  Description of Artificial Sequence: Synthetic oligonucleotide
ggagcuacaacuacauucc

SEQ ID NO: 417020 - RNA, 19 nt, Artificial Sequence
  Description of Artificial Sequence: Synthetic oligonucleotide
cacugucuuaggaaugagc

SEQ ID NO: 417021 - RNA, 19 nt, Artificial Sequence
  Description of Artificial Sequence: Synthetic oligonucleotide
uaucucaguacacgguaaa

SEQ ID NO: 417022 - RNA, 19 nt, Artificial Sequence
  Description of Artificial Sequence: Synthetic oligonucleotide
auuauuggcuuucgaccug

SEQ ID NO: 417023 - RNA, 19 nt, Artificial Sequence
  Description of Artificial Sequence: Synthetic oligonucleotide
auagugcaaucccaaggug

SEQ ID NO: 417024 - RNA, 19 nt, Artificial Sequence
  Description of Artificial Sequence: Synthetic oligonucleotide
augacgagcuaaagaaugg

SEQ ID NO: 417025 - RNA, 19 nt, Artificial Sequence
  Description of Artificial Sequence: Synthetic oligonucleotide
aacaaaccaugaaacauuu

SEQ ID NO: 417026 - RNA, 19 nt, Artificial Sequence
  Description of Artificial Sequence: Synthetic oligonucleotide
gaacaggacauuuuaugua

SEQ ID NO: 417027 - RNA, 19 nt, Artificial Sequence
  Description of Artificial Sequence: Synthetic oligonucleotide
gagcgcacuaagaggaacg

SEQ ID NO: 417028 - RNA, 19 nt, Artificial Sequence
  Description of Artificial Sequence: Synthetic oligonucleotide
aucgucuuuacaacaguag

SEQ ID NO: 417029 - RNA, 19 nt, Artificial Sequence
  Description of Artificial Sequence: Synthetic oligonucleotide
cucagaaauuucacgccug

SEQ ID NO: 417030 - RNA, 19 nt, Artificial Sequence
  Description of Artificial Sequence: Synthetic oligonucleotide
guucaugacgcauagccua

SEQ ID NO: 417031 - RNA, 19 nt, Artificial Sequence
  Description of Artificial Sequence: Synthetic oligonucleotide
aacagagguuggaauccac

SEQ ID NO: 417032 - RNA, 19 nt, Artificial Sequence
  Description of Artificial Sequence: Synthetic oligonucleotide
acagaucuauugcaaagua

SEQ ID NO: 417033 - RNA, 19 nt, Artificial Sequence
  Description of Artificial Sequence: Synthetic oligonucleotide
gaguugacauaucucagua

SEQ ID NO: 417034 - RNA, 19 nt, Artificial Sequence
  Description of Artificial Sequence: Synthetic oligonucleotide
caguacacgguaaaucuca

SEQ ID NO: 417035 - RNA, 19 nt, Artificial Sequence
  Description of Artificial Sequence: Synthetic oligonucleotide
aagccuaagggacgccaug

SEQ ID NO: 417036 - RNA, 19 nt, Artificial Sequence
  Description of Artificial Sequence: Synthetic oligonucleotide
uauuccgaagucguuugga

SEQ ID NO: 417037 - RNA, 19 nt, Artificial Sequence
  Description of Artificial Sequence: Synthetic oligonucleotide
gugcauauaugcugaaaca

SEQ ID NO: 417038 - RNA, 19 nt, Artificial Sequence
  Description of Artificial Sequence: Synthetic oligonucleotide
ugcaaaagugagaccugcu

SEQ ID NO: 417039 - RNA, 19 nt, Artificial Sequence
  Description of Artificial Sequence: Synthetic oligonucleotide
uuagcagugacagccucgu

SEQ ID NO: 417040 - RNA, 19 nt, Artificial Sequence
  Description of Artificial Sequence: Synthetic oligonucleotide
uuaacuugcuucugacaua

SEQ ID NO: 417041 - RNA, 19 nt, Artificial Sequence
  Description of Artificial Sequence: Synthetic oligonucleotide
ugacaggaauaacugcuua

SEQ ID NO: 417042 - RNA, 19 nt, Artificial Sequence
  Description of Artificial Sequence: Synthetic oligonucleotide
cuuuauggaugaccuuggc

SEQ ID NO: 417043 - RNA, 19 nt, Artificial Sequence
  Description of Artificial Sequence: Synthetic oligonucleotide
aguucucggauccuaggaa

SEQ ID NO: 417044 - RNA, 19 nt, Artificial Sequence
  Description of Artificial Sequence: Synthetic oligonucleotide
uggggcaccccaaucgucu

SEQ ID NO: 417045 - RNA, 19 nt, Artificial Sequence
  Description of Artificial Sequence: Synthetic oligonucleotide
gagaagcgcgaaaaggaug

SEQ ID NO: 417046 - RNA, 19 nt, Artificial Sequence
  Description of Artificial Sequence: Synthetic oligonucleotide
uuuaggcauuaaacucuug

SEQ ID NO: 417047 - RNA, 19 nt, Artificial Sequence
  Description of Artificial Sequence: Synthetic oligonucleotide
acuuaacacaucaucugca

SEQ ID NO: 417048 - RNA, 19 nt, Artificial Sequence
  Description of Artificial Sequence: Synthetic oligonucleotide
ugcauucuguucaccuaug

SEQ ID NO: 417049 - RNA, 19 nt, Artificial Sequence
  Description of Artificial Sequence: Synthetic oligonucleotide
gccuauaaaacagugcaug

SEQ ID NO: 417050 - RNA, 19 nt, Artificial Sequence
  Description of Artificial Sequence: Synthetic oligonucleotide
uucuauuccgaagucguuu

SEQ ID NO: 417051 - RNA, 19 nt, Artificial Sequence
  Description of Artificial Sequence: Synthetic oligonucleotide
guaauacuucaugggcucg

SEQ ID NO: 417052 - RNA, 19 nt, Artificial Sequence
  Description of Artificial Sequence: Synthetic oligonucleotide
gaguucucggauccuagga

SEQ ID NO: 417053 - RNA, 19 nt, Artificial Sequence
  Description of Artificial Sequence: Synthetic oligonucleotide
auuccgaagucguuuggau

SEQ ID NO: 417054 - RNA, 19 nt, Artificial Sequence
  Description of Artificial Sequence: Synthetic oligonucleotide
uccgaggagacuccucacu

SEQ ID NO: 417055 - RNA, 19 nt, Artificial Sequence
  Description of Artificial Sequence: Synthetic oligonucleotide
gggugauauggcuacgucc

SEQ ID NO: 417056 - RNA, 19 nt, Artificial Sequence
  Description of Artificial Sequence: Synthetic oligonucleotide
uguuagggcuucucacuga

SEQ ID NO: 417057 - RNA, 19 nt, Artificial Sequence
  Description of Artificial Sequence: Synthetic oligonucleotide
ggaaacuaacucagcauag

SEQ ID NO: 417058 - RNA, 19 nt, Artificial Sequence
  Description of Artificial Sequence: Synthetic oligonucleotide
uucaugacgcauagccuau

SEQ ID NO: 417059 - RNA, 19 nt, Artificial Sequence
  Description of Artificial Sequence: Synthetic oligonucleotide
cuauuccgaagucguuugg

SEQ ID NO: 417060 - RNA, 19 nt, Artificial Sequence
  Description of Artificial Sequence: Synthetic oligonucleotide
acgggcaccacacagcauu

SEQ ID NO: 417061 - RNA, 19 nt, Artificial Sequence
  Description of Artificial Sequence: Synthetic oligonucleotide
ccagucaugggugucaucc

SEQ ID NO: 417062 - RNA, 19 nt, Artificial Sequence
  Description of Artificial Sequence: Synthetic oligonucleotide
uguaagcuguguucugauc

SEQ ID NO: 417063 - RNA, 19 nt, Artificial Sequence
  Description of Artificial Sequence: Synthetic oligonucleotide
gugguccggagccagcgcg

SEQ ID NO: 417064 - RNA, 19 nt, Artificial Sequence
  Description of Artificial Sequence: Synthetic oligonucleotide
gucauguuagggcuucuca

SEQ ID NO: 417065 - RNA, 19 nt, Artificial Sequence
  Description of Artificial Sequence: Synthetic oligonucleotide
ggaggcuaaaagugcaggc

SEQ ID NO: 417066 - RNA, 19 nt, Artificial Sequence
  Description of Artificial Sequence: Synthetic oligonucleotide
aaucccaaggugccaucau

SEQ ID NO: 417067 - RNA, 19 nt, Artificial Sequence
  Description of Artificial Sequence: Synthetic oligonucleotide
uucugaucgccuggaagcc

SEQ ID NO: 417068 - RNA, 19 nt, Artificial Sequence
  Description of Artificial Sequence: Synthetic oligonucleotide
ugacgagcuaaagaauggu

SEQ ID NO: 417069 - RNA, 19 nt, Artificial Sequence
  Description of Artificial Sequence: Synthetic oligonucleotide
cauaucucaguacacggua

SEQ ID NO: 417070 - RNA, 19 nt, Artificial Sequence
  Description of Artificial Sequence: Synthetic oligonucleotide
guagggcuacugcuaauug

SEQ ID NO: 417071 - RNA, 19 nt, Artificial Sequence
  Description of Artificial Sequence: Synthetic oligonucleotide
gaugucauguuagggcuuc

SEQ ID NO: 417072 - RNA, 19 nt, Artificial Sequence
  Description of Artificial Sequence: Synthetic oligonucleotide
guuuuaaccugcugcugga

SEQ ID NO: 417073 - RNA, 19 nt, Artificial Sequence
  Description of Artificial Sequence: Synthetic oligonucleotide
uaagggacgccauguugcu

SEQ ID NO: 417074 - RNA, 19 nt, Artificial Sequence
  Description of Artificial Sequence: Synthetic oligonucleotide
gucauauuuagcagugaca

SEQ ID NO: 417075 - RNA, 19 nt, Artificial Sequence
  Description of Artificial Sequence: Synthetic oligonucleotide
gcuacauagaauauuuuaa

SEQ ID NO: 417076 - RNA, 19 nt, Artificial Sequence
  Description of Artificial Sequence: Synthetic oligonucleotide
cuuccuucgcuuccgagga

SEQ ID NO: 417077 - RNA, 19 nt, Artificial Sequence
  Description of Artificial Sequence: Synthetic oligonucleotide
cucgauggcuacgaugggc

SEQ ID NO: 417078 - RNA, 19 nt, Artificial Sequence
  Description of Artificial Sequence: Synthetic oligonucleotide
uuugcgcauacaucuucaa

SEQ ID NO: 417079 - RNA, 19 nt, Artificial Sequence
  Description of Artificial Sequence: Synthetic oligonucleotide
uuaccucuaggcucuccac

SEQ ID NO: 417080 - RNA, 19 nt, Artificial Sequence
  Description of Artificial Sequence: Synthetic oligonucleotide
agcgcacuaagaggaacgg

SEQ ID NO: 417081 - RNA, 19 nt, Artificial Sequence
  Description of Artificial Sequence: Synthetic oligonucleotide
uccguauguaaugugcaua

SEQ ID NO: 417082 - RNA, 19 nt, Artificial Sequence
  Description of Artificial Sequence: Synthetic oligonucleotide
ucugguuaguacagaucua

SEQ ID NO: 417083 - RNA, 19 nt, Artificial Sequence
  Description of Artificial Sequence: Synthetic oligonucleotide
cuuuuacauaccaggcgga

SEQ ID NO: 417084 - RNA, 19 nt, Artificial Sequence
  Description of Artificial Sequence: Synthetic oligonucleotide
aggaugccaaccacaagag

SEQ ID NO: 417085 - RNA, 19 nt, Artificial Sequence
  Description of Artificial Sequence: Synthetic oligonucleotide
cagucuauguaggagguga

SEQ ID NO: 417086 - RNA, 19 nt, Artificial Sequence
  Description of Artificial Sequence: Synthetic oligonucleotide
aggaaguauuauggcaaag

SEQ ID NO: 417087 - RNA, 19 nt, Artificial Sequence
  Description of Artificial Sequence: Synthetic oligonucleotide
ucggauccuaggaaguauu

SEQ ID NO: 417088 - RNA, 19 nt, Artificial Sequence
  Description of Artificial Sequence: Synthetic oligonucleotide
cacuaagaggaacgggcac

SEQ ID NO: 417089 - RNA, 19 nt, Artificial Sequence
  Description of Artificial Sequence: Synthetic oligonucleotide
aagcgcgaaaaggaugcca

SEQ ID NO: 417090 - RNA, 19 nt, Artificial Sequence
  Description of Artificial Sequence: Synthetic oligonucleotide
uuucuauuccgaagucguu

SEQ ID NO: 417091 - RNA, 19 nt, Artificial Sequence
  Description of Artificial Sequence: Synthetic oligonucleotide
acgagcuaaagaaugguuu

SEQ ID NO: 417092 - RNA, 19 nt, Artificial Sequence
  Description of Artificial Sequence: Synthetic oligonucleotide
ggaguucucggauccuagg

SEQ ID NO: 417093 - RNA, 19 nt, Artificial Sequence
  Description of Artificial Sequence: Synthetic oligonucleotide
gugagcacugucuuaggaa

SEQ ID NO: 417094 - RNA, 19 nt, Artificial Sequence
  Description of Artificial Sequence: Synthetic oligonucleotide
acauaucucaguacacggu

SEQ ID NO: 417095 - RNA, 19 nt, Artificial Sequence
  Description of Artificial Sequence: Synthetic oligonucleotide
gucuauggcuucuguugcc

SEQ ID NO: 417096 - RNA, 19 nt, Artificial Sequence
  Description of Artificial Sequence: Synthetic oligonucleotide
ucugacagaccaaguccau

SEQ ID NO: 417097 - RNA, 19 nt, Artificial Sequence
  Description of Artificial Sequence: Synthetic oligonucleotide
auuugcgcauacaucuuca

SEQ ID NO: 417098 - RNA, 19 nt, Artificial Sequence
  Description of Artificial Sequence: Synthetic oligonucleotide
uuccgaagucguuuggauu

SEQ ID NO: 417099 - RNA, 19 nt, Artificial Sequence
  Description of Artificial Sequence: Synthetic oligonucleotide
agucugucaagaauggguu

SEQ ID NO: 417100 - RNA, 19 nt, Artificial Sequence
  Description of Artificial Sequence: Synthetic oligonucleotide
caugucgguuggaaaccag

SEQ ID NO: 417101 - RNA, 19 nt, Artificial Sequence
  Description of Artificial Sequence: Synthetic oligonucleotide
ggacacaugauagugucca

SEQ ID NO: 417102 - RNA, 19 nt, Artificial Sequence
  Description of Artificial Sequence: Synthetic oligonucleotide
aucucgucguaggacauga

SEQ ID NO: 417103 - RNA, 19 nt, Artificial Sequence
  Description of Artificial Sequence: Synthetic oligonucleotide
cagaucuauugcaaaguaa

SEQ ID NO: 417104 - RNA, 19 nt, Artificial Sequence
  Description of Artificial Sequence: Synthetic oligonucleotide
cagagaacucaaggaaggc

SEQ ID NO: 417105 - RNA, 19 nt, Artificial Sequence
  Description of Artificial Sequence: Synthetic oligonucleotide
agcuggcuaaucucgucgu

SEQ ID NO: 417106 - RNA, 19 nt, Artificial Sequence
  Description of Artificial Sequence: Synthetic oligonucleotide
ugguuaguacagaucuauu

SEQ ID NO: 417107 - RNA, 19 nt, Artificial Sequence
  Description of Artificial Sequence: Synthetic oligonucleotide
acacgguaaaucucaucaa

SEQ ID NO: 417108 - RNA, 19 nt, Artificial Sequence
  Description of Artificial Sequence: Synthetic oligonucleotide
auccguauguaaugugcau

SEQ ID NO: 417109 - RNA, 19 nt, Artificial Sequence
  Description of Artificial Sequence: Synthetic oligonucleotide
ggcuacugcuaauugcccc

SEQ ID NO: 417110 - RNA, 19 nt, Artificial Sequence
  Description of Artificial Sequence: Synthetic oligonucleotide
uaacccaugucgguuggaa

SEQ ID NO: 417111 - RNA, 19 nt, Artificial Sequence
  Description of Artificial Sequence: Synthetic oligonucleotide
ugagcgcacuaagaggaac

SEQ ID NO: 417112 - RNA, 19 nt, Artificial Sequence
  Description of Artificial Sequence: Synthetic oligonucleotide
ucuagcaguuucuggucuu

SEQ ID NO: 417113 - RNA, 19 nt, Artificial Sequence
  Description of Artificial Sequence: Synthetic oligonucleotide
cugcaugacgagcuaaaga

SEQ ID NO: 417114 - RNA, 19 nt, Artificial Sequence
  Description of Artificial Sequence: Synthetic oligonucleotide
uccuucgcuuccgaggaga

SEQ ID NO: 417115 - RNA, 19 nt, Artificial Sequence
  Description of Artificial Sequence: Synthetic oligonucleotide
guuagggcuucucacugaa

SEQ ID NO: 417116 - RNA, 19 nt, Artificial Sequence
  Description of Artificial Sequence: Synthetic oligonucleotide
ugcggagcucagaaauuuc

SEQ ID NO: 417117 - RNA, 19 nt, Artificial Sequence
  Description of Artificial Sequence: Synthetic oligonucleotide
gaaacuaacucagcauagu

SEQ ID NO: 417118 - RNA, 19 nt, Artificial Sequence
  Description of Artificial Sequence: Synthetic oligonucleotide
uacguccuagggcugcaaa

SEQ ID NO: 417119 - RNA, 19 nt, Artificial Sequence
  Description of Artificial Sequence: Synthetic oligonucleotide
ucuuaggaaugagcgcacu

SEQ ID NO: 417120 - RNA, 19 nt, Artificial Sequence
  Description of Artificial Sequence: Synthetic oligonucleotide
agagaagcgcgaaaaggau

SEQ ID NO: 417121 - RNA, 19 nt, Artificial Sequence
  Description of Artificial Sequence: Synthetic oligonucleotide
aucggcuccaccagagaag

SEQ ID NO: 417122 - RNA, 19 nt, Artificial Sequence
  Description of Artificial Sequence: Synthetic oligonucleotide
ccuauaaaacagugcauga

SEQ ID NO: 417123 - RNA, 19 nt, Artificial Sequence
  Description of Artificial Sequence: Synthetic oligonucleotide
gcagugacagccucguuuc

SEQ ID NO: 417124 - RNA, 19 nt, Artificial Sequence
  Description of Artificial Sequence: Synthetic oligonucleotide
auuuaggcauuaaacucuu

SEQ ID NO: 417125 - RNA, 19 nt, Artificial Sequence
  Description of Artificial Sequence: Synthetic oligonucleotide
gugagaccugcugaaaaca

SEQ ID NO: 417126 - RNA, 19 nt, Artificial Sequence
  Description of Artificial Sequence: Synthetic oligonucleotide
augacgcauagccuauuuu

SEQ ID NO: 417127 - RNA, 19 nt, Artificial Sequence
  Description of Artificial Sequence: Synthetic oligonucleotide
gaggcuaaaagugcaggcu

SEQ ID NO: 417128 - RNA, 19 nt, Artificial Sequence
  Description of Artificial Sequence: Synthetic oligonucleotide
aggcggagcuggcuaaucu

SEQ ID NO: 417129 - RNA, 19 nt, Artificial Sequence
  Description of Artificial Sequence: Synthetic oligonucleotide
uggggcuacauagaauauu

SEQ ID NO: 417130 - RNA, 19 nt, Artificial Sequence
  Description of Artificial Sequence: Synthetic oligonucleotide
acguccuagggcugcaaaa

SEQ ID NO: 417131 - RNA, 19 nt, Artificial Sequence
  Description of Artificial Sequence: Synthetic oligonucleotide
gcuaaucucgucguaggac

SEQ ID NO: 417132 - RNA, 19 nt, Artificial Sequence
  Description of Artificial Sequence: Synthetic oligonucleotide
ggugauauggcuacguccu

SEQ ID NO: 417133 - RNA, 19 nt, Artificial Sequence
  Description of Artificial Sequence: Synthetic oligonucleotide
gcuacugcuaauugcccca

SEQ ID NO: 417134 - RNA, 19 nt, Artificial Sequence
  Description of Artificial Sequence: Synthetic oligonucleotide
guacacgguaaaucucauc

SEQ ID NO: 417135 - RNA, 19 nt, Artificial Sequence
  Description of Artificial Sequence: Synthetic oligonucleotide
auuucacgccugaggacag

SEQ ID NO: 417136 - RNA, 19 nt, Artificial Sequence
  Description of Artificial Sequence: Synthetic oligonucleotide
agcgcgaaaaggaugccaa

SEQ ID NO: 417137 - RNA, 19 nt, Artificial Sequence
  Description of Artificial Sequence: Synthetic oligonucleotide
accuucccaacaaaccaug

SEQ ID NO: 417138 - RNA, 19 nt, Artificial Sequence
  Description of Artificial Sequence: Synthetic oligonucleotide
uuccuacugcacuuuccau

SEQ ID NO: 417139 - RNA, 19 nt, Artificial Sequence
  Description of Artificial Sequence: Synthetic oligonucleotide
agcauuucuuuggaggcua

SEQ ID NO: 417140 - RNA, 19 nt, Artificial Sequence
  Description of Artificial Sequence: Synthetic oligonucleotide
uuuccacggcagcaaggau

SEQ ID NO: 417141 - RNA, 19 nt, Artificial Sequence
  Description of Artificial Sequence: Synthetic oligonucleotide
agccuaagggacgccaugu

SEQ ID NO: 417142 - RNA, 19 nt, Artificial Sequence
  Description of Artificial Sequence: Synthetic oligonucleotide
accuaugaucugggucugc

SEQ ID NO: 417143 - RNA, 19 nt, Artificial Sequence
  Description of Artificial Sequence: Synthetic oligonucleotide
caagccccugugaaguuca

SEQ ID NO: 417144 - RNA, 19 nt, Artificial Sequence
  Description of Artificial Sequence: Synthetic oligonucleotide
ucugaucgccuggaagccu

SEQ ID NO: 417145 - RNA, 19 nt, Artificial Sequence
  Description of Artificial Sequence: Synthetic oligonucleotide
uuccuucgcuuccgaggag

SEQ ID NO: 417146 - RNA, 19 nt, Artificial Sequence
  Description of Artificial Sequence: Synthetic oligonucleotide
auaucucaguacacgguaa

SEQ ID NO: 417147 - RNA, 19 nt, Artificial Sequence
  Description of Artificial Sequence: Synthetic oligonucleotide
accgugcauucuguucacc

SEQ ID NO: 417148 - RNA, 19 nt, Artificial Sequence
  Description of Artificial Sequence: Synthetic oligonucleotide
uccaccagagaagcgcgaa

SEQ ID NO: 417149 - RNA, 19 nt, Artificial Sequence
  Description of Artificial Sequence: Synthetic oligonucleotide
aucccaaggugccaucauu

SEQ ID NO: 417150 - RNA, 19 nt, Artificial Sequence
  Description of Artificial Sequence: Synthetic oligonucleotide
guaggacaugaagcugagg

SEQ ID NO: 417151 - RNA, 19 nt, Artificial Sequence
  Description of Artificial Sequence: Synthetic oligonucleotide
uucacgccugaggacaguc

SEQ ID NO: 417152 - RNA, 19 nt, Artificial Sequence
  Description of Artificial Sequence: Synthetic oligonucleotide
ucgcuuccgaggagacucc

SEQ ID NO: 417153 - RNA, 19 nt, Artificial Sequence
  Description of Artificial Sequence: Synthetic oligonucleotide
cccgcaauuccuguaauac

SEQ ID NO: 417154 - RNA, 19 nt, Artificial Sequence
  Description of Artificial Sequence: Synthetic oligonucleotide
acguuagcucccaaacaug

SEQ ID NO: 417155 - RNA, 19 nt, Artificial Sequence
  Description of Artificial Sequence: Synthetic oligonucleotide
ccuaagggacgccauguug

SEQ ID NO: 417156 - RNA, 19 nt, Artificial Sequence
  Description of Artificial Sequence: Synthetic oligonucleotide
cacaugauaguguccauuu

SEQ ID NO: 417157 - RNA, 19 nt, Artificial Sequence
  Description of Artificial Sequence: Synthetic oligonucleotide
ccuaagagagucuauggcu

SEQ ID NO: 417158 - RNA, 19 nt, Artificial Sequence
  Description of Artificial Sequence: Synthetic oligonucleotide
cuuaggaaugagcgcacua

SEQ ID NO: 417159 - RNA, 19 nt, Artificial Sequence
  Description of Artificial Sequence: Synthetic oligonucleotide
augaagcaacagagguugg

SEQ ID NO: 417160 - RNA, 19 nt, Artificial Sequence
  Description of Artificial Sequence: Synthetic oligonucleotide
ggaugccaaccacaagagc

SEQ ID NO: 417161 - RNA, 19 nt, Artificial Sequence
  Description of Artificial Sequence: Synthetic oligonucleotide
gaagcgcgaaaaggaugcc

SEQ ID NO: 417162 - RNA, 19 nt, Artificial Sequence
  Description of Artificial Sequence: Synthetic oligonucleotide
gucaagaauggguuuguuu

SEQ ID NO: 417163 - RNA, 19 nt, Artificial Sequence
  Description of Artificial Sequence: Synthetic oligonucleotide
ggcuacgaugggcagcgcc

SEQ ID NO: 417164 - RNA, 19 nt, Artificial Sequence
  Description of Artificial Sequence: Synthetic oligonucleotide
ggaacgggcaccacacagc

SEQ ID NO: 417165 - RNA, 19 nt, Artificial Sequence
  Description of Artificial Sequence: Synthetic oligonucleotide
gagagcccaugagucuucc

SEQ ID NO: 417166 - RNA, 19 nt, Artificial Sequence
  Description of Artificial Sequence: Synthetic oligonucleotide
cauuaccucuaggcucucc

SEQ ID NO: 417167 - RNA, 19 nt, Artificial Sequence
  Description of Artificial Sequence: Synthetic oligonucleotide
cauacuucaugaaggucau

SEQ ID NO: 417168 - RNA, 19 nt, Artificial Sequence
  Description of Artificial Sequence: Synthetic oligonucleotide
ccuagggcugcaaaaguga

SEQ ID NO: 417169 - RNA, 19 nt, Artificial Sequence
  Description of Artificial Sequence: Synthetic oligonucleotide
cacgguaaaucucaucaau

SEQ ID NO: 417170 - RNA, 19 nt, Artificial Sequence
  Description of Artificial Sequence: Synthetic oligonucleotide
aggucauauuuagcaguga

SEQ ID NO: 417171 - RNA, 19 nt, Artificial Sequence
  Description of Artificial Sequence: Synthetic oligonucleotide
auauuugcgcauacaucuu

SEQ ID NO: 417172 - RNA, 19 nt, Artificial Sequence
  Description of Artificial Sequence: Synthetic oligonucleotide
gcuaaaagugcaggcuaug

SEQ ID NO: 417173 - RNA, 19 nt, Artificial Sequence
  Description of Artificial Sequence: Synthetic oligonucleotide
gucuuaggaaugagcgcac

SEQ ID NO: 417174 - RNA, 19 nt, Artificial Sequence
  Description of Artificial Sequence: Synthetic oligonucleotide
acgccugaggacagucacg

SEQ ID NO: 417175 - RNA, 19 nt, Artificial Sequence
  Description of Artificial Sequence: Synthetic oligonucleotide
ggaccuuuauggaugaccu

SEQ ID NO: 417176 - RNA, 19 nt, Artificial Sequence
  Description of Artificial Sequence: Synthetic oligonucleotide
agcuguguucugaucgccu

SEQ ID NO: 417177 - RNA, 19 nt, Artificial Sequence
  Description of Artificial Sequence: Synthetic oligonucleotide
cugguuaguacagaucuau

SEQ ID NO: 417178 - RNA, 19 nt, Artificial Sequence
  Description of Artificial Sequence: Synthetic oligonucleotide
ucucgucguaggacaugaa

SEQ ID NO: 417179 - RNA, 19 nt, Artificial Sequence
  Description of Artificial Sequence: Synthetic oligonucleotide
gaucgccuggaagccuaag

SEQ ID NO: 417180 - RNA, 19 nt, Artificial Sequence
  Description of Artificial Sequence: Synthetic oligonucleotide
ugaucgccuggaagccuaa

SEQ ID NO: 417181 - RNA, 19 nt, Artificial Sequence
  Description of Artificial Sequence: Synthetic oligonucleotide
aguacacgguaaaucucau

SEQ ID NO: 417182 - RNA, 19 nt, Artificial Sequence
  Description of Artificial Sequence: Synthetic oligonucleotide
cugcauuguugucagggcu

SEQ ID NO: 417183 - RNA, 19 nt, Artificial Sequence
  Description of Artificial Sequence: Synthetic oligonucleotide
ggcaguugugcuuuaacuu

SEQ ID NO: 417184 - RNA, 19 nt, Artificial Sequence
  Description of Artificial Sequence: Synthetic oligonucleotide
agccucguuuccacggcag

SEQ ID NO: 417185 - RNA, 19 nt, Artificial Sequence
  Description of Artificial Sequence: Synthetic oligonucleotide
ccccaaucgucuuuacaac

SEQ ID NO: 417186 - RNA, 19 nt, Artificial Sequence
  Description of Artificial Sequence: Synthetic oligonucleotide
cccaaucgucuuuacaaca

SEQ ID NO: 417187 - RNA, 19 nt, Artificial Sequence
  Description of Artificial Sequence: Synthetic oligonucleotide
cuggggcaccccaaucguc

SEQ ID NO: 417188 - RNA, 19 nt, Artificial Sequence
  Description of Artificial Sequence: Synthetic oligonucleotide
gaggaacgggcaccacaca

SEQ ID NO: 417189 - RNA, 19 nt, Artificial Sequence
  Description of Artificial Sequence: Synthetic oligonucleotide
cugaucgccuggaagccua

SEQ ID NO: 417190 - RNA, 19 nt, Artificial Sequence
  Description of Artificial Sequence: Synthetic oligonucleotide
caaucgucuuuacaacagu

SEQ ID NO: 417191 - RNA, 19 nt, Artificial Sequence
  Description of Artificial Sequence: Synthetic oligonucleotide
ggcuaaucucgucguagga

SEQ ID NO: 417192 - RNA, 19 nt, Artificial Sequence
  Description of Artificial Sequence: Synthetic oligonucleotide
augucccgcaauuccugua

SEQ ID NO: 417193 - RNA, 19 nt, Artificial Sequence
  Description of Artificial Sequence: Synthetic oligonucleotide
acagucacgccagcaccgu

SEQ ID NO: 417194 - RNA, 19 nt, Artificial Sequence
  Description of Artificial Sequence: Synthetic oligonucleotide
ggcggagcuggcuaaucuc

SEQ ID NO: 417195 - RNA, 19 nt, Artificial Sequence
  Description of Artificial Sequence: Synthetic oligonucleotide
gcugcaaaagugagaccug

SEQ ID NO: 417196 - RNA, 19 nt, Artificial Sequence
  Description of Artificial Sequence: Synthetic oligonucleotide
gacgagcuaaagaaugguu

SEQ ID NO: 417197 - RNA, 19 nt, Artificial Sequence
  Description of Artificial Sequence: Synthetic oligonucleotide
caccccaaucgucuuuaca

SEQ ID NO: 417198 - RNA, 19 nt, Artificial Sequence
  Description of Artificial Sequence: Synthetic oligonucleotide
uuucacgccugaggacagu

SEQ ID NO: 417199 - RNA, 19 nt, Artificial Sequence
  Description of Artificial Sequence: Synthetic oligonucleotide
cccaugucgguuggaaacc

SEQ ID NO: 417200 - RNA, 19 nt, Artificial Sequence
  Description of Artificial Sequence: Synthetic oligonucleotide
ggggugauauggcuacguc

SEQ ID NO: 417201 - RNA, 19 nt, Artificial Sequence
  Description of Artificial Sequence: Synthetic oligonucleotide
ccgaggagacuccucacuc

SEQ ID NO: 417202 - RNA, 19 nt, Artificial Sequence
  Description of Artificial Sequence: Synthetic oligonucleotide
cguuuccacggcagcaagg

SEQ ID NO: 417203 - RNA, 19 nt, Artificial Sequence
  Description of Artificial Sequence: Synthetic oligonucleotide
guccuagggcugcaaaagu

SEQ ID NO: 417204 - RNA, 19 nt, Artificial Sequence
  Description of Artificial Sequence: Synthetic oligonucleotide
gcacuaagaggaacgggca

SEQ ID NO: 417205 - RNA, 19 nt, Artificial Sequence
  Description of Artificial Sequence: Synthetic oligonucleotide
guguaagcuguguucugau

SEQ ID NO: 417206 - RNA, 19 nt, Artificial Sequence
  Description of Artificial Sequence: Synthetic oligonucleotide
ucaugacgcauagccuauu

SEQ ID NO: 417207 - RNA, 19 nt, Artificial Sequence
  Description of Artificial Sequence: Synthetic oligonucleotide
cguccuagggcugcaaaag

SEQ ID NO: 417208 - RNA, 19 nt, Artificial Sequence
  Description of Artificial Sequence: Synthetic oligonucleotide
aagccccugugaaguucag

SEQ ID NO: 417209 - RNA, 19 nt, Artificial Sequence
  Description of Artificial Sequence: Synthetic oligonucleotide
gacacaugauaguguccau

SEQ ID NO: 417210 - RNA, 19 nt, Artificial Sequence
  Description of Artificial Sequence: Synthetic oligonucleotide
gugcaucggcuccaccaga

SEQ ID NO: 417211 - RNA, 19 nt, Artificial Sequence
  Description of Artificial Sequence: Synthetic oligonucleotide
ggggcuacauagaauauuu

SEQ ID NO: 417212 - RNA, 19 nt, Artificial Sequence
  Description of Artificial Sequence: Synthetic oligonucleotide
gaagccuaagggacgccau

SEQ ID NO: 417213 - RNA, 19 nt, Artificial Sequence
  Description of Artificial Sequence: Synthetic oligonucleotide
ggugguccggagccagcgc

SEQ ID NO: 417214 - RNA, 19 nt, Artificial Sequence
  Description of Artificial Sequence: Synthetic oligonucleotide
gugauauggcuacguccua

SEQ ID NO: 417215 - RNA, 19 nt, Artificial Sequence
  Description of Artificial Sequence: Synthetic oligonucleotide
gccucguuuccacggcagc

SEQ ID NO: 417216 - RNA, 19 nt, Artificial Sequence
  Description of Artificial Sequence: Synthetic oligonucleotide
gggcuacugcuaauugccc

SEQ ID NO: 417217 - RNA, 19 nt, Artificial Sequence
  Description of Artificial Sequence: Synthetic oligonucleotide
ccuucgcuuccgaggagac

SEQ ID NO: 417218 - RNA, 19 nt, Artificial Sequence
  Description of Artificial Sequence: Synthetic oligonucleotide
agccccugugaaguucagu

SEQ ID NO: 417219 - RNA, 19 nt, Artificial Sequence
  Description of Artificial Sequence: Synthetic oligonucleotide
gaccuuggcugacaaucuu

SEQ ID NO: 417220 - RNA, 19 nt, Artificial Sequence
  Description of Artificial Sequence: Synthetic oligonucleotide
uacccacucuuggggcuac

SEQ ID NO: 417221 - RNA, 19 nt, Artificial Sequence
  Description of Artificial Sequence: Synthetic oligonucleotide
cgguuggaaaccagcugag

SEQ ID NO: 417222 - RNA, 19 nt, Artificial Sequence
  Description of Artificial Sequence: Synthetic oligonucleotide
cuccaccagagaagcgcga

SEQ ID NO: 417223 - RNA, 19 nt, Artificial Sequence
  Description of Artificial Sequence: Synthetic oligonucleotide
ccguauguaaugugcauau

SEQ ID NO: 417224 - RNA, 19 nt, Artificial Sequence
  Description of Artificial Sequence: Synthetic oligonucleotide
gaccuuuauggaugaccuu

SEQ ID NO: 417225 - RNA, 19 nt, Artificial Sequence
  Description of Artificial Sequence: Synthetic oligonucleotide
augagcgcacuaagaggaa

SEQ ID NO: 417226 - RNA, 19 nt, Artificial Sequence
  Description of Artificial Sequence: Synthetic oligonucleotide
caugacgcauagccuauuu

SEQ ID NO: 417227 - RNA, 19 nt, Artificial Sequence
  Description of Artificial Sequence: Synthetic oligonucleotide
aacgggcaccacacagcau

SEQ ID NO: 417228 - RNA, 19 nt, Artificial Sequence
  Description of Artificial Sequence: Synthetic oligonucleotide
gcgcgaaaaggaugccaac

SEQ ID NO: 417229 - RNA, 19 nt, Artificial Sequence
  Description of Artificial Sequence: Synthetic oligonucleotide
gccgcgggcgccugggacc

SEQ ID NO: 417230 - RNA, 19 nt, Artificial Sequence
  Description of Artificial Sequence: Synthetic oligonucleotide
guaacccaugucgguugga

SEQ ID NO: 417231 - RNA, 19 nt, Artificial Sequence
  Description of Artificial Sequence: Synthetic oligonucleotide
gguccggagccagcgcggg

SEQ ID NO: 417232 - RNA, 19 nt, Artificial Sequence
  Description of Artificial Sequence: Synthetic oligonucleotide
guuagcucccaaacaugau

SEQ ID NO: 417233 - RNA, 19 nt, Artificial Sequence
  Description of Artificial Sequence: Synthetic oligonucleotide
cagccucguuuccacggca

SEQ ID NO: 417234 - RNA, 19 nt, Artificial Sequence
  Description of Artificial Sequence: Synthetic oligonucleotide
cagcaccguugguuuuaac

SEQ ID NO: 417235 - RNA, 19 nt, Artificial Sequence
  Description of Artificial Sequence: Synthetic oligonucleotide
cgcaauuccuguaauacuu

SEQ ID NO: 417236 - RNA, 19 nt, Artificial Sequence
  Description of Artificial Sequence: Synthetic oligonucleotide
cugggaccccggcggcggg

SEQ ID NO: 417237 - RNA, 19 nt, Artificial Sequence
  Description of Artificial Sequence: Synthetic oligonucleotide
cgucguaggacaugaagcu

SEQ ID NO: 417238 - RNA, 19 nt, Artificial Sequence
  Description of Artificial Sequence: Synthetic oligonucleotide
gggcagcgccaccagugug

SEQ ID NO: 417239 - RNA, 19 nt, Artificial Sequence
  Description of Artificial Sequence: Synthetic oligonucleotide
gcaagccccugugaaguuc

SEQ ID NO: 417240 - RNA, 19 nt, Artificial Sequence
  Description of Artificial Sequence: Synthetic oligonucleotide
ggauccuaggaaguauuau

SEQ ID NO: 417241 - RNA, 19 nt, Artificial Sequence
  Description of Artificial Sequence: Synthetic oligonucleotide
caggcggagcuggcuaauc

SEQ ID NO: 417242 - RNA, 19 nt, Artificial Sequence
  Description of Artificial Sequence: Synthetic oligonucleotide
gugcggagcucagaaauuu

SEQ ID NO: 417243 - RNA, 19 nt, Artificial Sequence
  Description of Artificial Sequence: Synthetic oligonucleotide
gccaaguguaagcuguguu

SEQ ID NO: 417244 - RNA, 19 nt, Artificial Sequence
  Description of Artificial Sequence: Synthetic oligonucleotide
ccugggaccccggcggcgg

SEQ ID NO: 417245 - RNA, 19 nt, Artificial Sequence
  Description of Artificial Sequence: Synthetic oligonucleotide
ggcuaaaagugcaggcuau

SEQ ID NO: 417246 - RNA, 19 nt, Artificial Sequence
  Description of Artificial Sequence: Synthetic oligonucleotide
ggcuaugaaauggccuaua

SEQ ID NO: 417247 - RNA, 19 nt, Artificial Sequence
  Description of Artificial Sequence: Synthetic oligonucleotide
ggcaccccaaucgucuuua

SEQ ID NO: 417248 - RNA, 19 nt, Artificial Sequence
  Description of Artificial Sequence: Synthetic oligonucleotide
ccgcaauuccuguaauacu

SEQ ID NO: 417249 - RNA, 19 nt, Artificial Sequence
  Description of Artificial Sequence: Synthetic oligonucleotide
ccuaugaucugggucugcu

SEQ ID NO: 417250 - RNA, 19 nt, Artificial Sequence
  Description of Artificial Sequence: Synthetic oligonucleotide
gcuuccgaggagacuccuc

SEQ ID NO: 417251 - RNA, 19 nt, Artificial Sequence
  Description of Artificial Sequence: Synthetic oligonucleotide
ccgaagucguuuggauuuc

SEQ ID NO: 417252 - RNA, 19 nt, Artificial Sequence
  Description of Artificial Sequence: Synthetic oligonucleotide
gggacgccauguugcucca

SEQ ID NO: 417253 - RNA, 19 nt, Artificial Sequence
  Description of Artificial Sequence: Synthetic oligonucleotide
cuucgcuuccgaggagacu

SEQ ID NO: 417254 - RNA, 19 nt, Artificial Sequence
  Description of Artificial Sequence: Synthetic oligonucleotide
cuacugcuaauugccccau

SEQ ID NO: 417255 - RNA, 19 nt, Artificial Sequence
  Description of Artificial Sequence: Synthetic oligonucleotide
cuacguccuagggcugcaa

SEQ ID NO: 417256 - RNA, 19 nt, Artificial Sequence
  Description of Artificial Sequence: Synthetic oligonucleotide
acccacucuuggggcuaca

SEQ ID NO: 417257 - RNA, 19 nt, Artificial Sequence
  Description of Artificial Sequence: Synthetic oligonucleotide
accccggcggcggggccug

SEQ ID NO: 417258 - RNA, 19 nt, Artificial Sequence
  Description of Artificial Sequence: Synthetic oligonucleotide
cggauccuaggaaguauua

SEQ ID NO: 417259 - RNA, 19 nt, Artificial Sequence
  Description of Artificial Sequence: Synthetic oligonucleotide
ggugcggagcucagaaauu

SEQ ID NO: 417260 - RNA, 19 nt, Artificial Sequence
  Description of Artificial Sequence: Synthetic oligonucleotide
gccuaagggacgccauguu

SEQ ID NO: 417261 - RNA, 19 nt, Artificial Sequence
  Description of Artificial Sequence: Synthetic oligonucleotide
cguauguaaugugcauaua

SEQ ID NO: 417262 - RNA, 19 nt, Artificial Sequence
  Description of Artificial Sequence: Synthetic oligonucleotide
ccagcaccguugguuuuaa

SEQ ID NO: 417263 - RNA, 19 nt, Artificial Sequence
  Description of Artificial Sequence: Synthetic oligonucleotide
ggggcaccccaaucgucuu

SEQ ID NO: 417264 - RNA, 19 nt, Artificial Sequence
  Description of Artificial Sequence: Synthetic oligonucleotide
gggcaccccaaucgucuuu

SEQ ID NO: 417265 - RNA, 19 nt, Artificial Sequence
  Description of Artificial Sequence: Synthetic oligonucleotide
ccaggcggagcuggcuaau

SEQ ID NO: 417266 - RNA, 19 nt, Artificial Sequence
  Description of Artificial Sequence: Synthetic oligonucleotide
cgcuuccgaggagacuccu

SEQ ID NO: 417267 - RNA, 19 nt, Artificial Sequence
  Description of Artificial Sequence: Synthetic oligonucleotide
auuuauaugcccuagggac

SEQ ID NO: 417268 - RNA, 19 nt, Artificial Sequence
  Description of Artificial Sequence: Synthetic oligonucleotide
aauguuaauauacuuccuc

SEQ ID NO: 417269 - RNA, 19 nt, Artificial Sequence
  Description of Artificial Sequence: Synthetic oligonucleotide
aaauuuuagacuaguacac

SEQ ID NO: 417270 - RNA, 19 nt, Artificial Sequence
  Description of Artificial Sequence: Synthetic oligonucleotide
aaggaguuaauuuuaguug

SEQ ID NO: 417271 - RNA, 19 nt, Artificial Sequence
  Description of Artificial Sequence: Synthetic oligonucleotide
  modified_base (12)..(12): a, c, u, g, unknown or other
aauucauuauunucccuac

SEQ ID NO: 417272 - RNA, 19 nt, Artificial Sequence
  Description of Artificial Sequence: Synthetic oligonucleotide
ugaaauuuuagacuaguac

SEQ ID NO: 417273 - RNA, 19 nt, Artificial Sequence
  Description of Artificial Sequence: Synthetic oligonucleotide
uagacuaguacacugaaga

SEQ ID NO: 417274 - RNA, 19 nt, Artificial Sequence
  Description of Artificial Sequence: Synthetic oligonucleotide
uauuaauauguucaggaga

SEQ ID NO: 417275 - RNA, 19 nt, Artificial Sequence
  Description of Artificial Sequence: Synthetic oligonucleotide
acauuauuaaagcauagug

SEQ ID NO: 417276 - RNA, 19 nt, Artificial Sequence
  Description of Artificial Sequence: Synthetic oligonucleotide
uauugucagauacauauug

SEQ ID NO: 417277 - RNA, 19 nt, Artificial Sequence
  Description of Artificial Sequence: Synthetic oligonucleotide
aguaaauguagguugaugu

SEQ ID NO: 417278 - RNA, 19 nt, Artificial Sequence
  Description of Artificial Sequence: Synthetic oligonucleotide
augaugugcguuuaugugc

SEQ ID NO: 417279 - RNA, 19 nt, Artificial Sequence
  Description of Artificial Sequence: Synthetic oligonucleotide
gaucguuuaacacugcugc

SEQ ID NO: 417280 - RNA, 19 nt, Artificial Sequence
  Description of Artificial Sequence: Synthetic oligonucleotide
  modified_base (6)..(6): a, c, u, g, unknown or other
uuauunucccuacucagcc

SEQ ID NO: 417281 - RNA, 19 nt, Artificial Sequence
  Description of Artificial Sequence: Synthetic oligonucleotide
ucggagagaugacagaucg

SEQ ID NO: 417282 - RNA, 19 nt, Artificial Sequence
  Description of Artificial Sequence: Synthetic oligonucleotide
uaacgauguauuaauaugu

SEQ ID NO: 417283 - RNA, 19 nt, Artificial Sequence
  Description of Artificial Sequence: Synthetic oligonucleotide
ucaagcuuaaugcaaaguc

SEQ ID NO: 417284 - RNA, 19 nt, Artificial Sequence
  Description of Artificial Sequence: Synthetic oligonucleotide
uugauguuacacaagagaa

SEQ ID NO: 417285 - RNA, 19 nt, Artificial Sequence
  Description of Artificial Sequence: Synthetic oligonucleotide
  modified_base (7)..(7): a, c, u, g, unknown or other
auuauunucccuacucagc

SEQ ID NO: 417286 - RNA, 19 nt, Artificial Sequence
  Description of Artificial Sequence: Synthetic oligonucleotide
cuguucguagcuaacaacg

SEQ ID NO: 417287 - RNA, 19 nt, Artificial Sequence
  Description of Artificial Sequence: Synthetic oligonucleotide
aguuaugcgagguuagagg

SEQ ID NO: 417288 - RNA, 19 nt, Artificial Sequence
  Description of Artificial Sequence: Synthetic oligonucleotide
  modified_base (4)..(4): a, c, u, g, unknown or other
ugunucauguguaacacuu

SEQ ID NO: 417289 - RNA, 19 nt, Artificial Sequence
  Description of Artificial Sequence: Synthetic oligonucleotide
uuaauauacuuccucucug

SEQ ID NO: 417290 - RNA, 19 nt, Artificial Sequence
  Description of Artificial Sequence: Synthetic oligonucleotide
uuagcucguagcauggagg

SEQ ID NO: 417291 - RNA, 19 nt, Artificial Sequence
  Description of Artificial Sequence: Synthetic oligonucleotide
aaauguagguugauguuac

SEQ ID NO: 417292 - RNA, 19 nt, Artificial Sequence
  Description of Artificial Sequence: Synthetic oligonucleotide
  modified_base (9)..(9): a, c, u, g, unknown or other
ucauuauunucccuacuca

SEQ ID NO: 417293 - RNA, 19 nt, Artificial Sequence
  Description of Artificial Sequence: Synthetic oligonucleotide
ucauacuauucucaaagac

SEQ ID NO: 417294 - RNA, 19 nt, Artificial Sequence
  Description of Artificial Sequence: Synthetic oligonucleotide
  modified_base (15)..(15): a, c, u, g, unknown or other
uacaauucauuauunuccc

SEQ ID NO: 417295 - RNA, 19 nt, Artificial Sequence
  Description of Artificial Sequence: Synthetic oligonucleotide
auuuuagacuaguacacug

SEQ ID NO: 417296 - RNA, 19 nt, Artificial Sequence
  Description of Artificial Sequence: Synthetic oligonucleotide
uaagucuaauuccaguuga

SEQ ID NO: 417297 - RNA, 19 nt, Artificial Sequence
  Description of Artificial Sequence: Synthetic oligonucleotide
augacagaucguuuaacac

SEQ ID NO: 417298 - RNA, 19 nt, Artificial Sequence
  Description of Artificial Sequence: Synthetic oligonucleotide
cuuagguucacaacuucgg

SEQ ID NO: 417299 - RNA, 19 nt, Artificial Sequence
  Description of Artificial Sequence: Synthetic oligonucleotide
acaacuucgguugucaccg

SEQ ID NO: 417300 - RNA, 19 nt, Artificial Sequence
  Description of Artificial Sequence: Synthetic oligonucleotide
uuuuagacuaguacacuga

SEQ ID NO: 417301 - RNA, 19 nt, Artificial Sequence
  Description of Artificial Sequence: Synthetic oligonucleotide
cucucuuaguccaucaugc

SEQ ID NO: 417302 - RNA, 19 nt, Artificial Sequence
  Description of Artificial Sequence: Synthetic oligonucleotide
uggacuguuaauaaacuau

SEQ ID NO: 417303 - RNA, 19 nt, Artificial Sequence
  Description of Artificial Sequence: Synthetic oligonucleotide
  modified_base (8)..(8): a, c, u, g, unknown or other
cauuauunucccuacucag

SEQ ID NO: 417304 - RNA, 19 nt, Artificial Sequence
  Description of Artificial Sequence: Synthetic oligonucleotide
ucucaaguuuauaagguuc

SEQ ID NO: 417305 - RNA, 19 nt, Artificial Sequence
  Description of Artificial Sequence: Synthetic oligonucleotide
uuaauugucugccucucac

SEQ ID NO: 417306 - RNA, 19 nt, Artificial Sequence
  Description of Artificial Sequence: Synthetic oligonucleotide
ugacagaucguuuaacacu

SEQ ID NO: 417307 - RNA, 19 nt, Artificial Sequence
  Description of Artificial Sequence: Synthetic oligonucleotide
uuuuagaaggagcucgcca

SEQ ID NO: 417308 - RNA, 19 nt, Artificial Sequence
  Description of Artificial Sequence: Synthetic oligonucleotide
uuuauaugcccuagggaca

SEQ ID NO: 417309 - RNA, 19 nt, Artificial Sequence
  Description of Artificial Sequence: Synthetic oligonucleotide
uuuagcucguagcauggag

SEQ ID NO: 417310 - RNA, 19 nt, Artificial Sequence
  Description of Artificial Sequence: Synthetic oligonucleotide
cacuguuagagucuggcgg

SEQ ID NO: 417311 - RNA, 19 nt, Artificial Sequence
  Description of Artificial Sequence: Synthetic oligonucleotide
auauuacaucaguuaagcg

SEQ ID NO: 417312 - RNA, 19 nt, Artificial Sequence
  Description of Artificial Sequence: Synthetic oligonucleotide
uuagaggucacaauaugua

SEQ ID NO: 417313 - RNA, 19 nt, Artificial Sequence
  Description of Artificial Sequence: Synthetic oligonucleotide
uuaucucggcguuuuaucc

SEQ ID NO: 417314 - RNA, 19 nt, Artificial Sequence
  Description of Artificial Sequence: Synthetic oligonucleotide
auacauauuggacuguuaa

SEQ ID NO: 417315 - RNA, 19 nt, Artificial Sequence
  Description of Artificial Sequence: Synthetic oligonucleotide
uuguuaucuuacaaaacuc

SEQ ID NO: 417316 - RNA, 19 nt, Artificial Sequence
  Description of Artificial Sequence: Synthetic oligonucleotide
gaugacagaucguuuaaca

SEQ ID NO: 417317 - RNA, 19 nt, Artificial Sequence
  Description of Artificial Sequence: Synthetic oligonucleotide
  modified_base (7)..(7): a, c, u, g, unknown or other
agcugunucauguguaaca

SEQ ID NO: 417318 - RNA, 19 nt, Artificial Sequence
  Description of Artificial Sequence: Synthetic oligonucleotide
uuccgcauuucacagaggu

SEQ ID NO: 417319 - RNA, 19 nt, Artificial Sequence
  Description of Artificial Sequence: Synthetic oligonucleotide
uuuagaaggagcucgccau

SEQ ID NO: 417320 - RNA, 19 nt, Artificial Sequence
  Description of Artificial Sequence: Synthetic oligonucleotide
cucguuuucaauaugucga

SEQ ID NO: 417321 - RNA, 19 nt, Artificial Sequence
  Description of Artificial Sequence: Synthetic oligonucleotide
uuagacuaguacacugaag

SEQ ID NO: 417322 - RNA, 19 nt, Artificial Sequence
  Description of Artificial Sequence: Synthetic oligonucleotide
uuuagacuaguacacugaa

SEQ ID NO: 417323 - RNA, 19 nt, Artificial Sequence
  Description of Artificial Sequence: Synthetic oligonucleotide
uggcauaagucuaauucca

SEQ ID NO: 417324 - RNA, 19 nt, Artificial Sequence
  Description of Artificial Sequence: Synthetic oligonucleotide
gacagaucguuuaacacug

SEQ ID NO: 417325 - RNA, 19 nt, Artificial Sequence
  Description of Artificial Sequence: Synthetic oligonucleotide
ugucacuuuagcucguagc

SEQ ID NO: 417326 - RNA, 19 nt, Artificial Sequence
  Description of Artificial Sequence: Synthetic oligonucleotide
aucguuuaacacugcugcc

SEQ ID NO: 417327 - RNA, 19 nt, Artificial Sequence
  Description of Artificial Sequence: Synthetic oligonucleotide
ugaugugcguuuaugugcu

SEQ ID NO: 417328 - RNA, 19 nt, Artificial Sequence
  Description of Artificial Sequence: Synthetic oligonucleotide
aauuuuagacuaguacacu

SEQ ID NO: 417329 - RNA, 19 nt, Artificial Sequence
  Description of Artificial Sequence: Synthetic oligonucleotide
ucgcuaauagucucgcucc

SEQ ID NO: 417330 - RNA, 19 nt, Artificial Sequence
  Description of Artificial Sequence: Synthetic oligonucleotide
uucaauuuauaugcccuag

SEQ ID NO: 417331 - RNA, 19 nt, Artificial Sequence
  Description of Artificial Sequence: Synthetic oligonucleotide
ugacacaaccuugaaagug

SEQ ID NO: 417332 - RNA, 19 nt, Artificial Sequence
  Description of Artificial Sequence: Synthetic oligonucleotide
aagcuuaaugcaaaguccu

SEQ ID NO: 417333 - RNA, 19 nt, Artificial Sequence
  Description of Artificial Sequence: Synthetic oligonucleotide
auguagguugauguuacac

SEQ ID NO: 417334 - RNA, 19 nt, Artificial Sequence
  Description of Artificial Sequence: Synthetic oligonucleotide
uuauaugcccuagggacag

SEQ ID NO: 417335 - RNA, 19 nt, Artificial Sequence
  Description of Artificial Sequence: Synthetic oligonucleotide
guuguaugaaccaaaucac

SEQ ID NO: 417336 - RNA, 19 nt, Artificial Sequence
  Description of Artificial Sequence: Synthetic oligonucleotide
gguauugucagauacauau

SEQ ID NO: 417337 - RNA, 19 nt, Artificial Sequence
  Description of Artificial Sequence: Synthetic oligonucleotide
ucguagcuaacaacgauuc

SEQ ID NO: 417338 - RNA, 19 nt, Artificial Sequence
  Description of Artificial Sequence: Synthetic oligonucleotide
agcauggagguuucucggc

SEQ ID NO: 417339 - RNA, 19 nt, Artificial Sequence
  Description of Artificial Sequence: Synthetic oligonucleotide
gauaacgauguauuaauau

SEQ ID NO: 417340 - RNA, 19 nt, Artificial Sequence
  Description of Artificial Sequence: Synthetic oligonucleotide
cauuauuaaagcauagugu

SEQ ID NO: 417341 - RNA, 19 nt, Artificial Sequence
  Description of Artificial Sequence: Synthetic oligonucleotide
gagaucugagacucguaag

SEQ ID NO: 417342 - RNA, 19 nt, Artificial Sequence
  Description of Artificial Sequence: Synthetic oligonucleotide
uuuaauugucugccucuca

SEQ ID NO: 417343 - RNA, 19 nt, Artificial Sequence
  Description of Artificial Sequence: Synthetic oligonucleotide
agaggucacaauauguauc

SEQ ID NO: 417344 - RNA, 19 nt, Artificial Sequence
  Description of Artificial Sequence: Synthetic oligonucleotide
  modified_base (14)..(14): a, c, u, g, unknown or other
acaauucauuauunucccu

SEQ ID NO: 417345 - RNA, 19 nt, Artificial Sequence
  Description of Artificial Sequence: Synthetic oligonucleotide
uguucguagcuaacaacga

SEQ ID NO: 417346 - RNA, 19 nt, Artificial Sequence
  Description of Artificial Sequence: Synthetic oligonucleotide
uucuaguguaguuuucuaa

SEQ ID NO: 417347 - RNA, 19 nt, Artificial Sequence
  Description of Artificial Sequence: Synthetic oligonucleotide
aacucacugaaaaccauca

SEQ ID NO: 417348 - RNA, 19 nt, Artificial Sequence
  Description of Artificial Sequence: Synthetic oligonucleotide
agagaugacagaucguuua

SEQ ID NO: 417349 - RNA, 19 nt, Artificial Sequence
  Description of Artificial Sequence: Synthetic oligonucleotide
uuaaugcaaaguccucgga

SEQ ID NO: 417350 - RNA, 19 nt, Artificial Sequence
  Description of Artificial Sequence: Synthetic oligonucleotide
uggucuaaccuuuuccuaa

SEQ ID NO: 417351 - RNA, 19 nt, Artificial Sequence
  Description of Artificial Sequence: Synthetic oligonucleotide
auaauuucuggaugauaga

SEQ ID NO: 417352 - RNA, 19 nt, Artificial Sequence
  Description of Artificial Sequence: Synthetic oligonucleotide
cacuuuagcucguagcaug

SEQ ID NO: 417353 - RNA, 19 nt, Artificial Sequence
  Description of Artificial Sequence: Synthetic oligonucleotide
ucuguucguagcuaacaac

SEQ ID NO: 417354 - RNA, 19 nt, Artificial Sequence
  Description of Artificial Sequence: Synthetic oligonucleotide
gauuguucgcucucguuca

SEQ ID NO: 417355 - RNA, 19 nt, Artificial Sequence
  Description of Artificial Sequence: Synthetic oligonucleotide
aaaugccccaaauuuccau

SEQ ID NO: 417356 - RNA, 19 nt, Artificial Sequence
  Description of Artificial Sequence: Synthetic oligonucleotide
uccagaaauuuacuagauc

SEQ ID NO: 417357 - RNA, 19 nt, Artificial Sequence
  Description of Artificial Sequence: Synthetic oligonucleotide
  modified_base (4)..(4): a, c, u, g, unknown or other
auunucccuacucagccuu

SEQ ID NO: 417358 - RNA, 19 nt, Artificial Sequence
  Description of Artificial Sequence: Synthetic oligonucleotide
cuuaucucggcguuuuauc

SEQ ID NO: 417359 - RNA, 19 nt, Artificial Sequence
  Description of Artificial Sequence: Synthetic oligonucleotide
gauucgcaggaacaaguac

SEQ ID NO: 417360 - RNA, 19 nt, Artificial Sequence
  Description of Artificial Sequence: Synthetic oligonucleotide
gauuuuagaaggagcucgc

SEQ ID NO: 417361 - RNA, 19 nt, Artificial Sequence
  Description of Artificial Sequence: Synthetic oligonucleotide
uuuaauugugcuggucuga

SEQ ID NO: 417362 - RNA, 19 nt, Artificial Sequence
  Description of Artificial Sequence: Synthetic oligonucleotide
ugcaacugugucacuuuag

SEQ ID NO: 417363 - RNA, 19 nt, Artificial Sequence
  Description of Artificial Sequence: Synthetic oligonucleotide
cucgcuaauagucucgcuc

SEQ ID NO: 417364 - RNA, 19 nt, Artificial Sequence
  Description of Artificial Sequence: Synthetic oligonucleotide
aaagcauagugugaguaua

SEQ ID NO: 417365 - RNA, 19 nt, Artificial Sequence
  Description of Artificial Sequence: Synthetic oligonucleotide
augugcguuuaugugcucc

SEQ ID NO: 417366 - RNA, 19 nt, Artificial Sequence
  Description of Artificial Sequence: Synthetic oligonucleotide
agucaagcuuaaugcaaag

SEQ ID NO: 417367 - RNA, 19 nt, Artificial Sequence
  Description of Artificial Sequence: Synthetic oligonucleotide
  modified_base (9)..(9): a, c, u, g, unknown or other
ucagcugunucauguguaa

SEQ ID NO: 417368 - RNA, 19 nt, Artificial Sequence
  Description of Artificial Sequence: Synthetic oligonucleotide
ccauguucuagccucaucc

SEQ ID NO: 417369 - RNA, 19 nt, Artificial Sequence
  Description of Artificial Sequence: Synthetic oligonucleotide
auucgcaggaacaaguacu

SEQ ID NO: 417370 - RNA, 19 nt, Artificial Sequence
  Description of Artificial Sequence: Synthetic oligonucleotide
  modified_base (18)..(18): a, c, u, g, unknown or other
uuuacuagaucagcugunu

SEQ ID NO: 417371 - RNA, 19 nt, Artificial Sequence
  Description of Artificial Sequence: Synthetic oligonucleotide
ugauaacgauguauuaaua

SEQ ID NO: 417372 - RNA, 19 nt, Artificial Sequence
  Description of Artificial Sequence: Synthetic oligonucleotide
gguuccgcauuucacagag

SEQ ID NO: 417373 - RNA, 19 nt, Artificial Sequence
  Description of Artificial Sequence: Synthetic oligonucleotide
ucguuuaacacugcugccu

SEQ ID NO: 417374 - RNA, 19 nt, Artificial Sequence
  Description of Artificial Sequence: Synthetic oligonucleotide
uuuugcuaagucuguacuu

SEQ ID NO: 417375 - RNA, 19 nt, Artificial Sequence
  Description of Artificial Sequence: Synthetic oligonucleotide
aagaccaugucggcgcauc

SEQ ID NO: 417376 - RNA, 19 nt, Artificial Sequence
  Description of Artificial Sequence: Synthetic oligonucleotide
cauauuggacuguuaauaa

SEQ ID NO: 417377 - RNA, 19 nt, Artificial Sequence
  Description of Artificial Sequence: Synthetic oligonucleotide
agaugacagaucguuuaac

SEQ ID NO: 417378 - RNA, 19 nt, Artificial Sequence
  Description of Artificial Sequence: Synthetic oligonucleotide
  modified_base (5)..(5): a, c, u, g, unknown or other
uauunucccuacucagccu

SEQ ID NO: 417379 - RNA, 19 nt, Artificial Sequence
  Description of Artificial Sequence: Synthetic oligonucleotide
gagacucguaagcaugaug

SEQ ID NO: 417380 - RNA, 19 nt, Artificial Sequence
  Description of Artificial Sequence: Synthetic oligonucleotide
aaauacgcaauuggcacua

SEQ ID NO: 417381 - RNA, 19 nt, Artificial Sequence
  Description of Artificial Sequence: Synthetic oligonucleotide
gcuuaaugcaaaguccucg

SEQ ID NO: 417382 - RNA, 19 nt, Artificial Sequence
  Description of Artificial Sequence: Synthetic oligonucleotide
cugaguuaugcgagguuag

SEQ ID NO: 417383 - RNA, 19 nt, Artificial Sequence
  Description of Artificial Sequence: Synthetic oligonucleotide
ucguuuucaauaugucgaa

SEQ ID NO: 417384 - RNA, 19 nt, Artificial Sequence
  Description of Artificial Sequence: Synthetic oligonucleotide
ucucaugggaggucagaug

SEQ ID NO: 417385 - RNA, 19 nt, Artificial Sequence
  Description of Artificial Sequence: Synthetic oligonucleotide
augucggcgcaucucuugg

SEQ ID NO: 417386 - RNA, 19 nt, Artificial Sequence
  Description of Artificial Sequence: Synthetic oligonucleotide
auacgcaauuggcacuauc

SEQ ID NO: 417387 - RNA, 19 nt, Artificial Sequence
  Description of Artificial Sequence: Synthetic oligonucleotide
uggucgauuuccguuaacu

SEQ ID NO: 417388 - RNA, 19 nt, Artificial Sequence
  Description of Artificial Sequence: Synthetic oligonucleotide
uaucucuguucguagcuaa

SEQ ID NO: 417389 - RNA, 19 nt, Artificial Sequence
  Description of Artificial Sequence: Synthetic oligonucleotide
  modified_base (14)..(14): a, c, u, g, unknown or other
cuagaucagcugunucaug

SEQ ID NO: 417390 - RNA, 19 nt, Artificial Sequence
  Description of Artificial Sequence: Synthetic oligonucleotide
ugauucgcaggaacaagua

SEQ ID NO: 417391 - RNA, 19 nt, Artificial Sequence
  Description of Artificial Sequence: Synthetic oligonucleotide
uuuuaauugucugccucuc

SEQ ID NO: 417392 - RNA, 19 nt, Artificial Sequence
  Description of Artificial Sequence: Synthetic oligonucleotide
uccuauggcauaagucuaa

SEQ ID NO: 417393 - RNA, 19 nt, Artificial Sequence
  Description of Artificial Sequence: Synthetic oligonucleotide
  modified_base (17)..(17): a, c, u, g, unknown or other
uuacuagaucagcugunuc

SEQ ID NO: 417394 - RNA, 19 nt, Artificial Sequence
  Description of Artificial Sequence: Synthetic oligonucleotide
ucggcguuuuaucccaugu

SEQ ID NO: 417395 - RNA, 19 nt, Artificial Sequence
  Description of Artificial Sequence: Synthetic oligonucleotide
agcuaacaacgauucaaga

SEQ ID NO: 417396 - RNA, 19 nt, Artificial Sequence
  Description of Artificial Sequence: Synthetic oligonucleotide
uuccuauggcauaagucua

SEQ ID NO: 417397 - RNA, 19 nt, Artificial Sequence
  Description of Artificial Sequence: Synthetic oligonucleotide
uucgcaggaacaaguacuu

SEQ ID NO: 417398 - RNA, 19 nt, Artificial Sequence
  Description of Artificial Sequence: Synthetic oligonucleotide
acuuuagcucguagcaugg

SEQ ID NO: 417399 - RNA, 19 nt, Artificial Sequence
  Description of Artificial Sequence: Synthetic oligonucleotide
ugugcguuuaugugcuccu

SEQ ID NO: 417400 - RNA, 19 nt, Artificial Sequence
  Description of Artificial Sequence: Synthetic oligonucleotide
ugacuacaaagcuuuccaa

SEQ ID NO: 417401 - RNA, 19 nt, Artificial Sequence
  Description of Artificial Sequence: Synthetic oligonucleotide
uagguucacaacuucgguu

SEQ ID NO: 417402 - RNA, 19 nt, Artificial Sequence
  Description of Artificial Sequence: Synthetic oligonucleotide
gcuacuuagguucacaacu

SEQ ID NO: 417403 - RNA, 19 nt, Artificial Sequence
  Description of Artificial Sequence: Synthetic oligonucleotide
gacucguaagcaugaugug

SEQ ID NO: 417404 - RNA, 19 nt, Artificial Sequence
  Description of Artificial Sequence: Synthetic oligonucleotide
agacuaguacacugaagaa

SEQ ID NO: 417405 - RNA, 19 nt, Artificial Sequence
  Description of Artificial Sequence: Synthetic oligonucleotide
ggauuguucgcucucguuc

SEQ ID NO: 417406 - RNA, 19 nt, Artificial Sequence
  Description of Artificial Sequence: Synthetic oligonucleotide
agaucguuuaacacugcug

SEQ ID NO: 417407 - RNA, 19 nt, Artificial Sequence
  Description of Artificial Sequence: Synthetic oligonucleotide
ugugucuaaacgggagggc

SEQ ID NO: 417408 - RNA, 19 nt, Artificial Sequence
  Description of Artificial Sequence: Synthetic oligonucleotide
aucucggcguuuuauccca

SEQ ID NO: 417409 - RNA, 19 nt, Artificial Sequence
  Description of Artificial Sequence: Synthetic oligonucleotide
ccuacucagccuuacauuc

SEQ ID NO: 417410 - RNA, 19 nt, Artificial Sequence
  Description of Artificial Sequence: Synthetic oligonucleotide
uguuagagucuggcgguag

SEQ ID NO: 417411 - RNA, 19 nt, Artificial Sequence
  Description of Artificial Sequence: Synthetic oligonucleotide
agcaugaugugcguuuaug

SEQ ID NO: 417412 - RNA, 19 nt, Artificial Sequence
  Description of Artificial Sequence: Synthetic oligonucleotide
ugaguuaugcgagguuaga

SEQ ID NO: 417413 - RNA, 19 nt, Artificial Sequence
  Description of Artificial Sequence: Synthetic oligonucleotide
caguaaauguagguugaug

SEQ ID NO: 417414 - RNA, 19 nt, Artificial Sequence
  Description of Artificial Sequence: Synthetic oligonucleotide
agccuuacauucucaaguu

SEQ ID NO: 417415 - RNA, 19 nt, Artificial Sequence
  Description of Artificial Sequence: Synthetic oligonucleotide
acgggagggcaacuuaucu

SEQ ID NO: 417416 - RNA, 19 nt, Artificial Sequence
  Description of Artificial Sequence: Synthetic oligonucleotide
ggaguuaauuuuaguuggg

SEQ ID NO: 417417 - RNA, 19 nt, Artificial Sequence
  Description of Artificial Sequence: Synthetic oligonucleotide
uccugauaacgauguauua

SEQ ID NO: 417418 - RNA, 19 nt, Artificial Sequence
  Description of Artificial Sequence: Synthetic oligonucleotide
uaugcccuagggacagugu

SEQ ID NO: 417419 - RNA, 19 nt, Artificial Sequence
  Description of Artificial Sequence: Synthetic oligonucleotide
uuagaaggagcucgccauu

SEQ ID NO: 417420 - RNA, 19 nt, Artificial Sequence
  Description of Artificial Sequence: Synthetic oligonucleotide
cucgccauucagucucucc

SEQ ID NO: 417421 - RNA, 19 nt, Artificial Sequence
  Description of Artificial Sequence: Synthetic oligonucleotide
cauaagucuaauuccaguu

SEQ ID NO: 417422 - RNA, 19 nt, Artificial Sequence
  Description of Artificial Sequence: Synthetic oligonucleotide
cacucgcucucgcuaauag

SEQ ID NO: 417423 - RNA, 19 nt, Artificial Sequence
  Description of Artificial Sequence: Synthetic oligonucleotide
cuuaguccaucaugcuaug

SEQ ID NO: 417424 - RNA, 19 nt, Artificial Sequence
  Description of Artificial Sequence: Synthetic oligonucleotide
uaauugugcuggucugagu

SEQ ID NO: 417425 - RNA, 19 nt, Artificial Sequence
  Description of Artificial Sequence: Synthetic oligonucleotide
agcuuaaugcaaaguccuc

SEQ ID NO: 417426 - RNA, 19 nt, Artificial Sequence
  Description of Artificial Sequence: Synthetic oligonucleotide
auaugcccuagggacagug

SEQ ID NO: 417427 - RNA, 19 nt, Artificial Sequence
  Description of Artificial Sequence: Synthetic oligonucleotide
aaagguugacagagguaga

SEQ ID NO: 417428 - RNA, 19 nt, Artificial Sequence
  Description of Artificial Sequence: Synthetic oligonucleotide
gagacuguauaggagauuu

SEQ ID NO: 417429 - RNA, 19 nt, Artificial Sequence
  Description of Artificial Sequence: Synthetic oligonucleotide
uuaucucuguucguagcua

SEQ ID NO: 417430 - RNA, 19 nt, Artificial Sequence
  Description of Artificial Sequence: Synthetic oligonucleotide
uccucggagagaugacaga

SEQ ID NO: 417431 - RNA, 19 nt, Artificial Sequence
  Description of Artificial Sequence: Synthetic oligonucleotide
acucuuuaauugugcuggu

SEQ ID NO: 417432 - RNA, 19 nt, Artificial Sequence
  Description of Artificial Sequence: Synthetic oligonucleotide
cuucgguugucaccguuuc

SEQ ID NO: 417433 - RNA, 19 nt, Artificial Sequence
  Description of Artificial Sequence: Synthetic oligonucleotide
agcuggucgauuuccguua

SEQ ID NO: 417434 - RNA, 19 nt, Artificial Sequence
  Description of Artificial Sequence: Synthetic oligonucleotide
  modified_base (19)..(19): a, c, u, g, unknown or other
auuuacuagaucagcugun

SEQ ID NO: 417435 - RNA, 19 nt, Artificial Sequence
  Description of Artificial Sequence: Synthetic oligonucleotide
ucacuuuagcucguagcau

SEQ ID NO: 417436 - RNA, 19 nt, Artificial Sequence
  Description of Artificial Sequence: Synthetic oligonucleotide
cucggagagaugacagauc

SEQ ID NO: 417437 - RNA, 19 nt, Artificial Sequence
  Description of Artificial Sequence: Synthetic oligonucleotide
ugguauugucagauacaua

SEQ ID NO: 417438 - RNA, 19 nt, Artificial Sequence
  Description of Artificial Sequence: Synthetic oligonucleotide
cucucgcuaauagucucgc

SEQ ID NO: 417439 - RNA, 19 nt, Artificial Sequence
  Description of Artificial Sequence: Synthetic oligonucleotide
  modified_base (6)..(6): a, c, u, g, unknown or other
gcugunucauguguaacac

SEQ ID NO: 417440 - RNA, 19 nt, Artificial Sequence
  Description of Artificial Sequence: Synthetic oligonucleotide
aagcaugaugugcguuuau

SEQ ID NO: 417441 - RNA, 19 nt, Artificial Sequence
  Description of Artificial Sequence: Synthetic oligonucleotide
ucguaagcaugaugugcgu

SEQ ID NO: 417442 - RNA, 19 nt, Artificial Sequence
  Description of Artificial Sequence: Synthetic oligonucleotide
cauggagguuucucggcuc

SEQ ID NO: 417443 - RNA, 19 nt, Artificial Sequence
  Description of Artificial Sequence: Synthetic oligonucleotide
uaagcaugaugugcguuua

SEQ ID NO: 417444 - RNA, 19 nt, Artificial Sequence
  Description of Artificial Sequence: Synthetic oligonucleotide
guaaauguagguugauguu

SEQ ID NO: 417445 - RNA, 19 nt, Artificial Sequence
  Description of Artificial Sequence: Synthetic oligonucleotide
gcuaacaacgauucaagau

SEQ ID NO: 417446 - RNA, 19 nt, Artificial Sequence
  Description of Artificial Sequence: Synthetic oligonucleotide
ucuaaacgggagggcaacu

SEQ ID NO: 417447 - RNA, 19 nt, Artificial Sequence
  Description of Artificial Sequence: Synthetic oligonucleotide
cucuuaguccaucaugcua

SEQ ID NO: 417448 - RNA, 19 nt, Artificial Sequence
  Description of Artificial Sequence: Synthetic oligonucleotide
agguuagaggucacaauau

SEQ ID NO: 417449 - RNA, 19 nt, Artificial Sequence
  Description of Artificial Sequence: Synthetic oligonucleotide
  modified_base (3)..(3): a, c, u, g, unknown or other
uunucccuacucagccuua

SEQ ID NO: 417450 - RNA, 19 nt, Artificial Sequence
  Description of Artificial Sequence: Synthetic oligonucleotide
ugcccuagggacaguguuu

SEQ ID NO: 417451 - RNA, 19 nt, Artificial Sequence
  Description of Artificial Sequence: Synthetic oligonucleotide
  modified_base (2)..(2): a, c, u, g, unknown or other
unucccuacucagccuuac

SEQ ID NO: 417452 - RNA, 19 nt, Artificial Sequence
  Description of Artificial Sequence: Synthetic oligonucleotide
agucuggcgguagcccagc

SEQ ID NO: 417453 - RNA, 19 nt, Artificial Sequence
  Description of Artificial Sequence: Synthetic oligonucleotide
ucucgcuaauagucucgcu

SEQ ID NO: 417454 - RNA, 19 nt, Artificial Sequence
  Description of Artificial Sequence: Synthetic oligonucleotide
gcauagugugaguauauua

SEQ ID NO: 417455 - RNA, 19 nt, Artificial Sequence
  Description of Artificial Sequence: Synthetic oligonucleotide
cucuguucguagcuaacaa

SEQ ID NO: 417456 - RNA, 19 nt, Artificial Sequence
  Description of Artificial Sequence: Synthetic oligonucleotide
gucuaaacgggagggcaac

SEQ ID NO: 417457 - RNA, 19 nt, Artificial Sequence
  Description of Artificial Sequence: Synthetic oligonucleotide
ccacuguuagagucuggcg

SEQ ID NO: 417458 - RNA, 19 nt, Artificial Sequence
  Description of Artificial Sequence: Synthetic oligonucleotide
agaccaugucggcgcaucu

SEQ ID NO: 417459 - RNA, 19 nt, Artificial Sequence
  Description of Artificial Sequence: Synthetic oligonucleotide
gaugggaaugaaauucuuu

SEQ ID NO: 417460 - RNA, 19 nt, Artificial Sequence
  Description of Artificial Sequence: Synthetic oligonucleotide
caucaugcuaugggcuuac

SEQ ID NO: 417461 - RNA, 19 nt, Artificial Sequence
  Description of Artificial Sequence: Synthetic oligonucleotide
guucguagcuaacaacgau

SEQ ID NO: 417462 - RNA, 19 nt, Artificial Sequence
  Description of Artificial Sequence: Synthetic oligonucleotide
aauacgcaauuggcacuau

SEQ ID NO: 417463 - RNA, 19 nt, Artificial Sequence
  Description of Artificial Sequence: Synthetic oligonucleotide
cucggcguuuuaucccaug

SEQ ID NO: 417464 - RNA, 19 nt, Artificial Sequence
  Description of Artificial Sequence: Synthetic oligonucleotide
ugagacucguaagcaugau

SEQ ID NO: 417465 - RNA, 19 nt, Artificial Sequence
  Description of Artificial Sequence: Synthetic oligonucleotide
cuggucuaaccuuuuccua

SEQ ID NO: 417466 - RNA, 19 nt, Artificial Sequence
  Description of Artificial Sequence: Synthetic oligonucleotide
ugccucucacuugucaguu

SEQ ID NO: 417467 - RNA, 19 nt, Artificial Sequence
  Description of Artificial Sequence: Synthetic oligonucleotide
ugugucacuuuagcucgua

SEQ ID NO: 417468 - RNA, 19 nt, Artificial Sequence
  Description of Artificial Sequence: Synthetic oligonucleotide
aucaguuaagcggcucuuu

SEQ ID NO: 417469 - RNA, 19 nt, Artificial Sequence
  Description of Artificial Sequence: Synthetic oligonucleotide
gaugugcguuuaugugcuc

SEQ ID NO: 417470 - RNA, 19 nt, Artificial Sequence
  Description of Artificial Sequence: Synthetic oligonucleotide
gcugaguuaugcgagguua

SEQ ID NO: 417471 - RNA, 19 nt, Artificial Sequence
  Description of Artificial Sequence: Synthetic oligonucleotide
gaccaugucggcgcaucuc

SEQ ID NO: 417472 - RNA, 19 nt, Artificial Sequence
  Description of Artificial Sequence: Synthetic oligonucleotide
aggucagaugggaaugaaa

SEQ ID NO: 417473 - RNA, 19 nt, Artificial Sequence
  Description of Artificial Sequence: Synthetic oligonucleotide
agcggcucuuuuaaacuaa

SEQ ID NO: 417474 - RNA, 19 nt, Artificial Sequence
  Description of Artificial Sequence: Synthetic oligonucleotide
gcguuuaugugcuccugga

SEQ ID NO: 417475 - RNA, 19 nt, Artificial Sequence
  Description of Artificial Sequence: Synthetic oligonucleotide
cuccagaaauuuacuagau

SEQ ID NO: 417476 - RNA, 19 nt, Artificial Sequence
  Description of Artificial Sequence: Synthetic oligonucleotide
guuccgcauuucacagagg

SEQ ID NO: 417477 - RNA, 19 nt, Artificial Sequence
  Description of Artificial Sequence: Synthetic oligonucleotide
uucugcuacuuagguucac

SEQ ID NO: 417478 - RNA, 19 nt, Artificial Sequence
  Description of Artificial Sequence: Synthetic oligonucleotide
uccacucgcucucgcuaau

SEQ ID NO: 417479 - RNA, 19 nt, Artificial Sequence
  Description of Artificial Sequence: Synthetic oligonucleotide
cagaucguuuaacacugcu

SEQ ID NO: 417480 - RNA, 19 nt, Artificial Sequence
  Description of Artificial Sequence: Synthetic oligonucleotide
  modified_base (5)..(5): a, c, u, g, unknown or other
cugunucauguguaacacu

SEQ ID NO: 417481 - RNA, 19 nt, Artificial Sequence
  Description of Artificial Sequence: Synthetic oligonucleotide
ucggcgcaucucuuggauu

SEQ ID NO: 417482 - RNA, 19 nt, Artificial Sequence
  Description of Artificial Sequence: Synthetic oligonucleotide
cuacaaagcuuuccaacuu

SEQ ID NO: 417483 - RNA, 19 nt, Artificial Sequence
  Description of Artificial Sequence: Synthetic oligonucleotide
ucgcaggaacaaguacuuc

SEQ ID NO: 417484 - RNA, 19 nt, Artificial Sequence
  Description of Artificial Sequence: Synthetic oligonucleotide
cuggucgauuuccguuaac

SEQ ID NO: 417485 - RNA, 19 nt, Artificial Sequence
  Description of Artificial Sequence: Synthetic oligonucleotide
gugcguuuaugugcuccug

SEQ ID NO: 417486 - RNA, 19 nt, Artificial Sequence
  Description of Artificial Sequence: Synthetic oligonucleotide
ucucggcguuuuaucccau

SEQ ID NO: 417487 - RNA, 19 nt, Artificial Sequence
  Description of Artificial Sequence: Synthetic oligonucleotide
cuuuagcucguagcaugga

SEQ ID NO: 417488 - RNA, 19 nt, Artificial Sequence
  Description of Artificial Sequence: Synthetic oligonucleotide
uauaugcccuagggacagu

SEQ ID NO: 417489 - RNA, 19 nt, Artificial Sequence
  Description of Artificial Sequence: Synthetic oligonucleotide
gcuaauagucucgcuccuc

SEQ ID NO: 417490 - RNA, 19 nt, Artificial Sequence
  Description of Artificial Sequence: Synthetic oligonucleotide
ggaagaccaugucggcgca

SEQ ID NO: 417491 - RNA, 19 nt, Artificial Sequence
  Description of Artificial Sequence: Synthetic oligonucleotide
guauugucagauacauauu

SEQ ID NO: 417492 - RNA, 19 nt, Artificial Sequence
  Description of Artificial Sequence: Synthetic oligonucleotide
aucaugcuaugggcuuaca

SEQ ID NO: 417493 - RNA, 19 nt, Artificial Sequence
  Description of Artificial Sequence: Synthetic oligonucleotide
gcguuuuaucccauguucu

SEQ ID NO: 417494 - RNA, 19 nt, Artificial Sequence
  Description of Artificial Sequence: Synthetic oligonucleotide
gcauggagguuucucggcu

SEQ ID NO: 417495 - RNA, 19 nt, Artificial Sequence
  Description of Artificial Sequence: Synthetic oligonucleotide
cuauggcauaagucuaauu

SEQ ID NO: 417496 - RNA, 19 nt, Artificial Sequence
  Description of Artificial Sequence: Synthetic oligonucleotide
gcgagguuagaggucacaa

SEQ ID NO: 417497 - RNA, 19 nt, Artificial Sequence
  Description of Artificial Sequence: Synthetic oligonucleotide
ucguagcauggagguuucu

SEQ ID NO: 417498 - RNA, 19 nt, Artificial Sequence
  Description of Artificial Sequence: Synthetic oligonucleotide
  modified_base (3)..(3): a, c, u, g, unknown or other
gunucauguguaacacuuu

SEQ ID NO: 417499 - RNA, 19 nt, Artificial Sequence
  Description of Artificial Sequence: Synthetic oligonucleotide
gucggcgcaucucuuggau

SEQ ID NO: 417500 - RNA, 19 nt, Artificial Sequence
  Description of Artificial Sequence: Synthetic oligonucleotide
gggcaacuuaucucggcgu

SEQ ID NO: 417501 - RNA, 19 nt, Artificial Sequence
  Description of Artificial Sequence: Synthetic oligonucleotide
gcuggucgauuuccguuaa

SEQ ID NO: 417502 - RNA, 19 nt, Artificial Sequence
  Description of Artificial Sequence: Synthetic oligonucleotide
ggagcucgccauucagucu

SEQ ID NO: 417503 - RNA, 19 nt, Artificial Sequence
  Description of Artificial Sequence: Synthetic oligonucleotide
cccauguucuagccucauc

SEQ ID NO: 417504 - RNA, 19 nt, Artificial Sequence
  Description of Artificial Sequence: Synthetic oligonucleotide
cuccgccuuugccgaggac

SEQ ID NO: 417505 - RNA, 19 nt, Artificial Sequence
  Description of Artificial Sequence: Synthetic oligonucleotide
cguagcuaacaacgauuca

SEQ ID NO: 417506 - RNA, 19 nt, Artificial Sequence
  Description of Artificial Sequence: Synthetic oligonucleotide
caucaguuaagcggcucuu

SEQ ID NO: 417507 - RNA, 19 nt, Artificial Sequence
  Description of Artificial Sequence: Synthetic oligonucleotide
cugugucacuuuagcucgu

SEQ ID NO: 417508 - RNA, 19 nt, Artificial Sequence
  Description of Artificial Sequence: Synthetic oligonucleotide
gcggcucuuuuaaacuaaa

SEQ ID NO: 417509 - RNA, 19 nt, Artificial Sequence
  Description of Artificial Sequence: Synthetic oligonucleotide
gaagaccaugucggcgcau

SEQ ID NO: 417510 - RNA, 19 nt, Artificial Sequence
  Description of Artificial Sequence: Synthetic oligonucleotide
ccucggagagaugacagau

SEQ ID NO: 417511 - RNA, 19 nt, Artificial Sequence
  Description of Artificial Sequence: Synthetic oligonucleotide
ggcugaguuaugcgagguu

SEQ ID NO: 417512 - RNA, 19 nt, Artificial Sequence
  Description of Artificial Sequence: Synthetic oligonucleotide
cacuauccuucuccgccuu

SEQ ID NO: 417513 - RNA, 19 nt, Artificial Sequence
  Description of Artificial Sequence: Synthetic oligonucleotide
gucuggcgguagcccagcu

SEQ ID NO: 417514 - RNA, 19 nt, Artificial Sequence
  Description of Artificial Sequence: Synthetic oligonucleotide
ggcgaugugggaagaccau

SEQ ID NO: 417515 - RNA, 19 nt, Artificial Sequence
  Description of Artificial Sequence: Synthetic oligonucleotide
gcaacuuaucucggcguuu

SEQ ID NO: 417516 - RNA, 19 nt, Artificial Sequence
  Description of Artificial Sequence: Synthetic oligonucleotide
ccuauggcauaagucuaau

SEQ ID NO: 417517 - RNA, 19 nt, Artificial Sequence
  Description of Artificial Sequence: Synthetic oligonucleotide
cguaagcaugaugugcguu

SEQ ID NO: 417518 - RNA, 19 nt, Artificial Sequence
  Description of Artificial Sequence: Synthetic oligonucleotide
ccacucgcucucgcuaaua

SEQ ID NO: 417519 - RNA, 19 nt, Artificial Sequence
  Description of Artificial Sequence: Synthetic oligonucleotide
gcgcaucucuuggauuguu

SEQ ID NO: 417520 - RNA, 19 nt, Artificial Sequence
  Description of Artificial Sequence: Synthetic oligonucleotide
  modified_base (1)..(1): a, c, u, g, unknown or other
nucccuacucagccuuaca

SEQ ID NO: 417521 - RNA, 19 nt, Artificial Sequence
  Description of Artificial Sequence: Synthetic oligonucleotide
uuaaaagugaaccugggag

SEQ ID NO: 417522 - RNA, 19 nt, Artificial Sequence
  Description of Artificial Sequence: Synthetic oligonucleotide
aaugacugaauccuaaauc

SEQ ID NO: 417523 - RNA, 19 nt, Artificial Sequence
  Description of Artificial Sequence: Synthetic oligonucleotide
augacugaauccuaaaucc

SEQ ID NO: 417524 - RNA, 19 nt, Artificial Sequence
  Description of Artificial Sequence: Synthetic oligonucleotide
aucuugauaauaugcaucc

SEQ ID NO: 417525 - RNA, 19 nt, Artificial Sequence
  Description of Artificial Sequence: Synthetic oligonucleotide
aauguaacgaaugugagga

SEQ ID NO: 417526 - RNA, 19 nt, Artificial Sequence
  Description of Artificial Sequence: Synthetic oligonucleotide
uauuuaagcauauuuaaac

SEQ ID NO: 417527 - RNA, 19 nt, Artificial Sequence
  Description of Artificial Sequence: Synthetic oligonucleotide
agaaaauuccuauugauca

SEQ ID NO: 417528 - RNA, 19 nt, Artificial Sequence
  Description of Artificial Sequence: Synthetic oligonucleotide
auaucuuaauuauucgugc

SEQ ID NO: 417529 - RNA, 19 nt, Artificial Sequence
  Description of Artificial Sequence: Synthetic oligonucleotide
auaauaugcauccugaagu

SEQ ID NO: 417530 - RNA, 19 nt, Artificial Sequence
  Description of Artificial Sequence: Synthetic oligonucleotide
uucccaauauuaaaggugg

SEQ ID NO: 417531 - RNA, 19 nt, Artificial Sequence
  Description of Artificial Sequence: Synthetic oligonucleotide
aaauguaacgaaugugagg

SEQ ID NO: 417532 - RNA, 19 nt, Artificial Sequence
  Description of Artificial Sequence: Synthetic oligonucleotide
uguccuaauuuaauuaagg

SEQ ID NO: 417533 - RNA, 19 nt, Artificial Sequence
  Description of Artificial Sequence: Synthetic oligonucleotide
uguacaucuucacauauug

SEQ ID NO: 417534 - RNA, 19 nt, Artificial Sequence
  Description of Artificial Sequence: Synthetic oligonucleotide
uuuaguguucaucaaagcu

SEQ ID NO: 417535 - RNA, 19 nt, Artificial Sequence
  Description of Artificial Sequence: Synthetic oligonucleotide
aguauguuaacuuuuauua

SEQ ID NO: 417536 - RNA, 19 nt, Artificial Sequence
  Description of Artificial Sequence: Synthetic oligonucleotide
gauaauaugcauccugaag

SEQ ID NO: 417537 - RNA, 19 nt, Artificial Sequence
  Description of Artificial Sequence: Synthetic oligonucleotide
auagauaccugccaaugac

SEQ ID NO: 417538 - RNA, 19 nt, Artificial Sequence
  Description of Artificial Sequence: Synthetic oligonucleotide
aauguuaguauguuaacuu

SEQ ID NO: 417539 - RNA, 19 nt, Artificial Sequence
  Description of Artificial Sequence: Synthetic oligonucleotide
uauaaucugugccucacag

SEQ ID NO: 417540 - RNA, 19 nt, Artificial Sequence
  Description of Artificial Sequence: Synthetic oligonucleotide
aaaugucaaaucuaggaaa

SEQ ID NO: 417541 - RNA, 19 nt, Artificial Sequence
  Description of Artificial Sequence: Synthetic oligonucleotide
uucuagaggaucuuuauac

SEQ ID NO: 417542 - RNA, 19 nt, Artificial Sequence
  Description of Artificial Sequence: Synthetic oligonucleotide
aaaugcaauacaaggaauc

SEQ ID NO: 417543 - RNA, 19 nt, Artificial Sequence
  Description of Artificial Sequence: Synthetic oligonucleotide
ugcaauacaaggaaucaug

SEQ ID NO: 417544 - RNA, 19 nt, Artificial Sequence
  Description of Artificial Sequence: Synthetic oligonucleotide
aacucagaacuccauauug

SEQ ID NO: 417545 - RNA, 19 nt, Artificial Sequence
  Description of Artificial Sequence: Synthetic oligonucleotide
auaaguuguaggucuagcg

SEQ ID NO: 417546 - RNA, 19 nt, Artificial Sequence
  Description of Artificial Sequence: Synthetic oligonucleotide
gauaucuuaauuauucgug

SEQ ID NO: 417547 - RNA, 19 nt, Artificial Sequence
  Description of Artificial Sequence: Synthetic oligonucleotide
auuacucuauauuauguug

SEQ ID NO: 417548 - RNA, 19 nt, Artificial Sequence
  Description of Artificial Sequence: Synthetic oligonucleotide
uauacaauccagcuaacuc

SEQ ID NO: 417549 - RNA, 19 nt, Artificial Sequence
  Description of Artificial Sequence: Synthetic oligonucleotide
aguggauuaaaacuuccuc

SEQ ID NO: 417550 - RNA, 19 nt, Artificial Sequence
  Description of Artificial Sequence: Synthetic oligonucleotide
uauuuauguggauaugugc

SEQ ID NO: 417551 - RNA, 19 nt, Artificial Sequence
  Description of Artificial Sequence: Synthetic oligonucleotide
aacgaaugugaggauagcc

SEQ ID NO: 417552 - RNA, 19 nt, Artificial Sequence
  Description of Artificial Sequence: Synthetic oligonucleotide
aaguguuccuaacuguagg

SEQ ID NO: 417553 - RNA, 19 nt, Artificial Sequence
  Description of Artificial Sequence: Synthetic oligonucleotide
uuauuacucuauauuaugu

SEQ ID NO: 417554 - RNA, 19 nt, Artificial Sequence
  Description of Artificial Sequence: Synthetic oligonucleotide
agauaaauagggucagaac

SEQ ID NO: 417555 - RNA, 19 nt, Artificial Sequence
  Description of Artificial Sequence: Synthetic oligonucleotide
uaggcuauccuguauauga

SEQ ID NO: 417556 - RNA, 19 nt, Artificial Sequence
  Description of Artificial Sequence: Synthetic oligonucleotide
uuuguauuuauguggauau

SEQ ID NO: 417557 - RNA, 19 nt, Artificial Sequence
  Description of Artificial Sequence: Synthetic oligonucleotide
aauaugaugcccauggcca

SEQ ID NO: 417558 - RNA, 19 nt, Artificial Sequence
  Description of Artificial Sequence: Synthetic oligonucleotide
uuauuaaucaauccacuua

SEQ ID NO: 417559 - RNA, 19 nt, Artificial Sequence
  Description of Artificial Sequence: Synthetic oligonucleotide
cuauugaucacucugguca

SEQ ID NO: 417560 - RNA, 19 nt, Artificial Sequence
  Description of Artificial Sequence: Synthetic oligonucleotide
aacauacggcaucaauagc

SEQ ID NO: 417561 - RNA, 19 nt, Artificial Sequence
  Description of Artificial Sequence: Synthetic oligonucleotide
aaugcauagauaccugcca

SEQ ID NO: 417562 - RNA, 19 nt, Artificial Sequence
  Description of Artificial Sequence: Synthetic oligonucleotide
uuacucuauauuauguugu

SEQ ID NO: 417563 - RNA, 19 nt, Artificial Sequence
  Description of Artificial Sequence: Synthetic oligonucleotide
aauccacuuacaaagcagg

SEQ ID NO: 417564 - RNA, 19 nt, Artificial Sequence
  Description of Artificial Sequence: Synthetic oligonucleotide
aauaaaguuccaaauggca

SEQ ID NO: 417565 - RNA, 19 nt, Artificial Sequence
  Description of Artificial Sequence: Synthetic oligonucleotide
uuaaucaauccacuuacaa

SEQ ID NO: 417566 - RNA, 19 nt, Artificial Sequence
  Description of Artificial Sequence: Synthetic oligonucleotide
uuccuauugaucacucugg

SEQ ID NO: 417567 - RNA, 19 nt, Artificial Sequence
  Description of Artificial Sequence: Synthetic oligonucleotide
auacaauccagcuaacuca

SEQ ID NO: 417568 - RNA, 19 nt, Artificial Sequence
  Description of Artificial Sequence: Synthetic oligonucleotide
uuuuaaucagugaucgacu

SEQ ID NO: 417569 - RNA, 19 nt, Artificial Sequence
  Description of Artificial Sequence: Synthetic oligonucleotide
gaagugggugucuauaacc

SEQ ID NO: 417570 - RNA, 19 nt, Artificial Sequence
  Description of Artificial Sequence: Synthetic oligonucleotide
uguguacauaaguuguagg

SEQ ID NO: 417571 - RNA, 19 nt, Artificial Sequence
  Description of Artificial Sequence: Synthetic oligonucleotide
auuccuauugaucacucug

SEQ ID NO: 417572 - RNA, 19 nt, Artificial Sequence
  Description of Artificial Sequence: Synthetic oligonucleotide
cuaucuugcacugugcugg

SEQ ID NO: 417573 - RNA, 19 nt, Artificial Sequence
  Description of Artificial Sequence: Synthetic oligonucleotide
uaucuugauaauaugcauc

SEQ ID NO: 417574 - RNA, 19 nt, Artificial Sequence
  Description of Artificial Sequence: Synthetic oligonucleotide
agaccuaacaaaauucuac

SEQ ID NO: 417575 - RNA, 19 nt, Artificial Sequence
  Description of Artificial Sequence: Synthetic oligonucleotide
aaauuggcuggugagcugg

SEQ ID NO: 417576 - RNA, 19 nt, Artificial Sequence
  Description of Artificial Sequence: Synthetic oligonucleotide
agcacuccgaguucaaggc

SEQ ID NO: 417577 - RNA, 19 nt, Artificial Sequence
  Description of Artificial Sequence: Synthetic oligonucleotide
uuagcagaagaccuaacaa

SEQ ID NO: 417578 - RNA, 19 nt, Artificial Sequence
  Description of Artificial Sequence: Synthetic oligonucleotide
gguauuacugacuggaugc

SEQ ID NO: 417579 - RNA, 19 nt, Artificial Sequence
  Description of Artificial Sequence: Synthetic oligonucleotide
uuuguccuaauuuaauuaa

SEQ ID NO: 417580 - RNA, 19 nt, Artificial Sequence
  Description of Artificial Sequence: Synthetic oligonucleotide
gucaggaaccauuaauugg

SEQ ID NO: 417581 - RNA, 19 nt, Artificial Sequence
  Description of Artificial Sequence: Synthetic oligonucleotide
agauaucuuaauuauucgu

SEQ ID NO: 417582 - RNA, 19 nt, Artificial Sequence
  Description of Artificial Sequence: Synthetic oligonucleotide
ucaacuguguacauaaguu

SEQ ID NO: 417583 - RNA, 19 nt, Artificial Sequence
  Description of Artificial Sequence: Synthetic oligonucleotide
ucuugguaaugucugaagu

SEQ ID NO: 417584 - RNA, 19 nt, Artificial Sequence
  Description of Artificial Sequence: Synthetic oligonucleotide
aagaaaugcaauacaagga

SEQ ID NO: 417585 - RNA, 19 nt, Artificial Sequence
  Description of Artificial Sequence: Synthetic oligonucleotide
aagcagauaucuuaauuau

SEQ ID NO: 417586 - RNA, 19 nt, Artificial Sequence
  Description of Artificial Sequence: Synthetic oligonucleotide
uggauuagggaauaaaguu

SEQ ID NO: 417587 - RNA, 19 nt, Artificial Sequence
  Description of Artificial Sequence: Synthetic oligonucleotide
agucuaaacauacggcauc

SEQ ID NO: 417588 - RNA, 19 nt, Artificial Sequence
  Description of Artificial Sequence: Synthetic oligonucleotide
auugcaagcuuauuguaca

SEQ ID NO: 417589 - RNA, 19 nt, Artificial Sequence
  Description of Artificial Sequence: Synthetic oligonucleotide
uuaaacuaaaguacaugau

SEQ ID NO: 417590 - RNA, 19 nt, Artificial Sequence
  Description of Artificial Sequence: Synthetic oligonucleotide
gaugcugugggaugggugc

SEQ ID NO: 417591 - RNA, 19 nt, Artificial Sequence
  Description of Artificial Sequence: Synthetic oligonucleotide
aauaugcauccugaagugg

SEQ ID NO: 417592 - RNA, 19 nt, Artificial Sequence
  Description of Artificial Sequence: Synthetic oligonucleotide
auaaauagggucagaacag

SEQ ID NO: 417593 - RNA, 19 nt, Artificial Sequence
  Description of Artificial Sequence: Synthetic oligonucleotide
uaacuguaggugaugaagu

SEQ ID NO: 417594 - RNA, 19 nt, Artificial Sequence
  Description of Artificial Sequence: Synthetic oligonucleotide
uuuauuaaucaauccacuu

SEQ ID NO: 417595 - RNA, 19 nt, Artificial Sequence
  Description of Artificial Sequence: Synthetic oligonucleotide
aauccuaaauccugacuga

SEQ ID NO: 417596 - RNA, 19 nt, Artificial Sequence
  Description of Artificial Sequence: Synthetic oligonucleotide
cuaacuguaggugaugaag

SEQ ID NO: 417597 - RNA, 19 nt, Artificial Sequence
  Description of Artificial Sequence: Synthetic oligonucleotide
uuugggugcauccuaugug

SEQ ID NO: 417598 - RNA, 19 nt, Artificial Sequence
  Description of Artificial Sequence: Synthetic oligonucleotide
auuaaagguuaaguaauag

SEQ ID NO: 417599 - RNA, 19 nt, Artificial Sequence
  Description of Artificial Sequence: Synthetic oligonucleotide
uccuguauaugaaaguauc

SEQ ID NO: 417600 - RNA, 19 nt, Artificial Sequence
  Description of Artificial Sequence: Synthetic oligonucleotide
uguuccuaacuguagguga

SEQ ID NO: 417601 - RNA, 19 nt, Artificial Sequence
  Description of Artificial Sequence: Synthetic oligonucleotide
ugguauuacugacuggaug

SEQ ID NO: 417602 - RNA, 19 nt, Artificial Sequence
  Description of Artificial Sequence: Synthetic oligonucleotide
auuauucgugcuuagcaga

SEQ ID NO: 417603 - RNA, 19 nt, Artificial Sequence
  Description of Artificial Sequence: Synthetic oligonucleotide
gacugaaugauuuuauaaa

SEQ ID NO: 417604 - RNA, 19 nt, Artificial Sequence
  Description of Artificial Sequence: Synthetic oligonucleotide
ucaugugaguaccaccugc

SEQ ID NO: 417605 - RNA, 19 nt, Artificial Sequence
  Description of Artificial Sequence: Synthetic oligonucleotide
agcuaacucaaauuaauau

SEQ ID NO: 417606 - RNA, 19 nt, Artificial Sequence
  Description of Artificial Sequence: Synthetic oligonucleotide
agcuguaccauguagcaga

SEQ ID NO: 417607 - RNA, 19 nt, Artificial Sequence
  Description of Artificial Sequence: Synthetic oligonucleotide
ccauauuguaaauauacag

SEQ ID NO: 417608 - RNA, 19 nt, Artificial Sequence
  Description of Artificial Sequence: Synthetic oligonucleotide
caugguuugaggcacauga

SEQ ID NO: 417609 - RNA, 19 nt, Artificial Sequence
  Description of Artificial Sequence: Synthetic oligonucleotide
aacuguguacauaaguugu

SEQ ID NO: 417610 - RNA, 19 nt, Artificial Sequence
  Description of Artificial Sequence: Synthetic oligonucleotide
uuuaaucagugaucgacuc

SEQ ID NO: 417611 - RNA, 19 nt, Artificial Sequence
  Description of Artificial Sequence: Synthetic oligonucleotide
ucuuauuggugaucaacca

SEQ ID NO: 417612 - RNA, 19 nt, Artificial Sequence
  Description of Artificial Sequence: Synthetic oligonucleotide
auaaugggccaagugaggg

SEQ ID NO: 417613 - RNA, 19 nt, Artificial Sequence
  Description of Artificial Sequence: Synthetic oligonucleotide
ugguaaugucugaaguggg

SEQ ID NO: 417614 - RNA, 19 nt, Artificial Sequence
  Description of Artificial Sequence: Synthetic oligonucleotide
uauuaaaggugguacuuaa

SEQ ID NO: 417615 - RNA, 19 nt, Artificial Sequence
  Description of Artificial Sequence: Synthetic oligonucleotide
uaucuuaauuauucgugcu

SEQ ID NO: 417616 - RNA, 19 nt, Artificial Sequence
  Description of Artificial Sequence: Synthetic oligonucleotide
uacuuacuaaagcagcuaa

SEQ ID NO: 417617 - RNA, 19 nt, Artificial Sequence
  Description of Artificial Sequence: Synthetic oligonucleotide
ucuagaggaucuuuauaca

SEQ ID NO: 417618 - RNA, 19 nt, Artificial Sequence
  Description of Artificial Sequence: Synthetic oligonucleotide
uaaaggugguacuuaacuc

SEQ ID NO: 417619 - RNA, 19 nt, Artificial Sequence
  Description of Artificial Sequence: Synthetic oligonucleotide
aguaucuugauaauaugca

SEQ ID NO: 417620 - RNA, 19 nt, Artificial Sequence
  Description of Artificial Sequence: Synthetic oligonucleotide
ucaaguuuagagagaaaua

SEQ ID NO: 417621 - RNA, 19 nt, Artificial Sequence
  Description of Artificial Sequence: Synthetic oligonucleotide
uccacgauugacauuuccu

SEQ ID NO: 417622 - RNA, 19 nt, Artificial Sequence
  Description of Artificial Sequence: Synthetic oligonucleotide
ugaaaggaccucugaauga

SEQ ID NO: 417623 - RNA, 19 nt, Artificial Sequence
  Description of Artificial Sequence: Synthetic oligonucleotide
uguucccaauauuaaaggu

SEQ ID NO: 417624 - RNA, 19 nt, Artificial Sequence
  Description of Artificial Sequence: Synthetic oligonucleotide
ugaaauuggcuggugagcu

SEQ ID NO: 417625 - RNA, 19 nt, Artificial Sequence
  Description of Artificial Sequence: Synthetic oligonucleotide
uuuuguauuuauguggaua

SEQ ID NO: 417626 - RNA, 19 nt, Artificial Sequence
  Description of Artificial Sequence: Synthetic oligonucleotide
aaaauuaggcuauccugua

SEQ ID NO: 417627 - RNA, 19 nt, Artificial Sequence
  Description of Artificial Sequence: Synthetic oligonucleotide
uuauguuguaaaucuuaac

SEQ ID NO: 417628 - RNA, 19 nt, Artificial Sequence
  Description of Artificial Sequence: Synthetic oligonucleotide
aaauuccuauugaucacuc

SEQ ID NO: 417629 - RNA, 19 nt, Artificial Sequence
  Description of Artificial Sequence: Synthetic oligonucleotide
ucuaaaauauggugucaac

SEQ ID NO: 417630 - RNA, 19 nt, Artificial Sequence
  Description of Artificial Sequence: Synthetic oligonucleotide
caacuguguacauaaguug

SEQ ID NO: 417631 - RNA, 19 nt, Artificial Sequence
  Description of Artificial Sequence: Synthetic oligonucleotide
uggugaucaaccauugauc

SEQ ID NO: 417632 - RNA, 19 nt, Artificial Sequence
  Description of Artificial Sequence: Synthetic oligonucleotide
ucgacucuugguaaugucu

SEQ ID NO: 417633 - RNA, 19 nt, Artificial Sequence
  Description of Artificial Sequence: Synthetic oligonucleotide
acccuuagaaguucuauga

SEQ ID NO: 417634 - RNA, 19 nt, Artificial Sequence
  Description of Artificial Sequence: Synthetic oligonucleotide
uaaccauagccaacaguag

SEQ ID NO: 417635 - RNA, 19 nt, Artificial Sequence
  Description of Artificial Sequence: Synthetic oligonucleotide
aguauauacaauccagcua

SEQ ID NO: 417636 - RNA, 19 nt, Artificial Sequence
  Description of Artificial Sequence: Synthetic oligonucleotide
uguacauaaguuguagguc

SEQ ID NO: 417637 - RNA, 19 nt, Artificial Sequence
  Description of Artificial Sequence: Synthetic oligonucleotide
cugcaucacuucaugaggg

SEQ ID NO: 417638 - RNA, 19 nt, Artificial Sequence
  Description of Artificial Sequence: Synthetic oligonucleotide
agaugaaucaguuccucaa

SEQ ID NO: 417639 - RNA, 19 nt, Artificial Sequence
  Description of Artificial Sequence: Synthetic oligonucleotide
uucaauuguccccugggau

SEQ ID NO: 417640 - RNA, 19 nt, Artificial Sequence
  Description of Artificial Sequence: Synthetic oligonucleotide
gacagcaagaguucuaaaa

SEQ ID NO: 417641 - RNA, 19 nt, Artificial Sequence
  Description of Artificial Sequence: Synthetic oligonucleotide
guaacgaaugugaggauag

SEQ ID NO: 417642 - RNA, 19 nt, Artificial Sequence
  Description of Artificial Sequence: Synthetic oligonucleotide
uguagauucagcugacuuu

SEQ ID NO: 417643 - RNA, 19 nt, Artificial Sequence
  Description of Artificial Sequence: Synthetic oligonucleotide
aucuuaacuauagaaauua

SEQ ID NO: 417644 - RNA, 19 nt, Artificial Sequence
  Description of Artificial Sequence: Synthetic oligonucleotide
acauacggcaucaauagca

SEQ ID NO: 417645 - RNA, 19 nt, Artificial Sequence
  Description of Artificial Sequence: Synthetic oligonucleotide
agcagcuaaucuugccugc

SEQ ID NO: 417646 - RNA, 19 nt, Artificial Sequence
  Description of Artificial Sequence: Synthetic oligonucleotide
uguuaacuuuuauuacucu

SEQ ID NO: 417647 - RNA, 19 nt, Artificial Sequence
  Description of Artificial Sequence: Synthetic oligonucleotide
aucagugaucgacucuugg

SEQ ID NO: 417648 - RNA, 19 nt, Artificial Sequence
  Description of Artificial Sequence: Synthetic oligonucleotide
uguagguagcugcagucac

SEQ ID NO: 417649 - RNA, 19 nt, Artificial Sequence
  Description of Artificial Sequence: Synthetic oligonucleotide
ucuuaacuauagaaauuaa

SEQ ID NO: 417650 - RNA, 19 nt, Artificial Sequence
  Description of Artificial Sequence: Synthetic oligonucleotide
uagaaguucuaugaaugca

SEQ ID NO: 417651 - RNA, 19 nt, Artificial Sequence
  Description of Artificial Sequence: Synthetic oligonucleotide
gacccuuagaaguucuaug

SEQ ID NO: 417652 - RNA, 19 nt, Artificial Sequence
  Description of Artificial Sequence: Synthetic oligonucleotide
ucagugaucgacucuuggu

SEQ ID NO: 417653 - RNA, 19 nt, Artificial Sequence
  Description of Artificial Sequence: Synthetic oligonucleotide
aguucuaugaaugcauaga

SEQ ID NO: 417654 - RNA, 19 nt, Artificial Sequence
  Description of Artificial Sequence: Synthetic oligonucleotide
aaauuaggcuauccuguau

SEQ ID NO: 417655 - RNA, 19 nt, Artificial Sequence
  Description of Artificial Sequence: Synthetic oligonucleotide
uuauucgugcuuagcagaa

SEQ ID NO: 417656 - RNA, 19 nt, Artificial Sequence
  Description of Artificial Sequence: Synthetic oligonucleotide
uauccuguauaugaaagua

SEQ ID NO: 417657 - RNA, 19 nt, Artificial Sequence
  Description of Artificial Sequence: Synthetic oligonucleotide
cauauugauccaugggaac

SEQ ID NO: 417658 - RNA, 19 nt, Artificial Sequence
  Description of Artificial Sequence: Synthetic oligonucleotide
ugugaguaccaccugcauc

SEQ ID NO: 417659 - RNA, 19 nt, Artificial Sequence
  Description of Artificial Sequence: Synthetic oligonucleotide
uagauaccugccaaugacu

SEQ ID NO: 417660 - RNA, 19 nt, Artificial Sequence
  Description of Artificial Sequence: Synthetic oligonucleotide
cacgauugacauuuccuag

SEQ ID NO: 417661 - RNA, 19 nt, Artificial Sequence
  Description of Artificial Sequence: Synthetic oligonucleotide
auauugauccaugggaaca

SEQ ID NO: 417662 - RNA, 19 nt, Artificial Sequence
  Description of Artificial Sequence: Synthetic oligonucleotide
ugaagugggugucuauaac

SEQ ID NO: 417663 - RNA, 19 nt, Artificial Sequence
  Description of Artificial Sequence: Synthetic oligonucleotide
ugaucaacacacacuuggu

SEQ ID NO: 417664 - RNA, 19 nt, Artificial Sequence
  Description of Artificial Sequence: Synthetic oligonucleotide
acgauugacauuuccuagu

SEQ ID NO: 417665 - RNA, 19 nt, Artificial Sequence
  Description of Artificial Sequence: Synthetic oligonucleotide
aguguuccuaacuguaggu

SEQ ID NO: 417666 - RNA, 19 nt, Artificial Sequence
  Description of Artificial Sequence: Synthetic oligonucleotide
agcuaaucuugccugcaag

SEQ ID NO: 417667 - RNA, 19 nt, Artificial Sequence
  Description of Artificial Sequence: Synthetic oligonucleotide
uuucuagaggaucuuuaua

SEQ ID NO: 417668 - RNA, 19 nt, Artificial Sequence
  Description of Artificial Sequence: Synthetic oligonucleotide
aaggugguacuuaacucag

SEQ ID NO: 417669 - RNA, 19 nt, Artificial Sequence
  Description of Artificial Sequence: Synthetic oligonucleotide
cuuagcagaagaccuaaca

SEQ ID NO: 417670 - RNA, 19 nt, Artificial Sequence
  Description of Artificial Sequence: Synthetic oligonucleotide
ucgauguccacucuacaua

SEQ ID NO: 417671 - RNA, 19 nt, Artificial Sequence
  Description of Artificial Sequence: Synthetic oligonucleotide
ugcuccacgauugacauuu

SEQ ID NO: 417672 - RNA, 19 nt, Artificial Sequence
  Description of Artificial Sequence: Synthetic oligonucleotide
uccuauguggauggguggg

SEQ ID NO: 417673 - RNA, 19 nt, Artificial Sequence
  Description of Artificial Sequence: Synthetic oligonucleotide
auuaaaggugguacuuaac

SEQ ID NO: 417674 - RNA, 19 nt, Artificial Sequence
  Description of Artificial Sequence: Synthetic oligonucleotide
aaucuuaacuauagaaauu

SEQ ID NO: 417675 - RNA, 19 nt, Artificial Sequence
  Description of Artificial Sequence: Synthetic oligonucleotide
uccacuuacaaagcaggug

SEQ ID NO: 417676 - RNA, 19 nt, Artificial Sequence
  Description of Artificial Sequence: Synthetic oligonucleotide
aagugggugucuauaacca

SEQ ID NO: 417677 - RNA, 19 nt, Artificial Sequence
  Description of Artificial Sequence: Synthetic oligonucleotide
cagguguguagguagcugc

SEQ ID NO: 417678 - RNA, 19 nt, Artificial Sequence
  Description of Artificial Sequence: Synthetic oligonucleotide
aauuaaagguuaaguaaua

SEQ ID NO: 417679 - RNA, 19 nt, Artificial Sequence
  Description of Artificial Sequence: Synthetic oligonucleotide
auaugugcaaagaaaugca

SEQ ID NO: 417680 - RNA, 19 nt, Artificial Sequence
  Description of Artificial Sequence: Synthetic oligonucleotide
cagcacuccgaguucaagg

SEQ ID NO: 417681 - RNA, 19 nt, Artificial Sequence
  Description of Artificial Sequence: Synthetic oligonucleotide
caugauugauuuaaauuaa

SEQ ID NO: 417682 - RNA, 19 nt, Artificial Sequence
  Description of Artificial Sequence: Synthetic oligonucleotide
guacauaaguuguaggucu

SEQ ID NO: 417683 - RNA, 19 nt, Artificial Sequence
  Description of Artificial Sequence: Synthetic oligonucleotide
uccuauugaucacucuggu

SEQ ID NO: 417684 - RNA, 19 nt, Artificial Sequence
  Description of Artificial Sequence: Synthetic oligonucleotide
cugcaugugaagauaucug

SEQ ID NO: 417685 - RNA, 19 nt, Artificial Sequence
  Description of Artificial Sequence: Synthetic oligonucleotide
uguaacgaaugugaggaua

SEQ ID NO: 417686 - RNA, 19 nt, Artificial Sequence
  Description of Artificial Sequence: Synthetic oligonucleotide
auguuaguauguuaacuuu

SEQ ID NO: 417687 - RNA, 19 nt, Artificial Sequence
  Description of Artificial Sequence: Synthetic oligonucleotide
guagcuguaccauguagca

SEQ ID NO: 417688 - RNA, 19 nt, Artificial Sequence
  Description of Artificial Sequence: Synthetic oligonucleotide
aucgacucuugguaauguc

SEQ ID NO: 417689 - RNA, 19 nt, Artificial Sequence
  Description of Artificial Sequence: Synthetic oligonucleotide
agcugacuuuauuuaaacu

SEQ ID NO: 417690 - RNA, 19 nt, Artificial Sequence
  Description of Artificial Sequence: Synthetic oligonucleotide
uggucaugugaguaccacc

SEQ ID NO: 417691 - RNA, 19 nt, Artificial Sequence
  Description of Artificial Sequence: Synthetic oligonucleotide
acuacuuacuaaagcagcu

SEQ ID NO: 417692 - RNA, 19 nt, Artificial Sequence
  Description of Artificial Sequence: Synthetic oligonucleotide
aaggauacaccaagaaaau

SEQ ID NO: 417693 - RNA, 19 nt, Artificial Sequence
  Description of Artificial Sequence: Synthetic oligonucleotide
ccuaauuuaauuaaggaau

SEQ ID NO: 417694 - RNA, 19 nt, Artificial Sequence
  Description of Artificial Sequence: Synthetic oligonucleotide
gauucagcugacuuuauuu

SEQ ID NO: 417695 - RNA, 19 nt, Artificial Sequence
  Description of Artificial Sequence: Synthetic oligonucleotide
cuaaauccugacugaauga

SEQ ID NO: 417696 - RNA, 19 nt, Artificial Sequence
  Description of Artificial Sequence: Synthetic oligonucleotide
agaucugcgcagguaaguc

SEQ ID NO: 417697 - RNA, 19 nt, Artificial Sequence
  Description of Artificial Sequence: Synthetic oligonucleotide
ugacauggguugcauucug

SEQ ID NO: 417698 - RNA, 19 nt, Artificial Sequence
  Description of Artificial Sequence: Synthetic oligonucleotide
auaaucugugccucacagu

SEQ ID NO: 417699 - RNA, 19 nt, Artificial Sequence
  Description of Artificial Sequence: Synthetic oligonucleotide
agcccugaagaaauguaac

SEQ ID NO: 417700 - RNA, 19 nt, Artificial Sequence
  Description of Artificial Sequence: Synthetic oligonucleotide
guguacauaaguuguaggu

SEQ ID NO: 417701 - RNA, 19 nt, Artificial Sequence
  Description of Artificial Sequence: Synthetic oligonucleotide
uacucuauauuauguugua

SEQ ID NO: 417702 - RNA, 19 nt, Artificial Sequence
  Description of Artificial Sequence: Synthetic oligonucleotide
uaggucuagcgguagcugu

SEQ ID NO: 417703 - RNA, 19 nt, Artificial Sequence
  Description of Artificial Sequence: Synthetic oligonucleotide
agcagaagaccuaacaaaa

SEQ ID NO: 417704 - RNA, 19 nt, Artificial Sequence
  Description of Artificial Sequence: Synthetic oligonucleotide
guucaugugcccgcguugg

SEQ ID NO: 417705 - RNA, 19 nt, Artificial Sequence
  Description of Artificial Sequence: Synthetic oligonucleotide
accugccaaugacugaauc

SEQ ID NO: 417706 - RNA, 19 nt, Artificial Sequence
  Description of Artificial Sequence: Synthetic oligonucleotide
acgaaugugaggauagccu

SEQ ID NO: 417707 - RNA, 19 nt, Artificial Sequence
  Description of Artificial Sequence: Synthetic oligonucleotide
acauauugauccaugggaa

SEQ ID NO: 417708 - RNA, 19 nt, Artificial Sequence
  Description of Artificial Sequence: Synthetic oligonucleotide
auacggcaucaauagcauc

SEQ ID NO: 417709 - RNA, 19 nt, Artificial Sequence
  Description of Artificial Sequence: Synthetic oligonucleotide
gcuauccuguauaugaaag

SEQ ID NO: 417710 - RNA, 19 nt, Artificial Sequence
  Description of Artificial Sequence: Synthetic oligonucleotide
gaagaccuaacaaaauucu

SEQ ID NO: 417711 - RNA, 19 nt, Artificial Sequence
  Description of Artificial Sequence: Synthetic oligonucleotide
aaaaucccuuaaaagugaa

SEQ ID NO: 417712 - RNA, 19 nt, Artificial Sequence
  Description of Artificial Sequence: Synthetic oligonucleotide
auauaaucugugccucaca

SEQ ID NO: 417713 - RNA, 19 nt, Artificial Sequence
  Description of Artificial Sequence: Synthetic oligonucleotide
aacaguagccugacaauau

SEQ ID NO: 417714 - RNA, 19 nt, Artificial Sequence
  Description of Artificial Sequence: Synthetic oligonucleotide
uccuaaauccugacugaau

SEQ ID NO: 417715 - RNA, 19 nt, Artificial Sequence
  Description of Artificial Sequence: Synthetic oligonucleotide
acauauggggcacuucuua

SEQ ID NO: 417716 - RNA, 19 nt, Artificial Sequence
  Description of Artificial Sequence: Synthetic oligonucleotide
uuacugacuggaugcauuu

SEQ ID NO: 417717 - RNA, 19 nt, Artificial Sequence
  Description of Artificial Sequence: Synthetic oligonucleotide
uauugauccaugggaacau

SEQ ID NO: 417718 - RNA, 19 nt, Artificial Sequence
  Description of Artificial Sequence: Synthetic oligonucleotide
ggauauggugugaaauugg

SEQ ID NO: 417719 - RNA, 19 nt, Artificial Sequence
  Description of Artificial Sequence: Synthetic oligonucleotide
ggauuagggaauaaaguuc

SEQ ID NO: 417720 - RNA, 19 nt, Artificial Sequence
  Description of Artificial Sequence: Synthetic oligonucleotide
cauggguugcauucuguuc

SEQ ID NO: 417721 - RNA, 19 nt, Artificial Sequence
  Description of Artificial Sequence: Synthetic oligonucleotide
auaguuugggugcauccua

SEQ ID NO: 417722 - RNA, 19 nt, Artificial Sequence
  Description of Artificial Sequence: Synthetic oligonucleotide
gugaaauuggcuggugagc

SEQ ID NO: 417723 - RNA, 19 nt, Artificial Sequence
  Description of Artificial Sequence: Synthetic oligonucleotide
acugaauccuaaauccuga

SEQ ID NO: 417724 - RNA, 19 nt, Artificial Sequence
  Description of Artificial Sequence: Synthetic oligonucleotide
guugacugcaguaccagga

SEQ ID NO: 417725 - RNA, 19 nt, Artificial Sequence
  Description of Artificial Sequence: Synthetic oligonucleotide
uacauaaguuguaggucua

SEQ ID NO: 417726 - RNA, 19 nt, Artificial Sequence
  Description of Artificial Sequence: Synthetic oligonucleotide
uccuagucuuucuuccaga

SEQ ID NO: 417727 - RNA, 19 nt, Artificial Sequence
  Description of Artificial Sequence: Synthetic oligonucleotide
uuaggcuauccuguauaug

SEQ ID NO: 417728 - RNA, 19 nt, Artificial Sequence
  Description of Artificial Sequence: Synthetic oligonucleotide
auaccugccaaugacugaa

SEQ ID NO: 417729 - RNA, 19 nt, Artificial Sequence
  Description of Artificial Sequence: Synthetic oligonucleotide
uucaugugcccgcguuggg

SEQ ID NO: 417730 - RNA, 19 nt, Artificial Sequence
  Description of Artificial Sequence: Synthetic oligonucleotide
uccucaaaauugccccuga

SEQ ID NO: 417731 - RNA, 19 nt, Artificial Sequence
  Description of Artificial Sequence: Synthetic oligonucleotide
cugccuaaaugaguugggg

SEQ ID NO: 417732 - RNA, 19 nt, Artificial Sequence
  Description of Artificial Sequence: Synthetic oligonucleotide
gcaauacaaggaaucaugc

SEQ ID NO: 417733 - RNA, 19 nt, Artificial Sequence
  Description of Artificial Sequence: Synthetic oligonucleotide
cauugaucaacacacacuu

SEQ ID NO: 417734 - RNA, 19 nt, Artificial Sequence
  Description of Artificial Sequence: Synthetic oligonucleotide
cauagauaccugccaauga

SEQ ID NO: 417735 - RNA, 19 nt, Artificial Sequence
  Description of Artificial Sequence: Synthetic oligonucleotide
gauaccugccaaugacuga

SEQ ID NO: 417736 - RNA, 19 nt, Artificial Sequence
  Description of Artificial Sequence: Synthetic oligonucleotide
auuggugaucaaccauuga

SEQ ID NO: 417737 - RNA, 19 nt, Artificial Sequence
  Description of Artificial Sequence: Synthetic oligonucleotide
acauaaguuguaggucuag

SEQ ID NO: 417738 - RNA, 19 nt, Artificial Sequence
  Description of Artificial Sequence: Synthetic oligonucleotide
uaguuugggugcauccuau

SEQ ID NO: 417739 - RNA, 19 nt, Artificial Sequence
  Description of Artificial Sequence: Synthetic oligonucleotide
acugccuaaaugaguuggg

SEQ ID NO: 417740 - RNA, 19 nt, Artificial Sequence
  Description of Artificial Sequence: Synthetic oligonucleotide
augucaggaaccauuaauu

SEQ ID NO: 417741 - RNA, 19 nt, Artificial Sequence
  Description of Artificial Sequence: Synthetic oligonucleotide
uccaugggaacaugucuuc

SEQ ID NO: 417742 - RNA, 19 nt, Artificial Sequence
  Description of Artificial Sequence: Synthetic oligonucleotide
aagaccuaacaaaauucua

SEQ ID NO: 417743 - RNA, 19 nt, Artificial Sequence
  Description of Artificial Sequence: Synthetic oligonucleotide
auagccugccaugucagga

SEQ ID NO: 417744 - RNA, 19 nt, Artificial Sequence
  Description of Artificial Sequence: Synthetic oligonucleotide
cagguggcuuaauugcaag

SEQ ID NO: 417745 - RNA, 19 nt, Artificial Sequence
  Description of Artificial Sequence: Synthetic oligonucleotide
uauucgugcuuagcagaag

SEQ ID NO: 417746 - RNA, 19 nt, Artificial Sequence
  Description of Artificial Sequence: Synthetic oligonucleotide
caugugcccgcguugggug

SEQ ID NO: 417747 - RNA, 19 nt, Artificial Sequence
  Description of Artificial Sequence: Synthetic oligonucleotide
caugugaguaccaccugca

SEQ ID NO: 417748 - RNA, 19 nt, Artificial Sequence
  Description of Artificial Sequence: Synthetic oligonucleotide
ggugagaugcugcauguga

SEQ ID NO: 417749 - RNA, 19 nt, Artificial Sequence
  Description of Artificial Sequence: Synthetic oligonucleotide
cucuggucaugugaguacc

SEQ ID NO: 417750 - RNA, 19 nt, Artificial Sequence
  Description of Artificial Sequence: Synthetic oligonucleotide
gcaaguuuagggucacaag

SEQ ID NO: 417751 - RNA, 19 nt, Artificial Sequence
  Description of Artificial Sequence: Synthetic oligonucleotide
gggauauggugugaaauug

SEQ ID NO: 417752 - RNA, 19 nt, Artificial Sequence
  Description of Artificial Sequence: Synthetic oligonucleotide
ugcuuagcagaagaccuaa

SEQ ID NO: 417753 - RNA, 19 nt, Artificial Sequence
  Description of Artificial Sequence: Synthetic oligonucleotide
ucuugauaauaugcauccu

SEQ ID NO: 417754 - RNA, 19 nt, Artificial Sequence
  Description of Artificial Sequence: Synthetic oligonucleotide
auuaaucaauccacuuaca

SEQ ID NO: 417755 - RNA, 19 nt, Artificial Sequence
  Description of Artificial Sequence: Synthetic oligonucleotide
augugcccgcguugggugc

SEQ ID NO: 417756 - RNA, 19 nt, Artificial Sequence
  Description of Artificial Sequence: Synthetic oligonucleotide
cuccacgauugacauuucc

SEQ ID NO: 417757 - RNA, 19 nt, Artificial Sequence
  Description of Artificial Sequence: Synthetic oligonucleotide
guuguaaaucuuaacuaua

SEQ ID NO: 417758 - RNA, 19 nt, Artificial Sequence
  Description of Artificial Sequence: Synthetic oligonucleotide
aaaggaccucugaaugaug

SEQ ID NO: 417759 - RNA, 19 nt, Artificial Sequence
  Description of Artificial Sequence: Synthetic oligonucleotide
gaguucaaggcuuccagau

SEQ ID NO: 417760 - RNA, 19 nt, Artificial Sequence
  Description of Artificial Sequence: Synthetic oligonucleotide
uaacgaaugugaggauagc

SEQ ID NO: 417761 - RNA, 19 nt, Artificial Sequence
  Description of Artificial Sequence: Synthetic oligonucleotide
uacauauggggcacuucuu

SEQ ID NO: 417762 - RNA, 19 nt, Artificial Sequence
  Description of Artificial Sequence: Synthetic oligonucleotide
acauggguugcauucuguu

SEQ ID NO: 417763 - RNA, 19 nt, Artificial Sequence
  Description of Artificial Sequence: Synthetic oligonucleotide
auauggugugaaauuggcu

SEQ ID NO: 417764 - RNA, 19 nt, Artificial Sequence
  Description of Artificial Sequence: Synthetic oligonucleotide
gguuaaguaauaggaauaa

SEQ ID NO: 417765 - RNA, 19 nt, Artificial Sequence
  Description of Artificial Sequence: Synthetic oligonucleotide
gucuaaacauacggcauca

SEQ ID NO: 417766 - RNA, 19 nt, Artificial Sequence
  Description of Artificial Sequence: Synthetic oligonucleotide
augauugauuuaaauuaaa

SEQ ID NO: 417767 - RNA, 19 nt, Artificial Sequence
  Description of Artificial Sequence: Synthetic oligonucleotide
acggcaucaauagcaucuc

SEQ ID NO: 417768 - RNA, 19 nt, Artificial Sequence
  Description of Artificial Sequence: Synthetic oligonucleotide
auuacugacuggaugcauu

SEQ ID NO: 417769 - RNA, 19 nt, Artificial Sequence
  Description of Artificial Sequence: Synthetic oligonucleotide
gcaagcuuauuguacaucu

SEQ ID NO: 417770 - RNA, 19 nt, Artificial Sequence
  Description of Artificial Sequence: Synthetic oligonucleotide
agugggugucuauaaccau

SEQ ID NO: 417771 - RNA, 19 nt, Artificial Sequence
  Description of Artificial Sequence: Synthetic oligonucleotide
aaccauugaucaacacaca

SEQ ID NO: 417772 - RNA, 19 nt, Artificial Sequence
  Description of Artificial Sequence: Synthetic oligonucleotide
cuagaggaucuuuauacau

SEQ ID NO: 417773 - RNA, 19 nt, Artificial Sequence
  Description of Artificial Sequence: Synthetic oligonucleotide
auugaucaacacacacuug

SEQ ID NO: 417774 - RNA, 19 nt, Artificial Sequence
  Description of Artificial Sequence: Synthetic oligonucleotide
acucuauauuauguuguaa

SEQ ID NO: 417775 - RNA, 19 nt, Artificial Sequence
  Description of Artificial Sequence: Synthetic oligonucleotide
uccgaguucaaggcuucca

SEQ ID NO: 417776 - RNA, 19 nt, Artificial Sequence
  Description of Artificial Sequence: Synthetic oligonucleotide
cacucuacauauggggcac

SEQ ID NO: 417777 - RNA, 19 nt, Artificial Sequence
  Description of Artificial Sequence: Synthetic oligonucleotide
gucaugugaguaccaccug

SEQ ID NO: 417778 - RNA, 19 nt, Artificial Sequence
  Description of Artificial Sequence: Synthetic oligonucleotide
gcuaacucaaauuaauauu

SEQ ID NO: 417779 - RNA, 19 nt, Artificial Sequence
  Description of Artificial Sequence: Synthetic oligonucleotide
auauuauguuguaaaucuu

SEQ ID NO: 417780 - RNA, 19 nt, Artificial Sequence
  Description of Artificial Sequence: Synthetic oligonucleotide
ucuacauauggggcacuuc

SEQ ID NO: 417781 - RNA, 19 nt, Artificial Sequence
  Description of Artificial Sequence: Synthetic oligonucleotide
gcgaggacaugguuugagg

SEQ ID NO: 417782 - RNA, 19 nt, Artificial Sequence
  Description of Artificial Sequence: Synthetic oligonucleotide
cugaagugggugucuauaa

SEQ ID NO: 417783 - RNA, 19 nt, Artificial Sequence
  Description of Artificial Sequence: Synthetic oligonucleotide
cuauccuguauaugaaagu

SEQ ID NO: 417784 - RNA, 19 nt, Artificial Sequence
  Description of Artificial Sequence: Synthetic oligonucleotide
caguagccugacaauauaa

SEQ ID NO: 417785 - RNA, 19 nt, Artificial Sequence
  Description of Artificial Sequence: Synthetic oligonucleotide
agcgguagcuguaccaugu

SEQ ID NO: 417786 - RNA, 19 nt, Artificial Sequence
  Description of Artificial Sequence: Synthetic oligonucleotide
gaaaugcaauacaaggaau

SEQ ID NO: 417787 - RNA, 19 nt, Artificial Sequence
  Description of Artificial Sequence: Synthetic oligonucleotide
cagugaucgacucuuggua

SEQ ID NO: 417788 - RNA, 19 nt, Artificial Sequence
  Description of Artificial Sequence: Synthetic oligonucleotide
gaaaggaccucugaaugau

SEQ ID NO: 417789 - RNA, 19 nt, Artificial Sequence
  Description of Artificial Sequence: Synthetic oligonucleotide
acuuacuaaagcagcuaau

SEQ ID NO: 417790 - RNA, 19 nt, Artificial Sequence
  Description of Artificial Sequence: Synthetic oligonucleotide
gauguccacucuacauaug

SEQ ID NO: 417791 - RNA, 19 nt, Artificial Sequence
  Description of Artificial Sequence: Synthetic oligonucleotide
cuuauuggugaucaaccau

SEQ ID NO: 417792 - RNA, 19 nt, Artificial Sequence
  Description of Artificial Sequence: Synthetic oligonucleotide
guaggucuagcgguagcug

SEQ ID NO: 417793 - RNA, 19 nt, Artificial Sequence
  Description of Artificial Sequence: Synthetic oligonucleotide
guuugggugcauccuaugu

SEQ ID NO: 417794 - RNA, 19 nt, Artificial Sequence
  Description of Artificial Sequence: Synthetic oligonucleotide
cagugcgccagguguguag

SEQ ID NO: 417795 - RNA, 19 nt, Artificial Sequence
  Description of Artificial Sequence: Synthetic oligonucleotide
gucagaacagcagucuaaa

SEQ ID NO: 417796 - RNA, 19 nt, Artificial Sequence
  Description of Artificial Sequence: Synthetic oligonucleotide
gugaaccugggagggaccc

SEQ ID NO: 417797 - RNA, 19 nt, Artificial Sequence
  Description of Artificial Sequence: Synthetic oligonucleotide
caucugauugacauggguu

SEQ ID NO: 417798 - RNA, 19 nt, Artificial Sequence
  Description of Artificial Sequence: Synthetic oligonucleotide
ccaagaaaauuccuauuga

SEQ ID NO: 417799 - RNA, 19 nt, Artificial Sequence
  Description of Artificial Sequence: Synthetic oligonucleotide
augugaguaccaccugcau

SEQ ID NO: 417800 - RNA, 19 nt, Artificial Sequence
  Description of Artificial Sequence: Synthetic oligonucleotide
auccuaaauccugacugaa

SEQ ID NO: 417801 - RNA, 19 nt, Artificial Sequence
  Description of Artificial Sequence: Synthetic oligonucleotide
aggaaggaugggaaugaga

SEQ ID NO: 417802 - RNA, 19 nt, Artificial Sequence
  Description of Artificial Sequence: Synthetic oligonucleotide
gggacguucaugugcccgc

SEQ ID NO: 417803 - RNA, 19 nt, Artificial Sequence
  Description of Artificial Sequence: Synthetic oligonucleotide
auguaacgaaugugaggau

SEQ ID NO: 417804 - RNA, 19 nt, Artificial Sequence
  Description of Artificial Sequence: Synthetic oligonucleotide
gggagggacccuuagaagu

SEQ ID NO: 417805 - RNA, 19 nt, Artificial Sequence
  Description of Artificial Sequence: Synthetic oligonucleotide
ccauaauaugugcaaagaa

SEQ ID NO: 417806 - RNA, 19 nt, Artificial Sequence
  Description of Artificial Sequence: Synthetic oligonucleotide
augggccaagugagggugc

SEQ ID NO: 417807 - RNA, 19 nt, Artificial Sequence
  Description of Artificial Sequence: Synthetic oligonucleotide
cuggcgaggaugcgaggac

SEQ ID NO: 417808 - RNA, 19 nt, Artificial Sequence
  Description of Artificial Sequence: Synthetic oligonucleotide
guguagguagcugcaguca

SEQ ID NO: 417809 - RNA, 19 nt, Artificial Sequence
  Description of Artificial Sequence: Synthetic oligonucleotide
ggauagccugccaugucag

SEQ ID NO: 417810 - RNA, 19 nt, Artificial Sequence
  Description of Artificial Sequence: Synthetic oligonucleotide
ccgaguucaaggcuuccag

SEQ ID NO: 417811 - RNA, 19 nt, Artificial Sequence
  Description of Artificial Sequence: Synthetic oligonucleotide
acguucaugugcccgcguu

SEQ ID NO: 417812 - RNA, 19 nt, Artificial Sequence
  Description of Artificial Sequence: Synthetic oligonucleotide
ccuauugaucacucugguc

SEQ ID NO: 417813 - RNA, 19 nt, Artificial Sequence
  Description of Artificial Sequence: Synthetic oligonucleotide
gucuagcgguagcuguacc

SEQ ID NO: 417814 - RNA, 19 nt, Artificial Sequence
  Description of Artificial Sequence: Synthetic oligonucleotide
caacaguagccugacaaua

SEQ ID NO: 417815 - RNA, 19 nt, Artificial Sequence
  Description of Artificial Sequence: Synthetic oligonucleotide
ggucaugugaguaccaccu

SEQ ID NO: 417816 - RNA, 19 nt, Artificial Sequence
  Description of Artificial Sequence: Synthetic oligonucleotide
cuugggcauauuuaagcau

SEQ ID NO: 417817 - RNA, 19 nt, Artificial Sequence
  Description of Artificial Sequence: Synthetic oligonucleotide
ggggacguucaugugcccg

SEQ ID NO: 417818 - RNA, 19 nt, Artificial Sequence
  Description of Artificial Sequence: Synthetic oligonucleotide
ugggugcugcaucauccuu

SEQ ID NO: 417819 - RNA, 19 nt, Artificial Sequence
  Description of Artificial Sequence: Synthetic oligonucleotide
cauacggcaucaauagcau

SEQ ID NO: 417820 - RNA, 19 nt, Artificial Sequence
  Description of Artificial Sequence: Synthetic oligonucleotide
aguuguaggucuagcggua

SEQ ID NO: 417821 - RNA, 19 nt, Artificial Sequence
  Description of Artificial Sequence: Synthetic oligonucleotide
ugcagugcgccaggugugu

SEQ ID NO: 417822 - RNA, 19 nt, Artificial Sequence
  Description of Artificial Sequence: Synthetic oligonucleotide
cuacuuacuaaagcagcua

SEQ ID NO: 417823 - RNA, 19 nt, Artificial Sequence
  Description of Artificial Sequence: Synthetic oligonucleotide
gcuaaucuugccugcaagu

SEQ ID NO: 417824 - RNA, 19 nt, Artificial Sequence
  Description of Artificial Sequence: Synthetic oligonucleotide
cagucuaaacauacggcau

SEQ ID NO: 417825 - RNA, 19 nt, Artificial Sequence
  Description of Artificial Sequence: Synthetic oligonucleotide
cuguacugccuaaaugagu

SEQ ID NO: 417826 - RNA, 19 nt, Artificial Sequence
  Description of Artificial Sequence: Synthetic oligonucleotide
gagggacccuuagaaguuc

SEQ ID NO: 417827 - RNA, 19 nt, Artificial Sequence
  Description of Artificial Sequence: Synthetic oligonucleotide
acaugguuugaggcacaug

SEQ ID NO: 417828 - RNA, 19 nt, Artificial Sequence
  Description of Artificial Sequence: Synthetic oligonucleotide
uaccugccaaugacugaau

SEQ ID NO: 417829 - RNA, 19 nt, Artificial Sequence
  Description of Artificial Sequence: Synthetic oligonucleotide
gaucgacucuugguaaugu

SEQ ID NO: 417830 - RNA, 19 nt, Artificial Sequence
  Description of Artificial Sequence: Synthetic oligonucleotide
cauauggggcacuucuuau

SEQ ID NO: 417831 - RNA, 19 nt, Artificial Sequence
  Description of Artificial Sequence: Synthetic oligonucleotide
gaggaucuuuauacauuaa

SEQ ID NO: 417832 - RNA, 19 nt, Artificial Sequence
  Description of Artificial Sequence: Synthetic oligonucleotide
ugcgccagguguguaggua

SEQ ID NO: 417833 - RNA, 19 nt, Artificial Sequence
  Description of Artificial Sequence: Synthetic oligonucleotide
cgauugacauuuccuaguc

SEQ ID NO: 417834 - RNA, 19 nt, Artificial Sequence
  Description of Artificial Sequence: Synthetic oligonucleotide
ccacucuacauauggggca

SEQ ID NO: 417835 - RNA, 19 nt, Artificial Sequence
  Description of Artificial Sequence: Synthetic oligonucleotide
aggcuauccuguauaugaa

SEQ ID NO: 417836 - RNA, 19 nt, Artificial Sequence
  Description of Artificial Sequence: Synthetic oligonucleotide
gcgccacagggugagaugc

SEQ ID NO: 417837 - RNA, 19 nt, Artificial Sequence
  Description of Artificial Sequence: Synthetic oligonucleotide
ccuauguggaugggugggg

SEQ ID NO: 417838 - RNA, 19 nt, Artificial Sequence
  Description of Artificial Sequence: Synthetic oligonucleotide
ccauugaucaacacacacu

SEQ ID NO: 417839 - RNA, 19 nt, Artificial Sequence
  Description of Artificial Sequence: Synthetic oligonucleotide
ccacgauugacauuuccua

SEQ ID NO: 417840 - RNA, 19 nt, Artificial Sequence
  Description of Artificial Sequence: Synthetic oligonucleotide
ccuuagaaguucuaugaau

SEQ ID NO: 417841 - RNA, 19 nt, Artificial Sequence
  Description of Artificial Sequence: Synthetic oligonucleotide
caaagcagguggcuuaauu

SEQ ID NO: 417842 - RNA, 19 nt, Artificial Sequence
  Description of Artificial Sequence: Synthetic oligonucleotide
gggugcugcaucauccuuc

SEQ ID NO: 417843 - RNA, 19 nt, Artificial Sequence
  Description of Artificial Sequence: Synthetic oligonucleotide
guggcuuaauugcaagcuu

SEQ ID NO: 417844 - RNA, 19 nt, Artificial Sequence
  Description of Artificial Sequence: Synthetic oligonucleotide
acucuacauauggggcacu

SEQ ID NO: 417845 - RNA, 19 nt, Artificial Sequence
  Description of Artificial Sequence: Synthetic oligonucleotide
gaggaugcgaggacauggu

SEQ ID NO: 417846 - RNA, 19 nt, Artificial Sequence
  Description of Artificial Sequence: Synthetic oligonucleotide
gaacuuccauccucugcau

SEQ ID NO: 417847 - RNA, 19 nt, Artificial Sequence
  Description of Artificial Sequence: Synthetic oligonucleotide
ggcgccacagggugagaug

SEQ ID NO: 417848 - RNA, 19 nt, Artificial Sequence
  Description of Artificial Sequence: Synthetic oligonucleotide
ggucuagcgguagcuguac

SEQ ID NO: 417849 - RNA, 19 nt, Artificial Sequence
  Description of Artificial Sequence: Synthetic oligonucleotide
aggugguacuuaacucaga

SEQ ID NO: 417850 - RNA, 19 nt, Artificial Sequence
  Description of Artificial Sequence: Synthetic oligonucleotide
aggucuagcgguagcugua

SEQ ID NO: 417851 - RNA, 19 nt, Artificial Sequence
  Description of Artificial Sequence: Synthetic oligonucleotide
cacuccgaguucaaggcuu

SEQ ID NO: 417852 - RNA, 19 nt, Artificial Sequence
  Description of Artificial Sequence: Synthetic oligonucleotide
gccucgauguccacucuac

SEQ ID NO: 417853 - RNA, 19 nt, Artificial Sequence
  Description of Artificial Sequence: Synthetic oligonucleotide
guagguagcugcagucacu

SEQ ID NO: 417854 - RNA, 19 nt, Artificial Sequence
  Description of Artificial Sequence: Synthetic oligonucleotide
gugcuuagcagaagaccua

SEQ ID NO: 417855 - RNA, 19 nt, Artificial Sequence
  Description of Artificial Sequence: Synthetic oligonucleotide
gggucagaacagcagucua

SEQ ID NO: 417856 - RNA, 19 nt, Artificial Sequence
  Description of Artificial Sequence: Synthetic oligonucleotide
ccagguguguagguagcug

SEQ ID NO: 417857 - RNA, 19 nt, Artificial Sequence
  Description of Artificial Sequence: Synthetic oligonucleotide
augcuccacgauugacauu

SEQ ID NO: 417858 - RNA, 19 nt, Artificial Sequence
  Description of Artificial Sequence: Synthetic oligonucleotide
cccuuagaaguucuaugaa

SEQ ID NO: 417859 - RNA, 19 nt, Artificial Sequence
  Description of Artificial Sequence: Synthetic oligonucleotide
gccauaguuugggugcauc

SEQ ID NO: 417860 - RNA, 19 nt, Artificial Sequence
  Description of Artificial Sequence: Synthetic oligonucleotide
gcuuagcagaagaccuaac

SEQ ID NO: 417861 - RNA, 19 nt, Artificial Sequence
  Description of Artificial Sequence: Synthetic oligonucleotide
ggaugcgaggacaugguuu

SEQ ID NO: 417862 - RNA, 19 nt, Artificial Sequence
  Description of Artificial Sequence: Synthetic oligonucleotide
cagaucugcgcagguaagu

SEQ ID NO: 417863 - RNA, 19 nt, Artificial Sequence
  Description of Artificial Sequence: Synthetic oligonucleotide
augcgaggacaugguuuga

SEQ ID NO: 417864 - RNA, 19 nt, Artificial Sequence
  Description of Artificial Sequence: Synthetic oligonucleotide
gugguauuacugacuggau

SEQ ID NO: 417865 - RNA, 19 nt, Artificial Sequence
  Description of Artificial Sequence: Synthetic oligonucleotide
ccuggcgaggaugcgagga

SEQ ID NO: 417866 - RNA, 19 nt, Artificial Sequence
  Description of Artificial Sequence: Synthetic oligonucleotide
cguugggugcugcaucauc

SEQ ID NO: 417867 - RNA, 19 nt, Artificial Sequence
  Description of Artificial Sequence: Synthetic oligonucleotide
ggccaagugagggugcagu

SEQ ID NO: 417868 - RNA, 19 nt, Artificial Sequence
  Description of Artificial Sequence: Synthetic oligonucleotide
gccccugaaaggaccucug

SEQ ID NO: 417869 - RNA, 19 nt, Artificial Sequence
  Description of Artificial Sequence: Synthetic oligonucleotide
cgccagguguguagguagc

SEQ ID NO: 417870 - RNA, 19 nt, Artificial Sequence
  Description of Artificial Sequence: Synthetic oligonucleotide
gcauccuauguggaugggu

SEQ ID NO: 417871 - RNA, 19 nt, Artificial Sequence
  Description of Artificial Sequence: Synthetic oligonucleotide
gcgaggaugcgaggacaug

SEQ ID NO: 417872 - RNA, 19 nt, Artificial Sequence
  Description of Artificial Sequence: Synthetic oligonucleotide
ccucgauguccacucuaca

SEQ ID NO: 417873 - RNA, 19 nt, Artificial Sequence
  Description of Artificial Sequence: Synthetic oligonucleotide
gcacuccgaguucaaggcu

SEQ ID NO: 417874 - RNA, 19 nt, Artificial Sequence
  Description of Artificial Sequence: Synthetic oligonucleotide
ccgcguugggugcugcauc

SEQ ID NO: 417875 - RNA, 19 nt, Artificial Sequence
  Description of Artificial Sequence: Synthetic oligonucleotide
ggugccggggcugggauau

SEQ ID NO: 417876 - RNA, 19 nt, Artificial Sequence
  Description of Artificial Sequence: Synthetic oligonucleotide
caucucuaucuugcacugu

SEQ ID NO: 417877 - RNA, 19 nt, Artificial Sequence
  Description of Artificial Sequence: Synthetic oligonucleotide
cucuacauauggggcacuu

SEQ ID NO: 417878 - RNA, 19 nt, Artificial Sequence
  Description of Artificial Sequence: Synthetic oligonucleotide
ggagggacccuuagaaguu

SEQ ID NO: 417879 - RNA, 19 nt, Artificial Sequence
  Description of Artificial Sequence: Synthetic oligonucleotide
gccugacaauauaaucugu

SEQ ID NO: 417880 - RNA, 19 nt, Artificial Sequence
  Description of Artificial Sequence: Synthetic oligonucleotide
gugcgccagguguguaggu

SEQ ID NO: 417881 - RNA, 19 nt, Artificial Sequence
  Description of Artificial Sequence: Synthetic oligonucleotide
gugcccgcguugggugcug

SEQ ID NO: 417882 - RNA, 19 nt, Artificial Sequence
  Description of Artificial Sequence: Synthetic oligonucleotide
gggacccuuagaaguucua

SEQ ID NO: 417883 - RNA, 19 nt, Artificial Sequence
  Description of Artificial Sequence: Synthetic oligonucleotide
ggcgaggaugcgaggacau

SEQ ID NO: 417884 - RNA, 19 nt, Artificial Sequence
  Description of Artificial Sequence: Synthetic oligonucleotide
gcccgcguugggugcugca

SEQ ID NO: 417885 - RNA, 19 nt, Artificial Sequence
  Description of Artificial Sequence: Synthetic oligonucleotide
gcagugcgccaggugugua

SEQ ID NO: 417886 - RNA, 19 nt, Artificial Sequence
  Description of Artificial Sequence: Synthetic oligonucleotide
cccgcguugggugcugcau

SEQ ID NO: 417887 - RNA, 19 nt, Artificial Sequence
  Description of Artificial Sequence: Synthetic oligonucleotide
gcguugggugcugcaucau

SEQ ID NO: 417888 - RNA, 19 nt, Artificial Sequence
  Description of Artificial Sequence: Synthetic oligonucleotide
aaaacuagggccuaguccc

SEQ ID NO: 417889 - RNA, 19 nt, Artificial Sequence
  Description of Artificial Sequence: Synthetic oligonucleotide
aauaucauaaauaugggcg

SEQ ID NO: 417890 - RNA, 19 nt, Artificial Sequence
  Description of Artificial Sequence: Synthetic oligonucleotide
uaaguaaagaacauuauac

SEQ ID NO: 417891 - RNA, 19 nt, Artificial Sequence
  Description of Artificial Sequence: Synthetic oligonucleotide
uauauugugaaauacccag

SEQ ID NO: 417892 - RNA, 19 nt, Artificial Sequence
  Description of Artificial Sequence: Synthetic oligonucleotide
agagucaacagcuuguugc

SEQ ID NO: 417893 - RNA, 19 nt, Artificial Sequence
  Description of Artificial Sequence: Synthetic oligonucleotide
uaaaucauaguccucaaug

SEQ ID NO: 417894 - RNA, 19 nt, Artificial Sequence
  Description of Artificial Sequence: Synthetic oligonucleotide
uuaaagguggcacaguucc

SEQ ID NO: 417895 - RNA, 19 nt, Artificial Sequence
  Description of Artificial Sequence: Synthetic oligonucleotide
cuucauaucaaauacugac

SEQ ID NO: 417896 - RNA, 19 nt, Artificial Sequence
  Description of Artificial Sequence: Synthetic oligonucleotide
aacgguguguaaaagaugg

SEQ ID NO: 417897 - RNA, 19 nt, Artificial Sequence
  Description of Artificial Sequence: Synthetic oligonucleotide
ucauaaagccugcacaccg

SEQ ID NO: 417898 - RNA, 19 nt, Artificial Sequence
  Description of Artificial Sequence: Synthetic oligonucleotide
aaaucugcugaagauaagg

SEQ ID NO: 417899 - RNA, 19 nt, Artificial Sequence
  Description of Artificial Sequence: Synthetic oligonucleotide
ugaguugugacaguuauag

SEQ ID NO: 417900 - RNA, 19 nt, Artificial Sequence
  Description of Artificial Sequence: Synthetic oligonucleotide
aacauugcuccauacauca

SEQ ID NO: 417901 - RNA, 19 nt, Artificial Sequence
  Description of Artificial Sequence: Synthetic oligonucleotide
aguuccuuaacggacagcc

SEQ ID NO: 417902 - RNA, 19 nt, Artificial Sequence
  Description of Artificial Sequence: Synthetic oligonucleotide
aauaggacgaaaucugcug

SEQ ID NO: 417903 - RNA, 19 nt, Artificial Sequence
  Description of Artificial Sequence: Synthetic oligonucleotide
aucuggguuaaacagaguc

SEQ ID NO: 417904 - RNA, 19 nt, Artificial Sequence
  Description of Artificial Sequence: Synthetic oligonucleotide
aaagcauccgccaucuacc

SEQ ID NO: 417905 - RNA, 19 nt, Artificial Sequence
  Description of Artificial Sequence: Synthetic oligonucleotide
acuaaauacguuguagagc

SEQ ID NO: 417906 - RNA, 19 nt, Artificial Sequence
  Description of Artificial Sequence: Synthetic oligonucleotide
uucagagauaagaugaugu

SEQ ID NO: 417907 - RNA, 19 nt, Artificial Sequence
  Description of Artificial Sequence: Synthetic oligonucleotide
ugcuauagguuuauaauca

SEQ ID NO: 417908 - RNA, 19 nt, Artificial Sequence
  Description of Artificial Sequence: Synthetic oligonucleotide
aaauaugggcgaugucucc

SEQ ID NO: 417909 - RNA, 19 nt, Artificial Sequence
  Description of Artificial Sequence: Synthetic oligonucleotide
auaaauaugggcgaugucu

SEQ ID NO: 417910 - RNA, 19 nt, Artificial Sequence
  Description of Artificial Sequence: Synthetic oligonucleotide
uaaugaucuucugugaagg

SEQ ID NO: 417911 - RNA, 19 nt, Artificial Sequence
  Description of Artificial Sequence: Synthetic oligonucleotide
aguaaagaacauuauacaa

SEQ ID NO: 417912 - RNA, 19 nt, Artificial Sequence
  Description of Artificial Sequence: Synthetic oligonucleotide
gauaaggugccuaucaaag

SEQ ID NO: 417913 - RNA, 19 nt, Artificial Sequence
  Description of Artificial Sequence: Synthetic oligonucleotide
agguaaaguuuauuggcgc

SEQ ID NO: 417914 - RNA, 19 nt, Artificial Sequence
  Description of Artificial Sequence: Synthetic oligonucleotide
aagaugucuauccaauugu

SEQ ID NO: 417915 - RNA, 19 nt, Artificial Sequence
  Description of Artificial Sequence: Synthetic oligonucleotide
uggaauaagcugcaguaag

SEQ ID NO: 417916 - RNA, 19 nt, Artificial Sequence
  Description of Artificial Sequence: Synthetic oligonucleotide
aagacaagaucaucuguag

SEQ ID NO: 417917 - RNA, 19 nt, Artificial Sequence
  Description of Artificial Sequence: Synthetic oligonucleotide
gaagaugucuauccaauug

SEQ ID NO: 417918 - RNA, 19 nt, Artificial Sequence
  Description of Artificial Sequence: Synthetic oligonucleotide
aaagccugcacaccguguc

SEQ ID NO: 417919 - RNA, 19 nt, Artificial Sequence
  Description of Artificial Sequence: Synthetic oligonucleotide
ugcauuaaauguucggaag

SEQ ID NO: 417920 - RNA, 19 nt, Artificial Sequence
  Description of Artificial Sequence: Synthetic oligonucleotide
uggaaaacgccacugauau

SEQ ID NO: 417921 - RNA, 19 nt, Artificial Sequence
  Description of Artificial Sequence: Synthetic oligonucleotide
auaaggugccuaucaaagc

SEQ ID NO: 417922 - RNA, 19 nt, Artificial Sequence
  Description of Artificial Sequence: Synthetic oligonucleotide
cuugcagcgagcauguugc

SEQ ID NO: 417923 - RNA, 19 nt, Artificial Sequence
  Description of Artificial Sequence: Synthetic oligonucleotide
uucauaucaaauacugacu

SEQ ID NO: 417924 - RNA, 19 nt, Artificial Sequence
  Description of Artificial Sequence: Synthetic oligonucleotide
aaauguucggaaggaagac

SEQ ID NO: 417925 - RNA, 19 nt, Artificial Sequence
  Description of Artificial Sequence: Synthetic oligonucleotide
acaucacucauucagagau

SEQ ID NO: 417926 - RNA, 19 nt, Artificial Sequence
  Description of Artificial Sequence: Synthetic oligonucleotide
gacaguuauagcuagccuc

SEQ ID NO: 417927 - RNA, 19 nt, Artificial Sequence
  Description of Artificial Sequence: Synthetic oligonucleotide
aguugcauuaaauguucgg

SEQ ID NO: 417928 - RNA, 19 nt, Artificial Sequence
  Description of Artificial Sequence: Synthetic oligonucleotide
auaucauaaauaugggcga

SEQ ID NO: 417929 - RNA, 19 nt, Artificial Sequence
  Description of Artificial Sequence: Synthetic oligonucleotide
guuauagcuagccucuucc

SEQ ID NO: 417930 - RNA, 19 nt, Artificial Sequence
  Description of Artificial Sequence: Synthetic oligonucleotide
uguauugaugaugaccucc

SEQ ID NO: 417931 - RNA, 19 nt, Artificial Sequence
  Description of Artificial Sequence: Synthetic oligonucleotide
ugauccuaccaaucaaagg

SEQ ID NO: 417932 - RNA, 19 nt, Artificial Sequence
  Description of Artificial Sequence: Synthetic oligonucleotide
agauacucugugaugauac

SEQ ID NO: 417933 - RNA, 19 nt, Artificial Sequence
  Description of Artificial Sequence: Synthetic oligonucleotide
caaaacuagggccuagucc

SEQ ID NO: 417934 - RNA, 19 nt, Artificial Sequence
  Description of Artificial Sequence: Synthetic oligonucleotide
uuucgaucaacagaagcag

SEQ ID NO: 417935 - RNA, 19 nt, Artificial Sequence
  Description of Artificial Sequence: Synthetic oligonucleotide
gaagauaaggugccuauca

SEQ ID NO: 417936 - RNA, 19 nt, Artificial Sequence
  Description of Artificial Sequence: Synthetic oligonucleotide
auguucggaaggaagaccc

SEQ ID NO: 417937 - RNA, 19 nt, Artificial Sequence
  Description of Artificial Sequence: Synthetic oligonucleotide
cuaaauacguuguagagcu

SEQ ID NO: 417938 - RNA, 19 nt, Artificial Sequence
  Description of Artificial Sequence: Synthetic oligonucleotide
uaaauaugggcgaugucuc

SEQ ID NO: 417939 - RNA, 19 nt, Artificial Sequence
  Description of Artificial Sequence: Synthetic oligonucleotide
uccaauugcaggcaaugga

SEQ ID NO: 417940 - RNA, 19 nt, Artificial Sequence
  Description of Artificial Sequence: Synthetic oligonucleotide
uccacuaaauacguuguag

SEQ ID NO: 417941 - RNA, 19 nt, Artificial Sequence
  Description of Artificial Sequence: Synthetic oligonucleotide
ucaagaugugugauggcug

SEQ ID NO: 417942 - RNA, 19 nt, Artificial Sequence
  Description of Artificial Sequence: Synthetic oligonucleotide
cacuaaauacguuguagag

SEQ ID NO: 417943 - RNA, 19 nt, Artificial Sequence
  Description of Artificial Sequence: Synthetic oligonucleotide
ugauaaaacugauccuacc

SEQ ID NO: 417944 - RNA, 19 nt, Artificial Sequence
  Description of Artificial Sequence: Synthetic oligonucleotide
uuuauuggcgcuugccgcc

SEQ ID NO: 417945 - RNA, 19 nt, Artificial Sequence
  Description of Artificial Sequence: Synthetic oligonucleotide
agcauacaguuccuuaacg

SEQ ID NO: 417946 - RNA, 19 nt, Artificial Sequence
  Description of Artificial Sequence: Synthetic oligonucleotide
ugggcaauuccaauugcag

SEQ ID NO: 417947 - RNA, 19 nt, Artificial Sequence
  Description of Artificial Sequence: Synthetic oligonucleotide
gaugauacuguccagugua

SEQ ID NO: 417948 - RNA, 19 nt, Artificial Sequence
  Description of Artificial Sequence: Synthetic oligonucleotide
uuuggauggaaaacgccac

SEQ ID NO: 417949 - RNA, 19 nt, Artificial Sequence
  Description of Artificial Sequence: Synthetic oligonucleotide
uauagcuagccucuuccug

SEQ ID NO: 417950 - RNA, 19 nt, Artificial Sequence
  Description of Artificial Sequence: Synthetic oligonucleotide
ugggagaccgcaaaaggca

SEQ ID NO: 417951 - RNA, 19 nt, Artificial Sequence
  Description of Artificial Sequence: Synthetic oligonucleotide
augacagcaagauagcaau

SEQ ID NO: 417952 - RNA, 19 nt, Artificial Sequence
  Description of Artificial Sequence: Synthetic oligonucleotide
cuauguccuuccuaggagg

SEQ ID NO: 417953 - RNA, 19 nt, Artificial Sequence
  Description of Artificial Sequence: Synthetic oligonucleotide
auuucgaucaacagaagca

SEQ ID NO: 417954 - RNA, 19 nt, Artificial Sequence
  Description of Artificial Sequence: Synthetic oligonucleotide
agacaagaucaucuguagg

SEQ ID NO: 417955 - RNA, 19 nt, Artificial Sequence
  Description of Artificial Sequence: Synthetic oligonucleotide
agugugguuaaacaccaca

SEQ ID NO: 417956 - RNA, 19 nt, Artificial Sequence
  Description of Artificial Sequence: Synthetic oligonucleotide
ugguuaaacaccacacgac

SEQ ID NO: 417957 - RNA, 19 nt, Artificial Sequence
  Description of Artificial Sequence: Synthetic oligonucleotide
ggaaggaagaugucuaucc

SEQ ID NO: 417958 - RNA, 19 nt, Artificial Sequence
  Description of Artificial Sequence: Synthetic oligonucleotide
ucugccguaaaacucgaau

SEQ ID NO: 417959 - RNA, 19 nt, Artificial Sequence
  Description of Artificial Sequence: Synthetic oligonucleotide
cucgucuuccgccagacgc

SEQ ID NO: 417960 - RNA, 19 nt, Artificial Sequence
  Description of Artificial Sequence: Synthetic oligonucleotide
gcauuaaauguucggaagg

SEQ ID NO: 417961 - RNA, 19 nt, Artificial Sequence
  Description of Artificial Sequence: Synthetic oligonucleotide
aguaaggacccaucccugg

SEQ ID NO: 417962 - RNA, 19 nt, Artificial Sequence
  Description of Artificial Sequence: Synthetic oligonucleotide
augucagaaguaaggaccc

SEQ ID NO: 417963 - RNA, 19 nt, Artificial Sequence
  Description of Artificial Sequence: Synthetic oligonucleotide
aaaagauggaaaguucgaa

SEQ ID NO: 417964 - RNA, 19 nt, Artificial Sequence
  Description of Artificial Sequence: Synthetic oligonucleotide
ucuccuuuugugccuauga

SEQ ID NO: 417965 - RNA, 19 nt, Artificial Sequence
  Description of Artificial Sequence: Synthetic oligonucleotide
gguuaaacagagucaacag

SEQ ID NO: 417966 - RNA, 19 nt, Artificial Sequence
  Description of Artificial Sequence: Synthetic oligonucleotide
caaagcauccgccaucuac

SEQ ID NO: 417967 - RNA, 19 nt, Artificial Sequence
  Description of Artificial Sequence: Synthetic oligonucleotide
aauugcaggcaauggaaua

SEQ ID NO: 417968 - RNA, 19 nt, Artificial Sequence
  Description of Artificial Sequence: Synthetic oligonucleotide
cauuuggauggaaaacgcc

SEQ ID NO: 417969 - RNA, 19 nt, Artificial Sequence
  Description of Artificial Sequence: Synthetic oligonucleotide
ucucucgucagcacaguug

SEQ ID NO: 417970 - RNA, 19 nt, Artificial Sequence
  Description of Artificial Sequence: Synthetic oligonucleotide
accucauaaagccugcaca

SEQ ID NO: 417971 - RNA, 19 nt, Artificial Sequence
  Description of Artificial Sequence: Synthetic oligonucleotide
uugcauuaaauguucggaa

SEQ ID NO: 417972 - RNA, 19 nt, Artificial Sequence
  Description of Artificial Sequence: Synthetic oligonucleotide
aaugacagcaagauagcaa

SEQ ID NO: 417973 - RNA, 19 nt, Artificial Sequence
  Description of Artificial Sequence: Synthetic oligonucleotide
cucucgucagcacaguugc

SEQ ID NO: 417974 - RNA, 19 nt, Artificial Sequence
  Description of Artificial Sequence: Synthetic oligonucleotide
guuacuggggugaaggcag

SEQ ID NO: 417975 - RNA, 19 nt, Artificial Sequence
  Description of Artificial Sequence: Synthetic oligonucleotide
uaggauuaaagguggcaca

SEQ ID NO: 417976 - RNA, 19 nt, Artificial Sequence
  Description of Artificial Sequence: Synthetic oligonucleotide
uuuauggcggggcucuggc

SEQ ID NO: 417977 - RNA, 19 nt, Artificial Sequence
  Description of Artificial Sequence: Synthetic oligonucleotide
auaggacgaaaucugcuga

SEQ ID NO: 417978 - RNA, 19 nt, Artificial Sequence
  Description of Artificial Sequence: Synthetic oligonucleotide
cagaaguaaggacccaucc

SEQ ID NO: 417979 - RNA, 19 nt, Artificial Sequence
  Description of Artificial Sequence: Synthetic oligonucleotide
aaucaaaggggaguugccu

SEQ ID NO: 417980 - RNA, 19 nt, Artificial Sequence
  Description of Artificial Sequence: Synthetic oligonucleotide
agcaagauagcaaucuuug

SEQ ID NO: 417981 - RNA, 19 nt, Artificial Sequence
  Description of Artificial Sequence: Synthetic oligonucleotide
gugguuaaacaccacacga

SEQ ID NO: 417982 - RNA, 19 nt, Artificial Sequence
  Description of Artificial Sequence: Synthetic oligonucleotide
agaucuggguuaaacagag

SEQ ID NO: 417983 - RNA, 19 nt, Artificial Sequence
  Description of Artificial Sequence: Synthetic oligonucleotide
uccguuucacaucaauagu

SEQ ID NO: 417984 - RNA, 19 nt, Artificial Sequence
  Description of Artificial Sequence: Synthetic oligonucleotide
uucgaucaacagaagcagc

SEQ ID NO: 417985 - RNA, 19 nt, Artificial Sequence
  Description of Artificial Sequence: Synthetic oligonucleotide
caugguccgacuucugccg

SEQ ID NO: 417986 - RNA, 19 nt, Artificial Sequence
  Description of Artificial Sequence: Synthetic oligonucleotide
ucagaguuguccgagcugu

SEQ ID NO: 417987 - RNA, 19 nt, Artificial Sequence
  Description of Artificial Sequence: Synthetic oligonucleotide
cugggagaccgcaaaaggc

SEQ ID NO: 417988 - RNA, 19 nt, Artificial Sequence
  Description of Artificial Sequence: Synthetic oligonucleotide
uccuugacugggcaauucc

SEQ ID NO: 417989 - RNA, 19 nt, Artificial Sequence
  Description of Artificial Sequence: Synthetic oligonucleotide
cugauccuaccaaucaaag

SEQ ID NO: 417990 - RNA, 19 nt, Artificial Sequence
  Description of Artificial Sequence: Synthetic oligonucleotide
uccagggaggcucuaaauc

SEQ ID NO: 417991 - RNA, 19 nt, Artificial Sequence
  Description of Artificial Sequence: Synthetic oligonucleotide
cauacaguuccuuaacgga

SEQ ID NO: 417992 - RNA, 19 nt, Artificial Sequence
  Description of Artificial Sequence: Synthetic oligonucleotide
ugccguaaaacucgaauuu

SEQ ID NO: 417993 - RNA, 19 nt, Artificial Sequence
  Description of Artificial Sequence: Synthetic oligonucleotide
uauguccuuccuaggagga

SEQ ID NO: 417994 - RNA, 19 nt, Artificial Sequence
  Description of Artificial Sequence: Synthetic oligonucleotide
guaggauuaaagguggcac

SEQ ID NO: 417995 - RNA, 19 nt, Artificial Sequence
  Description of Artificial Sequence: Synthetic oligonucleotide
guugcauuaaauguucgga

SEQ ID NO: 417996 - RNA, 19 nt, Artificial Sequence
  Description of Artificial Sequence: Synthetic oligonucleotide
aggauuaaagguggcacag

SEQ ID NO: 417997 - RNA, 19 nt, Artificial Sequence
  Description of Artificial Sequence: Synthetic oligonucleotide
uaucaaagcauccgccauc

SEQ ID NO: 417998 - RNA, 19 nt, Artificial Sequence
  Description of Artificial Sequence: Synthetic oligonucleotide
caucaauaguugcuauagg

SEQ ID NO: 417999 - RNA, 19 nt, Artificial Sequence
  Description of Artificial Sequence: Synthetic oligonucleotide
uagccaaccgauuugcaau

SEQ ID NO: 418000 - RNA, 19 nt, Artificial Sequence
  Description of Artificial Sequence: Synthetic oligonucleotide
agauaaggugccuaucaaa

SEQ ID NO: 418001 - RNA, 19 nt, Artificial Sequence
  Description of Artificial Sequence: Synthetic oligonucleotide
ugugaaggaaugcuucaua

SEQ ID NO: 418002 - RNA, 19 nt, Artificial Sequence
  Description of Artificial Sequence: Synthetic oligonucleotide
agcuauguccuuccuagga

SEQ ID NO: 418003 - RNA, 19 nt, Artificial Sequence
  Description of Artificial Sequence: Synthetic oligonucleotide
caguaagaguugcacacag

SEQ ID NO: 418004 - RNA, 19 nt, Artificial Sequence
  Description of Artificial Sequence: Synthetic oligonucleotide
gaggacgccaucauuuaag

SEQ ID NO: 418005 - RNA, 19 nt, Artificial Sequence
  Description of Artificial Sequence: Synthetic oligonucleotide
acgccacugauauucaugu

SEQ ID NO: 418006 - RNA, 19 nt, Artificial Sequence
  Description of Artificial Sequence: Synthetic oligonucleotide
uuccaauugcaggcaaugg

SEQ ID NO: 418007 - RNA, 19 nt, Artificial Sequence
  Description of Artificial Sequence: Synthetic oligonucleotide
gugacaguuauagcuagcc

SEQ ID NO: 418008 - RNA, 19 nt, Artificial Sequence
  Description of Artificial Sequence: Synthetic oligonucleotide
uccuaccaaucaaagggga

SEQ ID NO: 418009 - RNA, 19 nt, Artificial Sequence
  Description of Artificial Sequence: Synthetic oligonucleotide
gaaggaagaugucuaucca

SEQ ID NO: 418010 - RNA, 19 nt, Artificial Sequence
  Description of Artificial Sequence: Synthetic oligonucleotide
gaacacugaaauaggacga

SEQ ID NO: 418011 - RNA, 19 nt, Artificial Sequence
  Description of Artificial Sequence: Synthetic oligonucleotide
cccaauacagcugagcugg

SEQ ID NO: 418012 - RNA, 19 nt, Artificial Sequence
  Description of Artificial Sequence: Synthetic oligonucleotide
ugcuuacugaacucaacau

SEQ ID NO: 418013 - RNA, 19 nt, Artificial Sequence
  Description of Artificial Sequence: Synthetic oligonucleotide
uguuccguuucacaucaau

SEQ ID NO: 418014 - RNA, 19 nt, Artificial Sequence
  Description of Artificial Sequence: Synthetic oligonucleotide
ugcaggcaauggaauaagc

SEQ ID NO: 418015 - RNA, 19 nt, Artificial Sequence
  Description of Artificial Sequence: Synthetic oligonucleotide
gacccaaaaggacuuuuca

SEQ ID NO: 418016 - RNA, 19 nt, Artificial Sequence
  Description of Artificial Sequence: Synthetic oligonucleotide
aagcuugaggaagacuuca

SEQ ID NO: 418017 - RNA, 19 nt, Artificial Sequence
  Description of Artificial Sequence: Synthetic oligonucleotide
acaguuauagcuagccucu

SEQ ID NO: 418018 - RNA, 19 nt, Artificial Sequence
  Description of Artificial Sequence: Synthetic oligonucleotide
uuuuauggcggggcucugg

SEQ ID NO: 418019 - RNA, 19 nt, Artificial Sequence
  Description of Artificial Sequence: Synthetic oligonucleotide
ucccaauacagcugagcug

SEQ ID NO: 418020 - RNA, 19 nt, Artificial Sequence
  Description of Artificial Sequence: Synthetic oligonucleotide
uuauagcuagccucuuccu

SEQ ID NO: 418021 - RNA, 19 nt, Artificial Sequence
  Description of Artificial Sequence: Synthetic oligonucleotide
gguuaaacaccacacgaca

SEQ ID NO: 418022 - RNA, 19 nt, Artificial Sequence
  Description of Artificial Sequence: Synthetic oligonucleotide
ugacccgauccugagagug

SEQ ID NO: 418023 - RNA, 19 nt, Artificial Sequence
  Description of Artificial Sequence: Synthetic oligonucleotide
ugggcgaugucuccuuuug

SEQ ID NO: 418024 - RNA, 19 nt, Artificial Sequence
  Description of Artificial Sequence: Synthetic oligonucleotide
ucggaaggaagacccaaaa

SEQ ID NO: 418025 - RNA, 19 nt, Artificial Sequence
  Description of Artificial Sequence: Synthetic oligonucleotide
gggcaauuccaauugcagg

SEQ ID NO: 418026 - RNA, 19 nt, Artificial Sequence
  Description of Artificial Sequence: Synthetic oligonucleotide
auccugagagugcuuacug

SEQ ID NO: 418027 - RNA, 19 nt, Artificial Sequence
  Description of Artificial Sequence: Synthetic oligonucleotide
guugccuguauacgauggg

SEQ ID NO: 418028 - RNA, 19 nt, Artificial Sequence
  Description of Artificial Sequence: Synthetic oligonucleotide
uccuuaacggacagcccug

SEQ ID NO: 418029 - RNA, 19 nt, Artificial Sequence
  Description of Artificial Sequence: Synthetic oligonucleotide
ccugccaagauucucuucc

SEQ ID NO: 418030 - RNA, 19 nt, Artificial Sequence
  Description of Artificial Sequence: Synthetic oligonucleotide
gggacgcaaaacuagggcc

SEQ ID NO: 418031 - RNA, 19 nt, Artificial Sequence
  Description of Artificial Sequence: Synthetic oligonucleotide
gaggggacgcaaaacuagg

SEQ ID NO: 418032 - RNA, 19 nt, Artificial Sequence
  Description of Artificial Sequence: Synthetic oligonucleotide
auagcaaucuuuggugucu

SEQ ID NO: 418033 - RNA, 19 nt, Artificial Sequence
  Description of Artificial Sequence: Synthetic oligonucleotide
gagcauacaguuccuuaac

SEQ ID NO: 418034 - RNA, 19 nt, Artificial Sequence
  Description of Artificial Sequence: Synthetic oligonucleotide
gugccuaucaaagcauccg

SEQ ID NO: 418035 - RNA, 19 nt, Artificial Sequence
  Description of Artificial Sequence: Synthetic oligonucleotide
agguuuauaaucaguugca

SEQ ID NO: 418036 - RNA, 19 nt, Artificial Sequence
  Description of Artificial Sequence: Synthetic oligonucleotide
gaguuguccgagcugucug

SEQ ID NO: 418037 - RNA, 19 nt, Artificial Sequence
  Description of Artificial Sequence: Synthetic oligonucleotide
auacuguccaguguaggug

SEQ ID NO: 418038 - RNA, 19 nt, Artificial Sequence
  Description of Artificial Sequence: Synthetic oligonucleotide
gugugugugugugugagug

SEQ ID NO: 418039 - RNA, 19 nt, Artificial Sequence
  Description of Artificial Sequence: Synthetic oligonucleotide
agucugaauaucauaaaua

SEQ ID NO: 418040 - RNA, 19 nt, Artificial Sequence
  Description of Artificial Sequence: Synthetic oligonucleotide
guuaaacaccacacgacac

SEQ ID NO: 418041 - RNA, 19 nt, Artificial Sequence
  Description of Artificial Sequence: Synthetic oligonucleotide
gaaaugaugcccuucgguu

SEQ ID NO: 418042 - RNA, 19 nt, Artificial Sequence
  Description of Artificial Sequence: Synthetic oligonucleotide
uuuuggcucaggacacuga

SEQ ID NO: 418043 - RNA, 19 nt, Artificial Sequence
  Description of Artificial Sequence: Synthetic oligonucleotide
caagauagcaaucuuuggu

SEQ ID NO: 418044 - RNA, 19 nt, Artificial Sequence
  Description of Artificial Sequence: Synthetic oligonucleotide
gauacuguccaguguaggu

SEQ ID NO: 418045 - RNA, 19 nt, Artificial Sequence
  Description of Artificial Sequence: Synthetic oligonucleotide
caguugcauuaaauguucg

SEQ ID NO: 418046 - RNA, 19 nt, Artificial Sequence
  Description of Artificial Sequence: Synthetic oligonucleotide
cucuggccugccaagauuc

SEQ ID NO: 418047 - RNA, 19 nt, Artificial Sequence
  Description of Artificial Sequence: Synthetic oligonucleotide
agcauccgccaucuacccc

SEQ ID NO: 418048 - RNA, 19 nt, Artificial Sequence
  Description of Artificial Sequence: Synthetic oligonucleotide
aacacugaaauaggacgaa

SEQ ID NO: 418049 - RNA, 19 nt, Artificial Sequence
  Description of Artificial Sequence: Synthetic oligonucleotide
auugcaggcaauggaauaa

SEQ ID NO: 418050 - RNA, 19 nt, Artificial Sequence
  Description of Artificial Sequence: Synthetic oligonucleotide
uuacugaacucaacauaau

SEQ ID NO: 418051 - RNA, 19 nt, Artificial Sequence
  Description of Artificial Sequence: Synthetic oligonucleotide
ugcccuucgguuuagccuu

SEQ ID NO: 418052 - RNA, 19 nt, Artificial Sequence
  Description of Artificial Sequence: Synthetic oligonucleotide
gaguugugacaguuauagc

SEQ ID NO: 418053 - RNA, 19 nt, Artificial Sequence
  Description of Artificial Sequence: Synthetic oligonucleotide
ccauuggcaauucuagggg

SEQ ID NO: 418054 - RNA, 19 nt, Artificial Sequence
  Description of Artificial Sequence: Synthetic oligonucleotide
aucagaguuguccgagcug

SEQ ID NO: 418055 - RNA, 19 nt, Artificial Sequence
  Description of Artificial Sequence: Synthetic oligonucleotide
uaucauaaauaugggcgau

SEQ ID NO: 418056 - RNA, 19 nt, Artificial Sequence
  Description of Artificial Sequence: Synthetic oligonucleotide
acgggguucuugcagcgag

SEQ ID NO: 418057 - RNA, 19 nt, Artificial Sequence
  Description of Artificial Sequence: Synthetic oligonucleotide
cacaccguguccauguuca

SEQ ID NO: 418058 - RNA, 19 nt, Artificial Sequence
  Description of Artificial Sequence: Synthetic oligonucleotide
acucauucagagauaagau

SEQ ID NO: 418059 - RNA, 19 nt, Artificial Sequence
  Description of Artificial Sequence: Synthetic oligonucleotide
aguaagaguugcacacagg

SEQ ID NO: 418060 - RNA, 19 nt, Artificial Sequence
  Description of Artificial Sequence: Synthetic oligonucleotide
auuagcuucccggaacacu

SEQ ID NO: 418061 - RNA, 19 nt, Artificial Sequence
  Description of Artificial Sequence: Synthetic oligonucleotide
aaguaaggacccaucccug

SEQ ID NO: 418062 - RNA, 19 nt, Artificial Sequence
  Description of Artificial Sequence: Synthetic oligonucleotide
ugugugugugaguguguug

SEQ ID NO: 418063 - RNA, 19 nt, Artificial Sequence
  Description of Artificial Sequence: Synthetic oligonucleotide
uugcaggcaauggaauaag

SEQ ID NO: 418064 - RNA, 19 nt, Artificial Sequence
  Description of Artificial Sequence: Synthetic oligonucleotide
gcuauguccuuccuaggag

SEQ ID NO: 418065 - RNA, 19 nt, Artificial Sequence
  Description of Artificial Sequence: Synthetic oligonucleotide
uguucggaaggaagaccca

SEQ ID NO: 418066 - RNA, 19 nt, Artificial Sequence
  Description of Artificial Sequence: Synthetic oligonucleotide
ugacugggcaauuccaauu

SEQ ID NO: 418067 - RNA, 19 nt, Artificial Sequence
  Description of Artificial Sequence: Synthetic oligonucleotide
uccgacuucugccguaaaa

SEQ ID NO: 418068 - RNA, 19 nt, Artificial Sequence
  Description of Artificial Sequence: Synthetic oligonucleotide
cucauaaagccugcacacc

SEQ ID NO: 418069 - RNA, 19 nt, Artificial Sequence
  Description of Artificial Sequence: Synthetic oligonucleotide
uucggaaggaagacccaaa

SEQ ID NO: 418070 - RNA, 19 nt, Artificial Sequence
  Description of Artificial Sequence: Synthetic oligonucleotide
augugugauggcugaguug

SEQ ID NO: 418071 - RNA, 19 nt, Artificial Sequence
  Description of Artificial Sequence: Synthetic oligonucleotide
cuccuuuugugccuaugac

SEQ ID NO: 418072 - RNA, 19 nt, Artificial Sequence
  Description of Artificial Sequence: Synthetic oligonucleotide
cccuuuagaaaugagauga

SEQ ID NO: 418073 - RNA, 19 nt, Artificial Sequence
  Description of Artificial Sequence: Synthetic oligonucleotide
gacggccucucucugauaa

SEQ ID NO: 418074 - RNA, 19 nt, Artificial Sequence
  Description of Artificial Sequence: Synthetic oligonucleotide
cuguauacgaugggccagg

SEQ ID NO: 418075 - RNA, 19 nt, Artificial Sequence
  Description of Artificial Sequence: Synthetic oligonucleotide
ccucauaaagccugcacac

SEQ ID NO: 418076 - RNA, 19 nt, Artificial Sequence
  Description of Artificial Sequence: Synthetic oligonucleotide
ucgucuuccgccagacgcu

SEQ ID NO: 418077 - RNA, 19 nt, Artificial Sequence
  Description of Artificial Sequence: Synthetic oligonucleotide
gacgaaaucugcugaagau

SEQ ID NO: 418078 - RNA, 19 nt, Artificial Sequence
  Description of Artificial Sequence: Synthetic oligonucleotide
cucgucagcacaguugcug

SEQ ID NO: 418079 - RNA, 19 nt, Artificial Sequence
  Description of Artificial Sequence: Synthetic oligonucleotide
ggguuaaacagagucaaca

SEQ ID NO: 418080 - RNA, 19 nt, Artificial Sequence
  Description of Artificial Sequence: Synthetic oligonucleotide
gugugugugugugugugag

SEQ ID NO: 418081 - RNA, 19 nt, Artificial Sequence
  Description of Artificial Sequence: Synthetic oligonucleotide
uguguguguguguguguga

SEQ ID NO: 418082 - RNA, 19 nt, Artificial Sequence
  Description of Artificial Sequence: Synthetic oligonucleotide
gugugugugugugagugug

SEQ ID NO: 418083 - RNA, 19 nt, Artificial Sequence
  Description of Artificial Sequence: Synthetic oligonucleotide
aaggaaugcuucauaucaa

SEQ ID NO: 418084 - RNA, 19 nt, Artificial Sequence
  Description of Artificial Sequence: Synthetic oligonucleotide
aauuccaauugcaggcaau

SEQ ID NO: 418085 - RNA, 19 nt, Artificial Sequence
  Description of Artificial Sequence: Synthetic oligonucleotide
agcucugugugugugugug

SEQ ID NO: 418086 - RNA, 19 nt, Artificial Sequence
  Description of Artificial Sequence: Synthetic oligonucleotide
ugacagcaagauagcaauc

SEQ ID NO: 418087 - RNA, 19 nt, Artificial Sequence
  Description of Artificial Sequence: Synthetic oligonucleotide
aaacgccacugauauucau

SEQ ID NO: 418088 - RNA, 19 nt, Artificial Sequence
  Description of Artificial Sequence: Synthetic oligonucleotide
ugaagauaaggugccuauc

SEQ ID NO: 418089 - RNA, 19 nt, Artificial Sequence
  Description of Artificial Sequence: Synthetic oligonucleotide
aaaacgccacugauauuca

SEQ ID NO: 418090 - RNA, 19 nt, Artificial Sequence
  Description of Artificial Sequence: Synthetic oligonucleotide
ugugugugugugagugugu

SEQ ID NO: 418091 - RNA, 19 nt, Artificial Sequence
  Description of Artificial Sequence: Synthetic oligonucleotide
guucccaauacagcugagc

SEQ ID NO: 418092 - RNA, 19 nt, Artificial Sequence
  Description of Artificial Sequence: Synthetic oligonucleotide
cuuaacggacagcccuggg

SEQ ID NO: 418093 - RNA, 19 nt, Artificial Sequence
  Description of Artificial Sequence: Synthetic oligonucleotide
cauaaauaugggcgauguc

SEQ ID NO: 418094 - RNA, 19 nt, Artificial Sequence
  Description of Artificial Sequence: Synthetic oligonucleotide
agcagucaugggcaaguca

SEQ ID NO: 418095 - RNA, 19 nt, Artificial Sequence
  Description of Artificial Sequence: Synthetic oligonucleotide
aaggggaguugccuguaua

SEQ ID NO: 418096 - RNA, 19 nt, Artificial Sequence
  Description of Artificial Sequence: Synthetic oligonucleotide
aggaagaugucuauccaau

SEQ ID NO: 418097 - RNA, 19 nt, Artificial Sequence
  Description of Artificial Sequence: Synthetic oligonucleotide
caguuacuggggugaaggc

SEQ ID NO: 418098 - RNA, 19 nt, Artificial Sequence
  Description of Artificial Sequence: Synthetic oligonucleotide
caacgggguucuugcagcg

SEQ ID NO: 418099 - RNA, 19 nt, Artificial Sequence
  Description of Artificial Sequence: Synthetic oligonucleotide
ugugugugugugugugugu

SEQ ID NO: 418100 - RNA, 19 nt, Artificial Sequence
  Description of Artificial Sequence: Synthetic oligonucleotide
ugugugugugugugagugu

SEQ ID NO: 418101 - RNA, 19 nt, Artificial Sequence
  Description of Artificial Sequence: Synthetic oligonucleotide
acacgacacugauccagag

SEQ ID NO: 418102 - RNA, 19 nt, Artificial Sequence
  Description of Artificial Sequence: Synthetic oligonucleotide
caccucauaaagccugcac

SEQ ID NO: 418103 - RNA, 19 nt, Artificial Sequence
  Description of Artificial Sequence: Synthetic oligonucleotide
uccauacuuuggaaaugau

SEQ ID NO: 418104 - RNA, 19 nt, Artificial Sequence
  Description of Artificial Sequence: Synthetic oligonucleotide
ucugugugugugugugugu

SEQ ID NO: 418105 - RNA, 19 nt, Artificial Sequence
  Description of Artificial Sequence: Synthetic oligonucleotide
guaugcaccaugguccgac

SEQ ID NO: 418106 - RNA, 19 nt, Artificial Sequence
  Description of Artificial Sequence: Synthetic oligonucleotide
cucugugugugugugugug

SEQ ID NO: 418107 - RNA, 19 nt, Artificial Sequence
  Description of Artificial Sequence: Synthetic oligonucleotide
ggggacgcaaaacuagggc

SEQ ID NO: 418108 - RNA, 19 nt, Artificial Sequence
  Description of Artificial Sequence: Synthetic oligonucleotide
guagcucugugugugugug

SEQ ID NO: 418109 - RNA, 19 nt, Artificial Sequence
  Description of Artificial Sequence: Synthetic oligonucleotide
cuugacugggcaauuccaa

SEQ ID NO: 418110 - RNA, 19 nt, Artificial Sequence
  Description of Artificial Sequence: Synthetic oligonucleotide
cugugugugugugugugug

SEQ ID NO: 418111 - RNA, 19 nt, Artificial Sequence
  Description of Artificial Sequence: Synthetic oligonucleotide
gugugugugugugugugug

SEQ ID NO: 418112 - RNA, 19 nt, Artificial Sequence
  Description of Artificial Sequence: Synthetic oligonucleotide
aagacccaaaaggacuuuu

SEQ ID NO: 418113 - RNA, 19 nt, Artificial Sequence
  Description of Artificial Sequence: Synthetic oligonucleotide
uccggggaagagagacagg

SEQ ID NO: 418114 - RNA, 19 nt, Artificial Sequence
  Description of Artificial Sequence: Synthetic oligonucleotide
ucccgggcugaaaaugcac

SEQ ID NO: 418115 - RNA, 19 nt, Artificial Sequence
  Description of Artificial Sequence: Synthetic oligonucleotide
aggggacgcaaaacuaggg

SEQ ID NO: 418116 - RNA, 19 nt, Artificial Sequence
  Description of Artificial Sequence: Synthetic oligonucleotide
ggcaacgggguucuugcag

SEQ ID NO: 418117 - RNA, 19 nt, Artificial Sequence
  Description of Artificial Sequence: Synthetic oligonucleotide
ugugugugugugugugagu

SEQ ID NO: 418118 - RNA, 19 nt, Artificial Sequence
  Description of Artificial Sequence: Synthetic oligonucleotide
gaauucauucacucaguuu

SEQ ID NO: 418119 - RNA, 19 nt, Artificial Sequence
  Description of Artificial Sequence: Synthetic oligonucleotide
guaaggacccaucccugga

SEQ ID NO: 418120 - RNA, 19 nt, Artificial Sequence
  Description of Artificial Sequence: Synthetic oligonucleotide
agaguuguccgagcugucu

SEQ ID NO: 418121 - RNA, 19 nt, Artificial Sequence
  Description of Artificial Sequence: Synthetic oligonucleotide
aggugccuaucaaagcauc

SEQ ID NO: 418122 - RNA, 19 nt, Artificial Sequence
  Description of Artificial Sequence: Synthetic oligonucleotide
uguauacgaugggccaggc

SEQ ID NO: 418123 - RNA, 19 nt, Artificial Sequence
  Description of Artificial Sequence: Synthetic oligonucleotide
gggaguugccuguauacga

SEQ ID NO: 418124 - RNA, 19 nt, Artificial Sequence
  Description of Artificial Sequence: Synthetic oligonucleotide
cagcauggcuagccaaccg

SEQ ID NO: 418125 - RNA, 19 nt, Artificial Sequence
  Description of Artificial Sequence: Synthetic oligonucleotide
auugcacggugacggccuc

SEQ ID NO: 418126 - RNA, 19 nt, Artificial Sequence
  Description of Artificial Sequence: Synthetic oligonucleotide
agaggacgccaucauuuaa

SEQ ID NO: 418127 - RNA, 19 nt, Artificial Sequence
  Description of Artificial Sequence: Synthetic oligonucleotide
gcaacgggguucuugcagc

SEQ ID NO: 418128 - RNA, 19 nt, Artificial Sequence
  Description of Artificial Sequence: Synthetic oligonucleotide
ggcaagaucuggguuaaac

SEQ ID NO: 418129 - RNA, 19 nt, Artificial Sequence
  Description of Artificial Sequence: Synthetic oligonucleotide
gaugugugauggcugaguu

SEQ ID NO: 418130 - RNA, 19 nt, Artificial Sequence
  Description of Artificial Sequence: Synthetic oligonucleotide
ccacuaaauacguuguaga

SEQ ID NO: 418131 - RNA, 19 nt, Artificial Sequence
  Description of Artificial Sequence: Synthetic oligonucleotide
acgaugggccaggcaaagc

SEQ ID NO: 418132 - RNA, 19 nt, Artificial Sequence
  Description of Artificial Sequence: Synthetic oligonucleotide
acuagggccuagucccugu

SEQ ID NO: 418133 - RNA, 19 nt, Artificial Sequence
  Description of Artificial Sequence: Synthetic oligonucleotide
gaugaggaguaaagagaga

SEQ ID NO: 418134 - RNA, 19 nt, Artificial Sequence
  Description of Artificial Sequence: Synthetic oligonucleotide
cuguauugaugaugaccuc

SEQ ID NO: 418135 - RNA, 19 nt, Artificial Sequence
  Description of Artificial Sequence: Synthetic oligonucleotide
ugccuaugacccgauccug

SEQ ID NO: 418136 - RNA, 19 nt, Artificial Sequence
  Description of Artificial Sequence: Synthetic oligonucleotide
cuucccggaacacugaaau

SEQ ID NO: 418137 - RNA, 19 nt, Artificial Sequence
  Description of Artificial Sequence: Synthetic oligonucleotide
uucuagggguccggggaag

SEQ ID NO: 418138 - RNA, 19 nt, Artificial Sequence
  Description of Artificial Sequence: Synthetic oligonucleotide
gggaggcucuaaaucauag

SEQ ID NO: 418139 - RNA, 19 nt, Artificial Sequence
  Description of Artificial Sequence: Synthetic oligonucleotide
ggggaguugccuguauacg

SEQ ID NO: 418140 - RNA, 19 nt, Artificial Sequence
  Description of Artificial Sequence: Synthetic oligonucleotide
caucugccugcaacauugc

SEQ ID NO: 418141 - RNA, 19 nt, Artificial Sequence
  Description of Artificial Sequence: Synthetic oligonucleotide
ccgauuugcaaugccauug

SEQ ID NO: 418142 - RNA, 19 nt, Artificial Sequence
  Description of Artificial Sequence: Synthetic oligonucleotide
gguaaaguuuauuggcgcu

SEQ ID NO: 418143 - RNA, 19 nt, Artificial Sequence
  Description of Artificial Sequence: Synthetic oligonucleotide
gagauccuugacugggcaa

SEQ ID NO: 418144 - RNA, 19 nt, Artificial Sequence
  Description of Artificial Sequence: Synthetic oligonucleotide
cccggaacacugaaauagg

SEQ ID NO: 418145 - RNA, 19 nt, Artificial Sequence
  Description of Artificial Sequence: Synthetic oligonucleotide
uaaauacguuguagagcuu

SEQ ID NO: 418146 - RNA, 19 nt, Artificial Sequence
  Description of Artificial Sequence: Synthetic oligonucleotide
gcccuuuagaaaugagaug

SEQ ID NO: 418147 - RNA, 19 nt, Artificial Sequence
  Description of Artificial Sequence: Synthetic oligonucleotide
uuauggcggggcucuggcu

SEQ ID NO: 418148 - RNA, 19 nt, Artificial Sequence
  Description of Artificial Sequence: Synthetic oligonucleotide
uccgccagacgcugccugc

SEQ ID NO: 418149 - RNA, 19 nt, Artificial Sequence
  Description of Artificial Sequence: Synthetic oligonucleotide
cagucugaauaucauaaau

SEQ ID NO: 418150 - RNA, 19 nt, Artificial Sequence
  Description of Artificial Sequence: Synthetic oligonucleotide
uuauuggcgcuugccgccu

SEQ ID NO: 418151 - RNA, 19 nt, Artificial Sequence
  Description of Artificial Sequence: Synthetic oligonucleotide
ggaaaugaugcccuucggu

SEQ ID NO: 418152 - RNA, 19 nt, Artificial Sequence
  Description of Artificial Sequence: Synthetic oligonucleotide
auaugggcgaugucuccuu

SEQ ID NO: 418153 - RNA, 19 nt, Artificial Sequence
  Description of Artificial Sequence: Synthetic oligonucleotide
accgauuugcaaugccauu

SEQ ID NO: 418154 - RNA, 19 nt, Artificial Sequence
  Description of Artificial Sequence: Synthetic oligonucleotide
cacacgacacugauccaga

SEQ ID NO: 418155 - RNA, 19 nt, Artificial Sequence
  Description of Artificial Sequence: Synthetic oligonucleotide
ggugccuaucaaagcaucc

SEQ ID NO: 418156 - RNA, 19 nt, Artificial Sequence
  Description of Artificial Sequence: Synthetic oligonucleotide
ugggcaagucagccucucu

SEQ ID NO: 418157 - RNA, 19 nt, Artificial Sequence
  Description of Artificial Sequence: Synthetic oligonucleotide
ggaagcuugaggaagacuu

SEQ ID NO: 418158 - RNA, 19 nt, Artificial Sequence
  Description of Artificial Sequence: Synthetic oligonucleotide
ccuaucaaagcauccgcca

SEQ ID NO: 418159 - RNA, 19 nt, Artificial Sequence
  Description of Artificial Sequence: Synthetic oligonucleotide
ucccuguagcucugugugu

SEQ ID NO: 418160 - RNA, 19 nt, Artificial Sequence
  Description of Artificial Sequence: Synthetic oligonucleotide
ccuaugacccgauccugag

SEQ ID NO: 418161 - RNA, 19 nt, Artificial Sequence
  Description of Artificial Sequence: Synthetic oligonucleotide
cgauuugcaaugccauugg

SEQ ID NO: 418162 - RNA, 19 nt, Artificial Sequence
  Description of Artificial Sequence: Synthetic oligonucleotide
uucccggaacacugaaaua

SEQ ID NO: 418163 - RNA, 19 nt, Artificial Sequence
  Description of Artificial Sequence: Synthetic oligonucleotide
ggggauggcacaucacuca

SEQ ID NO: 418164 - RNA, 19 nt, Artificial Sequence
  Description of Artificial Sequence: Synthetic oligonucleotide
auguccuuccuaggaggag

SEQ ID NO: 418165 - RNA, 19 nt, Artificial Sequence
  Description of Artificial Sequence: Synthetic oligonucleotide
gacccgauccugagagugc

SEQ ID NO: 418166 - RNA, 19 nt, Artificial Sequence
  Description of Artificial Sequence: Synthetic oligonucleotide
ucuagggguccggggaaga

SEQ ID NO: 418167 - RNA, 19 nt, Artificial Sequence
  Description of Artificial Sequence: Synthetic oligonucleotide
cuggaagguucaagaugug

SEQ ID NO: 418168 - RNA, 19 nt, Artificial Sequence
  Description of Artificial Sequence: Synthetic oligonucleotide
ucucgucagcacaguugcu

SEQ ID NO: 418169 - RNA, 19 nt, Artificial Sequence
  Description of Artificial Sequence: Synthetic oligonucleotide
aggaagcuugaggaagacu

SEQ ID NO: 418170 - RNA, 19 nt, Artificial Sequence
  Description of Artificial Sequence: Synthetic oligonucleotide
cauuggcaauucuaggggu

SEQ ID NO: 418171 - RNA, 19 nt, Artificial Sequence
  Description of Artificial Sequence: Synthetic oligonucleotide
gcaaaacuagggccuaguc

SEQ ID NO: 418172 - RNA, 19 nt, Artificial Sequence
  Description of Artificial Sequence: Synthetic oligonucleotide
ccgacuucugccguaaaac

SEQ ID NO: 418173 - RNA, 19 nt, Artificial Sequence
  Description of Artificial Sequence: Synthetic oligonucleotide
ugcagcgagcauguugcuc

SEQ ID NO: 418174 - RNA, 19 nt, Artificial Sequence
  Description of Artificial Sequence: Synthetic oligonucleotide
aguguagguggggaaggaa

SEQ ID NO: 418175 - RNA, 19 nt, Artificial Sequence
  Description of Artificial Sequence: Synthetic oligonucleotide
augguccgacuucugccgu

SEQ ID NO: 418176 - RNA, 19 nt, Artificial Sequence
  Description of Artificial Sequence: Synthetic oligonucleotide
gugccuaugacccgauccu

SEQ ID NO: 418177 - RNA, 19 nt, Artificial Sequence
  Description of Artificial Sequence: Synthetic oligonucleotide
uucugccguaaaacucgaa

SEQ ID NO: 418178 - RNA, 19 nt, Artificial Sequence
  Description of Artificial Sequence: Synthetic oligonucleotide
cauuagcuucccggaacac

SEQ ID NO: 418179 - RNA, 19 nt, Artificial Sequence
  Description of Artificial Sequence: Synthetic oligonucleotide
ggagauccuugacugggca

SEQ ID NO: 418180 - RNA, 19 nt, Artificial Sequence
  Description of Artificial Sequence: Synthetic oligonucleotide
ccaaccgauuugcaaugcc

SEQ ID NO: 418181 - RNA, 19 nt, Artificial Sequence
  Description of Artificial Sequence: Synthetic oligonucleotide
gauccugagagugcuuacu

SEQ ID NO: 418182 - RNA, 19 nt, Artificial Sequence
  Description of Artificial Sequence: Synthetic oligonucleotide
ggcugaaaaugcacagcag

SEQ ID NO: 418183 - RNA, 19 nt, Artificial Sequence
  Description of Artificial Sequence: Synthetic oligonucleotide
guucggaaggaagacccaa

SEQ ID NO: 418184 - RNA, 19 nt, Artificial Sequence
  Description of Artificial Sequence: Synthetic oligonucleotide
uagcucugugugugugugu

SEQ ID NO: 418185 - RNA, 19 nt, Artificial Sequence
  Description of Artificial Sequence: Synthetic oligonucleotide
cuaugacccgauccugaga

SEQ ID NO: 418186 - RNA, 19 nt, Artificial Sequence
  Description of Artificial Sequence: Synthetic oligonucleotide
gggagaccgcaaaaggcag

SEQ ID NO: 418187 - RNA, 19 nt, Artificial Sequence
  Description of Artificial Sequence: Synthetic oligonucleotide
cuucugccguaaaacucga

SEQ ID NO: 418188 - RNA, 19 nt, Artificial Sequence
  Description of Artificial Sequence: Synthetic oligonucleotide
agguuccaagcaucaggaa

SEQ ID NO: 418189 - RNA, 19 nt, Artificial Sequence
  Description of Artificial Sequence: Synthetic oligonucleotide
cuaucaaagcauccgccau

SEQ ID NO: 418190 - RNA, 19 nt, Artificial Sequence
  Description of Artificial Sequence: Synthetic oligonucleotide
ggacgccaucauuuaagac

SEQ ID NO: 418191 - RNA, 19 nt, Artificial Sequence
  Description of Artificial Sequence: Synthetic oligonucleotide
ggguccggggaagagagac

SEQ ID NO: 418192 - RNA, 19 nt, Artificial Sequence
  Description of Artificial Sequence: Synthetic oligonucleotide
ccgggcugaaaaugcacag

SEQ ID NO: 418193 - RNA, 19 nt, Artificial Sequence
  Description of Artificial Sequence: Synthetic oligonucleotide
cugccguaaaacucgaauu

SEQ ID NO: 418194 - RNA, 19 nt, Artificial Sequence
  Description of Artificial Sequence: Synthetic oligonucleotide
gauuccagggaggcucuaa

SEQ ID NO: 418195 - RNA, 19 nt, Artificial Sequence
  Description of Artificial Sequence: Synthetic oligonucleotide
agacgcugccugcccaccu

SEQ ID NO: 418196 - RNA, 19 nt, Artificial Sequence
  Description of Artificial Sequence: Synthetic oligonucleotide
gcaggaacgguguguaaaa

SEQ ID NO: 418197 - RNA, 19 nt, Artificial Sequence
  Description of Artificial Sequence: Synthetic oligonucleotide
cagcccauuuggauggaaa

SEQ ID NO: 418198 - RNA, 19 nt, Artificial Sequence
  Description of Artificial Sequence: Synthetic oligonucleotide
ggaaaguucgaagguccca

SEQ ID NO: 418199 - RNA, 19 nt, Artificial Sequence
  Description of Artificial Sequence: Synthetic oligonucleotide
acgcaaaacuagggccuag

SEQ ID NO: 418200 - RNA, 19 nt, Artificial Sequence
  Description of Artificial Sequence: Synthetic oligonucleotide
cuucugugaaggaaugcuu

SEQ ID NO: 418201 - RNA, 19 nt, Artificial Sequence
  Description of Artificial Sequence: Synthetic oligonucleotide
auacgaugggccaggcaaa

SEQ ID NO: 418202 - RNA, 19 nt, Artificial Sequence
  Description of Artificial Sequence: Synthetic oligonucleotide
gcccauuuggauggaaaac

SEQ ID NO: 418203 - RNA, 19 nt, Artificial Sequence
  Description of Artificial Sequence: Synthetic oligonucleotide
uugcagcgagcauguugcu

SEQ ID NO: 418204 - RNA, 19 nt, Artificial Sequence
  Description of Artificial Sequence: Synthetic oligonucleotide
uauuggcgcuugccgccuc

SEQ ID NO: 418205 - RNA, 19 nt, Artificial Sequence
  Description of Artificial Sequence: Synthetic oligonucleotide
ccaaaucagaguuguccga

SEQ ID NO: 418206 - RNA, 19 nt, Artificial Sequence
  Description of Artificial Sequence: Synthetic oligonucleotide
gcagcauggcuagccaacc

SEQ ID NO: 418207 - RNA, 19 nt, Artificial Sequence
  Description of Artificial Sequence: Synthetic oligonucleotide
cagaggacgccaucauuua

SEQ ID NO: 418208 - RNA, 19 nt, Artificial Sequence
  Description of Artificial Sequence: Synthetic oligonucleotide
gacgcaaaacuagggccua

SEQ ID NO: 418209 - RNA, 19 nt, Artificial Sequence
  Description of Artificial Sequence: Synthetic oligonucleotide
ugguccgacuucugccgua

SEQ ID NO: 418210 - RNA, 19 nt, Artificial Sequence
  Description of Artificial Sequence: Synthetic oligonucleotide
gucagaaguaaggacccau

SEQ ID NO: 418211 - RNA, 19 nt, Artificial Sequence
  Description of Artificial Sequence: Synthetic oligonucleotide
ccuuaacggacagcccugg

SEQ ID NO: 418212 - RNA, 19 nt, Artificial Sequence
  Description of Artificial Sequence: Synthetic oligonucleotide
ggugacggccucucucuga

SEQ ID NO: 418213 - RNA, 19 nt, Artificial Sequence
  Description of Artificial Sequence: Synthetic oligonucleotide
agaccgcaaaaggcaggug

SEQ ID NO: 418214 - RNA, 19 nt, Artificial Sequence
  Description of Artificial Sequence: Synthetic oligonucleotide
ccggaacacugaaauagga

SEQ ID NO: 418215 - RNA, 19 nt, Artificial Sequence
  Description of Artificial Sequence: Synthetic oligonucleotide
ccaaguggcagaugucaga

SEQ ID NO: 418216 - RNA, 19 nt, Artificial Sequence
  Description of Artificial Sequence: Synthetic oligonucleotide
agcggacaucccagaggac

SEQ ID NO: 418217 - RNA, 19 nt, Artificial Sequence
  Description of Artificial Sequence: Synthetic oligonucleotide
ccaauacagcugagcuggg

SEQ ID NO: 418218 - RNA, 19 nt, Artificial Sequence
  Description of Artificial Sequence: Synthetic oligonucleotide
ggaggcucuaaaucauagu

SEQ ID NO: 418219 - RNA, 19 nt, Artificial Sequence
  Description of Artificial Sequence: Synthetic oligonucleotide
ggacgcaaaacuagggccu

SEQ ID NO: 418220 - RNA, 19 nt, Artificial Sequence
  Description of Artificial Sequence: Synthetic oligonucleotide
cugggccauauucuaucaa

SEQ ID NO: 418221 - RNA, 19 nt, Artificial Sequence
  Description of Artificial Sequence: Synthetic oligonucleotide
gcugaagauaaggugccua

SEQ ID NO: 418222 - RNA, 19 nt, Artificial Sequence
  Description of Artificial Sequence: Synthetic oligonucleotide
acggccucucucugauaaa

SEQ ID NO: 418223 - RNA, 19 nt, Artificial Sequence
  Description of Artificial Sequence: Synthetic oligonucleotide
cagacgcugccugcccacc

SEQ ID NO: 418224 - RNA, 19 nt, Artificial Sequence
  Description of Artificial Sequence: Synthetic oligonucleotide
ggaagaugucuauccaauu

SEQ ID NO: 418225 - RNA, 19 nt, Artificial Sequence
  Description of Artificial Sequence: Synthetic oligonucleotide
agggaggcucuaaaucaua

SEQ ID NO: 418226 - RNA, 19 nt, Artificial Sequence
  Description of Artificial Sequence: Synthetic oligonucleotide
ggccucucucugauaaaac

SEQ ID NO: 418227 - RNA, 19 nt, Artificial Sequence
  Description of Artificial Sequence: Synthetic oligonucleotide
agcgagcauguugcucucu

SEQ ID NO: 418228 - RNA, 19 nt, Artificial Sequence
  Description of Artificial Sequence: Synthetic oligonucleotide
gccaaccgauuugcaaugc

SEQ ID NO: 418229 - RNA, 19 nt, Artificial Sequence
  Description of Artificial Sequence: Synthetic oligonucleotide
uugcacggugacggccucu

SEQ ID NO: 418230 - RNA, 19 nt, Artificial Sequence
  Description of Artificial Sequence: Synthetic oligonucleotide
gcacaccguguccauguuc

SEQ ID NO: 418231 - RNA, 19 nt, Artificial Sequence
  Description of Artificial Sequence: Synthetic oligonucleotide
uccagcccauuuggaugga

SEQ ID NO: 418232 - RNA, 19 nt, Artificial Sequence
  Description of Artificial Sequence: Synthetic oligonucleotide
cagcagucaugggcaaguc

SEQ ID NO: 418233 - RNA, 19 nt, Artificial Sequence
  Description of Artificial Sequence: Synthetic oligonucleotide
cagauuccagggaggcucu

SEQ ID NO: 418234 - RNA, 19 nt, Artificial Sequence
  Description of Artificial Sequence: Synthetic oligonucleotide
gccuaugacccgauccuga

SEQ ID NO: 418235 - RNA, 19 nt, Artificial Sequence
  Description of Artificial Sequence: Synthetic oligonucleotide
gaucuggguuaaacagagu

SEQ ID NO: 418236 - RNA, 19 nt, Artificial Sequence
  Description of Artificial Sequence: Synthetic oligonucleotide
gaagacccaaaaggacuuu

SEQ ID NO: 418237 - RNA, 19 nt, Artificial Sequence
  Description of Artificial Sequence: Synthetic oligonucleotide
ggaguugccuguauacgau

SEQ ID NO: 418238 - RNA, 19 nt, Artificial Sequence
  Description of Artificial Sequence: Synthetic oligonucleotide
gcagcagucaugggcaagu

SEQ ID NO: 418239 - RNA, 19 nt, Artificial Sequence
  Description of Artificial Sequence: Synthetic oligonucleotide
gugugugugugaguguguu

SEQ ID NO: 418240 - RNA, 19 nt, Artificial Sequence
  Description of Artificial Sequence: Synthetic oligonucleotide
cccuccauacuuuggaaau

SEQ ID NO: 418241 - RNA, 19 nt, Artificial Sequence
  Description of Artificial Sequence: Synthetic oligonucleotide
ggauuaaagguggcacagu

SEQ ID NO: 418242 - RNA, 19 nt, Artificial Sequence
  Description of Artificial Sequence: Synthetic oligonucleotide
gcgagcauguugcucucua

SEQ ID NO: 418243 - RNA, 19 nt, Artificial Sequence
  Description of Artificial Sequence: Synthetic oligonucleotide
cauggcuagccaaccgauu

SEQ ID NO: 418244 - RNA, 19 nt, Artificial Sequence
  Description of Artificial Sequence: Synthetic oligonucleotide
aaccgcucccgggcugaaa

SEQ ID NO: 418245 - RNA, 19 nt, Artificial Sequence
  Description of Artificial Sequence: Synthetic oligonucleotide
gggauggcacaucacucau

SEQ ID NO: 418246 - RNA, 19 nt, Artificial Sequence
  Description of Artificial Sequence: Synthetic oligonucleotide
gauccuugacugggcaauu

SEQ ID NO: 418247 - RNA, 19 nt, Artificial Sequence
  Description of Artificial Sequence: Synthetic oligonucleotide
gcggggcucuggcuguaug

SEQ ID NO: 418248 - RNA, 19 nt, Artificial Sequence
  Description of Artificial Sequence: Synthetic oligonucleotide
gguccgacuucugccguaa

SEQ ID NO: 418249 - RNA, 19 nt, Artificial Sequence
  Description of Artificial Sequence: Synthetic oligonucleotide
uucuugcagcgagcauguu

SEQ ID NO: 418250 - RNA, 19 nt, Artificial Sequence
  Description of Artificial Sequence: Synthetic oligonucleotide
gccguaaaacucgaauuuu

SEQ ID NO: 418251 - RNA, 19 nt, Artificial Sequence
  Description of Artificial Sequence: Synthetic oligonucleotide
agauuccagggaggcucua

SEQ ID NO: 418252 - RNA, 19 nt, Artificial Sequence
  Description of Artificial Sequence: Synthetic oligonucleotide
cgcucccgggcugaaaaug

SEQ ID NO: 418253 - RNA, 19 nt, Artificial Sequence
  Description of Artificial Sequence: Synthetic oligonucleotide
auguuccguuucacaucaa

SEQ ID NO: 418254 - RNA, 19 nt, Artificial Sequence
  Description of Artificial Sequence: Synthetic oligonucleotide
gggcgaugucuccuuuugu

SEQ ID NO: 418255 - RNA, 19 nt, Artificial Sequence
  Description of Artificial Sequence: Synthetic oligonucleotide
ccgccucuguuuuggcuca

SEQ ID NO: 418256 - RNA, 19 nt, Artificial Sequence
  Description of Artificial Sequence: Synthetic oligonucleotide
ccgccagacgcugccugcc

SEQ ID NO: 418257 - RNA, 19 nt, Artificial Sequence
  Description of Artificial Sequence: Synthetic oligonucleotide
gcauggcuagccaaccgau

SEQ ID NO: 418258 - RNA, 19 nt, Artificial Sequence
  Description of Artificial Sequence: Synthetic oligonucleotide
gcucugugugugugugugu

SEQ ID NO: 418259 - RNA, 19 nt, Artificial Sequence
  Description of Artificial Sequence: Synthetic oligonucleotide
ggcgcuugccgccucuguu

SEQ ID NO: 418260 - RNA, 19 nt, Artificial Sequence
  Description of Artificial Sequence: Synthetic oligonucleotide
gcgcuugccgccucuguuu

SEQ ID NO: 418261 - RNA, 19 nt, Artificial Sequence
  Description of Artificial Sequence: Synthetic oligonucleotide
caguuauagcuagccucuu

SEQ ID NO: 418262 - RNA, 19 nt, Artificial Sequence
  Description of Artificial Sequence: Synthetic oligonucleotide
ccuugagguaaaguuuauu

SEQ ID NO: 418263 - RNA, 19 nt, Artificial Sequence
  Description of Artificial Sequence: Synthetic oligonucleotide
gggguccggggaagagaga

SEQ ID NO: 418264 - RNA, 19 nt, Artificial Sequence
  Description of Artificial Sequence: Synthetic oligonucleotide
cgcaaaacuagggccuagu

SEQ ID NO: 418265 - RNA, 19 nt, Artificial Sequence
  Description of Artificial Sequence: Synthetic oligonucleotide
cucuggcuguaugcaccau

SEQ ID NO: 418266 - RNA, 19 nt, Artificial Sequence
  Description of Artificial Sequence: Synthetic oligonucleotide
uuuuguuucguccucguag

SEQ ID NO: 418267 - RNA, 19 nt, Artificial Sequence
  Description of Artificial Sequence: Synthetic oligonucleotide
ugugguccuaccaaagugg

SEQ ID NO: 418268 - RNA, 19 nt, Artificial Sequence
  Description of Artificial Sequence: Synthetic oligonucleotide
guagcaauaaggcacagac

SEQ ID NO: 418269 - RNA, 19 nt, Artificial Sequence
  Description of Artificial Sequence: Synthetic oligonucleotide
cagguugagaccauggugg

SEQ ID NO: 418270 - RNA, 19 nt, Artificial Sequence
  Description of Artificial Sequence: Synthetic oligonucleotide
ugaucucccuccuugacgg

SEQ ID NO: 418271 - RNA, 19 nt, Artificial Sequence
  Description of Artificial Sequence: Synthetic oligonucleotide
aaagucaagaacacgggag

SEQ ID NO: 418272 - RNA, 19 nt, Artificial Sequence
  Description of Artificial Sequence: Synthetic oligonucleotide
ucuuucucgagccugguga

SEQ ID NO: 418273 - RNA, 19 nt, Artificial Sequence
  Description of Artificial Sequence: Synthetic oligonucleotide
uccucguagacuuucacgc

SEQ ID NO: 418274 - RNA, 19 nt, Artificial Sequence
  Description of Artificial Sequence: Synthetic oligonucleotide
aaggguuaccccuauuuug

SEQ ID NO: 418275 - RNA, 19 nt, Artificial Sequence
  Description of Artificial Sequence: Synthetic oligonucleotide
uacucuacacaccaggcug

SEQ ID NO: 418276 - RNA, 19 nt, Artificial Sequence
  Description of Artificial Sequence: Synthetic oligonucleotide
aguucguccaccucggagg

SEQ ID NO: 418277 - RNA, 19 nt, Artificial Sequence
  Description of Artificial Sequence: Synthetic oligonucleotide
ugauagcccaugaagacca

SEQ ID NO: 418278 - RNA, 19 nt, Artificial Sequence
  Description of Artificial Sequence: Synthetic oligonucleotide
cacccuaggacuuugagac

SEQ ID NO: 418279 - RNA, 19 nt, Artificial Sequence
  Description of Artificial Sequence: Synthetic oligonucleotide
ugggcuugcacacaggggc

SEQ ID NO: 418280 - RNA, 19 nt, Artificial Sequence
  Description of Artificial Sequence: Synthetic oligonucleotide
aagucaagaacacgggagu

SEQ ID NO: 418281 - RNA, 19 nt, Artificial Sequence
  Description of Artificial Sequence: Synthetic oligonucleotide
aacacgggagugaaggggc

SEQ ID NO: 418282 - RNA, 19 nt, Artificial Sequence
  Description of Artificial Sequence: Synthetic oligonucleotide
ugacucgaggugcacaggg

SEQ ID NO: 418283 - RNA, 19 nt, Artificial Sequence
  Description of Artificial Sequence: Synthetic oligonucleotide
uguacucuacacaccaggc

SEQ ID NO: 418284 - RNA, 19 nt, Artificial Sequence
  Description of Artificial Sequence: Synthetic oligonucleotide
uuaaggguuaccccuauuu

SEQ ID NO: 418285 - RNA, 19 nt, Artificial Sequence
  Description of Artificial Sequence: Synthetic oligonucleotide
uuuguuucguccucguaga

SEQ ID NO: 418286 - RNA, 19 nt, Artificial Sequence
  Description of Artificial Sequence: Synthetic oligonucleotide
agagacuccccaaaguagc

SEQ ID NO: 418287 - RNA, 19 nt, Artificial Sequence
  Description of Artificial Sequence: Synthetic oligonucleotide
caugcgauucucuuucggg

SEQ ID NO: 418288 - RNA, 19 nt, Artificial Sequence
  Description of Artificial Sequence: Synthetic oligonucleotide
ucugauagcccaugaagac

SEQ ID NO: 418289 - RNA, 19 nt, Artificial Sequence
  Description of Artificial Sequence: Synthetic oligonucleotide
augcgauucucuuucgggg

SEQ ID NO: 418290 - RNA, 19 nt, Artificial Sequence
  Description of Artificial Sequence: Synthetic oligonucleotide
ucagccgaggcucagggcu

SEQ ID NO: 418291 - RNA, 19 nt, Artificial Sequence
  Description of Artificial Sequence: Synthetic oligonucleotide
ucgaucaccaccaguucag

SEQ ID NO: 418292 - RNA, 19 nt, Artificial Sequence
  Description of Artificial Sequence: Synthetic oligonucleotide
gaagaccaugguuaccggg

SEQ ID NO: 418293 - RNA, 19 nt, Artificial Sequence
  Description of Artificial Sequence: Synthetic oligonucleotide
auugaguggugccggcucc

SEQ ID NO: 418294 - RNA, 19 nt, Artificial Sequence
  Description of Artificial Sequence: Synthetic oligonucleotide
cucgucacacgucaaaagc

SEQ ID NO: 418295 - RNA, 19 nt, Artificial Sequence
  Description of Artificial Sequence: Synthetic oligonucleotide
accacacacacacaggugu

SEQ ID NO: 418296 - RNA, 19 nt, Artificial Sequence
  Description of Artificial Sequence: Synthetic oligonucleotide
gacuucgggaucuccaaag

SEQ ID NO: 418297 - RNA, 19 nt, Artificial Sequence
  Description of Artificial Sequence: Synthetic oligonucleotide
agcgcuggcagccguaccc

SEQ ID NO: 418298 - RNA, 19 nt, Artificial Sequence
  Description of Artificial Sequence: Synthetic oligonucleotide
ucuacagcgaggcuucuuc

SEQ ID NO: 418299 - RNA, 19 nt, Artificial Sequence
  Description of Artificial Sequence: Synthetic oligonucleotide
guccaagccaacuagagaa

SEQ ID NO: 418300 - RNA, 19 nt, Artificial Sequence
  Description of Artificial Sequence: Synthetic oligonucleotide
agggaccacacacacacag

SEQ ID NO: 418301 - RNA, 19 nt, Artificial Sequence
  Description of Artificial Sequence: Synthetic oligonucleotide
uggcgcauuggccagggag

SEQ ID NO: 418302 - RNA, 19 nt, Artificial Sequence
  Description of Artificial Sequence: Synthetic oligonucleotide
uugagcuaccccuacuuac

SEQ ID NO: 418303 - RNA, 19 nt, Artificial Sequence
  Description of Artificial Sequence: Synthetic oligonucleotide
gaaagucaagaacacggga

SEQ ID NO: 418304 - RNA, 19 nt, Artificial Sequence
  Description of Artificial Sequence: Synthetic oligonucleotide
ucccuaaauuagcaccagg

SEQ ID NO: 418305 - RNA, 19 nt, Artificial Sequence
  Description of Artificial Sequence: Synthetic oligonucleotide
gaaaugcuaggcucugcag

SEQ ID NO: 418306 - RNA, 19 nt, Artificial Sequence
  Description of Artificial Sequence: Synthetic oligonucleotide
accuuaggggaucugaggu

SEQ ID NO: 418307 - RNA, 19 nt, Artificial Sequence
  Description of Artificial Sequence: Synthetic oligonucleotide
ugagcuaccccuacuuacu

SEQ ID NO: 418308 - RNA, 19 nt, Artificial Sequence
  Description of Artificial Sequence: Synthetic oligonucleotide
uucaacuccugugaucucc

SEQ ID NO: 418309 - RNA, 19 nt, Artificial Sequence
  Description of Artificial Sequence: Synthetic oligonucleotide
uccaccgaguacauggcug

SEQ ID NO: 418310 - RNA, 19 nt, Artificial Sequence
  Description of Artificial Sequence: Synthetic oligonucleotide
acuuugagacuucgggauc

SEQ ID NO: 418311 - RNA, 19 nt, Artificial Sequence
  Description of Artificial Sequence: Synthetic oligonucleotide
uaugugggaaacccaggac

SEQ ID NO: 418312 - RNA, 19 nt, Artificial Sequence
  Description of Artificial Sequence: Synthetic oligonucleotide
uauuuugagcuaccccuac

SEQ ID NO: 418313 - RNA, 19 nt, Artificial Sequence
  Description of Artificial Sequence: Synthetic oligonucleotide
cucguagacuuucacgccc

SEQ ID NO: 418314 - RNA, 19 nt, Artificial Sequence
  Description of Artificial Sequence: Synthetic oligonucleotide
ggccuugugaaugaguucg

SEQ ID NO: 418315 - RNA, 19 nt, Artificial Sequence
  Description of Artificial Sequence: Synthetic oligonucleotide
uccaagccaacuagagaag

SEQ ID NO: 418316 - RNA, 19 nt, Artificial Sequence
  Description of Artificial Sequence: Synthetic oligonucleotide
uccauccccaguuaagggu

SEQ ID NO: 418317 - RNA, 19 nt, Artificial Sequence
  Description of Artificial Sequence: Synthetic oligonucleotide
ugaaugaguucguccaccu

SEQ ID NO: 418318 - RNA, 19 nt, Artificial Sequence
  Description of Artificial Sequence: Synthetic oligonucleotide
agccaacuagagaagaggg

SEQ ID NO: 418319 - RNA, 19 nt, Artificial Sequence
  Description of Artificial Sequence: Synthetic oligonucleotide
ugucucucaccaagggaag

SEQ ID NO: 418320 - RNA, 19 nt, Artificial Sequence
  Description of Artificial Sequence: Synthetic oligonucleotide
ugaagaccaugguuaccgg

SEQ ID NO: 418321 - RNA, 19 nt, Artificial Sequence
  Description of Artificial Sequence: Synthetic oligonucleotide
acaugcgauucucuuucgg

SEQ ID NO: 418322 - RNA, 19 nt, Artificial Sequence
  Description of Artificial Sequence: Synthetic oligonucleotide
gcaacaaggggacaccagg

SEQ ID NO: 418323 - RNA, 19 nt, Artificial Sequence
  Description of Artificial Sequence: Synthetic oligonucleotide
agugugugcaugguagggg

SEQ ID NO: 418324 - RNA, 19 nt, Artificial Sequence
  Description of Artificial Sequence: Synthetic oligonucleotide
gaguucguccaccucggag

SEQ ID NO: 418325 - RNA, 19 nt, Artificial Sequence
  Description of Artificial Sequence: Synthetic oligonucleotide
uccccggucaccuuguccu

SEQ ID NO: 418326 - RNA, 19 nt, Artificial Sequence
  Description of Artificial Sequence: Synthetic oligonucleotide
agcuuaguggcuggauucc

SEQ ID NO: 418327 - RNA, 19 nt, Artificial Sequence
  Description of Artificial Sequence: Synthetic oligonucleotide
uaaggguuaccccuauuuu

SEQ ID NO: 418328 - RNA, 19 nt, Artificial Sequence
  Description of Artificial Sequence: Synthetic oligonucleotide
ucggccuugugaaugaguu

SEQ ID NO: 418329 - RNA, 19 nt, Artificial Sequence
  Description of Artificial Sequence: Synthetic oligonucleotide
gcuaccccuacuuacuggg

SEQ ID NO: 418330 - RNA, 19 nt, Artificial Sequence
  Description of Artificial Sequence: Synthetic oligonucleotide
cugauagcccaugaagacc

SEQ ID NO: 418331 - RNA, 19 nt, Artificial Sequence
  Description of Artificial Sequence: Synthetic oligonucleotide
guaugugggaaacccagga

SEQ ID NO: 418332 - RNA, 19 nt, Artificial Sequence
  Description of Artificial Sequence: Synthetic oligonucleotide
acuuggaguugggaguccc

SEQ ID NO: 418333 - RNA, 19 nt, Artificial Sequence
  Description of Artificial Sequence: Synthetic oligonucleotide
ugcgauucucuuucggggu

SEQ ID NO: 418334 - RNA, 19 nt, Artificial Sequence
  Description of Artificial Sequence: Synthetic oligonucleotide
uguggagcgaaggacggga

SEQ ID NO: 418335 - RNA, 19 nt, Artificial Sequence
  Description of Artificial Sequence: Synthetic oligonucleotide
ugugaucucccuccuugac

SEQ ID NO: 418336 - RNA, 19 nt, Artificial Sequence
  Description of Artificial Sequence: Synthetic oligonucleotide
acggcucagagguucgggg

SEQ ID NO: 418337 - RNA, 19 nt, Artificial Sequence
  Description of Artificial Sequence: Synthetic oligonucleotide
uucaucaugguggauccuc

SEQ ID NO: 418338 - RNA, 19 nt, Artificial Sequence
  Description of Artificial Sequence: Synthetic oligonucleotide
agcuaccccuacuuacugg

SEQ ID NO: 418339 - RNA, 19 nt, Artificial Sequence
  Description of Artificial Sequence: Synthetic oligonucleotide
uuugagcuaccccuacuua

SEQ ID NO: 418340 - RNA, 19 nt, Artificial Sequence
  Description of Artificial Sequence: Synthetic oligonucleotide
aagaagggcccagugugug

SEQ ID NO: 418341 - RNA, 19 nt, Artificial Sequence
  Description of Artificial Sequence: Synthetic oligonucleotide
aaauuagcaccaggaagaa

SEQ ID NO: 418342 - RNA, 19 nt, Artificial Sequence
  Description of Artificial Sequence: Synthetic oligonucleotide
gacaugcgauucucuuucg

SEQ ID NO: 418343 - RNA, 19 nt, Artificial Sequence
  Description of Artificial Sequence: Synthetic oligonucleotide
caaggaaagggaccuggac

SEQ ID NO: 418344 - RNA, 19 nt, Artificial Sequence
  Description of Artificial Sequence: Synthetic oligonucleotide
ucuccaccgaguacauggc

SEQ ID NO: 418345 - RNA, 19 nt, Artificial Sequence
  Description of Artificial Sequence: Synthetic oligonucleotide
gacuuugagacuucgggau

SEQ ID NO: 418346 - RNA, 19 nt, Artificial Sequence
  Description of Artificial Sequence: Synthetic oligonucleotide
uggacuacuuuuguuucgu

SEQ ID NO: 418347 - RNA, 19 nt, Artificial Sequence
  Description of Artificial Sequence: Synthetic oligonucleotide
aguccccaaccuuagggga

SEQ ID NO: 418348 - RNA, 19 nt, Artificial Sequence
  Description of Artificial Sequence: Synthetic oligonucleotide
aacuagagaagaggguaaa

SEQ ID NO: 418349 - RNA, 19 nt, Artificial Sequence
  Description of Artificial Sequence: Synthetic oligonucleotide
ucgaggugcacagggacca

SEQ ID NO: 418350 - RNA, 19 nt, Artificial Sequence
  Description of Artificial Sequence: Synthetic oligonucleotide
guguggggcaaccuagacc

SEQ ID NO: 418351 - RNA, 19 nt, Artificial Sequence
  Description of Artificial Sequence: Synthetic oligonucleotide
acuuucacgcccugaggga

SEQ ID NO: 418352 - RNA, 19 nt, Artificial Sequence
  Description of Artificial Sequence: Synthetic oligonucleotide
accuagaccugccuggaaa

SEQ ID NO: 418353 - RNA, 19 nt, Artificial Sequence
  Description of Artificial Sequence: Synthetic oligonucleotide
ucguagacuuucacgcccu

SEQ ID NO: 418354 - RNA, 19 nt, Artificial Sequence
  Description of Artificial Sequence: Synthetic oligonucleotide
agcaucuacagcgaggcuu

SEQ ID NO: 418355 - RNA, 19 nt, Artificial Sequence
  Description of Artificial Sequence: Synthetic oligonucleotide
cuugacggugugcuccugc

SEQ ID NO: 418356 - RNA, 19 nt, Artificial Sequence
  Description of Artificial Sequence: Synthetic oligonucleotide
cuuucacgcccugagggag

SEQ ID NO: 418357 - RNA, 19 nt, Artificial Sequence
  Description of Artificial Sequence: Synthetic oligonucleotide
aggguuaccccuauuuuga

SEQ ID NO: 418358 - RNA, 19 nt, Artificial Sequence
  Description of Artificial Sequence: Synthetic oligonucleotide
agggagacccucucauuug

SEQ ID NO: 418359 - RNA, 19 nt, Artificial Sequence
  Description of Artificial Sequence: Synthetic oligonucleotide
ggacaugcgauucucuuuc

SEQ ID NO: 418360 - RNA, 19 nt, Artificial Sequence
  Description of Artificial Sequence: Synthetic oligonucleotide
ccucggaggagcuuagugg

SEQ ID NO: 418361 - RNA, 19 nt, Artificial Sequence
  Description of Artificial Sequence: Synthetic oligonucleotide
ugucugcugagaguucacc

SEQ ID NO: 418362 - RNA, 19 nt, Artificial Sequence
  Description of Artificial Sequence: Synthetic oligonucleotide
aagggcacuucagccgagg

SEQ ID NO: 418363 - RNA, 19 nt, Artificial Sequence
  Description of Artificial Sequence: Synthetic oligonucleotide
ucucccuccuugacggugu

SEQ ID NO: 418364 - RNA, 19 nt, Artificial Sequence
  Description of Artificial Sequence: Synthetic oligonucleotide
ugacagggccccacgggug

SEQ ID NO: 418365 - RNA, 19 nt, Artificial Sequence
  Description of Artificial Sequence: Synthetic oligonucleotide
gagcuaccccuacuuacug

SEQ ID NO: 418366 - RNA, 19 nt, Artificial Sequence
  Description of Artificial Sequence: Synthetic oligonucleotide
uuugguccccucagagacu

SEQ ID NO: 418367 - RNA, 19 nt, Artificial Sequence
  Description of Artificial Sequence: Synthetic oligonucleotide
ggugccggcucccugggcg

SEQ ID NO: 418368 - RNA, 19 nt, Artificial Sequence
  Description of Artificial Sequence: Synthetic oligonucleotide
cuggaauccucugcgaguc

SEQ ID NO: 418369 - RNA, 19 nt, Artificial Sequence
  Description of Artificial Sequence: Synthetic oligonucleotide
agcgaggcuucuucauguc

SEQ ID NO: 418370 - RNA, 19 nt, Artificial Sequence
  Description of Artificial Sequence: Synthetic oligonucleotide
cuaccccuacuuacugggg

SEQ ID NO: 418371 - RNA, 19 nt, Artificial Sequence
  Description of Artificial Sequence: Synthetic oligonucleotide
uaccccuauuuugagcuac

SEQ ID NO: 418372 - RNA, 19 nt, Artificial Sequence
  Description of Artificial Sequence: Synthetic oligonucleotide
gguuaccccuauuuugagc

SEQ ID NO: 418373 - RNA, 19 nt, Artificial Sequence
  Description of Artificial Sequence: Synthetic oligonucleotide
gugauguauccauccccag

SEQ ID NO: 418374 - RNA, 19 nt, Artificial Sequence
  Description of Artificial Sequence: Synthetic oligonucleotide
uuguuucguccucguagac

SEQ ID NO: 418375 - RNA, 19 nt, Artificial Sequence
  Description of Artificial Sequence: Synthetic oligonucleotide
gagucccaaggaaagggac

SEQ ID NO: 418376 - RNA, 19 nt, Artificial Sequence
  Description of Artificial Sequence: Synthetic oligonucleotide
uuucacgcccugagggagu

SEQ ID NO: 418377 - RNA, 19 nt, Artificial Sequence
  Description of Artificial Sequence: Synthetic oligonucleotide
aguagcaauaaggcacaga

SEQ ID NO: 418378 - RNA, 19 nt, Artificial Sequence
  Description of Artificial Sequence: Synthetic oligonucleotide
aguucucuuuuggggcggc

SEQ ID NO: 418379 - RNA, 19 nt, Artificial Sequence
  Description of Artificial Sequence: Synthetic oligonucleotide
ggacuuugagacuucggga

SEQ ID NO: 418380 - RNA, 19 nt, Artificial Sequence
  Description of Artificial Sequence: Synthetic oligonucleotide
gaaugaguucguccaccuc

SEQ ID NO: 418381 - RNA, 19 nt, Artificial Sequence
  Description of Artificial Sequence: Synthetic oligonucleotide
gagguucggggugagugug

SEQ ID NO: 418382 - RNA, 19 nt, Artificial Sequence
  Description of Artificial Sequence: Synthetic oligonucleotide
caacuagagaagaggguaa

SEQ ID NO: 418383 - RNA, 19 nt, Artificial Sequence
  Description of Artificial Sequence: Synthetic oligonucleotide
guccgcaccggcguggagg

SEQ ID NO: 418384 - RNA, 19 nt, Artificial Sequence
  Description of Artificial Sequence: Synthetic oligonucleotide
uggaauccucugcgagucc

SEQ ID NO: 418385 - RNA, 19 nt, Artificial Sequence
  Description of Artificial Sequence: Synthetic oligonucleotide
cuauuuugagcuaccccua

SEQ ID NO: 418386 - RNA, 19 nt, Artificial Sequence
  Description of Artificial Sequence: Synthetic oligonucleotide
ggugauguauccaucccca

SEQ ID NO: 418387 - RNA, 19 nt, Artificial Sequence
  Description of Artificial Sequence: Synthetic oligonucleotide
ucguccucguagacuuuca

SEQ ID NO: 418388 - RNA, 19 nt, Artificial Sequence
  Description of Artificial Sequence: Synthetic oligonucleotide
uucguccucguagacuuuc

SEQ ID NO: 418389 - RNA, 19 nt, Artificial Sequence
  Description of Artificial Sequence: Synthetic oligonucleotide
uccgcaccggcguggagga

SEQ ID NO: 418390 - RNA, 19 nt, Artificial Sequence
  Description of Artificial Sequence: Synthetic oligonucleotide
ccagguugagaccauggug

SEQ ID NO: 418391 - RNA, 19 nt, Artificial Sequence
  Description of Artificial Sequence: Synthetic oligonucleotide
uucagccgaggcucagggc

SEQ ID NO: 418392 - RNA, 19 nt, Artificial Sequence
  Description of Artificial Sequence: Synthetic oligonucleotide
gacggcucacaugacagaa

SEQ ID NO: 418393 - RNA, 19 nt, Artificial Sequence
  Description of Artificial Sequence: Synthetic oligonucleotide
ucggaggagcuuaguggcu

SEQ ID NO: 418394 - RNA, 19 nt, Artificial Sequence
  Description of Artificial Sequence: Synthetic oligonucleotide
augagccgucuguguaaac

SEQ ID NO: 418395 - RNA, 19 nt, Artificial Sequence
  Description of Artificial Sequence: Synthetic oligonucleotide
acgggagugaaggggcagg

SEQ ID NO: 418396 - RNA, 19 nt, Artificial Sequence
  Description of Artificial Sequence: Synthetic oligonucleotide
acgguguccccuccagcag

SEQ ID NO: 418397 - RNA, 19 nt, Artificial Sequence
  Description of Artificial Sequence: Synthetic oligonucleotide
gaccacacacacacaggug

SEQ ID NO: 418398 - RNA, 19 nt, Artificial Sequence
  Description of Artificial Sequence: Synthetic oligonucleotide
cauucugauagcccaugaa

SEQ ID NO: 418399 - RNA, 19 nt, Artificial Sequence
  Description of Artificial Sequence: Synthetic oligonucleotide
cacauucugauagcccaug

SEQ ID NO: 418400 - RNA, 19 nt, Artificial Sequence
  Description of Artificial Sequence: Synthetic oligonucleotide
ugaggacgguguccccucc

SEQ ID NO: 418401 - RNA, 19 nt, Artificial Sequence
  Description of Artificial Sequence: Synthetic oligonucleotide
uggugacgggcagagcacc

SEQ ID NO: 418402 - RNA, 19 nt, Artificial Sequence
  Description of Artificial Sequence: Synthetic oligonucleotide
cucucauuugguccccuca

SEQ ID NO: 418403 - RNA, 19 nt, Artificial Sequence
  Description of Artificial Sequence: Synthetic oligonucleotide
gagccgucuguguaaaccu

SEQ ID NO: 418404 - RNA, 19 nt, Artificial Sequence
  Description of Artificial Sequence: Synthetic oligonucleotide
caccgugaucuccaccgag

SEQ ID NO: 418405 - RNA, 19 nt, Artificial Sequence
  Description of Artificial Sequence: Synthetic oligonucleotide
aaccuagaccugccuggaa

SEQ ID NO: 418406 - RNA, 19 nt, Artificial Sequence
  Description of Artificial Sequence: Synthetic oligonucleotide
ggaauccucugcgaguccc

SEQ ID NO: 418407 - RNA, 19 nt, Artificial Sequence
  Description of Artificial Sequence: Synthetic oligonucleotide
acggcucacaugacagaac

SEQ ID NO: 418408 - RNA, 19 nt, Artificial Sequence
  Description of Artificial Sequence: Synthetic oligonucleotide
uucuaggguaugggguaug

SEQ ID NO: 418409 - RNA, 19 nt, Artificial Sequence
  Description of Artificial Sequence: Synthetic oligonucleotide
ugaguucguccaccucgga

SEQ ID NO: 418410 - RNA, 19 nt, Artificial Sequence
  Description of Artificial Sequence: Synthetic oligonucleotide
guacucuacacaccaggcu

SEQ ID NO: 418411 - RNA, 19 nt, Artificial Sequence
  Description of Artificial Sequence: Synthetic oligonucleotide
ccgacggcucacaugacag

SEQ ID NO: 418412 - RNA, 19 nt, Artificial Sequence
  Description of Artificial Sequence: Synthetic oligonucleotide
ggugucuggggcccgugag

SEQ ID NO: 418413 - RNA, 19 nt, Artificial Sequence
  Description of Artificial Sequence: Synthetic oligonucleotide
ucagccgcgcugccauuga

SEQ ID NO: 418414 - RNA, 19 nt, Artificial Sequence
  Description of Artificial Sequence: Synthetic oligonucleotide
auuuggggccuugccaaca

SEQ ID NO: 418415 - RNA, 19 nt, Artificial Sequence
  Description of Artificial Sequence: Synthetic oligonucleotide
uucacgcccugagggagug

SEQ ID NO: 418416 - RNA, 19 nt, Artificial Sequence
  Description of Artificial Sequence: Synthetic oligonucleotide
ggggugauguauccauccc

SEQ ID NO: 418417 - RNA, 19 nt, Artificial Sequence
  Description of Artificial Sequence: Synthetic oligonucleotide
guucguccaccucggagga

SEQ ID NO: 418418 - RNA, 19 nt, Artificial Sequence
  Description of Artificial Sequence: Synthetic oligonucleotide
aucucccuccuugacggug

SEQ ID NO: 418419 - RNA, 19 nt, Artificial Sequence
  Description of Artificial Sequence: Synthetic oligonucleotide
ggucccuaaauuagcacca

SEQ ID NO: 418420 - RNA, 19 nt, Artificial Sequence
  Description of Artificial Sequence: Synthetic oligonucleotide
gccugucucucaccaaggg

SEQ ID NO: 418421 - RNA, 19 nt, Artificial Sequence
  Description of Artificial Sequence: Synthetic oligonucleotide
gccccgacggcucacauga

SEQ ID NO: 418422 - RNA, 19 nt, Artificial Sequence
  Description of Artificial Sequence: Synthetic oligonucleotide
gucccuaaauuagcaccag

SEQ ID NO: 418423 - RNA, 19 nt, Artificial Sequence
  Description of Artificial Sequence: Synthetic oligonucleotide
ugccccacugcagcuucgg

SEQ ID NO: 418424 - RNA, 19 nt, Artificial Sequence
  Description of Artificial Sequence: Synthetic oligonucleotide
cugguccaagccaacuaga

SEQ ID NO: 418425 - RNA, 19 nt, Artificial Sequence
  Description of Artificial Sequence: Synthetic oligonucleotide
ccucgucacacgucaaaag

SEQ ID NO: 418426 - RNA, 19 nt, Artificial Sequence
  Description of Artificial Sequence: Synthetic oligonucleotide
ccuaaauuagcaccaggaa

SEQ ID NO: 418427 - RNA, 19 nt, Artificial Sequence
  Description of Artificial Sequence: Synthetic oligonucleotide
ggaccacacacacacaggu

SEQ ID NO: 418428 - RNA, 19 nt, Artificial Sequence
  Description of Artificial Sequence: Synthetic oligonucleotide
cuaggguaugggguaugug

SEQ ID NO: 418429 - RNA, 19 nt, Artificial Sequence
  Description of Artificial Sequence: Synthetic oligonucleotide
cacggcucagagguucggg

SEQ ID NO: 418430 - RNA, 19 nt, Artificial Sequence
  Description of Artificial Sequence: Synthetic oligonucleotide
uuaccccuauuuugagcua

SEQ ID NO: 418431 - RNA, 19 nt, Artificial Sequence
  Description of Artificial Sequence: Synthetic oligonucleotide
ggguuaccccuauuuugag

SEQ ID NO: 418432 - RNA, 19 nt, Artificial Sequence
  Description of Artificial Sequence: Synthetic oligonucleotide
cuacagcgaggcuucuuca

SEQ ID NO: 418433 - RNA, 19 nt, Artificial Sequence
  Description of Artificial Sequence: Synthetic oligonucleotide
guaugggguaugugggaaa

SEQ ID NO: 418434 - RNA, 19 nt, Artificial Sequence
  Description of Artificial Sequence: Synthetic oligonucleotide
gccgcgcugccauugagug

SEQ ID NO: 418435 - RNA, 19 nt, Artificial Sequence
  Description of Artificial Sequence: Synthetic oligonucleotide
uuugagacuucgggaucuc

SEQ ID NO: 418436 - RNA, 19 nt, Artificial Sequence
  Description of Artificial Sequence: Synthetic oligonucleotide
accgugaucuccaccgagu

SEQ ID NO: 418437 - RNA, 19 nt, Artificial Sequence
  Description of Artificial Sequence: Synthetic oligonucleotide
caugguggauccucccgga

SEQ ID NO: 418438 - RNA, 19 nt, Artificial Sequence
  Description of Artificial Sequence: Synthetic oligonucleotide
cacgggugguccuguacuc

SEQ ID NO: 418439 - RNA, 19 nt, Artificial Sequence
  Description of Artificial Sequence: Synthetic oligonucleotide
ugucaagauccugggcauc

SEQ ID NO: 418440 - RNA, 19 nt, Artificial Sequence
  Description of Artificial Sequence: Synthetic oligonucleotide
auccucccggaguccgcac

SEQ ID NO: 418441 - RNA, 19 nt, Artificial Sequence
  Description of Artificial Sequence: Synthetic oligonucleotide
gggaccacacacacacagg

SEQ ID NO: 418442 - RNA, 19 nt, Artificial Sequence
  Description of Artificial Sequence: Synthetic oligonucleotide
ccccaguuaaggguuaccc

SEQ ID NO: 418443 - RNA, 19 nt, Artificial Sequence
  Description of Artificial Sequence: Synthetic oligonucleotide
acccuaggacuuugagacu

SEQ ID NO: 418444 - RNA, 19 nt, Artificial Sequence
  Description of Artificial Sequence: Synthetic oligonucleotide
ccaguuaaggguuaccccu

SEQ ID NO: 418445 - RNA, 19 nt, Artificial Sequence
  Description of Artificial Sequence: Synthetic oligonucleotide
accgaguacauggcugccu

SEQ ID NO: 418446 - RNA, 19 nt, Artificial Sequence
  Description of Artificial Sequence: Synthetic oligonucleotide
ccacccaaggugugugugg

SEQ ID NO: 418447 - RNA, 19 nt, Artificial Sequence
  Description of Artificial Sequence: Synthetic oligonucleotide
gcauggacuacuuuuguuu

SEQ ID NO: 418448 - RNA, 19 nt, Artificial Sequence
  Description of Artificial Sequence: Synthetic oligonucleotide
cugcuggcgcauuggccag

SEQ ID NO: 418449 - RNA, 19 nt, Artificial Sequence
  Description of Artificial Sequence: Synthetic oligonucleotide
guguggagcgaaggacggg

SEQ ID NO: 418450 - RNA, 19 nt, Artificial Sequence
  Description of Artificial Sequence: Synthetic oligonucleotide
uccccaaccuuaggggauc

SEQ ID NO: 418451 - RNA, 19 nt, Artificial Sequence
  Description of Artificial Sequence: Synthetic oligonucleotide
accgugacucgaggugcac

SEQ ID NO: 418452 - RNA, 19 nt, Artificial Sequence
  Description of Artificial Sequence: Synthetic oligonucleotide
gcaucuacagcgaggcuuc

SEQ ID NO: 418453 - RNA, 19 nt, Artificial Sequence
  Description of Artificial Sequence: Synthetic oligonucleotide
ggcaacaaggggacaccag

SEQ ID NO: 418454 - RNA, 19 nt, Artificial Sequence
  Description of Artificial Sequence: Synthetic oligonucleotide
agucaccccucagggaaca

SEQ ID NO: 418455 - RNA, 19 nt, Artificial Sequence
  Description of Artificial Sequence: Synthetic oligonucleotide
agguucggggugagugugg

SEQ ID NO: 418456 - RNA, 19 nt, Artificial Sequence
  Description of Artificial Sequence: Synthetic oligonucleotide
acggugugcuccugcugga

SEQ ID NO: 418457 - RNA, 19 nt, Artificial Sequence
  Description of Artificial Sequence: Synthetic oligonucleotide
gugacagggccccacgggu

SEQ ID NO: 418458 - RNA, 19 nt, Artificial Sequence
  Description of Artificial Sequence: Synthetic oligonucleotide
acacggcucagagguucgg

SEQ ID NO: 418459 - RNA, 19 nt, Artificial Sequence
  Description of Artificial Sequence: Synthetic oligonucleotide
cucagccgcgcugccauug

SEQ ID NO: 418460 - RNA, 19 nt, Artificial Sequence
  Description of Artificial Sequence: Synthetic oligonucleotide
agccgucuguguaaaccug

SEQ ID NO: 418461 - RNA, 19 nt, Artificial Sequence
  Description of Artificial Sequence: Synthetic oligonucleotide
gaggacgguguccccucca

SEQ ID NO: 418462 - RNA, 19 nt, Artificial Sequence
  Description of Artificial Sequence: Synthetic oligonucleotide
cacgggagugaaggggcag

SEQ ID NO: 418463 - RNA, 19 nt, Artificial Sequence
  Description of Artificial Sequence: Synthetic oligonucleotide
cccaccgugacucgaggug

SEQ ID NO: 418464 - RNA, 19 nt, Artificial Sequence
  Description of Artificial Sequence: Synthetic oligonucleotide
gguaugggguaugugggaa

SEQ ID NO: 418465 - RNA, 19 nt, Artificial Sequence
  Description of Artificial Sequence: Synthetic oligonucleotide
aucggccuugugaaugagu

SEQ ID NO: 418466 - RNA, 19 nt, Artificial Sequence
  Description of Artificial Sequence: Synthetic oligonucleotide
augcccggugggccugagg

SEQ ID NO: 418467 - RNA, 19 nt, Artificial Sequence
  Description of Artificial Sequence: Synthetic oligonucleotide
cccggugggccugaggugg

SEQ ID NO: 418468 - RNA, 19 nt, Artificial Sequence
  Description of Artificial Sequence: Synthetic oligonucleotide
gagagccccgucugguucu

SEQ ID NO: 418469 - RNA, 19 nt, Artificial Sequence
  Description of Artificial Sequence: Synthetic oligonucleotide
gguugagaccauggugggc

SEQ ID NO: 418470 - RNA, 19 nt, Artificial Sequence
  Description of Artificial Sequence: Synthetic oligonucleotide
acgggugguccuguacucu

SEQ ID NO: 418471 - RNA, 19 nt, Artificial Sequence
  Description of Artificial Sequence: Synthetic oligonucleotide
ggcgcauuggccagggaga

SEQ ID NO: 418472 - RNA, 19 nt, Artificial Sequence
  Description of Artificial Sequence: Synthetic oligonucleotide
ggagucccaaggaaaggga

SEQ ID NO: 418473 - RNA, 19 nt, Artificial Sequence
  Description of Artificial Sequence: Synthetic oligonucleotide
ccaccgugacucgaggugc

SEQ ID NO: 418474 - RNA, 19 nt, Artificial Sequence
  Description of Artificial Sequence: Synthetic oligonucleotide
caccgaguacauggcugcc

SEQ ID NO: 418475 - RNA, 19 nt, Artificial Sequence
  Description of Artificial Sequence: Synthetic oligonucleotide
ccacccuaggacuuugaga

SEQ ID NO: 418476 - RNA, 19 nt, Artificial Sequence
  Description of Artificial Sequence: Synthetic oligonucleotide
caucggccuugugaaugag

SEQ ID NO: 418477 - RNA, 19 nt, Artificial Sequence
  Description of Artificial Sequence: Synthetic oligonucleotide
ggauucccuuacucccacc

SEQ ID NO: 418478 - RNA, 19 nt, Artificial Sequence
  Description of Artificial Sequence: Synthetic oligonucleotide
ggaguccgcaccggcgugg

SEQ ID NO: 418479 - RNA, 19 nt, Artificial Sequence
  Description of Artificial Sequence: Synthetic oligonucleotide
caccucgcucagugugacc

SEQ ID NO: 418480 - RNA, 19 nt, Artificial Sequence
  Description of Artificial Sequence: Synthetic oligonucleotide
gaguguggugacgggcaga

SEQ ID NO: 418481 - RNA, 19 nt, Artificial Sequence
  Description of Artificial Sequence: Synthetic oligonucleotide
gagcuucaacuccugugau

SEQ ID NO: 418482 - RNA, 19 nt, Artificial Sequence
  Description of Artificial Sequence: Synthetic oligonucleotide
caggcgccggggagggccg

SEQ ID NO: 418483 - RNA, 19 nt, Artificial Sequence
  Description of Artificial Sequence: Synthetic oligonucleotide
cagccguaccccugccuuc

SEQ ID NO: 418484 - RNA, 19 nt, Artificial Sequence
  Description of Artificial Sequence: Synthetic oligonucleotide
ccccgucugguucucuucc

SEQ ID NO: 418485 - RNA, 19 nt, Artificial Sequence
  Description of Artificial Sequence: Synthetic oligonucleotide
caugagccgucuguguaaa

SEQ ID NO: 418486 - RNA, 19 nt, Artificial Sequence
  Description of Artificial Sequence: Synthetic oligonucleotide
ccacacacacacagguguc

SEQ ID NO: 418487 - RNA, 19 nt, Artificial Sequence
  Description of Artificial Sequence: Synthetic oligonucleotide
uggugccggcucccugggc

SEQ ID NO: 418488 - RNA, 19 nt, Artificial Sequence
  Description of Artificial Sequence: Synthetic oligonucleotide
agagccccgucugguucuc

SEQ ID NO: 418489 - RNA, 19 nt, Artificial Sequence
  Description of Artificial Sequence: Synthetic oligonucleotide
gaccgggcuagggacugca

SEQ ID NO: 418490 - RNA, 19 nt, Artificial Sequence
  Description of Artificial Sequence: Synthetic oligonucleotide
gccauugaguggugccggc

SEQ ID NO: 418491 - RNA, 19 nt, Artificial Sequence
  Description of Artificial Sequence: Synthetic oligonucleotide
ucacgcccugagggagugg

SEQ ID NO: 418492 - RNA, 19 nt, Artificial Sequence
  Description of Artificial Sequence: Synthetic oligonucleotide
cacgcccugagggagugga

SEQ ID NO: 418493 - RNA, 19 nt, Artificial Sequence
  Description of Artificial Sequence: Synthetic oligonucleotide
ggacgguguccccuccagc

SEQ ID NO: 418494 - RNA, 19 nt, Artificial Sequence
  Description of Artificial Sequence: Synthetic oligonucleotide
agccgcgcugccauugagu

SEQ ID NO: 418495 - RNA, 19 nt, Artificial Sequence
  Description of Artificial Sequence: Synthetic oligonucleotide
ggacuggggcgccccgacg

SEQ ID NO: 418496 - RNA, 19 nt, Artificial Sequence
  Description of Artificial Sequence: Synthetic oligonucleotide
aguccgcaccggcguggag

SEQ ID NO: 418497 - RNA, 19 nt, Artificial Sequence
  Description of Artificial Sequence: Synthetic oligonucleotide
caccgugacucgaggugca

SEQ ID NO: 418498 - RNA, 19 nt, Artificial Sequence
  Description of Artificial Sequence: Synthetic oligonucleotide
cagccgcgcugccauugag

SEQ ID NO: 418499 - RNA, 19 nt, Artificial Sequence
  Description of Artificial Sequence: Synthetic oligonucleotide
cacaggugucuggggcccg

SEQ ID NO: 418500 - RNA, 19 nt, Artificial Sequence
  Description of Artificial Sequence: Synthetic oligonucleotide
ccaagccaacuagagaaga

SEQ ID NO: 418501 - RNA, 19 nt, Artificial Sequence
  Description of Artificial Sequence: Synthetic oligonucleotide
gggucggccugucucucac

SEQ ID NO: 418502 - RNA, 19 nt, Artificial Sequence
  Description of Artificial Sequence: Synthetic oligonucleotide
aucuacagcgaggcuucuu

SEQ ID NO: 418503 - RNA, 19 nt, Artificial Sequence
  Description of Artificial Sequence: Synthetic oligonucleotide
cucuacacaccaggcugga

SEQ ID NO: 418504 - RNA, 19 nt, Artificial Sequence
  Description of Artificial Sequence: Synthetic oligonucleotide
cggcucacaugacagaaca

SEQ ID NO: 418505 - RNA, 19 nt, Artificial Sequence
  Description of Artificial Sequence: Synthetic oligonucleotide
ccuugugaaugaguucguc

SEQ ID NO: 418506 - RNA, 19 nt, Artificial Sequence
  Description of Artificial Sequence: Synthetic oligonucleotide
ggcugauuuggggccuugc

SEQ ID NO: 418507 - RNA, 19 nt, Artificial Sequence
  Description of Artificial Sequence: Synthetic oligonucleotide
cucccuccuugacggugug

SEQ ID NO: 418508 - RNA, 19 nt, Artificial Sequence
  Description of Artificial Sequence: Synthetic oligonucleotide
cgugaucuccaccgaguac

SEQ ID NO: 418509 - RNA, 19 nt, Artificial Sequence
  Description of Artificial Sequence: Synthetic oligonucleotide
gguucggggugagugugga

SEQ ID NO: 418510 - RNA, 19 nt, Artificial Sequence
  Description of Artificial Sequence: Synthetic oligonucleotide
ccguccacagcauggacua

SEQ ID NO: 418511 - RNA, 19 nt, Artificial Sequence
  Description of Artificial Sequence: Synthetic oligonucleotide
guuaaggguuaccccuauu

SEQ ID NO: 418512 - RNA, 19 nt, Artificial Sequence
  Description of Artificial Sequence: Synthetic oligonucleotide
cuugcacacaggggcugga

SEQ ID NO: 418513 - RNA, 19 nt, Artificial Sequence
  Description of Artificial Sequence: Synthetic oligonucleotide
cacacacacacaggugucu

SEQ ID NO: 418514 - RNA, 19 nt, Artificial Sequence
  Description of Artificial Sequence: Synthetic oligonucleotide
ggucggccugucucucacc

SEQ ID NO: 418515 - RNA, 19 nt, Artificial Sequence
  Description of Artificial Sequence: Synthetic oligonucleotide
gccuucuaggguauggggu

SEQ ID NO: 418516 - RNA, 19 nt, Artificial Sequence
  Description of Artificial Sequence: Synthetic oligonucleotide
cuccacccuaggacuuuga

SEQ ID NO: 418517 - RNA, 19 nt, Artificial Sequence
  Description of Artificial Sequence: Synthetic oligonucleotide
gaugcccggugggccugag

SEQ ID NO: 418518 - RNA, 19 nt, Artificial Sequence
  Description of Artificial Sequence: Synthetic oligonucleotide
cagggaccacacacacaca

SEQ ID NO: 418519 - RNA, 19 nt, Artificial Sequence
  Description of Artificial Sequence: Synthetic oligonucleotide
gaguccgcaccggcgugga

SEQ ID NO: 418520 - RNA, 19 nt, Artificial Sequence
  Description of Artificial Sequence: Synthetic oligonucleotide
gaccugccuggaaaugcua

SEQ ID NO: 418521 - RNA, 19 nt, Artificial Sequence
  Description of Artificial Sequence: Synthetic oligonucleotide
gggcaacaaggggacacca

SEQ ID NO: 418522 - RNA, 19 nt, Artificial Sequence
  Description of Artificial Sequence: Synthetic oligonucleotide
ggcuagggacugcagaguu

SEQ ID NO: 418523 - RNA, 19 nt, Artificial Sequence
  Description of Artificial Sequence: Synthetic oligonucleotide
ccgcgcugccauugagugg

SEQ ID NO: 418524 - RNA, 19 nt, Artificial Sequence
  Description of Artificial Sequence: Synthetic oligonucleotide
gccucgucacacgucaaaa

SEQ ID NO: 418525 - RNA, 19 nt, Artificial Sequence
  Description of Artificial Sequence: Synthetic oligonucleotide
ccguaccccugccuucuag

SEQ ID NO: 418526 - RNA, 19 nt, Artificial Sequence
  Description of Artificial Sequence: Synthetic oligonucleotide
cccacccaaggugugugug

SEQ ID NO: 418527 - RNA, 19 nt, Artificial Sequence
  Description of Artificial Sequence: Synthetic oligonucleotide
cgagagccccgucugguuc

SEQ ID NO: 418528 - RNA, 19 nt, Artificial Sequence
  Description of Artificial Sequence: Synthetic oligonucleotide
ggcagacucagaggaggaa

SEQ ID NO: 418529 - RNA, 19 nt, Artificial Sequence
  Description of Artificial Sequence: Synthetic oligonucleotide
ggguggaguguggagcgaa

SEQ ID NO: 418530 - RNA, 19 nt, Artificial Sequence
  Description of Artificial Sequence: Synthetic oligonucleotide
cccaccucgcucaguguga

SEQ ID NO: 418531 - RNA, 19 nt, Artificial Sequence
  Description of Artificial Sequence: Synthetic oligonucleotide
ccuagaccugccuggaaau

SEQ ID NO: 418532 - RNA, 19 nt, Artificial Sequence
  Description of Artificial Sequence: Synthetic oligonucleotide
ccgggugugguccuaccaa

SEQ ID NO: 418533 - RNA, 19 nt, Artificial Sequence
  Description of Artificial Sequence: Synthetic oligonucleotide
gccccgucugguucucuuc

SEQ ID NO: 418534 - RNA, 19 nt, Artificial Sequence
  Description of Artificial Sequence: Synthetic oligonucleotide
gcgcuggcagccguacccc

SEQ ID NO: 418535 - RNA, 19 nt, Artificial Sequence
  Description of Artificial Sequence: Synthetic oligonucleotide
gcagccguaccccugccuu

SEQ ID NO: 418536 - RNA, 19 nt, Artificial Sequence
  Description of Artificial Sequence: Synthetic oligonucleotide
gccguccacagcauggacu

SEQ ID NO: 418537 - RNA, 19 nt, Artificial Sequence
  Description of Artificial Sequence: Synthetic oligonucleotide
gaggugggucggccugucu

SEQ ID NO: 418538 - RNA, 19 nt, Artificial Sequence
  Description of Artificial Sequence: Synthetic oligonucleotide
ccaccucgcucagugugac

SEQ ID NO: 418539 - RNA, 19 nt, Artificial Sequence
  Description of Artificial Sequence: Synthetic oligonucleotide
ggaccgggugugguccuac

SEQ ID NO: 418540 - RNA, 19 nt, Artificial Sequence
  Description of Artificial Sequence: Synthetic oligonucleotide
cguagacuuucacgcccug

SEQ ID NO: 418541 - RNA, 19 nt, Artificial Sequence
  Description of Artificial Sequence: Synthetic oligonucleotide
gggcaugagccgucugugu

SEQ ID NO: 418542 - RNA, 19 nt, Artificial Sequence
  Description of Artificial Sequence: Synthetic oligonucleotide
cccgaagugccuuggacuu

SEQ ID NO: 418543 - RNA, 19 nt, Artificial Sequence
  Description of Artificial Sequence: Synthetic oligonucleotide
gcagggccucgucacacgu

SEQ ID NO: 418544 - RNA, 19 nt, Artificial Sequence
  Description of Artificial Sequence: Synthetic oligonucleotide
cggccuugugaaugaguuc

SEQ ID NO: 418545 - RNA, 19 nt, Artificial Sequence
  Description of Artificial Sequence: Synthetic oligonucleotide
ccgugaucuccaccgagua

SEQ ID NO: 418546 - RNA, 19 nt, Artificial Sequence
  Description of Artificial Sequence: Synthetic oligonucleotide
cccugguccaagccaacua

SEQ ID NO: 418547 - RNA, 19 nt, Artificial Sequence
  Description of Artificial Sequence: Synthetic oligonucleotide
ccggugggccugagguggc

SEQ ID NO: 418548 - RNA, 19 nt, Artificial Sequence
  Description of Artificial Sequence: Synthetic oligonucleotide
gugccggcucccugggcgu

SEQ ID NO: 418549 - RNA, 19 nt, Artificial Sequence
  Description of Artificial Sequence: Synthetic oligonucleotide
gggugcccuguggugucug

SEQ ID NO: 418550 - RNA, 19 nt, Artificial Sequence
  Description of Artificial Sequence: Synthetic oligonucleotide
cgcgcugccauugaguggu

SEQ ID NO: 418551 - RNA, 19 nt, Artificial Sequence
  Description of Artificial Sequence: Synthetic oligonucleotide
ccgaagugccuuggacuuc

SEQ ID NO: 418552 - RNA, 19 nt, Artificial Sequence
  Description of Artificial Sequence: Synthetic oligonucleotide
cuggaccgggugugguccu

SEQ ID NO: 418553 - RNA, 19 nt, Artificial Sequence
  Description of Artificial Sequence: Synthetic oligonucleotide
cccggucaccuuguccuuc

SEQ ID NO: 418554 - RNA, 19 nt, Artificial Sequence
  Description of Artificial Sequence: Synthetic oligonucleotide
acgcccugagggaguggau

SEQ ID NO: 418555 - RNA, 19 nt, Artificial Sequence
  Description of Artificial Sequence: Synthetic oligonucleotide
cuggcgcauuggccaggga

SEQ ID NO: 418556 - RNA, 19 nt, Artificial Sequence
  Description of Artificial Sequence: Synthetic oligonucleotide
ggaccgggcuagggacugc

SEQ ID NO: 418557 - RNA, 19 nt, Artificial Sequence
  Description of Artificial Sequence: Synthetic oligonucleotide
cccaaccuuaggggaucug

SEQ ID NO: 418558 - RNA, 19 nt, Artificial Sequence
  Description of Artificial Sequence: Synthetic oligonucleotide
gggcuugcacacaggggcu

SEQ ID NO: 418559 - RNA, 19 nt, Artificial Sequence
  Description of Artificial Sequence: Synthetic oligonucleotide
cgcugccauugaguggugc

SEQ ID NO: 418560 - RNA, 19 nt, Artificial Sequence
  Description of Artificial Sequence: Synthetic oligonucleotide
cucuuucggggugcccugu

SEQ ID NO: 418561 - RNA, 19 nt, Artificial Sequence
  Description of Artificial Sequence: Synthetic oligonucleotide
ccaccgugaucuccaccga

SEQ ID NO: 418562 - RNA, 19 nt, Artificial Sequence
  Description of Artificial Sequence: Synthetic oligonucleotide
ccccucagagacuccccaa

SEQ ID NO: 418563 - RNA, 19 nt, Artificial Sequence
  Description of Artificial Sequence: Synthetic oligonucleotide
cgacggcucacaugacaga

SEQ ID NO: 418564 - RNA, 19 nt, Artificial Sequence
  Description of Artificial Sequence: Synthetic oligonucleotide
ccgaguacauggcugccuu

SEQ ID NO: 418565 - RNA, 19 nt, Artificial Sequence
  Description of Artificial Sequence: Synthetic oligonucleotide
cggcguggaggacaugcga

SEQ ID NO: 418566 - RNA, 19 nt, Artificial Sequence
  Description of Artificial Sequence: Synthetic oligonucleotide
cgccccgacggcucacaug

SEQ ID NO: 418567 - RNA, 19 nt, Artificial Sequence
  Description of Artificial Sequence: Synthetic oligonucleotide
cgaguccccgaggcucugg

SEQ ID NO: 418568 - RNA, 19 nt, Artificial Sequence
  Description of Artificial Sequence: Synthetic oligonucleotide
caucuacagcgaggcuucu

SEQ ID NO: 418569 - RNA, 19 nt, Artificial Sequence
  Description of Artificial Sequence: Synthetic oligonucleotide
ccggaguccgcaccggcgu

SEQ ID NO: 418570 - RNA, 19 nt, Artificial Sequence
  Description of Artificial Sequence: Synthetic oligonucleotide
ccccgaggcucugguggcc

SEQ ID NO: 418571 - RNA, 19 nt, Artificial Sequence
  Description of Artificial Sequence: Synthetic oligonucleotide
cggaguccgcaccggcgug

SEQ ID NO: 418572 - RNA, 19 nt, Artificial Sequence
  Description of Artificial Sequence: Synthetic oligonucleotide
cccggaccuucuguucauc

SEQ ID NO: 418573 - RNA, 19 nt, Artificial Sequence
  Description of Artificial Sequence: Synthetic oligonucleotide
ggguagugacagggcccca

SEQ ID NO: 418574 - RNA, 19 nt, Artificial Sequence
  Description of Artificial Sequence: Synthetic oligonucleotide
guccagccaggcggcaaau

SEQ ID NO: 418575 - RNA, 19 nt, Artificial Sequence
  Description of Artificial Sequence: Synthetic oligonucleotide
gcaaugccguccacagcau

SEQ ID NO: 418576 - RNA, 19 nt, Artificial Sequence
  Description of Artificial Sequence: Synthetic oligonucleotide
ccgucugguucucuuccuu

SEQ ID NO: 418577 - RNA, 19 nt, Artificial Sequence
  Description of Artificial Sequence: Synthetic oligonucleotide
gccguaccccugccuucua

SEQ ID NO: 418578 - RNA, 19 nt, Artificial Sequence
  Description of Artificial Sequence: Synthetic oligonucleotide
ccgagagccccgucugguu

SEQ ID NO: 418579 - RNA, 19 nt, Artificial Sequence
  Description of Artificial Sequence: Synthetic oligonucleotide
ggcccgugaggcggagggu

SEQ ID NO: 418580 - RNA, 19 nt, Artificial Sequence
  Description of Artificial Sequence: Synthetic oligonucleotide
ccccaaccuuaggggaucu

SEQ ID NO: 418581 - RNA, 19 nt, Artificial Sequence
  Description of Artificial Sequence: Synthetic oligonucleotide
gcgugccccacugcagcuu

SEQ ID NO: 418582 - RNA, 19 nt, Artificial Sequence
  Description of Artificial Sequence: Synthetic oligonucleotide
gccccacgggugguccugu

SEQ ID NO: 418583 - RNA, 19 nt, Artificial Sequence
  Description of Artificial Sequence: Synthetic oligonucleotide
ccgcaccggcguggaggac

SEQ ID NO: 418584 - RNA, 19 nt, Artificial Sequence
  Description of Artificial Sequence: Synthetic oligonucleotide
cggggugaguguggagugu

SEQ ID NO: 418585 - RNA, 19 nt, Artificial Sequence
  Description of Artificial Sequence: Synthetic oligonucleotide
ccccggucaccuuguccuu

SEQ ID NO: 418586 - RNA, 19 nt, Artificial Sequence
  Description of Artificial Sequence: Synthetic oligonucleotide
uuuuacguagaaaugaugg

SEQ ID NO: 418587 - RNA, 19 nt, Artificial Sequence
  Description of Artificial Sequence: Synthetic oligonucleotide
ucugauaucaacaucuugc

SEQ ID NO: 418588 - RNA, 19 nt, Artificial Sequence
  Description of Artificial Sequence: Synthetic oligonucleotide
uucuuaaucacacaguuug

SEQ ID NO: 418589 - RNA, 19 nt, Artificial Sequence
  Description of Artificial Sequence: Synthetic oligonucleotide
uguaacuguacccagauac

SEQ ID NO: 418590 - RNA, 19 nt, Artificial Sequence
  Description of Artificial Sequence: Synthetic oligonucleotide
aaauccagauguuuugagc

SEQ ID NO: 418591 - RNA, 19 nt, Artificial Sequence
  Description of Artificial Sequence: Synthetic oligonucleotide
aacuacaugguucuuaaug

SEQ ID NO: 418592 - RNA, 19 nt, Artificial Sequence
  Description of Artificial Sequence: Synthetic oligonucleotide
aaacgggcuaaauaugccc

SEQ ID NO: 418593 - RNA, 19 nt, Artificial Sequence
  Description of Artificial Sequence: Synthetic oligonucleotide
uuaugcaggguuuuaaagg

SEQ ID NO: 418594 - RNA, 19 nt, Artificial Sequence
  Description of Artificial Sequence: Synthetic oligonucleotide
ugaauuaaauuuuaucucu

SEQ ID NO: 418595 - RNA, 19 nt, Artificial Sequence
  Description of Artificial Sequence: Synthetic oligonucleotide
ugaauuaccugaccgaugc

SEQ ID NO: 418596 - RNA, 19 nt, Artificial Sequence
  Description of Artificial Sequence: Synthetic oligonucleotide
acuuccaaucaccaaaccc

SEQ ID NO: 418597 - RNA, 19 nt, Artificial Sequence
  Description of Artificial Sequence: Synthetic oligonucleotide
aacuaaacaaugcaagccu

SEQ ID NO: 418598 - RNA, 19 nt, Artificial Sequence
  Description of Artificial Sequence: Synthetic oligonucleotide
ucuagaaagcgaaaggaug

SEQ ID NO: 418599 - RNA, 19 nt, Artificial Sequence
  Description of Artificial Sequence: Synthetic oligonucleotide
acugacguaucucuuaaac

SEQ ID NO: 418600 - RNA, 19 nt, Artificial Sequence
  Description of Artificial Sequence: Synthetic oligonucleotide
aaacguucaacucucuuca

SEQ ID NO: 418601 - RNA, 19 nt, Artificial Sequence
  Description of Artificial Sequence: Synthetic oligonucleotide
aagcugaacuuccagguuc

SEQ ID NO: 418602 - RNA, 19 nt, Artificial Sequence
  Description of Artificial Sequence: Synthetic oligonucleotide
acuaguuccuaaaagaguc

SEQ ID NO: 418603 - RNA, 19 nt, Artificial Sequence
  Description of Artificial Sequence: Synthetic oligonucleotide
agacaugucguccaggguc

SEQ ID NO: 418604 - RNA, 19 nt, Artificial Sequence
  Description of Artificial Sequence: Synthetic oligonucleotide
ucuagguuggcuaacuucu

SEQ ID NO: 418605 - RNA, 19 nt, Artificial Sequence
  Description of Artificial Sequence: Synthetic oligonucleotide
aaacucacuuggcaccucc

SEQ ID NO: 418606 - RNA, 19 nt, Artificial Sequence
  Description of Artificial Sequence: Synthetic oligonucleotide
cuugcuucgaaguuuacug

SEQ ID NO: 418607 - RNA, 19 nt, Artificial Sequence
  Description of Artificial Sequence: Synthetic oligonucleotide
uccuguucuaauuuggacc

SEQ ID NO: 418608 - RNA, 19 nt, Artificial Sequence
  Description of Artificial Sequence: Synthetic oligonucleotide
agcauugcuucuuacacuc

SEQ ID NO: 418609 - RNA, 19 nt, Artificial Sequence
  Description of Artificial Sequence: Synthetic oligonucleotide
ugacguaucucuuaaacuc

SEQ ID NO: 418610 - RNA, 19 nt, Artificial Sequence
  Description of Artificial Sequence: Synthetic oligonucleotide
cuuuucgucacacucuugg

SEQ ID NO: 418611 - RNA, 19 nt, Artificial Sequence
  Description of Artificial Sequence: Synthetic oligonucleotide
acguagaaaugauggaugc

SEQ ID NO: 418612 - RNA, 19 nt, Artificial Sequence
  Description of Artificial Sequence: Synthetic oligonucleotide
ucgcauacuuuucagcugg

SEQ ID NO: 418613 - RNA, 19 nt, Artificial Sequence
  Description of Artificial Sequence: Synthetic oligonucleotide
uaaacuuucgggcuuugca

SEQ ID NO: 418614 - RNA, 19 nt, Artificial Sequence
  Description of Artificial Sequence: Synthetic oligonucleotide
accgauugcuuucaaggcc

SEQ ID NO: 418615 - RNA, 19 nt, Artificial Sequence
  Description of Artificial Sequence: Synthetic oligonucleotide
gaucggaggagacauaggc

SEQ ID NO: 418616 - RNA, 19 nt, Artificial Sequence
  Description of Artificial Sequence: Synthetic oligonucleotide
uaauccacuguuauuacaa

SEQ ID NO: 418617 - RNA, 19 nt, Artificial Sequence
  Description of Artificial Sequence: Synthetic oligonucleotide
aauuggcucauuucucauc

SEQ ID NO: 418618 - RNA, 19 nt, Artificial Sequence
  Description of Artificial Sequence: Synthetic oligonucleotide
aauuuuaucucuucuucua

SEQ ID NO: 418619 - RNA, 19 nt, Artificial Sequence
  Description of Artificial Sequence: Synthetic oligonucleotide
auaucaacaucuugcuugg

SEQ ID NO: 418620 - RNA, 19 nt, Artificial Sequence
  Description of Artificial Sequence: Synthetic oligonucleotide
agauacuaguuccuaaaag

SEQ ID NO: 418621 - RNA, 19 nt, Artificial Sequence
  Description of Artificial Sequence: Synthetic oligonucleotide
cuaaaagaguccucuaaag

SEQ ID NO: 418622 - RNA, 19 nt, Artificial Sequence
  Description of Artificial Sequence: Synthetic oligonucleotide
uacguagaaaugauggaug

SEQ ID NO: 418623 - RNA, 19 nt, Artificial Sequence
  Description of Artificial Sequence: Synthetic oligonucleotide
ugacgaaagguacucaugu

SEQ ID NO: 418624 - RNA, 19 nt, Artificial Sequence
  Description of Artificial Sequence: Synthetic oligonucleotide
aaaacgggcuaaauaugcc

SEQ ID NO: 418625 - RNA, 19 nt, Artificial Sequence
  Description of Artificial Sequence: Synthetic oligonucleotide
gagucuagaaagcgaaagg

SEQ ID NO: 418626 - RNA, 19 nt, Artificial Sequence
  Description of Artificial Sequence: Synthetic oligonucleotide
agagcuugccuucaauugg

SEQ ID NO: 418627 - RNA, 19 nt, Artificial Sequence
  Description of Artificial Sequence: Synthetic oligonucleotide
ucgcaguugauguugaaug

SEQ ID NO: 418628 - RNA, 19 nt, Artificial Sequence
  Description of Artificial Sequence: Synthetic oligonucleotide
uguacucuugcuucgaagu

SEQ ID NO: 418629 - RNA, 19 nt, Artificial Sequence
  Description of Artificial Sequence: Synthetic oligonucleotide
uagaaaacucacuuggcac

SEQ ID NO: 418630 - RNA, 19 nt, Artificial Sequence
  Description of Artificial Sequence: Synthetic oligonucleotide
aauauuaaacugguuuaca

SEQ ID NO: 418631 - RNA, 19 nt, Artificial Sequence
  Description of Artificial Sequence: Synthetic oligonucleotide
ugcuuuagaaagcauugcu

SEQ ID NO: 418632 - RNA, 19 nt, Artificial Sequence
  Description of Artificial Sequence: Synthetic oligonucleotide
ucagcuauuaucugaugcu

SEQ ID NO: 418633 - RNA, 19 nt, Artificial Sequence
  Description of Artificial Sequence: Synthetic oligonucleotide
ugucgcauacuuuucagcu

SEQ ID NO: 418634 - RNA, 19 nt, Artificial Sequence
  Description of Artificial Sequence: Synthetic oligonucleotide
uuuacguagaaaugaugga

SEQ ID NO: 418635 - RNA, 19 nt, Artificial Sequence
  Description of Artificial Sequence: Synthetic oligonucleotide
uuuaagcauccgcugauga

SEQ ID NO: 418636 - RNA, 19 nt, Artificial Sequence
  Description of Artificial Sequence: Synthetic oligonucleotide
gauguuuugagcugcucac

SEQ ID NO: 418637 - RNA, 19 nt, Artificial Sequence
  Description of Artificial Sequence: Synthetic oligonucleotide
uuaauggacacauguuuac

SEQ ID NO: 418638 - RNA, 19 nt, Artificial Sequence
  Description of Artificial Sequence: Synthetic oligonucleotide
gaaagcgaaaggaugacac

SEQ ID NO: 418639 - RNA, 19 nt, Artificial Sequence
  Description of Artificial Sequence: Synthetic oligonucleotide
aguuuacugacguaucucu

SEQ ID NO: 418640 - RNA, 19 nt, Artificial Sequence
  Description of Artificial Sequence: Synthetic oligonucleotide
aaacuuucgggcuuugcau

SEQ ID NO: 418641 - RNA, 19 nt, Artificial Sequence
  Description of Artificial Sequence: Synthetic oligonucleotide
uguuuauuggugucggcca

SEQ ID NO: 418642 - RNA, 19 nt, Artificial Sequence
  Description of Artificial Sequence: Synthetic oligonucleotide
uuacagauagcaagcucag

SEQ ID NO: 418643 - RNA, 19 nt, Artificial Sequence
  Description of Artificial Sequence: Synthetic oligonucleotide
acuuucgggcuuugcaucc

SEQ ID NO: 418644 - RNA, 19 nt, Artificial Sequence
  Description of Artificial Sequence: Synthetic oligonucleotide
aacaucuugcuuggggucg

SEQ ID NO: 418645 - RNA, 19 nt, Artificial Sequence
  Description of Artificial Sequence: Synthetic oligonucleotide
ucgacggcuaaacuaaaca

SEQ ID NO: 418646 - RNA, 19 nt, Artificial Sequence
  Description of Artificial Sequence: Synthetic oligonucleotide
auuggcucauuucucauca

SEQ ID NO: 418647 - RNA, 19 nt, Artificial Sequence
  Description of Artificial Sequence: Synthetic oligonucleotide
ugcacugcgugaaacagcu

SEQ ID NO: 418648 - RNA, 19 nt, Artificial Sequence
  Description of Artificial Sequence: Synthetic oligonucleotide
acgaaagguacucaugucu

SEQ ID NO: 418649 - RNA, 19 nt, Artificial Sequence
  Description of Artificial Sequence: Synthetic oligonucleotide
ucuuggguguaacuguacc

SEQ ID NO: 418650 - RNA, 19 nt, Artificial Sequence
  Description of Artificial Sequence: Synthetic oligonucleotide
cagguucuuaaucacacag

SEQ ID NO: 418651 - RNA, 19 nt, Artificial Sequence
  Description of Artificial Sequence: Synthetic oligonucleotide
gagggacgagucuagaaag

SEQ ID NO: 418652 - RNA, 19 nt, Artificial Sequence
  Description of Artificial Sequence: Synthetic oligonucleotide
uacuaguuccuaaaagagu

SEQ ID NO: 418653 - RNA, 19 nt, Artificial Sequence
  Description of Artificial Sequence: Synthetic oligonucleotide
uuaaacucgucucccuuca

SEQ ID NO: 418654 - RNA, 19 nt, Artificial Sequence
  Description of Artificial Sequence: Synthetic oligonucleotide
augucgcauacuuuucagc

SEQ ID NO: 418655 - RNA, 19 nt, Artificial Sequence
  Description of Artificial Sequence: Synthetic oligonucleotide
gagagcuugccuucaauug

SEQ ID NO: 418656 - RNA, 19 nt, Artificial Sequence
  Description of Artificial Sequence: Synthetic oligonucleotide
ucuguugugcaagaaauuc

SEQ ID NO: 418657 - RNA, 19 nt, Artificial Sequence
  Description of Artificial Sequence: Synthetic oligonucleotide
auacuaguuccuaaaagag

SEQ ID NO: 418658 - RNA, 19 nt, Artificial Sequence
  Description of Artificial Sequence: Synthetic oligonucleotide
uuuucgucacacucuuggg

SEQ ID NO: 418659 - RNA, 19 nt, Artificial Sequence
  Description of Artificial Sequence: Synthetic oligonucleotide
cuagaaagcgaaaggauga

SEQ ID NO: 418660 - RNA, 19 nt, Artificial Sequence
  Description of Artificial Sequence: Synthetic oligonucleotide
acagguuuacuuccaauca

SEQ ID NO: 418661 - RNA, 19 nt, Artificial Sequence
  Description of Artificial Sequence: Synthetic oligonucleotide
ucccuucaaaaccucggcg

SEQ ID NO: 418662 - RNA, 19 nt, Artificial Sequence
  Description of Artificial Sequence: Synthetic oligonucleotide
caaacguucaacucucuuc

SEQ ID NO: 418663 - RNA, 19 nt, Artificial Sequence
  Description of Artificial Sequence: Synthetic oligonucleotide
ucacaugaggagaacaaau

SEQ ID NO: 418664 - RNA, 19 nt, Artificial Sequence
  Description of Artificial Sequence: Synthetic oligonucleotide
uaucucuuaaacucgucuc

SEQ ID NO: 418665 - RNA, 19 nt, Artificial Sequence
  Description of Artificial Sequence: Synthetic oligonucleotide
uuacuuccaaucaccaaac

SEQ ID NO: 418666 - RNA, 19 nt, Artificial Sequence
  Description of Artificial Sequence: Synthetic oligonucleotide
gacguaucucuuaaacucg

SEQ ID NO: 418667 - RNA, 19 nt, Artificial Sequence
  Description of Artificial Sequence: Synthetic oligonucleotide
aauuuggaccgauugcuuu

SEQ ID NO: 418668 - RNA, 19 nt, Artificial Sequence
  Description of Artificial Sequence: Synthetic oligonucleotide
gacaacuuuaggagggacg

SEQ ID NO: 418669 - RNA, 19 nt, Artificial Sequence
  Description of Artificial Sequence: Synthetic oligonucleotide
gagacauaggccuucaucu

SEQ ID NO: 418670 - RNA, 19 nt, Artificial Sequence
  Description of Artificial Sequence: Synthetic oligonucleotide
uccacuguuauuacaacuu

SEQ ID NO: 418671 - RNA, 19 nt, Artificial Sequence
  Description of Artificial Sequence: Synthetic oligonucleotide
cuuggguguaacuguaccc

SEQ ID NO: 418672 - RNA, 19 nt, Artificial Sequence
  Description of Artificial Sequence: Synthetic oligonucleotide
uauuuaagcauccgcugau

SEQ ID NO: 418673 - RNA, 19 nt, Artificial Sequence
  Description of Artificial Sequence: Synthetic oligonucleotide
aacuuuaggagggacgagu

SEQ ID NO: 418674 - RNA, 19 nt, Artificial Sequence
  Description of Artificial Sequence: Synthetic oligonucleotide
ucgacgaagcugaacuucc

SEQ ID NO: 418675 - RNA, 19 nt, Artificial Sequence
  Description of Artificial Sequence: Synthetic oligonucleotide
uuacguagaaaugauggau

SEQ ID NO: 418676 - RNA, 19 nt, Artificial Sequence
  Description of Artificial Sequence: Synthetic oligonucleotide
ugcgugaaacagcugauuc

SEQ ID NO: 418677 - RNA, 19 nt, Artificial Sequence
  Description of Artificial Sequence: Synthetic oligonucleotide
aauuaccugaccgaugcaa

SEQ ID NO: 418678 - RNA, 19 nt, Artificial Sequence
  Description of Artificial Sequence: Synthetic oligonucleotide
agauacacccuucuucucu

SEQ ID NO: 418679 - RNA, 19 nt, Artificial Sequence
  Description of Artificial Sequence: Synthetic oligonucleotide
aagcucuagaaggucagag

SEQ ID NO: 418680 - RNA, 19 nt, Artificial Sequence
  Description of Artificial Sequence: Synthetic oligonucleotide
uuuacugacguaucucuua

SEQ ID NO: 418681 - RNA, 19 nt, Artificial Sequence
  Description of Artificial Sequence: Synthetic oligonucleotide
uucauugacuuuagacuca

SEQ ID NO: 418682 - RNA, 19 nt, Artificial Sequence
  Description of Artificial Sequence: Synthetic oligonucleotide
ugaccauauaugaauuaaa

SEQ ID NO: 418683 - RNA, 19 nt, Artificial Sequence
  Description of Artificial Sequence: Synthetic oligonucleotide
aacucaggacaaccacucg

SEQ ID NO: 418684 - RNA, 19 nt, Artificial Sequence
  Description of Artificial Sequence: Synthetic oligonucleotide
ccuguucuaauuuggaccg

SEQ ID NO: 418685 - RNA, 19 nt, Artificial Sequence
  Description of Artificial Sequence: Synthetic oligonucleotide
agucuagaaagcgaaagga

SEQ ID NO: 418686 - RNA, 19 nt, Artificial Sequence
  Description of Artificial Sequence: Synthetic oligonucleotide
ucuuaccaagguuuucuug

SEQ ID NO: 418687 - RNA, 19 nt, Artificial Sequence
  Description of Artificial Sequence: Synthetic oligonucleotide
aacucgucucccuucaaaa

SEQ ID NO: 418688 - RNA, 19 nt, Artificial Sequence
  Description of Artificial Sequence: Synthetic oligonucleotide
cauugagaacuuguaauag

SEQ ID NO: 418689 - RNA, 19 nt, Artificial Sequence
  Description of Artificial Sequence: Synthetic oligonucleotide
gaucucgccacaucuuugc

SEQ ID NO: 418690 - RNA, 19 nt, Artificial Sequence
  Description of Artificial Sequence: Synthetic oligonucleotide
ucgaaguuuacugacguau

SEQ ID NO: 418691 - RNA, 19 nt, Artificial Sequence
  Description of Artificial Sequence: Synthetic oligonucleotide
aagagaccgaauucagccu

SEQ ID NO: 418692 - RNA, 19 nt, Artificial Sequence
  Description of Artificial Sequence: Synthetic oligonucleotide
uuuaugacuggggccagag

SEQ ID NO: 418693 - RNA, 19 nt, Artificial Sequence
  Description of Artificial Sequence: Synthetic oligonucleotide
cauauuuggaccaugacuu

SEQ ID NO: 418694 - RNA, 19 nt, Artificial Sequence
  Description of Artificial Sequence: Synthetic oligonucleotide
aaccacucgacggcuaaac

SEQ ID NO: 418695 - RNA, 19 nt, Artificial Sequence
  Description of Artificial Sequence: Synthetic oligonucleotide
uuccugacguugcuuaagc

SEQ ID NO: 418696 - RNA, 19 nt, Artificial Sequence
  Description of Artificial Sequence: Synthetic oligonucleotide
cuccguguuuauuucauug

SEQ ID NO: 418697 - RNA, 19 nt, Artificial Sequence
  Description of Artificial Sequence: Synthetic oligonucleotide
acuguuuauuggugucggc

SEQ ID NO: 418698 - RNA, 19 nt, Artificial Sequence
  Description of Artificial Sequence: Synthetic oligonucleotide
uccguguuuauuucauuga

SEQ ID NO: 418699 - RNA, 19 nt, Artificial Sequence
  Description of Artificial Sequence: Synthetic oligonucleotide
cucgccacaucuuugcuug

SEQ ID NO: 418700 - RNA, 19 nt, Artificial Sequence
  Description of Artificial Sequence: Synthetic oligonucleotide
cuguuuauuggugucggcc

SEQ ID NO: 418701 - RNA, 19 nt, Artificial Sequence
  Description of Artificial Sequence: Synthetic oligonucleotide
uuacugacguaucucuuaa

SEQ ID NO: 418702 - RNA, 19 nt, Artificial Sequence
  Description of Artificial Sequence: Synthetic oligonucleotide
gauggaugccuguugucug

SEQ ID NO: 418703 - RNA, 19 nt, Artificial Sequence
  Description of Artificial Sequence: Synthetic oligonucleotide
gaccgauugcuuucaaggc

SEQ ID NO: 418704 - RNA, 19 nt, Artificial Sequence
  Description of Artificial Sequence: Synthetic oligonucleotide
ucucaucagucgcucgacg

SEQ ID NO: 418705 - RNA, 19 nt, Artificial Sequence
  Description of Artificial Sequence: Synthetic oligonucleotide
uuggguguaacuguaccca

SEQ ID NO: 418706 - RNA, 19 nt, Artificial Sequence
  Description of Artificial Sequence: Synthetic oligonucleotide
acuaaacaaugcaagccuc

SEQ ID NO: 418707 - RNA, 19 nt, Artificial Sequence
  Description of Artificial Sequence: Synthetic oligonucleotide
aacgucauugagaacuugu

SEQ ID NO: 418708 - RNA, 19 nt, Artificial Sequence
  Description of Artificial Sequence: Synthetic oligonucleotide
uccugaauuaccugaccga

SEQ ID NO: 418709 - RNA, 19 nt, Artificial Sequence
  Description of Artificial Sequence: Synthetic oligonucleotide
cauuaauccacuguuauua

SEQ ID NO: 418710 - RNA, 19 nt, Artificial Sequence
  Description of Artificial Sequence: Synthetic oligonucleotide
uuaccugaccgaugcaagc

SEQ ID NO: 418711 - RNA, 19 nt, Artificial Sequence
  Description of Artificial Sequence: Synthetic oligonucleotide
acggcuaaacuaaacaaug

SEQ ID NO: 418712 - RNA, 19 nt, Artificial Sequence
  Description of Artificial Sequence: Synthetic oligonucleotide
ugauggaugccuguugucu

SEQ ID NO: 418713 - RNA, 19 nt, Artificial Sequence
  Description of Artificial Sequence: Synthetic oligonucleotide
acucaggacaaccacucga

SEQ ID NO: 418714 - RNA, 19 nt, Artificial Sequence
  Description of Artificial Sequence: Synthetic oligonucleotide
ugauugaucuccguguuua

SEQ ID NO: 418715 - RNA, 19 nt, Artificial Sequence
  Description of Artificial Sequence: Synthetic oligonucleotide
ugaucggaggagacauagg

SEQ ID NO: 418716 - RNA, 19 nt, Artificial Sequence
  Description of Artificial Sequence: Synthetic oligonucleotide
uuccuguucuaauuuggac

SEQ ID NO: 418717 - RNA, 19 nt, Artificial Sequence
  Description of Artificial Sequence: Synthetic oligonucleotide
caugucgcauacuuuucag

SEQ ID NO: 418718 - RNA, 19 nt, Artificial Sequence
  Description of Artificial Sequence: Synthetic oligonucleotide
uuuaggagggacgagucua

SEQ ID NO: 418719 - RNA, 19 nt, Artificial Sequence
  Description of Artificial Sequence: Synthetic oligonucleotide
aagguucagcauccguuug

SEQ ID NO: 418720 - RNA, 19 nt, Artificial Sequence
  Description of Artificial Sequence: Synthetic oligonucleotide
ucauacugggcuuucuuuu

SEQ ID NO: 418721 - RNA, 19 nt, Artificial Sequence
  Description of Artificial Sequence: Synthetic oligonucleotide
ucuuggguuaguuccugac

SEQ ID NO: 418722 - RNA, 19 nt, Artificial Sequence
  Description of Artificial Sequence: Synthetic oligonucleotide
cuuaauggacacauguuua

SEQ ID NO: 418723 - RNA, 19 nt, Artificial Sequence
  Description of Artificial Sequence: Synthetic oligonucleotide
cuauuuaagcauccgcuga

SEQ ID NO: 418724 - RNA, 19 nt, Artificial Sequence
  Description of Artificial Sequence: Synthetic oligonucleotide
cugcacagcuaucauacug

SEQ ID NO: 418725 - RNA, 19 nt, Artificial Sequence
  Description of Artificial Sequence: Synthetic oligonucleotide
uucgucacacucuuggguu

SEQ ID NO: 418726 - RNA, 19 nt, Artificial Sequence
  Description of Artificial Sequence: Synthetic oligonucleotide
aacgggcuaaauaugcccu

SEQ ID NO: 418727 - RNA, 19 nt, Artificial Sequence
  Description of Artificial Sequence: Synthetic oligonucleotide
ugagagcuugccuucaauu

SEQ ID NO: 418728 - RNA, 19 nt, Artificial Sequence
  Description of Artificial Sequence: Synthetic oligonucleotide
ucuugcuucgaaguuuacu

SEQ ID NO: 418729 - RNA, 19 nt, Artificial Sequence
  Description of Artificial Sequence: Synthetic oligonucleotide
cugaucggaggagacauag

SEQ ID NO: 418730 - RNA, 19 nt, Artificial Sequence
  Description of Artificial Sequence: Synthetic oligonucleotide
agcucuuuuaugacugggg

SEQ ID NO: 418731 - RNA, 19 nt, Artificial Sequence
  Description of Artificial Sequence: Synthetic oligonucleotide
uuaagcauccgcugaugau

SEQ ID NO: 418732 - RNA, 19 nt, Artificial Sequence
  Description of Artificial Sequence: Synthetic oligonucleotide
accauuucagacaugucgu

SEQ ID NO: 418733 - RNA, 19 nt, Artificial Sequence
  Description of Artificial Sequence: Synthetic oligonucleotide
gcuauuuaagcauccgcug

SEQ ID NO: 418734 - RNA, 19 nt, Artificial Sequence
  Description of Artificial Sequence: Synthetic oligonucleotide
uucccauaacucaggacaa

SEQ ID NO: 418735 - RNA, 19 nt, Artificial Sequence
  Description of Artificial Sequence: Synthetic oligonucleotide
cagguuuacuuccaaucac

SEQ ID NO: 418736 - RNA, 19 nt, Artificial Sequence
  Description of Artificial Sequence: Synthetic oligonucleotide
uguacccagauacacccuu

SEQ ID NO: 418737 - RNA, 19 nt, Artificial Sequence
  Description of Artificial Sequence: Synthetic oligonucleotide
aaccucacucuugagggca

SEQ ID NO: 418738 - RNA, 19 nt, Artificial Sequence
  Description of Artificial Sequence: Synthetic oligonucleotide
ucaucagucgcucgacgaa

SEQ ID NO: 418739 - RNA, 19 nt, Artificial Sequence
  Description of Artificial Sequence: Synthetic oligonucleotide
agcuauuaucugaugcuuc

SEQ ID NO: 418740 - RNA, 19 nt, Artificial Sequence
  Description of Artificial Sequence: Synthetic oligonucleotide
cugauaccagugaauucag

SEQ ID NO: 418741 - RNA, 19 nt, Artificial Sequence
  Description of Artificial Sequence: Synthetic oligonucleotide
auuaccugaccgaugcaag

SEQ ID NO: 418742 - RNA, 19 nt, Artificial Sequence
  Description of Artificial Sequence: Synthetic oligonucleotide
uggaccgauugcuuucaag

SEQ ID NO: 418743 - RNA, 19 nt, Artificial Sequence
  Description of Artificial Sequence: Synthetic oligonucleotide
ugcaggguuuuaaaggcuu

SEQ ID NO: 418744 - RNA, 19 nt, Artificial Sequence
  Description of Artificial Sequence: Synthetic oligonucleotide
uauuuggaccaugacuuuc

SEQ ID NO: 418745 - RNA, 19 nt, Artificial Sequence
  Description of Artificial Sequence: Synthetic oligonucleotide
cugacgaaagguacucaug

SEQ ID NO: 418746 - RNA, 19 nt, Artificial Sequence
  Description of Artificial Sequence: Synthetic oligonucleotide
cagaacgucauugagaacu

SEQ ID NO: 418747 - RNA, 19 nt, Artificial Sequence
  Description of Artificial Sequence: Synthetic oligonucleotide
gacaugucguccagggucc

SEQ ID NO: 418748 - RNA, 19 nt, Artificial Sequence
  Description of Artificial Sequence: Synthetic oligonucleotide
gagauacuaguuccuaaaa

SEQ ID NO: 418749 - RNA, 19 nt, Artificial Sequence
  Description of Artificial Sequence: Synthetic oligonucleotide
ugguucgcaguugauguug

SEQ ID NO: 418750 - RNA, 19 nt, Artificial Sequence
  Description of Artificial Sequence: Synthetic oligonucleotide
gcucuuuuaugacuggggc

SEQ ID NO: 418751 - RNA, 19 nt, Artificial Sequence
  Description of Artificial Sequence: Synthetic oligonucleotide
ucaaacguucaacucucuu

SEQ ID NO: 418752 - RNA, 19 nt, Artificial Sequence
  Description of Artificial Sequence: Synthetic oligonucleotide
aaacauuaauccacuguua

SEQ ID NO: 418753 - RNA, 19 nt, Artificial Sequence
  Description of Artificial Sequence: Synthetic oligonucleotide
cucugauaucaacaucuug

SEQ ID NO: 418754 - RNA, 19 nt, Artificial Sequence
  Description of Artificial Sequence: Synthetic oligonucleotide
auaaugguaucuacuuucu

SEQ ID NO: 418755 - RNA, 19 nt, Artificial Sequence
  Description of Artificial Sequence: Synthetic oligonucleotide
gguaucuacuuucuuccug

SEQ ID NO: 418756 - RNA, 19 nt, Artificial Sequence
  Description of Artificial Sequence: Synthetic oligonucleotide
ugguauacugcucccugau

SEQ ID NO: 418757 - RNA, 19 nt, Artificial Sequence
  Description of Artificial Sequence: Synthetic oligonucleotide
aaucucugcacugcgugaa

SEQ ID NO: 418758 - RNA, 19 nt, Artificial Sequence
  Description of Artificial Sequence: Synthetic oligonucleotide
ccugacguugcuuaagcag

SEQ ID NO: 418759 - RNA, 19 nt, Artificial Sequence
  Description of Artificial Sequence: Synthetic oligonucleotide
uaccugaccgaugcaagcc

SEQ ID NO: 418760 - RNA, 19 nt, Artificial Sequence
  Description of Artificial Sequence: Synthetic oligonucleotide
cacugcgugaaacagcuga

SEQ ID NO: 418761 - RNA, 19 nt, Artificial Sequence
  Description of Artificial Sequence: Synthetic oligonucleotide
uuuugguauacugcucccu

SEQ ID NO: 418762 - RNA, 19 nt, Artificial Sequence
  Description of Artificial Sequence: Synthetic oligonucleotide
cugaauuaccugaccgaug

SEQ ID NO: 418763 - RNA, 19 nt, Artificial Sequence
  Description of Artificial Sequence: Synthetic oligonucleotide
uuaaacuuucgggcuuugc

SEQ ID NO: 418764 - RNA, 19 nt, Artificial Sequence
  Description of Artificial Sequence: Synthetic oligonucleotide
uguuuacauuacagauagc

SEQ ID NO: 418765 - RNA, 19 nt, Artificial Sequence
  Description of Artificial Sequence: Synthetic oligonucleotide
agggacgagucuagaaagc

SEQ ID NO: 418766 - RNA, 19 nt, Artificial Sequence
  Description of Artificial Sequence: Synthetic oligonucleotide
uacccagauacacccuucu

SEQ ID NO: 418767 - RNA, 19 nt, Artificial Sequence
  Description of Artificial Sequence: Synthetic oligonucleotide
aucauacugggcuuucuuu

SEQ ID NO: 418768 - RNA, 19 nt, Artificial Sequence
  Description of Artificial Sequence: Synthetic oligonucleotide
uggguaaauuacagguuua

SEQ ID NO: 418769 - RNA, 19 nt, Artificial Sequence
  Description of Artificial Sequence: Synthetic oligonucleotide
guaucucuuaaacucgucu

SEQ ID NO: 418770 - RNA, 19 nt, Artificial Sequence
  Description of Artificial Sequence: Synthetic oligonucleotide
ugcugaucggaggagacau

SEQ ID NO: 418771 - RNA, 19 nt, Artificial Sequence
  Description of Artificial Sequence: Synthetic oligonucleotide
agagaccgaauucagccuu

SEQ ID NO: 418772 - RNA, 19 nt, Artificial Sequence
  Description of Artificial Sequence: Synthetic oligonucleotide
guaacuguagggacugcug

SEQ ID NO: 418773 - RNA, 19 nt, Artificial Sequence
  Description of Artificial Sequence: Synthetic oligonucleotide
gacgaaagguacucauguc

SEQ ID NO: 418774 - RNA, 19 nt, Artificial Sequence
  Description of Artificial Sequence: Synthetic oligonucleotide
aucagucgcucgacgaagc

SEQ ID NO: 418775 - RNA, 19 nt, Artificial Sequence
  Description of Artificial Sequence: Synthetic oligonucleotide
uucuguugugcaagaaauu

SEQ ID NO: 418776 - RNA, 19 nt, Artificial Sequence
  Description of Artificial Sequence: Synthetic oligonucleotide
gacgagucuagaaagcgaa

SEQ ID NO: 418777 - RNA, 19 nt, Artificial Sequence
  Description of Artificial Sequence: Synthetic oligonucleotide
gucgcauacuuuucagcug

SEQ ID NO: 418778 - RNA, 19 nt, Artificial Sequence
  Description of Artificial Sequence: Synthetic oligonucleotide
ugauaccagugaauucagu

SEQ ID NO: 418779 - RNA, 19 nt, Artificial Sequence
  Description of Artificial Sequence: Synthetic oligonucleotide
uuuggaccgauugcuuuca

SEQ ID NO: 418780 - RNA, 19 nt, Artificial Sequence
  Description of Artificial Sequence: Synthetic oligonucleotide
cucggcgccaucgaauucc

SEQ ID NO: 418781 - RNA, 19 nt, Artificial Sequence
  Description of Artificial Sequence: Synthetic oligonucleotide
auuuaagcauccgcugaug

SEQ ID NO: 418782 - RNA, 19 nt, Artificial Sequence
  Description of Artificial Sequence: Synthetic oligonucleotide
gaucuccguguuuauuuca

SEQ ID NO: 418783 - RNA, 19 nt, Artificial Sequence
  Description of Artificial Sequence: Synthetic oligonucleotide
cauugcuucuuacacucca

SEQ ID NO: 418784 - RNA, 19 nt, Artificial Sequence
  Description of Artificial Sequence: Synthetic oligonucleotide
agguuuguauuuaaggaua

SEQ ID NO: 418785 - RNA, 19 nt, Artificial Sequence
  Description of Artificial Sequence: Synthetic oligonucleotide
uucacggagcccucgcacu

SEQ ID NO: 418786 - RNA, 19 nt, Artificial Sequence
  Description of Artificial Sequence: Synthetic oligonucleotide
agacacccuuucuagcucu

SEQ ID NO: 418787 - RNA, 19 nt, Artificial Sequence
  Description of Artificial Sequence: Synthetic oligonucleotide
cugaccgaugcaagccugg

SEQ ID NO: 418788 - RNA, 19 nt, Artificial Sequence
  Description of Artificial Sequence: Synthetic oligonucleotide
uaucuacuuucuuccugga

SEQ ID NO: 418789 - RNA, 19 nt, Artificial Sequence
  Description of Artificial Sequence: Synthetic oligonucleotide
aguuccuaaaagaguccuc

SEQ ID NO: 418790 - RNA, 19 nt, Artificial Sequence
  Description of Artificial Sequence: Synthetic oligonucleotide
ucuuuucgucacacucuug

SEQ ID NO: 418791 - RNA, 19 nt, Artificial Sequence
  Description of Artificial Sequence: Synthetic oligonucleotide
caacaucuugcuugggguc

SEQ ID NO: 418792 - RNA, 19 nt, Artificial Sequence
  Description of Artificial Sequence: Synthetic oligonucleotide
cacagcuaucauacugggc

SEQ ID NO: 418793 - RNA, 19 nt, Artificial Sequence
  Description of Artificial Sequence: Synthetic oligonucleotide
auggacacauguuuacauu

SEQ ID NO: 418794 - RNA, 19 nt, Artificial Sequence
  Description of Artificial Sequence: Synthetic oligonucleotide
uuucgggcuuugcauccgc

SEQ ID NO: 418795 - RNA, 19 nt, Artificial Sequence
  Description of Artificial Sequence: Synthetic oligonucleotide
cacacucuuggguuaguuc

SEQ ID NO: 418796 - RNA, 19 nt, Artificial Sequence
  Description of Artificial Sequence: Synthetic oligonucleotide
agucgcucgacgaagcuga

SEQ ID NO: 418797 - RNA, 19 nt, Artificial Sequence
  Description of Artificial Sequence: Synthetic oligonucleotide
gcaaucucugcacugcgug

SEQ ID NO: 418798 - RNA, 19 nt, Artificial Sequence
  Description of Artificial Sequence: Synthetic oligonucleotide
cucaacccgaagcugucug

SEQ ID NO: 418799 - RNA, 19 nt, Artificial Sequence
  Description of Artificial Sequence: Synthetic oligonucleotide
agaaagcgaaaggaugaca

SEQ ID NO: 418800 - RNA, 19 nt, Artificial Sequence
  Description of Artificial Sequence: Synthetic oligonucleotide
cacucgacggcuaaacuaa

SEQ ID NO: 418801 - RNA, 19 nt, Artificial Sequence
  Description of Artificial Sequence: Synthetic oligonucleotide
uucaaacguucaacucucu

SEQ ID NO: 418802 - RNA, 19 nt, Artificial Sequence
  Description of Artificial Sequence: Synthetic oligonucleotide
cuuggguuaguuccugaca

SEQ ID NO: 418803 - RNA, 19 nt, Artificial Sequence
  Description of Artificial Sequence: Synthetic oligonucleotide
uccugacguugcuuaagca

SEQ ID NO: 418804 - RNA, 19 nt, Artificial Sequence
  Description of Artificial Sequence: Synthetic oligonucleotide
uugcauccgcugcagcaug

SEQ ID NO: 418805 - RNA, 19 nt, Artificial Sequence
  Description of Artificial Sequence: Synthetic oligonucleotide
acaagagauacuaguuccu

SEQ ID NO: 418806 - RNA, 19 nt, Artificial Sequence
  Description of Artificial Sequence: Synthetic oligonucleotide
cucgacggcuaaacuaaac

SEQ ID NO: 418807 - RNA, 19 nt, Artificial Sequence
  Description of Artificial Sequence: Synthetic oligonucleotide
acccugacgaaagguacuc

SEQ ID NO: 418808 - RNA, 19 nt, Artificial Sequence
  Description of Artificial Sequence: Synthetic oligonucleotide
ucgaauucccgagucuggu

SEQ ID NO: 418809 - RNA, 19 nt, Artificial Sequence
  Description of Artificial Sequence: Synthetic oligonucleotide
ugcaagccucuucuucaug

SEQ ID NO: 418810 - RNA, 19 nt, Artificial Sequence
  Description of Artificial Sequence: Synthetic oligonucleotide
agggcagacacccuuucua

SEQ ID NO: 418811 - RNA, 19 nt, Artificial Sequence
  Description of Artificial Sequence: Synthetic oligonucleotide
ucagucgcucgacgaagcu

SEQ ID NO: 418812 - RNA, 19 nt, Artificial Sequence
  Description of Artificial Sequence: Synthetic oligonucleotide
gcuaaacuaaacaaugcaa

SEQ ID NO: 418813 - RNA, 19 nt, Artificial Sequence
  Description of Artificial Sequence: Synthetic oligonucleotide
uacucuugcuucgaaguuu

SEQ ID NO: 418814 - RNA, 19 nt, Artificial Sequence
  Description of Artificial Sequence: Synthetic oligonucleotide
gaugcaagccuggcuuugc

SEQ ID NO: 418815 - RNA, 19 nt, Artificial Sequence
  Description of Artificial Sequence: Synthetic oligonucleotide
agucacaugaggagaacaa

SEQ ID NO: 418816 - RNA, 19 nt, Artificial Sequence
  Description of Artificial Sequence: Synthetic oligonucleotide
guuuacuuccaaucaccaa

SEQ ID NO: 418817 - RNA, 19 nt, Artificial Sequence
  Description of Artificial Sequence: Synthetic oligonucleotide
uccgcccuccugaauuacc

SEQ ID NO: 418818 - RNA, 19 nt, Artificial Sequence
  Description of Artificial Sequence: Synthetic oligonucleotide
aacuguacucuugcuucga

SEQ ID NO: 418819 - RNA, 19 nt, Artificial Sequence
  Description of Artificial Sequence: Synthetic oligonucleotide
gcacuggguaaauuacagg

SEQ ID NO: 418820 - RNA, 19 nt, Artificial Sequence
  Description of Artificial Sequence: Synthetic oligonucleotide
caucagucgcucgacgaag

SEQ ID NO: 418821 - RNA, 19 nt, Artificial Sequence
  Description of Artificial Sequence: Synthetic oligonucleotide
aaaccucggcgccaucgaa

SEQ ID NO: 418822 - RNA, 19 nt, Artificial Sequence
  Description of Artificial Sequence: Synthetic oligonucleotide
ugacguugcuuaagcaguu

SEQ ID NO: 418823 - RNA, 19 nt, Artificial Sequence
  Description of Artificial Sequence: Synthetic oligonucleotide
agcaugucgcauacuuuuc

SEQ ID NO: 418824 - RNA, 19 nt, Artificial Sequence
  Description of Artificial Sequence: Synthetic oligonucleotide
cucgacgaagcugaacuuc

SEQ ID NO: 418825 - RNA, 19 nt, Artificial Sequence
  Description of Artificial Sequence: Synthetic oligonucleotide
uggcuaacuucuccuuggu

SEQ ID NO: 418826 - RNA, 19 nt, Artificial Sequence
  Description of Artificial Sequence: Synthetic oligonucleotide
agacaaggguuucuucaaa

SEQ ID NO: 418827 - RNA, 19 nt, Artificial Sequence
  Description of Artificial Sequence: Synthetic oligonucleotide
uggugucggccacaguuuc

SEQ ID NO: 418828 - RNA, 19 nt, Artificial Sequence
  Description of Artificial Sequence: Synthetic oligonucleotide
cugacguugcuuaagcagu

SEQ ID NO: 418829 - RNA, 19 nt, Artificial Sequence
  Description of Artificial Sequence: Synthetic oligonucleotide
gcuucgaaguuuacugacg

SEQ ID NO: 418830 - RNA, 19 nt, Artificial Sequence
  Description of Artificial Sequence: Synthetic oligonucleotide
uucgaaguuuacugacgua

SEQ ID NO: 418831 - RNA, 19 nt, Artificial Sequence
  Description of Artificial Sequence: Synthetic oligonucleotide
ugcucgagaucucgccaca

SEQ ID NO: 418832 - RNA, 19 nt, Artificial Sequence
  Description of Artificial Sequence: Synthetic oligonucleotide
uggcauuuccuggagguuu

SEQ ID NO: 418833 - RNA, 19 nt, Artificial Sequence
  Description of Artificial Sequence: Synthetic oligonucleotide
acaaccacucgacggcuaa

SEQ ID NO: 418834 - RNA, 19 nt, Artificial Sequence
  Description of Artificial Sequence: Synthetic oligonucleotide
gcuaaauaugcccuuuucu

SEQ ID NO: 418835 - RNA, 19 nt, Artificial Sequence
  Description of Artificial Sequence: Synthetic oligonucleotide
ucucgccacaucuuugcuu

SEQ ID NO: 418836 - RNA, 19 nt, Artificial Sequence
  Description of Artificial Sequence: Synthetic oligonucleotide
cuugcuuggggucgaucuc

SEQ ID NO: 418837 - RNA, 19 nt, Artificial Sequence
  Description of Artificial Sequence: Synthetic oligonucleotide
ucucuagguuggcuaacuu

SEQ ID NO: 418838 - RNA, 19 nt, Artificial Sequence
  Description of Artificial Sequence: Synthetic oligonucleotide
gaagguucagcauccguuu

SEQ ID NO: 418839 - RNA, 19 nt, Artificial Sequence
  Description of Artificial Sequence: Synthetic oligonucleotide
cugacguaucucuuaaacu

SEQ ID NO: 418840 - RNA, 19 nt, Artificial Sequence
  Description of Artificial Sequence: Synthetic oligonucleotide
accacucgacggcuaaacu

SEQ ID NO: 418841 - RNA, 19 nt, Artificial Sequence
  Description of Artificial Sequence: Synthetic oligonucleotide
cuucgaaguuuacugacgu

SEQ ID NO: 418842 - RNA, 19 nt, Artificial Sequence
  Description of Artificial Sequence: Synthetic oligonucleotide
uuuuaugacuggggccaga

SEQ ID NO: 418843 - RNA, 19 nt, Artificial Sequence
  Description of Artificial Sequence: Synthetic oligonucleotide
ggagggacgagucuagaaa

SEQ ID NO: 418844 - RNA, 19 nt, Artificial Sequence
  Description of Artificial Sequence: Synthetic oligonucleotide
acuguacucuugcuucgaa

SEQ ID NO: 418845 - RNA, 19 nt, Artificial Sequence
  Description of Artificial Sequence: Synthetic oligonucleotide
gagcacuggguaaauuaca

SEQ ID NO: 418846 - RNA, 19 nt, Artificial Sequence
  Description of Artificial Sequence: Synthetic oligonucleotide
gaauuaccugaccgaugca

SEQ ID NO: 418847 - RNA, 19 nt, Artificial Sequence
  Description of Artificial Sequence: Synthetic oligonucleotide
ugcauccgcugcagcaugu

SEQ ID NO: 418848 - RNA, 19 nt, Artificial Sequence
  Description of Artificial Sequence: Synthetic oligonucleotide
gacggcuaaacuaaacaau

SEQ ID NO: 418849 - RNA, 19 nt, Artificial Sequence
  Description of Artificial Sequence: Synthetic oligonucleotide
ugaccgaugcaagccuggc

SEQ ID NO: 418850 - RNA, 19 nt, Artificial Sequence
  Description of Artificial Sequence: Synthetic oligonucleotide
cuguugugcaagaaauucu

SEQ ID NO: 418851 - RNA, 19 nt, Artificial Sequence
  Description of Artificial Sequence: Synthetic oligonucleotide
gaacgucauugagaacuug

SEQ ID NO: 418852 - RNA, 19 nt, Artificial Sequence
  Description of Artificial Sequence: Synthetic oligonucleotide
ucggcgccaucgaauuccc

SEQ ID NO: 418853 - RNA, 19 nt, Artificial Sequence
  Description of Artificial Sequence: Synthetic oligonucleotide
ggagcacuggguaaauuac

SEQ ID NO: 418854 - RNA, 19 nt, Artificial Sequence
  Description of Artificial Sequence: Synthetic oligonucleotide
ggcuaaauaugcccuuuuc

SEQ ID NO: 418855 - RNA, 19 nt, Artificial Sequence
  Description of Artificial Sequence: Synthetic oligonucleotide
uugcugaucggaggagaca

SEQ ID NO: 418856 - RNA, 19 nt, Artificial Sequence
  Description of Artificial Sequence: Synthetic oligonucleotide
agggacugcugacuucaga

SEQ ID NO: 418857 - RNA, 19 nt, Artificial Sequence
  Description of Artificial Sequence: Synthetic oligonucleotide
accuccaguuuuauuaaaa

SEQ ID NO: 418858 - RNA, 19 nt, Artificial Sequence
  Description of Artificial Sequence: Synthetic oligonucleotide
cuuuuaugacuggggccag

SEQ ID NO: 418859 - RNA, 19 nt, Artificial Sequence
  Description of Artificial Sequence: Synthetic oligonucleotide
uacugacguaucucuuaaa

SEQ ID NO: 418860 - RNA, 19 nt, Artificial Sequence
  Description of Artificial Sequence: Synthetic oligonucleotide
agaucucgccacaucuuug

SEQ ID NO: 418861 - RNA, 19 nt, Artificial Sequence
  Description of Artificial Sequence: Synthetic oligonucleotide
cagacacccuuucuagcuc

SEQ ID NO: 418862 - RNA, 19 nt, Artificial Sequence
  Description of Artificial Sequence: Synthetic oligonucleotide
acguaucucuuaaacucgu

SEQ ID NO: 418863 - RNA, 19 nt, Artificial Sequence
  Description of Artificial Sequence: Synthetic oligonucleotide
ggcgccaucgaauucccga

SEQ ID NO: 418864 - RNA, 19 nt, Artificial Sequence
  Description of Artificial Sequence: Synthetic oligonucleotide
ucgucacacucuuggguua

SEQ ID NO: 418865 - RNA, 19 nt, Artificial Sequence
  Description of Artificial Sequence: Synthetic oligonucleotide
gguuuacuuccaaucacca

SEQ ID NO: 418866 - RNA, 19 nt, Artificial Sequence
  Description of Artificial Sequence: Synthetic oligonucleotide
cucgagaucucgccacauc

SEQ ID NO: 418867 - RNA, 19 nt, Artificial Sequence
  Description of Artificial Sequence: Synthetic oligonucleotide
ucccauaacucaggacaac

SEQ ID NO: 418868 - RNA, 19 nt, Artificial Sequence
  Description of Artificial Sequence: Synthetic oligonucleotide
caugagucugcuguagaaa

SEQ ID NO: 418869 - RNA, 19 nt, Artificial Sequence
  Description of Artificial Sequence: Synthetic oligonucleotide
ggcuauuuaagcauccgcu

SEQ ID NO: 418870 - RNA, 19 nt, Artificial Sequence
  Description of Artificial Sequence: Synthetic oligonucleotide
cccggaguuucuuaccaag

SEQ ID NO: 418871 - RNA, 19 nt, Artificial Sequence
  Description of Artificial Sequence: Synthetic oligonucleotide
cgagucuagaaagcgaaag

SEQ ID NO: 418872 - RNA, 19 nt, Artificial Sequence
  Description of Artificial Sequence: Synthetic oligonucleotide
gucacaugaggagaacaaa

SEQ ID NO: 418873 - RNA, 19 nt, Artificial Sequence
  Description of Artificial Sequence: Synthetic oligonucleotide
aaccucggcgccaucgaau

SEQ ID NO: 418874 - RNA, 19 nt, Artificial Sequence
  Description of Artificial Sequence: Synthetic oligonucleotide
uccguuuggcugucugcuc

SEQ ID NO: 418875 - RNA, 19 nt, Artificial Sequence
  Description of Artificial Sequence: Synthetic oligonucleotide
cggcuaaacuaaacaaugc

SEQ ID NO: 418876 - RNA, 19 nt, Artificial Sequence
  Description of Artificial Sequence: Synthetic oligonucleotide
gcaugucgcauacuuuuca

SEQ ID NO: 418877 - RNA, 19 nt, Artificial Sequence
  Description of Artificial Sequence: Synthetic oligonucleotide
aucuccguguuuauuucau

SEQ ID NO: 418878 - RNA, 19 nt, Artificial Sequence
  Description of Artificial Sequence: Synthetic oligonucleotide
ugcuucauauuuggaccau

SEQ ID NO: 418879 - RNA, 19 nt, Artificial Sequence
  Description of Artificial Sequence: Synthetic oligonucleotide
ucccggaguuucuuaccaa

SEQ ID NO: 418880 - RNA, 19 nt, Artificial Sequence
  Description of Artificial Sequence: Synthetic oligonucleotide
gcgccaucgaauucccgag

SEQ ID NO: 418881 - RNA, 19 nt, Artificial Sequence
  Description of Artificial Sequence: Synthetic oligonucleotide
guuuccugacguugcuuaa

SEQ ID NO: 418882 - RNA, 19 nt, Artificial Sequence
  Description of Artificial Sequence: Synthetic oligonucleotide
gacguugcuuaagcaguuc

SEQ ID NO: 418883 - RNA, 19 nt, Artificial Sequence
  Description of Artificial Sequence: Synthetic oligonucleotide
ggagcccucgcacuuccug

SEQ ID NO: 418884 - RNA, 19 nt, Artificial Sequence
  Description of Artificial Sequence: Synthetic oligonucleotide
acgucauugagaacuugua

SEQ ID NO: 418885 - RNA, 19 nt, Artificial Sequence
  Description of Artificial Sequence: Synthetic oligonucleotide
cagucgcucgacgaagcug

SEQ ID NO: 418886 - RNA, 19 nt, Artificial Sequence
  Description of Artificial Sequence: Synthetic oligonucleotide
acgggcuaaauaugcccuu

SEQ ID NO: 418887 - RNA, 19 nt, Artificial Sequence
  Description of Artificial Sequence: Synthetic oligonucleotide
guacucaugucuguggcau

SEQ ID NO: 418888 - RNA, 19 nt, Artificial Sequence
  Description of Artificial Sequence: Synthetic oligonucleotide
agaacgucauugagaacuu

SEQ ID NO: 418889 - RNA, 19 nt, Artificial Sequence
  Description of Artificial Sequence: Synthetic oligonucleotide
uuggaccgauugcuuucaa

SEQ ID NO: 418890 - RNA, 19 nt, Artificial Sequence
  Description of Artificial Sequence: Synthetic oligonucleotide
cuucaaaaccucggcgcca

SEQ ID NO: 418891 - RNA, 19 nt, Artificial Sequence
  Description of Artificial Sequence: Synthetic oligonucleotide
gguaaauuacagguuuacu

SEQ ID NO: 418892 - RNA, 19 nt, Artificial Sequence
  Description of Artificial Sequence: Synthetic oligonucleotide
agcuaucauacugggcuuu

SEQ ID NO: 418893 - RNA, 19 nt, Artificial Sequence
  Description of Artificial Sequence: Synthetic oligonucleotide
uacucaugucuguggcauu

SEQ ID NO: 418894 - RNA, 19 nt, Artificial Sequence
  Description of Artificial Sequence: Synthetic oligonucleotide
acccagauacacccuucuu

SEQ ID NO: 418895 - RNA, 19 nt, Artificial Sequence
  Description of Artificial Sequence: Synthetic oligonucleotide
ucgccacaucuuugcuugc

SEQ ID NO: 418896 - RNA, 19 nt, Artificial Sequence
  Description of Artificial Sequence: Synthetic oligonucleotide
cuuuaggagggacgagucu

SEQ ID NO: 418897 - RNA, 19 nt, Artificial Sequence
  Description of Artificial Sequence: Synthetic oligonucleotide
gaccgaauucagccuuaaa

SEQ ID NO: 418898 - RNA, 19 nt, Artificial Sequence
  Description of Artificial Sequence: Synthetic oligonucleotide
cucuuaaacucgucucccu

SEQ ID NO: 418899 - RNA, 19 nt, Artificial Sequence
  Description of Artificial Sequence: Synthetic oligonucleotide
guacccagauacacccuuc

SEQ ID NO: 418900 - RNA, 19 nt, Artificial Sequence
  Description of Artificial Sequence: Synthetic oligonucleotide
ccaugacuuucucguacag

SEQ ID NO: 418901 - RNA, 19 nt, Artificial Sequence
  Description of Artificial Sequence: Synthetic oligonucleotide
ugucggccacaguuucauc

SEQ ID NO: 418902 - RNA, 19 nt, Artificial Sequence
  Description of Artificial Sequence: Synthetic oligonucleotide
gagcccucgcacuuccugu

SEQ ID NO: 418903 - RNA, 19 nt, Artificial Sequence
  Description of Artificial Sequence: Synthetic oligonucleotide
gaccgaugcaagccuggcu

SEQ ID NO: 418904 - RNA, 19 nt, Artificial Sequence
  Description of Artificial Sequence: Synthetic oligonucleotide
ggacgagucuagaaagcga

SEQ ID NO: 418905 - RNA, 19 nt, Artificial Sequence
  Description of Artificial Sequence: Synthetic oligonucleotide
aggaugacacggggcucag

SEQ ID NO: 418906 - RNA, 19 nt, Artificial Sequence
  Description of Artificial Sequence: Synthetic oligonucleotide
cagugaccauauaugaauu

SEQ ID NO: 418907 - RNA, 19 nt, Artificial Sequence
  Description of Artificial Sequence: Synthetic oligonucleotide
cucagagcaccagccgguc

SEQ ID NO: 418908 - RNA, 19 nt, Artificial Sequence
  Description of Artificial Sequence: Synthetic oligonucleotide
guacucuugcuucgaaguu

SEQ ID NO: 418909 - RNA, 19 nt, Artificial Sequence
  Description of Artificial Sequence: Synthetic oligonucleotide
ucgcucgacgaagcugaac

SEQ ID NO: 418910 - RNA, 19 nt, Artificial Sequence
  Description of Artificial Sequence: Synthetic oligonucleotide
agaccgaauucagccuuaa

SEQ ID NO: 418911 - RNA, 19 nt, Artificial Sequence
  Description of Artificial Sequence: Synthetic oligonucleotide
gcgugaaacagcugauucu

SEQ ID NO: 418912 - RNA, 19 nt, Artificial Sequence
  Description of Artificial Sequence: Synthetic oligonucleotide
acgagucuagaaagcgaaa

SEQ ID NO: 418913 - RNA, 19 nt, Artificial Sequence
  Description of Artificial Sequence: Synthetic oligonucleotide
acuuucucguacagccuuu

SEQ ID NO: 418914 - RNA, 19 nt, Artificial Sequence
  Description of Artificial Sequence: Synthetic oligonucleotide
caauuggcucauuucucau

SEQ ID NO: 418915 - RNA, 19 nt, Artificial Sequence
  Description of Artificial Sequence: Synthetic oligonucleotide
caagcucuagaaggucaga

SEQ ID NO: 418916 - RNA, 19 nt, Artificial Sequence
  Description of Artificial Sequence: Synthetic oligonucleotide
caccuccaguuuuauuaaa

SEQ ID NO: 418917 - RNA, 19 nt, Artificial Sequence
  Description of Artificial Sequence: Synthetic oligonucleotide
ccacucgacggcuaaacua

SEQ ID NO: 418918 - RNA, 19 nt, Artificial Sequence
  Description of Artificial Sequence: Synthetic oligonucleotide
guucgcaguugauguugaa

SEQ ID NO: 418919 - RNA, 19 nt, Artificial Sequence
  Description of Artificial Sequence: Synthetic oligonucleotide
gagaccgaauucagccuua

SEQ ID NO: 418920 - RNA, 19 nt, Artificial Sequence
  Description of Artificial Sequence: Synthetic oligonucleotide
agccuuaaauucagcuauu

SEQ ID NO: 418921 - RNA, 19 nt, Artificial Sequence
  Description of Artificial Sequence: Synthetic oligonucleotide
cgacggcuaaacuaaacaa

SEQ ID NO: 418922 - RNA, 19 nt, Artificial Sequence
  Description of Artificial Sequence: Synthetic oligonucleotide
gcuaucauacugggcuuuc

SEQ ID NO: 418923 - RNA, 19 nt, Artificial Sequence
  Description of Artificial Sequence: Synthetic oligonucleotide
ccgauugcuuucaaggccu

SEQ ID NO: 418924 - RNA, 19 nt, Artificial Sequence
  Description of Artificial Sequence: Synthetic oligonucleotide
guuuacugacguaucucuu

SEQ ID NO: 418925 - RNA, 19 nt, Artificial Sequence
  Description of Artificial Sequence: Synthetic oligonucleotide
gguucgcaguugauguuga

SEQ ID NO: 418926 - RNA, 19 nt, Artificial Sequence
  Description of Artificial Sequence: Synthetic oligonucleotide
cgucauugagaacuuguaa

SEQ ID NO: 418927 - RNA, 19 nt, Artificial Sequence
  Description of Artificial Sequence: Synthetic oligonucleotide
gacaaccacucgacggcua

SEQ ID NO: 418928 - RNA, 19 nt, Artificial Sequence
  Description of Artificial Sequence: Synthetic oligonucleotide
ggucgaucucagccagaac

SEQ ID NO: 418929 - RNA, 19 nt, Artificial Sequence
  Description of Artificial Sequence: Synthetic oligonucleotide
gggucgaucucagccagaa

SEQ ID NO: 418930 - RNA, 19 nt, Artificial Sequence
  Description of Artificial Sequence: Synthetic oligonucleotide
gcaggguuuuaaaggcuuc

SEQ ID NO: 418931 - RNA, 19 nt, Artificial Sequence
  Description of Artificial Sequence: Synthetic oligonucleotide
cucucuagguuggcuaacu

SEQ ID NO: 418932 - RNA, 19 nt, Artificial Sequence
  Description of Artificial Sequence: Synthetic oligonucleotide
ggguuaguuccugacauuu

SEQ ID NO: 418933 - RNA, 19 nt, Artificial Sequence
  Description of Artificial Sequence: Synthetic oligonucleotide
cuguucuaauuuggaccga

SEQ ID NO: 418934 - RNA, 19 nt, Artificial Sequence
  Description of Artificial Sequence: Synthetic oligonucleotide
acucgacggcuaaacuaaa

SEQ ID NO: 418935 - RNA, 19 nt, Artificial Sequence
  Description of Artificial Sequence: Synthetic oligonucleotide
ccagaacgucauugagaac

SEQ ID NO: 418936 - RNA, 19 nt, Artificial Sequence
  Description of Artificial Sequence: Synthetic oligonucleotide
cuccgcccuccugaauuac

SEQ ID NO: 418937 - RNA, 19 nt, Artificial Sequence
  Description of Artificial Sequence: Synthetic oligonucleotide
cagcuauuaucugaugcuu

SEQ ID NO: 418938 - RNA, 19 nt, Artificial Sequence
  Description of Artificial Sequence: Synthetic oligonucleotide
ggaccaugacuuucucgua

SEQ ID NO: 418939 - RNA, 19 nt, Artificial Sequence
  Description of Artificial Sequence: Synthetic oligonucleotide
gugucggccacaguuucau

SEQ ID NO: 418940 - RNA, 19 nt, Artificial Sequence
  Description of Artificial Sequence: Synthetic oligonucleotide
cgcucgacgaagcugaacu

SEQ ID NO: 418941 - RNA, 19 nt, Artificial Sequence
  Description of Artificial Sequence: Synthetic oligonucleotide
ccugacgaaagguacucau

SEQ ID NO: 418942 - RNA, 19 nt, Artificial Sequence
  Description of Artificial Sequence: Synthetic oligonucleotide
cacggggcucagagcacca

SEQ ID NO: 418943 - RNA, 19 nt, Artificial Sequence
  Description of Artificial Sequence: Synthetic oligonucleotide
cugauugaucuccguguuu

SEQ ID NO: 418944 - RNA, 19 nt, Artificial Sequence
  Description of Artificial Sequence: Synthetic oligonucleotide
cuguacccagauacacccu

SEQ ID NO: 418945 - RNA, 19 nt, Artificial Sequence
  Description of Artificial Sequence: Synthetic oligonucleotide
ggugucggccacaguuuca

SEQ ID NO: 418946 - RNA, 19 nt, Artificial Sequence
  Description of Artificial Sequence: Synthetic oligonucleotide
cagcuaucauacugggcuu

SEQ ID NO: 418947 - RNA, 19 nt, Artificial Sequence
  Description of Artificial Sequence: Synthetic oligonucleotide
ccugaauuaccugaccgau

SEQ ID NO: 418948 - RNA, 19 nt, Artificial Sequence
  Description of Artificial Sequence: Synthetic oligonucleotide
cacauucuuuaugcagggu

SEQ ID NO: 418949 - RNA, 19 nt, Artificial Sequence
  Description of Artificial Sequence: Synthetic oligonucleotide
caaccacucgacggcuaaa

SEQ ID NO: 418950 - RNA, 19 nt, Artificial Sequence
  Description of Artificial Sequence: Synthetic oligonucleotide
cuuucucguacagccuuuu

SEQ ID NO: 418951 - RNA, 19 nt, Artificial Sequence
  Description of Artificial Sequence: Synthetic oligonucleotide
gggcuaaauaugcccuuuu

SEQ ID NO: 418952 - RNA, 19 nt, Artificial Sequence
  Description of Artificial Sequence: Synthetic oligonucleotide
ccguuuggcugucugcucu

SEQ ID NO: 418953 - RNA, 19 nt, Artificial Sequence
  Description of Artificial Sequence: Synthetic oligonucleotide
ggcuaacuucuccuugguu

SEQ ID NO: 418954 - RNA, 19 nt, Artificial Sequence
  Description of Artificial Sequence: Synthetic oligonucleotide
cgaugcaagccuggcuuug

SEQ ID NO: 418955 - RNA, 19 nt, Artificial Sequence
  Description of Artificial Sequence: Synthetic oligonucleotide
ccaucgaauucccgagucu

SEQ ID NO: 418956 - RNA, 19 nt, Artificial Sequence
  Description of Artificial Sequence: Synthetic oligonucleotide
gacacccuuucuagcucuu

SEQ ID NO: 418957 - RNA, 19 nt, Artificial Sequence
  Description of Artificial Sequence: Synthetic oligonucleotide
gcacugcgugaaacagcug

SEQ ID NO: 418958 - RNA, 19 nt, Artificial Sequence
  Description of Artificial Sequence: Synthetic oligonucleotide
gcucgacgaagcugaacuu

SEQ ID NO: 418959 - RNA, 19 nt, Artificial Sequence
  Description of Artificial Sequence: Synthetic oligonucleotide
ccucggcgccaucgaauuc

SEQ ID NO: 418960 - RNA, 19 nt, Artificial Sequence
  Description of Artificial Sequence: Synthetic oligonucleotide
gucgcucgacgaagcugaa

SEQ ID NO: 418961 - RNA, 19 nt, Artificial Sequence
  Description of Artificial Sequence: Synthetic oligonucleotide
gcauacuuuucagcugguu

SEQ ID NO: 418962 - RNA, 19 nt, Artificial Sequence
  Description of Artificial Sequence: Synthetic oligonucleotide
cccugacgaaagguacuca

SEQ ID NO: 418963 - RNA, 19 nt, Artificial Sequence
  Description of Artificial Sequence: Synthetic oligonucleotide
gcugaucggaggagacaua

SEQ ID NO: 418964 - RNA, 19 nt, Artificial Sequence
  Description of Artificial Sequence: Synthetic oligonucleotide
cccgaagcugucuggcuau

SEQ ID NO: 418965 - RNA, 19 nt, Artificial Sequence
  Description of Artificial Sequence: Synthetic oligonucleotide
ggcccauagcuggcucaga

SEQ ID NO: 418966 - RNA, 19 nt, Artificial Sequence
  Description of Artificial Sequence: Synthetic oligonucleotide
ccucacucuugagggcaga

SEQ ID NO: 418967 - RNA, 19 nt, Artificial Sequence
  Description of Artificial Sequence: Synthetic oligonucleotide
gcucgagaucucgccacau

SEQ ID NO: 418968 - RNA, 19 nt, Artificial Sequence
  Description of Artificial Sequence: Synthetic oligonucleotide
caucuugcuuggggucgau

SEQ ID NO: 418969 - RNA, 19 nt, Artificial Sequence
  Description of Artificial Sequence: Synthetic oligonucleotide
ccgaugcaagccuggcuuu

SEQ ID NO: 418970 - RNA, 19 nt, Artificial Sequence
  Description of Artificial Sequence: Synthetic oligonucleotide
cgccaucgaauucccgagu

SEQ ID NO: 418971 - RNA, 19 nt, Artificial Sequence
  Description of Artificial Sequence: Synthetic oligonucleotide
cgggcuaaauaugcccuuu

SEQ ID NO: 418972 - RNA, 19 nt, Artificial Sequence
  Description of Artificial Sequence: Synthetic oligonucleotide
agucaaaacauucugaaac

SEQ ID NO: 418973 - RNA, 19 nt, Artificial Sequence
  Description of Artificial Sequence: Synthetic oligonucleotide
aacuguuaaagucauguac

SEQ ID NO: 418974 - RNA, 19 nt, Artificial Sequence
  Description of Artificial Sequence: Synthetic oligonucleotide
aagaucuacaugucuaucc

SEQ ID NO: 418975 - RNA, 19 nt, Artificial Sequence
  Description of Artificial Sequence: Synthetic oligonucleotide
aguaauaccguuuacauga

SEQ ID NO: 418976 - RNA, 19 nt, Artificial Sequence
  Description of Artificial Sequence: Synthetic oligonucleotide
uuuacuucuaaucuaaaca

SEQ ID NO: 418977 - RNA, 19 nt, Artificial Sequence
  Description of Artificial Sequence: Synthetic oligonucleotide
aaauggagcaauaaagucc

SEQ ID NO: 418978 - RNA, 19 nt, Artificial Sequence
  Description of Artificial Sequence: Synthetic oligonucleotide
aacaugcauauucagaggg

SEQ ID NO: 418979 - RNA, 19 nt, Artificial Sequence
  Description of Artificial Sequence: Synthetic oligonucleotide
aauuaaagaacauguaacu

SEQ ID NO: 418980 - RNA, 19 nt, Artificial Sequence
  Description of Artificial Sequence: Synthetic oligonucleotide
auaaauugagcuuucauca

SEQ ID NO: 418981 - RNA, 19 nt, Artificial Sequence
  Description of Artificial Sequence: Synthetic oligonucleotide
uuuagcacauuuaauaaug

SEQ ID NO: 418982 - RNA, 19 nt, Artificial Sequence
  Description of Artificial Sequence: Synthetic oligonucleotide
aucaguauccaauccaucc

SEQ ID NO: 418983 - RNA, 19 nt, Artificial Sequence
  Description of Artificial Sequence: Synthetic oligonucleotide
cugacaagcaguaauaccg

SEQ ID NO: 418984 - RNA, 19 nt, Artificial Sequence
  Description of Artificial Sequence: Synthetic oligonucleotide
aauuauuacuuuaagacca

SEQ ID NO: 418985 - RNA, 19 nt, Artificial Sequence
  Description of Artificial Sequence: Synthetic oligonucleotide
aaucuaaacaaacaugagu

SEQ ID NO: 418986 - RNA, 19 nt, Artificial Sequence
  Description of Artificial Sequence: Synthetic oligonucleotide
aauauguagucacauagca

SEQ ID NO: 418987 - RNA, 19 nt, Artificial Sequence
  Description of Artificial Sequence: Synthetic oligonucleotide
auaaugacuauuuauauaa

SEQ ID NO: 418988 - RNA, 19 nt, Artificial Sequence
  Description of Artificial Sequence: Synthetic oligonucleotide
aauaaaguccaguaagucu

SEQ ID NO: 418989 - RNA, 19 nt, Artificial Sequence
  Description of Artificial Sequence: Synthetic oligonucleotide
uauagaacuguuaaaguca

SEQ ID NO: 418990 - RNA, 19 nt, Artificial Sequence
  Description of Artificial Sequence: Synthetic oligonucleotide
cuauaaucgagacacaugc

SEQ ID NO: 418991 - RNA, 19 nt, Artificial Sequence
  Description of Artificial Sequence: Synthetic oligonucleotide
ucuuguaucagcauucacc

SEQ ID NO: 418992 - RNA, 19 nt, Artificial Sequence
  Description of Artificial Sequence: Synthetic oligonucleotide
aaaguugucuacuuggugu

SEQ ID NO: 418993 - RNA, 19 nt, Artificial Sequence
  Description of Artificial Sequence: Synthetic oligonucleotide
aauugcccgaugcaggucc

SEQ ID NO: 418994 - RNA, 19 nt, Artificial Sequence
  Description of Artificial Sequence: Synthetic oligonucleotide
auaaucgagacacaugcac

SEQ ID NO: 418995 - RNA, 19 nt, Artificial Sequence
  Description of Artificial Sequence: Synthetic oligonucleotide
cuauaaauaugauggaagg

SEQ ID NO: 418996 - RNA, 19 nt, Artificial Sequence
  Description of Artificial Sequence: Synthetic oligonucleotide
auauaaacuaucauuuugc

SEQ ID NO: 418997 - RNA, 19 nt, Artificial Sequence
  Description of Artificial Sequence: Synthetic oligonucleotide
ucgauauuuacauugauau

SEQ ID NO: 418998 - RNA, 19 nt, Artificial Sequence
  Description of Artificial Sequence: Synthetic oligonucleotide
aaaccugcuauaucacucc

SEQ ID NO: 418999 - RNA, 19 nt, Artificial Sequence
  Description of Artificial Sequence: Synthetic oligonucleotide
uugauauacacucacacau

SEQ ID NO: 419000 - RNA, 19 nt, Artificial Sequence
  Description of Artificial Sequence: Synthetic oligonucleotide
accaccaaagcacaaaugg

SEQ ID NO: 419001 - RNA, 19 nt, Artificial Sequence
  Description of Artificial Sequence: Synthetic oligonucleotide
auucaauccaucuuaaugu

SEQ ID NO: 419002 - RNA, 19 nt, Artificial Sequence
  Description of Artificial Sequence: Synthetic oligonucleotide
uuuuggacuccauaguugg

SEQ ID NO: 419003 - RNA, 19 nt, Artificial Sequence
  Description of Artificial Sequence: Synthetic oligonucleotide
augucgagaaaccagcacc

SEQ ID NO: 419004 - RNA, 19 nt, Artificial Sequence
  Description of Artificial Sequence: Synthetic oligonucleotide
aacuugaacgguuucguag

SEQ ID NO: 419005 - RNA, 19 nt, Artificial Sequence
  Description of Artificial Sequence: Synthetic oligonucleotide
cauggucagaacuugaacg

SEQ ID NO: 419006 - RNA, 19 nt, Artificial Sequence
  Description of Artificial Sequence: Synthetic oligonucleotide
cucuauaaggcuauaacag

SEQ ID NO: 419007 - RNA, 19 nt, Artificial Sequence
  Description of Artificial Sequence: Synthetic oligonucleotide
cuaaucuaaacaaacauga

SEQ ID NO: 419008 - RNA, 19 nt, Artificial Sequence
  Description of Artificial Sequence: Synthetic oligonucleotide
ucacauagcaucaagugac

SEQ ID NO: 419009 - RNA, 19 nt, Artificial Sequence
  Description of Artificial Sequence: Synthetic oligonucleotide
aggaucaaggacuaagugg

SEQ ID NO: 419010 - RNA, 19 nt, Artificial Sequence
  Description of Artificial Sequence: Synthetic oligonucleotide
ugucagagcauaaugaggu

SEQ ID NO: 419011 - RNA, 19 nt, Artificial Sequence
  Description of Artificial Sequence: Synthetic oligonucleotide
uuauagaacuguuaaaguc

SEQ ID NO: 419012 - RNA, 19 nt, Artificial Sequence
  Description of Artificial Sequence: Synthetic oligonucleotide
aauaccguuuacaugacag

SEQ ID NO: 419013 - RNA, 19 nt, Artificial Sequence
  Description of Artificial Sequence: Synthetic oligonucleotide
auaccagagaaaguaaucc

SEQ ID NO: 419014 - RNA, 19 nt, Artificial Sequence
  Description of Artificial Sequence: Synthetic oligonucleotide
uauagcugagucaaggucu

SEQ ID NO: 419015 - RNA, 19 nt, Artificial Sequence
  Description of Artificial Sequence: Synthetic oligonucleotide
aauuuaaguuacaaaauga

SEQ ID NO: 419016 - RNA, 19 nt, Artificial Sequence
  Description of Artificial Sequence: Synthetic oligonucleotide
gauaugaaaccuuguaggc

SEQ ID NO: 419017 - RNA, 19 nt, Artificial Sequence
  Description of Artificial Sequence: Synthetic oligonucleotide
auaguuauagaacuguuaa

SEQ ID NO: 419018 - RNA, 19 nt, Artificial Sequence
  Description of Artificial Sequence: Synthetic oligonucleotide
aucuaaaccugcuauauca

SEQ ID NO: 419019 - RNA, 19 nt, Artificial Sequence
  Description of Artificial Sequence: Synthetic oligonucleotide
aaggccacgauuuaaagua

SEQ ID NO: 419020 - RNA, 19 nt, Artificial Sequence
  Description of Artificial Sequence: Synthetic oligonucleotide
agguuaauaaaucgacagc

SEQ ID NO: 419021 - RNA, 19 nt, Artificial Sequence
  Description of Artificial Sequence: Synthetic oligonucleotide
gaaaccagcaccuaaccac

SEQ ID NO: 419022 - RNA, 19 nt, Artificial Sequence
  Description of Artificial Sequence: Synthetic oligonucleotide
cauaaugaggugaaauugc

SEQ ID NO: 419023 - RNA, 19 nt, Artificial Sequence
  Description of Artificial Sequence: Synthetic oligonucleotide
cagacuaucuaucuggugc

SEQ ID NO: 419024 - RNA, 19 nt, Artificial Sequence
  Description of Artificial Sequence: Synthetic oligonucleotide
uacuuuaagaccagcuuag

SEQ ID NO: 419025 - RNA, 19 nt, Artificial Sequence
  Description of Artificial Sequence: Synthetic oligonucleotide
uuaagaccagcuuagacuc

SEQ ID NO: 419026 - RNA, 19 nt, Artificial Sequence
  Description of Artificial Sequence: Synthetic oligonucleotide
ucuauaaggcuauaacagc

SEQ ID NO: 419027 - RNA, 19 nt, Artificial Sequence
  Description of Artificial Sequence: Synthetic oligonucleotide
ugacuauuuauauaaacua

SEQ ID NO: 419028 - RNA, 19 nt, Artificial Sequence
  Description of Artificial Sequence: Synthetic oligonucleotide
ugcuauaucacuccaagua

SEQ ID NO: 419029 - RNA, 19 nt, Artificial Sequence
  Description of Artificial Sequence: Synthetic oligonucleotide
auuuuguuagccuaggcau

SEQ ID NO: 419030 - RNA, 19 nt, Artificial Sequence
  Description of Artificial Sequence: Synthetic oligonucleotide
uuuguuaucugauuccccu

SEQ ID NO: 419031 - RNA, 19 nt, Artificial Sequence
  Description of Artificial Sequence: Synthetic oligonucleotide
uagaucuugguuaugcuac

SEQ ID NO: 419032 - RNA, 19 nt, Artificial Sequence
  Description of Artificial Sequence: Synthetic oligonucleotide
aguaagucuugugagacac

SEQ ID NO: 419033 - RNA, 19 nt, Artificial Sequence
  Description of Artificial Sequence: Synthetic oligonucleotide
aauaccagagaaaguaauc

SEQ ID NO: 419034 - RNA, 19 nt, Artificial Sequence
  Description of Artificial Sequence: Synthetic oligonucleotide
uaaacaacauuugaggaac

SEQ ID NO: 419035 - RNA, 19 nt, Artificial Sequence
  Description of Artificial Sequence: Synthetic oligonucleotide
caagugacaacuaggaaug

SEQ ID NO: 419036 - RNA, 19 nt, Artificial Sequence
  Description of Artificial Sequence: Synthetic oligonucleotide
uaacuucuaaacaacauuu

SEQ ID NO: 419037 - RNA, 19 nt, Artificial Sequence
  Description of Artificial Sequence: Synthetic oligonucleotide
uccaauccaucccagaggc

SEQ ID NO: 419038 - RNA, 19 nt, Artificial Sequence
  Description of Artificial Sequence: Synthetic oligonucleotide
uaaaucgacagccugcuuc

SEQ ID NO: 419039 - RNA, 19 nt, Artificial Sequence
  Description of Artificial Sequence: Synthetic oligonucleotide
aaggauucaauccaucuua

SEQ ID NO: 419040 - RNA, 19 nt, Artificial Sequence
  Description of Artificial Sequence: Synthetic oligonucleotide
uauagcaagggagaaaaca

SEQ ID NO: 419041 - RNA, 19 nt, Artificial Sequence
  Description of Artificial Sequence: Synthetic oligonucleotide
uaucagucagugucgaagg

SEQ ID NO: 419042 - RNA, 19 nt, Artificial Sequence
  Description of Artificial Sequence: Synthetic oligonucleotide
aauggagcaauaaagucca

SEQ ID NO: 419043 - RNA, 19 nt, Artificial Sequence
  Description of Artificial Sequence: Synthetic oligonucleotide
uuaucagucagugucgaag

SEQ ID NO: 419044 - RNA, 19 nt, Artificial Sequence
  Description of Artificial Sequence: Synthetic oligonucleotide
aauugacauacucccugac

SEQ ID NO: 419045 - RNA, 19 nt, Artificial Sequence
  Description of Artificial Sequence: Synthetic oligonucleotide
acucuauaaggcuauaaca

SEQ ID NO: 419046 - RNA, 19 nt, Artificial Sequence
  Description of Artificial Sequence: Synthetic oligonucleotide
auggucagaacuugaacgg

SEQ ID NO: 419047 - RNA, 19 nt, Artificial Sequence
  Description of Artificial Sequence: Synthetic oligonucleotide
uauaacagcauauggcuaa

SEQ ID NO: 419048 - RNA, 19 nt, Artificial Sequence
  Description of Artificial Sequence: Synthetic oligonucleotide
uugucuuagaucuugguua

SEQ ID NO: 419049 - RNA, 19 nt, Artificial Sequence
  Description of Artificial Sequence: Synthetic oligonucleotide
uucacaaucuugcaugacu

SEQ ID NO: 419050 - RNA, 19 nt, Artificial Sequence
  Description of Artificial Sequence: Synthetic oligonucleotide
guaugaaaaucucaacugc

SEQ ID NO: 419051 - RNA, 19 nt, Artificial Sequence
  Description of Artificial Sequence: Synthetic oligonucleotide
gguucauucaaucaacugc

SEQ ID NO: 419052 - RNA, 19 nt, Artificial Sequence
  Description of Artificial Sequence: Synthetic oligonucleotide
cauugauauacacucacac

SEQ ID NO: 419053 - RNA, 19 nt, Artificial Sequence
  Description of Artificial Sequence: Synthetic oligonucleotide
acauguaacuucuaaacaa

SEQ ID NO: 419054 - RNA, 19 nt, Artificial Sequence
  Description of Artificial Sequence: Synthetic oligonucleotide
aggucaaacaagcacccac

SEQ ID NO: 419055 - RNA, 19 nt, Artificial Sequence
  Description of Artificial Sequence: Synthetic oligonucleotide
aucuaaacuaugcugagaa

SEQ ID NO: 419056 - RNA, 19 nt, Artificial Sequence
  Description of Artificial Sequence: Synthetic oligonucleotide
uaugaucaguauccaaucc

SEQ ID NO: 419057 - RNA, 19 nt, Artificial Sequence
  Description of Artificial Sequence: Synthetic oligonucleotide
uaugaaaccuuguaggcau

SEQ ID NO: 419058 - RNA, 19 nt, Artificial Sequence
  Description of Artificial Sequence: Synthetic oligonucleotide
uacaugucuauccacauuu

SEQ ID NO: 419059 - RNA, 19 nt, Artificial Sequence
  Description of Artificial Sequence: Synthetic oligonucleotide
aacgguuucguagaaagga

SEQ ID NO: 419060 - RNA, 19 nt, Artificial Sequence
  Description of Artificial Sequence: Synthetic oligonucleotide
uuucacguucuucacacca

SEQ ID NO: 419061 - RNA, 19 nt, Artificial Sequence
  Description of Artificial Sequence: Synthetic oligonucleotide
gauagguaaaaugacugug

SEQ ID NO: 419062 - RNA, 19 nt, Artificial Sequence
  Description of Artificial Sequence: Synthetic oligonucleotide
uauaucacuccaaguaaca

SEQ ID NO: 419063 - RNA, 19 nt, Artificial Sequence
  Description of Artificial Sequence: Synthetic oligonucleotide
ucuuagaucuugguuaugc

SEQ ID NO: 419064 - RNA, 19 nt, Artificial Sequence
  Description of Artificial Sequence: Synthetic oligonucleotide
auuaacguuuucccacagc

SEQ ID NO: 419065 - RNA, 19 nt, Artificial Sequence
  Description of Artificial Sequence: Synthetic oligonucleotide
aaaggccacgauuuaaagu

SEQ ID NO: 419066 - RNA, 19 nt, Artificial Sequence
  Description of Artificial Sequence: Synthetic oligonucleotide
ucacaugucgagaaaccag

SEQ ID NO: 419067 - RNA, 19 nt, Artificial Sequence
  Description of Artificial Sequence: Synthetic oligonucleotide
cagcuuagacucuauaagg

SEQ ID NO: 419068 - RNA, 19 nt, Artificial Sequence
  Description of Artificial Sequence: Synthetic oligonucleotide
aauugcugaugacugagaa

SEQ ID NO: 419069 - RNA, 19 nt, Artificial Sequence
  Description of Artificial Sequence: Synthetic oligonucleotide
aaacaagugacaacuagga

SEQ ID NO: 419070 - RNA, 19 nt, Artificial Sequence
  Description of Artificial Sequence: Synthetic oligonucleotide
aauaaaucgacagccugcu

SEQ ID NO: 419071 - RNA, 19 nt, Artificial Sequence
  Description of Artificial Sequence: Synthetic oligonucleotide
uaaaccugcuauaucacuc

SEQ ID NO: 419072 - RNA, 19 nt, Artificial Sequence
  Description of Artificial Sequence: Synthetic oligonucleotide
auugauauacacucacaca

SEQ ID NO: 419073 - RNA, 19 nt, Artificial Sequence
  Description of Artificial Sequence: Synthetic oligonucleotide
ggaucaaggacuaaguggg

SEQ ID NO: 419074 - RNA, 19 nt, Artificial Sequence
  Description of Artificial Sequence: Synthetic oligonucleotide
agagaaaguaauccaauaa

SEQ ID NO: 419075 - RNA, 19 nt, Artificial Sequence
  Description of Artificial Sequence: Synthetic oligonucleotide
agaugugguucauucaauc

SEQ ID NO: 419076 - RNA, 19 nt, Artificial Sequence
  Description of Artificial Sequence: Synthetic oligonucleotide
aaaucgacagccugcuucu

SEQ ID NO: 419077 - RNA, 19 nt, Artificial Sequence
  Description of Artificial Sequence: Synthetic oligonucleotide
gacucuauaaggcuauaac

SEQ ID NO: 419078 - RNA, 19 nt, Artificial Sequence
  Description of Artificial Sequence: Synthetic oligonucleotide
uuauagcugagucaagguc

SEQ ID NO: 419079 - RNA, 19 nt, Artificial Sequence
  Description of Artificial Sequence: Synthetic oligonucleotide
ucuugcaugacuugcauuu

SEQ ID NO: 419080 - RNA, 19 nt, Artificial Sequence
  Description of Artificial Sequence: Synthetic oligonucleotide
uguaacuucuaaacaacau

SEQ ID NO: 419081 - RNA, 19 nt, Artificial Sequence
  Description of Artificial Sequence: Synthetic oligonucleotide
auaaagagcacugagguuu

SEQ ID NO: 419082 - RNA, 19 nt, Artificial Sequence
  Description of Artificial Sequence: Synthetic oligonucleotide
uaaacuaugcugagaaaau

SEQ ID NO: 419083 - RNA, 19 nt, Artificial Sequence
  Description of Artificial Sequence: Synthetic oligonucleotide
agcuuagacucuauaaggc

SEQ ID NO: 419084 - RNA, 19 nt, Artificial Sequence
  Description of Artificial Sequence: Synthetic oligonucleotide
uuggugucagagcauaaug

SEQ ID NO: 419085 - RNA, 19 nt, Artificial Sequence
  Description of Artificial Sequence: Synthetic oligonucleotide
ugguugauaugaaaccuug

SEQ ID NO: 419086 - RNA, 19 nt, Artificial Sequence
  Description of Artificial Sequence: Synthetic oligonucleotide
uucugaaaguuucacguuc

SEQ ID NO: 419087 - RNA, 19 nt, Artificial Sequence
  Description of Artificial Sequence: Synthetic oligonucleotide
aaaggauucaauccaucuu

SEQ ID NO: 419088 - RNA, 19 nt, Artificial Sequence
  Description of Artificial Sequence: Synthetic oligonucleotide
aauuaacguuuucccacag

SEQ ID NO: 419089 - RNA, 19 nt, Artificial Sequence
  Description of Artificial Sequence: Synthetic oligonucleotide
cacgauuuaaaguaaguga

SEQ ID NO: 419090 - RNA, 19 nt, Artificial Sequence
  Description of Artificial Sequence: Synthetic oligonucleotide
augacuauuuauauaaacu

SEQ ID NO: 419091 - RNA, 19 nt, Artificial Sequence
  Description of Artificial Sequence: Synthetic oligonucleotide
aacccaugaagauuuaaua

SEQ ID NO: 419092 - RNA, 19 nt, Artificial Sequence
  Description of Artificial Sequence: Synthetic oligonucleotide
cacucauacucacaugucg

SEQ ID NO: 419093 - RNA, 19 nt, Artificial Sequence
  Description of Artificial Sequence: Synthetic oligonucleotide
auagcaagggagaaaacag

SEQ ID NO: 419094 - RNA, 19 nt, Artificial Sequence
  Description of Artificial Sequence: Synthetic oligonucleotide
guaaugacaucaucuaaac

SEQ ID NO: 419095 - RNA, 19 nt, Artificial Sequence
  Description of Artificial Sequence: Synthetic oligonucleotide
guagaaaggagucuauuuc

SEQ ID NO: 419096 - RNA, 19 nt, Artificial Sequence
  Description of Artificial Sequence: Synthetic oligonucleotide
aaggcugaagguuaauaaa

SEQ ID NO: 419097 - RNA, 19 nt, Artificial Sequence
  Description of Artificial Sequence: Synthetic oligonucleotide
aaggcuauaacagcauaug

SEQ ID NO: 419098 - RNA, 19 nt, Artificial Sequence
  Description of Artificial Sequence: Synthetic oligonucleotide
uggaauucucaaacaaaug

SEQ ID NO: 419099 - RNA, 19 nt, Artificial Sequence
  Description of Artificial Sequence: Synthetic oligonucleotide
ucuuucagaucuguaauga

SEQ ID NO: 419100 - RNA, 19 nt, Artificial Sequence
  Description of Artificial Sequence: Synthetic oligonucleotide
agccuaggcauucuccugc

SEQ ID NO: 419101 - RNA, 19 nt, Artificial Sequence
  Description of Artificial Sequence: Synthetic oligonucleotide
uggugucagagcauaauga

SEQ ID NO: 419102 - RNA, 19 nt, Artificial Sequence
  Description of Artificial Sequence: Synthetic oligonucleotide
cuauaucacuccaaguaac

SEQ ID NO: 419103 - RNA, 19 nt, Artificial Sequence
  Description of Artificial Sequence: Synthetic oligonucleotide
gcugaagguuaauaaaucg

SEQ ID NO: 419104 - RNA, 19 nt, Artificial Sequence
  Description of Artificial Sequence: Synthetic oligonucleotide
cacaugucgagaaaccagc

SEQ ID NO: 419105 - RNA, 19 nt, Artificial Sequence
  Description of Artificial Sequence: Synthetic oligonucleotide
uuuagagcaggcugguuga

SEQ ID NO: 419106 - RNA, 19 nt, Artificial Sequence
  Description of Artificial Sequence: Synthetic oligonucleotide
cuauaaggcuauaacagca

SEQ ID NO: 419107 - RNA, 19 nt, Artificial Sequence
  Description of Artificial Sequence: Synthetic oligonucleotide
aaauugagcuuucaucauu

SEQ ID NO: 419108 - RNA, 19 nt, Artificial Sequence
  Description of Artificial Sequence: Synthetic oligonucleotide
agugacaacuaggaauggc

SEQ ID NO: 419109 - RNA, 19 nt, Artificial Sequence
  Description of Artificial Sequence: Synthetic oligonucleotide
ucugaaaguuucacguucu

SEQ ID NO: 419110 - RNA, 19 nt, Artificial Sequence
  Description of Artificial Sequence: Synthetic oligonucleotide
augaucaguauccaaucca

SEQ ID NO: 419111 - RNA, 19 nt, Artificial Sequence
  Description of Artificial Sequence: Synthetic oligonucleotide
ugacaacuaggaauggcug

SEQ ID NO: 419112 - RNA, 19 nt, Artificial Sequence
  Description of Artificial Sequence: Synthetic oligonucleotide
cauagcaucaagugacuac

SEQ ID NO: 419113 - RNA, 19 nt, Artificial Sequence
  Description of Artificial Sequence: Synthetic oligonucleotide
ugauagguaaaaugacugu

SEQ ID NO: 419114 - RNA, 19 nt, Artificial Sequence
  Description of Artificial Sequence: Synthetic oligonucleotide
uguagcuucauggucagaa

SEQ ID NO: 419115 - RNA, 19 nt, Artificial Sequence
  Description of Artificial Sequence: Synthetic oligonucleotide
ucaacuuacaaguggccaa

SEQ ID NO: 419116 - RNA, 19 nt, Artificial Sequence
  Description of Artificial Sequence: Synthetic oligonucleotide
ucuaaaccugcuauaucac

SEQ ID NO: 419117 - RNA, 19 nt, Artificial Sequence
  Description of Artificial Sequence: Synthetic oligonucleotide
ugaucaguauccaauccau

SEQ ID NO: 419118 - RNA, 19 nt, Artificial Sequence
  Description of Artificial Sequence: Synthetic oligonucleotide
cauacucccugacacagag

SEQ ID NO: 419119 - RNA, 19 nt, Artificial Sequence
  Description of Artificial Sequence: Synthetic oligonucleotide
uuagccuaggcauucuccu

SEQ ID NO: 419120 - RNA, 19 nt, Artificial Sequence
  Description of Artificial Sequence: Synthetic oligonucleotide
ugucgagaaaccagcaccu

SEQ ID NO: 419121 - RNA, 19 nt, Artificial Sequence
  Description of Artificial Sequence: Synthetic oligonucleotide
uuagacucuauaaggcuau

SEQ ID NO: 419122 - RNA, 19 nt, Artificial Sequence
  Description of Artificial Sequence: Synthetic oligonucleotide
uauaaucgagacacaugca

SEQ ID NO: 419123 - RNA, 19 nt, Artificial Sequence
  Description of Artificial Sequence: Synthetic oligonucleotide
aaguggccaaaacaaguga

SEQ ID NO: 419124 - RNA, 19 nt, Artificial Sequence
  Description of Artificial Sequence: Synthetic oligonucleotide
uucaacuuacaaguggcca

SEQ ID NO: 419125 - RNA, 19 nt, Artificial Sequence
  Description of Artificial Sequence: Synthetic oligonucleotide
acuugaacgguuucguaga

SEQ ID NO: 419126 - RNA, 19 nt, Artificial Sequence
  Description of Artificial Sequence: Synthetic oligonucleotide
cuaugaucaguauccaauc

SEQ ID NO: 419127 - RNA, 19 nt, Artificial Sequence
  Description of Artificial Sequence: Synthetic oligonucleotide
cucacuaauaacucaacaa

SEQ ID NO: 419128 - RNA, 19 nt, Artificial Sequence
  Description of Artificial Sequence: Synthetic oligonucleotide
cacuuaucagucagugucg

SEQ ID NO: 419129 - RNA, 19 nt, Artificial Sequence
  Description of Artificial Sequence: Synthetic oligonucleotide
uguugugaaaggauucaau

SEQ ID NO: 419130 - RNA, 19 nt, Artificial Sequence
  Description of Artificial Sequence: Synthetic oligonucleotide
cuucuaaucuaaacaaaca

SEQ ID NO: 419131 - RNA, 19 nt, Artificial Sequence
  Description of Artificial Sequence: Synthetic oligonucleotide
acgauuuaaaguaagugaa

SEQ ID NO: 419132 - RNA, 19 nt, Artificial Sequence
  Description of Artificial Sequence: Synthetic oligonucleotide
cauuuuguuagccuaggca

SEQ ID NO: 419133 - RNA, 19 nt, Artificial Sequence
  Description of Artificial Sequence: Synthetic oligonucleotide
aauccaucuuaauguaaau

SEQ ID NO: 419134 - RNA, 19 nt, Artificial Sequence
  Description of Artificial Sequence: Synthetic oligonucleotide
uguccaaacauagauuuua

SEQ ID NO: 419135 - RNA, 19 nt, Artificial Sequence
  Description of Artificial Sequence: Synthetic oligonucleotide
ugguucauucaaucaacug

SEQ ID NO: 419136 - RNA, 19 nt, Artificial Sequence
  Description of Artificial Sequence: Synthetic oligonucleotide
cuacagauacaacacagga

SEQ ID NO: 419137 - RNA, 19 nt, Artificial Sequence
  Description of Artificial Sequence: Synthetic oligonucleotide
cuucugauguagaauugac

SEQ ID NO: 419138 - RNA, 19 nt, Artificial Sequence
  Description of Artificial Sequence: Synthetic oligonucleotide
uucauucaaucaacugcag

SEQ ID NO: 419139 - RNA, 19 nt, Artificial Sequence
  Description of Artificial Sequence: Synthetic oligonucleotide
cuaaacuaugcugagaaaa

SEQ ID NO: 419140 - RNA, 19 nt, Artificial Sequence
  Description of Artificial Sequence: Synthetic oligonucleotide
ucacaaucuugcaugacuu

SEQ ID NO: 419141 - RNA, 19 nt, Artificial Sequence
  Description of Artificial Sequence: Synthetic oligonucleotide
aucauuuugcuugggugac

SEQ ID NO: 419142 - RNA, 19 nt, Artificial Sequence
  Description of Artificial Sequence: Synthetic oligonucleotide
acuacagauacaacacagg

SEQ ID NO: 419143 - RNA, 19 nt, Artificial Sequence
  Description of Artificial Sequence: Synthetic oligonucleotide
ucaauugcccgaugcaggu

SEQ ID NO: 419144 - RNA, 19 nt, Artificial Sequence
  Description of Artificial Sequence: Synthetic oligonucleotide
aaguccaguaagucuugug

SEQ ID NO: 419145 - RNA, 19 nt, Artificial Sequence
  Description of Artificial Sequence: Synthetic oligonucleotide
augugguucauucaaucaa

SEQ ID NO: 419146 - RNA, 19 nt, Artificial Sequence
  Description of Artificial Sequence: Synthetic oligonucleotide
guccaguaagucuugugag

SEQ ID NO: 419147 - RNA, 19 nt, Artificial Sequence
  Description of Artificial Sequence: Synthetic oligonucleotide
uccaguaagucuugugaga

SEQ ID NO: 419148 - RNA, 19 nt, Artificial Sequence
  Description of Artificial Sequence: Synthetic oligonucleotide
uuugcuugggugaccaaau

SEQ ID NO: 419149 - RNA, 19 nt, Artificial Sequence
  Description of Artificial Sequence: Synthetic oligonucleotide
acuaucaccuggcagcuau

SEQ ID NO: 419150 - RNA, 19 nt, Artificial Sequence
  Description of Artificial Sequence: Synthetic oligonucleotide
ugacaagcaguaauaccgu

SEQ ID NO: 419151 - RNA, 19 nt, Artificial Sequence
  Description of Artificial Sequence: Synthetic oligonucleotide
ugcuacagacuaucuaucu

SEQ ID NO: 419152 - RNA, 19 nt, Artificial Sequence
  Description of Artificial Sequence: Synthetic oligonucleotide
aacuaugcugagaaaauuu

SEQ ID NO: 419153 - RNA, 19 nt, Artificial Sequence
  Description of Artificial Sequence: Synthetic oligonucleotide
ucaucuaaaccugcuauau

SEQ ID NO: 419154 - RNA, 19 nt, Artificial Sequence
  Description of Artificial Sequence: Synthetic oligonucleotide
caacacaggaauucugaug

SEQ ID NO: 419155 - RNA, 19 nt, Artificial Sequence
  Description of Artificial Sequence: Synthetic oligonucleotide
aaagccgcuuuguuaucug

SEQ ID NO: 419156 - RNA, 19 nt, Artificial Sequence
  Description of Artificial Sequence: Synthetic oligonucleotide
aaacccaugaagauuuaau

SEQ ID NO: 419157 - RNA, 19 nt, Artificial Sequence
  Description of Artificial Sequence: Synthetic oligonucleotide
gacuaagugggaaacagaa

SEQ ID NO: 419158 - RNA, 19 nt, Artificial Sequence
  Description of Artificial Sequence: Synthetic oligonucleotide
ucaauccaucuuaauguaa

SEQ ID NO: 419159 - RNA, 19 nt, Artificial Sequence
  Description of Artificial Sequence: Synthetic oligonucleotide
ccaaacauagauuuuauaa

SEQ ID NO: 419160 - RNA, 19 nt, Artificial Sequence
  Description of Artificial Sequence: Synthetic oligonucleotide
aacgcugcauccuuugauu

SEQ ID NO: 419161 - RNA, 19 nt, Artificial Sequence
  Description of Artificial Sequence: Synthetic oligonucleotide
agacuaucuaucuggugcu

SEQ ID NO: 419162 - RNA, 19 nt, Artificial Sequence
  Description of Artificial Sequence: Synthetic oligonucleotide
cuuguaucagcauucaccu

SEQ ID NO: 419163 - RNA, 19 nt, Artificial Sequence
  Description of Artificial Sequence: Synthetic oligonucleotide
uaaauugagcuuucaucau

SEQ ID NO: 419164 - RNA, 19 nt, Artificial Sequence
  Description of Artificial Sequence: Synthetic oligonucleotide
uacagacuaucuaucuggu

SEQ ID NO: 419165 - RNA, 19 nt, Artificial Sequence
  Description of Artificial Sequence: Synthetic oligonucleotide
uucaauccaucuuaaugua

SEQ ID NO: 419166 - RNA, 19 nt, Artificial Sequence
  Description of Artificial Sequence: Synthetic oligonucleotide
cucauacucacaugucgag

SEQ ID NO: 419167 - RNA, 19 nt, Artificial Sequence
  Description of Artificial Sequence: Synthetic oligonucleotide
cuuucagaucuguaaugac

SEQ ID NO: 419168 - RNA, 19 nt, Artificial Sequence
  Description of Artificial Sequence: Synthetic oligonucleotide
ugucuuagaucuugguuau

SEQ ID NO: 419169 - RNA, 19 nt, Artificial Sequence
  Description of Artificial Sequence: Synthetic oligonucleotide
ucgacagccugcuucuuug

SEQ ID NO: 419170 - RNA, 19 nt, Artificial Sequence
  Description of Artificial Sequence: Synthetic oligonucleotide
uuucguagaaaggagucua

SEQ ID NO: 419171 - RNA, 19 nt, Artificial Sequence
  Description of Artificial Sequence: Synthetic oligonucleotide
ucgagaaaccagcaccuaa

SEQ ID NO: 419172 - RNA, 19 nt, Artificial Sequence
  Description of Artificial Sequence: Synthetic oligonucleotide
auuauuacuuuaagaccag

SEQ ID NO: 419173 - RNA, 19 nt, Artificial Sequence
  Description of Artificial Sequence: Synthetic oligonucleotide
gaggcucauaaauugagcu

SEQ ID NO: 419174 - RNA, 19 nt, Artificial Sequence
  Description of Artificial Sequence: Synthetic oligonucleotide
caguaauaccguuuacaug

SEQ ID NO: 419175 - RNA, 19 nt, Artificial Sequence
  Description of Artificial Sequence: Synthetic oligonucleotide
uucuguauuuaaaccuauc

SEQ ID NO: 419176 - RNA, 19 nt, Artificial Sequence
  Description of Artificial Sequence: Synthetic oligonucleotide
uaauaccguuuacaugaca

SEQ ID NO: 419177 - RNA, 19 nt, Artificial Sequence
  Description of Artificial Sequence: Synthetic oligonucleotide
aaacuaugcugagaaaauu

SEQ ID NO: 419178 - RNA, 19 nt, Artificial Sequence
  Description of Artificial Sequence: Synthetic oligonucleotide
acguucuucacaccaauuu

SEQ ID NO: 419179 - RNA, 19 nt, Artificial Sequence
  Description of Artificial Sequence: Synthetic oligonucleotide
uaccguuuacaugacagaa

SEQ ID NO: 419180 - RNA, 19 nt, Artificial Sequence
  Description of Artificial Sequence: Synthetic oligonucleotide
guuauagaacuguuaaagu

SEQ ID NO: 419181 - RNA, 19 nt, Artificial Sequence
  Description of Artificial Sequence: Synthetic oligonucleotide
caauccaucuuaauguaaa

SEQ ID NO: 419182 - RNA, 19 nt, Artificial Sequence
  Description of Artificial Sequence: Synthetic oligonucleotide
guaccugucauaucuuguc

SEQ ID NO: 419183 - RNA, 19 nt, Artificial Sequence
  Description of Artificial Sequence: Synthetic oligonucleotide
auaccguuuacaugacaga

SEQ ID NO: 419184 - RNA, 19 nt, Artificial Sequence
  Description of Artificial Sequence: Synthetic oligonucleotide
cuuagacucuauaaggcua

SEQ ID NO: 419185 - RNA, 19 nt, Artificial Sequence
  Description of Artificial Sequence: Synthetic oligonucleotide
uucugacaagcaguaauac

SEQ ID NO: 419186 - RNA, 19 nt, Artificial Sequence
  Description of Artificial Sequence: Synthetic oligonucleotide
ucuaaacuaugcugagaaa

SEQ ID NO: 419187 - RNA, 19 nt, Artificial Sequence
  Description of Artificial Sequence: Synthetic oligonucleotide
agcuuuauagcaagggaga

SEQ ID NO: 419188 - RNA, 19 nt, Artificial Sequence
  Description of Artificial Sequence: Synthetic oligonucleotide
cauauucagaugugguuca

SEQ ID NO: 419189 - RNA, 19 nt, Artificial Sequence
  Description of Artificial Sequence: Synthetic oligonucleotide
guaggcauucuucucauua

SEQ ID NO: 419190 - RNA, 19 nt, Artificial Sequence
  Description of Artificial Sequence: Synthetic oligonucleotide
caagugacuacagauacaa

SEQ ID NO: 419191 - RNA, 19 nt, Artificial Sequence
  Description of Artificial Sequence: Synthetic oligonucleotide
aaccugcuauaucacucca

SEQ ID NO: 419192 - RNA, 19 nt, Artificial Sequence
  Description of Artificial Sequence: Synthetic oligonucleotide
aucuugguuaugcuacaga

SEQ ID NO: 419193 - RNA, 19 nt, Artificial Sequence
  Description of Artificial Sequence: Synthetic oligonucleotide
cauaguuauagaacuguua

SEQ ID NO: 419194 - RNA, 19 nt, Artificial Sequence
  Description of Artificial Sequence: Synthetic oligonucleotide
caugucgagaaaccagcac

SEQ ID NO: 419195 - RNA, 19 nt, Artificial Sequence
  Description of Artificial Sequence: Synthetic oligonucleotide
acaugagucaaaacauucu

SEQ ID NO: 419196 - RNA, 19 nt, Artificial Sequence
  Description of Artificial Sequence: Synthetic oligonucleotide
gacaaccccuauaaucgag

SEQ ID NO: 419197 - RNA, 19 nt, Artificial Sequence
  Description of Artificial Sequence: Synthetic oligonucleotide
uucacguucuucacaccaa

SEQ ID NO: 419198 - RNA, 19 nt, Artificial Sequence
  Description of Artificial Sequence: Synthetic oligonucleotide
guuagccuaggcauucucc

SEQ ID NO: 419199 - RNA, 19 nt, Artificial Sequence
  Description of Artificial Sequence: Synthetic oligonucleotide
ccaucuuaauguaaaucag

SEQ ID NO: 419200 - RNA, 19 nt, Artificial Sequence
  Description of Artificial Sequence: Synthetic oligonucleotide
auaaggcuauaacagcaua

SEQ ID NO: 419201 - RNA, 19 nt, Artificial Sequence
  Description of Artificial Sequence: Synthetic oligonucleotide
acagacuaucuaucuggug

SEQ ID NO: 419202 - RNA, 19 nt, Artificial Sequence
  Description of Artificial Sequence: Synthetic oligonucleotide
aggaauggcugaaucacug

SEQ ID NO: 419203 - RNA, 19 nt, Artificial Sequence
  Description of Artificial Sequence: Synthetic oligonucleotide
uggccaaaacaagugacaa

SEQ ID NO: 419204 - RNA, 19 nt, Artificial Sequence
  Description of Artificial Sequence: Synthetic oligonucleotide
cagcauucaccucacaaca

SEQ ID NO: 419205 - RNA, 19 nt, Artificial Sequence
  Description of Artificial Sequence: Synthetic oligonucleotide
caauuaacguuuucccaca

SEQ ID NO: 419206 - RNA, 19 nt, Artificial Sequence
  Description of Artificial Sequence: Synthetic oligonucleotide
aaauugcugaugacugaga

SEQ ID NO: 419207 - RNA, 19 nt, Artificial Sequence
  Description of Artificial Sequence: Synthetic oligonucleotide
uguuagccuaggcauucuc

SEQ ID NO: 419208 - RNA, 19 nt, Artificial Sequence
  Description of Artificial Sequence: Synthetic oligonucleotide
ccugcuauaucacuccaag

SEQ ID NO: 419209 - RNA, 19 nt, Artificial Sequence
  Description of Artificial Sequence: Synthetic oligonucleotide
agaaagccgcuuuguuauc

SEQ ID NO: 419210 - RNA, 19 nt, Artificial Sequence
  Description of Artificial Sequence: Synthetic oligonucleotide
acucauacucacaugucga

SEQ ID NO: 419211 - RNA, 19 nt, Artificial Sequence
  Description of Artificial Sequence: Synthetic oligonucleotide
guagcucccaucacuauca

SEQ ID NO: 419212 - RNA, 19 nt, Artificial Sequence
  Description of Artificial Sequence: Synthetic oligonucleotide
accuaucuacagaauauca

SEQ ID NO: 419213 - RNA, 19 nt, Artificial Sequence
  Description of Artificial Sequence: Synthetic oligonucleotide
cuggaauucucaaacaaau

SEQ ID NO: 419214 - RNA, 19 nt, Artificial Sequence
  Description of Artificial Sequence: Synthetic oligonucleotide
aaccaccaaagcacaaaug

SEQ ID NO: 419215 - RNA, 19 nt, Artificial Sequence
  Description of Artificial Sequence: Synthetic oligonucleotide
accagcaccuaaccacauc

SEQ ID NO: 419216 - RNA, 19 nt, Artificial Sequence
  Description of Artificial Sequence: Synthetic oligonucleotide
guugucuacuuggugucag

SEQ ID NO: 419217 - RNA, 19 nt, Artificial Sequence
  Description of Artificial Sequence: Synthetic oligonucleotide
ugcauauucagagggucua

SEQ ID NO: 419218 - RNA, 19 nt, Artificial Sequence
  Description of Artificial Sequence: Synthetic oligonucleotide
auagaacuguuaaagucau

SEQ ID NO: 419219 - RNA, 19 nt, Artificial Sequence
  Description of Artificial Sequence: Synthetic oligonucleotide
caucuaaaccugcuauauc

SEQ ID NO: 419220 - RNA, 19 nt, Artificial Sequence
  Description of Artificial Sequence: Synthetic oligonucleotide
cugauuccccugacaaccc

SEQ ID NO: 419221 - RNA, 19 nt, Artificial Sequence
  Description of Artificial Sequence: Synthetic oligonucleotide
uaaacccaugaagauuuaa

SEQ ID NO: 419222 - RNA, 19 nt, Artificial Sequence
  Description of Artificial Sequence: Synthetic oligonucleotide
ucuacuagaugagcagcaa

SEQ ID NO: 419223 - RNA, 19 nt, Artificial Sequence
  Description of Artificial Sequence: Synthetic oligonucleotide
cuaaccacaucccacuucu

SEQ ID NO: 419224 - RNA, 19 nt, Artificial Sequence
  Description of Artificial Sequence: Synthetic oligonucleotide
acucaacaaauuauuacuu

SEQ ID NO: 419225 - RNA, 19 nt, Artificial Sequence
  Description of Artificial Sequence: Synthetic oligonucleotide
gaagaucuacaugucuauc

SEQ ID NO: 419226 - RNA, 19 nt, Artificial Sequence
  Description of Artificial Sequence: Synthetic oligonucleotide
caagcaguaauaccguuua

SEQ ID NO: 419227 - RNA, 19 nt, Artificial Sequence
  Description of Artificial Sequence: Synthetic oligonucleotide
acaacuaggaauggcugaa

SEQ ID NO: 419228 - RNA, 19 nt, Artificial Sequence
  Description of Artificial Sequence: Synthetic oligonucleotide
gggucuacuagaugagcag

SEQ ID NO: 419229 - RNA, 19 nt, Artificial Sequence
  Description of Artificial Sequence: Synthetic oligonucleotide
augcuacagacuaucuauc

SEQ ID NO: 419230 - RNA, 19 nt, Artificial Sequence
  Description of Artificial Sequence: Synthetic oligonucleotide
accacuuaucagucagugu

SEQ ID NO: 419231 - RNA, 19 nt, Artificial Sequence
  Description of Artificial Sequence: Synthetic oligonucleotide
ccuauaaucgagacacaug

SEQ ID NO: 419232 - RNA, 19 nt, Artificial Sequence
  Description of Artificial Sequence: Synthetic oligonucleotide
augaggugaaauugcugau

SEQ ID NO: 419233 - RNA, 19 nt, Artificial Sequence
  Description of Artificial Sequence: Synthetic oligonucleotide
acaaaaggccacgauuuaa

SEQ ID NO: 419234 - RNA, 19 nt, Artificial Sequence
  Description of Artificial Sequence: Synthetic oligonucleotide
gcuauaucacuccaaguaa

SEQ ID NO: 419235 - RNA, 19 nt, Artificial Sequence
  Description of Artificial Sequence: Synthetic oligonucleotide
aggcucauaaauugagcuu

SEQ ID NO: 419236 - RNA, 19 nt, Artificial Sequence
  Description of Artificial Sequence: Synthetic oligonucleotide
acgguuucguagaaaggag

SEQ ID NO: 419237 - RNA, 19 nt, Artificial Sequence
  Description of Artificial Sequence: Synthetic oligonucleotide
uagccuaggcauucuccug

SEQ ID NO: 419238 - RNA, 19 nt, Artificial Sequence
  Description of Artificial Sequence: Synthetic oligonucleotide
auaucacuccaaguaacau

SEQ ID NO: 419239 - RNA, 19 nt, Artificial Sequence
  Description of Artificial Sequence: Synthetic oligonucleotide
aaacaacauuugaggaaca

SEQ ID NO: 419240 - RNA, 19 nt, Artificial Sequence
  Description of Artificial Sequence: Synthetic oligonucleotide
auauguagucacauagcau

SEQ ID NO: 419241 - RNA, 19 nt, Artificial Sequence
  Description of Artificial Sequence: Synthetic oligonucleotide
ucacuaucaccuggcagcu

SEQ ID NO: 419242 - RNA, 19 nt, Artificial Sequence
  Description of Artificial Sequence: Synthetic oligonucleotide
acacucauacucacauguc

SEQ ID NO: 419243 - RNA, 19 nt, Artificial Sequence
  Description of Artificial Sequence: Synthetic oligonucleotide
uggacugaacuuccuccuc

SEQ ID NO: 419244 - RNA, 19 nt, Artificial Sequence
  Description of Artificial Sequence: Synthetic oligonucleotide
ucucgacacauuucuuuua

SEQ ID NO: 419245 - RNA, 19 nt, Artificial Sequence
  Description of Artificial Sequence: Synthetic oligonucleotide
gagggucuacuagaugagc

SEQ ID NO: 419246 - RNA, 19 nt, Artificial Sequence
  Description of Artificial Sequence: Synthetic oligonucleotide
acaacauuugaggaacaua

SEQ ID NO: 419247 - RNA, 19 nt, Artificial Sequence
  Description of Artificial Sequence: Synthetic oligonucleotide
agagggucuacuagaugag

SEQ ID NO: 419248 - RNA, 19 nt, Artificial Sequence
  Description of Artificial Sequence: Synthetic oligonucleotide
ccucacaacaccuucacaa

SEQ ID NO: 419249 - RNA, 19 nt, Artificial Sequence
  Description of Artificial Sequence: Synthetic oligonucleotide
gucgauauuuacauugaua

SEQ ID NO: 419250 - RNA, 19 nt, Artificial Sequence
  Description of Artificial Sequence: Synthetic oligonucleotide
guuaauaaaucgacagccu

SEQ ID NO: 419251 - RNA, 19 nt, Artificial Sequence
  Description of Artificial Sequence: Synthetic oligonucleotide
cagagcauaaugaggugaa

SEQ ID NO: 419252 - RNA, 19 nt, Artificial Sequence
  Description of Artificial Sequence: Synthetic oligonucleotide
uggucagaacuugaacggu

SEQ ID NO: 419253 - RNA, 19 nt, Artificial Sequence
  Description of Artificial Sequence: Synthetic oligonucleotide
cuguaaugacaucaucuaa

SEQ ID NO: 419254 - RNA, 19 nt, Artificial Sequence
  Description of Artificial Sequence: Synthetic oligonucleotide
gaucaguauccaauccauc

SEQ ID NO: 419255 - RNA, 19 nt, Artificial Sequence
  Description of Artificial Sequence: Synthetic oligonucleotide
gguuucguagaaaggaguc

SEQ ID NO: 419256 - RNA, 19 nt, Artificial Sequence
  Description of Artificial Sequence: Synthetic oligonucleotide
ggugaccaaaugaaauuug

SEQ ID NO: 419257 - RNA, 19 nt, Artificial Sequence
  Description of Artificial Sequence: Synthetic oligonucleotide
ucacuccaaguaacaugca

SEQ ID NO: 419258 - RNA, 19 nt, Artificial Sequence
  Description of Artificial Sequence: Synthetic oligonucleotide
ggucuacuagaugagcagc

SEQ ID NO: 419259 - RNA, 19 nt, Artificial Sequence
  Description of Artificial Sequence: Synthetic oligonucleotide
gucuacuagaugagcagca

SEQ ID NO: 419260 - RNA, 19 nt, Artificial Sequence
  Description of Artificial Sequence: Synthetic oligonucleotide
gguagcucccaucacuauc

SEQ ID NO: 419261 - RNA, 19 nt, Artificial Sequence
  Description of Artificial Sequence: Synthetic oligonucleotide
ccacgauuuaaaguaagug

SEQ ID NO: 419262 - RNA, 19 nt, Artificial Sequence
  Description of Artificial Sequence: Synthetic oligonucleotide
auacucacaugucgagaaa

SEQ ID NO: 419263 - RNA, 19 nt, Artificial Sequence
  Description of Artificial Sequence: Synthetic oligonucleotide
uccccugacaaccccuaua

SEQ ID NO: 419264 - RNA, 19 nt, Artificial Sequence
  Description of Artificial Sequence: Synthetic oligonucleotide
acuuuaagaccagcuuaga

SEQ ID NO: 419265 - RNA, 19 nt, Artificial Sequence
  Description of Artificial Sequence: Synthetic oligonucleotide
cucacaugucgagaaacca

SEQ ID NO: 419266 - RNA, 19 nt, Artificial Sequence
  Description of Artificial Sequence: Synthetic oligonucleotide
acauaguuauagaacuguu

SEQ ID NO: 419267 - RNA, 19 nt, Artificial Sequence
  Description of Artificial Sequence: Synthetic oligonucleotide
gaacuugaacgguuucgua

SEQ ID NO: 419268 - RNA, 19 nt, Artificial Sequence
  Description of Artificial Sequence: Synthetic oligonucleotide
cuuuauagcaagggagaaa

SEQ ID NO: 419269 - RNA, 19 nt, Artificial Sequence
  Description of Artificial Sequence: Synthetic oligonucleotide
gagcauaaugaggugaaau

SEQ ID NO: 419270 - RNA, 19 nt, Artificial Sequence
  Description of Artificial Sequence: Synthetic oligonucleotide
cccacuucucacuaauaac

SEQ ID NO: 419271 - RNA, 19 nt, Artificial Sequence
  Description of Artificial Sequence: Synthetic oligonucleotide
uauucagaugugguucauu

SEQ ID NO: 419272 - RNA, 19 nt, Artificial Sequence
  Description of Artificial Sequence: Synthetic oligonucleotide
gcauuuuguuagccuaggc

SEQ ID NO: 419273 - RNA, 19 nt, Artificial Sequence
  Description of Artificial Sequence: Synthetic oligonucleotide
accuuuuauuguaaaucau

SEQ ID NO: 419274 - RNA, 19 nt, Artificial Sequence
  Description of Artificial Sequence: Synthetic oligonucleotide
uugaacgguuucguagaaa

SEQ ID NO: 419275 - RNA, 19 nt, Artificial Sequence
  Description of Artificial Sequence: Synthetic oligonucleotide
ucguagaaaggagucuauu

SEQ ID NO: 419276 - RNA, 19 nt, Artificial Sequence
  Description of Artificial Sequence: Synthetic oligonucleotide
guaauaccguuuacaugac

SEQ ID NO: 419277 - RNA, 19 nt, Artificial Sequence
  Description of Artificial Sequence: Synthetic oligonucleotide
ccuaucuacagaauaucaa

SEQ ID NO: 419278 - RNA, 19 nt, Artificial Sequence
  Description of Artificial Sequence: Synthetic oligonucleotide
cuuagaucuugguuaugcu

SEQ ID NO: 419279 - RNA, 19 nt, Artificial Sequence
  Description of Artificial Sequence: Synthetic oligonucleotide
cgagaaaccagcaccuaac

SEQ ID NO: 419280 - RNA, 19 nt, Artificial Sequence
  Description of Artificial Sequence: Synthetic oligonucleotide
cauucaccucacaacaccu

SEQ ID NO: 419281 - RNA, 19 nt, Artificial Sequence
  Description of Artificial Sequence: Synthetic oligonucleotide
gguuggacugaacuuccuc

SEQ ID NO: 419282 - RNA, 19 nt, Artificial Sequence
  Description of Artificial Sequence: Synthetic oligonucleotide
aucgacagccugcuucuuu

SEQ ID NO: 419283 - RNA, 19 nt, Artificial Sequence
  Description of Artificial Sequence: Synthetic oligonucleotide
acuaucuaucuggugcuuu

SEQ ID NO: 419284 - RNA, 19 nt, Artificial Sequence
  Description of Artificial Sequence: Synthetic oligonucleotide
cgcuuuguuaucugauucc

SEQ ID NO: 419285 - RNA, 19 nt, Artificial Sequence
  Description of Artificial Sequence: Synthetic oligonucleotide
acaugucgagaaaccagca

SEQ ID NO: 419286 - RNA, 19 nt, Artificial Sequence
  Description of Artificial Sequence: Synthetic oligonucleotide
ccguuuacaugacagaaaa

SEQ ID NO: 419287 - RNA, 19 nt, Artificial Sequence
  Description of Artificial Sequence: Synthetic oligonucleotide
aguugucuacuugguguca

SEQ ID NO: 419288 - RNA, 19 nt, Artificial Sequence
  Description of Artificial Sequence: Synthetic oligonucleotide
gagcaggcugguugauaug

SEQ ID NO: 419289 - RNA, 19 nt, Artificial Sequence
  Description of Artificial Sequence: Synthetic oligonucleotide
auaacagcauauggcuaaa

SEQ ID NO: 419290 - RNA, 19 nt, Artificial Sequence
  Description of Artificial Sequence: Synthetic oligonucleotide
accguuuacaugacagaaa

SEQ ID NO: 419291 - RNA, 19 nt, Artificial Sequence
  Description of Artificial Sequence: Synthetic oligonucleotide
gaaagccgcuuuguuaucu

SEQ ID NO: 419292 - RNA, 19 nt, Artificial Sequence
  Description of Artificial Sequence: Synthetic oligonucleotide
cacauauucagaugugguu

SEQ ID NO: 419293 - RNA, 19 nt, Artificial Sequence
  Description of Artificial Sequence: Synthetic oligonucleotide
aggauucaauccaucuuaa

SEQ ID NO: 419294 - RNA, 19 nt, Artificial Sequence
  Description of Artificial Sequence: Synthetic oligonucleotide
gcuuagacucuauaaggcu

SEQ ID NO: 419295 - RNA, 19 nt, Artificial Sequence
  Description of Artificial Sequence: Synthetic oligonucleotide
caagauugcuucucucugu

SEQ ID NO: 419296 - RNA, 19 nt, Artificial Sequence
  Description of Artificial Sequence: Synthetic oligonucleotide
auaaaucgacagccugcuu

SEQ ID NO: 419297 - RNA, 19 nt, Artificial Sequence
  Description of Artificial Sequence: Synthetic oligonucleotide
cacaggccggauuucaucu

SEQ ID NO: 419298 - RNA, 19 nt, Artificial Sequence
  Description of Artificial Sequence: Synthetic oligonucleotide
auacucccugacacagagg

SEQ ID NO: 419299 - RNA, 19 nt, Artificial Sequence
  Description of Artificial Sequence: Synthetic oligonucleotide
acauagcaucaagugacua

SEQ ID NO: 419300 - RNA, 19 nt, Artificial Sequence
  Description of Artificial Sequence: Synthetic oligonucleotide
caucucgacacauuucuuu

SEQ ID NO: 419301 - RNA, 19 nt, Artificial Sequence
  Description of Artificial Sequence: Synthetic oligonucleotide
gccuggaauucucaaacaa

SEQ ID NO: 419302 - RNA, 19 nt, Artificial Sequence
  Description of Artificial Sequence: Synthetic oligonucleotide
auaccacuuaucagucagu

SEQ ID NO: 419303 - RNA, 19 nt, Artificial Sequence
  Description of Artificial Sequence: Synthetic oligonucleotide
caggcugguugauaugaaa

SEQ ID NO: 419304 - RNA, 19 nt, Artificial Sequence
  Description of Artificial Sequence: Synthetic oligonucleotide
caccuaaccacaucccacu

SEQ ID NO: 419305 - RNA, 19 nt, Artificial Sequence
  Description of Artificial Sequence: Synthetic oligonucleotide
ggccacgauuuaaaguaag

SEQ ID NO: 419306 - RNA, 19 nt, Artificial Sequence
  Description of Artificial Sequence: Synthetic oligonucleotide
cuugaacgguuucguagaa

SEQ ID NO: 419307 - RNA, 19 nt, Artificial Sequence
  Description of Artificial Sequence: Synthetic oligonucleotide
cuuaucagucagugucgaa

SEQ ID NO: 419308 - RNA, 19 nt, Artificial Sequence
  Description of Artificial Sequence: Synthetic oligonucleotide
agagcauaaugaggugaaa

SEQ ID NO: 419309 - RNA, 19 nt, Artificial Sequence
  Description of Artificial Sequence: Synthetic oligonucleotide
gauguagaauugacauacu

SEQ ID NO: 419310 - RNA, 19 nt, Artificial Sequence
  Description of Artificial Sequence: Synthetic oligonucleotide
guuaugcuacagacuaucu

SEQ ID NO: 419311 - RNA, 19 nt, Artificial Sequence
  Description of Artificial Sequence: Synthetic oligonucleotide
gaccagcuuagacucuaua

SEQ ID NO: 419312 - RNA, 19 nt, Artificial Sequence
  Description of Artificial Sequence: Synthetic oligonucleotide
cucacaacaccuucacaau

SEQ ID NO: 419313 - RNA, 19 nt, Artificial Sequence
  Description of Artificial Sequence: Synthetic oligonucleotide
gaugacugagaaagccgcu

SEQ ID NO: 419314 - RNA, 19 nt, Artificial Sequence
  Description of Artificial Sequence: Synthetic oligonucleotide
gcaccuaaccacaucccac

SEQ ID NO: 419315 - RNA, 19 nt, Artificial Sequence
  Description of Artificial Sequence: Synthetic oligonucleotide
gacaagcaguaauaccguu

SEQ ID NO: 419316 - RNA, 19 nt, Artificial Sequence
  Description of Artificial Sequence: Synthetic oligonucleotide
uuccccugacaaccccuau

SEQ ID NO: 419317 - RNA, 19 nt, Artificial Sequence
  Description of Artificial Sequence: Synthetic oligonucleotide
gguuucucaagcccacugu

SEQ ID NO: 419318 - RNA, 19 nt, Artificial Sequence
  Description of Artificial Sequence: Synthetic oligonucleotide
cugguugauaugaaaccuu

SEQ ID NO: 419319 - RNA, 19 nt, Artificial Sequence
  Description of Artificial Sequence: Synthetic oligonucleotide
cuaucuaucuggugcuuuu

SEQ ID NO: 419320 - RNA, 19 nt, Artificial Sequence
  Description of Artificial Sequence: Synthetic oligonucleotide
cuguugugaaaggauucaa

SEQ ID NO: 419321 - RNA, 19 nt, Artificial Sequence
  Description of Artificial Sequence: Synthetic oligonucleotide
gcugguugauaugaaaccu

SEQ ID NO: 419322 - RNA, 19 nt, Artificial Sequence
  Description of Artificial Sequence: Synthetic oligonucleotide
ggcucauaaauugagcuuu

SEQ ID NO: 419323 - RNA, 19 nt, Artificial Sequence
  Description of Artificial Sequence: Synthetic oligonucleotide
uggugcuuuuggacuccau

SEQ ID NO: 419324 - RNA, 19 nt, Artificial Sequence
  Description of Artificial Sequence: Synthetic oligonucleotide
cacauagcaucaagugacu

SEQ ID NO: 419325 - RNA, 19 nt, Artificial Sequence
  Description of Artificial Sequence: Synthetic oligonucleotide
gucuuagaucuugguuaug

SEQ ID NO: 419326 - RNA, 19 nt, Artificial Sequence
  Description of Artificial Sequence: Synthetic oligonucleotide
aaccagcaccuaaccacau

SEQ ID NO: 419327 - RNA, 19 nt, Artificial Sequence
  Description of Artificial Sequence: Synthetic oligonucleotide
cacuccaaguaacaugcau

SEQ ID NO: 419328 - RNA, 19 nt, Artificial Sequence
  Description of Artificial Sequence: Synthetic oligonucleotide
gcuuuauagcaagggagaa

SEQ ID NO: 419329 - RNA, 19 nt, Artificial Sequence
  Description of Artificial Sequence: Synthetic oligonucleotide
gugguucauucaaucaacu

SEQ ID NO: 419330 - RNA, 19 nt, Artificial Sequence
  Description of Artificial Sequence: Synthetic oligonucleotide
ggacuaagugggaaacaga

SEQ ID NO: 419331 - RNA, 19 nt, Artificial Sequence
  Description of Artificial Sequence: Synthetic oligonucleotide
cgauugguagcucccauca

SEQ ID NO: 419332 - RNA, 19 nt, Artificial Sequence
  Description of Artificial Sequence: Synthetic oligonucleotide
gucagugucgaaggcugaa

SEQ ID NO: 419333 - RNA, 19 nt, Artificial Sequence
  Description of Artificial Sequence: Synthetic oligonucleotide
gcauauucagagggucuac

SEQ ID NO: 419334 - RNA, 19 nt, Artificial Sequence
  Description of Artificial Sequence: Synthetic oligonucleotide
aucgagacacaugcacaua

SEQ ID NO: 419335 - RNA, 19 nt, Artificial Sequence
  Description of Artificial Sequence: Synthetic oligonucleotide
ggaauggcugaaucacugu

SEQ ID NO: 419336 - RNA, 19 nt, Artificial Sequence
  Description of Artificial Sequence: Synthetic oligonucleotide
gucgaaggcugaagguuaa

SEQ ID NO: 419337 - RNA, 19 nt, Artificial Sequence
  Description of Artificial Sequence: Synthetic oligonucleotide
agguuggacugaacuuccu

SEQ ID NO: 419338 - RNA, 19 nt, Artificial Sequence
  Description of Artificial Sequence: Synthetic oligonucleotide
auuccccugacaaccccua

SEQ ID NO: 419339 - RNA, 19 nt, Artificial Sequence
  Description of Artificial Sequence: Synthetic oligonucleotide
uugcccgaugcagguccug

SEQ ID NO: 419340 - RNA, 19 nt, Artificial Sequence
  Description of Artificial Sequence: Synthetic oligonucleotide
ccccugacaaccccuauaa

SEQ ID NO: 419341 - RNA, 19 nt, Artificial Sequence
  Description of Artificial Sequence: Synthetic oligonucleotide
cuacaugucuauccacauu

SEQ ID NO: 419342 - RNA, 19 nt, Artificial Sequence
  Description of Artificial Sequence: Synthetic oligonucleotide
auugcccgaugcagguccu

SEQ ID NO: 419343 - RNA, 19 nt, Artificial Sequence
  Description of Artificial Sequence: Synthetic oligonucleotide
ggagucuauuucaucuaua

SEQ ID NO: 419344 - RNA, 19 nt, Artificial Sequence
  Description of Artificial Sequence: Synthetic oligonucleotide
augaaaccuuguaggcauu

SEQ ID NO: 419345 - RNA, 19 nt, Artificial Sequence
  Description of Artificial Sequence: Synthetic oligonucleotide
cuguccaaacauagauuuu

SEQ ID NO: 419346 - RNA, 19 nt, Artificial Sequence
  Description of Artificial Sequence: Synthetic oligonucleotide
gggugaccaaaugaaauuu

SEQ ID NO: 419347 - RNA, 19 nt, Artificial Sequence
  Description of Artificial Sequence: Synthetic oligonucleotide
cuacuuggugucagagcau

SEQ ID NO: 419348 - RNA, 19 nt, Artificial Sequence
  Description of Artificial Sequence: Synthetic oligonucleotide
auggaaggcugcagcuuua

SEQ ID NO: 419349 - RNA, 19 nt, Artificial Sequence
  Description of Artificial Sequence: Synthetic oligonucleotide
gccacgauuuaaaguaagu

SEQ ID NO: 419350 - RNA, 19 nt, Artificial Sequence
  Description of Artificial Sequence: Synthetic oligonucleotide
gccuaggcauucuccugca

SEQ ID NO: 419351 - RNA, 19 nt, Artificial Sequence
  Description of Artificial Sequence: Synthetic oligonucleotide
cguagaaaggagucuauuu

SEQ ID NO: 419352 - RNA, 19 nt, Artificial Sequence
  Description of Artificial Sequence: Synthetic oligonucleotide
cugaaaguuucacguucuu

SEQ ID NO: 419353 - RNA, 19 nt, Artificial Sequence
  Description of Artificial Sequence: Synthetic oligonucleotide
gacuaucuaucuggugcuu

SEQ ID NO: 419354 - RNA, 19 nt, Artificial Sequence
  Description of Artificial Sequence: Synthetic oligonucleotide
cccuauaaucgagacacau

SEQ ID NO: 419355 - RNA, 19 nt, Artificial Sequence
  Description of Artificial Sequence: Synthetic oligonucleotide
ggcgauugguagcucccau

SEQ ID NO: 419356 - RNA, 19 nt, Artificial Sequence
  Description of Artificial Sequence: Synthetic oligonucleotide
cgguuucguagaaaggagu

SEQ ID NO: 419357 - RNA, 19 nt, Artificial Sequence
  Description of Artificial Sequence: Synthetic oligonucleotide
ccccuauaaucgagacaca

SEQ ID NO: 419358 - RNA, 19 nt, Artificial Sequence
  Description of Artificial Sequence: Synthetic oligonucleotide
cacuaucaccuggcagcua

SEQ ID NO: 419359 - RNA, 19 nt, Artificial Sequence
  Description of Artificial Sequence: Synthetic oligonucleotide
ggccggauuucaucuucuu

SEQ ID NO: 419360 - RNA, 19 nt, Artificial Sequence
  Description of Artificial Sequence: Synthetic oligonucleotide
gcaucucgacacauuucuu

SEQ ID NO: 419361 - RNA, 19 nt, Artificial Sequence
  Description of Artificial Sequence: Synthetic oligonucleotide
ccuaggcauucuccugcau

SEQ ID NO: 419362 - RNA, 19 nt, Artificial Sequence
  Description of Artificial Sequence: Synthetic oligonucleotide
cccugacaaccccuauaau

SEQ ID NO: 419363 - RNA, 19 nt, Artificial Sequence
  Description of Artificial Sequence: Synthetic oligonucleotide
uaugaaaagggucucgugg

SEQ ID NO: 419364 - RNA, 19 nt, Artificial Sequence
  Description of Artificial Sequence: Synthetic oligonucleotide
aaaugagaguuucagguug

SEQ ID NO: 419365 - RNA, 19 nt, Artificial Sequence
  Description of Artificial Sequence: Synthetic oligonucleotide
aaguauagguccccgaguc

SEQ ID NO: 419366 - RNA, 19 nt, Artificial Sequence
  Description of Artificial Sequence: Synthetic oligonucleotide
uguagaaugugguaccacg

SEQ ID NO: 419367 - RNA, 19 nt, Artificial Sequence
  Description of Artificial Sequence: Synthetic oligonucleotide
auccacaugacgcaggcgc

SEQ ID NO: 419368 - RNA, 19 nt, Artificial Sequence
  Description of Artificial Sequence: Synthetic oligonucleotide
aauagguagucugucaccg

SEQ ID NO: 419369 - RNA, 19 nt, Artificial Sequence
  Description of Artificial Sequence: Synthetic oligonucleotide
aaguugaccacaucauuuc

SEQ ID NO: 419370 - RNA, 19 nt, Artificial Sequence
  Description of Artificial Sequence: Synthetic oligonucleotide
cauagaucucaucagaggc

SEQ ID NO: 419371 - RNA, 19 nt, Artificial Sequence
  Description of Artificial Sequence: Synthetic oligonucleotide
uaaggggccauguagaaug

SEQ ID NO: 419372 - RNA, 19 nt, Artificial Sequence
  Description of Artificial Sequence: Synthetic oligonucleotide
gagaguuucagguugggug

SEQ ID NO: 419373 - RNA, 19 nt, Artificial Sequence
  Description of Artificial Sequence: Synthetic oligonucleotide
gaagguacugccuuuggag

SEQ ID NO: 419374 - RNA, 19 nt, Artificial Sequence
  Description of Artificial Sequence: Synthetic oligonucleotide
uguagcuaagcacugguga

SEQ ID NO: 419375 - RNA, 19 nt, Artificial Sequence
  Description of Artificial Sequence: Synthetic oligonucleotide
aaagcuaagacuggcacca

SEQ ID NO: 419376 - RNA, 19 nt, Artificial Sequence
  Description of Artificial Sequence: Synthetic oligonucleotide
agggacauugaccugcagc

SEQ ID NO: 419377 - RNA, 19 nt, Artificial Sequence
  Description of Artificial Sequence: Synthetic oligonucleotide
aggaaucuagguuccauac

SEQ ID NO: 419378 - RNA, 19 nt, Artificial Sequence
  Description of Artificial Sequence: Synthetic oligonucleotide
auaagccucgaacaccacc

SEQ ID NO: 419379 - RNA, 19 nt, Artificial Sequence
  Description of Artificial Sequence: Synthetic oligonucleotide
uagaccacgugacauuugg

SEQ ID NO: 419380 - RNA, 19 nt, Artificial Sequence
  Description of Artificial Sequence: Synthetic oligonucleotide
caagucucgaugaacacag

SEQ ID NO: 419381 - RNA, 19 nt, Artificial Sequence
  Description of Artificial Sequence: Synthetic oligonucleotide
agaugugguaucuggaauc

SEQ ID NO: 419382 - RNA, 19 nt, Artificial Sequence
  Description of Artificial Sequence: Synthetic oligonucleotide
ugacucauugaucaaggug

SEQ ID NO: 419383 - RNA, 19 nt, Artificial Sequence
  Description of Artificial Sequence: Synthetic oligonucleotide
acacauugcaaguauaggu

SEQ ID NO: 419384 - RNA, 19 nt, Artificial Sequence
  Description of Artificial Sequence: Synthetic oligonucleotide
ucaaggugacccuauaugu

SEQ ID NO: 419385 - RNA, 19 nt, Artificial Sequence
  Description of Artificial Sequence: Synthetic oligonucleotide
uguuaugccaagucaaggu

SEQ ID NO: 419386 - RNA, 19 nt, Artificial Sequence
  Description of Artificial Sequence: Synthetic oligonucleotide
auaagcacauuccuggcug

SEQ ID NO: 419387 - RNA, 19 nt, Artificial Sequence
  Description of Artificial Sequence: Synthetic oligonucleotide
uucguggacaccuuuugag

SEQ ID NO: 419388 - RNA, 19 nt, Artificial Sequence
  Description of Artificial Sequence: Synthetic oligonucleotide
uguaguagccagcuucugc

SEQ ID NO: 419389 - RNA, 19 nt, Artificial Sequence
  Description of Artificial Sequence: Synthetic oligonucleotide
uaagccucgaacaccaccu

SEQ ID NO: 419390 - RNA, 19 nt, Artificial Sequence
  Description of Artificial Sequence: Synthetic oligonucleotide
ucccgcaugauauaucgag

SEQ ID NO: 419391 - RNA, 19 nt, Artificial Sequence
  Description of Artificial Sequence: Synthetic oligonucleotide
cucaccgacacauugcaag

SEQ ID NO: 419392 - RNA, 19 nt, Artificial Sequence
  Description of Artificial Sequence: Synthetic oligonucleotide
ugugguaucuggaaucuuc

SEQ ID NO: 419393 - RNA, 19 nt, Artificial Sequence
  Description of Artificial Sequence: Synthetic oligonucleotide
gaaagcuaagacuggcacc

SEQ ID NO: 419394 - RNA, 19 nt, Artificial Sequence
  Description of Artificial Sequence: Synthetic oligonucleotide
guaguagccagcuucugcc

SEQ ID NO: 419395 - RNA, 19 nt, Artificial Sequence
  Description of Artificial Sequence: Synthetic oligonucleotide
uacagcguacugacaaugg

SEQ ID NO: 419396 - RNA, 19 nt, Artificial Sequence
  Description of Artificial Sequence: Synthetic oligonucleotide
aaucucugcccauugaguu

SEQ ID NO: 419397 - RNA, 19 nt, Artificial Sequence
  Description of Artificial Sequence: Synthetic oligonucleotide
uuucgaguagacagaacca

SEQ ID NO: 419398 - RNA, 19 nt, Artificial Sequence
  Description of Artificial Sequence: Synthetic oligonucleotide
agacagaaccaucucgccg

SEQ ID NO: 419399 - RNA, 19 nt, Artificial Sequence
  Description of Artificial Sequence: Synthetic oligonucleotide
ucaugguaugaaaaggguc

SEQ ID NO: 419400 - RNA, 19 nt, Artificial Sequence
  Description of Artificial Sequence: Synthetic oligonucleotide
caugauauaucgagccagg

SEQ ID NO: 419401 - RNA, 19 nt, Artificial Sequence
  Description of Artificial Sequence: Synthetic oligonucleotide
caaauagguagucugucac

SEQ ID NO: 419402 - RNA, 19 nt, Artificial Sequence
  Description of Artificial Sequence: Synthetic oligonucleotide
ucguggacaccuuuugagg

SEQ ID NO: 419403 - RNA, 19 nt, Artificial Sequence
  Description of Artificial Sequence: Synthetic oligonucleotide
aacggaguccccuggagga

SEQ ID NO: 419404 - RNA, 19 nt, Artificial Sequence
  Description of Artificial Sequence: Synthetic oligonucleotide
gaccacacaucgcucaagg

SEQ ID NO: 419405 - RNA, 19 nt, Artificial Sequence
  Description of Artificial Sequence: Synthetic oligonucleotide
gagugauccagcugagggg

SEQ ID NO: 419406 - RNA, 19 nt, Artificial Sequence
  Description of Artificial Sequence: Synthetic oligonucleotide
gaaucuagguuccauaccu

SEQ ID NO: 419407 - RNA, 19 nt, Artificial Sequence
  Description of Artificial Sequence: Synthetic oligonucleotide
ucuuacaucuggggaaacg

SEQ ID NO: 419408 - RNA, 19 nt, Artificial Sequence
  Description of Artificial Sequence: Synthetic oligonucleotide
gacacugacuguuaugcca

SEQ ID NO: 419409 - RNA, 19 nt, Artificial Sequence
  Description of Artificial Sequence: Synthetic oligonucleotide
gucguaaggggccauguag

SEQ ID NO: 419410 - RNA, 19 nt, Artificial Sequence
  Description of Artificial Sequence: Synthetic oligonucleotide
uuggagucccgcaugauau

SEQ ID NO: 419411 - RNA, 19 nt, Artificial Sequence
  Description of Artificial Sequence: Synthetic oligonucleotide
uggguaagggguaccaccc

SEQ ID NO: 419412 - RNA, 19 nt, Artificial Sequence
  Description of Artificial Sequence: Synthetic oligonucleotide
ugacauuuggcugaggcau

SEQ ID NO: 419413 - RNA, 19 nt, Artificial Sequence
  Description of Artificial Sequence: Synthetic oligonucleotide
agaguguucaugaagcaug

SEQ ID NO: 419414 - RNA, 19 nt, Artificial Sequence
  Description of Artificial Sequence: Synthetic oligonucleotide
augaaaagggucucguggu

SEQ ID NO: 419415 - RNA, 19 nt, Artificial Sequence
  Description of Artificial Sequence: Synthetic oligonucleotide
aaccugagcacuguggcug

SEQ ID NO: 419416 - RNA, 19 nt, Artificial Sequence
  Description of Artificial Sequence: Synthetic oligonucleotide
acgacagcggauugucugc

SEQ ID NO: 419417 - RNA, 19 nt, Artificial Sequence
  Description of Artificial Sequence: Synthetic oligonucleotide
agaaugugguaccacggug

SEQ ID NO: 419418 - RNA, 19 nt, Artificial Sequence
  Description of Artificial Sequence: Synthetic oligonucleotide
uccggugcaacucagcgau

SEQ ID NO: 419419 - RNA, 19 nt, Artificial Sequence
  Description of Artificial Sequence: Synthetic oligonucleotide
uacugacaauggcugaucc

SEQ ID NO: 419420 - RNA, 19 nt, Artificial Sequence
  Description of Artificial Sequence: Synthetic oligonucleotide
gaagaugcucucuggggcc

SEQ ID NO: 419421 - RNA, 19 nt, Artificial Sequence
  Description of Artificial Sequence: Synthetic oligonucleotide
ugcccauugaguucugcag

SEQ ID NO: 419422 - RNA, 19 nt, Artificial Sequence
  Description of Artificial Sequence: Synthetic oligonucleotide
ugauccacaugacgcaggc

SEQ ID NO: 419423 - RNA, 19 nt, Artificial Sequence
  Description of Artificial Sequence: Synthetic oligonucleotide
aaaagggucucgugguccu

SEQ ID NO: 419424 - RNA, 19 nt, Artificial Sequence
  Description of Artificial Sequence: Synthetic oligonucleotide
aggguucuaaugaaauggc

SEQ ID NO: 419425 - RNA, 19 nt, Artificial Sequence
  Description of Artificial Sequence: Synthetic oligonucleotide
uagaaugugguaccacggu

SEQ ID NO: 419426 - RNA, 19 nt, Artificial Sequence
  Description of Artificial Sequence: Synthetic oligonucleotide
ucguaaggggccauguaga

SEQ ID NO: 419427 - RNA, 19 nt, Artificial Sequence
  Description of Artificial Sequence: Synthetic oligonucleotide
uaagggguaccacccagug

SEQ ID NO: 419428 - RNA, 19 nt, Artificial Sequence
  Description of Artificial Sequence: Synthetic oligonucleotide
guagaaugugguaccacgg

SEQ ID NO: 419429 - RNA, 19 nt, Artificial Sequence
  Description of Artificial Sequence: Synthetic oligonucleotide
cauugcaaguauagguccc

SEQ ID NO: 419430 - RNA, 19 nt, Artificial Sequence
  Description of Artificial Sequence: Synthetic oligonucleotide
cugacaauggcugauccac

SEQ ID NO: 419431 - RNA, 19 nt, Artificial Sequence
  Description of Artificial Sequence: Synthetic oligonucleotide
gaguucagcgggcugcagg

SEQ ID NO: 419432 - RNA, 19 nt, Artificial Sequence
  Description of Artificial Sequence: Synthetic oligonucleotide
uuuacacccaggacucucu

SEQ ID NO: 419433 - RNA, 19 nt, Artificial Sequence
  Description of Artificial Sequence: Synthetic oligonucleotide
gaaaagggucucguggucc

SEQ ID NO: 419434 - RNA, 19 nt, Artificial Sequence
  Description of Artificial Sequence: Synthetic oligonucleotide
aggacgugaacacaccacu

SEQ ID NO: 419435 - RNA, 19 nt, Artificial Sequence
  Description of Artificial Sequence: Synthetic oligonucleotide
aaggucaguucugacacgu

SEQ ID NO: 419436 - RNA, 19 nt, Artificial Sequence
  Description of Artificial Sequence: Synthetic oligonucleotide
caugccccgaccacgacag

SEQ ID NO: 419437 - RNA, 19 nt, Artificial Sequence
  Description of Artificial Sequence: Synthetic oligonucleotide
uuucguggacaccuuuuga

SEQ ID NO: 419438 - RNA, 19 nt, Artificial Sequence
  Description of Artificial Sequence: Synthetic oligonucleotide
acggacagggacauugacc

SEQ ID NO: 419439 - RNA, 19 nt, Artificial Sequence
  Description of Artificial Sequence: Synthetic oligonucleotide
gaaacggaguccccuggag

SEQ ID NO: 419440 - RNA, 19 nt, Artificial Sequence
  Description of Artificial Sequence: Synthetic oligonucleotide
agcgauuuguacaucacca

SEQ ID NO: 419441 - RNA, 19 nt, Artificial Sequence
  Description of Artificial Sequence: Synthetic oligonucleotide
aucucugcccauugaguuc

SEQ ID NO: 419442 - RNA, 19 nt, Artificial Sequence
  Description of Artificial Sequence: Synthetic oligonucleotide
guagcuaagcacuggugac

SEQ ID NO: 419443 - RNA, 19 nt, Artificial Sequence
  Description of Artificial Sequence: Synthetic oligonucleotide
uugguggcggauaagccuc

SEQ ID NO: 419444 - RNA, 19 nt, Artificial Sequence
  Description of Artificial Sequence: Synthetic oligonucleotide
ugcagcauacagcguacug

SEQ ID NO: 419445 - RNA, 19 nt, Artificial Sequence
  Description of Artificial Sequence: Synthetic oligonucleotide
uaucgagccaggccaaagu

SEQ ID NO: 419446 - RNA, 19 nt, Artificial Sequence
  Description of Artificial Sequence: Synthetic oligonucleotide
agcuaagacuggcaccagg

SEQ ID NO: 419447 - RNA, 19 nt, Artificial Sequence
  Description of Artificial Sequence: Synthetic oligonucleotide
ucccggaaagaccacacau

SEQ ID NO: 419448 - RNA, 19 nt, Artificial Sequence
  Description of Artificial Sequence: Synthetic oligonucleotide
uagacagaaccaucucgcc

SEQ ID NO: 419449 - RNA, 19 nt, Artificial Sequence
  Description of Artificial Sequence: Synthetic oligonucleotide
ggcaaaugagaguuucagg

SEQ ID NO: 419450 - RNA, 19 nt, Artificial Sequence
  Description of Artificial Sequence: Synthetic oligonucleotide
ugucgcaggagaugguuga

SEQ ID NO: 419451 - RNA, 19 nt, Artificial Sequence
  Description of Artificial Sequence: Synthetic oligonucleotide
auagguagucugucaccgg

SEQ ID NO: 419452 - RNA, 19 nt, Artificial Sequence
  Description of Artificial Sequence: Synthetic oligonucleotide
cccuauauguccuuucagg

SEQ ID NO: 419453 - RNA, 19 nt, Artificial Sequence
  Description of Artificial Sequence: Synthetic oligonucleotide
aagaguguucaugaagcau

SEQ ID NO: 419454 - RNA, 19 nt, Artificial Sequence
  Description of Artificial Sequence: Synthetic oligonucleotide
auaccuguccaggccaagc

SEQ ID NO: 419455 - RNA, 19 nt, Artificial Sequence
  Description of Artificial Sequence: Synthetic oligonucleotide
cuguuaugccaagucaagg

SEQ ID NO: 419456 - RNA, 19 nt, Artificial Sequence
  Description of Artificial Sequence: Synthetic oligonucleotide
uuacaauacacuggauggu

SEQ ID NO: 419457 - RNA, 19 nt, Artificial Sequence
  Description of Artificial Sequence: Synthetic oligonucleotide
uccccuaagaguguucaug

SEQ ID NO: 419458 - RNA, 19 nt, Artificial Sequence
  Description of Artificial Sequence: Synthetic oligonucleotide
cacgacagcggauugucug

SEQ ID NO: 419459 - RNA, 19 nt, Artificial Sequence
  Description of Artificial Sequence: Synthetic oligonucleotide
ucgaugaacacaguucuua

SEQ ID NO: 419460 - RNA, 19 nt, Artificial Sequence
  Description of Artificial Sequence: Synthetic oligonucleotide
ggaaagcuaagacuggcac

SEQ ID NO: 419461 - RNA, 19 nt, Artificial Sequence
  Description of Artificial Sequence: Synthetic oligonucleotide
gaaugugguaccacgguga

SEQ ID NO: 419462 - RNA, 19 nt, Artificial Sequence
  Description of Artificial Sequence: Synthetic oligonucleotide
ucacccaagguaugguugu

SEQ ID NO: 419463 - RNA, 19 nt, Artificial Sequence
  Description of Artificial Sequence: Synthetic oligonucleotide
guaugaaaagggucucgug

SEQ ID NO: 419464 - RNA, 19 nt, Artificial Sequence
  Description of Artificial Sequence: Synthetic oligonucleotide
cuuucguggacaccuuuug

SEQ ID NO: 419465 - RNA, 19 nt, Artificial Sequence
  Description of Artificial Sequence: Synthetic oligonucleotide
aaguagaccacgugacauu

SEQ ID NO: 419466 - RNA, 19 nt, Artificial Sequence
  Description of Artificial Sequence: Synthetic oligonucleotide
ucgaguagacagaaccauc

SEQ ID NO: 419467 - RNA, 19 nt, Artificial Sequence
  Description of Artificial Sequence: Synthetic oligonucleotide
ugcgaaucucugcccauug

SEQ ID NO: 419468 - RNA, 19 nt, Artificial Sequence
  Description of Artificial Sequence: Synthetic oligonucleotide
agccgcccacucuucaugc

SEQ ID NO: 419469 - RNA, 19 nt, Artificial Sequence
  Description of Artificial Sequence: Synthetic oligonucleotide
guuccauaccuguccaggc

SEQ ID NO: 419470 - RNA, 19 nt, Artificial Sequence
  Description of Artificial Sequence: Synthetic oligonucleotide
ucaccgacacauugcaagu

SEQ ID NO: 419471 - RNA, 19 nt, Artificial Sequence
  Description of Artificial Sequence: Synthetic oligonucleotide
agacacauuucgaguagac

SEQ ID NO: 419472 - RNA, 19 nt, Artificial Sequence
  Description of Artificial Sequence: Synthetic oligonucleotide
gcaaguauagguccccgag

SEQ ID NO: 419473 - RNA, 19 nt, Artificial Sequence
  Description of Artificial Sequence: Synthetic oligonucleotide
acuguuaugccaagucaag

SEQ ID NO: 419474 - RNA, 19 nt, Artificial Sequence
  Description of Artificial Sequence: Synthetic oligonucleotide
uucgaguagacagaaccau

SEQ ID NO: 419475 - RNA, 19 nt, Artificial Sequence
  Description of Artificial Sequence: Synthetic oligonucleotide
aggaagguacugccuuugg

SEQ ID NO: 419476 - RNA, 19 nt, Artificial Sequence
  Description of Artificial Sequence: Synthetic oligonucleotide
ucggcaaguagaccacgug

SEQ ID NO: 419477 - RNA, 19 nt, Artificial Sequence
  Description of Artificial Sequence: Synthetic oligonucleotide
uugaucaaggugacccuau

SEQ ID NO: 419478 - RNA, 19 nt, Artificial Sequence
  Description of Artificial Sequence: Synthetic oligonucleotide
auguagaaugugguaccac

SEQ ID NO: 419479 - RNA, 19 nt, Artificial Sequence
  Description of Artificial Sequence: Synthetic oligonucleotide
agucucgaugaacacaguu

SEQ ID NO: 419480 - RNA, 19 nt, Artificial Sequence
  Description of Artificial Sequence: Synthetic oligonucleotide
auacagcguacugacaaug

SEQ ID NO: 419481 - RNA, 19 nt, Artificial Sequence
  Description of Artificial Sequence: Synthetic oligonucleotide
aaucuagguuccauaccug

SEQ ID NO: 419482 - RNA, 19 nt, Artificial Sequence
  Description of Artificial Sequence: Synthetic oligonucleotide
gacuguuaugccaagucaa

SEQ ID NO: 419483 - RNA, 19 nt, Artificial Sequence
  Description of Artificial Sequence: Synthetic oligonucleotide
guagaacuggucauucaug

SEQ ID NO: 419484 - RNA, 19 nt, Artificial Sequence
  Description of Artificial Sequence: Synthetic oligonucleotide
gacccuauauguccuuuca

SEQ ID NO: 419485 - RNA, 19 nt, Artificial Sequence
  Description of Artificial Sequence: Synthetic oligonucleotide
guauagguccccgagucac

SEQ ID NO: 419486 - RNA, 19 nt, Artificial Sequence
  Description of Artificial Sequence: Synthetic oligonucleotide
gcaugauauaucgagccag

SEQ ID NO: 419487 - RNA, 19 nt, Artificial Sequence
  Description of Artificial Sequence: Synthetic oligonucleotide
accacgacagcggauuguc

SEQ ID NO: 419488 - RNA, 19 nt, Artificial Sequence
  Description of Artificial Sequence: Synthetic oligonucleotide
ugcaaguauagguccccga

SEQ ID NO: 419489 - RNA, 19 nt, Artificial Sequence
  Description of Artificial Sequence: Synthetic oligonucleotide
ugccccgaccacgacagcg

SEQ ID NO: 419490 - RNA, 19 nt, Artificial Sequence
  Description of Artificial Sequence: Synthetic oligonucleotide
gaccacgugacauuuggcu

SEQ ID NO: 419491 - RNA, 19 nt, Artificial Sequence
  Description of Artificial Sequence: Synthetic oligonucleotide
aguauagguccccgaguca

SEQ ID NO: 419492 - RNA, 19 nt, Artificial Sequence
  Description of Artificial Sequence: Synthetic oligonucleotide
ggaaucuagguuccauacc

SEQ ID NO: 419493 - RNA, 19 nt, Artificial Sequence
  Description of Artificial Sequence: Synthetic oligonucleotide
ugggacacugacuguuaug

SEQ ID NO: 419494 - RNA, 19 nt, Artificial Sequence
  Description of Artificial Sequence: Synthetic oligonucleotide
uccacaugacgcaggcgca

SEQ ID NO: 419495 - RNA, 19 nt, Artificial Sequence
  Description of Artificial Sequence: Synthetic oligonucleotide
ugaccuccugcgaaucucu

SEQ ID NO: 419496 - RNA, 19 nt, Artificial Sequence
  Description of Artificial Sequence: Synthetic oligonucleotide
ucaaggugguguagaggcu

SEQ ID NO: 419497 - RNA, 19 nt, Artificial Sequence
  Description of Artificial Sequence: Synthetic oligonucleotide
cacauuucgaguagacaga

SEQ ID NO: 419498 - RNA, 19 nt, Artificial Sequence
  Description of Artificial Sequence: Synthetic oligonucleotide
agacccuacaggaagcugu

SEQ ID NO: 419499 - RNA, 19 nt, Artificial Sequence
  Description of Artificial Sequence: Synthetic oligonucleotide
augacgcaggcgcagugug

SEQ ID NO: 419500 - RNA, 19 nt, Artificial Sequence
  Description of Artificial Sequence: Synthetic oligonucleotide
accgacacauugcaaguau

SEQ ID NO: 419501 - RNA, 19 nt, Artificial Sequence
  Description of Artificial Sequence: Synthetic oligonucleotide
agcggauugucugcucccc

SEQ ID NO: 419502 - RNA, 19 nt, Artificial Sequence
  Description of Artificial Sequence: Synthetic oligonucleotide
acgaggucuguguagcuaa

SEQ ID NO: 419503 - RNA, 19 nt, Artificial Sequence
  Description of Artificial Sequence: Synthetic oligonucleotide
cucagacacauuucgagua

SEQ ID NO: 419504 - RNA, 19 nt, Artificial Sequence
  Description of Artificial Sequence: Synthetic oligonucleotide
ccauguagaaugugguacc

SEQ ID NO: 419505 - RNA, 19 nt, Artificial Sequence
  Description of Artificial Sequence: Synthetic oligonucleotide
agcacuggugacucauuga

SEQ ID NO: 419506 - RNA, 19 nt, Artificial Sequence
  Description of Artificial Sequence: Synthetic oligonucleotide
agcuugccuucacagauaa

SEQ ID NO: 419507 - RNA, 19 nt, Artificial Sequence
  Description of Artificial Sequence: Synthetic oligonucleotide
gaugggacauaguugucgu

SEQ ID NO: 419508 - RNA, 19 nt, Artificial Sequence
  Description of Artificial Sequence: Synthetic oligonucleotide
ccgcaugauauaucgagcc

SEQ ID NO: 419509 - RNA, 19 nt, Artificial Sequence
  Description of Artificial Sequence: Synthetic oligonucleotide
aguucuugggaagaucaaa

SEQ ID NO: 419510 - RNA, 19 nt, Artificial Sequence
  Description of Artificial Sequence: Synthetic oligonucleotide
ugggccaugcgguagccuc

SEQ ID NO: 419511 - RNA, 19 nt, Artificial Sequence
  Description of Artificial Sequence: Synthetic oligonucleotide
agguccccgagucacucag

SEQ ID NO: 419512 - RNA, 19 nt, Artificial Sequence
  Description of Artificial Sequence: Synthetic oligonucleotide
uguuccuagcagucucaca

SEQ ID NO: 419513 - RNA, 19 nt, Artificial Sequence
  Description of Artificial Sequence: Synthetic oligonucleotide
ggucaguucugacacguac

SEQ ID NO: 419514 - RNA, 19 nt, Artificial Sequence
  Description of Artificial Sequence: Synthetic oligonucleotide
cauucaagguggagcuggc

SEQ ID NO: 419515 - RNA, 19 nt, Artificial Sequence
  Description of Artificial Sequence: Synthetic oligonucleotide
cauagccauucucaaucac

SEQ ID NO: 419516 - RNA, 19 nt, Artificial Sequence
  Description of Artificial Sequence: Synthetic oligonucleotide
gugacauuuggcugaggca

SEQ ID NO: 419517 - RNA, 19 nt, Artificial Sequence
  Description of Artificial Sequence: Synthetic oligonucleotide
gcauacagcguacugacaa

SEQ ID NO: 419518 - RNA, 19 nt, Artificial Sequence
  Description of Artificial Sequence: Synthetic oligonucleotide
acgugaacacaccacuuua

SEQ ID NO: 419519 - RNA, 19 nt, Artificial Sequence
  Description of Artificial Sequence: Synthetic oligonucleotide
agaucaaaguggagugauc

SEQ ID NO: 419520 - RNA, 19 nt, Artificial Sequence
  Description of Artificial Sequence: Synthetic oligonucleotide
ucgugguccuucugugucc

SEQ ID NO: 419521 - RNA, 19 nt, Artificial Sequence
  Description of Artificial Sequence: Synthetic oligonucleotide
acauuucgaguagacagaa

SEQ ID NO: 419522 - RNA, 19 nt, Artificial Sequence
  Description of Artificial Sequence: Synthetic oligonucleotide
cucgugguccuucuguguc

SEQ ID NO: 419523 - RNA, 19 nt, Artificial Sequence
  Description of Artificial Sequence: Synthetic oligonucleotide
cacguaccgggucucagac

SEQ ID NO: 419524 - RNA, 19 nt, Artificial Sequence
  Description of Artificial Sequence: Synthetic oligonucleotide
guccucaagacagcuguag

SEQ ID NO: 419525 - RNA, 19 nt, Artificial Sequence
  Description of Artificial Sequence: Synthetic oligonucleotide
ucucggcaaguagaccacg

SEQ ID NO: 419526 - RNA, 19 nt, Artificial Sequence
  Description of Artificial Sequence: Synthetic oligonucleotide
ugagaguuucagguugggu

SEQ ID NO: 419527 - RNA, 19 nt, Artificial Sequence
  Description of Artificial Sequence: Synthetic oligonucleotide
cacaggacaguugguggcg

SEQ ID NO: 419528 - RNA, 19 nt, Artificial Sequence
  Description of Artificial Sequence: Synthetic oligonucleotide
auguacaggauggagccaa

SEQ ID NO: 419529 - RNA, 19 nt, Artificial Sequence
  Description of Artificial Sequence: Synthetic oligonucleotide
gaaguugaccacaucauuu

SEQ ID NO: 419530 - RNA, 19 nt, Artificial Sequence
  Description of Artificial Sequence: Synthetic oligonucleotide
ugcaacguccggcuccggu

SEQ ID NO: 419531 - RNA, 19 nt, Artificial Sequence
  Description of Artificial Sequence: Synthetic oligonucleotide
ggcggauaagccucgaaca

SEQ ID NO: 419532 - RNA, 19 nt, Artificial Sequence
  Description of Artificial Sequence: Synthetic oligonucleotide
gaggacgugaacacaccac

SEQ ID NO: 419533 - RNA, 19 nt, Artificial Sequence
  Description of Artificial Sequence: Synthetic oligonucleotide
ccugaauccccagaugugg

SEQ ID NO: 419534 - RNA, 19 nt, Artificial Sequence
  Description of Artificial Sequence: Synthetic oligonucleotide
ugaucaaggugacccuaua

SEQ ID NO: 419535 - RNA, 19 nt, Artificial Sequence
  Description of Artificial Sequence: Synthetic oligonucleotide
acgcucaccgacacauugc

SEQ ID NO: 419536 - RNA, 19 nt, Artificial Sequence
  Description of Artificial Sequence: Synthetic oligonucleotide
ugaauccccagauguggua

SEQ ID NO: 419537 - RNA, 19 nt, Artificial Sequence
  Description of Artificial Sequence: Synthetic oligonucleotide
uggcuacacaggaggacgu

SEQ ID NO: 419538 - RNA, 19 nt, Artificial Sequence
  Description of Artificial Sequence: Synthetic oligonucleotide
uucugacacguaccggguc

SEQ ID NO: 419539 - RNA, 19 nt, Artificial Sequence
  Description of Artificial Sequence: Synthetic oligonucleotide
agaccacgugacauuuggc

SEQ ID NO: 419540 - RNA, 19 nt, Artificial Sequence
  Description of Artificial Sequence: Synthetic oligonucleotide
gggcagacccuacaggaag

SEQ ID NO: 419541 - RNA, 19 nt, Artificial Sequence
  Description of Artificial Sequence: Synthetic oligonucleotide
cauccuguacucagcucug

SEQ ID NO: 419542 - RNA, 19 nt, Artificial Sequence
  Description of Artificial Sequence: Synthetic oligonucleotide
caacguccggcuccggugc

SEQ ID NO: 419543 - RNA, 19 nt, Artificial Sequence
  Description of Artificial Sequence: Synthetic oligonucleotide
uugaggagguguugacuuc

SEQ ID NO: 419544 - RNA, 19 nt, Artificial Sequence
  Description of Artificial Sequence: Synthetic oligonucleotide
aguagaccacgugacauuu

SEQ ID NO: 419545 - RNA, 19 nt, Artificial Sequence
  Description of Artificial Sequence: Synthetic oligonucleotide
gguaccacccagugugaag

SEQ ID NO: 419546 - RNA, 19 nt, Artificial Sequence
  Description of Artificial Sequence: Synthetic oligonucleotide
ugacagcuuucguggacac

SEQ ID NO: 419547 - RNA, 19 nt, Artificial Sequence
  Description of Artificial Sequence: Synthetic oligonucleotide
gauccacaugacgcaggcg

SEQ ID NO: 419548 - RNA, 19 nt, Artificial Sequence
  Description of Artificial Sequence: Synthetic oligonucleotide
augugguaccacggugacc

SEQ ID NO: 419549 - RNA, 19 nt, Artificial Sequence
  Description of Artificial Sequence: Synthetic oligonucleotide
aggaggguugggugcuagg

SEQ ID NO: 419550 - RNA, 19 nt, Artificial Sequence
  Description of Artificial Sequence: Synthetic oligonucleotide
ggauaagccucgaacacca

SEQ ID NO: 419551 - RNA, 19 nt, Artificial Sequence
  Description of Artificial Sequence: Synthetic oligonucleotide
ugucguaaggggccaugua

SEQ ID NO: 419552 - RNA, 19 nt, Artificial Sequence
  Description of Artificial Sequence: Synthetic oligonucleotide
acacguaccgggucucaga

SEQ ID NO: 419553 - RNA, 19 nt, Artificial Sequence
  Description of Artificial Sequence: Synthetic oligonucleotide
aguuucagguugggugggg

SEQ ID NO: 419554 - RNA, 19 nt, Artificial Sequence
  Description of Artificial Sequence: Synthetic oligonucleotide
guuggagucccgcaugaua

SEQ ID NO: 419555 - RNA, 19 nt, Artificial Sequence
  Description of Artificial Sequence: Synthetic oligonucleotide
auugaucaaggugacccua

SEQ ID NO: 419556 - RNA, 19 nt, Artificial Sequence
  Description of Artificial Sequence: Synthetic oligonucleotide
acaccccaaauagguaguc

SEQ ID NO: 419557 - RNA, 19 nt, Artificial Sequence
  Description of Artificial Sequence: Synthetic oligonucleotide
gagccaauucgggaggaca

SEQ ID NO: 419558 - RNA, 19 nt, Artificial Sequence
  Description of Artificial Sequence: Synthetic oligonucleotide
ggcaaccugagcacugugg

SEQ ID NO: 419559 - RNA, 19 nt, Artificial Sequence
  Description of Artificial Sequence: Synthetic oligonucleotide
cacuggugacucauugauc

SEQ ID NO: 419560 - RNA, 19 nt, Artificial Sequence
  Description of Artificial Sequence: Synthetic oligonucleotide
uggcaaccugagcacugug

SEQ ID NO: 419561 - RNA, 19 nt, Artificial Sequence
  Description of Artificial Sequence: Synthetic oligonucleotide
ucgcucaaggugguguaga

SEQ ID NO: 419562 - RNA, 19 nt, Artificial Sequence
  Description of Artificial Sequence: Synthetic oligonucleotide
ucacccuggcggaccacug

SEQ ID NO: 419563 - RNA, 19 nt, Artificial Sequence
  Description of Artificial Sequence: Synthetic oligonucleotide
ggguucuaaugaaauggcc

SEQ ID NO: 419564 - RNA, 19 nt, Artificial Sequence
  Description of Artificial Sequence: Synthetic oligonucleotide
uguacaggauggagccaau

SEQ ID NO: 419565 - RNA, 19 nt, Artificial Sequence
  Description of Artificial Sequence: Synthetic oligonucleotide
acacgcaccaaggucaguu

SEQ ID NO: 419566 - RNA, 19 nt, Artificial Sequence
  Description of Artificial Sequence: Synthetic oligonucleotide
uaccgggucucagacacau

SEQ ID NO: 419567 - RNA, 19 nt, Artificial Sequence
  Description of Artificial Sequence: Synthetic oligonucleotide
cguaccgggucucagacac

SEQ ID NO: 419568 - RNA, 19 nt, Artificial Sequence
  Description of Artificial Sequence: Synthetic oligonucleotide
gucaccggcuccaccagcc

SEQ ID NO: 419569 - RNA, 19 nt, Artificial Sequence
  Description of Artificial Sequence: Synthetic oligonucleotide
aucccggaaagaccacaca

SEQ ID NO: 419570 - RNA, 19 nt, Artificial Sequence
  Description of Artificial Sequence: Synthetic oligonucleotide
guguagcuaagcacuggug

SEQ ID NO: 419571 - RNA, 19 nt, Artificial Sequence
  Description of Artificial Sequence: Synthetic oligonucleotide
aagcuaagacuggcaccag

SEQ ID NO: 419572 - RNA, 19 nt, Artificial Sequence
  Description of Artificial Sequence: Synthetic oligonucleotide
cuacacaggaggacgugaa

SEQ ID NO: 419573 - RNA, 19 nt, Artificial Sequence
  Description of Artificial Sequence: Synthetic oligonucleotide
uaguugucguaaggggcca

SEQ ID NO: 419574 - RNA, 19 nt, Artificial Sequence
  Description of Artificial Sequence: Synthetic oligonucleotide
gcggauaagccucgaacac

SEQ ID NO: 419575 - RNA, 19 nt, Artificial Sequence
  Description of Artificial Sequence: Synthetic oligonucleotide
cacggacagggacauugac

SEQ ID NO: 419576 - RNA, 19 nt, Artificial Sequence
  Description of Artificial Sequence: Synthetic oligonucleotide
aggggcaacuggcuacaca

SEQ ID NO: 419577 - RNA, 19 nt, Artificial Sequence
  Description of Artificial Sequence: Synthetic oligonucleotide
aaggcccgcaugguguagu

SEQ ID NO: 419578 - RNA, 19 nt, Artificial Sequence
  Description of Artificial Sequence: Synthetic oligonucleotide
ggaggcaaaugagaguuuc

SEQ ID NO: 419579 - RNA, 19 nt, Artificial Sequence
  Description of Artificial Sequence: Synthetic oligonucleotide
gcauccuguacucagcucu

SEQ ID NO: 419580 - RNA, 19 nt, Artificial Sequence
  Description of Artificial Sequence: Synthetic oligonucleotide
cccgcaugauauaucgagc

SEQ ID NO: 419581 - RNA, 19 nt, Artificial Sequence
  Description of Artificial Sequence: Synthetic oligonucleotide
gacgugaacacaccacuuu

SEQ ID NO: 419582 - RNA, 19 nt, Artificial Sequence
  Description of Artificial Sequence: Synthetic oligonucleotide
aguguuccuagcagucuca

SEQ ID NO: 419583 - RNA, 19 nt, Artificial Sequence
  Description of Artificial Sequence: Synthetic oligonucleotide
guugucguaaggggccaug

SEQ ID NO: 419584 - RNA, 19 nt, Artificial Sequence
  Description of Artificial Sequence: Synthetic oligonucleotide
caggaagguacugccuuug

SEQ ID NO: 419585 - RNA, 19 nt, Artificial Sequence
  Description of Artificial Sequence: Synthetic oligonucleotide
ucggcagcgucaggcuugg

SEQ ID NO: 419586 - RNA, 19 nt, Artificial Sequence
  Description of Artificial Sequence: Synthetic oligonucleotide
gcaacguccggcuccggug

SEQ ID NO: 419587 - RNA, 19 nt, Artificial Sequence
  Description of Artificial Sequence: Synthetic oligonucleotide
aucggcagcgucaggcuug

SEQ ID NO: 419588 - RNA, 19 nt, Artificial Sequence
  Description of Artificial Sequence: Synthetic oligonucleotide
cugccaagucucgaugaac

SEQ ID NO: 419589 - RNA, 19 nt, Artificial Sequence
  Description of Artificial Sequence: Synthetic oligonucleotide
gcaauugcacuuggggacc

SEQ ID NO: 419590 - RNA, 19 nt, Artificial Sequence
  Description of Artificial Sequence: Synthetic oligonucleotide
cagcacacggacagggaca

SEQ ID NO: 419591 - RNA, 19 nt, Artificial Sequence
  Description of Artificial Sequence: Synthetic oligonucleotide
gcagcauacagcguacuga

SEQ ID NO: 419592 - RNA, 19 nt, Artificial Sequence
  Description of Artificial Sequence: Synthetic oligonucleotide
ccaaauagguagucuguca

SEQ ID NO: 419593 - RNA, 19 nt, Artificial Sequence
  Description of Artificial Sequence: Synthetic oligonucleotide
cacgcaccaaggucaguuc

SEQ ID NO: 419594 - RNA, 19 nt, Artificial Sequence
  Description of Artificial Sequence: Synthetic oligonucleotide
guacugacaauggcugauc

SEQ ID NO: 419595 - RNA, 19 nt, Artificial Sequence
  Description of Artificial Sequence: Synthetic oligonucleotide
acggugaccuccugcgaau

SEQ ID NO: 419596 - RNA, 19 nt, Artificial Sequence
  Description of Artificial Sequence: Synthetic oligonucleotide
ggccugggaaagcuaagac

SEQ ID NO: 419597 - RNA, 19 nt, Artificial Sequence
  Description of Artificial Sequence: Synthetic oligonucleotide
aacguccggcuccggugca

SEQ ID NO: 419598 - RNA, 19 nt, Artificial Sequence
  Description of Artificial Sequence: Synthetic oligonucleotide
agcacacggacagggacau

SEQ ID NO: 419599 - RNA, 19 nt, Artificial Sequence
  Description of Artificial Sequence: Synthetic oligonucleotide
uagguccccgagucacuca

SEQ ID NO: 419600 - RNA, 19 nt, Artificial Sequence
  Description of Artificial Sequence: Synthetic oligonucleotide
aaggggccauguagaaugu

SEQ ID NO: 419601 - RNA, 19 nt, Artificial Sequence
  Description of Artificial Sequence: Synthetic oligonucleotide
auauaucgagccaggccaa

SEQ ID NO: 419602 - RNA, 19 nt, Artificial Sequence
  Description of Artificial Sequence: Synthetic oligonucleotide
ggugcaacucagcgauuug

SEQ ID NO: 419603 - RNA, 19 nt, Artificial Sequence
  Description of Artificial Sequence: Synthetic oligonucleotide
agcuuucguggacaccuuu

SEQ ID NO: 419604 - RNA, 19 nt, Artificial Sequence
  Description of Artificial Sequence: Synthetic oligonucleotide
accaucucgccggcacugg

SEQ ID NO: 419605 - RNA, 19 nt, Artificial Sequence
  Description of Artificial Sequence: Synthetic oligonucleotide
auccccagaugugguaucu

SEQ ID NO: 419606 - RNA, 19 nt, Artificial Sequence
  Description of Artificial Sequence: Synthetic oligonucleotide
gcaaguagaccacgugaca

SEQ ID NO: 419607 - RNA, 19 nt, Artificial Sequence
  Description of Artificial Sequence: Synthetic oligonucleotide
ggggaaacggaguccccug

SEQ ID NO: 419608 - RNA, 19 nt, Artificial Sequence
  Description of Artificial Sequence: Synthetic oligonucleotide
uggagucccgcaugauaua

SEQ ID NO: 419609 - RNA, 19 nt, Artificial Sequence
  Description of Artificial Sequence: Synthetic oligonucleotide
agcucgggccugggaaagc

SEQ ID NO: 419610 - RNA, 19 nt, Artificial Sequence
  Description of Artificial Sequence: Synthetic oligonucleotide
cugucaccggcuccaccag

SEQ ID NO: 419611 - RNA, 19 nt, Artificial Sequence
  Description of Artificial Sequence: Synthetic oligonucleotide
agucaaggucugugcaauu

SEQ ID NO: 419612 - RNA, 19 nt, Artificial Sequence
  Description of Artificial Sequence: Synthetic oligonucleotide
gauaagccucgaacaccac

SEQ ID NO: 419613 - RNA, 19 nt, Artificial Sequence
  Description of Artificial Sequence: Synthetic oligonucleotide
caaguauagguccccgagu

SEQ ID NO: 419614 - RNA, 19 nt, Artificial Sequence
  Description of Artificial Sequence: Synthetic oligonucleotide
guagaccacgugacauuug

SEQ ID NO: 419615 - RNA, 19 nt, Artificial Sequence
  Description of Artificial Sequence: Synthetic oligonucleotide
cacgugacauuuggcugag

SEQ ID NO: 419616 - RNA, 19 nt, Artificial Sequence
  Description of Artificial Sequence: Synthetic oligonucleotide
cauugaucaaggugacccu

SEQ ID NO: 419617 - RNA, 19 nt, Artificial Sequence
  Description of Artificial Sequence: Synthetic oligonucleotide
caaguagaccacgugacau

SEQ ID NO: 419618 - RNA, 19 nt, Artificial Sequence
  Description of Artificial Sequence: Synthetic oligonucleotide
ggaggaggguucuaaugaa

SEQ ID NO: 419619 - RNA, 19 nt, Artificial Sequence
  Description of Artificial Sequence: Synthetic oligonucleotide
cagccgcccacucuucaug

SEQ ID NO: 419620 - RNA, 19 nt, Artificial Sequence
  Description of Artificial Sequence: Synthetic oligonucleotide
ccuagcagucucacauagc

SEQ ID NO: 419621 - RNA, 19 nt, Artificial Sequence
  Description of Artificial Sequence: Synthetic oligonucleotide
cgugaacacaccacuuuac

SEQ ID NO: 419622 - RNA, 19 nt, Artificial Sequence
  Description of Artificial Sequence: Synthetic oligonucleotide
gaauccccagaugugguau

SEQ ID NO: 419623 - RNA, 19 nt, Artificial Sequence
  Description of Artificial Sequence: Synthetic oligonucleotide
cgguagccucucuugaugg

SEQ ID NO: 419624 - RNA, 19 nt, Artificial Sequence
  Description of Artificial Sequence: Synthetic oligonucleotide
uccccagaugugguaucug

SEQ ID NO: 419625 - RNA, 19 nt, Artificial Sequence
  Description of Artificial Sequence: Synthetic oligonucleotide
aggugacccuauauguccu

SEQ ID NO: 419626 - RNA, 19 nt, Artificial Sequence
  Description of Artificial Sequence: Synthetic oligonucleotide
cauaccuguccaggccaag

SEQ ID NO: 419627 - RNA, 19 nt, Artificial Sequence
  Description of Artificial Sequence: Synthetic oligonucleotide
acguaccgggucucagaca

SEQ ID NO: 419628 - RNA, 19 nt, Artificial Sequence
  Description of Artificial Sequence: Synthetic oligonucleotide
gaaggcccgcaugguguag

SEQ ID NO: 419629 - RNA, 19 nt, Artificial Sequence
  Description of Artificial Sequence: Synthetic oligonucleotide
ggcugccaagucucgauga

SEQ ID NO: 419630 - RNA, 19 nt, Artificial Sequence
  Description of Artificial Sequence: Synthetic oligonucleotide
cacggugaccuccugcgaa

SEQ ID NO: 419631 - RNA, 19 nt, Artificial Sequence
  Description of Artificial Sequence: Synthetic oligonucleotide
gucucggcaaguagaccac

SEQ ID NO: 419632 - RNA, 19 nt, Artificial Sequence
  Description of Artificial Sequence: Synthetic oligonucleotide
cuccggugcaacucagcga

SEQ ID NO: 419633 - RNA, 19 nt, Artificial Sequence
  Description of Artificial Sequence: Synthetic oligonucleotide
ggucauucacgcucaccga

SEQ ID NO: 419634 - RNA, 19 nt, Artificial Sequence
  Description of Artificial Sequence: Synthetic oligonucleotide
gccaagucucgaugaacac

SEQ ID NO: 419635 - RNA, 19 nt, Artificial Sequence
  Description of Artificial Sequence: Synthetic oligonucleotide
gagucccgcaugauauauc

SEQ ID NO: 419636 - RNA, 19 nt, Artificial Sequence
  Description of Artificial Sequence: Synthetic oligonucleotide
augggacauaguugucgua

SEQ ID NO: 419637 - RNA, 19 nt, Artificial Sequence
  Description of Artificial Sequence: Synthetic oligonucleotide
aagucucgaugaacacagu

SEQ ID NO: 419638 - RNA, 19 nt, Artificial Sequence
  Description of Artificial Sequence: Synthetic oligonucleotide
gcgauuuguacaucaccaa

SEQ ID NO: 419639 - RNA, 19 nt, Artificial Sequence
  Description of Artificial Sequence: Synthetic oligonucleotide
agcccaacucuuccucuua

SEQ ID NO: 419640 - RNA, 19 nt, Artificial Sequence
  Description of Artificial Sequence: Synthetic oligonucleotide
acggaguccccuggaggag

SEQ ID NO: 419641 - RNA, 19 nt, Artificial Sequence
  Description of Artificial Sequence: Synthetic oligonucleotide
cagacccuacaggaagcug

SEQ ID NO: 419642 - RNA, 19 nt, Artificial Sequence
  Description of Artificial Sequence: Synthetic oligonucleotide
ggcagacccuacaggaagc

SEQ ID NO: 419643 - RNA, 19 nt, Artificial Sequence
  Description of Artificial Sequence: Synthetic oligonucleotide
cugaauccccagauguggu

SEQ ID NO: 419644 - RNA, 19 nt, Artificial Sequence
  Description of Artificial Sequence: Synthetic oligonucleotide
augccccgaccacgacagc

SEQ ID NO: 419645 - RNA, 19 nt, Artificial Sequence
  Description of Artificial Sequence: Synthetic oligonucleotide
gcucucuggggccauccac

SEQ ID NO: 419646 - RNA, 19 nt, Artificial Sequence
  Description of Artificial Sequence: Synthetic oligonucleotide
gcugaggcaugccccgacc

SEQ ID NO: 419647 - RNA, 19 nt, Artificial Sequence
  Description of Artificial Sequence: Synthetic oligonucleotide
cuaagcacuggugacucau

SEQ ID NO: 419648 - RNA, 19 nt, Artificial Sequence
  Description of Artificial Sequence: Synthetic oligonucleotide
gaaccaucucgccggcacu

SEQ ID NO: 419649 - RNA, 19 nt, Artificial Sequence
  Description of Artificial Sequence: Synthetic oligonucleotide
gugcaacucagcgauuugu

SEQ ID NO: 419650 - RNA, 19 nt, Artificial Sequence
  Description of Artificial Sequence: Synthetic oligonucleotide
guccccgagucacucagcu

SEQ ID NO: 419651 - RNA, 19 nt, Artificial Sequence
  Description of Artificial Sequence: Synthetic oligonucleotide
acacggacagggacauuga

SEQ ID NO: 419652 - RNA, 19 nt, Artificial Sequence
  Description of Artificial Sequence: Synthetic oligonucleotide
ggucucagacacauuucga

SEQ ID NO: 419653 - RNA, 19 nt, Artificial Sequence
  Description of Artificial Sequence: Synthetic oligonucleotide
gcuacacaggaggacguga

SEQ ID NO: 419654 - RNA, 19 nt, Artificial Sequence
  Description of Artificial Sequence: Synthetic oligonucleotide
cggauaagccucgaacacc

SEQ ID NO: 419655 - RNA, 19 nt, Artificial Sequence
  Description of Artificial Sequence: Synthetic oligonucleotide
ugggugcuaggaggcaaau

SEQ ID NO: 419656 - RNA, 19 nt, Artificial Sequence
  Description of Artificial Sequence: Synthetic oligonucleotide
ucgccggcacuggagucac

SEQ ID NO: 419657 - RNA, 19 nt, Artificial Sequence
  Description of Artificial Sequence: Synthetic oligonucleotide
cucggcaaguagaccacgu

SEQ ID NO: 419658 - RNA, 19 nt, Artificial Sequence
  Description of Artificial Sequence: Synthetic oligonucleotide
aggcaugccccgaccacga

SEQ ID NO: 419659 - RNA, 19 nt, Artificial Sequence
  Description of Artificial Sequence: Synthetic oligonucleotide
gcccaacucuuccucuuac

SEQ ID NO: 419660 - RNA, 19 nt, Artificial Sequence
  Description of Artificial Sequence: Synthetic oligonucleotide
acacaucgcucaagguggu

SEQ ID NO: 419661 - RNA, 19 nt, Artificial Sequence
  Description of Artificial Sequence: Synthetic oligonucleotide
guaagggguaccacccagu

SEQ ID NO: 419662 - RNA, 19 nt, Artificial Sequence
  Description of Artificial Sequence: Synthetic oligonucleotide
caaccugagcacuguggcu

SEQ ID NO: 419663 - RNA, 19 nt, Artificial Sequence
  Description of Artificial Sequence: Synthetic oligonucleotide
ggaucccggaaagaccaca

SEQ ID NO: 419664 - RNA, 19 nt, Artificial Sequence
  Description of Artificial Sequence: Synthetic oligonucleotide
aguugucguaaggggccau

SEQ ID NO: 419665 - RNA, 19 nt, Artificial Sequence
  Description of Artificial Sequence: Synthetic oligonucleotide
auucgggaggacaccccaa

SEQ ID NO: 419666 - RNA, 19 nt, Artificial Sequence
  Description of Artificial Sequence: Synthetic oligonucleotide
gcgaaucucugcccauuga

SEQ ID NO: 419667 - RNA, 19 nt, Artificial Sequence
  Description of Artificial Sequence: Synthetic oligonucleotide
gggugcuaggaggcaaaug

SEQ ID NO: 419668 - RNA, 19 nt, Artificial Sequence
  Description of Artificial Sequence: Synthetic oligonucleotide
acgugacauuuggcugagg

SEQ ID NO: 419669 - RNA, 19 nt, Artificial Sequence
  Description of Artificial Sequence: Synthetic oligonucleotide
ggcuacacaggaggacgug

SEQ ID NO: 419670 - RNA, 19 nt, Artificial Sequence
  Description of Artificial Sequence: Synthetic oligonucleotide
gcguacugacaauggcuga

SEQ ID NO: 419671 - RNA, 19 nt, Artificial Sequence
  Description of Artificial Sequence: Synthetic oligonucleotide
cacccaagguaugguuguc

SEQ ID NO: 419672 - RNA, 19 nt, Artificial Sequence
  Description of Artificial Sequence: Synthetic oligonucleotide
ggcugaggcaugccccgac

SEQ ID NO: 419673 - RNA, 19 nt, Artificial Sequence
  Description of Artificial Sequence: Synthetic oligonucleotide
guaaggggccauguagaau

SEQ ID NO: 419674 - RNA, 19 nt, Artificial Sequence
  Description of Artificial Sequence: Synthetic oligonucleotide
cacgaggucuguguagcua

SEQ ID NO: 419675 - RNA, 19 nt, Artificial Sequence
  Description of Artificial Sequence: Synthetic oligonucleotide
gguugaggagguguugacu

SEQ ID NO: 419676 - RNA, 19 nt, Artificial Sequence
  Description of Artificial Sequence: Synthetic oligonucleotide
uacugccuuuggagaugua

SEQ ID NO: 419677 - RNA, 19 nt, Artificial Sequence
  Description of Artificial Sequence: Synthetic oligonucleotide
gaggggcaacuggcuacac

SEQ ID NO: 419678 - RNA, 19 nt, Artificial Sequence
  Description of Artificial Sequence: Synthetic oligonucleotide
gucccgcaugauauaucga

SEQ ID NO: 419679 - RNA, 19 nt, Artificial Sequence
  Description of Artificial Sequence: Synthetic oligonucleotide
gcuaagcacuggugacuca

SEQ ID NO: 419680 - RNA, 19 nt, Artificial Sequence
  Description of Artificial Sequence: Synthetic oligonucleotide
caccugcaacguccggcuc

SEQ ID NO: 419681 - RNA, 19 nt, Artificial Sequence
  Description of Artificial Sequence: Synthetic oligonucleotide
aggaggcaaaugagaguuu

SEQ ID NO: 419682 - RNA, 19 nt, Artificial Sequence
  Description of Artificial Sequence: Synthetic oligonucleotide
caugacgcaggcgcagugu

SEQ ID NO: 419683 - RNA, 19 nt, Artificial Sequence
  Description of Artificial Sequence: Synthetic oligonucleotide
ggagccaauucgggaggac

SEQ ID NO: 419684 - RNA, 19 nt, Artificial Sequence
  Description of Artificial Sequence: Synthetic oligonucleotide
caccgacacauugcaagua

SEQ ID NO: 419685 - RNA, 19 nt, Artificial Sequence
  Description of Artificial Sequence: Synthetic oligonucleotide
ucucacccuggcggaccac

SEQ ID NO: 419686 - RNA, 19 nt, Artificial Sequence
  Description of Artificial Sequence: Synthetic oligonucleotide
gggucucgugguccuucug

SEQ ID NO: 419687 - RNA, 19 nt, Artificial Sequence
  Description of Artificial Sequence: Synthetic oligonucleotide
ggagucccgcaugauauau

SEQ ID NO: 419688 - RNA, 19 nt, Artificial Sequence
  Description of Artificial Sequence: Synthetic oligonucleotide
gguugggugcuaggaggca

SEQ ID NO: 419689 - RNA, 19 nt, Artificial Sequence
  Description of Artificial Sequence: Synthetic oligonucleotide
caccccaaauagguagucu

SEQ ID NO: 419690 - RNA, 19 nt, Artificial Sequence
  Description of Artificial Sequence: Synthetic oligonucleotide
ccucuuacaucuggggaaa

SEQ ID NO: 419691 - RNA, 19 nt, Artificial Sequence
  Description of Artificial Sequence: Synthetic oligonucleotide
ccccaaauagguagucugu

SEQ ID NO: 419692 - RNA, 19 nt, Artificial Sequence
  Description of Artificial Sequence: Synthetic oligonucleotide
ccgacacauugcaaguaua

SEQ ID NO: 419693 - RNA, 19 nt, Artificial Sequence
  Description of Artificial Sequence: Synthetic oligonucleotide
guaccgggucucagacaca

SEQ ID NO: 419694 - RNA, 19 nt, Artificial Sequence
  Description of Artificial Sequence: Synthetic oligonucleotide
guacaggauggagccaauu

SEQ ID NO: 419695 - RNA, 19 nt, Artificial Sequence
  Description of Artificial Sequence: Synthetic oligonucleotide
gugacccuauauguccuuu

SEQ ID NO: 419696 - RNA, 19 nt, Artificial Sequence
  Description of Artificial Sequence: Synthetic oligonucleotide
aggcccucaucggcagcgu

SEQ ID NO: 419697 - RNA, 19 nt, Artificial Sequence
  Description of Artificial Sequence: Synthetic oligonucleotide
cagaaccaucucgccggca

SEQ ID NO: 419698 - RNA, 19 nt, Artificial Sequence
  Description of Artificial Sequence: Synthetic oligonucleotide
cacaugacgcaggcgcagu

SEQ ID NO: 419699 - RNA, 19 nt, Artificial Sequence
  Description of Artificial Sequence: Synthetic oligonucleotide
ggcaugccccgaccacgac

SEQ ID NO: 419700 - RNA, 19 nt, Artificial Sequence
  Description of Artificial Sequence: Synthetic oligonucleotide
cugcaacguccggcuccgg

SEQ ID NO: 419701 - RNA, 19 nt, Artificial Sequence
  Description of Artificial Sequence: Synthetic oligonucleotide
caucggcagcgucaggcuu

SEQ ID NO: 419702 - RNA, 19 nt, Artificial Sequence
  Description of Artificial Sequence: Synthetic oligonucleotide
ggccaugcgguagccucuc

SEQ ID NO: 419703 - RNA, 19 nt, Artificial Sequence
  Description of Artificial Sequence: Synthetic oligonucleotide
ggugacccuauauguccuu

SEQ ID NO: 419704 - RNA, 19 nt, Artificial Sequence
  Description of Artificial Sequence: Synthetic oligonucleotide
ggacgugaacacaccacuu

SEQ ID NO: 419705 - RNA, 19 nt, Artificial Sequence
  Description of Artificial Sequence: Synthetic oligonucleotide
cgaccacgacagcggauug

SEQ ID NO: 419706 - RNA, 19 nt, Artificial Sequence
  Description of Artificial Sequence: Synthetic oligonucleotide
gguggcggauaagccucga

SEQ ID NO: 419707 - RNA, 19 nt, Artificial Sequence
  Description of Artificial Sequence: Synthetic oligonucleotide
caugagcaggcugggccau

SEQ ID NO: 419708 - RNA, 19 nt, Artificial Sequence
  Description of Artificial Sequence: Synthetic oligonucleotide
ggacaccuuuugaggucuc

SEQ ID NO: 419709 - RNA, 19 nt, Artificial Sequence
  Description of Artificial Sequence: Synthetic oligonucleotide
guccggcuccggugcaacu

SEQ ID NO: 419710 - RNA, 19 nt, Artificial Sequence
  Description of Artificial Sequence: Synthetic oligonucleotide
gcucaccgacacauugcaa

SEQ ID NO: 419711 - RNA, 19 nt, Artificial Sequence
  Description of Artificial Sequence: Synthetic oligonucleotide
ccgcaugguguaguagcca

SEQ ID NO: 419712 - RNA, 19 nt, Artificial Sequence
  Description of Artificial Sequence: Synthetic oligonucleotide
ccggcacuggagucaccca

SEQ ID NO: 419713 - RNA, 19 nt, Artificial Sequence
  Description of Artificial Sequence: Synthetic oligonucleotide
cagcuuucguggacaccuu

SEQ ID NO: 419714 - RNA, 19 nt, Artificial Sequence
  Description of Artificial Sequence: Synthetic oligonucleotide
ccgaccacgacagcggauu

SEQ ID NO: 419715 - RNA, 19 nt, Artificial Sequence
  Description of Artificial Sequence: Synthetic oligonucleotide
ccugcgaaucucugcccau

SEQ ID NO: 419716 - RNA, 19 nt, Artificial Sequence
  Description of Artificial Sequence: Synthetic oligonucleotide
ccacgacagcggauugucu

SEQ ID NO: 419717 - RNA, 19 nt, Artificial Sequence
  Description of Artificial Sequence: Synthetic oligonucleotide
cggauugucugcuccccau

SEQ ID NO: 419718 - RNA, 19 nt, Artificial Sequence
  Description of Artificial Sequence: Synthetic oligonucleotide
ccacgaggucuguguagcu

SEQ ID NO: 419719 - RNA, 19 nt, Artificial Sequence
  Description of Artificial Sequence: Synthetic oligonucleotide
cacacgcaccaaggucagu

SEQ ID NO: 419720 - RNA, 19 nt, Artificial Sequence
  Description of Artificial Sequence: Synthetic oligonucleotide
ccauugaguucugcagcau

SEQ ID NO: 419721 - RNA, 19 nt, Artificial Sequence
  Description of Artificial Sequence: Synthetic oligonucleotide
cggugcaacucagcgauuu

SEQ ID NO: 419722 - RNA, 19 nt, Artificial Sequence
  Description of Artificial Sequence: Synthetic oligonucleotide
gcccuggcucagagucuca

SEQ ID NO: 419723 - RNA, 19 nt, Artificial Sequence
  Description of Artificial Sequence: Synthetic oligonucleotide
cccgaccacgacagcggau

SEQ ID NO: 419724 - RNA, 19 nt, Artificial Sequence
  Description of Artificial Sequence: Synthetic oligonucleotide
ccggugcaacucagcgauu

SEQ ID NO: 419725 - RNA, 19 nt, Artificial Sequence
  Description of Artificial Sequence: Synthetic oligonucleotide
agcaauaugguccagaccc

SEQ ID NO: 419726 - RNA, 19 nt, Artificial Sequence
  Description of Artificial Sequence: Synthetic oligonucleotide
aagucuacaacguugacgg

SEQ ID NO: 419727 - RNA, 19 nt, Artificial Sequence
  Description of Artificial Sequence: Synthetic oligonucleotide
aagaauuuagccaagggac

SEQ ID NO: 419728 - RNA, 19 nt, Artificial Sequence
  Description of Artificial Sequence: Synthetic oligonucleotide
auacuugacacacaguucc

SEQ ID NO: 419729 - RNA, 19 nt, Artificial Sequence
  Description of Artificial Sequence: Synthetic oligonucleotide
ucgaaaacaagcuaugagg

SEQ ID NO: 419730 - RNA, 19 nt, Artificial Sequence
  Description of Artificial Sequence: Synthetic oligonucleotide
uaauuuuaggauaaagugc

SEQ ID NO: 419731 - RNA, 19 nt, Artificial Sequence
  Description of Artificial Sequence: Synthetic oligonucleotide
ucugguauuaucuuccuag

SEQ ID NO: 419732 - RNA, 19 nt, Artificial Sequence
  Description of Artificial Sequence: Synthetic oligonucleotide
ugauaguauugucagauga

SEQ ID NO: 419733 - RNA, 19 nt, Artificial Sequence
  Description of Artificial Sequence: Synthetic oligonucleotide
aaaucgaauacagcgcacc

SEQ ID NO: 419734 - RNA, 19 nt, Artificial Sequence
  Description of Artificial Sequence: Synthetic oligonucleotide
acauuaacgagucccgggc

SEQ ID NO: 419735 - RNA, 19 nt, Artificial Sequence
  Description of Artificial Sequence: Synthetic oligonucleotide
uuauugaaacgcaagugca

SEQ ID NO: 419736 - RNA, 19 nt, Artificial Sequence
  Description of Artificial Sequence: Synthetic oligonucleotide
ucuaagugaauucuucucu

SEQ ID NO: 419737 - RNA, 19 nt, Artificial Sequence
  Description of Artificial Sequence: Synthetic oligonucleotide
ucaaaucgaauacagcgca

SEQ ID NO: 419738 - RNA, 19 nt, Artificial Sequence
  Description of Artificial Sequence: Synthetic oligonucleotide
aaaguuaggacaaaucaga

SEQ ID NO: 419739 - RNA, 19 nt, Artificial Sequence
  Description of Artificial Sequence: Synthetic oligonucleotide
gguauuaucuuccuagggg

SEQ ID NO: 419740 - RNA, 19 nt, Artificial Sequence
  Description of Artificial Sequence: Synthetic oligonucleotide
ugcaacauuaacgaguccc

SEQ ID NO: 419741 - RNA, 19 nt, Artificial Sequence
  Description of Artificial Sequence: Synthetic oligonucleotide
cucuguacugcaaacaggc

SEQ ID NO: 419742 - RNA, 19 nt, Artificial Sequence
  Description of Artificial Sequence: Synthetic oligonucleotide
auaggcuuuagauaggagu

SEQ ID NO: 419743 - RNA, 19 nt, Artificial Sequence
  Description of Artificial Sequence: Synthetic oligonucleotide
cuaacacacguaaacacgc

SEQ ID NO: 419744 - RNA, 19 nt, Artificial Sequence
  Description of Artificial Sequence: Synthetic oligonucleotide
uguauguccgagaagggga

SEQ ID NO: 419745 - RNA, 19 nt, Artificial Sequence
  Description of Artificial Sequence: Synthetic oligonucleotide
agguguauguccgagaagg

SEQ ID NO: 419746 - RNA, 19 nt, Artificial Sequence
  Description of Artificial Sequence: Synthetic oligonucleotide
accuuuaugguucuaucuc

SEQ ID NO: 419747 - RNA, 19 nt, Artificial Sequence
  Description of Artificial Sequence: Synthetic oligonucleotide
augugaacuacugacaauc

SEQ ID NO: 419748 - RNA, 19 nt, Artificial Sequence
  Description of Artificial Sequence: Synthetic oligonucleotide
uguacgucugucuaaguga

SEQ ID NO: 419749 - RNA, 19 nt, Artificial Sequence
  Description of Artificial Sequence: Synthetic oligonucleotide
uccaaagcagccaugagau

SEQ ID NO: 419750 - RNA, 19 nt, Artificial Sequence
  Description of Artificial Sequence: Synthetic oligonucleotide
aacagaguuccagacaguc

SEQ ID NO: 419751 - RNA, 19 nt, Artificial Sequence
  Description of Artificial Sequence: Synthetic oligonucleotide
aucaaaucgaauacagcgc

SEQ ID NO: 419752 - RNA, 19 nt, Artificial Sequence
  Description of Artificial Sequence: Synthetic oligonucleotide
ugguauuaucuuccuaggg

SEQ ID NO: 419753 - RNA, 19 nt, Artificial Sequence
  Description of Artificial Sequence: Synthetic oligonucleotide
gaucacuaaagauaaaugu

SEQ ID NO: 419754 - RNA, 19 nt, Artificial Sequence
  Description of Artificial Sequence: Synthetic oligonucleotide
aucaugccguuauugaaac

SEQ ID NO: 419755 - RNA, 19 nt, Artificial Sequence
  Description of Artificial Sequence: Synthetic oligonucleotide
ucuacaacguugacggcag

SEQ ID NO: 419756 - RNA, 19 nt, Artificial Sequence
  Description of Artificial Sequence: Synthetic oligonucleotide
aauucacaaguacucgugu

SEQ ID NO: 419757 - RNA, 19 nt, Artificial Sequence
  Description of Artificial Sequence: Synthetic oligonucleotide
agagcaguuaugaaauccc

SEQ ID NO: 419758 - RNA, 19 nt, Artificial Sequence
  Description of Artificial Sequence: Synthetic oligonucleotide
auagcagugcuugucagac

SEQ ID NO: 419759 - RNA, 19 nt, Artificial Sequence
  Description of Artificial Sequence: Synthetic oligonucleotide
cuugaucagacucugacca

SEQ ID NO: 419760 - RNA, 19 nt, Artificial Sequence
  Description of Artificial Sequence: Synthetic oligonucleotide
caugccguuauugaaacgc

SEQ ID NO: 419761 - RNA, 19 nt, Artificial Sequence
  Description of Artificial Sequence: Synthetic oligonucleotide
aaggccgcuuacuauuuuc

SEQ ID NO: 419762 - RNA, 19 nt, Artificial Sequence
  Description of Artificial Sequence: Synthetic oligonucleotide
ugagaauccgcuugcauuc

SEQ ID NO: 419763 - RNA, 19 nt, Artificial Sequence
  Description of Artificial Sequence: Synthetic oligonucleotide
cauagcaugccauccgacg

SEQ ID NO: 419764 - RNA, 19 nt, Artificial Sequence
  Description of Artificial Sequence: Synthetic oligonucleotide
uacgacagaauguucucag

SEQ ID NO: 419765 - RNA, 19 nt, Artificial Sequence
  Description of Artificial Sequence: Synthetic oligonucleotide
gguguuaucucgaaggccg

SEQ ID NO: 419766 - RNA, 19 nt, Artificial Sequence
  Description of Artificial Sequence: Synthetic oligonucleotide
aaauucacaaguacucgug

SEQ ID NO: 419767 - RNA, 19 nt, Artificial Sequence
  Description of Artificial Sequence: Synthetic oligonucleotide
aguacgacagaauguucuc

SEQ ID NO: 419768 - RNA, 19 nt, Artificial Sequence
  Description of Artificial Sequence: Synthetic oligonucleotide
uuuagcaucucaccugcgu

SEQ ID NO: 419769 - RNA, 19 nt, Artificial Sequence
  Description of Artificial Sequence: Synthetic oligonucleotide
aaugauuuaggagucucaa

SEQ ID NO: 419770 - RNA, 19 nt, Artificial Sequence
  Description of Artificial Sequence: Synthetic oligonucleotide
auaccuuuaugguucuauc

SEQ ID NO: 419771 - RNA, 19 nt, Artificial Sequence
  Description of Artificial Sequence: Synthetic oligonucleotide
ucuauugucucaauaucuu

SEQ ID NO: 419772 - RNA, 19 nt, Artificial Sequence
  Description of Artificial Sequence: Synthetic oligonucleotide
aaucgaauacagcgcacca

SEQ ID NO: 419773 - RNA, 19 nt, Artificial Sequence
  Description of Artificial Sequence: Synthetic oligonucleotide
aaguacgacagaauguucu

SEQ ID NO: 419774 - RNA, 19 nt, Artificial Sequence
  Description of Artificial Sequence: Synthetic oligonucleotide
agggacaaguguaaaaggg

SEQ ID NO: 419775 - RNA, 19 nt, Artificial Sequence
  Description of Artificial Sequence: Synthetic oligonucleotide
uucacaaguacucguguuc

SEQ ID NO: 419776 - RNA, 19 nt, Artificial Sequence
  Description of Artificial Sequence: Synthetic oligonucleotide
ugucuaagugaauucuucu

SEQ ID NO: 419777 - RNA, 19 nt, Artificial Sequence
  Description of Artificial Sequence: Synthetic oligonucleotide
gaaacgcaagugcagaaca

SEQ ID NO: 419778 - RNA, 19 nt, Artificial Sequence
  Description of Artificial Sequence: Synthetic oligonucleotide
ucaucaugugaacuacuga

SEQ ID NO: 419779 - RNA, 19 nt, Artificial Sequence
  Description of Artificial Sequence: Synthetic oligonucleotide
ucgaauacagcgcaccaau

SEQ ID NO: 419780 - RNA, 19 nt, Artificial Sequence
  Description of Artificial Sequence: Synthetic oligonucleotide
uuggcguccaaguacgaca

SEQ ID NO: 419781 - RNA, 19 nt, Artificial Sequence
  Description of Artificial Sequence: Synthetic oligonucleotide
ucaaaauacuugacacaca

SEQ ID NO: 419782 - RNA, 19 nt, Artificial Sequence
  Description of Artificial Sequence: Synthetic oligonucleotide
ugcagaaacgauguacuug

SEQ ID NO: 419783 - RNA, 19 nt, Artificial Sequence
  Description of Artificial Sequence: Synthetic oligonucleotide
ucacaaugguggaucaaug

SEQ ID NO: 419784 - RNA, 19 nt, Artificial Sequence
  Description of Artificial Sequence: Synthetic oligonucleotide
uaccuuuaugguucuaucu

SEQ ID NO: 419785 - RNA, 19 nt, Artificial Sequence
  Description of Artificial Sequence: Synthetic oligonucleotide
ugagccacucaccaccagc

SEQ ID NO: 419786 - RNA, 19 nt, Artificial Sequence
  Description of Artificial Sequence: Synthetic oligonucleotide
uccgacgucacacgguacc

SEQ ID NO: 419787 - RNA, 19 nt, Artificial Sequence
  Description of Artificial Sequence: Synthetic oligonucleotide
cuugucaacagaguuccag

SEQ ID NO: 419788 - RNA, 19 nt, Artificial Sequence
  Description of Artificial Sequence: Synthetic oligonucleotide
auagcaugccauccgacgu

SEQ ID NO: 419789 - RNA, 19 nt, Artificial Sequence
  Description of Artificial Sequence: Synthetic oligonucleotide
ucccgggcaaguaugaggu

SEQ ID NO: 419790 - RNA, 19 nt, Artificial Sequence
  Description of Artificial Sequence: Synthetic oligonucleotide
ugaauagguacugucccca

SEQ ID NO: 419791 - RNA, 19 nt, Artificial Sequence
  Description of Artificial Sequence: Synthetic oligonucleotide
ugugaacuacugacaaucu

SEQ ID NO: 419792 - RNA, 19 nt, Artificial Sequence
  Description of Artificial Sequence: Synthetic oligonucleotide
aauuuagccaagggacaag

SEQ ID NO: 419793 - RNA, 19 nt, Artificial Sequence
  Description of Artificial Sequence: Synthetic oligonucleotide
agcguccguagacagagag

SEQ ID NO: 419794 - RNA, 19 nt, Artificial Sequence
  Description of Artificial Sequence: Synthetic oligonucleotide
caagcuaugagggccagac

SEQ ID NO: 419795 - RNA, 19 nt, Artificial Sequence
  Description of Artificial Sequence: Synthetic oligonucleotide
ucuaugucccacagucuga

SEQ ID NO: 419796 - RNA, 19 nt, Artificial Sequence
  Description of Artificial Sequence: Synthetic oligonucleotide
acagcuauuguacgucugu

SEQ ID NO: 419797 - RNA, 19 nt, Artificial Sequence
  Description of Artificial Sequence: Synthetic oligonucleotide
ucucuugguuuaugcagag

SEQ ID NO: 419798 - RNA, 19 nt, Artificial Sequence
  Description of Artificial Sequence: Synthetic oligonucleotide
cugucuaagugaauucuuc

SEQ ID NO: 419799 - RNA, 19 nt, Artificial Sequence
  Description of Artificial Sequence: Synthetic oligonucleotide
ugguggaucaauguguuua

SEQ ID NO: 419800 - RNA, 19 nt, Artificial Sequence
  Description of Artificial Sequence: Synthetic oligonucleotide
aaguaugaggucaguguug

SEQ ID NO: 419801 - RNA, 19 nt, Artificial Sequence
  Description of Artificial Sequence: Synthetic oligonucleotide
agcuauuguacgucugucu

SEQ ID NO: 419802 - RNA, 19 nt, Artificial Sequence
  Description of Artificial Sequence: Synthetic oligonucleotide
guguauguccgagaagggg

SEQ ID NO: 419803 - RNA, 19 nt, Artificial Sequence
  Description of Artificial Sequence: Synthetic oligonucleotide
gucuaagugaauucuucuc

SEQ ID NO: 419804 - RNA, 19 nt, Artificial Sequence
  Description of Artificial Sequence: Synthetic oligonucleotide
agacauacugucucuuggu

SEQ ID NO: 419805 - RNA, 19 nt, Artificial Sequence
  Description of Artificial Sequence: Synthetic oligonucleotide
uuagcaucucaccugcguu

SEQ ID NO: 419806 - RNA, 19 nt, Artificial Sequence
  Description of Artificial Sequence: Synthetic oligonucleotide
ucugucuaagugaauucuu

SEQ ID NO: 419807 - RNA, 19 nt, Artificial Sequence
  Description of Artificial Sequence: Synthetic oligonucleotide
aguggaauccgaugagcca

SEQ ID NO: 419808 - RNA, 19 nt, Artificial Sequence
  Description of Artificial Sequence: Synthetic oligonucleotide
aguaaacuccuuugcuugu

SEQ ID NO: 419809 - RNA, 19 nt, Artificial Sequence
  Description of Artificial Sequence: Synthetic oligonucleotide
acacgcaccgcauucuaug

SEQ ID NO: 419810 - RNA, 19 nt, Artificial Sequence
  Description of Artificial Sequence: Synthetic oligonucleotide
agcaauggaacgaucuuug

SEQ ID NO: 419811 - RNA, 19 nt, Artificial Sequence
  Description of Artificial Sequence: Synthetic oligonucleotide
agcggggugguucagcgug

SEQ ID NO: 419812 - RNA, 19 nt, Artificial Sequence
  Description of Artificial Sequence: Synthetic oligonucleotide
uguaaacuaugucguccac

SEQ ID NO: 419813 - RNA, 19 nt, Artificial Sequence
  Description of Artificial Sequence: Synthetic oligonucleotide
gaacgaucuuuggagcagg

SEQ ID NO: 419814 - RNA, 19 nt, Artificial Sequence
  Description of Artificial Sequence: Synthetic oligonucleotide
ugaucagacucugaccacu

SEQ ID NO: 419815 - RNA, 19 nt, Artificial Sequence
  Description of Artificial Sequence: Synthetic oligonucleotide
auaugguccagaccccgug

SEQ ID NO: 419816 - RNA, 19 nt, Artificial Sequence
  Description of Artificial Sequence: Synthetic oligonucleotide
cucacuauccuuuuguuau

SEQ ID NO: 419817 - RNA, 19 nt, Artificial Sequence
  Description of Artificial Sequence: Synthetic oligonucleotide
gccgcuuacuauuuucugg

SEQ ID NO: 419818 - RNA, 19 nt, Artificial Sequence
  Description of Artificial Sequence: Synthetic oligonucleotide
ucaugccguuauugaaacg

SEQ ID NO: 419819 - RNA, 19 nt, Artificial Sequence
  Description of Artificial Sequence: Synthetic oligonucleotide
uagguguauguccgagaag

SEQ ID NO: 419820 - RNA, 19 nt, Artificial Sequence
  Description of Artificial Sequence: Synthetic oligonucleotide
ugucagacauacugucucu

SEQ ID NO: 419821 - RNA, 19 nt, Artificial Sequence
  Description of Artificial Sequence: Synthetic oligonucleotide
gucccgggcaaguaugagg

SEQ ID NO: 419822 - RNA, 19 nt, Artificial Sequence
  Description of Artificial Sequence: Synthetic oligonucleotide
ucguguuccauaccuuuau

SEQ ID NO: 419823 - RNA, 19 nt, Artificial Sequence
  Description of Artificial Sequence: Synthetic oligonucleotide
aguucgaaaacaagcuaug

SEQ ID NO: 419824 - RNA, 19 nt, Artificial Sequence
  Description of Artificial Sequence: Synthetic oligonucleotide
agaauuuagccaagggaca

SEQ ID NO: 419825 - RNA, 19 nt, Artificial Sequence
  Description of Artificial Sequence: Synthetic oligonucleotide
uugaaacgcaagugcagaa

SEQ ID NO: 419826 - RNA, 19 nt, Artificial Sequence
  Description of Artificial Sequence: Synthetic oligonucleotide
cacguaaacacgcaccgca

SEQ ID NO: 419827 - RNA, 19 nt, Artificial Sequence
  Description of Artificial Sequence: Synthetic oligonucleotide
gacaaguguaaaaggguuc

SEQ ID NO: 419828 - RNA, 19 nt, Artificial Sequence
  Description of Artificial Sequence: Synthetic oligonucleotide
auuaacgagucccgggcaa

SEQ ID NO: 419829 - RNA, 19 nt, Artificial Sequence
  Description of Artificial Sequence: Synthetic oligonucleotide
ucgaaggccgcuuacuauu

SEQ ID NO: 419830 - RNA, 19 nt, Artificial Sequence
  Description of Artificial Sequence: Synthetic oligonucleotide
agucuacaacguugacggc

SEQ ID NO: 419831 - RNA, 19 nt, Artificial Sequence
  Description of Artificial Sequence: Synthetic oligonucleotide
uauugucagaugagccacu

SEQ ID NO: 419832 - RNA, 19 nt, Artificial Sequence
  Description of Artificial Sequence: Synthetic oligonucleotide
ucgcugauccauccgggga

SEQ ID NO: 419833 - RNA, 19 nt, Artificial Sequence
  Description of Artificial Sequence: Synthetic oligonucleotide
uuaacgagucccgggcaag

SEQ ID NO: 419834 - RNA, 19 nt, Artificial Sequence
  Description of Artificial Sequence: Synthetic oligonucleotide
auucacaaguacucguguu

SEQ ID NO: 419835 - RNA, 19 nt, Artificial Sequence
  Description of Artificial Sequence: Synthetic oligonucleotide
caacauuaacgagucccgg

SEQ ID NO: 419836 - RNA, 19 nt, Artificial Sequence
  Description of Artificial Sequence: Synthetic oligonucleotide
ucaccugcguucacauccc

SEQ ID NO: 419837 - RNA, 19 nt, Artificial Sequence
  Description of Artificial Sequence: Synthetic oligonucleotide
gcaacauuaacgagucccg

SEQ ID NO: 419838 - RNA, 19 nt, Artificial Sequence
  Description of Artificial Sequence: Synthetic oligonucleotide
caucaugccguuauugaaa

SEQ ID NO: 419839 - RNA, 19 nt, Artificial Sequence
  Description of Artificial Sequence: Synthetic oligonucleotide
aucaugugaacuacugaca

SEQ ID NO: 419840 - RNA, 19 nt, Artificial Sequence
  Description of Artificial Sequence: Synthetic oligonucleotide
acucacuauccuuuuguua

SEQ ID NO: 419841 - RNA, 19 nt, Artificial Sequence
  Description of Artificial Sequence: Synthetic oligonucleotide
ugccauccgacgucacacg

SEQ ID NO: 419842 - RNA, 19 nt, Artificial Sequence
  Description of Artificial Sequence: Synthetic oligonucleotide
ugugccgagcagaccgucc

SEQ ID NO: 419843 - RNA, 19 nt, Artificial Sequence
  Description of Artificial Sequence: Synthetic oligonucleotide
ugggcacaaucauacugga

SEQ ID NO: 419844 - RNA, 19 nt, Artificial Sequence
  Description of Artificial Sequence: Synthetic oligonucleotide
cucgcugauccauccgggg

SEQ ID NO: 419845 - RNA, 19 nt, Artificial Sequence
  Description of Artificial Sequence: Synthetic oligonucleotide
gucggaaaacucuuccaga

SEQ ID NO: 419846 - RNA, 19 nt, Artificial Sequence
  Description of Artificial Sequence: Synthetic oligonucleotide
acucguguuccauaccuuu

SEQ ID NO: 419847 - RNA, 19 nt, Artificial Sequence
  Description of Artificial Sequence: Synthetic oligonucleotide
guaggagugugauuguugu

SEQ ID NO: 419848 - RNA, 19 nt, Artificial Sequence
  Description of Artificial Sequence: Synthetic oligonucleotide
aauaugguccagaccccgu

SEQ ID NO: 419849 - RNA, 19 nt, Artificial Sequence
  Description of Artificial Sequence: Synthetic oligonucleotide
ggaguugaugugcccaugc

SEQ ID NO: 419850 - RNA, 19 nt, Artificial Sequence
  Description of Artificial Sequence: Synthetic oligonucleotide
guauguccgagaaggggag

SEQ ID NO: 419851 - RNA, 19 nt, Artificial Sequence
  Description of Artificial Sequence: Synthetic oligonucleotide
caaguacgacagaauguuc

SEQ ID NO: 419852 - RNA, 19 nt, Artificial Sequence
  Description of Artificial Sequence: Synthetic oligonucleotide
aggggaggcuuaaaaguuc

SEQ ID NO: 419853 - RNA, 19 nt, Artificial Sequence
  Description of Artificial Sequence: Synthetic oligonucleotide
cugcguucacaucccauac

SEQ ID NO: 419854 - RNA, 19 nt, Artificial Sequence
  Description of Artificial Sequence: Synthetic oligonucleotide
uagcaugccauccgacguc

SEQ ID NO: 419855 - RNA, 19 nt, Artificial Sequence
  Description of Artificial Sequence: Synthetic oligonucleotide
ucgcugagaguuuccgcug

SEQ ID NO: 419856 - RNA, 19 nt, Artificial Sequence
  Description of Artificial Sequence: Synthetic oligonucleotide
acgucugucuaagugaauu

SEQ ID NO: 419857 - RNA, 19 nt, Artificial Sequence
  Description of Artificial Sequence: Synthetic oligonucleotide
cacgguaccacuccuugca

SEQ ID NO: 419858 - RNA, 19 nt, Artificial Sequence
  Description of Artificial Sequence: Synthetic oligonucleotide
aaacaggcgaugccucguu

SEQ ID NO: 419859 - RNA, 19 nt, Artificial Sequence
  Description of Artificial Sequence: Synthetic oligonucleotide
augagggccagacuuuauu

SEQ ID NO: 419860 - RNA, 19 nt, Artificial Sequence
  Description of Artificial Sequence: Synthetic oligonucleotide
cacagcuauuguacgucug

SEQ ID NO: 419861 - RNA, 19 nt, Artificial Sequence
  Description of Artificial Sequence: Synthetic oligonucleotide
gugucaucaugugaacuac

SEQ ID NO: 419862 - RNA, 19 nt, Artificial Sequence
  Description of Artificial Sequence: Synthetic oligonucleotide
gcucaaaauacuugacaca

SEQ ID NO: 419863 - RNA, 19 nt, Artificial Sequence
  Description of Artificial Sequence: Synthetic oligonucleotide
guugacggcagcucggugu

SEQ ID NO: 419864 - RNA, 19 nt, Artificial Sequence
  Description of Artificial Sequence: Synthetic oligonucleotide
cauuuaggguccuuacaaa

SEQ ID NO: 419865 - RNA, 19 nt, Artificial Sequence
  Description of Artificial Sequence: Synthetic oligonucleotide
cauagcagugcuugucaga

SEQ ID NO: 419866 - RNA, 19 nt, Artificial Sequence
  Description of Artificial Sequence: Synthetic oligonucleotide
ccggguaggagugugauug

SEQ ID NO: 419867 - RNA, 19 nt, Artificial Sequence
  Description of Artificial Sequence: Synthetic oligonucleotide
agaauccgcuugcauucca

SEQ ID NO: 419868 - RNA, 19 nt, Artificial Sequence
  Description of Artificial Sequence: Synthetic oligonucleotide
gguaggagugugauuguug

SEQ ID NO: 419869 - RNA, 19 nt, Artificial Sequence
  Description of Artificial Sequence: Synthetic oligonucleotide
accccgugcuggcagagca

SEQ ID NO: 419870 - RNA, 19 nt, Artificial Sequence
  Description of Artificial Sequence: Synthetic oligonucleotide
ggaacgaucuuuggagcag

SEQ ID NO: 419871 - RNA, 19 nt, Artificial Sequence
  Description of Artificial Sequence: Synthetic oligonucleotide
gcaaguaugaggucagugu

SEQ ID NO: 419872 - RNA, 19 nt, Artificial Sequence
  Description of Artificial Sequence: Synthetic oligonucleotide
ugcuccacaagcguccgua

SEQ ID NO: 419873 - RNA, 19 nt, Artificial Sequence
  Description of Artificial Sequence: Synthetic oligonucleotide
gggauauaagguguucuac

SEQ ID NO: 419874 - RNA, 19 nt, Artificial Sequence
  Description of Artificial Sequence: Synthetic oligonucleotide
gcuauuguacgucugucua

SEQ ID NO: 419875 - RNA, 19 nt, Artificial Sequence
  Description of Artificial Sequence: Synthetic oligonucleotide
aacaggcgaugccucguuu

SEQ ID NO: 419876 - RNA, 19 nt, Artificial Sequence
  Description of Artificial Sequence: Synthetic oligonucleotide
cauuaacgagucccgggca

SEQ ID NO: 419877 - RNA, 19 nt, Artificial Sequence
  Description of Artificial Sequence: Synthetic oligonucleotide
cacaaugguggaucaaugu

SEQ ID NO: 419878 - RNA, 19 nt, Artificial Sequence
  Description of Artificial Sequence: Synthetic oligonucleotide
aucgaauacagcgcaccaa

SEQ ID NO: 419879 - RNA, 19 nt, Artificial Sequence
  Description of Artificial Sequence: Synthetic oligonucleotide
gguguauguccgagaaggg

SEQ ID NO: 419880 - RNA, 19 nt, Artificial Sequence
  Description of Artificial Sequence: Synthetic oligonucleotide
ccauuuaggguccuuacaa

SEQ ID NO: 419881 - RNA, 19 nt, Artificial Sequence
  Description of Artificial Sequence: Synthetic oligonucleotide
acgagucccgggcaaguau

SEQ ID NO: 419882 - RNA, 19 nt, Artificial Sequence
  Description of Artificial Sequence: Synthetic oligonucleotide
guacgacagaauguucuca

SEQ ID NO: 419883 - RNA, 19 nt, Artificial Sequence
  Description of Artificial Sequence: Synthetic oligonucleotide
guacgucugucuaagugaa

SEQ ID NO: 419884 - RNA, 19 nt, Artificial Sequence
  Description of Artificial Sequence: Synthetic oligonucleotide
gacgucacacgguaccacu

SEQ ID NO: 419885 - RNA, 19 nt, Artificial Sequence
  Description of Artificial Sequence: Synthetic oligonucleotide
cacuauccuuuuguuauca

SEQ ID NO: 419886 - RNA, 19 nt, Artificial Sequence
  Description of Artificial Sequence: Synthetic oligonucleotide
ggggaggcuuaaaaguucc

SEQ ID NO: 419887 - RNA, 19 nt, Artificial Sequence
  Description of Artificial Sequence: Synthetic oligonucleotide
ggccuucuaacacacguaa

SEQ ID NO: 419888 - RNA, 19 nt, Artificial Sequence
  Description of Artificial Sequence: Synthetic oligonucleotide
gccauuauuacagucuucu

SEQ ID NO: 419889 - RNA, 19 nt, Artificial Sequence
  Description of Artificial Sequence: Synthetic oligonucleotide
caaguaugaggucaguguu

SEQ ID NO: 419890 - RNA, 19 nt, Artificial Sequence
  Description of Artificial Sequence: Synthetic oligonucleotide
aacacgcaccgcauucuau

SEQ ID NO: 419891 - RNA, 19 nt, Artificial Sequence
  Description of Artificial Sequence: Synthetic oligonucleotide
gcuggcagagcaguuauga

SEQ ID NO: 419892 - RNA, 19 nt, Artificial Sequence
  Description of Artificial Sequence: Synthetic oligonucleotide
agcaugccauccgacguca

SEQ ID NO: 419893 - RNA, 19 nt, Artificial Sequence
  Description of Artificial Sequence: Synthetic oligonucleotide
acccuccuuagggugaugu

SEQ ID NO: 419894 - RNA, 19 nt, Artificial Sequence
  Description of Artificial Sequence: Synthetic oligonucleotide
augccguuauugaaacgca

SEQ ID NO: 419895 - RNA, 19 nt, Artificial Sequence
  Description of Artificial Sequence: Synthetic oligonucleotide
uacgucugucuaagugaau

SEQ ID NO: 419896 - RNA, 19 nt, Artificial Sequence
  Description of Artificial Sequence: Synthetic oligonucleotide
cagaaacgauguacuuguc

SEQ ID NO: 419897 - RNA, 19 nt, Artificial Sequence
  Description of Artificial Sequence: Synthetic oligonucleotide
cauccgacgucacacggua

SEQ ID NO: 419898 - RNA, 19 nt, Artificial Sequence
  Description of Artificial Sequence: Synthetic oligonucleotide
cagcuauuguacgucuguc

SEQ ID NO: 419899 - RNA, 19 nt, Artificial Sequence
  Description of Artificial Sequence: Synthetic oligonucleotide
cugcaacauuaacgagucc

SEQ ID NO: 419900 - RNA, 19 nt, Artificial Sequence
  Description of Artificial Sequence: Synthetic oligonucleotide
ucucaccugcguucacauc

SEQ ID NO: 419901 - RNA, 19 nt, Artificial Sequence
  Description of Artificial Sequence: Synthetic oligonucleotide
guguuaucucgaaggccgc

SEQ ID NO: 419902 - RNA, 19 nt, Artificial Sequence
  Description of Artificial Sequence: Synthetic oligonucleotide
ggccgcuuacuauuuucug

SEQ ID NO: 419903 - RNA, 19 nt, Artificial Sequence
  Description of Artificial Sequence: Synthetic oligonucleotide
gaauccgcuugcauuccaa

SEQ ID NO: 419904 - RNA, 19 nt, Artificial Sequence
  Description of Artificial Sequence: Synthetic oligonucleotide
gagcaguuaugaaaucccu

SEQ ID NO: 419905 - RNA, 19 nt, Artificial Sequence
  Description of Artificial Sequence: Synthetic oligonucleotide
cauaccuuuaugguucuau

SEQ ID NO: 419906 - RNA, 19 nt, Artificial Sequence
  Description of Artificial Sequence: Synthetic oligonucleotide
ggaggcuuaaaaguuccaa

SEQ ID NO: 419907 - RNA, 19 nt, Artificial Sequence
  Description of Artificial Sequence: Synthetic oligonucleotide
agucccgggcaaguaugag

SEQ ID NO: 419908 - RNA, 19 nt, Artificial Sequence
  Description of Artificial Sequence: Synthetic oligonucleotide
ggcacagcuauuguacguc

SEQ ID NO: 419909 - RNA, 19 nt, Artificial Sequence
  Description of Artificial Sequence: Synthetic oligonucleotide
aacgagucccgggcaagua

SEQ ID NO: 419910 - RNA, 19 nt, Artificial Sequence
  Description of Artificial Sequence: Synthetic oligonucleotide
guacugcaaacaggcgaug

SEQ ID NO: 419911 - RNA, 19 nt, Artificial Sequence
  Description of Artificial Sequence: Synthetic oligonucleotide
acguaaacacgcaccgcau

SEQ ID NO: 419912 - RNA, 19 nt, Artificial Sequence
  Description of Artificial Sequence: Synthetic oligonucleotide
gcucgcugagaguuuccgc

SEQ ID NO: 419913 - RNA, 19 nt, Artificial Sequence
  Description of Artificial Sequence: Synthetic oligonucleotide
cuugcauuccaaugugcuu

SEQ ID NO: 419914 - RNA, 19 nt, Artificial Sequence
  Description of Artificial Sequence: Synthetic oligonucleotide
gggacaaguguaaaagggu

SEQ ID NO: 419915 - RNA, 19 nt, Artificial Sequence
  Description of Artificial Sequence: Synthetic oligonucleotide
auccgacgucacacgguac

SEQ ID NO: 419916 - RNA, 19 nt, Artificial Sequence
  Description of Artificial Sequence: Synthetic oligonucleotide
ccauagcaugccauccgac

SEQ ID NO: 419917 - RNA, 19 nt, Artificial Sequence
  Description of Artificial Sequence: Synthetic oligonucleotide
uccggguaggagugugauu

SEQ ID NO: 419918 - RNA, 19 nt, Artificial Sequence
  Description of Artificial Sequence: Synthetic oligonucleotide
acaagcuaugagggccaga

SEQ ID NO: 419919 - RNA, 19 nt, Artificial Sequence
  Description of Artificial Sequence: Synthetic oligonucleotide
cucugguauuaucuuccua

SEQ ID NO: 419920 - RNA, 19 nt, Artificial Sequence
  Description of Artificial Sequence: Synthetic oligonucleotide
auuuggcguccaaguacga

SEQ ID NO: 419921 - RNA, 19 nt, Artificial Sequence
  Description of Artificial Sequence: Synthetic oligonucleotide
cucgaaggccgcuuacuau

SEQ ID NO: 419922 - RNA, 19 nt, Artificial Sequence
  Description of Artificial Sequence: Synthetic oligonucleotide
gugccgagcagaccguccu

SEQ ID NO: 419923 - RNA, 19 nt, Artificial Sequence
  Description of Artificial Sequence: Synthetic oligonucleotide
ccaguucgaaaacaagcua

SEQ ID NO: 419924 - RNA, 19 nt, Artificial Sequence
  Description of Artificial Sequence: Synthetic oligonucleotide
ccgcuuacuauuuucuggu

SEQ ID NO: 419925 - RNA, 19 nt, Artificial Sequence
  Description of Artificial Sequence: Synthetic oligonucleotide
ggaggccauaucccauaca

SEQ ID NO: 419926 - RNA, 19 nt, Artificial Sequence
  Description of Artificial Sequence: Synthetic oligonucleotide
aagcguccguagacagaga

SEQ ID NO: 419927 - RNA, 19 nt, Artificial Sequence
  Description of Artificial Sequence: Synthetic oligonucleotide
ugccucguuuguguccauu

SEQ ID NO: 419928 - RNA, 19 nt, Artificial Sequence
  Description of Artificial Sequence: Synthetic oligonucleotide
ccgggcaaguaugagguca

SEQ ID NO: 419929 - RNA, 19 nt, Artificial Sequence
  Description of Artificial Sequence: Synthetic oligonucleotide
guaaacuccuuugcuuguu

SEQ ID NO: 419930 - RNA, 19 nt, Artificial Sequence
  Description of Artificial Sequence: Synthetic oligonucleotide
cagaccguccuggucagcu

SEQ ID NO: 419931 - RNA, 19 nt, Artificial Sequence
  Description of Artificial Sequence: Synthetic oligonucleotide
gaaggccgcuuacuauuuu

SEQ ID NO: 419932 - RNA, 19 nt, Artificial Sequence
  Description of Artificial Sequence: Synthetic oligonucleotide
cgcugagaguuuccgcugc

SEQ ID NO: 419933 - RNA, 19 nt, Artificial Sequence
  Description of Artificial Sequence: Synthetic oligonucleotide
gguucgccauuauuacagu

SEQ ID NO: 419934 - RNA, 19 nt, Artificial Sequence
  Description of Artificial Sequence: Synthetic oligonucleotide
gcacagcuauuguacgucu

SEQ ID NO: 419935 - RNA, 19 nt, Artificial Sequence
  Description of Artificial Sequence: Synthetic oligonucleotide
cauagcucgcugagaguuu

SEQ ID NO: 419936 - RNA, 19 nt, Artificial Sequence
  Description of Artificial Sequence: Synthetic oligonucleotide
gcauucuaugucccacagu

SEQ ID NO: 419937 - RNA, 19 nt, Artificial Sequence
  Description of Artificial Sequence: Synthetic oligonucleotide
cgcuuacuauuuucugguc

SEQ ID NO: 419938 - RNA, 19 nt, Artificial Sequence
  Description of Artificial Sequence: Synthetic oligonucleotide
ccgcauucuaugucccaca

SEQ ID NO: 419939 - RNA, 19 nt, Artificial Sequence
  Description of Artificial Sequence: Synthetic oligonucleotide
caccugcguucacauccca

SEQ ID NO: 419940 - RNA, 19 nt, Artificial Sequence
  Description of Artificial Sequence: Synthetic oligonucleotide
ccacaagcguccguagaca

SEQ ID NO: 419941 - RNA, 19 nt, Artificial Sequence
  Description of Artificial Sequence: Synthetic oligonucleotide
cggggaauccggguaggag

SEQ ID NO: 419942 - RNA, 19 nt, Artificial Sequence
  Description of Artificial Sequence: Synthetic oligonucleotide
cacuucggcaguggauucu

SEQ ID NO: 419943 - RNA, 19 nt, Artificial Sequence
  Description of Artificial Sequence: Synthetic oligonucleotide
gggcacaaucauacuggaa

SEQ ID NO: 419944 - RNA, 19 nt, Artificial Sequence
  Description of Artificial Sequence: Synthetic oligonucleotide
augccucguuuguguccau

SEQ ID NO: 419945 - RNA, 19 nt, Artificial Sequence
  Description of Artificial Sequence: Synthetic oligonucleotide
cgacgucacacgguaccac

SEQ ID NO: 419946 - RNA, 19 nt, Artificial Sequence
  Description of Artificial Sequence: Synthetic oligonucleotide
cccgggcaaguaugagguc

SEQ ID NO: 419947 - RNA, 19 nt, Artificial Sequence
  Description of Artificial Sequence: Synthetic oligonucleotide
ccgacgucacacgguacca

SEQ ID NO: 419948 - RNA, 19 nt, Artificial Sequence
  Description of Artificial Sequence: Synthetic oligonucleotide
cacccuccuuagggugaug

SEQ ID NO: 419949 - RNA, 19 nt, Artificial Sequence
  Description of Artificial Sequence: Synthetic oligonucleotide
ggucaguguuggguuauuu

SEQ ID NO: 419950 - RNA, 19 nt, Artificial Sequence
  Description of Artificial Sequence: Synthetic oligonucleotide
ccgaugagccaguuaugau

SEQ ID NO: 419951 - RNA, 19 nt, Artificial Sequence
  Description of Artificial Sequence: Synthetic oligonucleotide
gcagaccguccuggucagc

SEQ ID NO: 419952 - RNA, 19 nt, Artificial Sequence
  Description of Artificial Sequence: Synthetic oligonucleotide
ccucacaaugguggaucaa

SEQ ID NO: 419953 - RNA, 19 nt, Artificial Sequence
  Description of Artificial Sequence: Synthetic oligonucleotide
cguccaaguacgacagaau

SEQ ID NO: 419954 - RNA, 19 nt, Artificial Sequence
  Description of Artificial Sequence: Synthetic oligonucleotide
cguaaacacgcaccgcauu

SEQ ID NO: 419955 - RNA, 19 nt, Artificial Sequence
  Description of Artificial Sequence: Synthetic oligonucleotide
ccccagcuuuggaucacua

SEQ ID NO: 419956 - RNA, 19 nt, Artificial Sequence
  Description of Artificial Sequence: Synthetic oligonucleotide
ccggggaauccggguagga

SEQ ID NO: 419957 - RNA, 19 nt, Artificial Sequence
  Description of Artificial Sequence: Synthetic oligonucleotide
cgaaggccgcuuacuauuu

SEQ ID NO: 419958 - RNA, 19 nt, Artificial Sequence
  Description of Artificial Sequence: Synthetic oligonucleotide
uguuaaaugagauaagugc

SEQ ID NO: 419959 - RNA, 19 nt, Artificial Sequence
  Description of Artificial Sequence: Synthetic oligonucleotide
aaaugagauaagugcaucc

SEQ ID NO: 419960 - RNA, 19 nt, Artificial Sequence
  Description of Artificial Sequence: Synthetic oligonucleotide
uuuaggauugaacugagug

SEQ ID NO: 419961 - RNA, 19 nt, Artificial Sequence
  Description of Artificial Sequence: Synthetic oligonucleotide
cauacaaccagcaugggcg

SEQ ID NO: 419962 - RNA, 19 nt, Artificial Sequence
  Description of Artificial Sequence: Synthetic oligonucleotide
ucuggaauuaacuaaaacu

SEQ ID NO: 419963 - RNA, 19 nt, Artificial Sequence
  Description of Artificial Sequence: Synthetic oligonucleotide
guauaaacuggucaaaugg

SEQ ID NO: 419964 - RNA, 19 nt, Artificial Sequence
  Description of Artificial Sequence: Synthetic oligonucleotide
uguaaugagugucacaaag

SEQ ID NO: 419965 - RNA, 19 nt, Artificial Sequence
  Description of Artificial Sequence: Synthetic oligonucleotide
uauaaacuggucaaauggg

SEQ ID NO: 419966 - RNA, 19 nt, Artificial Sequence
  Description of Artificial Sequence: Synthetic oligonucleotide
acuauugccacucugaggu

SEQ ID NO: 419967 - RNA, 19 nt, Artificial Sequence
  Description of Artificial Sequence: Synthetic oligonucleotide
auuaaggacaucugguagc

SEQ ID NO: 419968 - RNA, 19 nt, Artificial Sequence
  Description of Artificial Sequence: Synthetic oligonucleotide
cauuuuaagaggaaagacc

SEQ ID NO: 419969 - RNA, 19 nt, Artificial Sequence
  Description of Artificial Sequence: Synthetic oligonucleotide
aaacuaaacugcuggguac

SEQ ID NO: 419970 - RNA, 19 nt, Artificial Sequence
  Description of Artificial Sequence: Synthetic oligonucleotide
uuuaccgaacugaaggugg

SEQ ID NO: 419971 - RNA, 19 nt, Artificial Sequence
  Description of Artificial Sequence: Synthetic oligonucleotide
guaaacaagaacuaggguc

SEQ ID NO: 419972 - RNA, 19 nt, Artificial Sequence
  Description of Artificial Sequence: Synthetic oligonucleotide
uccaugaacaaucaugaug

SEQ ID NO: 419973 - RNA, 19 nt, Artificial Sequence
  Description of Artificial Sequence: Synthetic oligonucleotide
gauagagucaucaauaguc

SEQ ID NO: 419974 - RNA, 19 nt, Artificial Sequence
  Description of Artificial Sequence: Synthetic oligonucleotide
uguucguaggauauucugg

SEQ ID NO: 419975 - RNA, 19 nt, Artificial Sequence
  Description of Artificial Sequence: Synthetic oligonucleotide
agcaguuugucauaggaag

SEQ ID NO: 419976 - RNA, 19 nt, Artificial Sequence
  Description of Artificial Sequence: Synthetic oligonucleotide
aagggcaucaaaucggucu

SEQ ID NO: 419977 - RNA, 19 nt, Artificial Sequence
  Description of Artificial Sequence: Synthetic oligonucleotide
uuugucauaggaagggcag

SEQ ID NO: 419978 - RNA, 19 nt, Artificial Sequence
  Description of Artificial Sequence: Synthetic oligonucleotide
uuuuguuauggcaugucug

SEQ ID NO: 419979 - RNA, 19 nt, Artificial Sequence
  Description of Artificial Sequence: Synthetic oligonucleotide
guuauggcaugucugauag

SEQ ID NO: 419980 - RNA, 19 nt, Artificial Sequence
  Description of Artificial Sequence: Synthetic oligonucleotide
acaguugccaucauugucc

SEQ ID NO: 419981 - RNA, 19 nt, Artificial Sequence
  Description of Artificial Sequence: Synthetic oligonucleotide
aaugccuacucccagaauu

SEQ ID NO: 419982 - RNA, 19 nt, Artificial Sequence
  Description of Artificial Sequence: Synthetic oligonucleotide
cuucaugcuaacuauugcc

SEQ ID NO: 419983 - RNA, 19 nt, Artificial Sequence
  Description of Artificial Sequence: Synthetic oligonucleotide
uuaacuauuucacccuuca

SEQ ID NO: 419984 - RNA, 19 nt, Artificial Sequence
  Description of Artificial Sequence: Synthetic oligonucleotide
uuuaucuugggugucagca

SEQ ID NO: 419985 - RNA, 19 nt, Artificial Sequence
  Description of Artificial Sequence: Synthetic oligonucleotide
uucaauacagccauggcuu

SEQ ID NO: 419986 - RNA, 19 nt, Artificial Sequence
  Description of Artificial Sequence: Synthetic oligonucleotide
uuuguuauggcaugucuga

SEQ ID NO: 419987 - RNA, 19 nt, Artificial Sequence
  Description of Artificial Sequence: Synthetic oligonucleotide
uguggaaaugccuacuccc

SEQ ID NO: 419988 - RNA, 19 nt, Artificial Sequence
  Description of Artificial Sequence: Synthetic oligonucleotide
aaucuggaucuuuugaggu

SEQ ID NO: 419989 - RNA, 19 nt, Artificial Sequence
  Description of Artificial Sequence: Synthetic oligonucleotide
uguucaucaaggcagcaga

SEQ ID NO: 419990 - RNA, 19 nt, Artificial Sequence
  Description of Artificial Sequence: Synthetic oligonucleotide
aaacuuuaaaauccuugga

SEQ ID NO: 419991 - RNA, 19 nt, Artificial Sequence
  Description of Artificial Sequence: Synthetic oligonucleotide
uauaucuuugagcaagggu

SEQ ID NO: 419992 - RNA, 19 nt, Artificial Sequence
  Description of Artificial Sequence: Synthetic oligonucleotide
guucguaggauauucuggg

SEQ ID NO: 419993 - RNA, 19 nt, Artificial Sequence
  Description of Artificial Sequence: Synthetic oligonucleotide
auagucuuuauucuuggcu

SEQ ID NO: 419994 - RNA, 19 nt, Artificial Sequence
  Description of Artificial Sequence: Synthetic oligonucleotide
ucugaaaccacgacgucca

SEQ ID NO: 419995 - RNA, 19 nt, Artificial Sequence
  Description of Artificial Sequence: Synthetic oligonucleotide
cauauagucuuuauucuug

SEQ ID NO: 419996 - RNA, 19 nt, Artificial Sequence
  Description of Artificial Sequence: Synthetic oligonucleotide
aguuucaagaauaugguca

SEQ ID NO: 419997 - RNA, 19 nt, Artificial Sequence
  Description of Artificial Sequence: Synthetic oligonucleotide
aaaucggucuccaugaaca

SEQ ID NO: 419998 - RNA, 19 nt, Artificial Sequence
  Description of Artificial Sequence: Synthetic oligonucleotide
caagucugaaaccacgacg

SEQ ID NO: 419999 - RNA, 19 nt, Artificial Sequence
  Description of Artificial Sequence: Synthetic oligonucleotide
uucuucguagguuuuagga

SEQ ID NO: 420000 - RNA, 19 nt, Artificial Sequence
  Description of Artificial Sequence: Synthetic oligonucleotide
uuaggauugaacugagugu

SEQ ID NO: 420001 - RNA, 19 nt, Artificial Sequence
  Description of Artificial Sequence: Synthetic oligonucleotide
aaccucucgaacuccacag

SEQ ID NO: 420002 - RNA, 19 nt, Artificial Sequence
  Description of Artificial Sequence: Synthetic oligonucleotide
cauaugcuucaauacagcc

SEQ ID NO: 420003 - RNA, 19 nt, Artificial Sequence
  Description of Artificial Sequence: Synthetic oligonucleotide
aaaugggacaugcuugacu

SEQ ID NO: 420004 - RNA, 19 nt, Artificial Sequence
  Description of Artificial Sequence: Synthetic oligonucleotide
uuaaugucaguggucacag

SEQ ID NO: 420005 - RNA, 19 nt, Artificial Sequence
  Description of Artificial Sequence: Synthetic oligonucleotide
aaugagauaagugcaucca

SEQ ID NO: 420006 - RNA, 19 nt, Artificial Sequence
  Description of Artificial Sequence: Synthetic oligonucleotide
ugaaggauucggauguuca

SEQ ID NO: 420007 - RNA, 19 nt, Artificial Sequence
  Description of Artificial Sequence: Synthetic oligonucleotide
auuguccacccacacaggg

SEQ ID NO: 420008 - RNA, 19 nt, Artificial Sequence
  Description of Artificial Sequence: Synthetic oligonucleotide
ugagccaguuuuguuaugg

SEQ ID NO: 420009 - RNA, 19 nt, Artificial Sequence
  Description of Artificial Sequence: Synthetic oligonucleotide
acaaucaugaugucaggcu

SEQ ID NO: 420010 - RNA, 19 nt, Artificial Sequence
  Description of Artificial Sequence: Synthetic oligonucleotide
caucacucgaaccaucucc

SEQ ID NO: 420011 - RNA, 19 nt, Artificial Sequence
  Description of Artificial Sequence: Synthetic oligonucleotide
auauucugggccuucacgu

SEQ ID NO: 420012 - RNA, 19 nt, Artificial Sequence
  Description of Artificial Sequence: Synthetic oligonucleotide
aaggguacuguuuaccgaa

SEQ ID NO: 420013 - RNA, 19 nt, Artificial Sequence
  Description of Artificial Sequence: Synthetic oligonucleotide
ucaaaugggacaugcuuga

SEQ ID NO: 420014 - RNA, 19 nt, Artificial Sequence
  Description of Artificial Sequence: Synthetic oligonucleotide
agcucuugggucucagucc

SEQ ID NO: 420015 - RNA, 19 nt, Artificial Sequence
  Description of Artificial Sequence: Synthetic oligonucleotide
uugggugucagcaucccgc

SEQ ID NO: 420016 - RNA, 19 nt, Artificial Sequence
  Description of Artificial Sequence: Synthetic oligonucleotide
ggaagauccaccuuuaauc

SEQ ID NO: 420017 - RNA, 19 nt, Artificial Sequence
  Description of Artificial Sequence: Synthetic oligonucleotide
ugaagaaguacugaucuaa

SEQ ID NO: 420018 - RNA, 19 nt, Artificial Sequence
  Description of Artificial Sequence: Synthetic oligonucleotide
cacguugccaaguuuggcg

SEQ ID NO: 420019 - RNA, 19 nt, Artificial Sequence
  Description of Artificial Sequence: Synthetic oligonucleotide
gaugacguccuugacaaug

SEQ ID NO: 420020 - RNA, 19 nt, Artificial Sequence
  Description of Artificial Sequence: Synthetic oligonucleotide
ucaaugugaaggauucgga

SEQ ID NO: 420021 - RNA, 19 nt, Artificial Sequence
  Description of Artificial Sequence: Synthetic oligonucleotide
gcucauauagucuuuauuc

SEQ ID NO: 420022 - RNA, 19 nt, Artificial Sequence
  Description of Artificial Sequence: Synthetic oligonucleotide
uuccgcaucacucgaacca

SEQ ID NO: 420023 - RNA, 19 nt, Artificial Sequence
  Description of Artificial Sequence: Synthetic oligonucleotide
ucacggguguuccaaaagc

SEQ ID NO: 420024 - RNA, 19 nt, Artificial Sequence
  Description of Artificial Sequence: Synthetic oligonucleotide
aucuugagagauguucucc

SEQ ID NO: 420025 - RNA, 19 nt, Artificial Sequence
  Description of Artificial Sequence: Synthetic oligonucleotide
uucuuaacuauuucacccu

SEQ ID NO: 420026 - RNA, 19 nt, Artificial Sequence
  Description of Artificial Sequence: Synthetic oligonucleotide
aagaaguacugaucuaaaa

SEQ ID NO: 420027 - RNA, 19 nt, Artificial Sequence
  Description of Artificial Sequence: Synthetic oligonucleotide
uaaaacuaaacugcugggu

SEQ ID NO: 420028 - RNA, 19 nt, Artificial Sequence
  Description of Artificial Sequence: Synthetic oligonucleotide
ugagcaaggguacuguuua

SEQ ID NO: 420029 - RNA, 19 nt, Artificial Sequence
  Description of Artificial Sequence: Synthetic oligonucleotide
agugcaacaauguaaucuu

SEQ ID NO: 420030 - RNA, 19 nt, Artificial Sequence
  Description of Artificial Sequence: Synthetic oligonucleotide
uacugaucuaaaagaaccu

SEQ ID NO: 420031 - RNA, 19 nt, Artificial Sequence
  Description of Artificial Sequence: Synthetic oligonucleotide
acggucgugguccucacac

SEQ ID NO: 420032 - RNA, 19 nt, Artificial Sequence
  Description of Artificial Sequence: Synthetic oligonucleotide
cuggguacaccugugaggg

SEQ ID NO: 420033 - RNA, 19 nt, Artificial Sequence
  Description of Artificial Sequence: Synthetic oligonucleotide
auccgaaugaugcucauau

SEQ ID NO: 420034 - RNA, 19 nt, Artificial Sequence
  Description of Artificial Sequence: Synthetic oligonucleotide
aaccaagucugaaaccacg

SEQ ID NO: 420035 - RNA, 19 nt, Artificial Sequence
  Description of Artificial Sequence: Synthetic oligonucleotide
agguuuuaggauugaacug

SEQ ID NO: 420036 - RNA, 19 nt, Artificial Sequence
  Description of Artificial Sequence: Synthetic oligonucleotide
caucaaaucggucuccaug

SEQ ID NO: 420037 - RNA, 19 nt, Artificial Sequence
  Description of Artificial Sequence: Synthetic oligonucleotide
ucauaggaagggcagccug

SEQ ID NO: 420038 - RNA, 19 nt, Artificial Sequence
  Description of Artificial Sequence: Synthetic oligonucleotide
gauguagccagggcaaggg

SEQ ID NO: 420039 - RNA, 19 nt, Artificial Sequence
  Description of Artificial Sequence: Synthetic oligonucleotide
ugauagagucaucaauagu

SEQ ID NO: 420040 - RNA, 19 nt, Artificial Sequence
  Description of Artificial Sequence: Synthetic oligonucleotide
accugguuccacuaaguag

SEQ ID NO: 420041 - RNA, 19 nt, Artificial Sequence
  Description of Artificial Sequence: Synthetic oligonucleotide
ucuugagagauguucuccu

SEQ ID NO: 420042 - RNA, 19 nt, Artificial Sequence
  Description of Artificial Sequence: Synthetic oligonucleotide
uucguagguuuuaggauug

SEQ ID NO: 420043 - RNA, 19 nt, Artificial Sequence
  Description of Artificial Sequence: Synthetic oligonucleotide
uaagaggaaagacccauuu

SEQ ID NO: 420044 - RNA, 19 nt, Artificial Sequence
  Description of Artificial Sequence: Synthetic oligonucleotide
agcauaugcuucaauacag

SEQ ID NO: 420045 - RNA, 19 nt, Artificial Sequence
  Description of Artificial Sequence: Synthetic oligonucleotide
ugacugcacgaaaauuggg

SEQ ID NO: 420046 - RNA, 19 nt, Artificial Sequence
  Description of Artificial Sequence: Synthetic oligonucleotide
uuucuucguagguuuuagg

SEQ ID NO: 420047 - RNA, 19 nt, Artificial Sequence
  Description of Artificial Sequence: Synthetic oligonucleotide
cuaacuauugccacucuga

SEQ ID NO: 420048 - RNA, 19 nt, Artificial Sequence
  Description of Artificial Sequence: Synthetic oligonucleotide
cuucaggcgauuaaggaca

SEQ ID NO: 420049 - RNA, 19 nt, Artificial Sequence
  Description of Artificial Sequence: Synthetic oligonucleotide
gaugucaggcuucaggcga

SEQ ID NO: 420050 - RNA, 19 nt, Artificial Sequence
  Description of Artificial Sequence: Synthetic oligonucleotide
uguuuaccgaacugaaggu

SEQ ID NO: 420051 - RNA, 19 nt, Artificial Sequence
  Description of Artificial Sequence: Synthetic oligonucleotide
ugaguguacuucuuaacua

SEQ ID NO: 420052 - RNA, 19 nt, Artificial Sequence
  Description of Artificial Sequence: Synthetic oligonucleotide
aguuugucauaggaagggc

SEQ ID NO: 420053 - RNA, 19 nt, Artificial Sequence
  Description of Artificial Sequence: Synthetic oligonucleotide
gaggucaauagauuugaga

SEQ ID NO: 420054 - RNA, 19 nt, Artificial Sequence
  Description of Artificial Sequence: Synthetic oligonucleotide
caaaaggauacggucgugg

SEQ ID NO: 420055 - RNA, 19 nt, Artificial Sequence
  Description of Artificial Sequence: Synthetic oligonucleotide
aguuuggcggccuggauga

SEQ ID NO: 420056 - RNA, 19 nt, Artificial Sequence
  Description of Artificial Sequence: Synthetic oligonucleotide
agcaaggguacuguuuacc

SEQ ID NO: 420057 - RNA, 19 nt, Artificial Sequence
  Description of Artificial Sequence: Synthetic oligonucleotide
agcuguauaaacuggucaa

SEQ ID NO: 420058 - RNA, 19 nt, Artificial Sequence
  Description of Artificial Sequence: Synthetic oligonucleotide
acguugccaaguuuggcgg

SEQ ID NO: 420059 - RNA, 19 nt, Artificial Sequence
  Description of Artificial Sequence: Synthetic oligonucleotide
gaacaaucaugaugucagg

SEQ ID NO: 420060 - RNA, 19 nt, Artificial Sequence
  Description of Artificial Sequence: Synthetic oligonucleotide
cuaauccuuucuucguagg

SEQ ID NO: 420061 - RNA, 19 nt, Artificial Sequence
  Description of Artificial Sequence: Synthetic oligonucleotide
cuuccugaggauucacacg

SEQ ID NO: 420062 - RNA, 19 nt, Artificial Sequence
  Description of Artificial Sequence: Synthetic oligonucleotide
gcuauugccaaucauacaa

SEQ ID NO: 420063 - RNA, 19 nt, Artificial Sequence
  Description of Artificial Sequence: Synthetic oligonucleotide
agauccucaucauggagcu

SEQ ID NO: 420064 - RNA, 19 nt, Artificial Sequence
  Description of Artificial Sequence: Synthetic oligonucleotide
agauccaccuuuaaucuag

SEQ ID NO: 420065 - RNA, 19 nt, Artificial Sequence
  Description of Artificial Sequence: Synthetic oligonucleotide
ggcgauuaaggacaucugg

SEQ ID NO: 420066 - RNA, 19 nt, Artificial Sequence
  Description of Artificial Sequence: Synthetic oligonucleotide
aggauucauaguguggagg

SEQ ID NO: 420067 - RNA, 19 nt, Artificial Sequence
  Description of Artificial Sequence: Synthetic oligonucleotide
auccagagacaccacgagg

SEQ ID NO: 420068 - RNA, 19 nt, Artificial Sequence
  Description of Artificial Sequence: Synthetic oligonucleotide
cacggguguuccaaaagcg

SEQ ID NO: 420069 - RNA, 19 nt, Artificial Sequence
  Description of Artificial Sequence: Synthetic oligonucleotide
gauaucagguguuguucug

SEQ ID NO: 420070 - RNA, 19 nt, Artificial Sequence
  Description of Artificial Sequence: Synthetic oligonucleotide
uggucaauaucuugagaga

SEQ ID NO: 420071 - RNA, 19 nt, Artificial Sequence
  Description of Artificial Sequence: Synthetic oligonucleotide
ggaacagucaggcccaucc

SEQ ID NO: 420072 - RNA, 19 nt, Artificial Sequence
  Description of Artificial Sequence: Synthetic oligonucleotide
gucaaaugggacaugcuug

SEQ ID NO: 420073 - RNA, 19 nt, Artificial Sequence
  Description of Artificial Sequence: Synthetic oligonucleotide
acuaggguccucuuguuaa

SEQ ID NO: 420074 - RNA, 19 nt, Artificial Sequence
  Description of Artificial Sequence: Synthetic oligonucleotide
guucacaaccccaaguccc

SEQ ID NO: 420075 - RNA, 19 nt, Artificial Sequence
  Description of Artificial Sequence: Synthetic oligonucleotide
ugucauaggaagggcagcc

SEQ ID NO: 420076 - RNA, 19 nt, Artificial Sequence
  Description of Artificial Sequence: Synthetic oligonucleotide
gaagauccaccuuuaaucu

SEQ ID NO: 420077 - RNA, 19 nt, Artificial Sequence
  Description of Artificial Sequence: Synthetic oligonucleotide
uacuguuuaccgaacugaa

SEQ ID NO: 420078 - RNA, 19 nt, Artificial Sequence
  Description of Artificial Sequence: Synthetic oligonucleotide
ccuacugacucuaccaugg

SEQ ID NO: 420079 - RNA, 19 nt, Artificial Sequence
  Description of Artificial Sequence: Synthetic oligonucleotide
agguuuaucacggguguuc

SEQ ID NO: 420080 - RNA, 19 nt, Artificial Sequence
  Description of Artificial Sequence: Synthetic oligonucleotide
aauacagccauggcuucca

SEQ ID NO: 420081 - RNA, 19 nt, Artificial Sequence
  Description of Artificial Sequence: Synthetic oligonucleotide
uggaggucaauagauuuga

SEQ ID NO: 420082 - RNA, 19 nt, Artificial Sequence
  Description of Artificial Sequence: Synthetic oligonucleotide
acugcacgaaaauugggau

SEQ ID NO: 420083 - RNA, 19 nt, Artificial Sequence
  Description of Artificial Sequence: Synthetic oligonucleotide
uucacaaccccaaguccca

SEQ ID NO: 420084 - RNA, 19 nt, Artificial Sequence
  Description of Artificial Sequence: Synthetic oligonucleotide
agcuguucguaggauauuc

SEQ ID NO: 420085 - RNA, 19 nt, Artificial Sequence
  Description of Artificial Sequence: Synthetic oligonucleotide
guagguuuuaggauugaac

SEQ ID NO: 420086 - RNA, 19 nt, Artificial Sequence
  Description of Artificial Sequence: Synthetic oligonucleotide
cuguucguaggauauucug

SEQ ID NO: 420087 - RNA, 19 nt, Artificial Sequence
  Description of Artificial Sequence: Synthetic oligonucleotide
agugcauccaguguuaauu

SEQ ID NO: 420088 - RNA, 19 nt, Artificial Sequence
  Description of Artificial Sequence: Synthetic oligonucleotide
ugugccuguaaugaguguc

SEQ ID NO: 420089 - RNA, 19 nt, Artificial Sequence
  Description of Artificial Sequence: Synthetic oligonucleotide
aagaggaaagacccauuuu

SEQ ID NO: 420090 - RNA, 19 nt, Artificial Sequence
  Description of Artificial Sequence: Synthetic oligonucleotide
auaaacuggucaaauggga

SEQ ID NO: 420091 - RNA, 19 nt, Artificial Sequence
  Description of Artificial Sequence: Synthetic oligonucleotide
ucuuccgcaucacucgaac

SEQ ID NO: 420092 - RNA, 19 nt, Artificial Sequence
  Description of Artificial Sequence: Synthetic oligonucleotide
cuaucuggcguguucccag

SEQ ID NO: 420093 - RNA, 19 nt, Artificial Sequence
  Description of Artificial Sequence: Synthetic oligonucleotide
uuggcugagagcaguuugu

SEQ ID NO: 420094 - RNA, 19 nt, Artificial Sequence
  Description of Artificial Sequence: Synthetic oligonucleotide
ugacuuucaggcacugccu

SEQ ID NO: 420095 - RNA, 19 nt, Artificial Sequence
  Description of Artificial Sequence: Synthetic oligonucleotide
uacugacucuaccauggcu

SEQ ID NO: 420096 - RNA, 19 nt, Artificial Sequence
  Description of Artificial Sequence: Synthetic oligonucleotide
ucuuaacuauuucacccuu

SEQ ID NO: 420097 - RNA, 19 nt, Artificial Sequence
  Description of Artificial Sequence: Synthetic oligonucleotide
agcgccaaccucucgaacu

SEQ ID NO: 420098 - RNA, 19 nt, Artificial Sequence
  Description of Artificial Sequence: Synthetic oligonucleotide
ucugcaggauuaaacuaau

SEQ ID NO: 420099 - RNA, 19 nt, Artificial Sequence
  Description of Artificial Sequence: Synthetic oligonucleotide
uccuuggaacagcauuucc

SEQ ID NO: 420100 - RNA, 19 nt, Artificial Sequence
  Description of Artificial Sequence: Synthetic oligonucleotide
ucucaguccauguccacuc

SEQ ID NO: 420101 - RNA, 19 nt, Artificial Sequence
  Description of Artificial Sequence: Synthetic oligonucleotide
accucucgaacuccacagc

SEQ ID NO: 420102 - RNA, 19 nt, Artificial Sequence
  Description of Artificial Sequence: Synthetic oligonucleotide
uguuauggcaugucugaua

SEQ ID NO: 420103 - RNA, 19 nt, Artificial Sequence
  Description of Artificial Sequence: Synthetic oligonucleotide
ggugcucaggcucuuaacc

SEQ ID NO: 420104 - RNA, 19 nt, Artificial Sequence
  Description of Artificial Sequence: Synthetic oligonucleotide
cuuaacuauuucacccuuc

SEQ ID NO: 420105 - RNA, 19 nt, Artificial Sequence
  Description of Artificial Sequence: Synthetic oligonucleotide
ggucaaccaagucugaaac

SEQ ID NO: 420106 - RNA, 19 nt, Artificial Sequence
  Description of Artificial Sequence: Synthetic oligonucleotide
ccauauaucuuugagcaag

SEQ ID NO: 420107 - RNA, 19 nt, Artificial Sequence
  Description of Artificial Sequence: Synthetic oligonucleotide
uuuuaggauugaacugagu

SEQ ID NO: 420108 - RNA, 19 nt, Artificial Sequence
  Description of Artificial Sequence: Synthetic oligonucleotide
uucguaggauauucugggc

SEQ ID NO: 420109 - RNA, 19 nt, Artificial Sequence
  Description of Artificial Sequence: Synthetic oligonucleotide
acggguguuccaaaagcgc

SEQ ID NO: 420110 - RNA, 19 nt, Artificial Sequence
  Description of Artificial Sequence: Synthetic oligonucleotide
agcuaucuugguugucaac

SEQ ID NO: 420111 - RNA, 19 nt, Artificial Sequence
  Description of Artificial Sequence: Synthetic oligonucleotide
cuucacuagagcuaggccu

SEQ ID NO: 420112 - RNA, 19 nt, Artificial Sequence
  Description of Artificial Sequence: Synthetic oligonucleotide
gacugcacgaaaauuggga

SEQ ID NO: 420113 - RNA, 19 nt, Artificial Sequence
  Description of Artificial Sequence: Synthetic oligonucleotide
ucaccuagccacauccgaa

SEQ ID NO: 420114 - RNA, 19 nt, Artificial Sequence
  Description of Artificial Sequence: Synthetic oligonucleotide
cacgacguccacauccugc

SEQ ID NO: 420115 - RNA, 19 nt, Artificial Sequence
  Description of Artificial Sequence: Synthetic oligonucleotide
uuccuaucuggcguguucc

SEQ ID NO: 420116 - RNA, 19 nt, Artificial Sequence
  Description of Artificial Sequence: Synthetic oligonucleotide
uucacacggccaccugugg

SEQ ID NO: 420117 - RNA, 19 nt, Artificial Sequence
  Description of Artificial Sequence: Synthetic oligonucleotide
aucaccuagccacauccga

SEQ ID NO: 420118 - RNA, 19 nt, Artificial Sequence
  Description of Artificial Sequence: Synthetic oligonucleotide
aagcgccaaccucucgaac

SEQ ID NO: 420119 - RNA, 19 nt, Artificial Sequence
  Description of Artificial Sequence: Synthetic oligonucleotide
aaagcgccaaccucucgaa

SEQ ID NO: 420120 - RNA, 19 nt, Artificial Sequence
  Description of Artificial Sequence: Synthetic oligonucleotide
cuuucuucguagguuuuag

SEQ ID NO: 420121 - RNA, 19 nt, Artificial Sequence
  Description of Artificial Sequence: Synthetic oligonucleotide
uuggccaaacuuccuuucu

SEQ ID NO: 420122 - RNA, 19 nt, Artificial Sequence
  Description of Artificial Sequence: Synthetic oligonucleotide
cugacucuaccauggcugc

SEQ ID NO: 420123 - RNA, 19 nt, Artificial Sequence
  Description of Artificial Sequence: Synthetic oligonucleotide
uugagcaaggguacuguuu

SEQ ID NO: 420124 - RNA, 19 nt, Artificial Sequence
  Description of Artificial Sequence: Synthetic oligonucleotide
guuuaccgaacugaaggug

SEQ ID NO: 420125 - RNA, 19 nt, Artificial Sequence
  Description of Artificial Sequence: Synthetic oligonucleotide
aaccugguuccacuaagua

SEQ ID NO: 420126 - RNA, 19 nt, Artificial Sequence
  Description of Artificial Sequence: Synthetic oligonucleotide
uucuguaguggcucuugga

SEQ ID NO: 420127 - RNA, 19 nt, Artificial Sequence
  Description of Artificial Sequence: Synthetic oligonucleotide
agcacacgugguaaugagc

SEQ ID NO: 420128 - RNA, 19 nt, Artificial Sequence
  Description of Artificial Sequence: Synthetic oligonucleotide
ggauucauaguguggagga

SEQ ID NO: 420129 - RNA, 19 nt, Artificial Sequence
  Description of Artificial Sequence: Synthetic oligonucleotide
uucgucuuuuggcacugac

SEQ ID NO: 420130 - RNA, 19 nt, Artificial Sequence
  Description of Artificial Sequence: Synthetic oligonucleotide
guagcuaucuugguuguca

SEQ ID NO: 420131 - RNA, 19 nt, Artificial Sequence
  Description of Artificial Sequence: Synthetic oligonucleotide
cugcacgaaaauugggaug

SEQ ID NO: 420132 - RNA, 19 nt, Artificial Sequence
  Description of Artificial Sequence: Synthetic oligonucleotide
uuaagaggaaagacccauu

SEQ ID NO: 420133 - RNA, 19 nt, Artificial Sequence
  Description of Artificial Sequence: Synthetic oligonucleotide
gcaacaauguaaucuuuac

SEQ ID NO: 420134 - RNA, 19 nt, Artificial Sequence
  Description of Artificial Sequence: Synthetic oligonucleotide
cuucaauacagccauggcu

SEQ ID NO: 420135 - RNA, 19 nt, Artificial Sequence
  Description of Artificial Sequence: Synthetic oligonucleotide
gucacaaaguuuucuuguc

SEQ ID NO: 420136 - RNA, 19 nt, Artificial Sequence
  Description of Artificial Sequence: Synthetic oligonucleotide
gguacuguuuaccgaacug

SEQ ID NO: 420137 - RNA, 19 nt, Artificial Sequence
  Description of Artificial Sequence: Synthetic oligonucleotide
caaaucggucuccaugaac

SEQ ID NO: 420138 - RNA, 19 nt, Artificial Sequence
  Description of Artificial Sequence: Synthetic oligonucleotide
gugguaaugagccaguuuu

SEQ ID NO: 420139 - RNA, 19 nt, Artificial Sequence
  Description of Artificial Sequence: Synthetic oligonucleotide
aaucggucuccaugaacaa

SEQ ID NO: 420140 - RNA, 19 nt, Artificial Sequence
  Description of Artificial Sequence: Synthetic oligonucleotide
uuaucuugggugucagcau

SEQ ID NO: 420141 - RNA, 19 nt, Artificial Sequence
  Description of Artificial Sequence: Synthetic oligonucleotide
cauccagagacaccacgag

SEQ ID NO: 420142 - RNA, 19 nt, Artificial Sequence
  Description of Artificial Sequence: Synthetic oligonucleotide
uccauccccauauaucuuu

SEQ ID NO: 420143 - RNA, 19 nt, Artificial Sequence
  Description of Artificial Sequence: Synthetic oligonucleotide
acguccuugacaaugugga

SEQ ID NO: 420144 - RNA, 19 nt, Artificial Sequence
  Description of Artificial Sequence: Synthetic oligonucleotide
ccccauauaucuuugagca

SEQ ID NO: 420145 - RNA, 19 nt, Artificial Sequence
  Description of Artificial Sequence: Synthetic oligonucleotide
ugcuugacugcacgaaaau

SEQ ID NO: 420146 - RNA, 19 nt, Artificial Sequence
  Description of Artificial Sequence: Synthetic oligonucleotide
acuaaacugcuggguacac

SEQ ID NO: 420147 - RNA, 19 nt, Artificial Sequence
  Description of Artificial Sequence: Synthetic oligonucleotide
ucccagguuuaucacgggu

SEQ ID NO: 420148 - RNA, 19 nt, Artificial Sequence
  Description of Artificial Sequence: Synthetic oligonucleotide
ggcaagggcaucaaaucgg

SEQ ID NO: 420149 - RNA, 19 nt, Artificial Sequence
  Description of Artificial Sequence: Synthetic oligonucleotide
ccaugaacaaucaugaugu

SEQ ID NO: 420150 - RNA, 19 nt, Artificial Sequence
  Description of Artificial Sequence: Synthetic oligonucleotide
guacuguuuaccgaacuga

SEQ ID NO: 420151 - RNA, 19 nt, Artificial Sequence
  Description of Artificial Sequence: Synthetic oligonucleotide
caucaccuagccacauccg

SEQ ID NO: 420152 - RNA, 19 nt, Artificial Sequence
  Description of Artificial Sequence: Synthetic oligonucleotide
ucccacugaccucuccucc

SEQ ID NO: 420153 - RNA, 19 nt, Artificial Sequence
  Description of Artificial Sequence: Synthetic oligonucleotide
ccuacucccagaauucugc

SEQ ID NO: 420154 - RNA, 19 nt, Artificial Sequence
  Description of Artificial Sequence: Synthetic oligonucleotide
caagaucaacagccaaggc

SEQ ID NO: 420155 - RNA, 19 nt, Artificial Sequence
  Description of Artificial Sequence: Synthetic oligonucleotide
ucacacggccaccugugga

SEQ ID NO: 420156 - RNA, 19 nt, Artificial Sequence
  Description of Artificial Sequence: Synthetic oligonucleotide
ugaacugaguguacuucuu

SEQ ID NO: 420157 - RNA, 19 nt, Artificial Sequence
  Description of Artificial Sequence: Synthetic oligonucleotide
gcuggguacaccugugagg

SEQ ID NO: 420158 - RNA, 19 nt, Artificial Sequence
  Description of Artificial Sequence: Synthetic oligonucleotide
aucccugugccuguaauga

SEQ ID NO: 420159 - RNA, 19 nt, Artificial Sequence
  Description of Artificial Sequence: Synthetic oligonucleotide
ccaagaucaacagccaagg

SEQ ID NO: 420160 - RNA, 19 nt, Artificial Sequence
  Description of Artificial Sequence: Synthetic oligonucleotide
gauacggucgugguccuca

SEQ ID NO: 420161 - RNA, 19 nt, Artificial Sequence
  Description of Artificial Sequence: Synthetic oligonucleotide
cucauauagucuuuauucu

SEQ ID NO: 420162 - RNA, 19 nt, Artificial Sequence
  Description of Artificial Sequence: Synthetic oligonucleotide
gcuucaggcgauuaaggac

SEQ ID NO: 420163 - RNA, 19 nt, Artificial Sequence
  Description of Artificial Sequence: Synthetic oligonucleotide
gagcuaggccuacugacuc

SEQ ID NO: 420164 - RNA, 19 nt, Artificial Sequence
  Description of Artificial Sequence: Synthetic oligonucleotide
guuugucauaggaagggca

SEQ ID NO: 420165 - RNA, 19 nt, Artificial Sequence
  Description of Artificial Sequence: Synthetic oligonucleotide
guagugacuggccaggacu

SEQ ID NO: 420166 - RNA, 19 nt, Artificial Sequence
  Description of Artificial Sequence: Synthetic oligonucleotide
aggccuaguggauccugcg

SEQ ID NO: 420167 - RNA, 19 nt, Artificial Sequence
  Description of Artificial Sequence: Synthetic oligonucleotide
agguuuguuccuccaagau

SEQ ID NO: 420168 - RNA, 19 nt, Artificial Sequence
  Description of Artificial Sequence: Synthetic oligonucleotide
cuuccgcaucacucgaacc

SEQ ID NO: 420169 - RNA, 19 nt, Artificial Sequence
  Description of Artificial Sequence: Synthetic oligonucleotide
cuuggccaaacuuccuuuc

SEQ ID NO: 420170 - RNA, 19 nt, Artificial Sequence
  Description of Artificial Sequence: Synthetic oligonucleotide
acaccugugagggauuugu

SEQ ID NO: 420171 - RNA, 19 nt, Artificial Sequence
  Description of Artificial Sequence: Synthetic oligonucleotide
gaguguacuucuuaacuau

SEQ ID NO: 420172 - RNA, 19 nt, Artificial Sequence
  Description of Artificial Sequence: Synthetic oligonucleotide
uaucacggguguuccaaaa

SEQ ID NO: 420173 - RNA, 19 nt, Artificial Sequence
  Description of Artificial Sequence: Synthetic oligonucleotide
ugaaaccacgacguccaca

SEQ ID NO: 420174 - RNA, 19 nt, Artificial Sequence
  Description of Artificial Sequence: Synthetic oligonucleotide
gguuuguuccuccaagauc

SEQ ID NO: 420175 - RNA, 19 nt, Artificial Sequence
  Description of Artificial Sequence: Synthetic oligonucleotide
cuugggugucagcaucccg

SEQ ID NO: 420176 - RNA, 19 nt, Artificial Sequence
  Description of Artificial Sequence: Synthetic oligonucleotide
agacaggaucaccagggaa

SEQ ID NO: 420177 - RNA, 19 nt, Artificial Sequence
  Description of Artificial Sequence: Synthetic oligonucleotide
auacaaccagcaugggcga

SEQ ID NO: 420178 - RNA, 19 nt, Artificial Sequence
  Description of Artificial Sequence: Synthetic oligonucleotide
guuuuguuauggcaugucu

SEQ ID NO: 420179 - RNA, 19 nt, Artificial Sequence
  Description of Artificial Sequence: Synthetic oligonucleotide
ucaaaucggucuccaugaa

SEQ ID NO: 420180 - RNA, 19 nt, Artificial Sequence
  Description of Artificial Sequence: Synthetic oligonucleotide
gauccaccuuuaaucuagg

SEQ ID NO: 420181 - RNA, 19 nt, Artificial Sequence
  Description of Artificial Sequence: Synthetic oligonucleotide
ggauuaaacuaauccuuuc

SEQ ID NO: 420182 - RNA, 19 nt, Artificial Sequence
  Description of Artificial Sequence: Synthetic oligonucleotide
ccgaacugaagguggagcg

SEQ ID NO: 420183 - RNA, 19 nt, Artificial Sequence
  Description of Artificial Sequence: Synthetic oligonucleotide
cuucaaugugaaggauucg

SEQ ID NO: 420184 - RNA, 19 nt, Artificial Sequence
  Description of Artificial Sequence: Synthetic oligonucleotide
cugcagugcaacaauguaa

SEQ ID NO: 420185 - RNA, 19 nt, Artificial Sequence
  Description of Artificial Sequence: Synthetic oligonucleotide
cuaaacugcuggguacacc

SEQ ID NO: 420186 - RNA, 19 nt, Artificial Sequence
  Description of Artificial Sequence: Synthetic oligonucleotide
aaaugccuacucccagaau

SEQ ID NO: 420187 - RNA, 19 nt, Artificial Sequence
  Description of Artificial Sequence: Synthetic oligonucleotide
cugaguguacuucuuaacu

SEQ ID NO: 420188 - RNA, 19 nt, Artificial Sequence
  Description of Artificial Sequence: Synthetic oligonucleotide
ugacguccuugacaaugug

SEQ ID NO: 420189 - RNA, 19 nt, Artificial Sequence
  Description of Artificial Sequence: Synthetic oligonucleotide
gaagaaguacugaucuaaa

SEQ ID NO: 420190 - RNA, 19 nt, Artificial Sequence
  Description of Artificial Sequence: Synthetic oligonucleotide
ugcggguuguguaguccag

SEQ ID NO: 420191 - RNA, 19 nt, Artificial Sequence
  Description of Artificial Sequence: Synthetic oligonucleotide
gcuaacuauugccacucug

SEQ ID NO: 420192 - RNA, 19 nt, Artificial Sequence
  Description of Artificial Sequence: Synthetic oligonucleotide
uccuaucuggcguguuccc

SEQ ID NO: 420193 - RNA, 19 nt, Artificial Sequence
  Description of Artificial Sequence: Synthetic oligonucleotide
uucccagguuuaucacggg

SEQ ID NO: 420194 - RNA, 19 nt, Artificial Sequence
  Description of Artificial Sequence: Synthetic oligonucleotide
cuuccuaucuggcguguuc

SEQ ID NO: 420195 - RNA, 19 nt, Artificial Sequence
  Description of Artificial Sequence: Synthetic oligonucleotide
agcgcuuguaauauuuuau

SEQ ID NO: 420196 - RNA, 19 nt, Artificial Sequence
  Description of Artificial Sequence: Synthetic oligonucleotide
ugguagcuaucuugguugu

SEQ ID NO: 420197 - RNA, 19 nt, Artificial Sequence
  Description of Artificial Sequence: Synthetic oligonucleotide
ugggugucagcaucccgca

SEQ ID NO: 420198 - RNA, 19 nt, Artificial Sequence
  Description of Artificial Sequence: Synthetic oligonucleotide
gcugccguggaucagcuca

SEQ ID NO: 420199 - RNA, 19 nt, Artificial Sequence
  Description of Artificial Sequence: Synthetic oligonucleotide
caaaagcgccaaccucucg

SEQ ID NO: 420200 - RNA, 19 nt, Artificial Sequence
  Description of Artificial Sequence: Synthetic oligonucleotide
caggauuaaacuaauccuu

SEQ ID NO: 420201 - RNA, 19 nt, Artificial Sequence
  Description of Artificial Sequence: Synthetic oligonucleotide
caauacagccauggcuucc

SEQ ID NO: 420202 - RNA, 19 nt, Artificial Sequence
  Description of Artificial Sequence: Synthetic oligonucleotide
ggacaaggcuugcuggcgg

SEQ ID NO: 420203 - RNA, 19 nt, Artificial Sequence
  Description of Artificial Sequence: Synthetic oligonucleotide
auucacacggccaccugug

SEQ ID NO: 420204 - RNA, 19 nt, Artificial Sequence
  Description of Artificial Sequence: Synthetic oligonucleotide
agagcuaggccuacugacu

SEQ ID NO: 420205 - RNA, 19 nt, Artificial Sequence
  Description of Artificial Sequence: Synthetic oligonucleotide
auacggucgugguccucac

SEQ ID NO: 420206 - RNA, 19 nt, Artificial Sequence
  Description of Artificial Sequence: Synthetic oligonucleotide
cuacugacucuaccauggc

SEQ ID NO: 420207 - RNA, 19 nt, Artificial Sequence
  Description of Artificial Sequence: Synthetic oligonucleotide
cagugcaacaauguaaucu

SEQ ID NO: 420208 - RNA, 19 nt, Artificial Sequence
  Description of Artificial Sequence: Synthetic oligonucleotide
gagcgcuuguaauauuuua

SEQ ID NO: 420209 - RNA, 19 nt, Artificial Sequence
  Description of Artificial Sequence: Synthetic oligonucleotide
gaacagucaggcccaucca

SEQ ID NO: 420210 - RNA, 19 nt, Artificial Sequence
  Description of Artificial Sequence: Synthetic oligonucleotide
cacgagguggccaagcucu

SEQ ID NO: 420211 - RNA, 19 nt, Artificial Sequence
  Description of Artificial Sequence: Synthetic oligonucleotide
cuuggaggucaauagauuu

SEQ ID NO: 420212 - RNA, 19 nt, Artificial Sequence
  Description of Artificial Sequence: Synthetic oligonucleotide
uuauggcaugucugauaga

SEQ ID NO: 420213 - RNA, 19 nt, Artificial Sequence
  Description of Artificial Sequence: Synthetic oligonucleotide
auuucacccuucaugcuaa

SEQ ID NO: 420214 - RNA, 19 nt, Artificial Sequence
  Description of Artificial Sequence: Synthetic oligonucleotide
agguggagcgcuuguaaua

SEQ ID NO: 420215 - RNA, 19 nt, Artificial Sequence
  Description of Artificial Sequence: Synthetic oligonucleotide
guugccaaguuuggcggcc

SEQ ID NO: 420216 - RNA, 19 nt, Artificial Sequence
  Description of Artificial Sequence: Synthetic oligonucleotide
caauagucccacugaccuc

SEQ ID NO: 420217 - RNA, 19 nt, Artificial Sequence
  Description of Artificial Sequence: Synthetic oligonucleotide
gaugcucauauagucuuua

SEQ ID NO: 420218 - RNA, 19 nt, Artificial Sequence
  Description of Artificial Sequence: Synthetic oligonucleotide
ggagauguaaggugucaga

SEQ ID NO: 420219 - RNA, 19 nt, Artificial Sequence
  Description of Artificial Sequence: Synthetic oligonucleotide
aucauacaaccagcauggg

SEQ ID NO: 420220 - RNA, 19 nt, Artificial Sequence
  Description of Artificial Sequence: Synthetic oligonucleotide
cuucguagguuuuaggauu

SEQ ID NO: 420221 - RNA, 19 nt, Artificial Sequence
  Description of Artificial Sequence: Synthetic oligonucleotide
gcgcuuguaauauuuuauc

SEQ ID NO: 420222 - RNA, 19 nt, Artificial Sequence
  Description of Artificial Sequence: Synthetic oligonucleotide
gcuucaauacagccauggc

SEQ ID NO: 420223 - RNA, 19 nt, Artificial Sequence
  Description of Artificial Sequence: Synthetic oligonucleotide
uuguguaguccagaaccau

SEQ ID NO: 420224 - RNA, 19 nt, Artificial Sequence
  Description of Artificial Sequence: Synthetic oligonucleotide
acaugcuugacugcacgaa

SEQ ID NO: 420225 - RNA, 19 nt, Artificial Sequence
  Description of Artificial Sequence: Synthetic oligonucleotide
ggaaaugccuacucccaga

SEQ ID NO: 420226 - RNA, 19 nt, Artificial Sequence
  Description of Artificial Sequence: Synthetic oligonucleotide
cucuuggaggucaauagau

SEQ ID NO: 420227 - RNA, 19 nt, Artificial Sequence
  Description of Artificial Sequence: Synthetic oligonucleotide
uuguuauggcaugucugau

SEQ ID NO: 420228 - RNA, 19 nt, Artificial Sequence
  Description of Artificial Sequence: Synthetic oligonucleotide
aucuaggccacagcuucug

SEQ ID NO: 420229 - RNA, 19 nt, Artificial Sequence
  Description of Artificial Sequence: Synthetic oligonucleotide
cccagguuuaucacgggug

SEQ ID NO: 420230 - RNA, 19 nt, Artificial Sequence
  Description of Artificial Sequence: Synthetic oligonucleotide
gacaaggcuugcuggcgga

SEQ ID NO: 420231 - RNA, 19 nt, Artificial Sequence
  Description of Artificial Sequence: Synthetic oligonucleotide
augacguccuugacaaugu

SEQ ID NO: 420232 - RNA, 19 nt, Artificial Sequence
  Description of Artificial Sequence: Synthetic oligonucleotide
ggccuaguggauccugcgg

SEQ ID NO: 420233 - RNA, 19 nt, Artificial Sequence
  Description of Artificial Sequence: Synthetic oligonucleotide
gaaggauucggauguucau

SEQ ID NO: 420234 - RNA, 19 nt, Artificial Sequence
  Description of Artificial Sequence: Synthetic oligonucleotide
caugcuugacugcacgaaa

SEQ ID NO: 420235 - RNA, 19 nt, Artificial Sequence
  Description of Artificial Sequence: Synthetic oligonucleotide
caggcgauuaaggacaucu

SEQ ID NO: 420236 - RNA, 19 nt, Artificial Sequence
  Description of Artificial Sequence: Synthetic oligonucleotide
caucccgcacaugaagaac

SEQ ID NO: 420237 - RNA, 19 nt, Artificial Sequence
  Description of Artificial Sequence: Synthetic oligonucleotide
cugcaggauuaaacuaauc

SEQ ID NO: 420238 - RNA, 19 nt, Artificial Sequence
  Description of Artificial Sequence: Synthetic oligonucleotide
uuccauccccauauaucuu

SEQ ID NO: 420239 - RNA, 19 nt, Artificial Sequence
  Description of Artificial Sequence: Synthetic oligonucleotide
gcauaugcuucaauacagc

SEQ ID NO: 420240 - RNA, 19 nt, Artificial Sequence
  Description of Artificial Sequence: Synthetic oligonucleotide
gucaguggucacagggugc

SEQ ID NO: 420241 - RNA, 19 nt, Artificial Sequence
  Description of Artificial Sequence: Synthetic oligonucleotide
caaugugaaggauucggau

SEQ ID NO: 420242 - RNA, 19 nt, Artificial Sequence
  Description of Artificial Sequence: Synthetic oligonucleotide
ugccuacucccagaauucu

SEQ ID NO: 420243 - RNA, 19 nt, Artificial Sequence
  Description of Artificial Sequence: Synthetic oligonucleotide
ugccuguaaugagugucac

SEQ ID NO: 420244 - RNA, 19 nt, Artificial Sequence
  Description of Artificial Sequence: Synthetic oligonucleotide
augagccaguuuuguuaug

SEQ ID NO: 420245 - RNA, 19 nt, Artificial Sequence
  Description of Artificial Sequence: Synthetic oligonucleotide
cguggaucagcucaugcug

SEQ ID NO: 420246 - RNA, 19 nt, Artificial Sequence
  Description of Artificial Sequence: Synthetic oligonucleotide
ccaguguuaauucaaacau

SEQ ID NO: 420247 - RNA, 19 nt, Artificial Sequence
  Description of Artificial Sequence: Synthetic oligonucleotide
gguugaaugcagcacaauu

SEQ ID NO: 420248 - RNA, 19 nt, Artificial Sequence
  Description of Artificial Sequence: Synthetic oligonucleotide
augcuugacugcacgaaaa

SEQ ID NO: 420249 - RNA, 19 nt, Artificial Sequence
  Description of Artificial Sequence: Synthetic oligonucleotide
ggauaucagguguuguucu

SEQ ID NO: 420250 - RNA, 19 nt, Artificial Sequence
  Description of Artificial Sequence: Synthetic oligonucleotide
caagggcaucaaaucgguc

SEQ ID NO: 420251 - RNA, 19 nt, Artificial Sequence
  Description of Artificial Sequence: Synthetic oligonucleotide
uggcguguucccagguuua

SEQ ID NO: 420252 - RNA, 19 nt, Artificial Sequence
  Description of Artificial Sequence: Synthetic oligonucleotide
aguguacuucuuaacuauu

SEQ ID NO: 420253 - RNA, 19 nt, Artificial Sequence
  Description of Artificial Sequence: Synthetic oligonucleotide
gccuacugacucuaccaug

SEQ ID NO: 420254 - RNA, 19 nt, Artificial Sequence
  Description of Artificial Sequence: Synthetic oligonucleotide
uuucacccuucaugcuaac

SEQ ID NO: 420255 - RNA, 19 nt, Artificial Sequence
  Description of Artificial Sequence: Synthetic oligonucleotide
cugcggguuguguagucca

SEQ ID NO: 420256 - RNA, 19 nt, Artificial Sequence
  Description of Artificial Sequence: Synthetic oligonucleotide
ccacagguucgucuuuugg

SEQ ID NO: 420257 - RNA, 19 nt, Artificial Sequence
  Description of Artificial Sequence: Synthetic oligonucleotide
gugccuguaaugaguguca

SEQ ID NO: 420258 - RNA, 19 nt, Artificial Sequence
  Description of Artificial Sequence: Synthetic oligonucleotide
uacggucgugguccucaca

SEQ ID NO: 420259 - RNA, 19 nt, Artificial Sequence
  Description of Artificial Sequence: Synthetic oligonucleotide
ggucaaaugggacaugcuu

SEQ ID NO: 420260 - RNA, 19 nt, Artificial Sequence
  Description of Artificial Sequence: Synthetic oligonucleotide
cuaggccuacugacucuac

SEQ ID NO: 420261 - RNA, 19 nt, Artificial Sequence
  Description of Artificial Sequence: Synthetic oligonucleotide
caaucaugaugucaggcuu

SEQ ID NO: 420262 - RNA, 19 nt, Artificial Sequence
  Description of Artificial Sequence: Synthetic oligonucleotide
ccaagucugaaaccacgac

SEQ ID NO: 420263 - RNA, 19 nt, Artificial Sequence
  Description of Artificial Sequence: Synthetic oligonucleotide
gggucaaccaagucugaaa

SEQ ID NO: 420264 - RNA, 19 nt, Artificial Sequence
  Description of Artificial Sequence: Synthetic oligonucleotide
ucgcuucccucugcaaggc

SEQ ID NO: 420265 - RNA, 19 nt, Artificial Sequence
  Description of Artificial Sequence: Synthetic oligonucleotide
gguagcuucacuagagcua

SEQ ID NO: 420266 - RNA, 19 nt, Artificial Sequence
  Description of Artificial Sequence: Synthetic oligonucleotide
ggcgaccagcuguauaaac

SEQ ID NO: 420267 - RNA, 19 nt, Artificial Sequence
  Description of Artificial Sequence: Synthetic oligonucleotide
aggcgauuaaggacaucug

SEQ ID NO: 420268 - RNA, 19 nt, Artificial Sequence
  Description of Artificial Sequence: Synthetic oligonucleotide
aucuggcguguucccaggu

SEQ ID NO: 420269 - RNA, 19 nt, Artificial Sequence
  Description of Artificial Sequence: Synthetic oligonucleotide
ucguagguuuuaggauuga

SEQ ID NO: 420270 - RNA, 19 nt, Artificial Sequence
  Description of Artificial Sequence: Synthetic oligonucleotide
cguguucccagguuuauca

SEQ ID NO: 420271 - RNA, 19 nt, Artificial Sequence
  Description of Artificial Sequence: Synthetic oligonucleotide
aucggucuccaugaacaau

SEQ ID NO: 420272 - RNA, 19 nt, Artificial Sequence
  Description of Artificial Sequence: Synthetic oligonucleotide
ugcccuggagcuugacuuu

SEQ ID NO: 420273 - RNA, 19 nt, Artificial Sequence
  Description of Artificial Sequence: Synthetic oligonucleotide
ucacuagagcuaggccuac

SEQ ID NO: 420274 - RNA, 19 nt, Artificial Sequence
  Description of Artificial Sequence: Synthetic oligonucleotide
gcuuuugcucuugcccugg

SEQ ID NO: 420275 - RNA, 19 nt, Artificial Sequence
  Description of Artificial Sequence: Synthetic oligonucleotide
agggucaaccaagucugaa

SEQ ID NO: 420276 - RNA, 19 nt, Artificial Sequence
  Description of Artificial Sequence: Synthetic oligonucleotide
ccaccaaucccugugccug

SEQ ID NO: 420277 - RNA, 19 nt, Artificial Sequence
  Description of Artificial Sequence: Synthetic oligonucleotide
guguucugagguccacaga

SEQ ID NO: 420278 - RNA, 19 nt, Artificial Sequence
  Description of Artificial Sequence: Synthetic oligonucleotide
cuauuucacccuucaugcu

SEQ ID NO: 420279 - RNA, 19 nt, Artificial Sequence
  Description of Artificial Sequence: Synthetic oligonucleotide
aggaacagucaggcccauc

SEQ ID NO: 420280 - RNA, 19 nt, Artificial Sequence
  Description of Artificial Sequence: Synthetic oligonucleotide
agcugccguggaucagcuc

SEQ ID NO: 420281 - RNA, 19 nt, Artificial Sequence
  Description of Artificial Sequence: Synthetic oligonucleotide
uugccaaguuuggcggccu

SEQ ID NO: 420282 - RNA, 19 nt, Artificial Sequence
  Description of Artificial Sequence: Synthetic oligonucleotide
cugaaaccacgacguccac

SEQ ID NO: 420283 - RNA, 19 nt, Artificial Sequence
  Description of Artificial Sequence: Synthetic oligonucleotide
gccuauguaaggauaugaa

SEQ ID NO: 420284 - RNA, 19 nt, Artificial Sequence
  Description of Artificial Sequence: Synthetic oligonucleotide
cggaugacguccuugacaa

SEQ ID NO: 420285 - RNA, 19 nt, Artificial Sequence
  Description of Artificial Sequence: Synthetic oligonucleotide
agccugccaaaaggauacg

SEQ ID NO: 420286 - RNA, 19 nt, Artificial Sequence
  Description of Artificial Sequence: Synthetic oligonucleotide
cuugggucucaguccaugu

SEQ ID NO: 420287 - RNA, 19 nt, Artificial Sequence
  Description of Artificial Sequence: Synthetic oligonucleotide
ccauccccauauaucuuug

SEQ ID NO: 420288 - RNA, 19 nt, Artificial Sequence
  Description of Artificial Sequence: Synthetic oligonucleotide
ccaaaagcgccaaccucuc

SEQ ID NO: 420289 - RNA, 19 nt, Artificial Sequence
  Description of Artificial Sequence: Synthetic oligonucleotide
gccaaguuuggcggccugg

SEQ ID NO: 420290 - RNA, 19 nt, Artificial Sequence
  Description of Artificial Sequence: Synthetic oligonucleotide
gcgauuaaggacaucuggu

SEQ ID NO: 420291 - RNA, 19 nt, Artificial Sequence
  Description of Artificial Sequence: Synthetic oligonucleotide
gauucauaguguggaggau

SEQ ID NO: 420292 - RNA, 19 nt, Artificial Sequence
  Description of Artificial Sequence: Synthetic oligonucleotide
cacccuucaugcuaacuau

SEQ ID NO: 420293 - RNA, 19 nt, Artificial Sequence
  Description of Artificial Sequence: Synthetic oligonucleotide
cagccucccaaauuugccu

SEQ ID NO: 420294 - RNA, 19 nt, Artificial Sequence
  Description of Artificial Sequence: Synthetic oligonucleotide
gugucagagagggguguuc

SEQ ID NO: 420295 - RNA, 19 nt, Artificial Sequence
  Description of Artificial Sequence: Synthetic oligonucleotide
caauguggauguagugacu

SEQ ID NO: 420296 - RNA, 19 nt, Artificial Sequence
  Description of Artificial Sequence: Synthetic oligonucleotide
ggcaugucugauagaguca

SEQ ID NO: 420297 - RNA, 19 nt, Artificial Sequence
  Description of Artificial Sequence: Synthetic oligonucleotide
ucuuccuaucuggcguguu

SEQ ID NO: 420298 - RNA, 19 nt, Artificial Sequence
  Description of Artificial Sequence: Synthetic oligonucleotide
cuaggccacagcuucugau

SEQ ID NO: 420299 - RNA, 19 nt, Artificial Sequence
  Description of Artificial Sequence: Synthetic oligonucleotide
aacugaagguggagcgcuu

SEQ ID NO: 420300 - RNA, 19 nt, Artificial Sequence
  Description of Artificial Sequence: Synthetic oligonucleotide
cauggauaucagguguugu

SEQ ID NO: 420301 - RNA, 19 nt, Artificial Sequence
  Description of Artificial Sequence: Synthetic oligonucleotide
cacauggauaucagguguu

SEQ ID NO: 420302 - RNA, 19 nt, Artificial Sequence
  Description of Artificial Sequence: Synthetic oligonucleotide
ugccguggaucagcucaug

SEQ ID NO: 420303 - RNA, 19 nt, Artificial Sequence
  Description of Artificial Sequence: Synthetic oligonucleotide
gcaucccgcacaugaagaa

SEQ ID NO: 420304 - RNA, 19 nt, Artificial Sequence
  Description of Artificial Sequence: Synthetic oligonucleotide
cacccacacagggagaugu

SEQ ID NO: 420305 - RNA, 19 nt, Artificial Sequence
  Description of Artificial Sequence: Synthetic oligonucleotide
gccuacucccagaauucug

SEQ ID NO: 420306 - RNA, 19 nt, Artificial Sequence
  Description of Artificial Sequence: Synthetic oligonucleotide
gccuguaaugagugucaca

SEQ ID NO: 420307 - RNA, 19 nt, Artificial Sequence
  Description of Artificial Sequence: Synthetic oligonucleotide
cucaugcuggugaaugauu

SEQ ID NO: 420308 - RNA, 19 nt, Artificial Sequence
  Description of Artificial Sequence: Synthetic oligonucleotide
ccugccaaaaggauacggu

SEQ ID NO: 420309 - RNA, 19 nt, Artificial Sequence
  Description of Artificial Sequence: Synthetic oligonucleotide
caccuagccacauccgaau

SEQ ID NO: 420310 - RNA, 19 nt, Artificial Sequence
  Description of Artificial Sequence: Synthetic oligonucleotide
gcgaccagcuguauaaacu

SEQ ID NO: 420311 - RNA, 19 nt, Artificial Sequence
  Description of Artificial Sequence: Synthetic oligonucleotide
gggucucaguccaugucca

SEQ ID NO: 420312 - RNA, 19 nt, Artificial Sequence
  Description of Artificial Sequence: Synthetic oligonucleotide
ggucgugguccucacacau

SEQ ID NO: 420313 - RNA, 19 nt, Artificial Sequence
  Description of Artificial Sequence: Synthetic oligonucleotide
gguggagcgcuuguaauau

SEQ ID NO: 420314 - RNA, 19 nt, Artificial Sequence
  Description of Artificial Sequence: Synthetic oligonucleotide
ggguacuguuuaccgaacu

SEQ ID NO: 420315 - RNA, 19 nt, Artificial Sequence
  Description of Artificial Sequence: Synthetic oligonucleotide
ccugcggguuguguagucc

SEQ ID NO: 420316 - RNA, 19 nt, Artificial Sequence
  Description of Artificial Sequence: Synthetic oligonucleotide
agggcacccacagguucgu

SEQ ID NO: 420317 - RNA, 19 nt, Artificial Sequence
  Description of Artificial Sequence: Synthetic oligonucleotide
cguugccaaguuuggcggc

SEQ ID NO: 420318 - RNA, 19 nt, Artificial Sequence
  Description of Artificial Sequence: Synthetic oligonucleotide
gcagccugccaaaaggaua

SEQ ID NO: 420319 - RNA, 19 nt, Artificial Sequence
  Description of Artificial Sequence: Synthetic oligonucleotide
ggcagccuauguaaggaua

SEQ ID NO: 420320 - RNA, 19 nt, Artificial Sequence
  Description of Artificial Sequence: Synthetic oligonucleotide
acaccacgagguggccaag

SEQ ID NO: 420321 - RNA, 19 nt, Artificial Sequence
  Description of Artificial Sequence: Synthetic oligonucleotide
cuggcguguucccagguuu

SEQ ID NO: 420322 - RNA, 19 nt, Artificial Sequence
  Description of Artificial Sequence: Synthetic oligonucleotide
gccacauccgaaugaugcu

SEQ ID NO: 420323 - RNA, 19 nt, Artificial Sequence
  Description of Artificial Sequence: Synthetic oligonucleotide
guuuggcggccuggaugag

SEQ ID NO: 420324 - RNA, 19 nt, Artificial Sequence
  Description of Artificial Sequence: Synthetic oligonucleotide
gggacaugcuugacugcac

SEQ ID NO: 420325 - RNA, 19 nt, Artificial Sequence
  Description of Artificial Sequence: Synthetic oligonucleotide
ccaaaaggauacggucgug

SEQ ID NO: 420326 - RNA, 19 nt, Artificial Sequence
  Description of Artificial Sequence: Synthetic oligonucleotide
ccagguuuaucacgggugu

SEQ ID NO: 420327 - RNA, 19 nt, Artificial Sequence
  Description of Artificial Sequence: Synthetic oligonucleotide
ccacgagguggccaagcuc

SEQ ID NO: 420328 - RNA, 19 nt, Artificial Sequence
  Description of Artificial Sequence: Synthetic oligonucleotide
cguaggauauucugggccu

SEQ ID NO: 420329 - RNA, 19 nt, Artificial Sequence
  Description of Artificial Sequence: Synthetic oligonucleotide
ccucucgaacuccacagcu

SEQ ID NO: 420330 - RNA, 19 nt, Artificial Sequence
  Description of Artificial Sequence: Synthetic oligonucleotide
ggccuacugacucuaccau

SEQ ID NO: 420331 - RNA, 19 nt, Artificial Sequence
  Description of Artificial Sequence: Synthetic oligonucleotide
gggugucagcaucccgcac

SEQ ID NO: 420332 - RNA, 19 nt, Artificial Sequence
  Description of Artificial Sequence: Synthetic oligonucleotide
gcuaggccuacugacucua

SEQ ID NO: 420333 - RNA, 19 nt, Artificial Sequence
  Description of Artificial Sequence: Synthetic oligonucleotide
ccguggaucagcucaugcu

SEQ ID NO: 420334 - RNA, 19 nt, Artificial Sequence
  Description of Artificial Sequence: Synthetic oligonucleotide
ccaaucauacaaccagcau

SEQ ID NO: 420335 - RNA, 19 nt, Artificial Sequence
  Description of Artificial Sequence: Synthetic oligonucleotide
gcuguucguaggauauucu

SEQ ID NO: 420336 - RNA, 19 nt, Artificial Sequence
  Description of Artificial Sequence: Synthetic oligonucleotide
caaguuuggcggccuggau

SEQ ID NO: 420337 - RNA, 19 nt, Artificial Sequence
  Description of Artificial Sequence: Synthetic oligonucleotide
caccaaucccugugccugu

SEQ ID NO: 420338 - RNA, 19 nt, Artificial Sequence
  Description of Artificial Sequence: Synthetic oligonucleotide
gagcugccguggaucagcu

SEQ ID NO: 420339 - RNA, 19 nt, Artificial Sequence
  Description of Artificial Sequence: Synthetic oligonucleotide
gcguguucccagguuuauc

SEQ ID NO: 420340 - RNA, 19 nt, Artificial Sequence
  Description of Artificial Sequence: Synthetic oligonucleotide
gcggguuguguaguccaga

SEQ ID NO: 420341 - RNA, 19 nt, Artificial Sequence
  Description of Artificial Sequence: Synthetic oligonucleotide
cuggugcagcacacguggu

SEQ ID NO: 420342 - RNA, 19 nt, Artificial Sequence
  Description of Artificial Sequence: Synthetic oligonucleotide
ccuaguggauccugcgggu

SEQ ID NO: 420343 - RNA, 19 nt, Artificial Sequence
  Description of Artificial Sequence: Synthetic oligonucleotide
cuaguggauccugcggguu

SEQ ID NO: 420344 - RNA, 19 nt, Artificial Sequence
  Description of Artificial Sequence: Synthetic oligonucleotide
gcaugggcgaccagcugua

SEQ ID NO: 420345 - RNA, 19 nt, Artificial Sequence
  Description of Artificial Sequence: Synthetic oligonucleotide
cguagguuuuaggauugaa

SEQ ID NO: 420346 - RNA, 19 nt, Artificial Sequence
  Description of Artificial Sequence: Synthetic oligonucleotide
cucuuccuaucuggcgugu

SEQ ID NO: 420347 - RNA, 19 nt, Artificial Sequence
  Description of Artificial Sequence: Synthetic oligonucleotide
ggcagccugccaaaaggau

SEQ ID NO: 420348 - RNA, 19 nt, Artificial Sequence
  Description of Artificial Sequence: Synthetic oligonucleotide
ggauacggucgugguccuc

SEQ ID NO: 420349 - RNA, 19 nt, Artificial Sequence
  Description of Artificial Sequence: Synthetic oligonucleotide
cagguuuaucacggguguu

SEQ ID NO: 420350 - RNA, 19 nt, Artificial Sequence
  Description of Artificial Sequence: Synthetic oligonucleotide
cgccaaccucucgaacucc

SEQ ID NO: 420351 - RNA, 19 nt, Artificial Sequence
  Description of Artificial Sequence: Synthetic oligonucleotide
ggcguguucccagguuuau

SEQ ID NO: 420352 - RNA, 19 nt, Artificial Sequence
  Description of Artificial Sequence: Synthetic oligonucleotide
cggucgugguccucacaca

SEQ ID NO: 420353 - RNA, 19 nt, Artificial Sequence
  Description of Artificial Sequence: Synthetic oligonucleotide
cgugguaaugagccaguuu

SEQ ID NO: 420354 - RNA, 19 nt, Artificial Sequence
  Description of Artificial Sequence: Synthetic oligonucleotide
cagcuguucguaggauauu

SEQ ID NO: 420355 - RNA, 19 nt, Artificial Sequence
  Description of Artificial Sequence: Synthetic oligonucleotide
aauaauagggguuuacaac

SEQ ID NO: 420356 - RNA, 19 nt, Artificial Sequence
  Description of Artificial Sequence: Synthetic oligonucleotide
auaauagggguuuacaacc

SEQ ID NO: 420357 - RNA, 19 nt, Artificial Sequence
  Description of Artificial Sequence: Synthetic oligonucleotide
aaucaggugggcuuguugc

SEQ ID NO: 420358 - RNA, 19 nt, Artificial Sequence
  Description of Artificial Sequence: Synthetic oligonucleotide
cuaggaaagaaucaggugg

SEQ ID NO: 420359 - RNA, 19 nt, Artificial Sequence
  Description of Artificial Sequence: Synthetic oligonucleotide
aaggcauagagaaugaccc

SEQ ID NO: 420360 - RNA, 19 nt, Artificial Sequence
  Description of Artificial Sequence: Synthetic oligonucleotide
uuggcuauauuuauuaugc

SEQ ID NO: 420361 - RNA, 19 nt, Artificial Sequence
  Description of Artificial Sequence: Synthetic oligonucleotide
auauauauauauguaaaac

SEQ ID NO: 420362 - RNA, 19 nt, Artificial Sequence
  Description of Artificial Sequence: Synthetic oligonucleotide
uauauauauauauauguaa

SEQ ID NO: 420363 - RNA, 19 nt, Artificial Sequence
  Description of Artificial Sequence: Synthetic oligonucleotide
ucaauuaugaggugguagg

SEQ ID NO: 420364 - RNA, 19 nt, Artificial Sequence
  Description of Artificial Sequence: Synthetic oligonucleotide
uuauuaugcaugcuuauug

SEQ ID NO: 420365 - RNA, 19 nt, Artificial Sequence
  Description of Artificial Sequence: Synthetic oligonucleotide
acagaggacacacacacac

SEQ ID NO: 420366 - RNA, 19 nt, Artificial Sequence
  Description of Artificial Sequence: Synthetic oligonucleotide
ugaaagaccgaaaucagcu

SEQ ID NO: 420367 - RNA, 19 nt, Artificial Sequence
  Description of Artificial Sequence: Synthetic oligonucleotide
aaauucaccaucugacauc

SEQ ID NO: 420368 - RNA, 19 nt, Artificial Sequence
  Description of Artificial Sequence: Synthetic oligonucleotide
aguaaguccgacuauccac

SEQ ID NO: 420369 - RNA, 19 nt, Artificial Sequence
  Description of Artificial Sequence: Synthetic oligonucleotide
guuuaaaccauucauguuc

SEQ ID NO: 420370 - RNA, 19 nt, Artificial Sequence
  Description of Artificial Sequence: Synthetic oligonucleotide
aauuacuuccggugcagcg

SEQ ID NO: 420371 - RNA, 19 nt, Artificial Sequence
  Description of Artificial Sequence: Synthetic oligonucleotide
aaauaauagggguuuacaa

SEQ ID NO: 420372 - RNA, 19 nt, Artificial Sequence
  Description of Artificial Sequence: Synthetic oligonucleotide
aaaugugcuugucacgggg

SEQ ID NO: 420373 - RNA, 19 nt, Artificial Sequence
  Description of Artificial Sequence: Synthetic oligonucleotide
gugacaauaauccacacca

SEQ ID NO: 420374 - RNA, 19 nt, Artificial Sequence
  Description of Artificial Sequence: Synthetic oligonucleotide
acuacggaaauccaguaag

SEQ ID NO: 420375 - RNA, 19 nt, Artificial Sequence
  Description of Artificial Sequence: Synthetic oligonucleotide
uguaugauggauccuccgg

SEQ ID NO: 420376 - RNA, 19 nt, Artificial Sequence
  Description of Artificial Sequence: Synthetic oligonucleotide
gaagguccuauuuaauugg

SEQ ID NO: 420377 - RNA, 19 nt, Artificial Sequence
  Description of Artificial Sequence: Synthetic oligonucleotide
uaagugauaucagugagcc

SEQ ID NO: 420378 - RNA, 19 nt, Artificial Sequence
  Description of Artificial Sequence: Synthetic oligonucleotide
uauauauauauauguaaaa

SEQ ID NO: 420379 - RNA, 19 nt, Artificial Sequence
  Description of Artificial Sequence: Synthetic oligonucleotide
aaagaguuggcacgugguc

SEQ ID NO: 420380 - RNA, 19 nt, Artificial Sequence
  Description of Artificial Sequence: Synthetic oligonucleotide
aacucgguaacuaaaagga

SEQ ID NO: 420381 - RNA, 19 nt, Artificial Sequence
  Description of Artificial Sequence: Synthetic oligonucleotide
cauaauaucauuuggccga

SEQ ID NO: 420382 - RNA, 19 nt, Artificial Sequence
  Description of Artificial Sequence: Synthetic oligonucleotide
cauuuggacaucauaagug

SEQ ID NO: 420383 - RNA, 19 nt, Artificial Sequence
  Description of Artificial Sequence: Synthetic oligonucleotide
aaacuugauaaguggaagu

SEQ ID NO: 420384 - RNA, 19 nt, Artificial Sequence
  Description of Artificial Sequence: Synthetic oligonucleotide
ucguacacgcaaauaauag

SEQ ID NO: 420385 - RNA, 19 nt, Artificial Sequence
  Description of Artificial Sequence: Synthetic oligonucleotide
uaacaaggcauagagaaug

SEQ ID NO: 420386 - RNA, 19 nt, Artificial Sequence
  Description of Artificial Sequence: Synthetic oligonucleotide
gauaaguggaaguguuugg

SEQ ID NO: 420387 - RNA, 19 nt, Artificial Sequence
  Description of Artificial Sequence: Synthetic oligonucleotide
aauacuacggaaauccagu

SEQ ID NO: 420388 - RNA, 19 nt, Artificial Sequence
  Description of Artificial Sequence: Synthetic oligonucleotide
aaaaucccaucgcauaucu

SEQ ID NO: 420389 - RNA, 19 nt, Artificial Sequence
  Description of Artificial Sequence: Synthetic oligonucleotide
cauauauauauauauaugu

SEQ ID NO: 420390 - RNA, 19 nt, Artificial Sequence
  Description of Artificial Sequence: Synthetic oligonucleotide
uuaucaauuaugagguggu

SEQ ID NO: 420391 - RNA, 19 nt, Artificial Sequence
  Description of Artificial Sequence: Synthetic oligonucleotide
uacacgcaaauaauagggg

SEQ ID NO: 420392 - RNA, 19 nt, Artificial Sequence
  Description of Artificial Sequence: Synthetic oligonucleotide
uaaaacuugauaaguggaa

SEQ ID NO: 420393 - RNA, 19 nt, Artificial Sequence
  Description of Artificial Sequence: Synthetic oligonucleotide
uauaagaauuugcaaacua

SEQ ID NO: 420394 - RNA, 19 nt, Artificial Sequence
  Description of Artificial Sequence: Synthetic oligonucleotide
auguggccgaguuaaaugg

SEQ ID NO: 420395 - RNA, 19 nt, Artificial Sequence
  Description of Artificial Sequence: Synthetic oligonucleotide
uaucauuuggccgacuuug

SEQ ID NO: 420396 - RNA, 19 nt, Artificial Sequence
  Description of Artificial Sequence: Synthetic oligonucleotide
uaaguaaguccgacuaucc

SEQ ID NO: 420397 - RNA, 19 nt, Artificial Sequence
  Description of Artificial Sequence: Synthetic oligonucleotide
aaaaugugcuugucacggg

SEQ ID NO: 420398 - RNA, 19 nt, Artificial Sequence
  Description of Artificial Sequence: Synthetic oligonucleotide
guuuaauuaugugagggug

SEQ ID NO: 420399 - RNA, 19 nt, Artificial Sequence
  Description of Artificial Sequence: Synthetic oligonucleotide
ugcauuuggacaucauaag

SEQ ID NO: 420400 - RNA, 19 nt, Artificial Sequence
  Description of Artificial Sequence: Synthetic oligonucleotide
auaagugauaucagugagc

SEQ ID NO: 420401 - RNA, 19 nt, Artificial Sequence
  Description of Artificial Sequence: Synthetic oligonucleotide
auguauacaguacuuuucu

SEQ ID NO: 420402 - RNA, 19 nt, Artificial Sequence
  Description of Artificial Sequence: Synthetic oligonucleotide
aauaucauuuggccgacuu

SEQ ID NO: 420403 - RNA, 19 nt, Artificial Sequence
  Description of Artificial Sequence: Synthetic oligonucleotide
uauagcuguagacucauuu

SEQ ID NO: 420404 - RNA, 19 nt, Artificial Sequence
  Description of Artificial Sequence: Synthetic oligonucleotide
ucaucaauacuacggaaau

SEQ ID NO: 420405 - RNA, 19 nt, Artificial Sequence
  Description of Artificial Sequence: Synthetic oligonucleotide
auagagauauuacuuaguu

SEQ ID NO: 420406 - RNA, 19 nt, Artificial Sequence
  Description of Artificial Sequence: Synthetic oligonucleotide
uguggaccaaccaugugug

SEQ ID NO: 420407 - RNA, 19 nt, Artificial Sequence
  Description of Artificial Sequence: Synthetic oligonucleotide
auauauauauauauguaaa

SEQ ID NO: 420408 - RNA, 19 nt, Artificial Sequence
  Description of Artificial Sequence: Synthetic oligonucleotide
ucgguaacuaaaaggaauc

SEQ ID NO: 420409 - RNA, 19 nt, Artificial Sequence
  Description of Artificial Sequence: Synthetic oligonucleotide
uugaguaucuucacagcga

SEQ ID NO: 420410 - RNA, 19 nt, Artificial Sequence
  Description of Artificial Sequence: Synthetic oligonucleotide
caauacuacggaaauccag

SEQ ID NO: 420411 - RNA, 19 nt, Artificial Sequence
  Description of Artificial Sequence: Synthetic oligonucleotide
acauauauauauauauaug

SEQ ID NO: 420412 - RNA, 19 nt, Artificial Sequence
  Description of Artificial Sequence: Synthetic oligonucleotide
uguuugaaagaccgaaauc

SEQ ID NO: 420413 - RNA, 19 nt, Artificial Sequence
  Description of Artificial Sequence: Synthetic oligonucleotide
ugcagcauaugcuucaaaa

SEQ ID NO: 420414 - RNA, 19 nt, Artificial Sequence
  Description of Artificial Sequence: Synthetic oligonucleotide
uucccgaccacaucaaggc

SEQ ID NO: 420415 - RNA, 19 nt, Artificial Sequence
  Description of Artificial Sequence: Synthetic oligonucleotide
acuuaacugaaaguuauca

SEQ ID NO: 420416 - RNA, 19 nt, Artificial Sequence
  Description of Artificial Sequence: Synthetic oligonucleotide
aagugauaucagugagccc

SEQ ID NO: 420417 - RNA, 19 nt, Artificial Sequence
  Description of Artificial Sequence: Synthetic oligonucleotide
ugguuucuauuguaaaggc

SEQ ID NO: 420418 - RNA, 19 nt, Artificial Sequence
  Description of Artificial Sequence: Synthetic oligonucleotide
uguugcaagcuugacauac

SEQ ID NO: 420419 - RNA, 19 nt, Artificial Sequence
  Description of Artificial Sequence: Synthetic oligonucleotide
uccggugcagcguaauugg

SEQ ID NO: 420420 - RNA, 19 nt, Artificial Sequence
  Description of Artificial Sequence: Synthetic oligonucleotide
aucaauuaugaggugguag

SEQ ID NO: 420421 - RNA, 19 nt, Artificial Sequence
  Description of Artificial Sequence: Synthetic oligonucleotide
aaauaucagaugguguacu

SEQ ID NO: 420422 - RNA, 19 nt, Artificial Sequence
  Description of Artificial Sequence: Synthetic oligonucleotide
aauuaugaggugguaggca

SEQ ID NO: 420423 - RNA, 19 nt, Artificial Sequence
  Description of Artificial Sequence: Synthetic oligonucleotide
aaaauucuauugugugacu

SEQ ID NO: 420424 - RNA, 19 nt, Artificial Sequence
  Description of Artificial Sequence: Synthetic oligonucleotide
ugguacaguuuaauuaugu

SEQ ID NO: 420425 - RNA, 19 nt, Artificial Sequence
  Description of Artificial Sequence: Synthetic oligonucleotide
gacaauaauccacaccaga

SEQ ID NO: 420426 - RNA, 19 nt, Artificial Sequence
  Description of Artificial Sequence: Synthetic oligonucleotide
gaagguccuguuuaaacca

SEQ ID NO: 420427 - RNA, 19 nt, Artificial Sequence
  Description of Artificial Sequence: Synthetic oligonucleotide
aaggaaucacagaauaacu

SEQ ID NO: 420428 - RNA, 19 nt, Artificial Sequence
  Description of Artificial Sequence: Synthetic oligonucleotide
ugccggaaaagcuucaagu

SEQ ID NO: 420429 - RNA, 19 nt, Artificial Sequence
  Description of Artificial Sequence: Synthetic oligonucleotide
aggacacacacacacauau

SEQ ID NO: 420430 - RNA, 19 nt, Artificial Sequence
  Description of Artificial Sequence: Synthetic oligonucleotide
cuucccgaccacaucaagg

SEQ ID NO: 420431 - RNA, 19 nt, Artificial Sequence
  Description of Artificial Sequence: Synthetic oligonucleotide
auguuugaaagaccgaaau

SEQ ID NO: 420432 - RNA, 19 nt, Artificial Sequence
  Description of Artificial Sequence: Synthetic oligonucleotide
ugugccgugcccuuggugu

SEQ ID NO: 420433 - RNA, 19 nt, Artificial Sequence
  Description of Artificial Sequence: Synthetic oligonucleotide
agcuaagucaaccggagaa

SEQ ID NO: 420434 - RNA, 19 nt, Artificial Sequence
  Description of Artificial Sequence: Synthetic oligonucleotide
uggccgaguuaaauggugg

SEQ ID NO: 420435 - RNA, 19 nt, Artificial Sequence
  Description of Artificial Sequence: Synthetic oligonucleotide
uagaaaaucccaucgcaua

SEQ ID NO: 420436 - RNA, 19 nt, Artificial Sequence
  Description of Artificial Sequence: Synthetic oligonucleotide
agguaagagaaacuucuga

SEQ ID NO: 420437 - RNA, 19 nt, Artificial Sequence
  Description of Artificial Sequence: Synthetic oligonucleotide
auuuggccgacuuugacuu

SEQ ID NO: 420438 - RNA, 19 nt, Artificial Sequence
  Description of Artificial Sequence: Synthetic oligonucleotide
uuggcaagaccgauaguug

SEQ ID NO: 420439 - RNA, 19 nt, Artificial Sequence
  Description of Artificial Sequence: Synthetic oligonucleotide
ugacaauaauccacaccag

SEQ ID NO: 420440 - RNA, 19 nt, Artificial Sequence
  Description of Artificial Sequence: Synthetic oligonucleotide
uggagcuaagucaaccgga

SEQ ID NO: 420441 - RNA, 19 nt, Artificial Sequence
  Description of Artificial Sequence: Synthetic oligonucleotide
acaguuuauagagauauua

SEQ ID NO: 420442 - RNA, 19 nt, Artificial Sequence
  Description of Artificial Sequence: Synthetic oligonucleotide
uucguacacgcaaauaaua

SEQ ID NO: 420443 - RNA, 19 nt, Artificial Sequence
  Description of Artificial Sequence: Synthetic oligonucleotide
ucaauacuacggaaaucca

SEQ ID NO: 420444 - RNA, 19 nt, Artificial Sequence
  Description of Artificial Sequence: Synthetic oligonucleotide
cugccauaauaucauuugg

SEQ ID NO: 420445 - RNA, 19 nt, Artificial Sequence
  Description of Artificial Sequence: Synthetic oligonucleotide
ugggcuuguugccaaguag

SEQ ID NO: 420446 - RNA, 19 nt, Artificial Sequence
  Description of Artificial Sequence: Synthetic oligonucleotide
gccauaauaucauuuggcc

SEQ ID NO: 420447 - RNA, 19 nt, Artificial Sequence
  Description of Artificial Sequence: Synthetic oligonucleotide
agaggacacacacacacau

SEQ ID NO: 420448 - RNA, 19 nt, Artificial Sequence
  Description of Artificial Sequence: Synthetic oligonucleotide
aaaugguggucgucuagga

SEQ ID NO: 420449 - RNA, 19 nt, Artificial Sequence
  Description of Artificial Sequence: Synthetic oligonucleotide
uggcaagaccgauaguugc

SEQ ID NO: 420450 - RNA, 19 nt, Artificial Sequence
  Description of Artificial Sequence: Synthetic oligonucleotide
auauauauauauauaugua

SEQ ID NO: 420451 - RNA, 19 nt, Artificial Sequence
  Description of Artificial Sequence: Synthetic oligonucleotide
cacauauauauauauauau

SEQ ID NO: 420452 - RNA, 19 nt, Artificial Sequence
  Description of Artificial Sequence: Synthetic oligonucleotide
gcuugauugcucuacaaac

SEQ ID NO: 420453 - RNA, 19 nt, Artificial Sequence
  Description of Artificial Sequence: Synthetic oligonucleotide
aauucuguugcaagcuuga

SEQ ID NO: 420454 - RNA, 19 nt, Artificial Sequence
  Description of Artificial Sequence: Synthetic oligonucleotide
cacacauauauauauauau

SEQ ID NO: 420455 - RNA, 19 nt, Artificial Sequence
  Description of Artificial Sequence: Synthetic oligonucleotide
aagaccgaaaucagcuauc

SEQ ID NO: 420456 - RNA, 19 nt, Artificial Sequence
  Description of Artificial Sequence: Synthetic oligonucleotide
ugauugcucuacaaacuuc

SEQ ID NO: 420457 - RNA, 19 nt, Artificial Sequence
  Description of Artificial Sequence: Synthetic oligonucleotide
guagccgucccugauuugg

SEQ ID NO: 420458 - RNA, 19 nt, Artificial Sequence
  Description of Artificial Sequence: Synthetic oligonucleotide
gacacacacacacauauau

SEQ ID NO: 420459 - RNA, 19 nt, Artificial Sequence
  Description of Artificial Sequence: Synthetic oligonucleotide
uguuaucaauuaugaggug

SEQ ID NO: 420460 - RNA, 19 nt, Artificial Sequence
  Description of Artificial Sequence: Synthetic oligonucleotide
uguuuaaaccauucauguu

SEQ ID NO: 420461 - RNA, 19 nt, Artificial Sequence
  Description of Artificial Sequence: Synthetic oligonucleotide
uacuacggaaauccaguaa

SEQ ID NO: 420462 - RNA, 19 nt, Artificial Sequence
  Description of Artificial Sequence: Synthetic oligonucleotide
gagggguauagaaaauccc

SEQ ID NO: 420463 - RNA, 19 nt, Artificial Sequence
  Description of Artificial Sequence: Synthetic oligonucleotide
guaaguaaguccgacuauc

SEQ ID NO: 420464 - RNA, 19 nt, Artificial Sequence
  Description of Artificial Sequence: Synthetic oligonucleotide
ucaaccggagaagagucga

SEQ ID NO: 420465 - RNA, 19 nt, Artificial Sequence
  Description of Artificial Sequence: Synthetic oligonucleotide
cuguaugauggauccuccg

SEQ ID NO: 420466 - RNA, 19 nt, Artificial Sequence
  Description of Artificial Sequence: Synthetic oligonucleotide
ugcagcguaauugggugag

SEQ ID NO: 420467 - RNA, 19 nt, Artificial Sequence
  Description of Artificial Sequence: Synthetic oligonucleotide
aguaaguaaguccgacuau

SEQ ID NO: 420468 - RNA, 19 nt, Artificial Sequence
  Description of Artificial Sequence: Synthetic oligonucleotide
agacucauuuuggaaaaug

SEQ ID NO: 420469 - RNA, 19 nt, Artificial Sequence
  Description of Artificial Sequence: Synthetic oligonucleotide
aaguccgacuauccacuug

SEQ ID NO: 420470 - RNA, 19 nt, Artificial Sequence
  Description of Artificial Sequence: Synthetic oligonucleotide
guaugauggauccuccgga

SEQ ID NO: 420471 - RNA, 19 nt, Artificial Sequence
  Description of Artificial Sequence: Synthetic oligonucleotide
caauuaugaggugguaggc

SEQ ID NO: 420472 - RNA, 19 nt, Artificial Sequence
  Description of Artificial Sequence: Synthetic oligonucleotide
agggguauagaaaauccca

SEQ ID NO: 420473 - RNA, 19 nt, Artificial Sequence
  Description of Artificial Sequence: Synthetic oligonucleotide
cuccuguuaucaauuauga

SEQ ID NO: 420474 - RNA, 19 nt, Artificial Sequence
  Description of Artificial Sequence: Synthetic oligonucleotide
guagacucauuuuggaaaa

SEQ ID NO: 420475 - RNA, 19 nt, Artificial Sequence
  Description of Artificial Sequence: Synthetic oligonucleotide
uuaugaggugguaggcaac

SEQ ID NO: 420476 - RNA, 19 nt, Artificial Sequence
  Description of Artificial Sequence: Synthetic oligonucleotide
aguggaaguguuuggcuau

SEQ ID NO: 420477 - RNA, 19 nt, Artificial Sequence
  Description of Artificial Sequence: Synthetic oligonucleotide
agguuuacugugcaagaau

SEQ ID NO: 420478 - RNA, 19 nt, Artificial Sequence
  Description of Artificial Sequence: Synthetic oligonucleotide
uuccggugcagcguaauug

SEQ ID NO: 420479 - RNA, 19 nt, Artificial Sequence
  Description of Artificial Sequence: Synthetic oligonucleotide
uaauuaugugagggugccg

SEQ ID NO: 420480 - RNA, 19 nt, Artificial Sequence
  Description of Artificial Sequence: Synthetic oligonucleotide
uucaaacuuuucacacacu

SEQ ID NO: 420481 - RNA, 19 nt, Artificial Sequence
  Description of Artificial Sequence: Synthetic oligonucleotide
ggugcagcguaauugggug

SEQ ID NO: 420482 - RNA, 19 nt, Artificial Sequence
  Description of Artificial Sequence: Synthetic oligonucleotide
uuaauugguuccuccuuuu

SEQ ID NO: 420483 - RNA, 19 nt, Artificial Sequence
  Description of Artificial Sequence: Synthetic oligonucleotide
guuuauagagauauuacuu

SEQ ID NO: 420484 - RNA, 19 nt, Artificial Sequence
  Description of Artificial Sequence: Synthetic oligonucleotide
uguggccgaguuaaauggu

SEQ ID NO: 420485 - RNA, 19 nt, Artificial Sequence
  Description of Artificial Sequence: Synthetic oligonucleotide
uccuccgaacauucaaacu

SEQ ID NO: 420486 - RNA, 19 nt, Artificial Sequence
  Description of Artificial Sequence: Synthetic oligonucleotide
agauauuacuuaguucuau

SEQ ID NO: 420487 - RNA, 19 nt, Artificial Sequence
  Description of Artificial Sequence: Synthetic oligonucleotide
uggucgucuaggaaagaau

SEQ ID NO: 420488 - RNA, 19 nt, Artificial Sequence
  Description of Artificial Sequence: Synthetic oligonucleotide
ugauuccccuuacauuuuc

SEQ ID NO: 420489 - RNA, 19 nt, Artificial Sequence
  Description of Artificial Sequence: Synthetic oligonucleotide
cacacacacacauauauau

SEQ ID NO: 420490 - RNA, 19 nt, Artificial Sequence
  Description of Artificial Sequence: Synthetic oligonucleotide
aaugugcuugucacggggu

SEQ ID NO: 420491 - RNA, 19 nt, Artificial Sequence
  Description of Artificial Sequence: Synthetic oligonucleotide
uccccuguggaccaaccau

SEQ ID NO: 420492 - RNA, 19 nt, Artificial Sequence
  Description of Artificial Sequence: Synthetic oligonucleotide
ucauccaaccuuccauuuu

SEQ ID NO: 420493 - RNA, 19 nt, Artificial Sequence
  Description of Artificial Sequence: Synthetic oligonucleotide
acacauauauauauauaua

SEQ ID NO: 420494 - RNA, 19 nt, Artificial Sequence
  Description of Artificial Sequence: Synthetic oligonucleotide
ccgaguuaaaugguggucg

SEQ ID NO: 420495 - RNA, 19 nt, Artificial Sequence
  Description of Artificial Sequence: Synthetic oligonucleotide
uugcauugauuccccuuac

SEQ ID NO: 420496 - RNA, 19 nt, Artificial Sequence
  Description of Artificial Sequence: Synthetic oligonucleotide
aaccggagaagagucgagu

SEQ ID NO: 420497 - RNA, 19 nt, Artificial Sequence
  Description of Artificial Sequence: Synthetic oligonucleotide
uuccccuuacauuuucaau

SEQ ID NO: 420498 - RNA, 19 nt, Artificial Sequence
  Description of Artificial Sequence: Synthetic oligonucleotide
aaccaagaaugguacccuu

SEQ ID NO: 420499 - RNA, 19 nt, Artificial Sequence
  Description of Artificial Sequence: Synthetic oligonucleotide
gacuauccacuugguauag

SEQ ID NO: 420500 - RNA, 19 nt, Artificial Sequence
  Description of Artificial Sequence: Synthetic oligonucleotide
auccaauugcuugauugcu

SEQ ID NO: 420501 - RNA, 19 nt, Artificial Sequence
  Description of Artificial Sequence: Synthetic oligonucleotide
uggauccuccggaaagaga

SEQ ID NO: 420502 - RNA, 19 nt, Artificial Sequence
  Description of Artificial Sequence: Synthetic oligonucleotide
auuaugugagggugccgga

SEQ ID NO: 420503 - RNA, 19 nt, Artificial Sequence
  Description of Artificial Sequence: Synthetic oligonucleotide
agcguaauugggugagcca

SEQ ID NO: 420504 - RNA, 19 nt, Artificial Sequence
  Description of Artificial Sequence: Synthetic oligonucleotide
gaaagaccgaaaucagcua

SEQ ID NO: 420505 - RNA, 19 nt, Artificial Sequence
  Description of Artificial Sequence: Synthetic oligonucleotide
acgucgacuuuccuuuuca

SEQ ID NO: 420506 - RNA, 19 nt, Artificial Sequence
  Description of Artificial Sequence: Synthetic oligonucleotide
ucacgggguucuuccuucg

SEQ ID NO: 420507 - RNA, 19 nt, Artificial Sequence
  Description of Artificial Sequence: Synthetic oligonucleotide
agucgagugaggucacaga

SEQ ID NO: 420508 - RNA, 19 nt, Artificial Sequence
  Description of Artificial Sequence: Synthetic oligonucleotide
cacacacauauauauauau

SEQ ID NO: 420509 - RNA, 19 nt, Artificial Sequence
  Description of Artificial Sequence: Synthetic oligonucleotide
auacuacggaaauccagua

SEQ ID NO: 420510 - RNA, 19 nt, Artificial Sequence
  Description of Artificial Sequence: Synthetic oligonucleotide
gaacagacgucgacuuucc

SEQ ID NO: 420511 - RNA, 19 nt, Artificial Sequence
  Description of Artificial Sequence: Synthetic oligonucleotide
cagcguaauugggugagcc

SEQ ID NO: 420512 - RNA, 19 nt, Artificial Sequence
  Description of Artificial Sequence: Synthetic oligonucleotide
cauguuugaaagaccgaaa

SEQ ID NO: 420513 - RNA, 19 nt, Artificial Sequence
  Description of Artificial Sequence: Synthetic oligonucleotide
aacagacgucgacuuuccu

SEQ ID NO: 420514 - RNA, 19 nt, Artificial Sequence
  Description of Artificial Sequence: Synthetic oligonucleotide
agaaauaagcaaaguuuua

SEQ ID NO: 420515 - RNA, 19 nt, Artificial Sequence
  Description of Artificial Sequence: Synthetic oligonucleotide
ugugugacuuccuggucuu

SEQ ID NO: 420516 - RNA, 19 nt, Artificial Sequence
  Description of Artificial Sequence: Synthetic oligonucleotide
uccgacuauccacuuggua

SEQ ID NO: 420517 - RNA, 19 nt, Artificial Sequence
  Description of Artificial Sequence: Synthetic oligonucleotide
ucccugauuuggcuucugu

SEQ ID NO: 420518 - RNA, 19 nt, Artificial Sequence
  Description of Artificial Sequence: Synthetic oligonucleotide
uucguucauuauccuccug

SEQ ID NO: 420519 - RNA, 19 nt, Artificial Sequence
  Description of Artificial Sequence: Synthetic oligonucleotide
cucgguaacuaaaaggaau

SEQ ID NO: 420520 - RNA, 19 nt, Artificial Sequence
  Description of Artificial Sequence: Synthetic oligonucleotide
ucucuguggaguagccguc

SEQ ID NO: 420521 - RNA, 19 nt, Artificial Sequence
  Description of Artificial Sequence: Synthetic oligonucleotide
uuaugugagggugccggaa

SEQ ID NO: 420522 - RNA, 19 nt, Artificial Sequence
  Description of Artificial Sequence: Synthetic oligonucleotide
caucaucaauacuacggaa

SEQ ID NO: 420523 - RNA, 19 nt, Artificial Sequence
  Description of Artificial Sequence: Synthetic oligonucleotide
uccgaacauucaaacuuuu

SEQ ID NO: 420524 - RNA, 19 nt, Artificial Sequence
  Description of Artificial Sequence: Synthetic oligonucleotide
uagccgucccugauuuggc

SEQ ID NO: 420525 - RNA, 19 nt, Artificial Sequence
  Description of Artificial Sequence: Synthetic oligonucleotide
gucaaccggagaagagucg

SEQ ID NO: 420526 - RNA, 19 nt, Artificial Sequence
  Description of Artificial Sequence: Synthetic oligonucleotide
cuguggaccaaccaugugu

SEQ ID NO: 420527 - RNA, 19 nt, Artificial Sequence
  Description of Artificial Sequence: Synthetic oligonucleotide
acgcaaauaauagggguuu

SEQ ID NO: 420528 - RNA, 19 nt, Artificial Sequence
  Description of Artificial Sequence: Synthetic oligonucleotide
ggucgucuaggaaagaauc

SEQ ID NO: 420529 - RNA, 19 nt, Artificial Sequence
  Description of Artificial Sequence: Synthetic oligonucleotide
agggugccggaaaagcuuc

SEQ ID NO: 420530 - RNA, 19 nt, Artificial Sequence
  Description of Artificial Sequence: Synthetic oligonucleotide
uuccuucguacacgcaaau

SEQ ID NO: 420531 - RNA, 19 nt, Artificial Sequence
  Description of Artificial Sequence: Synthetic oligonucleotide
acacacauauauauauaua

SEQ ID NO: 420532 - RNA, 19 nt, Artificial Sequence
  Description of Artificial Sequence: Synthetic oligonucleotide
auacugagggguauagaaa

SEQ ID NO: 420533 - RNA, 19 nt, Artificial Sequence
  Description of Artificial Sequence: Synthetic oligonucleotide
cauuuggccgacuuugacu

SEQ ID NO: 420534 - RNA, 19 nt, Artificial Sequence
  Description of Artificial Sequence: Synthetic oligonucleotide
uaucaauuaugagguggua

SEQ ID NO: 420535 - RNA, 19 nt, Artificial Sequence
  Description of Artificial Sequence: Synthetic oligonucleotide
ccuucguacacgcaaauaa

SEQ ID NO: 420536 - RNA, 19 nt, Artificial Sequence
  Description of Artificial Sequence: Synthetic oligonucleotide
gagaagagucgagugaggu

SEQ ID NO: 420537 - RNA, 19 nt, Artificial Sequence
  Description of Artificial Sequence: Synthetic oligonucleotide
ucccgaccacaucaaggcu

SEQ ID NO: 420538 - RNA, 19 nt, Artificial Sequence
  Description of Artificial Sequence: Synthetic oligonucleotide
cugccgguugaguaucuuc

SEQ ID NO: 420539 - RNA, 19 nt, Artificial Sequence
  Description of Artificial Sequence: Synthetic oligonucleotide
uucggaucuucccgaccac

SEQ ID NO: 420540 - RNA, 19 nt, Artificial Sequence
  Description of Artificial Sequence: Synthetic oligonucleotide
gacgucgacuuuccuuuuc

SEQ ID NO: 420541 - RNA, 19 nt, Artificial Sequence
  Description of Artificial Sequence: Synthetic oligonucleotide
gcuguagacucauuuugga

SEQ ID NO: 420542 - RNA, 19 nt, Artificial Sequence
  Description of Artificial Sequence: Synthetic oligonucleotide
guggccgaguuaaauggug

SEQ ID NO: 420543 - RNA, 19 nt, Artificial Sequence
  Description of Artificial Sequence: Synthetic oligonucleotide
gucacgggguucuuccuuc

SEQ ID NO: 420544 - RNA, 19 nt, Artificial Sequence
  Description of Artificial Sequence: Synthetic oligonucleotide
cuuauacagcuuucaguua

SEQ ID NO: 420545 - RNA, 19 nt, Artificial Sequence
  Description of Artificial Sequence: Synthetic oligonucleotide
guaaguccgacuauccacu

SEQ ID NO: 420546 - RNA, 19 nt, Artificial Sequence
  Description of Artificial Sequence: Synthetic oligonucleotide
gauggaucccgaucucugu

SEQ ID NO: 420547 - RNA, 19 nt, Artificial Sequence
  Description of Artificial Sequence: Synthetic oligonucleotide
aucagaugguguacugaug

SEQ ID NO: 420548 - RNA, 19 nt, Artificial Sequence
  Description of Artificial Sequence: Synthetic oligonucleotide
gcaaauaauagggguuuac

SEQ ID NO: 420549 - RNA, 19 nt, Artificial Sequence
  Description of Artificial Sequence: Synthetic oligonucleotide
cuuccuucguacacgcaaa

SEQ ID NO: 420550 - RNA, 19 nt, Artificial Sequence
  Description of Artificial Sequence: Synthetic oligonucleotide
gucgagugaggucacagau

SEQ ID NO: 420551 - RNA, 19 nt, Artificial Sequence
  Description of Artificial Sequence: Synthetic oligonucleotide
gcguaauugggugagccac

SEQ ID NO: 420552 - RNA, 19 nt, Artificial Sequence
  Description of Artificial Sequence: Synthetic oligonucleotide
gcauuuggacaucauaagu

SEQ ID NO: 420553 - RNA, 19 nt, Artificial Sequence
  Description of Artificial Sequence: Synthetic oligonucleotide
cacuugguauagcuguaga

SEQ ID NO: 420554 - RNA, 19 nt, Artificial Sequence
  Description of Artificial Sequence: Synthetic oligonucleotide
uugucacgggguucuuccu

SEQ ID NO: 420555 - RNA, 19 nt, Artificial Sequence
  Description of Artificial Sequence: Synthetic oligonucleotide
uaaguccgacuauccacuu

SEQ ID NO: 420556 - RNA, 19 nt, Artificial Sequence
  Description of Artificial Sequence: Synthetic oligonucleotide
cuucguacacgcaaauaau

SEQ ID NO: 420557 - RNA, 19 nt, Artificial Sequence
  Description of Artificial Sequence: Synthetic oligonucleotide
caagaccgauaguugcuga

SEQ ID NO: 420558 - RNA, 19 nt, Artificial Sequence
  Description of Artificial Sequence: Synthetic oligonucleotide
acucgguaacuaaaaggaa

SEQ ID NO: 420559 - RNA, 19 nt, Artificial Sequence
  Description of Artificial Sequence: Synthetic oligonucleotide
cugaugaccugguacaguu

SEQ ID NO: 420560 - RNA, 19 nt, Artificial Sequence
  Description of Artificial Sequence: Synthetic oligonucleotide
uccuucguacacgcaaaua

SEQ ID NO: 420561 - RNA, 19 nt, Artificial Sequence
  Description of Artificial Sequence: Synthetic oligonucleotide
cagacgucgacuuuccuuu

SEQ ID NO: 420562 - RNA, 19 nt, Artificial Sequence
  Description of Artificial Sequence: Synthetic oligonucleotide
cagaggacacacacacaca

SEQ ID NO: 420563 - RNA, 19 nt, Artificial Sequence
  Description of Artificial Sequence: Synthetic oligonucleotide
uggaaguguuuggcuauau

SEQ ID NO: 420564 - RNA, 19 nt, Artificial Sequence
  Description of Artificial Sequence: Synthetic oligonucleotide
acacacacacacauauaua

SEQ ID NO: 420565 - RNA, 19 nt, Artificial Sequence
  Description of Artificial Sequence: Synthetic oligonucleotide
ccuuucaugagaaaucaau

SEQ ID NO: 420566 - RNA, 19 nt, Artificial Sequence
  Description of Artificial Sequence: Synthetic oligonucleotide
guggucgucuaggaaagaa

SEQ ID NO: 420567 - RNA, 19 nt, Artificial Sequence
  Description of Artificial Sequence: Synthetic oligonucleotide
ucccgaucucuguggagua

SEQ ID NO: 420568 - RNA, 19 nt, Artificial Sequence
  Description of Artificial Sequence: Synthetic oligonucleotide
caugguugaacuguaugau

SEQ ID NO: 420569 - RNA, 19 nt, Artificial Sequence
  Description of Artificial Sequence: Synthetic oligonucleotide
aaaucccaucgcauaucuu

SEQ ID NO: 420570 - RNA, 19 nt, Artificial Sequence
  Description of Artificial Sequence: Synthetic oligonucleotide
ccgaacauucaaacuuuuc

SEQ ID NO: 420571 - RNA, 19 nt, Artificial Sequence
  Description of Artificial Sequence: Synthetic oligonucleotide
uccuccggaaagagauauu

SEQ ID NO: 420572 - RNA, 19 nt, Artificial Sequence
  Description of Artificial Sequence: Synthetic oligonucleotide
ccgacuauccacuugguau

SEQ ID NO: 420573 - RNA, 19 nt, Artificial Sequence
  Description of Artificial Sequence: Synthetic oligonucleotide
gggguuuacaaccuuccau

SEQ ID NO: 420574 - RNA, 19 nt, Artificial Sequence
  Description of Artificial Sequence: Synthetic oligonucleotide
gacggcuuuccuugagccu

SEQ ID NO: 420575 - RNA, 19 nt, Artificial Sequence
  Description of Artificial Sequence: Synthetic oligonucleotide
ccccuguggaccaaccaug

SEQ ID NO: 420576 - RNA, 19 nt, Artificial Sequence
  Description of Artificial Sequence: Synthetic oligonucleotide
cuucguucauuauccuccu

SEQ ID NO: 420577 - RNA, 19 nt, Artificial Sequence
  Description of Artificial Sequence: Synthetic oligonucleotide
uacuuccggugcagcguaa

SEQ ID NO: 420578 - RNA, 19 nt, Artificial Sequence
  Description of Artificial Sequence: Synthetic oligonucleotide
cuccgaacauucaaacuuu

SEQ ID NO: 420579 - RNA, 19 nt, Artificial Sequence
  Description of Artificial Sequence: Synthetic oligonucleotide
agguccuauuuaauugguu

SEQ ID NO: 420580 - RNA, 19 nt, Artificial Sequence
  Description of Artificial Sequence: Synthetic oligonucleotide
gaggacacacacacacaua

SEQ ID NO: 420581 - RNA, 19 nt, Artificial Sequence
  Description of Artificial Sequence: Synthetic oligonucleotide
ccgaccacaucaaggcuuc

SEQ ID NO: 420582 - RNA, 19 nt, Artificial Sequence
  Description of Artificial Sequence: Synthetic oligonucleotide
caaccaagaaugguacccu

SEQ ID NO: 420583 - RNA, 19 nt, Artificial Sequence
  Description of Artificial Sequence: Synthetic oligonucleotide
ggacaucauaagugauauc

SEQ ID NO: 420584 - RNA, 19 nt, Artificial Sequence
  Description of Artificial Sequence: Synthetic oligonucleotide
ccuccgaacauucaaacuu

SEQ ID NO: 420585 - RNA, 19 nt, Artificial Sequence
  Description of Artificial Sequence: Synthetic oligonucleotide
acuuccggugcagcguaau

SEQ ID NO: 420586 - RNA, 19 nt, Artificial Sequence
  Description of Artificial Sequence: Synthetic oligonucleotide
cgggguucuuccuucguac

SEQ ID NO: 420587 - RNA, 19 nt, Artificial Sequence
  Description of Artificial Sequence: Synthetic oligonucleotide
guugcaagcuugacauacu

SEQ ID NO: 420588 - RNA, 19 nt, Artificial Sequence
  Description of Artificial Sequence: Synthetic oligonucleotide
gccgaguuaaauggugguc

SEQ ID NO: 420589 - RNA, 19 nt, Artificial Sequence
  Description of Artificial Sequence: Synthetic oligonucleotide
gauccuccggaaagagaua

SEQ ID NO: 420590 - RNA, 19 nt, Artificial Sequence
  Description of Artificial Sequence: Synthetic oligonucleotide
ccgucccugauuuggcuuc

SEQ ID NO: 420591 - RNA, 19 nt, Artificial Sequence
  Description of Artificial Sequence: Synthetic oligonucleotide
gguauagcuguagacucau

SEQ ID NO: 420592 - RNA, 19 nt, Artificial Sequence
  Description of Artificial Sequence: Synthetic oligonucleotide
gggguauagaaaaucccau

SEQ ID NO: 420593 - RNA, 19 nt, Artificial Sequence
  Description of Artificial Sequence: Synthetic oligonucleotide
ggccgaguuaaaugguggu

SEQ ID NO: 420594 - RNA, 19 nt, Artificial Sequence
  Description of Artificial Sequence: Synthetic oligonucleotide
gccgacuuugacuucuaau

SEQ ID NO: 420595 - RNA, 19 nt, Artificial Sequence
  Description of Artificial Sequence: Synthetic oligonucleotide
gaguuggcacguggucauc

SEQ ID NO: 420596 - RNA, 19 nt, Artificial Sequence
  Description of Artificial Sequence: Synthetic oligonucleotide
ggcaagaccgauaguugcu

SEQ ID NO: 420597 - RNA, 19 nt, Artificial Sequence
  Description of Artificial Sequence: Synthetic oligonucleotide
guuggcacguggucaucau

SEQ ID NO: 420598 - RNA, 19 nt, Artificial Sequence
  Description of Artificial Sequence: Synthetic oligonucleotide
cgacuauccacuugguaua

SEQ ID NO: 420599 - RNA, 19 nt, Artificial Sequence
  Description of Artificial Sequence: Synthetic oligonucleotide
caacugccaauggguccug

SEQ ID NO: 420600 - RNA, 19 nt, Artificial Sequence
  Description of Artificial Sequence: Synthetic oligonucleotide
ugccgugcccuugguguuu

SEQ ID NO: 420601 - RNA, 19 nt, Artificial Sequence
  Description of Artificial Sequence: Synthetic oligonucleotide
ggauguggccgaguuaaau

SEQ ID NO: 420602 - RNA, 19 nt, Artificial Sequence
  Description of Artificial Sequence: Synthetic oligonucleotide
cgguaacuaaaaggaauca

SEQ ID NO: 420603 - RNA, 19 nt, Artificial Sequence
  Description of Artificial Sequence: Synthetic oligonucleotide
ggacacacacacacauaua

SEQ ID NO: 420604 - RNA, 19 nt, Artificial Sequence
  Description of Artificial Sequence: Synthetic oligonucleotide
cccgaucucuguggaguag

SEQ ID NO: 420605 - RNA, 19 nt, Artificial Sequence
  Description of Artificial Sequence: Synthetic oligonucleotide
ccuccggaaagagauauuu

SEQ ID NO: 420606 - RNA, 19 nt, Artificial Sequence
  Description of Artificial Sequence: Synthetic oligonucleotide
cuuccggugcagcguaauu

SEQ ID NO: 420607 - RNA, 19 nt, Artificial Sequence
  Description of Artificial Sequence: Synthetic oligonucleotide
gguggucgucuaggaaaga

SEQ ID NO: 420608 - RNA, 19 nt, Artificial Sequence
  Description of Artificial Sequence: Synthetic oligonucleotide
cccgaccacaucaaggcuu

SEQ ID NO: 420609 - RNA, 19 nt, Artificial Sequence
  Description of Artificial Sequence: Synthetic oligonucleotide
cccuguggaccaaccaugu

SEQ ID NO: 420610 - RNA, 19 nt, Artificial Sequence
  Description of Artificial Sequence: Synthetic oligonucleotide
guccgacuauccacuuggu

SEQ ID NO: 420611 - RNA, 19 nt, Artificial Sequence
  Description of Artificial Sequence: Synthetic oligonucleotide
gugccgugcccuugguguu

SEQ ID NO: 420612 - RNA, 19 nt, Artificial Sequence
  Description of Artificial Sequence: Synthetic oligonucleotide
guauagcuguagacucauu

SEQ ID NO: 420613 - RNA, 19 nt, Artificial Sequence
  Description of Artificial Sequence: Synthetic oligonucleotide
gccgucccugauuuggcuu

SEQ ID NO: 420614 - RNA, 19 nt, Artificial Sequence
  Description of Artificial Sequence: Synthetic oligonucleotide
ggugugccgugcccuuggu

SEQ ID NO: 420615 - RNA, 19 nt, Artificial Sequence
  Description of Artificial Sequence: Synthetic oligonucleotide
cgcaaauaauagggguuua

SEQ ID NO: 420616 - RNA, 19 nt, Artificial Sequence
  Description of Artificial Sequence: Synthetic oligonucleotide
ccgugcccuugguguuuca

SEQ ID NO: 420617 - RNA, 19 nt, Artificial Sequence
  Description of Artificial Sequence: Synthetic oligonucleotide
gauaauaccuccuugcugg

SEQ ID NO: 420618 - RNA, 19 nt, Artificial Sequence
  Description of Artificial Sequence: Synthetic oligonucleotide
uuugauuugacucuacuca

SEQ ID NO: 420619 - RNA, 19 nt, Artificial Sequence
  Description of Artificial Sequence: Synthetic oligonucleotide
acuaacauuaaacucggac

SEQ ID NO: 420620 - RNA, 19 nt, Artificial Sequence
  Description of Artificial Sequence: Synthetic oligonucleotide
accaauugcuuccagaagc

SEQ ID NO: 420621 - RNA, 19 nt, Artificial Sequence
  Description of Artificial Sequence: Synthetic oligonucleotide
agaccgguaacccacaucc

SEQ ID NO: 420622 - RNA, 19 nt, Artificial Sequence
  Description of Artificial Sequence: Synthetic oligonucleotide
aauucuuaucuuuucucgg

SEQ ID NO: 420623 - RNA, 19 nt, Artificial Sequence
  Description of Artificial Sequence: Synthetic oligonucleotide
ucauacuuugccauaauug

SEQ ID NO: 420624 - RNA, 19 nt, Artificial Sequence
  Description of Artificial Sequence: Synthetic oligonucleotide
uaugggcuugauaauaugg

SEQ ID NO: 420625 - RNA, 19 nt, Artificial Sequence
  Description of Artificial Sequence: Synthetic oligonucleotide
ucagacuagccucagaucu

SEQ ID NO: 420626 - RNA, 19 nt, Artificial Sequence
  Description of Artificial Sequence: Synthetic oligonucleotide
auauggaagcacccgaacc

SEQ ID NO: 420627 - RNA, 19 nt, Artificial Sequence
  Description of Artificial Sequence: Synthetic oligonucleotide
ucagauaauaccuccuugc

SEQ ID NO: 420628 - RNA, 19 nt, Artificial Sequence
  Description of Artificial Sequence: Synthetic oligonucleotide
auuaaacucggacacuuuc

SEQ ID NO: 420629 - RNA, 19 nt, Artificial Sequence
  Description of Artificial Sequence: Synthetic oligonucleotide
augcuuaaggcucauucgc

SEQ ID NO: 420630 - RNA, 19 nt, Artificial Sequence
  Description of Artificial Sequence: Synthetic oligonucleotide
aguuucuuagacaaugccc

SEQ ID NO: 420631 - RNA, 19 nt, Artificial Sequence
  Description of Artificial Sequence: Synthetic oligonucleotide
gaugcuuaaggcucauucg

SEQ ID NO: 420632 - RNA, 19 nt, Artificial Sequence
  Description of Artificial Sequence: Synthetic oligonucleotide
uuuuauggcuuucuuggcc

SEQ ID NO: 420633 - RNA, 19 nt, Artificial Sequence
  Description of Artificial Sequence: Synthetic oligonucleotide
agguuuagcagguccaagc

SEQ ID NO: 420634 - RNA, 19 nt, Artificial Sequence
  Description of Artificial Sequence: Synthetic oligonucleotide
auagaacuuuucuuuaguc

SEQ ID NO: 420635 - RNA, 19 nt, Artificial Sequence
  Description of Artificial Sequence: Synthetic oligonucleotide
cuucaacugauauuguggg

SEQ ID NO: 420636 - RNA, 19 nt, Artificial Sequence
  Description of Artificial Sequence: Synthetic oligonucleotide
acuaaacacauguucaaug

SEQ ID NO: 420637 - RNA, 19 nt, Artificial Sequence
  Description of Artificial Sequence: Synthetic oligonucleotide
aaggagaacagucuuugcu

SEQ ID NO: 420638 - RNA, 19 nt, Artificial Sequence
  Description of Artificial Sequence: Synthetic oligonucleotide
uuucgcaucacgauuacaa

SEQ ID NO: 420639 - RNA, 19 nt, Artificial Sequence
  Description of Artificial Sequence: Synthetic oligonucleotide
acacuuucagacuagccuc

SEQ ID NO: 420640 - RNA, 19 nt, Artificial Sequence
  Description of Artificial Sequence: Synthetic oligonucleotide
uuaauaagaaaccggcguc

SEQ ID NO: 420641 - RNA, 19 nt, Artificial Sequence
  Description of Artificial Sequence: Synthetic oligonucleotide
uuaagggguaauuccagag

SEQ ID NO: 420642 - RNA, 19 nt, Artificial Sequence
  Description of Artificial Sequence: Synthetic oligonucleotide
accuaguucuucuaguuuc

SEQ ID NO: 420643 - RNA, 19 nt, Artificial Sequence
  Description of Artificial Sequence: Synthetic oligonucleotide
uguucaaugggagcaaagg

SEQ ID NO: 420644 - RNA, 19 nt, Artificial Sequence
  Description of Artificial Sequence: Synthetic oligonucleotide
uucaaugggagcaaaggaa

SEQ ID NO: 420645 - RNA, 19 nt, Artificial Sequence
  Description of Artificial Sequence: Synthetic oligonucleotide
aauaggauucuggaugguc

SEQ ID NO: 420646 - RNA, 19 nt, Artificial Sequence
  Description of Artificial Sequence: Synthetic oligonucleotide
acugauaaucacauugggc

SEQ ID NO: 420647 - RNA, 19 nt, Artificial Sequence
  Description of Artificial Sequence: Synthetic oligonucleotide
ugcacuuagaucuuuuccu

SEQ ID NO: 420648 - RNA, 19 nt, Artificial Sequence
  Description of Artificial Sequence: Synthetic oligonucleotide
agcaaaggaagaugacucc

SEQ ID NO: 420649 - RNA, 19 nt, Artificial Sequence
  Description of Artificial Sequence: Synthetic oligonucleotide
uugauuugacucuacucag

SEQ ID NO: 420650 - RNA, 19 nt, Artificial Sequence
  Description of Artificial Sequence: Synthetic oligonucleotide
ugaugcuuaaggcucauuc

SEQ ID NO: 420651 - RNA, 19 nt, Artificial Sequence
  Description of Artificial Sequence: Synthetic oligonucleotide
aauauggccugccuuggug

SEQ ID NO: 420652 - RNA, 19 nt, Artificial Sequence
  Description of Artificial Sequence: Synthetic oligonucleotide
auaauugccuuugacuugg

SEQ ID NO: 420653 - RNA, 19 nt, Artificial Sequence
  Description of Artificial Sequence: Synthetic oligonucleotide
uguagacugaucauuugcu

SEQ ID NO: 420654 - RNA, 19 nt, Artificial Sequence
  Description of Artificial Sequence: Synthetic oligonucleotide
uuucagacuagccucagau

SEQ ID NO: 420655 - RNA, 19 nt, Artificial Sequence
  Description of Artificial Sequence: Synthetic oligonucleotide
uuuggauuguucugcauga

SEQ ID NO: 420656 - RNA, 19 nt, Artificial Sequence
  Description of Artificial Sequence: Synthetic oligonucleotide
cuuagaucuuuuccuaagg

SEQ ID NO: 420657 - RNA, 19 nt, Artificial Sequence
  Description of Artificial Sequence: Synthetic oligonucleotide
uccccuucaacugauauug

SEQ ID NO: 420658 - RNA, 19 nt, Artificial Sequence
  Description of Artificial Sequence: Synthetic oligonucleotide
uucuugcauagcuuggcgg

SEQ ID NO: 420659 - RNA, 19 nt, Artificial Sequence
  Description of Artificial Sequence: Synthetic oligonucleotide
auacuuugccauaauugcc

SEQ ID NO: 420660 - RNA, 19 nt, Artificial Sequence
  Description of Artificial Sequence: Synthetic oligonucleotide
ucaagggguaguugguugg

SEQ ID NO: 420661 - RNA, 19 nt, Artificial Sequence
  Description of Artificial Sequence: Synthetic oligonucleotide
aggagaacagucuuugcug

SEQ ID NO: 420662 - RNA, 19 nt, Artificial Sequence
  Description of Artificial Sequence: Synthetic oligonucleotide
ucaauucagauaauaccuc

SEQ ID NO: 420663 - RNA, 19 nt, Artificial Sequence
  Description of Artificial Sequence: Synthetic oligonucleotide
aacacauguucaaugggag

SEQ ID NO: 420664 - RNA, 19 nt, Artificial Sequence
  Description of Artificial Sequence: Synthetic oligonucleotide
guccaagcagaucugaaag

SEQ ID NO: 420665 - RNA, 19 nt, Artificial Sequence
  Description of Artificial Sequence: Synthetic oligonucleotide
ugaacucucuuucugcuuc

SEQ ID NO: 420666 - RNA, 19 nt, Artificial Sequence
  Description of Artificial Sequence: Synthetic oligonucleotide
auaguaggacugcagagcu

SEQ ID NO: 420667 - RNA, 19 nt, Artificial Sequence
  Description of Artificial Sequence: Synthetic oligonucleotide
ugauauuguggguuccucc

SEQ ID NO: 420668 - RNA, 19 nt, Artificial Sequence
  Description of Artificial Sequence: Synthetic oligonucleotide
agauaauaccuccuugcug

SEQ ID NO: 420669 - RNA, 19 nt, Artificial Sequence
  Description of Artificial Sequence: Synthetic oligonucleotide
acuacaucaggaacuaggg

SEQ ID NO: 420670 - RNA, 19 nt, Artificial Sequence
  Description of Artificial Sequence: Synthetic oligonucleotide
uuuaugggcuugauaauau

SEQ ID NO: 420671 - RNA, 19 nt, Artificial Sequence
  Description of Artificial Sequence: Synthetic oligonucleotide
aaccaauugcuuccagaag

SEQ ID NO: 420672 - RNA, 19 nt, Artificial Sequence
  Description of Artificial Sequence: Synthetic oligonucleotide
aacggauauggaagcaccc

SEQ ID NO: 420673 - RNA, 19 nt, Artificial Sequence
  Description of Artificial Sequence: Synthetic oligonucleotide
ugagucaguuccuuguucu

SEQ ID NO: 420674 - RNA, 19 nt, Artificial Sequence
  Description of Artificial Sequence: Synthetic oligonucleotide
cacuaguucuuccugcugg

SEQ ID NO: 420675 - RNA, 19 nt, Artificial Sequence
  Description of Artificial Sequence: Synthetic oligonucleotide
augggcuugauaauauggc

SEQ ID NO: 420676 - RNA, 19 nt, Artificial Sequence
  Description of Artificial Sequence: Synthetic oligonucleotide
aagacaguccucguuaccu

SEQ ID NO: 420677 - RNA, 19 nt, Artificial Sequence
  Description of Artificial Sequence: Synthetic oligonucleotide
aaaccggcgucuuuucuug

SEQ ID NO: 420678 - RNA, 19 nt, Artificial Sequence
  Description of Artificial Sequence: Synthetic oligonucleotide
ugggcuugauaauauggcc

SEQ ID NO: 420679 - RNA, 19 nt, Artificial Sequence
  Description of Artificial Sequence: Synthetic oligonucleotide
ugacaguucaauccauaga

SEQ ID NO: 420680 - RNA, 19 nt, Artificial Sequence
  Description of Artificial Sequence: Synthetic oligonucleotide
aacugauauuguggguucc

SEQ ID NO: 420681 - RNA, 19 nt, Artificial Sequence
  Description of Artificial Sequence: Synthetic oligonucleotide
cacgauuacaacuccugag

SEQ ID NO: 420682 - RNA, 19 nt, Artificial Sequence
  Description of Artificial Sequence: Synthetic oligonucleotide
cauaguaggacugcagagc

SEQ ID NO: 420683 - RNA, 19 nt, Artificial Sequence
  Description of Artificial Sequence: Synthetic oligonucleotide
gaaccaauugcuuccagaa

SEQ ID NO: 420684 - RNA, 19 nt, Artificial Sequence
  Description of Artificial Sequence: Synthetic oligonucleotide
ugcugguagaaucuuuugu

SEQ ID NO: 420685 - RNA, 19 nt, Artificial Sequence
  Description of Artificial Sequence: Synthetic oligonucleotide
guaguugguuggcaaaucc

SEQ ID NO: 420686 - RNA, 19 nt, Artificial Sequence
  Description of Artificial Sequence: Synthetic oligonucleotide
uggagugucguuuuggauu

SEQ ID NO: 420687 - RNA, 19 nt, Artificial Sequence
  Description of Artificial Sequence: Synthetic oligonucleotide
gacaaugcccucaauucag

SEQ ID NO: 420688 - RNA, 19 nt, Artificial Sequence
  Description of Artificial Sequence: Synthetic oligonucleotide
cauggauuggcuccauccg

SEQ ID NO: 420689 - RNA, 19 nt, Artificial Sequence
  Description of Artificial Sequence: Synthetic oligonucleotide
ucauucacuacaucaggaa

SEQ ID NO: 420690 - RNA, 19 nt, Artificial Sequence
  Description of Artificial Sequence: Synthetic oligonucleotide
ccucaauucagauaauacc

SEQ ID NO: 420691 - RNA, 19 nt, Artificial Sequence
  Description of Artificial Sequence: Synthetic oligonucleotide
uuucuuggccacucacugg

SEQ ID NO: 420692 - RNA, 19 nt, Artificial Sequence
  Description of Artificial Sequence: Synthetic oligonucleotide
uccgaauucaucuguacuu

SEQ ID NO: 420693 - RNA, 19 nt, Artificial Sequence
  Description of Artificial Sequence: Synthetic oligonucleotide
ccuucaacugauauugugg

SEQ ID NO: 420694 - RNA, 19 nt, Artificial Sequence
  Description of Artificial Sequence: Synthetic oligonucleotide
ucgcaucacgauuacaacu

SEQ ID NO: 420695 - RNA, 19 nt, Artificial Sequence
  Description of Artificial Sequence: Synthetic oligonucleotide
cauaauugccuuugacuug

SEQ ID NO: 420696 - RNA, 19 nt, Artificial Sequence
  Description of Artificial Sequence: Synthetic oligonucleotide
auucgcuccaucauucugg

SEQ ID NO: 420697 - RNA, 19 nt, Artificial Sequence
  Description of Artificial Sequence: Synthetic oligonucleotide
accgguaacccacauccuc

SEQ ID NO: 420698 - RNA, 19 nt, Artificial Sequence
  Description of Artificial Sequence: Synthetic oligonucleotide
ugauaauauggccugccuu

SEQ ID NO: 420699 - RNA, 19 nt, Artificial Sequence
  Description of Artificial Sequence: Synthetic oligonucleotide
ucacgauuacaacuccuga

SEQ ID NO: 420700 - RNA, 19 nt, Artificial Sequence
  Description of Artificial Sequence: Synthetic oligonucleotide
uugauaauauggccugccu

SEQ ID NO: 420701 - RNA, 19 nt, Artificial Sequence
  Description of Artificial Sequence: Synthetic oligonucleotide
uaguugguuggcaaaucca

SEQ ID NO: 420702 - RNA, 19 nt, Artificial Sequence
  Description of Artificial Sequence: Synthetic oligonucleotide
ucacuaaacacauguucaa

SEQ ID NO: 420703 - RNA, 19 nt, Artificial Sequence
  Description of Artificial Sequence: Synthetic oligonucleotide
agacugaucauuugcuccu

SEQ ID NO: 420704 - RNA, 19 nt, Artificial Sequence
  Description of Artificial Sequence: Synthetic oligonucleotide
aguuuuacugaaugccacu

SEQ ID NO: 420705 - RNA, 19 nt, Artificial Sequence
  Description of Artificial Sequence: Synthetic oligonucleotide
ugguuggcaaauccacuag

SEQ ID NO: 420706 - RNA, 19 nt, Artificial Sequence
  Description of Artificial Sequence: Synthetic oligonucleotide
agcguuuggaucgaccuuc

SEQ ID NO: 420707 - RNA, 19 nt, Artificial Sequence
  Description of Artificial Sequence: Synthetic oligonucleotide
agacaaugcccucaauuca

SEQ ID NO: 420708 - RNA, 19 nt, Artificial Sequence
  Description of Artificial Sequence: Synthetic oligonucleotide
caagggaaccaauugcuuc

SEQ ID NO: 420709 - RNA, 19 nt, Artificial Sequence
  Description of Artificial Sequence: Synthetic oligonucleotide
ugauuugacucuacucagu

SEQ ID NO: 420710 - RNA, 19 nt, Artificial Sequence
  Description of Artificial Sequence: Synthetic oligonucleotide
uucuguagacugaucauuu

SEQ ID NO: 420711 - RNA, 19 nt, Artificial Sequence
  Description of Artificial Sequence: Synthetic oligonucleotide
ugggugaacggauauggaa

SEQ ID NO: 420712 - RNA, 19 nt, Artificial Sequence
  Description of Artificial Sequence: Synthetic oligonucleotide
uuaugggcuugauaauaug

SEQ ID NO: 420713 - RNA, 19 nt, Artificial Sequence
  Description of Artificial Sequence: Synthetic oligonucleotide
uuacaacuccugagcaucc

SEQ ID NO: 420714 - RNA, 19 nt, Artificial Sequence
  Description of Artificial Sequence: Synthetic oligonucleotide
ucuguagacugaucauuug

SEQ ID NO: 420715 - RNA, 19 nt, Artificial Sequence
  Description of Artificial Sequence: Synthetic oligonucleotide
gaacggauauggaagcacc

SEQ ID NO: 420716 - RNA, 19 nt, Artificial Sequence
  Description of Artificial Sequence: Synthetic oligonucleotide
cagacgguucuucagaguc

SEQ ID NO: 420717 - RNA, 19 nt, Artificial Sequence
  Description of Artificial Sequence: Synthetic oligonucleotide
uuguucuuauggaggaggu

SEQ ID NO: 420718 - RNA, 19 nt, Artificial Sequence
  Description of Artificial Sequence: Synthetic oligonucleotide
ggaugguccuuucaaauug

SEQ ID NO: 420719 - RNA, 19 nt, Artificial Sequence
  Description of Artificial Sequence: Synthetic oligonucleotide
auaauauggccugccuugg

SEQ ID NO: 420720 - RNA, 19 nt, Artificial Sequence
  Description of Artificial Sequence: Synthetic oligonucleotide
ugcuuaaggcucauucgcu

SEQ ID NO: 420721 - RNA, 19 nt, Artificial Sequence
  Description of Artificial Sequence: Synthetic oligonucleotide
auuugacucuacucaguug

SEQ ID NO: 420722 - RNA, 19 nt, Artificial Sequence
  Description of Artificial Sequence: Synthetic oligonucleotide
auauuguggguuccuccuc

SEQ ID NO: 420723 - RNA, 19 nt, Artificial Sequence
  Description of Artificial Sequence: Synthetic oligonucleotide
ggcuuuaauaagaaaccgg

SEQ ID NO: 420724 - RNA, 19 nt, Artificial Sequence
  Description of Artificial Sequence: Synthetic oligonucleotide
acauugggcaaauucuuau

SEQ ID NO: 420725 - RNA, 19 nt, Artificial Sequence
  Description of Artificial Sequence: Synthetic oligonucleotide
auccgaauucaucuguacu

SEQ ID NO: 420726 - RNA, 19 nt, Artificial Sequence
  Description of Artificial Sequence: Synthetic oligonucleotide
ucuuagccaacuguucuug

SEQ ID NO: 420727 - RNA, 19 nt, Artificial Sequence
  Description of Artificial Sequence: Synthetic oligonucleotide
uggaagcacccgaaccugg

SEQ ID NO: 420728 - RNA, 19 nt, Artificial Sequence
  Description of Artificial Sequence: Synthetic oligonucleotide
cucauucgcuccaucauuc

SEQ ID NO: 420729 - RNA, 19 nt, Artificial Sequence
  Description of Artificial Sequence: Synthetic oligonucleotide
uuguuucuuggccacucac

SEQ ID NO: 420730 - RNA, 19 nt, Artificial Sequence
  Description of Artificial Sequence: Synthetic oligonucleotide
gauauuguggguuccuccu

SEQ ID NO: 420731 - RNA, 19 nt, Artificial Sequence
  Description of Artificial Sequence: Synthetic oligonucleotide
ugggcaaauucuuaucuuu

SEQ ID NO: 420732 - RNA, 19 nt, Artificial Sequence
  Description of Artificial Sequence: Synthetic oligonucleotide
aacauuaaacucggacacu

SEQ ID NO: 420733 - RNA, 19 nt, Artificial Sequence
  Description of Artificial Sequence: Synthetic oligonucleotide
uuggagagaugauuuuccu

SEQ ID NO: 420734 - RNA, 19 nt, Artificial Sequence
  Description of Artificial Sequence: Synthetic oligonucleotide
gucguuuuggauuguucug

SEQ ID NO: 420735 - RNA, 19 nt, Artificial Sequence
  Description of Artificial Sequence: Synthetic oligonucleotide
ugaacggauauggaagcac

SEQ ID NO: 420736 - RNA, 19 nt, Artificial Sequence
  Description of Artificial Sequence: Synthetic oligonucleotide
aucaagggaaccaauugcu

SEQ ID NO: 420737 - RNA, 19 nt, Artificial Sequence
  Description of Artificial Sequence: Synthetic oligonucleotide
ucacuggcgcucaaggggu

SEQ ID NO: 420738 - RNA, 19 nt, Artificial Sequence
  Description of Artificial Sequence: Synthetic oligonucleotide
ugagacaacuuggagcuuc

SEQ ID NO: 420739 - RNA, 19 nt, Artificial Sequence
  Description of Artificial Sequence: Synthetic oligonucleotide
uucgcaucacgauuacaac

SEQ ID NO: 420740 - RNA, 19 nt, Artificial Sequence
  Description of Artificial Sequence: Synthetic oligonucleotide
guuucuuagacaaugcccu

SEQ ID NO: 420741 - RNA, 19 nt, Artificial Sequence
  Description of Artificial Sequence: Synthetic oligonucleotide
cucagacgguucuucagag

SEQ ID NO: 420742 - RNA, 19 nt, Artificial Sequence
  Description of Artificial Sequence: Synthetic oligonucleotide
aucucauccucuuucgcau

SEQ ID NO: 420743 - RNA, 19 nt, Artificial Sequence
  Description of Artificial Sequence: Synthetic oligonucleotide
ucauccccggcaaaagccu

SEQ ID NO: 420744 - RNA, 19 nt, Artificial Sequence
  Description of Artificial Sequence: Synthetic oligonucleotide
uuccucuagggcagguucc

SEQ ID NO: 420745 - RNA, 19 nt, Artificial Sequence
  Description of Artificial Sequence: Synthetic oligonucleotide
acggauauggaagcacccg

SEQ ID NO: 420746 - RNA, 19 nt, Artificial Sequence
  Description of Artificial Sequence: Synthetic oligonucleotide
gaagacaguccucguuacc

SEQ ID NO: 420747 - RNA, 19 nt, Artificial Sequence
  Description of Artificial Sequence: Synthetic oligonucleotide
uuacugaaugccacuucuc

SEQ ID NO: 420748 - RNA, 19 nt, Artificial Sequence
  Description of Artificial Sequence: Synthetic oligonucleotide
ggagugucguuuuggauug

SEQ ID NO: 420749 - RNA, 19 nt, Artificial Sequence
  Description of Artificial Sequence: Synthetic oligonucleotide
aucacgauuacaacuccug

SEQ ID NO: 420750 - RNA, 19 nt, Artificial Sequence
  Description of Artificial Sequence: Synthetic oligonucleotide
uggauuggcuccauccgaa

SEQ ID NO: 420751 - RNA, 19 nt, Artificial Sequence
  Description of Artificial Sequence: Synthetic oligonucleotide
uggagaggguuugugaagu

SEQ ID NO: 420752 - RNA, 19 nt, Artificial Sequence
  Description of Artificial Sequence: Synthetic oligonucleotide
cuuagccaacuguucuugc

SEQ ID NO: 420753 - RNA, 19 nt, Artificial Sequence
  Description of Artificial Sequence: Synthetic oligonucleotide
uuccuaagggaucuccuuu

SEQ ID NO: 420754 - RNA, 19 nt, Artificial Sequence
  Description of Artificial Sequence: Synthetic oligonucleotide
ucccgauucuucugaacca

SEQ ID NO: 420755 - RNA, 19 nt, Artificial Sequence
  Description of Artificial Sequence: Synthetic oligonucleotide
auggauuggcuccauccga

SEQ ID NO: 420756 - RNA, 19 nt, Artificial Sequence
  Description of Artificial Sequence: Synthetic oligonucleotide
ggcuugauaauauggccug

SEQ ID NO: 420757 - RNA, 19 nt, Artificial Sequence
  Description of Artificial Sequence: Synthetic oligonucleotide
ugaaccacagaaucccauu

SEQ ID NO: 420758 - RNA, 19 nt, Artificial Sequence
  Description of Artificial Sequence: Synthetic oligonucleotide
ggggcuuuaauaagaaacc

SEQ ID NO: 420759 - RNA, 19 nt, Artificial Sequence
  Description of Artificial Sequence: Synthetic oligonucleotide
ugcagcguuuggaucgacc

SEQ ID NO: 420760 - RNA, 19 nt, Artificial Sequence
  Description of Artificial Sequence: Synthetic oligonucleotide
uccuaagggaucuccuuuc

SEQ ID NO: 420761 - RNA, 19 nt, Artificial Sequence
  Description of Artificial Sequence: Synthetic oligonucleotide
aauaagaaaccggcgucuu

SEQ ID NO: 420762 - RNA, 19 nt, Artificial Sequence
  Description of Artificial Sequence: Synthetic oligonucleotide
uuuccuaagggaucuccuu

SEQ ID NO: 420763 - RNA, 19 nt, Artificial Sequence
  Description of Artificial Sequence: Synthetic oligonucleotide
caacugauauuguggguuc

SEQ ID NO: 420764 - RNA, 19 nt, Artificial Sequence
  Description of Artificial Sequence: Synthetic oligonucleotide
guuaagggguaauuccaga

SEQ ID NO: 420765 - RNA, 19 nt, Artificial Sequence
  Description of Artificial Sequence: Synthetic oligonucleotide
cauccgaauucaucuguac

SEQ ID NO: 420766 - RNA, 19 nt, Artificial Sequence
  Description of Artificial Sequence: Synthetic oligonucleotide
uucagacuagccucagauc

SEQ ID NO: 420767 - RNA, 19 nt, Artificial Sequence
  Description of Artificial Sequence: Synthetic oligonucleotide
ggcuuacuggccuggauag

SEQ ID NO: 420768 - RNA, 19 nt, Artificial Sequence
  Description of Artificial Sequence: Synthetic oligonucleotide
uuguauucuuucuggccuc

SEQ ID NO: 420769 - RNA, 19 nt, Artificial Sequence
  Description of Artificial Sequence: Synthetic oligonucleotide
uuaucuuuucucggaggac

SEQ ID NO: 420770 - RNA, 19 nt, Artificial Sequence
  Description of Artificial Sequence: Synthetic oligonucleotide
ucuuucgcaucacgauuac

SEQ ID NO: 420771 - RNA, 19 nt, Artificial Sequence
  Description of Artificial Sequence: Synthetic oligonucleotide
uguuccagagggguucuug

SEQ ID NO: 420772 - RNA, 19 nt, Artificial Sequence
  Description of Artificial Sequence: Synthetic oligonucleotide
uguugcgcuucucacugau

SEQ ID NO: 420773 - RNA, 19 nt, Artificial Sequence
  Description of Artificial Sequence: Synthetic oligonucleotide
ugcuuuuaugggcuugaua

SEQ ID NO: 420774 - RNA, 19 nt, Artificial Sequence
  Description of Artificial Sequence: Synthetic oligonucleotide
uggaugguccuuucaaauu

SEQ ID NO: 420775 - RNA, 19 nt, Artificial Sequence
  Description of Artificial Sequence: Synthetic oligonucleotide
cccuucgcagcuuuggucg

SEQ ID NO: 420776 - RNA, 19 nt, Artificial Sequence
  Description of Artificial Sequence: Synthetic oligonucleotide
cucggcgaaucuuagccuc

SEQ ID NO: 420777 - RNA, 19 nt, Artificial Sequence
  Description of Artificial Sequence: Synthetic oligonucleotide
aaccggcgucuuuucuugg

SEQ ID NO: 420778 - RNA, 19 nt, Artificial Sequence
  Description of Artificial Sequence: Synthetic oligonucleotide
uaauauggccugccuuggu

SEQ ID NO: 420779 - RNA, 19 nt, Artificial Sequence
  Description of Artificial Sequence: Synthetic oligonucleotide
agcacccgaaccuggugag

SEQ ID NO: 420780 - RNA, 19 nt, Artificial Sequence
  Description of Artificial Sequence: Synthetic oligonucleotide
uggaucgaccuuccucagc

SEQ ID NO: 420781 - RNA, 19 nt, Artificial Sequence
  Description of Artificial Sequence: Synthetic oligonucleotide
gaagcacccgaaccuggug

SEQ ID NO: 420782 - RNA, 19 nt, Artificial Sequence
  Description of Artificial Sequence: Synthetic oligonucleotide
ucauucgcuccaucauucu

SEQ ID NO: 420783 - RNA, 19 nt, Artificial Sequence
  Description of Artificial Sequence: Synthetic oligonucleotide
aagcucugcucggcgaauc

SEQ ID NO: 420784 - RNA, 19 nt, Artificial Sequence
  Description of Artificial Sequence: Synthetic oligonucleotide
ugcaacaagagaggcuccu

SEQ ID NO: 420785 - RNA, 19 nt, Artificial Sequence
  Description of Artificial Sequence: Synthetic oligonucleotide
agaaaccggcgucuuuucu

SEQ ID NO: 420786 - RNA, 19 nt, Artificial Sequence
  Description of Artificial Sequence: Synthetic oligonucleotide
cuugaagucaggagguucu

SEQ ID NO: 420787 - RNA, 19 nt, Artificial Sequence
  Description of Artificial Sequence: Synthetic oligonucleotide
cccucaauucagauaauac

SEQ ID NO: 420788 - RNA, 19 nt, Artificial Sequence
  Description of Artificial Sequence: Synthetic oligonucleotide
ucagacgguucuucagagu

SEQ ID NO: 420789 - RNA, 19 nt, Artificial Sequence
  Description of Artificial Sequence: Synthetic oligonucleotide
ggacccaauaggauucugg

SEQ ID NO: 420790 - RNA, 19 nt, Artificial Sequence
  Description of Artificial Sequence: Synthetic oligonucleotide
gcgcucaagggguaguugg

SEQ ID NO: 420791 - RNA, 19 nt, Artificial Sequence
  Description of Artificial Sequence: Synthetic oligonucleotide
auaauaccuccuugcuggu

SEQ ID NO: 420792 - RNA, 19 nt, Artificial Sequence
  Description of Artificial Sequence: Synthetic oligonucleotide
uuggagugucguuuuggau

SEQ ID NO: 420793 - RNA, 19 nt, Artificial Sequence
  Description of Artificial Sequence: Synthetic oligonucleotide
ucagaccuuggggaagacc

SEQ ID NO: 420794 - RNA, 19 nt, Artificial Sequence
  Description of Artificial Sequence: Synthetic oligonucleotide
gaacuagggcuucuuccuc

SEQ ID NO: 420795 - RNA, 19 nt, Artificial Sequence
  Description of Artificial Sequence: Synthetic oligonucleotide
cucuuucgcaucacgauua

SEQ ID NO: 420796 - RNA, 19 nt, Artificial Sequence
  Description of Artificial Sequence: Synthetic oligonucleotide
acugauauuguggguuccu

SEQ ID NO: 420797 - RNA, 19 nt, Artificial Sequence
  Description of Artificial Sequence: Synthetic oligonucleotide
cuugcauagcuuggcgggc

SEQ ID NO: 420798 - RNA, 19 nt, Artificial Sequence
  Description of Artificial Sequence: Synthetic oligonucleotide
agacuagccucagaucucu

SEQ ID NO: 420799 - RNA, 19 nt, Artificial Sequence
  Description of Artificial Sequence: Synthetic oligonucleotide
auaaucacauugggcaaau

SEQ ID NO: 420800 - RNA, 19 nt, Artificial Sequence
  Description of Artificial Sequence: Synthetic oligonucleotide
auguucaaugggagcaaag

SEQ ID NO: 420801 - RNA, 19 nt, Artificial Sequence
  Description of Artificial Sequence: Synthetic oligonucleotide
uugcauagcuuggcgggcc

SEQ ID NO: 420802 - RNA, 19 nt, Artificial Sequence
  Description of Artificial Sequence: Synthetic oligonucleotide
ggaaccaauugcuuccaga

SEQ ID NO: 420803 - RNA, 19 nt, Artificial Sequence
  Description of Artificial Sequence: Synthetic oligonucleotide
ucggcgaaucuuagccucu

SEQ ID NO: 420804 - RNA, 19 nt, Artificial Sequence
  Description of Artificial Sequence: Synthetic oligonucleotide
auggugggugaacggauau

SEQ ID NO: 420805 - RNA, 19 nt, Artificial Sequence
  Description of Artificial Sequence: Synthetic oligonucleotide
gccauaauugccuuugacu

SEQ ID NO: 420806 - RNA, 19 nt, Artificial Sequence
  Description of Artificial Sequence: Synthetic oligonucleotide
agaggguuugugaaguuuu

SEQ ID NO: 420807 - RNA, 19 nt, Artificial Sequence
  Description of Artificial Sequence: Synthetic oligonucleotide
cagacuagccucagaucuc

SEQ ID NO: 420808 - RNA, 19 nt, Artificial Sequence
  Description of Artificial Sequence: Synthetic oligonucleotide
auccccggcaaaagccucc

SEQ ID NO: 420809 - RNA, 19 nt, Artificial Sequence
  Description of Artificial Sequence: Synthetic oligonucleotide
ugcauagcuuggcgggccu

SEQ ID NO: 420810 - RNA, 19 nt, Artificial Sequence
  Description of Artificial Sequence: Synthetic oligonucleotide
cuuggccacucacuggcuc

SEQ ID NO: 420811 - RNA, 19 nt, Artificial Sequence
  Description of Artificial Sequence: Synthetic oligonucleotide
ugcccuucgcagcuuuggu

SEQ ID NO: 420812 - RNA, 19 nt, Artificial Sequence
  Description of Artificial Sequence: Synthetic oligonucleotide
ucuucgagcccuggcuuca

SEQ ID NO: 420813 - RNA, 19 nt, Artificial Sequence
  Description of Artificial Sequence: Synthetic oligonucleotide
cagagucuucuuugauuug

SEQ ID NO: 420814 - RNA, 19 nt, Artificial Sequence
  Description of Artificial Sequence: Synthetic oligonucleotide
ucacuacaucaggaacuag

SEQ ID NO: 420815 - RNA, 19 nt, Artificial Sequence
  Description of Artificial Sequence: Synthetic oligonucleotide
gaucgaccuuccucagcug

SEQ ID NO: 420816 - RNA, 19 nt, Artificial Sequence
  Description of Artificial Sequence: Synthetic oligonucleotide
gggaagaccgguaacccac

SEQ ID NO: 420817 - RNA, 19 nt, Artificial Sequence
  Description of Artificial Sequence: Synthetic oligonucleotide
ucuuauggaggagguuaaa

SEQ ID NO: 420818 - RNA, 19 nt, Artificial Sequence
  Description of Artificial Sequence: Synthetic oligonucleotide
cucguuaccuaguucuucu

SEQ ID NO: 420819 - RNA, 19 nt, Artificial Sequence
  Description of Artificial Sequence: Synthetic oligonucleotide
ggaagacaguccucguuac

SEQ ID NO: 420820 - RNA, 19 nt, Artificial Sequence
  Description of Artificial Sequence: Synthetic oligonucleotide
gcuuaaggcucauucgcuc

SEQ ID NO: 420821 - RNA, 19 nt, Artificial Sequence
  Description of Artificial Sequence: Synthetic oligonucleotide
uccuuacuuggaagacagu

SEQ ID NO: 420822 - RNA, 19 nt, Artificial Sequence
  Description of Artificial Sequence: Synthetic oligonucleotide
cgcaucacgauuacaacuc

SEQ ID NO: 420823 - RNA, 19 nt, Artificial Sequence
  Description of Artificial Sequence: Synthetic oligonucleotide
gaaaccggcgucuuuucuu

SEQ ID NO: 420824 - RNA, 19 nt, Artificial Sequence
  Description of Artificial Sequence: Synthetic oligonucleotide
acuagggcuucuuccucau

SEQ ID NO: 420825 - RNA, 19 nt, Artificial Sequence
  Description of Artificial Sequence: Synthetic oligonucleotide
ggaucucauccucuuucgc

SEQ ID NO: 420826 - RNA, 19 nt, Artificial Sequence
  Description of Artificial Sequence: Synthetic oligonucleotide
uccauggauuggcuccauc

SEQ ID NO: 420827 - RNA, 19 nt, Artificial Sequence
  Description of Artificial Sequence: Synthetic oligonucleotide
ggaucgaccuuccucagcu

SEQ ID NO: 420828 - RNA, 19 nt, Artificial Sequence
  Description of Artificial Sequence: Synthetic oligonucleotide
agaccuuggggaagaccgg

SEQ ID NO: 420829 - RNA, 19 nt, Artificial Sequence
  Description of Artificial Sequence: Synthetic oligonucleotide
gcaucacgauuacaacucc

SEQ ID NO: 420830 - RNA, 19 nt, Artificial Sequence
  Description of Artificial Sequence: Synthetic oligonucleotide
ccagucacuaaacacaugu

SEQ ID NO: 420831 - RNA, 19 nt, Artificial Sequence
  Description of Artificial Sequence: Synthetic oligonucleotide
agacaguccucguuaccua

SEQ ID NO: 420832 - RNA, 19 nt, Artificial Sequence
  Description of Artificial Sequence: Synthetic oligonucleotide
guucaauccauagaacuuu

SEQ ID NO: 420833 - RNA, 19 nt, Artificial Sequence
  Description of Artificial Sequence: Synthetic oligonucleotide
gcccuggcuucauaguagg

SEQ ID NO: 420834 - RNA, 19 nt, Artificial Sequence
  Description of Artificial Sequence: Synthetic oligonucleotide
cucggacacuuucagacua

SEQ ID NO: 420835 - RNA, 19 nt, Artificial Sequence
  Description of Artificial Sequence: Synthetic oligonucleotide
gguccaagcagaucugaaa

SEQ ID NO: 420836 - RNA, 19 nt, Artificial Sequence
  Description of Artificial Sequence: Synthetic oligonucleotide
uucgcagcuuuggucgugu

SEQ ID NO: 420837 - RNA, 19 nt, Artificial Sequence
  Description of Artificial Sequence: Synthetic oligonucleotide
ccuaagggaucuccuuucc

SEQ ID NO: 420838 - RNA, 19 nt, Artificial Sequence
  Description of Artificial Sequence: Synthetic oligonucleotide
ucguuaccuaguucuucua

SEQ ID NO: 420839 - RNA, 19 nt, Artificial Sequence
  Description of Artificial Sequence: Synthetic oligonucleotide
auaccuccuugcugguaga

SEQ ID NO: 420840 - RNA, 19 nt, Artificial Sequence
  Description of Artificial Sequence: Synthetic oligonucleotide
ugacucuacucaguugcuu

SEQ ID NO: 420841 - RNA, 19 nt, Artificial Sequence
  Description of Artificial Sequence: Synthetic oligonucleotide
ucuugccuuccagucacua

SEQ ID NO: 420842 - RNA, 19 nt, Artificial Sequence
  Description of Artificial Sequence: Synthetic oligonucleotide
gaauucaucuguacuucau

SEQ ID NO: 420843 - RNA, 19 nt, Artificial Sequence
  Description of Artificial Sequence: Synthetic oligonucleotide
aggcaauuuccaccuguuu

SEQ ID NO: 420844 - RNA, 19 nt, Artificial Sequence
  Description of Artificial Sequence: Synthetic oligonucleotide
acaaugcccucaauucaga

SEQ ID NO: 420845 - RNA, 19 nt, Artificial Sequence
  Description of Artificial Sequence: Synthetic oligonucleotide
cguuaccuaguucuucuag

SEQ ID NO: 420846 - RNA, 19 nt, Artificial Sequence
  Description of Artificial Sequence: Synthetic oligonucleotide
cauccccggcaaaagccuc

SEQ ID NO: 420847 - RNA, 19 nt, Artificial Sequence
  Description of Artificial Sequence: Synthetic oligonucleotide
caucuguacuucauucacu

SEQ ID NO: 420848 - RNA, 19 nt, Artificial Sequence
  Description of Artificial Sequence: Synthetic oligonucleotide
agacgguucuucagagucu

SEQ ID NO: 420849 - RNA, 19 nt, Artificial Sequence
  Description of Artificial Sequence: Synthetic oligonucleotide
cuuuuaugggcuugauaau

SEQ ID NO: 420850 - RNA, 19 nt, Artificial Sequence
  Description of Artificial Sequence: Synthetic oligonucleotide
gauggugggugaacggaua

SEQ ID NO: 420851 - RNA, 19 nt, Artificial Sequence
  Description of Artificial Sequence: Synthetic oligonucleotide
ccuucuacugcagcucuag

SEQ ID NO: 420852 - RNA, 19 nt, Artificial Sequence
  Description of Artificial Sequence: Synthetic oligonucleotide
acccgaaccuggugagcug

SEQ ID NO: 420853 - RNA, 19 nt, Artificial Sequence
  Description of Artificial Sequence: Synthetic oligonucleotide
gccagaaggcugcccuucg

SEQ ID NO: 420854 - RNA, 19 nt, Artificial Sequence
  Description of Artificial Sequence: Synthetic oligonucleotide
guccuuucaaauugcugau

SEQ ID NO: 420855 - RNA, 19 nt, Artificial Sequence
  Description of Artificial Sequence: Synthetic oligonucleotide
agugucguuuuggauuguu

SEQ ID NO: 420856 - RNA, 19 nt, Artificial Sequence
  Description of Artificial Sequence: Synthetic oligonucleotide
guuuuacugaaugccacuu

SEQ ID NO: 420857 - RNA, 19 nt, Artificial Sequence
  Description of Artificial Sequence: Synthetic oligonucleotide
gcagcguuuggaucgaccu

SEQ ID NO: 420858 - RNA, 19 nt, Artificial Sequence
  Description of Artificial Sequence: Synthetic oligonucleotide
auguugcgcuucucacuga

SEQ ID NO: 420859 - RNA, 19 nt, Artificial Sequence
  Description of Artificial Sequence: Synthetic oligonucleotide
guugguuggcaaauccacu

SEQ ID NO: 420860 - RNA, 19 nt, Artificial Sequence
  Description of Artificial Sequence: Synthetic oligonucleotide
agugcagcguuuggaucga

SEQ ID NO: 420861 - RNA, 19 nt, Artificial Sequence
  Description of Artificial Sequence: Synthetic oligonucleotide
ccgaauucaucuguacuuc

SEQ ID NO: 420862 - RNA, 19 nt, Artificial Sequence
  Description of Artificial Sequence: Synthetic oligonucleotide
gcuugauaauauggccugc

SEQ ID NO: 420863 - RNA, 19 nt, Artificial Sequence
  Description of Artificial Sequence: Synthetic oligonucleotide
gguaguugguuggcaaauc

SEQ ID NO: 420864 - RNA, 19 nt, Artificial Sequence
  Description of Artificial Sequence: Synthetic oligonucleotide
cucuacuguugugggaaca

SEQ ID NO: 420865 - RNA, 19 nt, Artificial Sequence
  Description of Artificial Sequence: Synthetic oligonucleotide
gggaaccaauugcuuccag

SEQ ID NO: 420866 - RNA, 19 nt, Artificial Sequence
  Description of Artificial Sequence: Synthetic oligonucleotide
cuaagggaucuccuuuccu

SEQ ID NO: 420867 - RNA, 19 nt, Artificial Sequence
  Description of Artificial Sequence: Synthetic oligonucleotide
ggggaagaccgguaaccca

SEQ ID NO: 420868 - RNA, 19 nt, Artificial Sequence
  Description of Artificial Sequence: Synthetic oligonucleotide
uucgagcccuggcuucaua

SEQ ID NO: 420869 - RNA, 19 nt, Artificial Sequence
  Description of Artificial Sequence: Synthetic oligonucleotide
cagguuccucuuccuggac

SEQ ID NO: 420870 - RNA, 19 nt, Artificial Sequence
  Description of Artificial Sequence: Synthetic oligonucleotide
gguuggcaaauccacuagu

SEQ ID NO: 420871 - RNA, 19 nt, Artificial Sequence
  Description of Artificial Sequence: Synthetic oligonucleotide
ggauauggaagcacccgaa

SEQ ID NO: 420872 - RNA, 19 nt, Artificial Sequence
  Description of Artificial Sequence: Synthetic oligonucleotide
cauguucaaugggagcaaa

SEQ ID NO: 420873 - RNA, 19 nt, Artificial Sequence
  Description of Artificial Sequence: Synthetic oligonucleotide
gggcuugauaauauggccu

SEQ ID NO: 420874 - RNA, 19 nt, Artificial Sequence
  Description of Artificial Sequence: Synthetic oligonucleotide
uaaucacauugggcaaauu

SEQ ID NO: 420875 - RNA, 19 nt, Artificial Sequence
  Description of Artificial Sequence: Synthetic oligonucleotide
ccucuaggucauacuuugc

SEQ ID NO: 420876 - RNA, 19 nt, Artificial Sequence
  Description of Artificial Sequence: Synthetic oligonucleotide
gguucuguagacugaucau

SEQ ID NO: 420877 - RNA, 19 nt, Artificial Sequence
  Description of Artificial Sequence: Synthetic oligonucleotide
ggcuccauccgaauucauc

SEQ ID NO: 420878 - RNA, 19 nt, Artificial Sequence
  Description of Artificial Sequence: Synthetic oligonucleotide
cuuucgcaucacgauuaca

SEQ ID NO: 420879 - RNA, 19 nt, Artificial Sequence
  Description of Artificial Sequence: Synthetic oligonucleotide
accuccuugcugguagaau

SEQ ID NO: 420880 - RNA, 19 nt, Artificial Sequence
  Description of Artificial Sequence: Synthetic oligonucleotide
uccccggcaaaagccuccu

SEQ ID NO: 420881 - RNA, 19 nt, Artificial Sequence
  Description of Artificial Sequence: Synthetic oligonucleotide
cagagcucgggcccucuga

SEQ ID NO: 420882 - RNA, 19 nt, Artificial Sequence
  Description of Artificial Sequence: Synthetic oligonucleotide
uuggcccauuugccacugu

SEQ ID NO: 420883 - RNA, 19 nt, Artificial Sequence
  Description of Artificial Sequence: Synthetic oligonucleotide
gcgucuuuucuuggcacug

SEQ ID NO: 420884 - RNA, 19 nt, Artificial Sequence
  Description of Artificial Sequence: Synthetic oligonucleotide
cccgauucuucugaaccac

SEQ ID NO: 420885 - RNA, 19 nt, Artificial Sequence
  Description of Artificial Sequence: Synthetic oligonucleotide
gaagaccgguaacccacau

SEQ ID NO: 420886 - RNA, 19 nt, Artificial Sequence
  Description of Artificial Sequence: Synthetic oligonucleotide
ggucagaccuuggggaaga

SEQ ID NO: 420887 - RNA, 19 nt, Artificial Sequence
  Description of Artificial Sequence: Synthetic oligonucleotide
gaccuuggggaagaccggu

SEQ ID NO: 420888 - RNA, 19 nt, Artificial Sequence
  Description of Artificial Sequence: Synthetic oligonucleotide
cacuaaacacauguucaau

SEQ ID NO: 420889 - RNA, 19 nt, Artificial Sequence
  Description of Artificial Sequence: Synthetic oligonucleotide
ggacaaggagaacagucuu

SEQ ID NO: 420890 - RNA, 19 nt, Artificial Sequence
  Description of Artificial Sequence: Synthetic oligonucleotide
cccgaaccuggugagcugc

SEQ ID NO: 420891 - RNA, 19 nt, Artificial Sequence
  Description of Artificial Sequence: Synthetic oligonucleotide
gacuagccucagaucucuc

SEQ ID NO: 420892 - RNA, 19 nt, Artificial Sequence
  Description of Artificial Sequence: Synthetic oligonucleotide
ggcgaaucuuagccucuuc

SEQ ID NO: 420893 - RNA, 19 nt, Artificial Sequence
  Description of Artificial Sequence: Synthetic oligonucleotide
ggguaauuccagagucuuc

SEQ ID NO: 420894 - RNA, 19 nt, Artificial Sequence
  Description of Artificial Sequence: Synthetic oligonucleotide
uggcgcucaagggguaguu

SEQ ID NO: 420895 - RNA, 19 nt, Artificial Sequence
  Description of Artificial Sequence: Synthetic oligonucleotide
ccucguuaccuaguucuuc

SEQ ID NO: 420896 - RNA, 19 nt, Artificial Sequence
  Description of Artificial Sequence: Synthetic oligonucleotide
ggcgcucaagggguaguug

SEQ ID NO: 420897 - RNA, 19 nt, Artificial Sequence
  Description of Artificial Sequence: Synthetic oligonucleotide
ggcgucuuuucuuggcacu

SEQ ID NO: 420898 - RNA, 19 nt, Artificial Sequence
  Description of Artificial Sequence: Synthetic oligonucleotide
cgucuuuucuuggcacugg

SEQ ID NO: 420899 - RNA, 19 nt, Artificial Sequence
  Description of Artificial Sequence: Synthetic oligonucleotide
ugccuuugacuuggcccau

SEQ ID NO: 420900 - RNA, 19 nt, Artificial Sequence
  Description of Artificial Sequence: Synthetic oligonucleotide
caggcaauuuccaccuguu

SEQ ID NO: 420901 - RNA, 19 nt, Artificial Sequence
  Description of Artificial Sequence: Synthetic oligonucleotide
cacccgaaccuggugagcu

SEQ ID NO: 420902 - RNA, 19 nt, Artificial Sequence
  Description of Artificial Sequence: Synthetic oligonucleotide
ggcucauucgcuccaucau

SEQ ID NO: 420903 - RNA, 19 nt, Artificial Sequence
  Description of Artificial Sequence: Synthetic oligonucleotide
ggaagaccgguaacccaca

SEQ ID NO: 420904 - RNA, 19 nt, Artificial Sequence
  Description of Artificial Sequence: Synthetic oligonucleotide
ggcaaauccacuaguucuu

SEQ ID NO: 420905 - RNA, 19 nt, Artificial Sequence
  Description of Artificial Sequence: Synthetic oligonucleotide
ccgauucuucugaaccaca

SEQ ID NO: 420906 - RNA, 19 nt, Artificial Sequence
  Description of Artificial Sequence: Synthetic oligonucleotide
gcguuuggaucgaccuucc

SEQ ID NO: 420907 - RNA, 19 nt, Artificial Sequence
  Description of Artificial Sequence: Synthetic oligonucleotide
gcucauucgcuccaucauu

SEQ ID NO: 420908 - RNA, 19 nt, Artificial Sequence
  Description of Artificial Sequence: Synthetic oligonucleotide
ccggcaaaagccuccuuua

SEQ ID NO: 420909 - RNA, 19 nt, Artificial Sequence
  Description of Artificial Sequence: Synthetic oligonucleotide
gggguaauuccagagucuu

SEQ ID NO: 420910 - RNA, 19 nt, Artificial Sequence
  Description of Artificial Sequence: Synthetic oligonucleotide
guccaucccgccccacucu

SEQ ID NO: 420911 - RNA, 19 nt, Artificial Sequence
  Description of Artificial Sequence: Synthetic oligonucleotide
ucgcagcuuuggucguguu

SEQ ID NO: 420912 - RNA, 19 nt, Artificial Sequence
  Description of Artificial Sequence: Synthetic oligonucleotide
guugcgcuucucacugaua

SEQ ID NO: 420913 - RNA, 19 nt, Artificial Sequence
  Description of Artificial Sequence: Synthetic oligonucleotide
cggcgucuuuucuuggcac

SEQ ID NO: 420914 - RNA, 19 nt, Artificial Sequence
  Description of Artificial Sequence: Synthetic oligonucleotide
gaccgguaacccacauccu

SEQ ID NO: 420915 - RNA, 19 nt, Artificial Sequence
  Description of Artificial Sequence: Synthetic oligonucleotide
gacugaucauuugcuccuu

SEQ ID NO: 420916 - RNA, 19 nt, Artificial Sequence
  Description of Artificial Sequence: Synthetic oligonucleotide
caauaggauucuggauggu

SEQ ID NO: 420917 - RNA, 19 nt, Artificial Sequence
  Description of Artificial Sequence: Synthetic oligonucleotide
ccggcgucuuuucuuggca

SEQ ID NO: 420918 - RNA, 19 nt, Artificial Sequence
  Description of Artificial Sequence: Synthetic oligonucleotide
ggaagcacccgaaccuggu

SEQ ID NO: 420919 - RNA, 19 nt, Artificial Sequence
  Description of Artificial Sequence: Synthetic oligonucleotide
gcacccgaaccuggugagc

SEQ ID NO: 420920 - RNA, 19 nt, Artificial Sequence
  Description of Artificial Sequence: Synthetic oligonucleotide
ggauuggcuccauccgaau

SEQ ID NO: 420921 - RNA, 19 nt, Artificial Sequence
  Description of Artificial Sequence: Synthetic oligonucleotide
gugcagcguuuggaucgac

SEQ ID NO: 420922 - RNA, 19 nt, Artificial Sequence
  Description of Artificial Sequence: Synthetic oligonucleotide
cagcguuuggaucgaccuu

SEQ ID NO: 420923 - RNA, 19 nt, Artificial Sequence
  Description of Artificial Sequence: Synthetic oligonucleotide
gagugucguuuuggauugu

SEQ ID NO: 420924 - RNA, 19 nt, Artificial Sequence
  Description of Artificial Sequence: Synthetic oligonucleotide
gcauagcuuggcgggccuc

SEQ ID NO: 420925 - RNA, 19 nt, Artificial Sequence
  Description of Artificial Sequence: Synthetic oligonucleotide
cccuggcuucauaguagga

SEQ ID NO: 420926 - RNA, 19 nt, Artificial Sequence
  Description of Artificial Sequence: Synthetic oligonucleotide
cccggcaaaagccuccuuu

SEQ ID NO: 420927 - RNA, 19 nt, Artificial Sequence
  Description of Artificial Sequence: Synthetic oligonucleotide
ccgaaccuggugagcugca

SEQ ID NO: 420928 - RNA, 19 nt, Artificial Sequence
  Description of Artificial Sequence: Synthetic oligonucleotide
cuggcgcucaagggguagu

SEQ ID NO: 420929 - RNA, 19 nt, Artificial Sequence
  Description of Artificial Sequence: Synthetic oligonucleotide
ccuucgcagcuuuggucgu

SEQ ID NO: 420930 - RNA, 19 nt, Artificial Sequence
  Description of Artificial Sequence: Synthetic oligonucleotide
ccgccccacucuccccagc

SEQ ID NO: 420931 - RNA, 19 nt, Artificial Sequence
  Description of Artificial Sequence: Synthetic oligonucleotide
cgcucaagggguaguuggu

SEQ ID NO: 420932 - RNA, 19 nt, Artificial Sequence
  Description of Artificial Sequence: Synthetic oligonucleotide
auuaacaaagaucagcuuc

SEQ ID NO: 420933 - RNA, 19 nt, Artificial Sequence
  Description of Artificial Sequence: Synthetic oligonucleotide
uuuucaaccuuauaaauag

SEQ ID NO: 420934 - RNA, 19 nt, Artificial Sequence
  Description of Artificial Sequence: Synthetic oligonucleotide
auuaauaucgaaugaacuc

SEQ ID NO: 420935 - RNA, 19 nt, Artificial Sequence
  Description of Artificial Sequence: Synthetic oligonucleotide
uuuaaugccaauaaguagu

SEQ ID NO: 420936 - RNA, 19 nt, Artificial Sequence
  Description of Artificial Sequence: Synthetic oligonucleotide
uguaugauuauaaaauggc

SEQ ID NO: 420937 - RNA, 19 nt, Artificial Sequence
  Description of Artificial Sequence: Synthetic oligonucleotide
gauguuugaauaucaaacg

SEQ ID NO: 420938 - RNA, 19 nt, Artificial Sequence
  Description of Artificial Sequence: Synthetic oligonucleotide
uuguaugauuauaaaaugg

SEQ ID NO: 420939 - RNA, 19 nt, Artificial Sequence
  Description of Artificial Sequence: Synthetic oligonucleotide
aacuaagugaaaauaaguc

SEQ ID NO: 420940 - RNA, 19 nt, Artificial Sequence
  Description of Artificial Sequence: Synthetic oligonucleotide
auguuugaauaucaaacgc

SEQ ID NO: 420941 - RNA, 19 nt, Artificial Sequence
  Description of Artificial Sequence: Synthetic oligonucleotide
ucugauggggacaugaaag

SEQ ID NO: 420942 - RNA, 19 nt, Artificial Sequence
  Description of Artificial Sequence: Synthetic oligonucleotide
uuccaagucggaaacaugg

SEQ ID NO: 420943 - RNA, 19 nt, Artificial Sequence
  Description of Artificial Sequence: Synthetic oligonucleotide
uguuuaaagaaacaaugac

SEQ ID NO: 420944 - RNA, 19 nt, Artificial Sequence
  Description of Artificial Sequence: Synthetic oligonucleotide
auagaacaaagacagcuac

SEQ ID NO: 420945 - RNA, 19 nt, Artificial Sequence
  Description of Artificial Sequence: Synthetic oligonucleotide
uauuaauaucgaaugaacu

SEQ ID NO: 420946 - RNA, 19 nt, Artificial Sequence
  Description of Artificial Sequence: Synthetic oligonucleotide
auguuauuaauaucgaaug

SEQ ID NO: 420947 - RNA, 19 nt, Artificial Sequence
  Description of Artificial Sequence: Synthetic oligonucleotide
agaaucaagacauuaacaa

SEQ ID NO: 420948 - RNA, 19 nt, Artificial Sequence
  Description of Artificial Sequence: Synthetic oligonucleotide
uguuugaauaucaaacgca

SEQ ID NO: 420949 - RNA, 19 nt, Artificial Sequence
  Description of Artificial Sequence: Synthetic oligonucleotide
ucuaacauugggaagucca

SEQ ID NO: 420950 - RNA, 19 nt, Artificial Sequence
  Description of Artificial Sequence: Synthetic oligonucleotide
aagugucgcaaacuguccc

SEQ ID NO: 420951 - RNA, 19 nt, Artificial Sequence
  Description of Artificial Sequence: Synthetic oligonucleotide
aagagggagagucuaagug

SEQ ID NO: 420952 - RNA, 19 nt, Artificial Sequence
  Description of Artificial Sequence: Synthetic oligonucleotide
ucaaccuuauaaauagaag

SEQ ID NO: 420953 - RNA, 19 nt, Artificial Sequence
  Description of Artificial Sequence: Synthetic oligonucleotide
uuaauaucgaaugaacucu

SEQ ID NO: 420954 - RNA, 19 nt, Artificial Sequence
  Description of Artificial Sequence: Synthetic oligonucleotide
gggacuguaagccagaggg

SEQ ID NO: 420955 - RNA, 19 nt, Artificial Sequence
  Description of Artificial Sequence: Synthetic oligonucleotide
uugucugucaauuggagga

SEQ ID NO: 420956 - RNA, 19 nt, Artificial Sequence
  Description of Artificial Sequence: Synthetic oligonucleotide
uuuuaagucacuagucugu

SEQ ID NO: 420957 - RNA, 19 nt, Artificial Sequence
  Description of Artificial Sequence: Synthetic oligonucleotide
ugcuaaaaggguuauucag

SEQ ID NO: 420958 - RNA, 19 nt, Artificial Sequence
  Description of Artificial Sequence: Synthetic oligonucleotide
uaucgaaugaacucucucc

SEQ ID NO: 420959 - RNA, 19 nt, Artificial Sequence
  Description of Artificial Sequence: Synthetic oligonucleotide
acuaucaaccccuuauuag

SEQ ID NO: 420960 - RNA, 19 nt, Artificial Sequence
  Description of Artificial Sequence: Synthetic oligonucleotide
cuuuaaugccaauaaguag

SEQ ID NO: 420961 - RNA, 19 nt, Artificial Sequence
  Description of Artificial Sequence: Synthetic oligonucleotide
cuaucaaccccuuauuagc

SEQ ID NO: 420962 - RNA, 19 nt, Artificial Sequence
  Description of Artificial Sequence: Synthetic oligonucleotide
uuacuaaugcuaaaagggu

SEQ ID NO: 420963 - RNA, 19 nt, Artificial Sequence
  Description of Artificial Sequence: Synthetic oligonucleotide
uucaccucagaacuaagug

SEQ ID NO: 420964 - RNA, 19 nt, Artificial Sequence
  Description of Artificial Sequence: Synthetic oligonucleotide
uucaaccuuauaaauagaa

SEQ ID NO: 420965 - RNA, 19 nt, Artificial Sequence
  Description of Artificial Sequence: Synthetic oligonucleotide
caaccuuauaaauagaaga

SEQ ID NO: 420966 - RNA, 19 nt, Artificial Sequence
  Description of Artificial Sequence: Synthetic oligonucleotide
ugauuauacaugagacagg

SEQ ID NO: 420967 - RNA, 19 nt, Artificial Sequence
  Description of Artificial Sequence: Synthetic oligonucleotide
ugaagaucaaccucucgcc

SEQ ID NO: 420968 - RNA, 19 nt, Artificial Sequence
  Description of Artificial Sequence: Synthetic oligonucleotide
cugaagaucaaccucucgc

SEQ ID NO: 420969 - RNA, 19 nt, Artificial Sequence
  Description of Artificial Sequence: Synthetic oligonucleotide
ugugauuauacaugagaca

SEQ ID NO: 420970 - RNA, 19 nt, Artificial Sequence
  Description of Artificial Sequence: Synthetic oligonucleotide
aagaucaaccucucgccag

SEQ ID NO: 420971 - RNA, 19 nt, Artificial Sequence
  Description of Artificial Sequence: Synthetic oligonucleotide
auaucaaacgcagagauuu

SEQ ID NO: 420972 - RNA, 19 nt, Artificial Sequence
  Description of Artificial Sequence: Synthetic oligonucleotide
ugucaaguagcuugaacug

SEQ ID NO: 420973 - RNA, 19 nt, Artificial Sequence
  Description of Artificial Sequence: Synthetic oligonucleotide
uguauuguaguuucuccac

SEQ ID NO: 420974 - RNA, 19 nt, Artificial Sequence
  Description of Artificial Sequence: Synthetic oligonucleotide
aacgggugucuucauuggc

SEQ ID NO: 420975 - RNA, 19 nt, Artificial Sequence
  Description of Artificial Sequence: Synthetic oligonucleotide
aucagauagguccucgauc

SEQ ID NO: 420976 - RNA, 19 nt, Artificial Sequence
  Description of Artificial Sequence: Synthetic oligonucleotide
auaucgaaugaacucucuc

SEQ ID NO: 420977 - RNA, 19 nt, Artificial Sequence
  Description of Artificial Sequence: Synthetic oligonucleotide
ucaaccccuuauuagcacg

SEQ ID NO: 420978 - RNA, 19 nt, Artificial Sequence
  Description of Artificial Sequence: Synthetic oligonucleotide
agacuuccuaguuuguagg

SEQ ID NO: 420979 - RNA, 19 nt, Artificial Sequence
  Description of Artificial Sequence: Synthetic oligonucleotide
aaggcuaacaggagguugg

SEQ ID NO: 420980 - RNA, 19 nt, Artificial Sequence
  Description of Artificial Sequence: Synthetic oligonucleotide
uguuguauggucugggaaa

SEQ ID NO: 420981 - RNA, 19 nt, Artificial Sequence
  Description of Artificial Sequence: Synthetic oligonucleotide
aauaucuguuugcuggcga

SEQ ID NO: 420982 - RNA, 19 nt, Artificial Sequence
  Description of Artificial Sequence: Synthetic oligonucleotide
uaaugggacuccuaggaga

SEQ ID NO: 420983 - RNA, 19 nt, Artificial Sequence
  Description of Artificial Sequence: Synthetic oligonucleotide
ucaaguagcuugaacugcu

SEQ ID NO: 420984 - RNA, 19 nt, Artificial Sequence
  Description of Artificial Sequence: Synthetic oligonucleotide
agaacuaagugaaaauaag

SEQ ID NO: 420985 - RNA, 19 nt, Artificial Sequence
  Description of Artificial Sequence: Synthetic oligonucleotide
ugugaaaauuccagcauau

SEQ ID NO: 420986 - RNA, 19 nt, Artificial Sequence
  Description of Artificial Sequence: Synthetic oligonucleotide
uauagaacaaagacagcua

SEQ ID NO: 420987 - RNA, 19 nt, Artificial Sequence
  Description of Artificial Sequence: Synthetic oligonucleotide
acuacuggacaucaggaga

SEQ ID NO: 420988 - RNA, 19 nt, Artificial Sequence
  Description of Artificial Sequence: Synthetic oligonucleotide
agaucaaccucucgccagc

SEQ ID NO: 420989 - RNA, 19 nt, Artificial Sequence
  Description of Artificial Sequence: Synthetic oligonucleotide
uuaugcauagggauauggu

SEQ ID NO: 420990 - RNA, 19 nt, Artificial Sequence
  Description of Artificial Sequence: Synthetic oligonucleotide
acuaauguugaaaauugug

SEQ ID NO: 420991 - RNA, 19 nt, Artificial Sequence
  Description of Artificial Sequence: Synthetic oligonucleotide
agcggcugacaauagcugc

SEQ ID NO: 420992 - RNA, 19 nt, Artificial Sequence
  Description of Artificial Sequence: Synthetic oligonucleotide
uaagugacugucugauggg

SEQ ID NO: 420993 - RNA, 19 nt, Artificial Sequence
  Description of Artificial Sequence: Synthetic oligonucleotide
ugcgaacagaaucaagaca

SEQ ID NO: 420994 - RNA, 19 nt, Artificial Sequence
  Description of Artificial Sequence: Synthetic oligonucleotide
gugaguagcugucaaguag

SEQ ID NO: 420995 - RNA, 19 nt, Artificial Sequence
  Description of Artificial Sequence: Synthetic oligonucleotide
aaaggugccuccccaagga

SEQ ID NO: 420996 - RNA, 19 nt, Artificial Sequence
  Description of Artificial Sequence: Synthetic oligonucleotide
uaucaaccccuuauuagca

SEQ ID NO: 420997 - RNA, 19 nt, Artificial Sequence
  Description of Artificial Sequence: Synthetic oligonucleotide
cuacuggacaucaggagag

SEQ ID NO: 420998 - RNA, 19 nt, Artificial Sequence
  Description of Artificial Sequence: Synthetic oligonucleotide
acaugugaacuacucagug

SEQ ID NO: 420999 - RNA, 19 nt, Artificial Sequence
  Description of Artificial Sequence: Synthetic oligonucleotide
agagggagagucuaaguga

SEQ ID NO: 421000 - RNA, 19 nt, Artificial Sequence
  Description of Artificial Sequence: Synthetic oligonucleotide
agaucugcguuucaggggu

SEQ ID NO: 421001 - RNA, 19 nt, Artificial Sequence
  Description of Artificial Sequence: Synthetic oligonucleotide
cuaacaggagguugguggg

SEQ ID NO: 421002 - RNA, 19 nt, Artificial Sequence
  Description of Artificial Sequence: Synthetic oligonucleotide
ugucaauuggaggaagugc

SEQ ID NO: 421003 - RNA, 19 nt, Artificial Sequence
  Description of Artificial Sequence: Synthetic oligonucleotide
ucgcaaacugucccgagcc

SEQ ID NO: 421004 - RNA, 19 nt, Artificial Sequence
  Description of Artificial Sequence: Synthetic oligonucleotide
accuuauaaauagaagaag

SEQ ID NO: 421005 - RNA, 19 nt, Artificial Sequence
  Description of Artificial Sequence: Synthetic oligonucleotide
uacuacuggacaucaggag

SEQ ID NO: 421006 - RNA, 19 nt, Artificial Sequence
  Description of Artificial Sequence: Synthetic oligonucleotide
gacuuccuaguuuguaggg

SEQ ID NO: 421007 - RNA, 19 nt, Artificial Sequence
  Description of Artificial Sequence: Synthetic oligonucleotide
gagucuaagugacugucug

SEQ ID NO: 421008 - RNA, 19 nt, Artificial Sequence
  Description of Artificial Sequence: Synthetic oligonucleotide
ugaucugucuucaccucag

SEQ ID NO: 421009 - RNA, 19 nt, Artificial Sequence
  Description of Artificial Sequence: Synthetic oligonucleotide
ugguuggacagacugcuca

SEQ ID NO: 421010 - RNA, 19 nt, Artificial Sequence
  Description of Artificial Sequence: Synthetic oligonucleotide
aauggaaaccacagcuagg

SEQ ID NO: 421011 - RNA, 19 nt, Artificial Sequence
  Description of Artificial Sequence: Synthetic oligonucleotide
ugaauaucaaacgcagaga

SEQ ID NO: 421012 - RNA, 19 nt, Artificial Sequence
  Description of Artificial Sequence: Synthetic oligonucleotide
agugucgcaaacugucccg

SEQ ID NO: 421013 - RNA, 19 nt, Artificial Sequence
  Description of Artificial Sequence: Synthetic oligonucleotide
auuagcacguaucuguuua

SEQ ID NO: 421014 - RNA, 19 nt, Artificial Sequence
  Description of Artificial Sequence: Synthetic oligonucleotide
cuaacauugggaaguccag

SEQ ID NO: 421015 - RNA, 19 nt, Artificial Sequence
  Description of Artificial Sequence: Synthetic oligonucleotide
caaccauuaagcagucugc

SEQ ID NO: 421016 - RNA, 19 nt, Artificial Sequence
  Description of Artificial Sequence: Synthetic oligonucleotide
aggacuaucaaccccuuau

SEQ ID NO: 421017 - RNA, 19 nt, Artificial Sequence
  Description of Artificial Sequence: Synthetic oligonucleotide
uaauaucgaaugaacucuc

SEQ ID NO: 421018 - RNA, 19 nt, Artificial Sequence
  Description of Artificial Sequence: Synthetic oligonucleotide
gcuacuacuggacaucagg

SEQ ID NO: 421019 - RNA, 19 nt, Artificial Sequence
  Description of Artificial Sequence: Synthetic oligonucleotide
gacaauagcugcucgaucu

SEQ ID NO: 421020 - RNA, 19 nt, Artificial Sequence
  Description of Artificial Sequence: Synthetic oligonucleotide
gaugccgacucuugagagg

SEQ ID NO: 421021 - RNA, 19 nt, Artificial Sequence
  Description of Artificial Sequence: Synthetic oligonucleotide
aacaugauacagaagugau

SEQ ID NO: 421022 - RNA, 19 nt, Artificial Sequence
  Description of Artificial Sequence: Synthetic oligonucleotide
ugggaugacaauguuauua

SEQ ID NO: 421023 - RNA, 19 nt, Artificial Sequence
  Description of Artificial Sequence: Synthetic oligonucleotide
agacauugggaugacaaug

SEQ ID NO: 421024 - RNA, 19 nt, Artificial Sequence
  Description of Artificial Sequence: Synthetic oligonucleotide
auucgauauuccaagucgg

SEQ ID NO: 421025 - RNA, 19 nt, Artificial Sequence
  Description of Artificial Sequence: Synthetic oligonucleotide
ugaugugauuauacaugag

SEQ ID NO: 421026 - RNA, 19 nt, Artificial Sequence
  Description of Artificial Sequence: Synthetic oligonucleotide
aucaaccccuuauuagcac

SEQ ID NO: 421027 - RNA, 19 nt, Artificial Sequence
  Description of Artificial Sequence: Synthetic oligonucleotide
auauggugcauuauuguug

SEQ ID NO: 421028 - RNA, 19 nt, Artificial Sequence
  Description of Artificial Sequence: Synthetic oligonucleotide
agggugaucaucuaacauu

SEQ ID NO: 421029 - RNA, 19 nt, Artificial Sequence
  Description of Artificial Sequence: Synthetic oligonucleotide
uaagcagucugccuauuau

SEQ ID NO: 421030 - RNA, 19 nt, Artificial Sequence
  Description of Artificial Sequence: Synthetic oligonucleotide
gugaugugauuauacauga

SEQ ID NO: 421031 - RNA, 19 nt, Artificial Sequence
  Description of Artificial Sequence: Synthetic oligonucleotide
uucgauauuccaagucgga

SEQ ID NO: 421032 - RNA, 19 nt, Artificial Sequence
  Description of Artificial Sequence: Synthetic oligonucleotide
uugcgaacagaaucaagac

SEQ ID NO: 421033 - RNA, 19 nt, Artificial Sequence
  Description of Artificial Sequence: Synthetic oligonucleotide
cagagaguggcuacuacug

SEQ ID NO: 421034 - RNA, 19 nt, Artificial Sequence
  Description of Artificial Sequence: Synthetic oligonucleotide
uguauggucugggaaaggu

SEQ ID NO: 421035 - RNA, 19 nt, Artificial Sequence
  Description of Artificial Sequence: Synthetic oligonucleotide
uaguccggccgucugauga

SEQ ID NO: 421036 - RNA, 19 nt, Artificial Sequence
  Description of Artificial Sequence: Synthetic oligonucleotide
agaugccgacucuugagag

SEQ ID NO: 421037 - RNA, 19 nt, Artificial Sequence
  Description of Artificial Sequence: Synthetic oligonucleotide
gcgaauucgauauuccaag

SEQ ID NO: 421038 - RNA, 19 nt, Artificial Sequence
  Description of Artificial Sequence: Synthetic oligonucleotide
uugcuggcgaauucgauau

SEQ ID NO: 421039 - RNA, 19 nt, Artificial Sequence
  Description of Artificial Sequence: Synthetic oligonucleotide
uauuccaagucggaaacau

SEQ ID NO: 421040 - RNA, 19 nt, Artificial Sequence
  Description of Artificial Sequence: Synthetic oligonucleotide
augccgacucuugagaggg

SEQ ID NO: 421041 - RNA, 19 nt, Artificial Sequence
  Description of Artificial Sequence: Synthetic oligonucleotide
uguuugcuggcgaauucga

SEQ ID NO: 421042 - RNA, 19 nt, Artificial Sequence
  Description of Artificial Sequence: Synthetic oligonucleotide
gaagugaugcuguguacuc

SEQ ID NO: 421043 - RNA, 19 nt, Artificial Sequence
  Description of Artificial Sequence: Synthetic oligonucleotide
cuauagaacaaagacagcu

SEQ ID NO: 421044 - RNA, 19 nt, Artificial Sequence
  Description of Artificial Sequence: Synthetic oligonucleotide
auguucgcugccauuacac

SEQ ID NO: 421045 - RNA, 19 nt, Artificial Sequence
  Description of Artificial Sequence: Synthetic oligonucleotide
ucuccacacgaguuguugc

SEQ ID NO: 421046 - RNA, 19 nt, Artificial Sequence
  Description of Artificial Sequence: Synthetic oligonucleotide
aguagcuugaacugcucau

SEQ ID NO: 421047 - RNA, 19 nt, Artificial Sequence
  Description of Artificial Sequence: Synthetic oligonucleotide
uuccuaguuuguaggggag

SEQ ID NO: 421048 - RNA, 19 nt, Artificial Sequence
  Description of Artificial Sequence: Synthetic oligonucleotide
cagaucugcguuucagggg

SEQ ID NO: 421049 - RNA, 19 nt, Artificial Sequence
  Description of Artificial Sequence: Synthetic oligonucleotide
acuuuaugcauagggauau

SEQ ID NO: 421050 - RNA, 19 nt, Artificial Sequence
  Description of Artificial Sequence: Synthetic oligonucleotide
acuagucugugcuuugcga

SEQ ID NO: 421051 - RNA, 19 nt, Artificial Sequence
  Description of Artificial Sequence: Synthetic oligonucleotide
guagugagucuguauaguc

SEQ ID NO: 421052 - RNA, 19 nt, Artificial Sequence
  Description of Artificial Sequence: Synthetic oligonucleotide
cuaaugggacuccuaggag

SEQ ID NO: 421053 - RNA, 19 nt, Artificial Sequence
  Description of Artificial Sequence: Synthetic oligonucleotide
uccaacuugugagcuagag

SEQ ID NO: 421054 - RNA, 19 nt, Artificial Sequence
  Description of Artificial Sequence: Synthetic oligonucleotide
uggugaguagcugucaagu

SEQ ID NO: 421055 - RNA, 19 nt, Artificial Sequence
  Description of Artificial Sequence: Synthetic oligonucleotide
ucuguuguauggucuggga

SEQ ID NO: 421056 - RNA, 19 nt, Artificial Sequence
  Description of Artificial Sequence: Synthetic oligonucleotide
guuguauggucugggaaag

SEQ ID NO: 421057 - RNA, 19 nt, Artificial Sequence
  Description of Artificial Sequence: Synthetic oligonucleotide
aauaucgaaugaacucucu

SEQ ID NO: 421058 - RNA, 19 nt, Artificial Sequence
  Description of Artificial Sequence: Synthetic oligonucleotide
acucuugagagggacaaca

SEQ ID NO: 421059 - RNA, 19 nt, Artificial Sequence
  Description of Artificial Sequence: Synthetic oligonucleotide
gagagggugaucaucuaac

SEQ ID NO: 421060 - RNA, 19 nt, Artificial Sequence
  Description of Artificial Sequence: Synthetic oligonucleotide
acauguucgcugccauuac

SEQ ID NO: 421061 - RNA, 19 nt, Artificial Sequence
  Description of Artificial Sequence: Synthetic oligonucleotide
aacuugucugucaauugga

SEQ ID NO: 421062 - RNA, 19 nt, Artificial Sequence
  Description of Artificial Sequence: Synthetic oligonucleotide
ugcaucagauagguccucg

SEQ ID NO: 421063 - RNA, 19 nt, Artificial Sequence
  Description of Artificial Sequence: Synthetic oligonucleotide
caagugucgcaaacugucc

SEQ ID NO: 421064 - RNA, 19 nt, Artificial Sequence
  Description of Artificial Sequence: Synthetic oligonucleotide
gaagaucaaccucucgcca

SEQ ID NO: 421065 - RNA, 19 nt, Artificial Sequence
  Description of Artificial Sequence: Synthetic oligonucleotide
aauaaguagugagucugua

SEQ ID NO: 421066 - RNA, 19 nt, Artificial Sequence
  Description of Artificial Sequence: Synthetic oligonucleotide
uggcgaauucgauauucca

SEQ ID NO: 421067 - RNA, 19 nt, Artificial Sequence
  Description of Artificial Sequence: Synthetic oligonucleotide
gaacuaagugaaaauaagu

SEQ ID NO: 421068 - RNA, 19 nt, Artificial Sequence
  Description of Artificial Sequence: Synthetic oligonucleotide
aagcagucugccuauuauu

SEQ ID NO: 421069 - RNA, 19 nt, Artificial Sequence
  Description of Artificial Sequence: Synthetic oligonucleotide
uacauguucgcugccauua

SEQ ID NO: 421070 - RNA, 19 nt, Artificial Sequence
  Description of Artificial Sequence: Synthetic oligonucleotide
ugaacugcucaugucugug

SEQ ID NO: 421071 - RNA, 19 nt, Artificial Sequence
  Description of Artificial Sequence: Synthetic oligonucleotide
aacagggucucuuccugaa

SEQ ID NO: 421072 - RNA, 19 nt, Artificial Sequence
  Description of Artificial Sequence: Synthetic oligonucleotide
cuggcgaauucgauauucc

SEQ ID NO: 421073 - RNA, 19 nt, Artificial Sequence
  Description of Artificial Sequence: Synthetic oligonucleotide
uugaccgugggagaauucu

SEQ ID NO: 421074 - RNA, 19 nt, Artificial Sequence
  Description of Artificial Sequence: Synthetic oligonucleotide
auagcugcucgaucugcag

SEQ ID NO: 421075 - RNA, 19 nt, Artificial Sequence
  Description of Artificial Sequence: Synthetic oligonucleotide
gacaugaaagaaacaugac

SEQ ID NO: 421076 - RNA, 19 nt, Artificial Sequence
  Description of Artificial Sequence: Synthetic oligonucleotide
uuaagcagucugccuauua

SEQ ID NO: 421077 - RNA, 19 nt, Artificial Sequence
  Description of Artificial Sequence: Synthetic oligonucleotide
agagggugaucaucuaaca

SEQ ID NO: 421078 - RNA, 19 nt, Artificial Sequence
  Description of Artificial Sequence: Synthetic oligonucleotide
acaauagcugcucgaucug

SEQ ID NO: 421079 - RNA, 19 nt, Artificial Sequence
  Description of Artificial Sequence: Synthetic oligonucleotide
cuacuacuggacaucagga

SEQ ID NO: 421080 - RNA, 19 nt, Artificial Sequence
  Description of Artificial Sequence: Synthetic oligonucleotide
agcacguaucuguuuauaa

SEQ ID NO: 421081 - RNA, 19 nt, Artificial Sequence
  Description of Artificial Sequence: Synthetic oligonucleotide
ugaccgugggagaauucug

SEQ ID NO: 421082 - RNA, 19 nt, Artificial Sequence
  Description of Artificial Sequence: Synthetic oligonucleotide
aucuaacauugggaagucc

SEQ ID NO: 421083 - RNA, 19 nt, Artificial Sequence
  Description of Artificial Sequence: Synthetic oligonucleotide
gucaaguagcuugaacugc

SEQ ID NO: 421084 - RNA, 19 nt, Artificial Sequence
  Description of Artificial Sequence: Synthetic oligonucleotide
gcuaaugggacuccuagga

SEQ ID NO: 421085 - RNA, 19 nt, Artificial Sequence
  Description of Artificial Sequence: Synthetic oligonucleotide
accaaaggaggaucuaaau

SEQ ID NO: 421086 - RNA, 19 nt, Artificial Sequence
  Description of Artificial Sequence: Synthetic oligonucleotide
ugacaauagcugcucgauc

SEQ ID NO: 421087 - RNA, 19 nt, Artificial Sequence
  Description of Artificial Sequence: Synthetic oligonucleotide
caacgggugucuucauugg

SEQ ID NO: 421088 - RNA, 19 nt, Artificial Sequence
  Description of Artificial Sequence: Synthetic oligonucleotide
gacuccuaggagauugacc

SEQ ID NO: 421089 - RNA, 19 nt, Artificial Sequence
  Description of Artificial Sequence: Synthetic oligonucleotide
uaucaaacgcagagauuuc

SEQ ID NO: 421090 - RNA, 19 nt, Artificial Sequence
  Description of Artificial Sequence: Synthetic oligonucleotide
cgugggagaauucugacag

SEQ ID NO: 421091 - RNA, 19 nt, Artificial Sequence
  Description of Artificial Sequence: Synthetic oligonucleotide
aguagugagucuguauagu

SEQ ID NO: 421092 - RNA, 19 nt, Artificial Sequence
  Description of Artificial Sequence: Synthetic oligonucleotide
gauauggugcauuauuguu

SEQ ID NO: 421093 - RNA, 19 nt, Artificial Sequence
  Description of Artificial Sequence: Synthetic oligonucleotide
agucuaagugacugucuga

SEQ ID NO: 421094 - RNA, 19 nt, Artificial Sequence
  Description of Artificial Sequence: Synthetic oligonucleotide
ccaaaccaaccaaaggagg

SEQ ID NO: 421095 - RNA, 19 nt, Artificial Sequence
  Description of Artificial Sequence: Synthetic oligonucleotide
cacuagucugugcuuugcg

SEQ ID NO: 421096 - RNA, 19 nt, Artificial Sequence
  Description of Artificial Sequence: Synthetic oligonucleotide
ucgauauuccaagucggaa

SEQ ID NO: 421097 - RNA, 19 nt, Artificial Sequence
  Description of Artificial Sequence: Synthetic oligonucleotide
cuguuuauaaauaucuguu

SEQ ID NO: 421098 - RNA, 19 nt, Artificial Sequence
  Description of Artificial Sequence: Synthetic oligonucleotide
cacgaguuguugcagcaac

SEQ ID NO: 421099 - RNA, 19 nt, Artificial Sequence
  Description of Artificial Sequence: Synthetic oligonucleotide
aucaaacgcagagauuucu

SEQ ID NO: 421100 - RNA, 19 nt, Artificial Sequence
  Description of Artificial Sequence: Synthetic oligonucleotide
gacuaucaaccccuuauua

SEQ ID NO: 421101 - RNA, 19 nt, Artificial Sequence
  Description of Artificial Sequence: Synthetic oligonucleotide
gcaacgggugucuucauug

SEQ ID NO: 421102 - RNA, 19 nt, Artificial Sequence
  Description of Artificial Sequence: Synthetic oligonucleotide
cagaggauaugcaggacca

SEQ ID NO: 421103 - RNA, 19 nt, Artificial Sequence
  Description of Artificial Sequence: Synthetic oligonucleotide
uggugcauuauuguuguuu

SEQ ID NO: 421104 - RNA, 19 nt, Artificial Sequence
  Description of Artificial Sequence: Synthetic oligonucleotide
caaacgcagagauuucuga

SEQ ID NO: 421105 - RNA, 19 nt, Artificial Sequence
  Description of Artificial Sequence: Synthetic oligonucleotide
gggugaucaucuaacauug

SEQ ID NO: 421106 - RNA, 19 nt, Artificial Sequence
  Description of Artificial Sequence: Synthetic oligonucleotide
ugugaacuacucagugaaa

SEQ ID NO: 421107 - RNA, 19 nt, Artificial Sequence
  Description of Artificial Sequence: Synthetic oligonucleotide
gauggugaguagcugucaa

SEQ ID NO: 421108 - RNA, 19 nt, Artificial Sequence
  Description of Artificial Sequence: Synthetic oligonucleotide
gacagagaguggcuacuac

SEQ ID NO: 421109 - RNA, 19 nt, Artificial Sequence
  Description of Artificial Sequence: Synthetic oligonucleotide
aaccaaaggaggaucuaaa

SEQ ID NO: 421110 - RNA, 19 nt, Artificial Sequence
  Description of Artificial Sequence: Synthetic oligonucleotide
ccaagugucgcaaacuguc

SEQ ID NO: 421111 - RNA, 19 nt, Artificial Sequence
  Description of Artificial Sequence: Synthetic oligonucleotide
aagugaaaauaagucuguu

SEQ ID NO: 421112 - RNA, 19 nt, Artificial Sequence
  Description of Artificial Sequence: Synthetic oligonucleotide
cuaguuuguaggggagagg

SEQ ID NO: 421113 - RNA, 19 nt, Artificial Sequence
  Description of Artificial Sequence: Synthetic oligonucleotide
gucgcaaacugucccgagc

SEQ ID NO: 421114 - RNA, 19 nt, Artificial Sequence
  Description of Artificial Sequence: Synthetic oligonucleotide
aaggaggaucuaaauuccu

SEQ ID NO: 421115 - RNA, 19 nt, Artificial Sequence
  Description of Artificial Sequence: Synthetic oligonucleotide
cucaauucuguucaucugu

SEQ ID NO: 421116 - RNA, 19 nt, Artificial Sequence
  Description of Artificial Sequence: Synthetic oligonucleotide
caacaggaggugagguggg

SEQ ID NO: 421117 - RNA, 19 nt, Artificial Sequence
  Description of Artificial Sequence: Synthetic oligonucleotide
gggcuaaugggacuccuag

SEQ ID NO: 421118 - RNA, 19 nt, Artificial Sequence
  Description of Artificial Sequence: Synthetic oligonucleotide
gggauauggugcauuauug

SEQ ID NO: 421119 - RNA, 19 nt, Artificial Sequence
  Description of Artificial Sequence: Synthetic oligonucleotide
ugucgcaaacugucccgag

SEQ ID NO: 421120 - RNA, 19 nt, Artificial Sequence
  Description of Artificial Sequence: Synthetic oligonucleotide
caaccucucgccagcuggg

SEQ ID NO: 421121 - RNA, 19 nt, Artificial Sequence
  Description of Artificial Sequence: Synthetic oligonucleotide
augccaauaaguagugagu

SEQ ID NO: 421122 - RNA, 19 nt, Artificial Sequence
  Description of Artificial Sequence: Synthetic oligonucleotide
uuguauggucugggaaagg

SEQ ID NO: 421123 - RNA, 19 nt, Artificial Sequence
  Description of Artificial Sequence: Synthetic oligonucleotide
cacacuugugguccacagc

SEQ ID NO: 421124 - RNA, 19 nt, Artificial Sequence
  Description of Artificial Sequence: Synthetic oligonucleotide
uuagcacguaucuguuuau

SEQ ID NO: 421125 - RNA, 19 nt, Artificial Sequence
  Description of Artificial Sequence: Synthetic oligonucleotide
gugaaaauuccagcauaug

SEQ ID NO: 421126 - RNA, 19 nt, Artificial Sequence
  Description of Artificial Sequence: Synthetic oligonucleotide
agggagagggugaucaucu

SEQ ID NO: 421127 - RNA, 19 nt, Artificial Sequence
  Description of Artificial Sequence: Synthetic oligonucleotide
ucacuagucugugcuuugc

SEQ ID NO: 421128 - RNA, 19 nt, Artificial Sequence
  Description of Artificial Sequence: Synthetic oligonucleotide
ggcuaaugggacuccuagg

SEQ ID NO: 421129 - RNA, 19 nt, Artificial Sequence
  Description of Artificial Sequence: Synthetic oligonucleotide
cacguaucuguuuauaaau

SEQ ID NO: 421130 - RNA, 19 nt, Artificial Sequence
  Description of Artificial Sequence: Synthetic oligonucleotide
acuguaagccagagggaag

SEQ ID NO: 421131 - RNA, 19 nt, Artificial Sequence
  Description of Artificial Sequence: Synthetic oligonucleotide
guauggucugggaaaggug

SEQ ID NO: 421132 - RNA, 19 nt, Artificial Sequence
  Description of Artificial Sequence: Synthetic oligonucleotide
ugcguuucagggguacaug

SEQ ID NO: 421133 - RNA, 19 nt, Artificial Sequence
  Description of Artificial Sequence: Synthetic oligonucleotide
uccuaguuuguaggggaga

SEQ ID NO: 421134 - RNA, 19 nt, Artificial Sequence
  Description of Artificial Sequence: Synthetic oligonucleotide
ggugcauuauuguuguuua

SEQ ID NO: 421135 - RNA, 19 nt, Artificial Sequence
  Description of Artificial Sequence: Synthetic oligonucleotide
gacuccccuucagagacug

SEQ ID NO: 421136 - RNA, 19 nt, Artificial Sequence
  Description of Artificial Sequence: Synthetic oligonucleotide
caacugugggguaguccgg

SEQ ID NO: 421137 - RNA, 19 nt, Artificial Sequence
  Description of Artificial Sequence: Synthetic oligonucleotide
ggccaagugucgcaaacug

SEQ ID NO: 421138 - RNA, 19 nt, Artificial Sequence
  Description of Artificial Sequence: Synthetic oligonucleotide
uugggcgcugagcugcaac

SEQ ID NO: 421139 - RNA, 19 nt, Artificial Sequence
  Description of Artificial Sequence: Synthetic oligonucleotide
gcuuuaaugccaauaagua

SEQ ID NO: 421140 - RNA, 19 nt, Artificial Sequence
  Description of Artificial Sequence: Synthetic oligonucleotide
ugucugucaauuggaggaa

SEQ ID NO: 421141 - RNA, 19 nt, Artificial Sequence
  Description of Artificial Sequence: Synthetic oligonucleotide
agcucgagucaguucuucu

SEQ ID NO: 421142 - RNA, 19 nt, Artificial Sequence
  Description of Artificial Sequence: Synthetic oligonucleotide
cccaugaucugucuucacc

SEQ ID NO: 421143 - RNA, 19 nt, Artificial Sequence
  Description of Artificial Sequence: Synthetic oligonucleotide
gaagagggagagucuaagu

SEQ ID NO: 421144 - RNA, 19 nt, Artificial Sequence
  Description of Artificial Sequence: Synthetic oligonucleotide
uggcuacuacuggacauca

SEQ ID NO: 421145 - RNA, 19 nt, Artificial Sequence
  Description of Artificial Sequence: Synthetic oligonucleotide
aaggacuaucaaccccuua

SEQ ID NO: 421146 - RNA, 19 nt, Artificial Sequence
  Description of Artificial Sequence: Synthetic oligonucleotide
cagagggaagguccgccgc

SEQ ID NO: 421147 - RNA, 19 nt, Artificial Sequence
  Description of Artificial Sequence: Synthetic oligonucleotide
caaguagcuugaacugcuc

SEQ ID NO: 421148 - RNA, 19 nt, Artificial Sequence
  Description of Artificial Sequence: Synthetic oligonucleotide
aggugaggugggugccacc

SEQ ID NO: 421149 - RNA, 19 nt, Artificial Sequence
  Description of Artificial Sequence: Synthetic oligonucleotide
auauuccaagucggaaaca

SEQ ID NO: 421150 - RNA, 19 nt, Artificial Sequence
  Description of Artificial Sequence: Synthetic oligonucleotide
cagcggcugacaauagcug

SEQ ID NO: 421151 - RNA, 19 nt, Artificial Sequence
  Description of Artificial Sequence: Synthetic oligonucleotide
uggagcaacgggugucuuc

SEQ ID NO: 421152 - RNA, 19 nt, Artificial Sequence
  Description of Artificial Sequence: Synthetic oligonucleotide
gucugauggggacaugaaa

SEQ ID NO: 421153 - RNA, 19 nt, Artificial Sequence
  Description of Artificial Sequence: Synthetic oligonucleotide
gucugucaauuggaggaag

SEQ ID NO: 421154 - RNA, 19 nt, Artificial Sequence
  Description of Artificial Sequence: Synthetic oligonucleotide
accccuuauuagcacguau

SEQ ID NO: 421155 - RNA, 19 nt, Artificial Sequence
  Description of Artificial Sequence: Synthetic oligonucleotide
ugccccgacgcuggggugg

SEQ ID NO: 421156 - RNA, 19 nt, Artificial Sequence
  Description of Artificial Sequence: Synthetic oligonucleotide
cacacgaguuguugcagca

SEQ ID NO: 421157 - RNA, 19 nt, Artificial Sequence
  Description of Artificial Sequence: Synthetic oligonucleotide
gaccgugggagaauucuga

SEQ ID NO: 421158 - RNA, 19 nt, Artificial Sequence
  Description of Artificial Sequence: Synthetic oligonucleotide
auuauacaugagacaggca

SEQ ID NO: 421159 - RNA, 19 nt, Artificial Sequence
  Description of Artificial Sequence: Synthetic oligonucleotide
cagaugccgacucuugaga

SEQ ID NO: 421160 - RNA, 19 nt, Artificial Sequence
  Description of Artificial Sequence: Synthetic oligonucleotide
gcaagggagagggugauca

SEQ ID NO: 421161 - RNA, 19 nt, Artificial Sequence
  Description of Artificial Sequence: Synthetic oligonucleotide
aucaaccucucgccagcug

SEQ ID NO: 421162 - RNA, 19 nt, Artificial Sequence
  Description of Artificial Sequence: Synthetic oligonucleotide
ccagaugccgacucuugag

SEQ ID NO: 421163 - RNA, 19 nt, Artificial Sequence
  Description of Artificial Sequence: Synthetic oligonucleotide
ccuaguuuguaggggagag

SEQ ID NO: 421164 - RNA, 19 nt, Artificial Sequence
  Description of Artificial Sequence: Synthetic oligonucleotide
cucagaacuaagugaaaau

SEQ ID NO: 421165 - RNA, 19 nt, Artificial Sequence
  Description of Artificial Sequence: Synthetic oligonucleotide
caucuaacauugggaaguc

SEQ ID NO: 421166 - RNA, 19 nt, Artificial Sequence
  Description of Artificial Sequence: Synthetic oligonucleotide
augagguggagagcugucu

SEQ ID NO: 421167 - RNA, 19 nt, Artificial Sequence
  Description of Artificial Sequence: Synthetic oligonucleotide
agcuacauguucgcugcca

SEQ ID NO: 421168 - RNA, 19 nt, Artificial Sequence
  Description of Artificial Sequence: Synthetic oligonucleotide
ccuaggagauugaccgugg

SEQ ID NO: 421169 - RNA, 19 nt, Artificial Sequence
  Description of Artificial Sequence: Synthetic oligonucleotide
ucugggcuaaugggacucc

SEQ ID NO: 421170 - RNA, 19 nt, Artificial Sequence
  Description of Artificial Sequence: Synthetic oligonucleotide
gagggugaucaucuaacau

SEQ ID NO: 421171 - RNA, 19 nt, Artificial Sequence
  Description of Artificial Sequence: Synthetic oligonucleotide
auugaccgugggagaauuc

SEQ ID NO: 421172 - RNA, 19 nt, Artificial Sequence
  Description of Artificial Sequence: Synthetic oligonucleotide
aucccaugaucugucuuca

SEQ ID NO: 421173 - RNA, 19 nt, Artificial Sequence
  Description of Artificial Sequence: Synthetic oligonucleotide
cccaaggacuaucaacccc

SEQ ID NO: 421174 - RNA, 19 nt, Artificial Sequence
  Description of Artificial Sequence: Synthetic oligonucleotide
cuuuaugcauagggauaug

SEQ ID NO: 421175 - RNA, 19 nt, Artificial Sequence
  Description of Artificial Sequence: Synthetic oligonucleotide
ggauauggugcauuauugu

SEQ ID NO: 421176 - RNA, 19 nt, Artificial Sequence
  Description of Artificial Sequence: Synthetic oligonucleotide
gcacguaucuguuuauaaa

SEQ ID NO: 421177 - RNA, 19 nt, Artificial Sequence
  Description of Artificial Sequence: Synthetic oligonucleotide
cuucaccucagaacuaagu

SEQ ID NO: 421178 - RNA, 19 nt, Artificial Sequence
  Description of Artificial Sequence: Synthetic oligonucleotide
cucccaugguuggacagac

SEQ ID NO: 421179 - RNA, 19 nt, Artificial Sequence
  Description of Artificial Sequence: Synthetic oligonucleotide
ggagcaacgggugucuuca

SEQ ID NO: 421180 - RNA, 19 nt, Artificial Sequence
  Description of Artificial Sequence: Synthetic oligonucleotide
cucugguguggagcaacgg

SEQ ID NO: 421181 - RNA, 19 nt, Artificial Sequence
  Description of Artificial Sequence: Synthetic oligonucleotide
gggaacaauggaaaccaca

SEQ ID NO: 421182 - RNA, 19 nt, Artificial Sequence
  Description of Artificial Sequence: Synthetic oligonucleotide
ccccuuauuagcacguauc

SEQ ID NO: 421183 - RNA, 19 nt, Artificial Sequence
  Description of Artificial Sequence: Synthetic oligonucleotide
ccaugguuggacagacugc

SEQ ID NO: 421184 - RNA, 19 nt, Artificial Sequence
  Description of Artificial Sequence: Synthetic oligonucleotide
aucuguuugcuggcgaauu

SEQ ID NO: 421185 - RNA, 19 nt, Artificial Sequence
  Description of Artificial Sequence: Synthetic oligonucleotide
gugaugcuucaacauccca

SEQ ID NO: 421186 - RNA, 19 nt, Artificial Sequence
  Description of Artificial Sequence: Synthetic oligonucleotide
ggugaucaucuaacauugg

SEQ ID NO: 421187 - RNA, 19 nt, Artificial Sequence
  Description of Artificial Sequence: Synthetic oligonucleotide
ggcggcaaaggcugcauca

SEQ ID NO: 421188 - RNA, 19 nt, Artificial Sequence
  Description of Artificial Sequence: Synthetic oligonucleotide
aggaggaucuaaauuccuu

SEQ ID NO: 421189 - RNA, 19 nt, Artificial Sequence
  Description of Artificial Sequence: Synthetic oligonucleotide
cacuaauguugaaaauugu

SEQ ID NO: 421190 - RNA, 19 nt, Artificial Sequence
  Description of Artificial Sequence: Synthetic oligonucleotide
agcaacgggugucuucauu

SEQ ID NO: 421191 - RNA, 19 nt, Artificial Sequence
  Description of Artificial Sequence: Synthetic oligonucleotide
gcacuuuaugcauagggau

SEQ ID NO: 421192 - RNA, 19 nt, Artificial Sequence
  Description of Artificial Sequence: Synthetic oligonucleotide
uagcacguaucuguuuaua

SEQ ID NO: 421193 - RNA, 19 nt, Artificial Sequence
  Description of Artificial Sequence: Synthetic oligonucleotide
gcuaggaccagacaguguu

SEQ ID NO: 421194 - RNA, 19 nt, Artificial Sequence
  Description of Artificial Sequence: Synthetic oligonucleotide
agucggaaacaugggccug

SEQ ID NO: 421195 - RNA, 19 nt, Artificial Sequence
  Description of Artificial Sequence: Synthetic oligonucleotide
ggcgaauucgauauuccaa

SEQ ID NO: 421196 - RNA, 19 nt, Artificial Sequence
  Description of Artificial Sequence: Synthetic oligonucleotide
uagucucaauucuguucau

SEQ ID NO: 421197 - RNA, 19 nt, Artificial Sequence
  Description of Artificial Sequence: Synthetic oligonucleotide
ggagagggugaucaucuaa

SEQ ID NO: 421198 - RNA, 19 nt, Artificial Sequence
  Description of Artificial Sequence: Synthetic oligonucleotide
gcuggcgaauucgauauuc

SEQ ID NO: 421199 - RNA, 19 nt, Artificial Sequence
  Description of Artificial Sequence: Synthetic oligonucleotide
ccuuauuagcacguaucug

SEQ ID NO: 421200 - RNA, 19 nt, Artificial Sequence
  Description of Artificial Sequence: Synthetic oligonucleotide
ggugcggcgagugcagcgg

SEQ ID NO: 421201 - RNA, 19 nt, Artificial Sequence
  Description of Artificial Sequence: Synthetic oligonucleotide
aguuuguaggggagaggga

SEQ ID NO: 421202 - RNA, 19 nt, Artificial Sequence
  Description of Artificial Sequence: Synthetic oligonucleotide
acgaguuguugcagcaaca

SEQ ID NO: 421203 - RNA, 19 nt, Artificial Sequence
  Description of Artificial Sequence: Synthetic oligonucleotide
gcauaugauguuugaauau

SEQ ID NO: 421204 - RNA, 19 nt, Artificial Sequence
  Description of Artificial Sequence: Synthetic oligonucleotide
cugaggugcggcgagugca

SEQ ID NO: 421205 - RNA, 19 nt, Artificial Sequence
  Description of Artificial Sequence: Synthetic oligonucleotide
aguccggccgucugaugau

SEQ ID NO: 421206 - RNA, 19 nt, Artificial Sequence
  Description of Artificial Sequence: Synthetic oligonucleotide
ucccaugguuggacagacu

SEQ ID NO: 421207 - RNA, 19 nt, Artificial Sequence
  Description of Artificial Sequence: Synthetic oligonucleotide
cugccugaggugcggcgag

SEQ ID NO: 421208 - RNA, 19 nt, Artificial Sequence
  Description of Artificial Sequence: Synthetic oligonucleotide
gacucuugagagggacaac

SEQ ID NO: 421209 - RNA, 19 nt, Artificial Sequence
  Description of Artificial Sequence: Synthetic oligonucleotide
agauugaccgugggagaau

SEQ ID NO: 421210 - RNA, 19 nt, Artificial Sequence
  Description of Artificial Sequence: Synthetic oligonucleotide
gugcggcgagugcagcggg

SEQ ID NO: 421211 - RNA, 19 nt, Artificial Sequence
  Description of Artificial Sequence: Synthetic oligonucleotide
gucggaaacaugggccuga

SEQ ID NO: 421212 - RNA, 19 nt, Artificial Sequence
  Description of Artificial Sequence: Synthetic oligonucleotide
guguggagcaacggguguc

SEQ ID NO: 421213 - RNA, 19 nt, Artificial Sequence
  Description of Artificial Sequence: Synthetic oligonucleotide
ggugaguagcugucaagua

SEQ ID NO: 421214 - RNA, 19 nt, Artificial Sequence
  Description of Artificial Sequence: Synthetic oligonucleotide
cgauauuccaagucggaaa

SEQ ID NO: 421215 - RNA, 19 nt, Artificial Sequence
  Description of Artificial Sequence: Synthetic oligonucleotide
aaccccuuauuagcacgua

SEQ ID NO: 421216 - RNA, 19 nt, Artificial Sequence
  Description of Artificial Sequence: Synthetic oligonucleotide
ugccgacucuugagaggga

SEQ ID NO: 421217 - RNA, 19 nt, Artificial Sequence
  Description of Artificial Sequence: Synthetic oligonucleotide
guaguccggccgucugaug

SEQ ID NO: 421218 - RNA, 19 nt, Artificial Sequence
  Description of Artificial Sequence: Synthetic oligonucleotide
acacgaguuguugcagcaa

SEQ ID NO: 421219 - RNA, 19 nt, Artificial Sequence
  Description of Artificial Sequence: Synthetic oligonucleotide
gccaauaaguagugagucu

SEQ ID NO: 421220 - RNA, 19 nt, Artificial Sequence
  Description of Artificial Sequence: Synthetic oligonucleotide
auuaagcagucugccuauu

SEQ ID NO: 421221 - RNA, 19 nt, Artificial Sequence
  Description of Artificial Sequence: Synthetic oligonucleotide
caaccccuuauuagcacgu

SEQ ID NO: 421222 - RNA, 19 nt, Artificial Sequence
  Description of Artificial Sequence: Synthetic oligonucleotide
gugucgcaaacugucccga

SEQ ID NO: 421223 - RNA, 19 nt, Artificial Sequence
  Description of Artificial Sequence: Synthetic oligonucleotide
gauugaccgugggagaauu

SEQ ID NO: 421224 - RNA, 19 nt, Artificial Sequence
  Description of Artificial Sequence: Synthetic oligonucleotide
aggcuaacaggagguuggu

SEQ ID NO: 421225 - RNA, 19 nt, Artificial Sequence
  Description of Artificial Sequence: Synthetic oligonucleotide
ugggguaguccggccgucu

SEQ ID NO: 421226 - RNA, 19 nt, Artificial Sequence
  Description of Artificial Sequence: Synthetic oligonucleotide
ugcuggcgaauucgauauu

SEQ ID NO: 421227 - RNA, 19 nt, Artificial Sequence
  Description of Artificial Sequence: Synthetic oligonucleotide
ccccuucagagacugaaga

SEQ ID NO: 421228 - RNA, 19 nt, Artificial Sequence
  Description of Artificial Sequence: Synthetic oligonucleotide
cugguccacccuaccccac

SEQ ID NO: 421229 - RNA, 19 nt, Artificial Sequence
  Description of Artificial Sequence: Synthetic oligonucleotide
gcggcaaaggcugcaucag

SEQ ID NO: 421230 - RNA, 19 nt, Artificial Sequence
  Description of Artificial Sequence: Synthetic oligonucleotide
ugcaagggagagggugauc

SEQ ID NO: 421231 - RNA, 19 nt, Artificial Sequence
  Description of Artificial Sequence: Synthetic oligonucleotide
agcuaggaccagacagugu

SEQ ID NO: 421232 - RNA, 19 nt, Artificial Sequence
  Description of Artificial Sequence: Synthetic oligonucleotide
ggagagucuaagugacugu

SEQ ID NO: 421233 - RNA, 19 nt, Artificial Sequence
  Description of Artificial Sequence: Synthetic oligonucleotide
ugccuccccaaggacuauc

SEQ ID NO: 421234 - RNA, 19 nt, Artificial Sequence
  Description of Artificial Sequence: Synthetic oligonucleotide
cagcucgagucaguucuuc

SEQ ID NO: 421235 - RNA, 19 nt, Artificial Sequence
  Description of Artificial Sequence: Synthetic oligonucleotide
ccagcggcugacaauagcu

SEQ ID NO: 421236 - RNA, 19 nt, Artificial Sequence
  Description of Artificial Sequence: Synthetic oligonucleotide
ggacuccuaggagauugac

SEQ ID NO: 421237 - RNA, 19 nt, Artificial Sequence
  Description of Artificial Sequence: Synthetic oligonucleotide
gggguaguccggccgucug

SEQ ID NO: 421238 - RNA, 19 nt, Artificial Sequence
  Description of Artificial Sequence: Synthetic oligonucleotide
guaagaccugcugccccga

SEQ ID NO: 421239 - RNA, 19 nt, Artificial Sequence
  Description of Artificial Sequence: Synthetic oligonucleotide
ggcuaacaggagguuggug

SEQ ID NO: 421240 - RNA, 19 nt, Artificial Sequence
  Description of Artificial Sequence: Synthetic oligonucleotide
cccuuauuagcacguaucu

SEQ ID NO: 421241 - RNA, 19 nt, Artificial Sequence
  Description of Artificial Sequence: Synthetic oligonucleotide
cccaacugugggguagucc

SEQ ID NO: 421242 - RNA, 19 nt, Artificial Sequence
  Description of Artificial Sequence: Synthetic oligonucleotide
ggacuguaagccagaggga

SEQ ID NO: 421243 - RNA, 19 nt, Artificial Sequence
  Description of Artificial Sequence: Synthetic oligonucleotide
uggcacacuugugguccac

SEQ ID NO: 421244 - RNA, 19 nt, Artificial Sequence
  Description of Artificial Sequence: Synthetic oligonucleotide
gggguuggcacugcccaac

SEQ ID NO: 421245 - RNA, 19 nt, Artificial Sequence
  Description of Artificial Sequence: Synthetic oligonucleotide
gcaacuguugcugccagau

SEQ ID NO: 421246 - RNA, 19 nt, Artificial Sequence
  Description of Artificial Sequence: Synthetic oligonucleotide
ggcuacuacuggacaucag

SEQ ID NO: 421247 - RNA, 19 nt, Artificial Sequence
  Description of Artificial Sequence: Synthetic oligonucleotide
gaucaaccucucgccagcu

SEQ ID NO: 421248 - RNA, 19 nt, Artificial Sequence
  Description of Artificial Sequence: Synthetic oligonucleotide
ccugaggugcggcgagugc

SEQ ID NO: 421249 - RNA, 19 nt, Artificial Sequence
  Description of Artificial Sequence: Synthetic oligonucleotide
cugacagagaguggcuacu

SEQ ID NO: 421250 - RNA, 19 nt, Artificial Sequence
  Description of Artificial Sequence: Synthetic oligonucleotide
ggacuaucaaccccuuauu

SEQ ID NO: 421251 - RNA, 19 nt, Artificial Sequence
  Description of Artificial Sequence: Synthetic oligonucleotide
ccgugggagaauucugaca

SEQ ID NO: 421252 - RNA, 19 nt, Artificial Sequence
  Description of Artificial Sequence: Synthetic oligonucleotide
gguguggagcaacgggugu

SEQ ID NO: 421253 - RNA, 19 nt, Artificial Sequence
  Description of Artificial Sequence: Synthetic oligonucleotide
gggguggcacacuuguggu

SEQ ID NO: 421254 - RNA, 19 nt, Artificial Sequence
  Description of Artificial Sequence: Synthetic oligonucleotide
ugccugaggugcggcgagu

SEQ ID NO: 421255 - RNA, 19 nt, Artificial Sequence
  Description of Artificial Sequence: Synthetic oligonucleotide
aguugggcgcugagcugca

SEQ ID NO: 421256 - RNA, 19 nt, Artificial Sequence
  Description of Artificial Sequence: Synthetic oligonucleotide
guuugcuggcgaauucgau

SEQ ID NO: 421257 - RNA, 19 nt, Artificial Sequence
  Description of Artificial Sequence: Synthetic oligonucleotide
gcagucugccuauuauuuu

SEQ ID NO: 421258 - RNA, 19 nt, Artificial Sequence
  Description of Artificial Sequence: Synthetic oligonucleotide
gccgucugaugaucuguaa

SEQ ID NO: 421259 - RNA, 19 nt, Artificial Sequence
  Description of Artificial Sequence: Synthetic oligonucleotide
ccgacucuugagagggaca

SEQ ID NO: 421260 - RNA, 19 nt, Artificial Sequence
  Description of Artificial Sequence: Synthetic oligonucleotide
gaucugcguuucaggggua

SEQ ID NO: 421261 - RNA, 19 nt, Artificial Sequence
  Description of Artificial Sequence: Synthetic oligonucleotide
acccuaccccacaggugca

SEQ ID NO: 421262 - RNA, 19 nt, Artificial Sequence
  Description of Artificial Sequence: Synthetic oligonucleotide
gggcggcaaaggcugcauc

SEQ ID NO: 421263 - RNA, 19 nt, Artificial Sequence
  Description of Artificial Sequence: Synthetic oligonucleotide
augggacuccuaggagauu

SEQ ID NO: 421264 - RNA, 19 nt, Artificial Sequence
  Description of Artificial Sequence: Synthetic oligonucleotide
cgaauucgauauuccaagu

SEQ ID NO: 421265 - RNA, 19 nt, Artificial Sequence
  Description of Artificial Sequence: Synthetic oligonucleotide
gccaagugucgcaaacugu

SEQ ID NO: 421266 - RNA, 19 nt, Artificial Sequence
  Description of Artificial Sequence: Synthetic oligonucleotide
gacgcugggguggcacacu

SEQ ID NO: 421267 - RNA, 19 nt, Artificial Sequence
  Description of Artificial Sequence: Synthetic oligonucleotide
gugggguaguccggccguc

SEQ ID NO: 421268 - RNA, 19 nt, Artificial Sequence
  Description of Artificial Sequence: Synthetic oligonucleotide
gggagagggugaucaucua

SEQ ID NO: 421269 - RNA, 19 nt, Artificial Sequence
  Description of Artificial Sequence: Synthetic oligonucleotide
ucucgccagcugggaguaa

SEQ ID NO: 421270 - RNA, 19 nt, Artificial Sequence
  Description of Artificial Sequence: Synthetic oligonucleotide
gagcaacgggugucuucau

SEQ ID NO: 421271 - RNA, 19 nt, Artificial Sequence
  Description of Artificial Sequence: Synthetic oligonucleotide
cggaaacaugggccugaag

SEQ ID NO: 421272 - RNA, 19 nt, Artificial Sequence
  Description of Artificial Sequence: Synthetic oligonucleotide
ggccgucugaugaucugua

SEQ ID NO: 421273 - RNA, 19 nt, Artificial Sequence
  Description of Artificial Sequence: Synthetic oligonucleotide
cccgacgcugggguggcac

SEQ ID NO: 421274 - RNA, 19 nt, Artificial Sequence
  Description of Artificial Sequence: Synthetic oligonucleotide
ccgagccacaggggugagg

SEQ ID NO: 421275 - RNA, 19 nt, Artificial Sequence
  Description of Artificial Sequence: Synthetic oligonucleotide
ccaaccaaaggaggaucua

SEQ ID NO: 421276 - RNA, 19 nt, Artificial Sequence
  Description of Artificial Sequence: Synthetic oligonucleotide
cugccagaugccgacucuu

SEQ ID NO: 421277 - RNA, 19 nt, Artificial Sequence
  Description of Artificial Sequence: Synthetic oligonucleotide
guugggcgcugagcugcaa

SEQ ID NO: 421278 - RNA, 19 nt, Artificial Sequence
  Description of Artificial Sequence: Synthetic oligonucleotide
ccgacgcugggguggcaca

SEQ ID NO: 421279 - RNA, 19 nt, Artificial Sequence
  Description of Artificial Sequence: Synthetic oligonucleotide
guccgccgcucccaugguu

SEQ ID NO: 421280 - RNA, 19 nt, Artificial Sequence
  Description of Artificial Sequence: Synthetic oligonucleotide
cgacgcugggguggcacac

SEQ ID NO: 421281 - RNA, 19 nt, Artificial Sequence
  Description of Artificial Sequence: Synthetic oligonucleotide
gccccgacgcugggguggc

SEQ ID NO: 421282 - RNA, 19 nt, Artificial Sequence
  Description of Artificial Sequence: Synthetic oligonucleotide
gcccaacugugggguaguc

SEQ ID NO: 421283 - RNA, 19 nt, Artificial Sequence
  Description of Artificial Sequence: Synthetic oligonucleotide
gcgggcugcuauguccugu

SEQ ID NO: 421284 - RNA, 19 nt, Artificial Sequence
  Description of Artificial Sequence: Synthetic oligonucleotide
ggacuccccuucagagacu

SEQ ID NO: 421285 - RNA, 19 nt, Artificial Sequence
  Description of Artificial Sequence: Synthetic oligonucleotide
gguccgccgcucccauggu

SEQ ID NO: 421286 - RNA, 19 nt, Artificial Sequence
  Description of Artificial Sequence: Synthetic oligonucleotide
cccgagccacaggggugag

SEQ ID NO: 421287 - RNA, 19 nt, Artificial Sequence
  Description of Artificial Sequence: Synthetic oligonucleotide
cggccgucugaugaucugu

SEQ ID NO: 421288 - RNA, 19 nt, Artificial Sequence
  Description of Artificial Sequence: Synthetic oligonucleotide
ccccgacgcugggguggca

SEQ ID NO: 421289 - RNA, 19 nt, Artificial Sequence
  Description of Artificial Sequence: Synthetic oligonucleotide
uuuuagguuagucucaugg

SEQ ID NO: 421290 - RNA, 19 nt, Artificial Sequence
  Description of Artificial Sequence: Synthetic oligonucleotide
uuuauagggaugcaguuag

SEQ ID NO: 421291 - RNA, 19 nt, Artificial Sequence
  Description of Artificial Sequence: Synthetic oligonucleotide
caucuuaacauccaaaggc

SEQ ID NO: 421292 - RNA, 19 nt, Artificial Sequence
  Description of Artificial Sequence: Synthetic oligonucleotide
auacgcgcugcauagaugc

SEQ ID NO: 421293 - RNA, 19 nt, Artificial Sequence
  Description of Artificial Sequence: Synthetic oligonucleotide
uaacgcugcagauagauca

SEQ ID NO: 421294 - RNA, 19 nt, Artificial Sequence
  Description of Artificial Sequence: Synthetic oligonucleotide
ugucguuucaugauuagcu

SEQ ID NO: 421295 - RNA, 19 nt, Artificial Sequence
  Description of Artificial Sequence: Synthetic oligonucleotide
acaacaauaguuuggucag

SEQ ID NO: 421296 - RNA, 19 nt, Artificial Sequence
  Description of Artificial Sequence: Synthetic oligonucleotide
acaguuagggcuugaagac

SEQ ID NO: 421297 - RNA, 19 nt, Artificial Sequence
  Description of Artificial Sequence: Synthetic oligonucleotide
aggauagacugccuaagcc

SEQ ID NO: 421298 - RNA, 19 nt, Artificial Sequence
  Description of Artificial Sequence: Synthetic oligonucleotide
uucguagugaccuaaagua

SEQ ID NO: 421299 - RNA, 19 nt, Artificial Sequence
  Description of Artificial Sequence: Synthetic oligonucleotide
cauguaacgcugcagauag

SEQ ID NO: 421300 - RNA, 19 nt, Artificial Sequence
  Description of Artificial Sequence: Synthetic oligonucleotide
ugaguaacacagcugagga

SEQ ID NO: 421301 - RNA, 19 nt, Artificial Sequence
  Description of Artificial Sequence: Synthetic oligonucleotide
ucaugauuagcucagugua

SEQ ID NO: 421302 - RNA, 19 nt, Artificial Sequence
  Description of Artificial Sequence: Synthetic oligonucleotide
aagaccuuauugcuuaagu

SEQ ID NO: 421303 - RNA, 19 nt, Artificial Sequence
  Description of Artificial Sequence: Synthetic oligonucleotide
uuucguagugaccuaaagu

SEQ ID NO: 421304 - RNA, 19 nt, Artificial Sequence
  Description of Artificial Sequence: Synthetic oligonucleotide
ugaagugggcuacaacagg

SEQ ID NO: 421305 - RNA, 19 nt, Artificial Sequence
  Description of Artificial Sequence: Synthetic oligonucleotide
caauauaagaugaggagca

SEQ ID NO: 421306 - RNA, 19 nt, Artificial Sequence
  Description of Artificial Sequence: Synthetic oligonucleotide
cacaacaauaguuugguca

SEQ ID NO: 421307 - RNA, 19 nt, Artificial Sequence
  Description of Artificial Sequence: Synthetic oligonucleotide
agugaccuaaaguaguucu

SEQ ID NO: 421308 - RNA, 19 nt, Artificial Sequence
  Description of Artificial Sequence: Synthetic oligonucleotide
uccuuaaccaagcccaccc

SEQ ID NO: 421309 - RNA, 19 nt, Artificial Sequence
  Description of Artificial Sequence: Synthetic oligonucleotide
aauaguuuggucagcucag

SEQ ID NO: 421310 - RNA, 19 nt, Artificial Sequence
  Description of Artificial Sequence: Synthetic oligonucleotide
uuaggcguuuccuuaacca

SEQ ID NO: 421311 - RNA, 19 nt, Artificial Sequence
  Description of Artificial Sequence: Synthetic oligonucleotide
uaggcuuaagccagggucc

SEQ ID NO: 421312 - RNA, 19 nt, Artificial Sequence
  Description of Artificial Sequence: Synthetic oligonucleotide
cuagggguaacgcucaccc

SEQ ID NO: 421313 - RNA, 19 nt, Artificial Sequence
  Description of Artificial Sequence: Synthetic oligonucleotide
acauccaaaggcuaacgug

SEQ ID NO: 421314 - RNA, 19 nt, Artificial Sequence
  Description of Artificial Sequence: Synthetic oligonucleotide
ucguagugaccuaaaguag

SEQ ID NO: 421315 - RNA, 19 nt, Artificial Sequence
  Description of Artificial Sequence: Synthetic oligonucleotide
ucgugagccauacuuuuag

SEQ ID NO: 421316 - RNA, 19 nt, Artificial Sequence
  Description of Artificial Sequence: Synthetic oligonucleotide
aacugggacacauccgaag

SEQ ID NO: 421317 - RNA, 19 nt, Artificial Sequence
  Description of Artificial Sequence: Synthetic oligonucleotide
cauaccagacccugggugg

SEQ ID NO: 421318 - RNA, 19 nt, Artificial Sequence
  Description of Artificial Sequence: Synthetic oligonucleotide
aacauccaaaggcuaacgu

SEQ ID NO: 421319 - RNA, 19 nt, Artificial Sequence
  Description of Artificial Sequence: Synthetic oligonucleotide
ucuagucaggucccuuucg

SEQ ID NO: 421320 - RNA, 19 nt, Artificial Sequence
  Description of Artificial Sequence: Synthetic oligonucleotide
guaggcuuaagccaggguc

SEQ ID NO: 421321 - RNA, 19 nt, Artificial Sequence
  Description of Artificial Sequence: Synthetic oligonucleotide
aauauaagaugaggagcag

SEQ ID NO: 421322 - RNA, 19 nt, Artificial Sequence
  Description of Artificial Sequence: Synthetic oligonucleotide
agucaggucccuuucguag

SEQ ID NO: 421323 - RNA, 19 nt, Artificial Sequence
  Description of Artificial Sequence: Synthetic oligonucleotide
ugauagugcaaauggugca

SEQ ID NO: 421324 - RNA, 19 nt, Artificial Sequence
  Description of Artificial Sequence: Synthetic oligonucleotide
agaacggcuggguaagagg

SEQ ID NO: 421325 - RNA, 19 nt, Artificial Sequence
  Description of Artificial Sequence: Synthetic oligonucleotide
ugaguuagcacagggguca

SEQ ID NO: 421326 - RNA, 19 nt, Artificial Sequence
  Description of Artificial Sequence: Synthetic oligonucleotide
agaugaagcaauauaagau

SEQ ID NO: 421327 - RNA, 19 nt, Artificial Sequence
  Description of Artificial Sequence: Synthetic oligonucleotide
uggugguugcaucuaaucu

SEQ ID NO: 421328 - RNA, 19 nt, Artificial Sequence
  Description of Artificial Sequence: Synthetic oligonucleotide
cacaguuagggcuugaaga

SEQ ID NO: 421329 - RNA, 19 nt, Artificial Sequence
  Description of Artificial Sequence: Synthetic oligonucleotide
gauagugcaaauggugcag

SEQ ID NO: 421330 - RNA, 19 nt, Artificial Sequence
  Description of Artificial Sequence: Synthetic oligonucleotide
aaggaaaccgagugcagaa

SEQ ID NO: 421331 - RNA, 19 nt, Artificial Sequence
  Description of Artificial Sequence: Synthetic oligonucleotide
cauuggguauagcauacgc

SEQ ID NO: 421332 - RNA, 19 nt, Artificial Sequence
  Description of Artificial Sequence: Synthetic oligonucleotide
agaaaugucagguccuuaa

SEQ ID NO: 421333 - RNA, 19 nt, Artificial Sequence
  Description of Artificial Sequence: Synthetic oligonucleotide
uguugaaugguuguaggaa

SEQ ID NO: 421334 - RNA, 19 nt, Artificial Sequence
  Description of Artificial Sequence: Synthetic oligonucleotide
aagaauaccuaggaucaga

SEQ ID NO: 421335 - RNA, 19 nt, Artificial Sequence
  Description of Artificial Sequence: Synthetic oligonucleotide
auagaugccagugcaagug

SEQ ID NO: 421336 - RNA, 19 nt, Artificial Sequence
  Description of Artificial Sequence: Synthetic oligonucleotide
cauccaaaggcuaacguga

SEQ ID NO: 421337 - RNA, 19 nt, Artificial Sequence
  Description of Artificial Sequence: Synthetic oligonucleotide
aagcccacccuuuaugccu

SEQ ID NO: 421338 - RNA, 19 nt, Artificial Sequence
  Description of Artificial Sequence: Synthetic oligonucleotide
auuggguauagcauacgcg

SEQ ID NO: 421339 - RNA, 19 nt, Artificial Sequence
  Description of Artificial Sequence: Synthetic oligonucleotide
agugcaagugcccacugca

SEQ ID NO: 421340 - RNA, 19 nt, Artificial Sequence
  Description of Artificial Sequence: Synthetic oligonucleotide
uccccaaagggucuaguca

SEQ ID NO: 421341 - RNA, 19 nt, Artificial Sequence
  Description of Artificial Sequence: Synthetic oligonucleotide
guuagucucauggaacuag

SEQ ID NO: 421342 - RNA, 19 nt, Artificial Sequence
  Description of Artificial Sequence: Synthetic oligonucleotide
guugcaucuaaucuacaca

SEQ ID NO: 421343 - RNA, 19 nt, Artificial Sequence
  Description of Artificial Sequence: Synthetic oligonucleotide
ucaaggauagacugccuaa

SEQ ID NO: 421344 - RNA, 19 nt, Artificial Sequence
  Description of Artificial Sequence: Synthetic oligonucleotide
gaugcaguuaggcguuucc

SEQ ID NO: 421345 - RNA, 19 nt, Artificial Sequence
  Description of Artificial Sequence: Synthetic oligonucleotide
uugcuuaaguaguuagaca

SEQ ID NO: 421346 - RNA, 19 nt, Artificial Sequence
  Description of Artificial Sequence: Synthetic oligonucleotide
aacgcucacccaucuuaac

SEQ ID NO: 421347 - RNA, 19 nt, Artificial Sequence
  Description of Artificial Sequence: Synthetic oligonucleotide
ccaccugaugcauagaagg

SEQ ID NO: 421348 - RNA, 19 nt, Artificial Sequence
  Description of Artificial Sequence: Synthetic oligonucleotide
ugagccauacuuuuagguu

SEQ ID NO: 421349 - RNA, 19 nt, Artificial Sequence
  Description of Artificial Sequence: Synthetic oligonucleotide
agguuagucucauggaacu

SEQ ID NO: 421350 - RNA, 19 nt, Artificial Sequence
  Description of Artificial Sequence: Synthetic oligonucleotide
uuauagggaugcaguuagg

SEQ ID NO: 421351 - RNA, 19 nt, Artificial Sequence
  Description of Artificial Sequence: Synthetic oligonucleotide
ugauaugcaagggcauggg

SEQ ID NO: 421352 - RNA, 19 nt, Artificial Sequence
  Description of Artificial Sequence: Synthetic oligonucleotide
caauccgagguucaggauc

SEQ ID NO: 421353 - RNA, 19 nt, Artificial Sequence
  Description of Artificial Sequence: Synthetic oligonucleotide
aguuaggcguuuccuuaac

SEQ ID NO: 421354 - RNA, 19 nt, Artificial Sequence
  Description of Artificial Sequence: Synthetic oligonucleotide
agugccuuagaggugaagu

SEQ ID NO: 421355 - RNA, 19 nt, Artificial Sequence
  Description of Artificial Sequence: Synthetic oligonucleotide
ucuuaacauccaaaggcua

SEQ ID NO: 421356 - RNA, 19 nt, Artificial Sequence
  Description of Artificial Sequence: Synthetic oligonucleotide
gugcaaauggugcagccug

SEQ ID NO: 421357 - RNA, 19 nt, Artificial Sequence
  Description of Artificial Sequence: Synthetic oligonucleotide
cuuucguagugaccuaaag

SEQ ID NO: 421358 - RNA, 19 nt, Artificial Sequence
  Description of Artificial Sequence: Synthetic oligonucleotide
aacgcugcagauagaucac

SEQ ID NO: 421359 - RNA, 19 nt, Artificial Sequence
  Description of Artificial Sequence: Synthetic oligonucleotide
uacaacagggccccugagu

SEQ ID NO: 421360 - RNA, 19 nt, Artificial Sequence
  Description of Artificial Sequence: Synthetic oligonucleotide
agacaagagugaggcaucc

SEQ ID NO: 421361 - RNA, 19 nt, Artificial Sequence
  Description of Artificial Sequence: Synthetic oligonucleotide
acaacagggccccugaguu

SEQ ID NO: 421362 - RNA, 19 nt, Artificial Sequence
  Description of Artificial Sequence: Synthetic oligonucleotide
agcgagccugucuuggacg

SEQ ID NO: 421363 - RNA, 19 nt, Artificial Sequence
  Description of Artificial Sequence: Synthetic oligonucleotide
gacggcuguaagcuggagc

SEQ ID NO: 421364 - RNA, 19 nt, Artificial Sequence
  Description of Artificial Sequence: Synthetic oligonucleotide
cuuuaugccuccuaggggu

SEQ ID NO: 421365 - RNA, 19 nt, Artificial Sequence
  Description of Artificial Sequence: Synthetic oligonucleotide
ugaccuaaaguaguucuuc

SEQ ID NO: 421366 - RNA, 19 nt, Artificial Sequence
  Description of Artificial Sequence: Synthetic oligonucleotide
auagcauacgcgcugcaua

SEQ ID NO: 421367 - RNA, 19 nt, Artificial Sequence
  Description of Artificial Sequence: Synthetic oligonucleotide
agugauaugcaagggcaug

SEQ ID NO: 421368 - RNA, 19 nt, Artificial Sequence
  Description of Artificial Sequence: Synthetic oligonucleotide
uccagaacggcuggguaag

SEQ ID NO: 421369 - RNA, 19 nt, Artificial Sequence
  Description of Artificial Sequence: Synthetic oligonucleotide
acguuugccaacccaccag

SEQ ID NO: 421370 - RNA, 19 nt, Artificial Sequence
  Description of Artificial Sequence: Synthetic oligonucleotide
gaccuaaaguaguucuuca

SEQ ID NO: 421371 - RNA, 19 nt, Artificial Sequence
  Description of Artificial Sequence: Synthetic oligonucleotide
auagccugccaggaauccc

SEQ ID NO: 421372 - RNA, 19 nt, Artificial Sequence
  Description of Artificial Sequence: Synthetic oligonucleotide
auuaucccuuauguggaag

SEQ ID NO: 421373 - RNA, 19 nt, Artificial Sequence
  Description of Artificial Sequence: Synthetic oligonucleotide
uaagaccuuauugcuuaag

SEQ ID NO: 421374 - RNA, 19 nt, Artificial Sequence
  Description of Artificial Sequence: Synthetic oligonucleotide
uaggcguuuccuuaaccaa

SEQ ID NO: 421375 - RNA, 19 nt, Artificial Sequence
  Description of Artificial Sequence: Synthetic oligonucleotide
cuaagugccuuagagguga

SEQ ID NO: 421376 - RNA, 19 nt, Artificial Sequence
  Description of Artificial Sequence: Synthetic oligonucleotide
gaaaccgagugcagaacug

SEQ ID NO: 421377 - RNA, 19 nt, Artificial Sequence
  Description of Artificial Sequence: Synthetic oligonucleotide
auaccuaggaucagaguca

SEQ ID NO: 421378 - RNA, 19 nt, Artificial Sequence
  Description of Artificial Sequence: Synthetic oligonucleotide
agaaggcgcacaacaauag

SEQ ID NO: 421379 - RNA, 19 nt, Artificial Sequence
  Description of Artificial Sequence: Synthetic oligonucleotide
ggaguguaggcuuaagcca

SEQ ID NO: 421380 - RNA, 19 nt, Artificial Sequence
  Description of Artificial Sequence: Synthetic oligonucleotide
aaggcgcacaacaauaguu

SEQ ID NO: 421381 - RNA, 19 nt, Artificial Sequence
  Description of Artificial Sequence: Synthetic oligonucleotide
caucuaaucuacacagcca

SEQ ID NO: 421382 - RNA, 19 nt, Artificial Sequence
  Description of Artificial Sequence: Synthetic oligonucleotide
cuaacgugaccuccuuagc

SEQ ID NO: 421383 - RNA, 19 nt, Artificial Sequence
  Description of Artificial Sequence: Synthetic oligonucleotide
accugauaggugcuggggu

SEQ ID NO: 421384 - RNA, 19 nt, Artificial Sequence
  Description of Artificial Sequence: Synthetic oligonucleotide
gugccuuagaggugaagug

SEQ ID NO: 421385 - RNA, 19 nt, Artificial Sequence
  Description of Artificial Sequence: Synthetic oligonucleotide
agugcuaagaauggugcau

SEQ ID NO: 421386 - RNA, 19 nt, Artificial Sequence
  Description of Artificial Sequence: Synthetic oligonucleotide
uaccuaggaucagagucag

SEQ ID NO: 421387 - RNA, 19 nt, Artificial Sequence
  Description of Artificial Sequence: Synthetic oligonucleotide
uagacugccuaagccuggg

SEQ ID NO: 421388 - RNA, 19 nt, Artificial Sequence
  Description of Artificial Sequence: Synthetic oligonucleotide
ugcaguuaggcguuuccuu

SEQ ID NO: 421389 - RNA, 19 nt, Artificial Sequence
  Description of Artificial Sequence: Synthetic oligonucleotide
ggagugauaugcaagggca

SEQ ID NO: 421390 - RNA, 19 nt, Artificial Sequence
  Description of Artificial Sequence: Synthetic oligonucleotide
ugaggcauccugcccuaca

SEQ ID NO: 421391 - RNA, 19 nt, Artificial Sequence
  Description of Artificial Sequence: Synthetic oligonucleotide
cuaaucuacacagccacaa

SEQ ID NO: 421392 - RNA, 19 nt, Artificial Sequence
  Description of Artificial Sequence: Synthetic oligonucleotide
uuccccaaagggucuaguc

SEQ ID NO: 421393 - RNA, 19 nt, Artificial Sequence
  Description of Artificial Sequence: Synthetic oligonucleotide
agggcugauagugcaaaug

SEQ ID NO: 421394 - RNA, 19 nt, Artificial Sequence
  Description of Artificial Sequence: Synthetic oligonucleotide
aaguaguuagacacugauu

SEQ ID NO: 421395 - RNA, 19 nt, Artificial Sequence
  Description of Artificial Sequence: Synthetic oligonucleotide
acucgugagccauacuuuu

SEQ ID NO: 421396 - RNA, 19 nt, Artificial Sequence
  Description of Artificial Sequence: Synthetic oligonucleotide
uauagcauacgcgcugcau

SEQ ID NO: 421397 - RNA, 19 nt, Artificial Sequence
  Description of Artificial Sequence: Synthetic oligonucleotide
aggcguuuccuuaaccaag

SEQ ID NO: 421398 - RNA, 19 nt, Artificial Sequence
  Description of Artificial Sequence: Synthetic oligonucleotide
ugaugcauagaaggcuccu

SEQ ID NO: 421399 - RNA, 19 nt, Artificial Sequence
  Description of Artificial Sequence: Synthetic oligonucleotide
ggugguugcaucuaaucua

SEQ ID NO: 421400 - RNA, 19 nt, Artificial Sequence
  Description of Artificial Sequence: Synthetic oligonucleotide
uuuaugccuccuaggggua

SEQ ID NO: 421401 - RNA, 19 nt, Artificial Sequence
  Description of Artificial Sequence: Synthetic oligonucleotide
gagugggcaaacuaauuau

SEQ ID NO: 421402 - RNA, 19 nt, Artificial Sequence
  Description of Artificial Sequence: Synthetic oligonucleotide
cauacgcgcugcauagaug

SEQ ID NO: 421403 - RNA, 19 nt, Artificial Sequence
  Description of Artificial Sequence: Synthetic oligonucleotide
cuacacucauggcccauac

SEQ ID NO: 421404 - RNA, 19 nt, Artificial Sequence
  Description of Artificial Sequence: Synthetic oligonucleotide
cuuaggggcuaccauagua

SEQ ID NO: 421405 - RNA, 19 nt, Artificial Sequence
  Description of Artificial Sequence: Synthetic oligonucleotide
gguggugugcccuggggcc

SEQ ID NO: 421406 - RNA, 19 nt, Artificial Sequence
  Description of Artificial Sequence: Synthetic oligonucleotide
cccugaacacuuuauuaag

SEQ ID NO: 421407 - RNA, 19 nt, Artificial Sequence
  Description of Artificial Sequence: Synthetic oligonucleotide
gucuuggacgggcuaggcc

SEQ ID NO: 421408 - RNA, 19 nt, Artificial Sequence
  Description of Artificial Sequence: Synthetic oligonucleotide
acacccugaacacuuuauu

SEQ ID NO: 421409 - RNA, 19 nt, Artificial Sequence
  Description of Artificial Sequence: Synthetic oligonucleotide
ggguauagcauacgcgcug

SEQ ID NO: 421410 - RNA, 19 nt, Artificial Sequence
  Description of Artificial Sequence: Synthetic oligonucleotide
gugagccauacuuuuaggu

SEQ ID NO: 421411 - RNA, 19 nt, Artificial Sequence
  Description of Artificial Sequence: Synthetic oligonucleotide
cagaaggcgcacaacaaua

SEQ ID NO: 421412 - RNA, 19 nt, Artificial Sequence
  Description of Artificial Sequence: Synthetic oligonucleotide
ccugaugcauagaaggcuc

SEQ ID NO: 421413 - RNA, 19 nt, Artificial Sequence
  Description of Artificial Sequence: Synthetic oligonucleotide
caccauacauggcagugga

SEQ ID NO: 421414 - RNA, 19 nt, Artificial Sequence
  Description of Artificial Sequence: Synthetic oligonucleotide
caaaggcuaacgugaccuc

SEQ ID NO: 421415 - RNA, 19 nt, Artificial Sequence
  Description of Artificial Sequence: Synthetic oligonucleotide
caggaaggucguucacagg

SEQ ID NO: 421416 - RNA, 19 nt, Artificial Sequence
  Description of Artificial Sequence: Synthetic oligonucleotide
aagugccuuagaggugaag

SEQ ID NO: 421417 - RNA, 19 nt, Artificial Sequence
  Description of Artificial Sequence: Synthetic oligonucleotide
cuuuauagggaugcaguua

SEQ ID NO: 421418 - RNA, 19 nt, Artificial Sequence
  Description of Artificial Sequence: Synthetic oligonucleotide
cacccugaacacuuuauua

SEQ ID NO: 421419 - RNA, 19 nt, Artificial Sequence
  Description of Artificial Sequence: Synthetic oligonucleotide
gaauggugcaugggcacca

SEQ ID NO: 421420 - RNA, 19 nt, Artificial Sequence
  Description of Artificial Sequence: Synthetic oligonucleotide
caacaauaguuuggucagc

SEQ ID NO: 421421 - RNA, 19 nt, Artificial Sequence
  Description of Artificial Sequence: Synthetic oligonucleotide
cucaaggauagacugccua

SEQ ID NO: 421422 - RNA, 19 nt, Artificial Sequence
  Description of Artificial Sequence: Synthetic oligonucleotide
cugauuagcuauaaauguu

SEQ ID NO: 421423 - RNA, 19 nt, Artificial Sequence
  Description of Artificial Sequence: Synthetic oligonucleotide
auagagcagggcugauagu

SEQ ID NO: 421424 - RNA, 19 nt, Artificial Sequence
  Description of Artificial Sequence: Synthetic oligonucleotide
aguaccuccuaagugccuu

SEQ ID NO: 421425 - RNA, 19 nt, Artificial Sequence
  Description of Artificial Sequence: Synthetic oligonucleotide
uacgcgcugcauagaugcc

SEQ ID NO: 421426 - RNA, 19 nt, Artificial Sequence
  Description of Artificial Sequence: Synthetic oligonucleotide
uaccuccuaagugccuuag

SEQ ID NO: 421427 - RNA, 19 nt, Artificial Sequence
  Description of Artificial Sequence: Synthetic oligonucleotide
uagucaggucccuuucgua

SEQ ID NO: 421428 - RNA, 19 nt, Artificial Sequence
  Description of Artificial Sequence: Synthetic oligonucleotide
cagaacggcuggguaagag

SEQ ID NO: 421429 - RNA, 19 nt, Artificial Sequence
  Description of Artificial Sequence: Synthetic oligonucleotide
auaguuuggucagcucagu

SEQ ID NO: 421430 - RNA, 19 nt, Artificial Sequence
  Description of Artificial Sequence: Synthetic oligonucleotide
gucuagucaggucccuuuc

SEQ ID NO: 421431 - RNA, 19 nt, Artificial Sequence
  Description of Artificial Sequence: Synthetic oligonucleotide
gggcaaacuaauuaucccu

SEQ ID NO: 421432 - RNA, 19 nt, Artificial Sequence
  Description of Artificial Sequence: Synthetic oligonucleotide
cuguguaguuagcaaggga

SEQ ID NO: 421433 - RNA, 19 nt, Artificial Sequence
  Description of Artificial Sequence: Synthetic oligonucleotide
augcaguuaggcguuuccu

SEQ ID NO: 421434 - RNA, 19 nt, Artificial Sequence
  Description of Artificial Sequence: Synthetic oligonucleotide
ugucuuggacgggcuaggc

SEQ ID NO: 421435 - RNA, 19 nt, Artificial Sequence
  Description of Artificial Sequence: Synthetic oligonucleotide
cugucuuggacgggcuagg

SEQ ID NO: 421436 - RNA, 19 nt, Artificial Sequence
  Description of Artificial Sequence: Synthetic oligonucleotide
cauccagagaaacccucca

SEQ ID NO: 421437 - RNA, 19 nt, Artificial Sequence
  Description of Artificial Sequence: Synthetic oligonucleotide
gaaggcgcacaacaauagu

SEQ ID NO: 421438 - RNA, 19 nt, Artificial Sequence
  Description of Artificial Sequence: Synthetic oligonucleotide
caagcacugcccauccaga

SEQ ID NO: 421439 - RNA, 19 nt, Artificial Sequence
  Description of Artificial Sequence: Synthetic oligonucleotide
gcgcacaacaauaguuugg

SEQ ID NO: 421440 - RNA, 19 nt, Artificial Sequence
  Description of Artificial Sequence: Synthetic oligonucleotide
ggcguuuccuuaaccaagc

SEQ ID NO: 421441 - RNA, 19 nt, Artificial Sequence
  Description of Artificial Sequence: Synthetic oligonucleotide
gcgagccugucuuggacgg

SEQ ID NO: 421442 - RNA, 19 nt, Artificial Sequence
  Description of Artificial Sequence: Synthetic oligonucleotide
gcugucguuucaugauuag

SEQ ID NO: 421443 - RNA, 19 nt, Artificial Sequence
  Description of Artificial Sequence: Synthetic oligonucleotide
cuacaacagggccccugag

SEQ ID NO: 421444 - RNA, 19 nt, Artificial Sequence
  Description of Artificial Sequence: Synthetic oligonucleotide
ucuacacucauggcccaua

SEQ ID NO: 421445 - RNA, 19 nt, Artificial Sequence
  Description of Artificial Sequence: Synthetic oligonucleotide
cagugcuaagaauggugca

SEQ ID NO: 421446 - RNA, 19 nt, Artificial Sequence
  Description of Artificial Sequence: Synthetic oligonucleotide
gggcuaccauaguacaagc

SEQ ID NO: 421447 - RNA, 19 nt, Artificial Sequence
  Description of Artificial Sequence: Synthetic oligonucleotide
gccuuaggggcuaccauag

SEQ ID NO: 421448 - RNA, 19 nt, Artificial Sequence
  Description of Artificial Sequence: Synthetic oligonucleotide
ccuuagcuuuucuuacaag

SEQ ID NO: 421449 - RNA, 19 nt, Artificial Sequence
  Description of Artificial Sequence: Synthetic oligonucleotide
cacauccgaaggaaaccga

SEQ ID NO: 421450 - RNA, 19 nt, Artificial Sequence
  Description of Artificial Sequence: Synthetic oligonucleotide
cagcgagccugucuuggac

SEQ ID NO: 421451 - RNA, 19 nt, Artificial Sequence
  Description of Artificial Sequence: Synthetic oligonucleotide
guaacgcugcagauagauc

SEQ ID NO: 421452 - RNA, 19 nt, Artificial Sequence
  Description of Artificial Sequence: Synthetic oligonucleotide
aauggugcaugggcaccau

SEQ ID NO: 421453 - RNA, 19 nt, Artificial Sequence
  Description of Artificial Sequence: Synthetic oligonucleotide
uuggacgggcuaggccugg

SEQ ID NO: 421454 - RNA, 19 nt, Artificial Sequence
  Description of Artificial Sequence: Synthetic oligonucleotide
agcccacccuuuaugccuc

SEQ ID NO: 421455 - RNA, 19 nt, Artificial Sequence
  Description of Artificial Sequence: Synthetic oligonucleotide
gcuacaacagggccccuga

SEQ ID NO: 421456 - RNA, 19 nt, Artificial Sequence
  Description of Artificial Sequence: Synthetic oligonucleotide
guuagggcuugaagacagc

SEQ ID NO: 421457 - RNA, 19 nt, Artificial Sequence
  Description of Artificial Sequence: Synthetic oligonucleotide
gacugccuaagccuggguu

SEQ ID NO: 421458 - RNA, 19 nt, Artificial Sequence
  Description of Artificial Sequence: Synthetic oligonucleotide
uccuagggguaacgcucac

SEQ ID NO: 421459 - RNA, 19 nt, Artificial Sequence
  Description of Artificial Sequence: Synthetic oligonucleotide
caguuaggcguuuccuuaa

SEQ ID NO: 421460 - RNA, 19 nt, Artificial Sequence
  Description of Artificial Sequence: Synthetic oligonucleotide
guacaccgaugacaagcca

SEQ ID NO: 421461 - RNA, 19 nt, Artificial Sequence
  Description of Artificial Sequence: Synthetic oligonucleotide
acccaucuuaacauccaaa

SEQ ID NO: 421462 - RNA, 19 nt, Artificial Sequence
  Description of Artificial Sequence: Synthetic oligonucleotide
ccugaguuagcacaggggu

SEQ ID NO: 421463 - RNA, 19 nt, Artificial Sequence
  Description of Artificial Sequence: Synthetic oligonucleotide
gucccagaggagugauaug

SEQ ID NO: 421464 - RNA, 19 nt, Artificial Sequence
  Description of Artificial Sequence: Synthetic oligonucleotide
ccuaaaguaguucuucagu

SEQ ID NO: 421465 - RNA, 19 nt, Artificial Sequence
  Description of Artificial Sequence: Synthetic oligonucleotide
gaggcgugugaugcugcug

SEQ ID NO: 421466 - RNA, 19 nt, Artificial Sequence
  Description of Artificial Sequence: Synthetic oligonucleotide
accuaggaucagagucagc

SEQ ID NO: 421467 - RNA, 19 nt, Artificial Sequence
  Description of Artificial Sequence: Synthetic oligonucleotide
aggcuuaagccagggucca

SEQ ID NO: 421468 - RNA, 19 nt, Artificial Sequence
  Description of Artificial Sequence: Synthetic oligonucleotide
caguuagggcuugaagaca

SEQ ID NO: 421469 - RNA, 19 nt, Artificial Sequence
  Description of Artificial Sequence: Synthetic oligonucleotide
ccauacuuuuagguuaguc

SEQ ID NO: 421470 - RNA, 19 nt, Artificial Sequence
  Description of Artificial Sequence: Synthetic oligonucleotide
ccccugaguuagcacaggg

SEQ ID NO: 421471 - RNA, 19 nt, Artificial Sequence
  Description of Artificial Sequence: Synthetic oligonucleotide
agacugccuaagccugggu

SEQ ID NO: 421472 - RNA, 19 nt, Artificial Sequence
  Description of Artificial Sequence: Synthetic oligonucleotide
acgggcuaggccuggcaua

SEQ ID NO: 421473 - RNA, 19 nt, Artificial Sequence
  Description of Artificial Sequence: Synthetic oligonucleotide
caaggccggguuccucaag

SEQ ID NO: 421474 - RNA, 19 nt, Artificial Sequence
  Description of Artificial Sequence: Synthetic oligonucleotide
uucuacacucauggcccau

SEQ ID NO: 421475 - RNA, 19 nt, Artificial Sequence
  Description of Artificial Sequence: Synthetic oligonucleotide
aaccccugacgugcagaga

SEQ ID NO: 421476 - RNA, 19 nt, Artificial Sequence
  Description of Artificial Sequence: Synthetic oligonucleotide
agggaugcaguuaggcguu

SEQ ID NO: 421477 - RNA, 19 nt, Artificial Sequence
  Description of Artificial Sequence: Synthetic oligonucleotide
ggggccacguuugccaacc

SEQ ID NO: 421478 - RNA, 19 nt, Artificial Sequence
  Description of Artificial Sequence: Synthetic oligonucleotide
ggguuccggcugcugacag

SEQ ID NO: 421479 - RNA, 19 nt, Artificial Sequence
  Description of Artificial Sequence: Synthetic oligonucleotide
ucccuuucguagugaccua

SEQ ID NO: 421480 - RNA, 19 nt, Artificial Sequence
  Description of Artificial Sequence: Synthetic oligonucleotide
agcauacgcgcugcauaga

SEQ ID NO: 421481 - RNA, 19 nt, Artificial Sequence
  Description of Artificial Sequence: Synthetic oligonucleotide
gagugauaugcaagggcau

SEQ ID NO: 421482 - RNA, 19 nt, Artificial Sequence
  Description of Artificial Sequence: Synthetic oligonucleotide
gcacaacaauaguuugguc

SEQ ID NO: 421483 - RNA, 19 nt, Artificial Sequence
  Description of Artificial Sequence: Synthetic oligonucleotide
gacgggcuaggccuggcau

SEQ ID NO: 421484 - RNA, 19 nt, Artificial Sequence
  Description of Artificial Sequence: Synthetic oligonucleotide
ggcuacaacagggccccug

SEQ ID NO: 421485 - RNA, 19 nt, Artificial Sequence
  Description of Artificial Sequence: Synthetic oligonucleotide
aggacaaggccggguuccu

SEQ ID NO: 421486 - RNA, 19 nt, Artificial Sequence
  Description of Artificial Sequence: Synthetic oligonucleotide
cguagugaccuaaaguagu

SEQ ID NO: 421487 - RNA, 19 nt, Artificial Sequence
  Description of Artificial Sequence: Synthetic oligonucleotide
guaccuccuaagugccuua

SEQ ID NO: 421488 - RNA, 19 nt, Artificial Sequence
  Description of Artificial Sequence: Synthetic oligonucleotide
ccuagggguaacgcucacc

SEQ ID NO: 421489 - RNA, 19 nt, Artificial Sequence
  Description of Artificial Sequence: Synthetic oligonucleotide
cacucgugagccauacuuu

SEQ ID NO: 421490 - RNA, 19 nt, Artificial Sequence
  Description of Artificial Sequence: Synthetic oligonucleotide
ggccacguuugccaaccca

SEQ ID NO: 421491 - RNA, 19 nt, Artificial Sequence
  Description of Artificial Sequence: Synthetic oligonucleotide
agggucuagucaggucccu

SEQ ID NO: 421492 - RNA, 19 nt, Artificial Sequence
  Description of Artificial Sequence: Synthetic oligonucleotide
ggcaaacuaauuaucccuu

SEQ ID NO: 421493 - RNA, 19 nt, Artificial Sequence
  Description of Artificial Sequence: Synthetic oligonucleotide
gguccagcgagccugucuu

SEQ ID NO: 421494 - RNA, 19 nt, Artificial Sequence
  Description of Artificial Sequence: Synthetic oligonucleotide
cagugccaaccccugacgu

SEQ ID NO: 421495 - RNA, 19 nt, Artificial Sequence
  Description of Artificial Sequence: Synthetic oligonucleotide
gcauacgcgcugcauagau

SEQ ID NO: 421496 - RNA, 19 nt, Artificial Sequence
  Description of Artificial Sequence: Synthetic oligonucleotide
gugaccuaaaguaguucuu

SEQ ID NO: 421497 - RNA, 19 nt, Artificial Sequence
  Description of Artificial Sequence: Synthetic oligonucleotide
cccuuauguggaagucaug

SEQ ID NO: 421498 - RNA, 19 nt, Artificial Sequence
  Description of Artificial Sequence: Synthetic oligonucleotide
auguaacgcugcagauaga

SEQ ID NO: 421499 - RNA, 19 nt, Artificial Sequence
  Description of Artificial Sequence: Synthetic oligonucleotide
ggcugauagugcaaauggu

SEQ ID NO: 421500 - RNA, 19 nt, Artificial Sequence
  Description of Artificial Sequence: Synthetic oligonucleotide
gguuagucucauggaacua

SEQ ID NO: 421501 - RNA, 19 nt, Artificial Sequence
  Description of Artificial Sequence: Synthetic oligonucleotide
gccggguuccucaaggaua

SEQ ID NO: 421502 - RNA, 19 nt, Artificial Sequence
  Description of Artificial Sequence: Synthetic oligonucleotide
ggaugcaguuaggcguuuc

SEQ ID NO: 421503 - RNA, 19 nt, Artificial Sequence
  Description of Artificial Sequence: Synthetic oligonucleotide
ccuuucguagugaccuaaa

SEQ ID NO: 421504 - RNA, 19 nt, Artificial Sequence
  Description of Artificial Sequence: Synthetic oligonucleotide
cagggccccugaguuagca

SEQ ID NO: 421505 - RNA, 19 nt, Artificial Sequence
  Description of Artificial Sequence: Synthetic oligonucleotide
gccaaccccugacgugcag

SEQ ID NO: 421506 - RNA, 19 nt, Artificial Sequence
  Description of Artificial Sequence: Synthetic oligonucleotide
ggcuaacgugaccuccuua

SEQ ID NO: 421507 - RNA, 19 nt, Artificial Sequence
  Description of Artificial Sequence: Synthetic oligonucleotide
caggucccuuucguaguga

SEQ ID NO: 421508 - RNA, 19 nt, Artificial Sequence
  Description of Artificial Sequence: Synthetic oligonucleotide
ggguccagcgagccugucu

SEQ ID NO: 421509 - RNA, 19 nt, Artificial Sequence
  Description of Artificial Sequence: Synthetic oligonucleotide
gggccacguuugccaaccc

SEQ ID NO: 421510 - RNA, 19 nt, Artificial Sequence
  Description of Artificial Sequence: Synthetic oligonucleotide
gccagagaugaagcaauau

SEQ ID NO: 421511 - RNA, 19 nt, Artificial Sequence
  Description of Artificial Sequence: Synthetic oligonucleotide
cgcucacccaucuuaacau

SEQ ID NO: 421512 - RNA, 19 nt, Artificial Sequence
  Description of Artificial Sequence: Synthetic oligonucleotide
ccaaccccugacgugcaga

SEQ ID NO: 421513 - RNA, 19 nt, Artificial Sequence
  Description of Artificial Sequence: Synthetic oligonucleotide
ccaaagggucuagucaggu

SEQ ID NO: 421514 - RNA, 19 nt, Artificial Sequence
  Description of Artificial Sequence: Synthetic oligonucleotide
cccuuucguagugaccuaa

SEQ ID NO: 421515 - RNA, 19 nt, Artificial Sequence
  Description of Artificial Sequence: Synthetic oligonucleotide
cgagccugucuuggacggg

SEQ ID NO: 421516 - RNA, 19 nt, Artificial Sequence
  Description of Artificial Sequence: Synthetic oligonucleotide
gccauacuuuuagguuagu

SEQ ID NO: 421517 - RNA, 19 nt, Artificial Sequence
  Description of Artificial Sequence: Synthetic oligonucleotide
ccgcugucguuucaugauu

SEQ ID NO: 421518 - RNA, 19 nt, Artificial Sequence
  Description of Artificial Sequence: Synthetic oligonucleotide
gggucuagucaggucccuu

SEQ ID NO: 421519 - RNA, 19 nt, Artificial Sequence
  Description of Artificial Sequence: Synthetic oligonucleotide
gggcuacaacagggccccu

SEQ ID NO: 421520 - RNA, 19 nt, Artificial Sequence
  Description of Artificial Sequence: Synthetic oligonucleotide
aacaguaugaaguaagugc

SEQ ID NO: 421521 - RNA, 19 nt, Artificial Sequence
  Description of Artificial Sequence: Synthetic oligonucleotide
auaguuuuaacccauaauc

SEQ ID NO: 421522 - RNA, 19 nt, Artificial Sequence
  Description of Artificial Sequence: Synthetic oligonucleotide
uuaaauuucucuaaugcag

SEQ ID NO: 421523 - RNA, 19 nt, Artificial Sequence
  Description of Artificial Sequence: Synthetic oligonucleotide
uacuaaaacaguaugaagu

SEQ ID NO: 421524 - RNA, 19 nt, Artificial Sequence
  Description of Artificial Sequence: Synthetic oligonucleotide
uguuauuugacuucuagcu

SEQ ID NO: 421525 - RNA, 19 nt, Artificial Sequence
  Description of Artificial Sequence: Synthetic oligonucleotide
acagauugaguguacaggc

SEQ ID NO: 421526 - RNA, 19 nt, Artificial Sequence
  Description of Artificial Sequence: Synthetic oligonucleotide
uuaacagagacucguaaag

SEQ ID NO: 421527 - RNA, 19 nt, Artificial Sequence
  Description of Artificial Sequence: Synthetic oligonucleotide
ucuaguaaccguuagacaa

SEQ ID NO: 421528 - RNA, 19 nt, Artificial Sequence
  Description of Artificial Sequence: Synthetic oligonucleotide
gaagauaaccuucugauuc

SEQ ID NO: 421529 - RNA, 19 nt, Artificial Sequence
  Description of Artificial Sequence: Synthetic oligonucleotide
agaguuaacagcaauaaag

SEQ ID NO: 421530 - RNA, 19 nt, Artificial Sequence
  Description of Artificial Sequence: Synthetic oligonucleotide
auaaccuucugauucaguc

SEQ ID NO: 421531 - RNA, 19 nt, Artificial Sequence
  Description of Artificial Sequence: Synthetic oligonucleotide
uaaugagugaaaaugugca

SEQ ID NO: 421532 - RNA, 19 nt, Artificial Sequence
  Description of Artificial Sequence: Synthetic oligonucleotide
gaugaagcagcucagggag

SEQ ID NO: 421533 - RNA, 19 nt, Artificial Sequence
  Description of Artificial Sequence: Synthetic oligonucleotide
agugucauuauacuaagca

SEQ ID NO: 421534 - RNA, 19 nt, Artificial Sequence
  Description of Artificial Sequence: Synthetic oligonucleotide
guuauggucagauaaugag

SEQ ID NO: 421535 - RNA, 19 nt, Artificial Sequence
  Description of Artificial Sequence: Synthetic oligonucleotide
aauacuacucauugaugag

SEQ ID NO: 421536 - RNA, 19 nt, Artificial Sequence
  Description of Artificial Sequence: Synthetic oligonucleotide
agugaaaaugugcagcuuc

SEQ ID NO: 421537 - RNA, 19 nt, Artificial Sequence
  Description of Artificial Sequence: Synthetic oligonucleotide
cauauugcuaauaguagcc

SEQ ID NO: 421538 - RNA, 19 nt, Artificial Sequence
  Description of Artificial Sequence: Synthetic oligonucleotide
aagaaugcggaccugagau

SEQ ID NO: 421539 - RNA, 19 nt, Artificial Sequence
  Description of Artificial Sequence: Synthetic oligonucleotide
uugcauuuaauuaaauccu

SEQ ID NO: 421540 - RNA, 19 nt, Artificial Sequence
  Description of Artificial Sequence: Synthetic oligonucleotide
uaguuuuaacccauaauca

SEQ ID NO: 421541 - RNA, 19 nt, Artificial Sequence
  Description of Artificial Sequence: Synthetic oligonucleotide
agaucuuugcuaaaagucc

SEQ ID NO: 421542 - RNA, 19 nt, Artificial Sequence
  Description of Artificial Sequence: Synthetic oligonucleotide
uugucguucaacuucaaga

SEQ ID NO: 421543 - RNA, 19 nt, Artificial Sequence
  Description of Artificial Sequence: Synthetic oligonucleotide
ucguucaacuucaagaucu

SEQ ID NO: 421544 - RNA, 19 nt, Artificial Sequence
  Description of Artificial Sequence: Synthetic oligonucleotide
uaaccguuagacaacagga

SEQ ID NO: 421545 - RNA, 19 nt, Artificial Sequence
  Description of Artificial Sequence: Synthetic oligonucleotide
uauaaggcugcccucauac

SEQ ID NO: 421546 - RNA, 19 nt, Artificial Sequence
  Description of Artificial Sequence: Synthetic oligonucleotide
ugcuaaaaguccuuuaaca

SEQ ID NO: 421547 - RNA, 19 nt, Artificial Sequence
  Description of Artificial Sequence: Synthetic oligonucleotide
uuuaagucaaaguuauggu

SEQ ID NO: 421548 - RNA, 19 nt, Artificial Sequence
  Description of Artificial Sequence: Synthetic oligonucleotide
uuugcuaaaaguccuuuaa

SEQ ID NO: 421549 - RNA, 19 nt, Artificial Sequence
  Description of Artificial Sequence: Synthetic oligonucleotide
aaagcauaaaauaucugcu

SEQ ID NO: 421550 - RNA, 19 nt, Artificial Sequence
  Description of Artificial Sequence: Synthetic oligonucleotide
ugugcaagagaugugaucu

SEQ ID NO: 421551 - RNA, 19 nt, Artificial Sequence
  Description of Artificial Sequence: Synthetic oligonucleotide
uucuuaaaggcauucuuca

SEQ ID NO: 421552 - RNA, 19 nt, Artificial Sequence
  Description of Artificial Sequence: Synthetic oligonucleotide
uuaagucaaaguuaugguc

SEQ ID NO: 421553 - RNA, 19 nt, Artificial Sequence
  Description of Artificial Sequence: Synthetic oligonucleotide
uuuagcuggucuuugaguc

SEQ ID NO: 421554 - RNA, 19 nt, Artificial Sequence
  Description of Artificial Sequence: Synthetic oligonucleotide
cauuauacuaagcacuuac

SEQ ID NO: 421555 - RNA, 19 nt, Artificial Sequence
  Description of Artificial Sequence: Synthetic oligonucleotide
ucuggauugggaacgacug

SEQ ID NO: 421556 - RNA, 19 nt, Artificial Sequence
  Description of Artificial Sequence: Synthetic oligonucleotide
guaaccguuagacaacagg

SEQ ID NO: 421557 - RNA, 19 nt, Artificial Sequence
  Description of Artificial Sequence: Synthetic oligonucleotide
augaauacuacucauugau

SEQ ID NO: 421558 - RNA, 19 nt, Artificial Sequence
  Description of Artificial Sequence: Synthetic oligonucleotide
ucugcauuugucccuauca

SEQ ID NO: 421559 - RNA, 19 nt, Artificial Sequence
  Description of Artificial Sequence: Synthetic oligonucleotide
uauucaacauggacgagca

SEQ ID NO: 421560 - RNA, 19 nt, Artificial Sequence
  Description of Artificial Sequence: Synthetic oligonucleotide
uugguuuacauaaagcaua

SEQ ID NO: 421561 - RNA, 19 nt, Artificial Sequence
  Description of Artificial Sequence: Synthetic oligonucleotide
uuggauaaggacuccaaca

SEQ ID NO: 421562 - RNA, 19 nt, Artificial Sequence
  Description of Artificial Sequence: Synthetic oligonucleotide
aagagccguacuuaaucac

SEQ ID NO: 421563 - RNA, 19 nt, Artificial Sequence
  Description of Artificial Sequence: Synthetic oligonucleotide
ucaagaguugguuuaaauc

SEQ ID NO: 421564 - RNA, 19 nt, Artificial Sequence
  Description of Artificial Sequence: Synthetic oligonucleotide
aacgacugcucugugaagg

SEQ ID NO: 421565 - RNA, 19 nt, Artificial Sequence
  Description of Artificial Sequence: Synthetic oligonucleotide
auuuuagggaaccaaucug

SEQ ID NO: 421566 - RNA, 19 nt, Artificial Sequence
  Description of Artificial Sequence: Synthetic oligonucleotide
aaccaaucugugcugauga

SEQ ID NO: 421567 - RNA, 19 nt, Artificial Sequence
  Description of Artificial Sequence: Synthetic oligonucleotide
uauaaaacuccccaacuuu

SEQ ID NO: 421568 - RNA, 19 nt, Artificial Sequence
  Description of Artificial Sequence: Synthetic oligonucleotide
acugaguuacgguuugucg

SEQ ID NO: 421569 - RNA, 19 nt, Artificial Sequence
  Description of Artificial Sequence: Synthetic oligonucleotide
gacagauugaguguacagg

SEQ ID NO: 421570 - RNA, 19 nt, Artificial Sequence
  Description of Artificial Sequence: Synthetic oligonucleotide
uuuaacagagacucguaaa

SEQ ID NO: 421571 - RNA, 19 nt, Artificial Sequence
  Description of Artificial Sequence: Synthetic oligonucleotide
auauugcuaauaguagccc

SEQ ID NO: 421572 - RNA, 19 nt, Artificial Sequence
  Description of Artificial Sequence: Synthetic oligonucleotide
ucacccaucuuugagagug

SEQ ID NO: 421573 - RNA, 19 nt, Artificial Sequence
  Description of Artificial Sequence: Synthetic oligonucleotide
ugaauacuacucauugaug

SEQ ID NO: 421574 - RNA, 19 nt, Artificial Sequence
  Description of Artificial Sequence: Synthetic oligonucleotide
uucaucggguacuaaaaca

SEQ ID NO: 421575 - RNA, 19 nt, Artificial Sequence
  Description of Artificial Sequence: Synthetic oligonucleotide
gcaguauucaacauggacg

SEQ ID NO: 421576 - RNA, 19 nt, Artificial Sequence
  Description of Artificial Sequence: Synthetic oligonucleotide
ugagguaauaaacauucuu

SEQ ID NO: 421577 - RNA, 19 nt, Artificial Sequence
  Description of Artificial Sequence: Synthetic oligonucleotide
ugguuuaaaucuucaaccu

SEQ ID NO: 421578 - RNA, 19 nt, Artificial Sequence
  Description of Artificial Sequence: Synthetic oligonucleotide
uaacauaggccucucgcug

SEQ ID NO: 421579 - RNA, 19 nt, Artificial Sequence
  Description of Artificial Sequence: Synthetic oligonucleotide
cagagacucguaaagaaug

SEQ ID NO: 421580 - RNA, 19 nt, Artificial Sequence
  Description of Artificial Sequence: Synthetic oligonucleotide
ucacugaucacccaucuuu

SEQ ID NO: 421581 - RNA, 19 nt, Artificial Sequence
  Description of Artificial Sequence: Synthetic oligonucleotide
accguuagacaacaggaag

SEQ ID NO: 421582 - RNA, 19 nt, Artificial Sequence
  Description of Artificial Sequence: Synthetic oligonucleotide
cauucuucaaacaaaaccu

SEQ ID NO: 421583 - RNA, 19 nt, Artificial Sequence
  Description of Artificial Sequence: Synthetic oligonucleotide
uuaacauaggccucucgcu

SEQ ID NO: 421584 - RNA, 19 nt, Artificial Sequence
  Description of Artificial Sequence: Synthetic oligonucleotide
aaacaguaugaaguaagug

SEQ ID NO: 421585 - RNA, 19 nt, Artificial Sequence
  Description of Artificial Sequence: Synthetic oligonucleotide
agugugaagugcuaguagu

SEQ ID NO: 421586 - RNA, 19 nt, Artificial Sequence
  Description of Artificial Sequence: Synthetic oligonucleotide
uaaagaaugcggaccugag

SEQ ID NO: 421587 - RNA, 19 nt, Artificial Sequence
  Description of Artificial Sequence: Synthetic oligonucleotide
uauugcuaauaguagccca

SEQ ID NO: 421588 - RNA, 19 nt, Artificial Sequence
  Description of Artificial Sequence: Synthetic oligonucleotide
uuuggauaaggacuccaac

SEQ ID NO: 421589 - RNA, 19 nt, Artificial Sequence
  Description of Artificial Sequence: Synthetic oligonucleotide
uuugucguucaacuucaag

SEQ ID NO: 421590 - RNA, 19 nt, Artificial Sequence
  Description of Artificial Sequence: Synthetic oligonucleotide
aguaugaaguaagugcuag

SEQ ID NO: 421591 - RNA, 19 nt, Artificial Sequence
  Description of Artificial Sequence: Synthetic oligonucleotide
acucguaaagaaugcggac

SEQ ID NO: 421592 - RNA, 19 nt, Artificial Sequence
  Description of Artificial Sequence: Synthetic oligonucleotide
ucguaaagaaugcggaccu

SEQ ID NO: 421593 - RNA, 19 nt, Artificial Sequence
  Description of Artificial Sequence: Synthetic oligonucleotide
uuugcaggcacgcucugug

SEQ ID NO: 421594 - RNA, 19 nt, Artificial Sequence
  Description of Artificial Sequence: Synthetic oligonucleotide
uccgacuuggagcugcuag

SEQ ID NO: 421595 - RNA, 19 nt, Artificial Sequence
  Description of Artificial Sequence: Synthetic oligonucleotide
uguucaucggguacuaaaa

SEQ ID NO: 421596 - RNA, 19 nt, Artificial Sequence
  Description of Artificial Sequence: Synthetic oligonucleotide
uacgguuugucguucaacu

SEQ ID NO: 421597 - RNA, 19 nt, Artificial Sequence
  Description of Artificial Sequence: Synthetic oligonucleotide
uucagaaagucuuuucguc

SEQ ID NO: 421598 - RNA, 19 nt, Artificial Sequence
  Description of Artificial Sequence: Synthetic oligonucleotide
uaagagccguacuuaauca

SEQ ID NO: 421599 - RNA, 19 nt, Artificial Sequence
  Description of Artificial Sequence: Synthetic oligonucleotide
gugggaguaaaguagcggc

SEQ ID NO: 421600 - RNA, 19 nt, Artificial Sequence
  Description of Artificial Sequence: Synthetic oligonucleotide
aaagaaugcggaccugaga

SEQ ID NO: 421601 - RNA, 19 nt, Artificial Sequence
  Description of Artificial Sequence: Synthetic oligonucleotide
ugacagauugaguguacag

SEQ ID NO: 421602 - RNA, 19 nt, Artificial Sequence
  Description of Artificial Sequence: Synthetic oligonucleotide
ugaucacccaucuuugaga

SEQ ID NO: 421603 - RNA, 19 nt, Artificial Sequence
  Description of Artificial Sequence: Synthetic oligonucleotide
ugugggaguaaaguagcgg

SEQ ID NO: 421604 - RNA, 19 nt, Artificial Sequence
  Description of Artificial Sequence: Synthetic oligonucleotide
guugggacauuccaccagg

SEQ ID NO: 421605 - RNA, 19 nt, Artificial Sequence
  Description of Artificial Sequence: Synthetic oligonucleotide
aacgcaacugaguuacggu

SEQ ID NO: 421606 - RNA, 19 nt, Artificial Sequence
  Description of Artificial Sequence: Synthetic oligonucleotide
uuagggaaccaaucugugc

SEQ ID NO: 421607 - RNA, 19 nt, Artificial Sequence
  Description of Artificial Sequence: Synthetic oligonucleotide
gacuucuagcuuuucggag

SEQ ID NO: 421608 - RNA, 19 nt, Artificial Sequence
  Description of Artificial Sequence: Synthetic oligonucleotide
ugucucuuuggauaaggac

SEQ ID NO: 421609 - RNA, 19 nt, Artificial Sequence
  Description of Artificial Sequence: Synthetic oligonucleotide
uucugaacgcaacugaguu

SEQ ID NO: 421610 - RNA, 19 nt, Artificial Sequence
  Description of Artificial Sequence: Synthetic oligonucleotide
ugcucgagcaaggaggagg

SEQ ID NO: 421611 - RNA, 19 nt, Artificial Sequence
  Description of Artificial Sequence: Synthetic oligonucleotide
agagccguacuuaaucacc

SEQ ID NO: 421612 - RNA, 19 nt, Artificial Sequence
  Description of Artificial Sequence: Synthetic oligonucleotide
auucucucacuguagccuc

SEQ ID NO: 421613 - RNA, 19 nt, Artificial Sequence
  Description of Artificial Sequence: Synthetic oligonucleotide
guaagagccguacuuaauc

SEQ ID NO: 421614 - RNA, 19 nt, Artificial Sequence
  Description of Artificial Sequence: Synthetic oligonucleotide
guguuauuugacuucuagc

SEQ ID NO: 421615 - RNA, 19 nt, Artificial Sequence
  Description of Artificial Sequence: Synthetic oligonucleotide
acuucuagcuuuucggagu

SEQ ID NO: 421616 - RNA, 19 nt, Artificial Sequence
  Description of Artificial Sequence: Synthetic oligonucleotide
ucgugcaguauucaacaug

SEQ ID NO: 421617 - RNA, 19 nt, Artificial Sequence
  Description of Artificial Sequence: Synthetic oligonucleotide
uuucguugagugcagcagu

SEQ ID NO: 421618 - RNA, 19 nt, Artificial Sequence
  Description of Artificial Sequence: Synthetic oligonucleotide
cuggucauacacaagccac

SEQ ID NO: 421619 - RNA, 19 nt, Artificial Sequence
  Description of Artificial Sequence: Synthetic oligonucleotide
guauucaacauggacgagc

SEQ ID NO: 421620 - RNA, 19 nt, Artificial Sequence
  Description of Artificial Sequence: Synthetic oligonucleotide
agagacucguaaagaaugc

SEQ ID NO: 421621 - RNA, 19 nt, Artificial Sequence
  Description of Artificial Sequence: Synthetic oligonucleotide
ucacuguagccucaugaug

SEQ ID NO: 421622 - RNA, 19 nt, Artificial Sequence
  Description of Artificial Sequence: Synthetic oligonucleotide
cugaacgcaacugaguuac

SEQ ID NO: 421623 - RNA, 19 nt, Artificial Sequence
  Description of Artificial Sequence: Synthetic oligonucleotide
ucauacaccauagugccaa

SEQ ID NO: 421624 - RNA, 19 nt, Artificial Sequence
  Description of Artificial Sequence: Synthetic oligonucleotide
cucguaaagaaugcggacc

SEQ ID NO: 421625 - RNA, 19 nt, Artificial Sequence
  Description of Artificial Sequence: Synthetic oligonucleotide
caguauucaacauggacga

SEQ ID NO: 421626 - RNA, 19 nt, Artificial Sequence
  Description of Artificial Sequence: Synthetic oligonucleotide
ucuaaugcaguguccgacu

SEQ ID NO: 421627 - RNA, 19 nt, Artificial Sequence
  Description of Artificial Sequence: Synthetic oligonucleotide
uaugaaguaagugcuaguu

SEQ ID NO: 421628 - RNA, 19 nt, Artificial Sequence
  Description of Artificial Sequence: Synthetic oligonucleotide
gaacgcaacugaguuacgg

SEQ ID NO: 421629 - RNA, 19 nt, Artificial Sequence
  Description of Artificial Sequence: Synthetic oligonucleotide
aagugucauuauacuaagc

SEQ ID NO: 421630 - RNA, 19 nt, Artificial Sequence
  Description of Artificial Sequence: Synthetic oligonucleotide
ucaaagucuagaguacaug

SEQ ID NO: 421631 - RNA, 19 nt, Artificial Sequence
  Description of Artificial Sequence: Synthetic oligonucleotide
gaagaguuaacagcaauaa

SEQ ID NO: 421632 - RNA, 19 nt, Artificial Sequence
  Description of Artificial Sequence: Synthetic oligonucleotide
uucgucauggcggacaacu

SEQ ID NO: 421633 - RNA, 19 nt, Artificial Sequence
  Description of Artificial Sequence: Synthetic oligonucleotide
ugcauuuaauuaaauccuu

SEQ ID NO: 421634 - RNA, 19 nt, Artificial Sequence
  Description of Artificial Sequence: Synthetic oligonucleotide
uuucaaagucuagaguaca

SEQ ID NO: 421635 - RNA, 19 nt, Artificial Sequence
  Description of Artificial Sequence: Synthetic oligonucleotide
agacucguaaagaaugcgg

SEQ ID NO: 421636 - RNA, 19 nt, Artificial Sequence
  Description of Artificial Sequence: Synthetic oligonucleotide
ugacuucuagcuuuucgga

SEQ ID NO: 421637 - RNA, 19 nt, Artificial Sequence
  Description of Artificial Sequence: Synthetic oligonucleotide
acuucgugcaguauucaac

SEQ ID NO: 421638 - RNA, 19 nt, Artificial Sequence
  Description of Artificial Sequence: Synthetic oligonucleotide
cuaguaaccguuagacaac

SEQ ID NO: 421639 - RNA, 19 nt, Artificial Sequence
  Description of Artificial Sequence: Synthetic oligonucleotide
ucaauaagccaaacagcuc

SEQ ID NO: 421640 - RNA, 19 nt, Artificial Sequence
  Description of Artificial Sequence: Synthetic oligonucleotide
uuguucaucggguacuaaa

SEQ ID NO: 421641 - RNA, 19 nt, Artificial Sequence
  Description of Artificial Sequence: Synthetic oligonucleotide
uccaacuguguuauuugac

SEQ ID NO: 421642 - RNA, 19 nt, Artificial Sequence
  Description of Artificial Sequence: Synthetic oligonucleotide
uucuaguaaccguuagaca

SEQ ID NO: 421643 - RNA, 19 nt, Artificial Sequence
  Description of Artificial Sequence: Synthetic oligonucleotide
gaucugugauucaaagugc

SEQ ID NO: 421644 - RNA, 19 nt, Artificial Sequence
  Description of Artificial Sequence: Synthetic oligonucleotide
gagacucguaaagaaugcg

SEQ ID NO: 421645 - RNA, 19 nt, Artificial Sequence
  Description of Artificial Sequence: Synthetic oligonucleotide
uacuacucauugaugaguu

SEQ ID NO: 421646 - RNA, 19 nt, Artificial Sequence
  Description of Artificial Sequence: Synthetic oligonucleotide
auugcuaauaguagcccag

SEQ ID NO: 421647 - RNA, 19 nt, Artificial Sequence
  Description of Artificial Sequence: Synthetic oligonucleotide
uucguugagugcagcagug

SEQ ID NO: 421648 - RNA, 19 nt, Artificial Sequence
  Description of Artificial Sequence: Synthetic oligonucleotide
gauaaggacuccaacaacu

SEQ ID NO: 421649 - RNA, 19 nt, Artificial Sequence
  Description of Artificial Sequence: Synthetic oligonucleotide
uucaaagucuagaguacau

SEQ ID NO: 421650 - RNA, 19 nt, Artificial Sequence
  Description of Artificial Sequence: Synthetic oligonucleotide
uuagcuggguacuguacac

SEQ ID NO: 421651 - RNA, 19 nt, Artificial Sequence
  Description of Artificial Sequence: Synthetic oligonucleotide
acgacugcucugugaaggc

SEQ ID NO: 421652 - RNA, 19 nt, Artificial Sequence
  Description of Artificial Sequence: Synthetic oligonucleotide
cauugaugaguugaagcag

SEQ ID NO: 421653 - RNA, 19 nt, Artificial Sequence
  Description of Artificial Sequence: Synthetic oligonucleotide
cgugcaguauucaacaugg

SEQ ID NO: 421654 - RNA, 19 nt, Artificial Sequence
  Description of Artificial Sequence: Synthetic oligonucleotide
cuucgugcaguauucaaca

SEQ ID NO: 421655 - RNA, 19 nt, Artificial Sequence
  Description of Artificial Sequence: Synthetic oligonucleotide
cugaucacccaucuuugag

SEQ ID NO: 421656 - RNA, 19 nt, Artificial Sequence
  Description of Artificial Sequence: Synthetic oligonucleotide
agauaucaaacuggaagug

SEQ ID NO: 421657 - RNA, 19 nt, Artificial Sequence
  Description of Artificial Sequence: Synthetic oligonucleotide
ugguucugcuacuucgugc

SEQ ID NO: 421658 - RNA, 19 nt, Artificial Sequence
  Description of Artificial Sequence: Synthetic oligonucleotide
aucucgauguucauuagcu

SEQ ID NO: 421659 - RNA, 19 nt, Artificial Sequence
  Description of Artificial Sequence: Synthetic oligonucleotide
agcauguuagaaaauuuga

SEQ ID NO: 421660 - RNA, 19 nt, Artificial Sequence
  Description of Artificial Sequence: Synthetic oligonucleotide
ucggguacuaaaacaguau

SEQ ID NO: 421661 - RNA, 19 nt, Artificial Sequence
  Description of Artificial Sequence: Synthetic oligonucleotide
agauugaguguacaggcuu

SEQ ID NO: 421662 - RNA, 19 nt, Artificial Sequence
  Description of Artificial Sequence: Synthetic oligonucleotide
uuccaacuguguuauuuga

SEQ ID NO: 421663 - RNA, 19 nt, Artificial Sequence
  Description of Artificial Sequence: Synthetic oligonucleotide
uugcuaauaguagcccagg

SEQ ID NO: 421664 - RNA, 19 nt, Artificial Sequence
  Description of Artificial Sequence: Synthetic oligonucleotide
gcaauaaaguuauaaaacu

SEQ ID NO: 421665 - RNA, 19 nt, Artificial Sequence
  Description of Artificial Sequence: Synthetic oligonucleotide
cuuuaacauaggccucucg

SEQ ID NO: 421666 - RNA, 19 nt, Artificial Sequence
  Description of Artificial Sequence: Synthetic oligonucleotide
ugcuacuucgugcaguauu

SEQ ID NO: 421667 - RNA, 19 nt, Artificial Sequence
  Description of Artificial Sequence: Synthetic oligonucleotide
uaauaguagcccagguuua

SEQ ID NO: 421668 - RNA, 19 nt, Artificial Sequence
  Description of Artificial Sequence: Synthetic oligonucleotide
auacuacucauugaugagu

SEQ ID NO: 421669 - RNA, 19 nt, Artificial Sequence
  Description of Artificial Sequence: Synthetic oligonucleotide
ugggaguaaaguagcggcu

SEQ ID NO: 421670 - RNA, 19 nt, Artificial Sequence
  Description of Artificial Sequence: Synthetic oligonucleotide
agcuguaucuugccuuuag

SEQ ID NO: 421671 - RNA, 19 nt, Artificial Sequence
  Description of Artificial Sequence: Synthetic oligonucleotide
gaagugcuaguagucuggg

SEQ ID NO: 421672 - RNA, 19 nt, Artificial Sequence
  Description of Artificial Sequence: Synthetic oligonucleotide
uaaugcaguguccgacuug

SEQ ID NO: 421673 - RNA, 19 nt, Artificial Sequence
  Description of Artificial Sequence: Synthetic oligonucleotide
uggucagauaaugagugaa

SEQ ID NO: 421674 - RNA, 19 nt, Artificial Sequence
  Description of Artificial Sequence: Synthetic oligonucleotide
cugcauuugucccuaucag

SEQ ID NO: 421675 - RNA, 19 nt, Artificial Sequence
  Description of Artificial Sequence: Synthetic oligonucleotide
ccagggacguuuuaaaggc

SEQ ID NO: 421676 - RNA, 19 nt, Artificial Sequence
  Description of Artificial Sequence: Synthetic oligonucleotide
uguggaccuuuucuguaca

SEQ ID NO: 421677 - RNA, 19 nt, Artificial Sequence
  Description of Artificial Sequence: Synthetic oligonucleotide
ugcuaauaguagcccaggu

SEQ ID NO: 421678 - RNA, 19 nt, Artificial Sequence
  Description of Artificial Sequence: Synthetic oligonucleotide
agggcagacagggaguuuc

SEQ ID NO: 421679 - RNA, 19 nt, Artificial Sequence
  Description of Artificial Sequence: Synthetic oligonucleotide
caccauagugccaagggca

SEQ ID NO: 421680 - RNA, 19 nt, Artificial Sequence
  Description of Artificial Sequence: Synthetic oligonucleotide
aaacuccccaacuuuucua

SEQ ID NO: 421681 - RNA, 19 nt, Artificial Sequence
  Description of Artificial Sequence: Synthetic oligonucleotide
ugugacagauugaguguac

SEQ ID NO: 421682 - RNA, 19 nt, Artificial Sequence
  Description of Artificial Sequence: Synthetic oligonucleotide
auuauacuaagcacuuaca

SEQ ID NO: 421683 - RNA, 19 nt, Artificial Sequence
  Description of Artificial Sequence: Synthetic oligonucleotide
cuaauaguagcccagguuu

SEQ ID NO: 421684 - RNA, 19 nt, Artificial Sequence
  Description of Artificial Sequence: Synthetic oligonucleotide
gguauugcuaccaaggaaa

SEQ ID NO: 421685 - RNA, 19 nt, Artificial Sequence
  Description of Artificial Sequence: Synthetic oligonucleotide
gacucguaaagaaugcgga

SEQ ID NO: 421686 - RNA, 19 nt, Artificial Sequence
  Description of Artificial Sequence: Synthetic oligonucleotide
ugcggaccugagauaagag

SEQ ID NO: 421687 - RNA, 19 nt, Artificial Sequence
  Description of Artificial Sequence: Synthetic oligonucleotide
auuaaauccuugggacuuc

SEQ ID NO: 421688 - RNA, 19 nt, Artificial Sequence
  Description of Artificial Sequence: Synthetic oligonucleotide
ugaguuacgguuugucguu

SEQ ID NO: 421689 - RNA, 19 nt, Artificial Sequence
  Description of Artificial Sequence: Synthetic oligonucleotide
cauguagcugcuucaagga

SEQ ID NO: 421690 - RNA, 19 nt, Artificial Sequence
  Description of Artificial Sequence: Synthetic oligonucleotide
ucuuuggauaaggacucca

SEQ ID NO: 421691 - RNA, 19 nt, Artificial Sequence
  Description of Artificial Sequence: Synthetic oligonucleotide
aauaguagcccagguuuaa

SEQ ID NO: 421692 - RNA, 19 nt, Artificial Sequence
  Description of Artificial Sequence: Synthetic oligonucleotide
agguauugcuaccaaggaa

SEQ ID NO: 421693 - RNA, 19 nt, Artificial Sequence
  Description of Artificial Sequence: Synthetic oligonucleotide
uuccgcugugaacucaaga

SEQ ID NO: 421694 - RNA, 19 nt, Artificial Sequence
  Description of Artificial Sequence: Synthetic oligonucleotide
uacaguuggugcugcauau

SEQ ID NO: 421695 - RNA, 19 nt, Artificial Sequence
  Description of Artificial Sequence: Synthetic oligonucleotide
ugcaagagaugugaucugu

SEQ ID NO: 421696 - RNA, 19 nt, Artificial Sequence
  Description of Artificial Sequence: Synthetic oligonucleotide
agguuuaagcauguuagaa

SEQ ID NO: 421697 - RNA, 19 nt, Artificial Sequence
  Description of Artificial Sequence: Synthetic oligonucleotide
gauaagaguucuucagacu

SEQ ID NO: 421698 - RNA, 19 nt, Artificial Sequence
  Description of Artificial Sequence: Synthetic oligonucleotide
cagugugaagugcuaguag

SEQ ID NO: 421699 - RNA, 19 nt, Artificial Sequence
  Description of Artificial Sequence: Synthetic oligonucleotide
aaaguagcggcuguuucuu

SEQ ID NO: 421700 - RNA, 19 nt, Artificial Sequence
  Description of Artificial Sequence: Synthetic oligonucleotide
auaaggacuccaacaacug

SEQ ID NO: 421701 - RNA, 19 nt, Artificial Sequence
  Description of Artificial Sequence: Synthetic oligonucleotide
ucugcuacuucgugcagua

SEQ ID NO: 421702 - RNA, 19 nt, Artificial Sequence
  Description of Artificial Sequence: Synthetic oligonucleotide
cauuagcuggguacuguac

SEQ ID NO: 421703 - RNA, 19 nt, Artificial Sequence
  Description of Artificial Sequence: Synthetic oligonucleotide
gguuuaagcauguuagaaa

SEQ ID NO: 421704 - RNA, 19 nt, Artificial Sequence
  Description of Artificial Sequence: Synthetic oligonucleotide
uugauccccacuugcauuu

SEQ ID NO: 421705 - RNA, 19 nt, Artificial Sequence
  Description of Artificial Sequence: Synthetic oligonucleotide
gcaguguccgacuuggagc

SEQ ID NO: 421706 - RNA, 19 nt, Artificial Sequence
  Description of Artificial Sequence: Synthetic oligonucleotide
cugugggaguaaaguagcg

SEQ ID NO: 421707 - RNA, 19 nt, Artificial Sequence
  Description of Artificial Sequence: Synthetic oligonucleotide
gaaugcggaccugagauaa

SEQ ID NO: 421708 - RNA, 19 nt, Artificial Sequence
  Description of Artificial Sequence: Synthetic oligonucleotide
uaguaaccguuagacaaca

SEQ ID NO: 421709 - RNA, 19 nt, Artificial Sequence
  Description of Artificial Sequence: Synthetic oligonucleotide
uuguuaaaguuuuguucau

SEQ ID NO: 421710 - RNA, 19 nt, Artificial Sequence
  Description of Artificial Sequence: Synthetic oligonucleotide
gaaccaaucugugcugaug

SEQ ID NO: 421711 - RNA, 19 nt, Artificial Sequence
  Description of Artificial Sequence: Synthetic oligonucleotide
accugcauugugcuuagaa

SEQ ID NO: 421712 - RNA, 19 nt, Artificial Sequence
  Description of Artificial Sequence: Synthetic oligonucleotide
guaaagaaugcggaccuga

SEQ ID NO: 421713 - RNA, 19 nt, Artificial Sequence
  Description of Artificial Sequence: Synthetic oligonucleotide
cauaaucaauaagccaaac

SEQ ID NO: 421714 - RNA, 19 nt, Artificial Sequence
  Description of Artificial Sequence: Synthetic oligonucleotide
ucuagaguacaugccugca

SEQ ID NO: 421715 - RNA, 19 nt, Artificial Sequence
  Description of Artificial Sequence: Synthetic oligonucleotide
ggaagugucauuauacuaa

SEQ ID NO: 421716 - RNA, 19 nt, Artificial Sequence
  Description of Artificial Sequence: Synthetic oligonucleotide
gguuuaaaucuucaaccuc

SEQ ID NO: 421717 - RNA, 19 nt, Artificial Sequence
  Description of Artificial Sequence: Synthetic oligonucleotide
ucucuaaugcaguguccga

SEQ ID NO: 421718 - RNA, 19 nt, Artificial Sequence
  Description of Artificial Sequence: Synthetic oligonucleotide
cucuaaugcaguguccgac

SEQ ID NO: 421719 - RNA, 19 nt, Artificial Sequence
  Description of Artificial Sequence: Synthetic oligonucleotide
acuacucauugaugaguug

SEQ ID NO: 421720 - RNA, 19 nt, Artificial Sequence
  Description of Artificial Sequence: Synthetic oligonucleotide
auugaaugaggaggcaaga

SEQ ID NO: 421721 - RNA, 19 nt, Artificial Sequence
  Description of Artificial Sequence: Synthetic oligonucleotide
cauuuuagggaaccaaucu

SEQ ID NO: 421722 - RNA, 19 nt, Artificial Sequence
  Description of Artificial Sequence: Synthetic oligonucleotide
ugaacgcaacugaguuacg

SEQ ID NO: 421723 - RNA, 19 nt, Artificial Sequence
  Description of Artificial Sequence: Synthetic oligonucleotide
uaaauccuugggacuucug

SEQ ID NO: 421724 - RNA, 19 nt, Artificial Sequence
  Description of Artificial Sequence: Synthetic oligonucleotide
auacaccauagugccaagg

SEQ ID NO: 421725 - RNA, 19 nt, Artificial Sequence
  Description of Artificial Sequence: Synthetic oligonucleotide
uuugucccuaucagucacu

SEQ ID NO: 421726 - RNA, 19 nt, Artificial Sequence
  Description of Artificial Sequence: Synthetic oligonucleotide
agaagaguuaacagcaaua

SEQ ID NO: 421727 - RNA, 19 nt, Artificial Sequence
  Description of Artificial Sequence: Synthetic oligonucleotide
ucugaacgcaacugaguua

SEQ ID NO: 421728 - RNA, 19 nt, Artificial Sequence
  Description of Artificial Sequence: Synthetic oligonucleotide
uuaaauccuugggacuucu

SEQ ID NO: 421729 - RNA, 19 nt, Artificial Sequence
  Description of Artificial Sequence: Synthetic oligonucleotide
uacuucgugcaguauucaa

SEQ ID NO: 421730 - RNA, 19 nt, Artificial Sequence
  Description of Artificial Sequence: Synthetic oligonucleotide
cauggacgagcagaucucg

SEQ ID NO: 421731 - RNA, 19 nt, Artificial Sequence
  Description of Artificial Sequence: Synthetic oligonucleotide
cuaagagaugaucauauuu

SEQ ID NO: 421732 - RNA, 19 nt, Artificial Sequence
  Description of Artificial Sequence: Synthetic oligonucleotide
ucguugagugcagcagugg

SEQ ID NO: 421733 - RNA, 19 nt, Artificial Sequence
  Description of Artificial Sequence: Synthetic oligonucleotide
gacgagcagaucucgaugu

SEQ ID NO: 421734 - RNA, 19 nt, Artificial Sequence
  Description of Artificial Sequence: Synthetic oligonucleotide
augguucugcuacuucgug

SEQ ID NO: 421735 - RNA, 19 nt, Artificial Sequence
  Description of Artificial Sequence: Synthetic oligonucleotide
uggacgagcagaucucgau

SEQ ID NO: 421736 - RNA, 19 nt, Artificial Sequence
  Description of Artificial Sequence: Synthetic oligonucleotide
cuggauugggaacgacugc

SEQ ID NO: 421737 - RNA, 19 nt, Artificial Sequence
  Description of Artificial Sequence: Synthetic oligonucleotide
uguuaaaguuuuguucauu

SEQ ID NO: 421738 - RNA, 19 nt, Artificial Sequence
  Description of Artificial Sequence: Synthetic oligonucleotide
gucauacacaagccacugc

SEQ ID NO: 421739 - RNA, 19 nt, Artificial Sequence
  Description of Artificial Sequence: Synthetic oligonucleotide
agucuagaguacaugccug

SEQ ID NO: 421740 - RNA, 19 nt, Artificial Sequence
  Description of Artificial Sequence: Synthetic oligonucleotide
auggucagauaaugaguga

SEQ ID NO: 421741 - RNA, 19 nt, Artificial Sequence
  Description of Artificial Sequence: Synthetic oligonucleotide
agcggcuguuucuuuucuc

SEQ ID NO: 421742 - RNA, 19 nt, Artificial Sequence
  Description of Artificial Sequence: Synthetic oligonucleotide
guagccucaugaugaagca

SEQ ID NO: 421743 - RNA, 19 nt, Artificial Sequence
  Description of Artificial Sequence: Synthetic oligonucleotide
auugaguguacaggcuuug

SEQ ID NO: 421744 - RNA, 19 nt, Artificial Sequence
  Description of Artificial Sequence: Synthetic oligonucleotide
ucccuaucagucacuuuuc

SEQ ID NO: 421745 - RNA, 19 nt, Artificial Sequence
  Description of Artificial Sequence: Synthetic oligonucleotide
uuacgguuugucguucaac

SEQ ID NO: 421746 - RNA, 19 nt, Artificial Sequence
  Description of Artificial Sequence: Synthetic oligonucleotide
auaguagcccagguuuaag

SEQ ID NO: 421747 - RNA, 19 nt, Artificial Sequence
  Description of Artificial Sequence: Synthetic oligonucleotide
agacagggaguuucuugug

SEQ ID NO: 421748 - RNA, 19 nt, Artificial Sequence
  Description of Artificial Sequence: Synthetic oligonucleotide
cugaguuacgguuugucgu

SEQ ID NO: 421749 - RNA, 19 nt, Artificial Sequence
  Description of Artificial Sequence: Synthetic oligonucleotide
gaacgacugcucugugaag

SEQ ID NO: 421750 - RNA, 19 nt, Artificial Sequence
  Description of Artificial Sequence: Synthetic oligonucleotide
acgcaacugaguuacgguu

SEQ ID NO: 421751 - RNA, 19 nt, Artificial Sequence
  Description of Artificial Sequence: Synthetic oligonucleotide
aguuacgguuugucguuca

SEQ ID NO: 421752 - RNA, 19 nt, Artificial Sequence
  Description of Artificial Sequence: Synthetic oligonucleotide
ucgucauggcggacaacug

SEQ ID NO: 421753 - RNA, 19 nt, Artificial Sequence
  Description of Artificial Sequence: Synthetic oligonucleotide
cuggguacuguacacugca

SEQ ID NO: 421754 - RNA, 19 nt, Artificial Sequence
  Description of Artificial Sequence: Synthetic oligonucleotide
cauuugucccuaucaguca

SEQ ID NO: 421755 - RNA, 19 nt, Artificial Sequence
  Description of Artificial Sequence: Synthetic oligonucleotide
ccguacuuaaucaccuucc

SEQ ID NO: 421756 - RNA, 19 nt, Artificial Sequence
  Description of Artificial Sequence: Synthetic oligonucleotide
uugaguguacaggcuuugc

SEQ ID NO: 421757 - RNA, 19 nt, Artificial Sequence
  Description of Artificial Sequence: Synthetic oligonucleotide
auaaggcugcccucauaca

SEQ ID NO: 421758 - RNA, 19 nt, Artificial Sequence
  Description of Artificial Sequence: Synthetic oligonucleotide
ggaacgacugcucugugaa

SEQ ID NO: 421759 - RNA, 19 nt, Artificial Sequence
  Description of Artificial Sequence: Synthetic oligonucleotide
cuuuggauaaggacuccaa

SEQ ID NO: 421760 - RNA, 19 nt, Artificial Sequence
  Description of Artificial Sequence: Synthetic oligonucleotide
accauagugccaagggcag

SEQ ID NO: 421761 - RNA, 19 nt, Artificial Sequence
  Description of Artificial Sequence: Synthetic oligonucleotide
ucaaccucuuucugaguuu

SEQ ID NO: 421762 - RNA, 19 nt, Artificial Sequence
  Description of Artificial Sequence: Synthetic oligonucleotide
gaguacaugccugcaucug

SEQ ID NO: 421763 - RNA, 19 nt, Artificial Sequence
  Description of Artificial Sequence: Synthetic oligonucleotide
acaguaagagccguacuua

SEQ ID NO: 421764 - RNA, 19 nt, Artificial Sequence
  Description of Artificial Sequence: Synthetic oligonucleotide
aguaaaguagcggcuguuu

SEQ ID NO: 421765 - RNA, 19 nt, Artificial Sequence
  Description of Artificial Sequence: Synthetic oligonucleotide
gauugggaacgacugcucu

SEQ ID NO: 421766 - RNA, 19 nt, Artificial Sequence
  Description of Artificial Sequence: Synthetic oligonucleotide
gucuuuucgucauggcgga

SEQ ID NO: 421767 - RNA, 19 nt, Artificial Sequence
  Description of Artificial Sequence: Synthetic oligonucleotide
aaugcggaccugagauaag

SEQ ID NO: 421768 - RNA, 19 nt, Artificial Sequence
  Description of Artificial Sequence: Synthetic oligonucleotide
uauugcuaccaaggaaaau

SEQ ID NO: 421769 - RNA, 19 nt, Artificial Sequence
  Description of Artificial Sequence: Synthetic oligonucleotide
gauguucauuagcugggua

SEQ ID NO: 421770 - RNA, 19 nt, Artificial Sequence
  Description of Artificial Sequence: Synthetic oligonucleotide
uggaccuuuucuguacaaa

SEQ ID NO: 421771 - RNA, 19 nt, Artificial Sequence
  Description of Artificial Sequence: Synthetic oligonucleotide
cuuuucgucauggcggaca

SEQ ID NO: 421772 - RNA, 19 nt, Artificial Sequence
  Description of Artificial Sequence: Synthetic oligonucleotide
gcuguaucuugccuuuagc

SEQ ID NO: 421773 - RNA, 19 nt, Artificial Sequence
  Description of Artificial Sequence: Synthetic oligonucleotide
cuggguacccacugcucac

SEQ ID NO: 421774 - RNA, 19 nt, Artificial Sequence
  Description of Artificial Sequence: Synthetic oligonucleotide
ggacgagcagaucucgaug

SEQ ID NO: 421775 - RNA, 19 nt, Artificial Sequence
  Description of Artificial Sequence: Synthetic oligonucleotide
caauugaaugaggaggcaa

SEQ ID NO: 421776 - RNA, 19 nt, Artificial Sequence
  Description of Artificial Sequence: Synthetic oligonucleotide
guucauuagcuggguacug

SEQ ID NO: 421777 - RNA, 19 nt, Artificial Sequence
  Description of Artificial Sequence: Synthetic oligonucleotide
gugcaagagaugugaucug

SEQ ID NO: 421778 - RNA, 19 nt, Artificial Sequence
  Description of Artificial Sequence: Synthetic oligonucleotide
augcggaccugagauaaga

SEQ ID NO: 421779 - RNA, 19 nt, Artificial Sequence
  Description of Artificial Sequence: Synthetic oligonucleotide
aucggguacuaaaacagua

SEQ ID NO: 421780 - RNA, 19 nt, Artificial Sequence
  Description of Artificial Sequence: Synthetic oligonucleotide
aggcaagaaugguucugcu

SEQ ID NO: 421781 - RNA, 19 nt, Artificial Sequence
  Description of Artificial Sequence: Synthetic oligonucleotide
caucaaguucugaacgcaa

SEQ ID NO: 421782 - RNA, 19 nt, Artificial Sequence
  Description of Artificial Sequence: Synthetic oligonucleotide
acagugugaagugcuagua

SEQ ID NO: 421783 - RNA, 19 nt, Artificial Sequence
  Description of Artificial Sequence: Synthetic oligonucleotide
acuuuugggugagguaacu

SEQ ID NO: 421784 - RNA, 19 nt, Artificial Sequence
  Description of Artificial Sequence: Synthetic oligonucleotide
agaaugcggaccugagaua

SEQ ID NO: 421785 - RNA, 19 nt, Artificial Sequence
  Description of Artificial Sequence: Synthetic oligonucleotide
gcuaccaaggaaaaugcaa

SEQ ID NO: 421786 - RNA, 19 nt, Artificial Sequence
  Description of Artificial Sequence: Synthetic oligonucleotide
guugagugcagcaguggga

SEQ ID NO: 421787 - RNA, 19 nt, Artificial Sequence
  Description of Artificial Sequence: Synthetic oligonucleotide
agcucuuguucaucgggua

SEQ ID NO: 421788 - RNA, 19 nt, Artificial Sequence
  Description of Artificial Sequence: Synthetic oligonucleotide
gggaguaaaguagcggcug

SEQ ID NO: 421789 - RNA, 19 nt, Artificial Sequence
  Description of Artificial Sequence: Synthetic oligonucleotide
cugucucuuuggauaagga

SEQ ID NO: 421790 - RNA, 19 nt, Artificial Sequence
  Description of Artificial Sequence: Synthetic oligonucleotide
caguaagagccguacuuaa

SEQ ID NO: 421791 - RNA, 19 nt, Artificial Sequence
  Description of Artificial Sequence: Synthetic oligonucleotide
gguuugucguucaacuuca

SEQ ID NO: 421792 - RNA, 19 nt, Artificial Sequence
  Description of Artificial Sequence: Synthetic oligonucleotide
aguaagagccguacuuaau

SEQ ID NO: 421793 - RNA, 19 nt, Artificial Sequence
  Description of Artificial Sequence: Synthetic oligonucleotide
acgguuugucguucaacuu

SEQ ID NO: 421794 - RNA, 19 nt, Artificial Sequence
  Description of Artificial Sequence: Synthetic oligonucleotide
uagcuggguacuguacacu

SEQ ID NO: 421795 - RNA, 19 nt, Artificial Sequence
  Description of Artificial Sequence: Synthetic oligonucleotide
guguccgacuuggagcugc

SEQ ID NO: 421796 - RNA, 19 nt, Artificial Sequence
  Description of Artificial Sequence: Synthetic oligonucleotide
accaaucugugcugaugaa

SEQ ID NO: 421797 - RNA, 19 nt, Artificial Sequence
  Description of Artificial Sequence: Synthetic oligonucleotide
gcuacuucgugcaguauuc

SEQ ID NO: 421798 - RNA, 19 nt, Artificial Sequence
  Description of Artificial Sequence: Synthetic oligonucleotide
guaugaaguaagugcuagu

SEQ ID NO: 421799 - RNA, 19 nt, Artificial Sequence
  Description of Artificial Sequence: Synthetic oligonucleotide
gugacagauugaguguaca

SEQ ID NO: 421800 - RNA, 19 nt, Artificial Sequence
  Description of Artificial Sequence: Synthetic oligonucleotide
cguacuuaaucaccuuccc

SEQ ID NO: 421801 - RNA, 19 nt, Artificial Sequence
  Description of Artificial Sequence: Synthetic oligonucleotide
aaguagcggcuguuucuuu

SEQ ID NO: 421802 - RNA, 19 nt, Artificial Sequence
  Description of Artificial Sequence: Synthetic oligonucleotide
ccguuagacaacaggaaga

SEQ ID NO: 421803 - RNA, 19 nt, Artificial Sequence
  Description of Artificial Sequence: Synthetic oligonucleotide
cuuccgcugugaacucaag

SEQ ID NO: 421804 - RNA, 19 nt, Artificial Sequence
  Description of Artificial Sequence: Synthetic oligonucleotide
gcucuuguucaucggguac

SEQ ID NO: 421805 - RNA, 19 nt, Artificial Sequence
  Description of Artificial Sequence: Synthetic oligonucleotide
cugcuaggccuugaucccc

SEQ ID NO: 421806 - RNA, 19 nt, Artificial Sequence
  Description of Artificial Sequence: Synthetic oligonucleotide
caguguccgacuuggagcu

SEQ ID NO: 421807 - RNA, 19 nt, Artificial Sequence
  Description of Artificial Sequence: Synthetic oligonucleotide
uugucccuaucagucacuu

SEQ ID NO: 421808 - RNA, 19 nt, Artificial Sequence
  Description of Artificial Sequence: Synthetic oligonucleotide
cacaguaagagccguacuu

SEQ ID NO: 421809 - RNA, 19 nt, Artificial Sequence
  Description of Artificial Sequence: Synthetic oligonucleotide
cuccccaacuuuucuagua

SEQ ID NO: 421810 - RNA, 19 nt, Artificial Sequence
  Description of Artificial Sequence: Synthetic oligonucleotide
guuacgguuugucguucaa

SEQ ID NO: 421811 - RNA, 19 nt, Artificial Sequence
  Description of Artificial Sequence: Synthetic oligonucleotide
gauccccacuugcauuuaa

SEQ ID NO: 421812 - RNA, 19 nt, Artificial Sequence
  Description of Artificial Sequence: Synthetic oligonucleotide
agagcuacccuggucuguu

SEQ ID NO: 421813 - RNA, 19 nt, Artificial Sequence
  Description of Artificial Sequence: Synthetic oligonucleotide
cuaguagucuggguaccca

SEQ ID NO: 421814 - RNA, 19 nt, Artificial Sequence
  Description of Artificial Sequence: Synthetic oligonucleotide
gaguuacgguuugucguuc

SEQ ID NO: 421815 - RNA, 19 nt, Artificial Sequence
  Description of Artificial Sequence: Synthetic oligonucleotide
caguaugaaguaagugcua

SEQ ID NO: 421816 - RNA, 19 nt, Artificial Sequence
  Description of Artificial Sequence: Synthetic oligonucleotide
gagccguacuuaaucaccu

SEQ ID NO: 421817 - RNA, 19 nt, Artificial Sequence
  Description of Artificial Sequence: Synthetic oligonucleotide
gggacguuuuaaaggcugc

SEQ ID NO: 421818 - RNA, 19 nt, Artificial Sequence
  Description of Artificial Sequence: Synthetic oligonucleotide
cgguuugucguucaacuuc

SEQ ID NO: 421819 - RNA, 19 nt, Artificial Sequence
  Description of Artificial Sequence: Synthetic oligonucleotide
cagauugaguguacaggcu

SEQ ID NO: 421820 - RNA, 19 nt, Artificial Sequence
  Description of Artificial Sequence: Synthetic oligonucleotide
cugcauauucuggcgguca

SEQ ID NO: 421821 - RNA, 19 nt, Artificial Sequence
  Description of Artificial Sequence: Synthetic oligonucleotide
caucggguacuaaaacagu

SEQ ID NO: 421822 - RNA, 19 nt, Artificial Sequence
  Description of Artificial Sequence: Synthetic oligonucleotide
cucuuaccccaaagcauaa

SEQ ID NO: 421823 - RNA, 19 nt, Artificial Sequence
  Description of Artificial Sequence: Synthetic oligonucleotide
guucugaacgcaacugagu

SEQ ID NO: 421824 - RNA, 19 nt, Artificial Sequence
  Description of Artificial Sequence: Synthetic oligonucleotide
cuugauccccacuugcauu

SEQ ID NO: 421825 - RNA, 19 nt, Artificial Sequence
  Description of Artificial Sequence: Synthetic oligonucleotide
ucuuuucgucauggcggac

SEQ ID NO: 421826 - RNA, 19 nt, Artificial Sequence
  Description of Artificial Sequence: Synthetic oligonucleotide
gggacauuccaccaggcuu

SEQ ID NO: 421827 - RNA, 19 nt, Artificial Sequence
  Description of Artificial Sequence: Synthetic oligonucleotide
acgagcagaucucgauguu

SEQ ID NO: 421828 - RNA, 19 nt, Artificial Sequence
  Description of Artificial Sequence: Synthetic oligonucleotide
agccguacuuaaucaccuu

SEQ ID NO: 421829 - RNA, 19 nt, Artificial Sequence
  Description of Artificial Sequence: Synthetic oligonucleotide
cuacccuggucuguuccuc

SEQ ID NO: 421830 - RNA, 19 nt, Artificial Sequence
  Description of Artificial Sequence: Synthetic oligonucleotide
cuagaguacaugccugcau

SEQ ID NO: 421831 - RNA, 19 nt, Artificial Sequence
  Description of Artificial Sequence: Synthetic oligonucleotide
guggaccuuuucuguacaa

SEQ ID NO: 421832 - RNA, 19 nt, Artificial Sequence
  Description of Artificial Sequence: Synthetic oligonucleotide
gcucaccaagauauaauaa

SEQ ID NO: 421833 - RNA, 19 nt, Artificial Sequence
  Description of Artificial Sequence: Synthetic oligonucleotide
cuugugcaagagaugugau

SEQ ID NO: 421834 - RNA, 19 nt, Artificial Sequence
  Description of Artificial Sequence: Synthetic oligonucleotide
uucuagcuuuucggaguuc

SEQ ID NO: 421835 - RNA, 19 nt, Artificial Sequence
  Description of Artificial Sequence: Synthetic oligonucleotide
auggacgagcagaucucga

SEQ ID NO: 421836 - RNA, 19 nt, Artificial Sequence
  Description of Artificial Sequence: Synthetic oligonucleotide
cuacuucgugcaguauuca

SEQ ID NO: 421837 - RNA, 19 nt, Artificial Sequence
  Description of Artificial Sequence: Synthetic oligonucleotide
ugccuuccgcugugaacuc

SEQ ID NO: 421838 - RNA, 19 nt, Artificial Sequence
  Description of Artificial Sequence: Synthetic oligonucleotide
cagcucuuguucaucgggu

SEQ ID NO: 421839 - RNA, 19 nt, Artificial Sequence
  Description of Artificial Sequence: Synthetic oligonucleotide
caacauggacgagcagauc

SEQ ID NO: 421840 - RNA, 19 nt, Artificial Sequence
  Description of Artificial Sequence: Synthetic oligonucleotide
gcuggguacuguacacugc

SEQ ID NO: 421841 - RNA, 19 nt, Artificial Sequence
  Description of Artificial Sequence: Synthetic oligonucleotide
gagcuacccuggucuguuc

SEQ ID NO: 421842 - RNA, 19 nt, Artificial Sequence
  Description of Artificial Sequence: Synthetic oligonucleotide
ccccacuugcauuuaauua

SEQ ID NO: 421843 - RNA, 19 nt, Artificial Sequence
  Description of Artificial Sequence: Synthetic oligonucleotide
cuucuagcuuuucggaguu

SEQ ID NO: 421844 - RNA, 19 nt, Artificial Sequence
  Description of Artificial Sequence: Synthetic oligonucleotide
gccuuuagcuggucuuuga

SEQ ID NO: 421845 - RNA, 19 nt, Artificial Sequence
  Description of Artificial Sequence: Synthetic oligonucleotide
cuaaugcaguguccgacuu

SEQ ID NO: 421846 - RNA, 19 nt, Artificial Sequence
  Description of Artificial Sequence: Synthetic oligonucleotide
gcggaccugagauaagagu

SEQ ID NO: 421847 - RNA, 19 nt, Artificial Sequence
  Description of Artificial Sequence: Synthetic oligonucleotide
gggacuuuugggugaggua

SEQ ID NO: 421848 - RNA, 19 nt, Artificial Sequence
  Description of Artificial Sequence: Synthetic oligonucleotide
ugauccccacuugcauuua

SEQ ID NO: 421849 - RNA, 19 nt, Artificial Sequence
  Description of Artificial Sequence: Synthetic oligonucleotide
agucugcauuugucccuau

SEQ ID NO: 421850 - RNA, 19 nt, Artificial Sequence
  Description of Artificial Sequence: Synthetic oligonucleotide
gguguucuaugucugccuu

SEQ ID NO: 421851 - RNA, 19 nt, Artificial Sequence
  Description of Artificial Sequence: Synthetic oligonucleotide
aguguccgacuuggagcug

SEQ ID NO: 421852 - RNA, 19 nt, Artificial Sequence
  Description of Artificial Sequence: Synthetic oligonucleotide
gugcaguauucaacaugga

SEQ ID NO: 421853 - RNA, 19 nt, Artificial Sequence
  Description of Artificial Sequence: Synthetic oligonucleotide
ggacauuccaccaggcuuu

SEQ ID NO: 421854 - RNA, 19 nt, Artificial Sequence
  Description of Artificial Sequence: Synthetic oligonucleotide
ggagcuguaucuugccuuu

SEQ ID NO: 421855 - RNA, 19 nt, Artificial Sequence
  Description of Artificial Sequence: Synthetic oligonucleotide
gaguaaaguagcggcuguu

SEQ ID NO: 421856 - RNA, 19 nt, Artificial Sequence
  Description of Artificial Sequence: Synthetic oligonucleotide
cugcucgagcaaggaggag

SEQ ID NO: 421857 - RNA, 19 nt, Artificial Sequence
  Description of Artificial Sequence: Synthetic oligonucleotide
cagggacguuuuaaaggcu

SEQ ID NO: 421858 - RNA, 19 nt, Artificial Sequence
  Description of Artificial Sequence: Synthetic oligonucleotide
ggcuuucguugagugcagc

SEQ ID NO: 421859 - RNA, 19 nt, Artificial Sequence
  Description of Artificial Sequence: Synthetic oligonucleotide
aggcacgcucugugacaga

SEQ ID NO: 421860 - RNA, 19 nt, Artificial Sequence
  Description of Artificial Sequence: Synthetic oligonucleotide
guuugcaggcacgcucugu

SEQ ID NO: 421861 - RNA, 19 nt, Artificial Sequence
  Description of Artificial Sequence: Synthetic oligonucleotide
guuugucguucaacuucaa

SEQ ID NO: 421862 - RNA, 19 nt, Artificial Sequence
  Description of Artificial Sequence: Synthetic oligonucleotide
cggaccugagauaagaguu

SEQ ID NO: 421863 - RNA, 19 nt, Artificial Sequence
  Description of Artificial Sequence: Synthetic oligonucleotide
ccuuccgcugugaacucaa

SEQ ID NO: 421864 - RNA, 19 nt, Artificial Sequence
  Description of Artificial Sequence: Synthetic oligonucleotide
gagcuguaucuugccuuua

SEQ ID NO: 421865 - RNA, 19 nt, Artificial Sequence
  Description of Artificial Sequence: Synthetic oligonucleotide
ccgcugugaacucaagagu

SEQ ID NO: 421866 - RNA, 19 nt, Artificial Sequence
  Description of Artificial Sequence: Synthetic oligonucleotide
ggcacgcucugugacagau

SEQ ID NO: 421867 - RNA, 19 nt, Artificial Sequence
  Description of Artificial Sequence: Synthetic oligonucleotide
cagagcuacccuggucugu

SEQ ID NO: 421868 - RNA, 19 nt, Artificial Sequence
  Description of Artificial Sequence: Synthetic oligonucleotide
cccauucucuuaccccaaa

SEQ ID NO: 421869 - RNA, 19 nt, Artificial Sequence
  Description of Artificial Sequence: Synthetic oligonucleotide
gccuuccgcugugaacuca

SEQ ID NO: 421870 - RNA, 19 nt, Artificial Sequence
  Description of Artificial Sequence: Synthetic oligonucleotide
cgacugcucugugaaggca

SEQ ID NO: 421871 - RNA, 19 nt, Artificial Sequence
  Description of Artificial Sequence: Synthetic oligonucleotide
cugcuacuucgugcaguau

SEQ ID NO: 421872 - RNA, 19 nt, Artificial Sequence
  Description of Artificial Sequence: Synthetic oligonucleotide
cgauguucauuagcugggu

SEQ ID NO: 421873 - RNA, 19 nt, Artificial Sequence
  Description of Artificial Sequence: Synthetic oligonucleotide
uuuaguagcacauaggcgu

SEQ ID NO: 421874 - RNA, 19 nt, Artificial Sequence
  Description of Artificial Sequence: Synthetic oligonucleotide
ucuagauuccaaauuauag

SEQ ID NO: 421875 - RNA, 19 nt, Artificial Sequence
  Description of Artificial Sequence: Synthetic oligonucleotide
aucuccuaaauuuaguagc

SEQ ID NO: 421876 - RNA, 19 nt, Artificial Sequence
  Description of Artificial Sequence: Synthetic oligonucleotide
ugcauuaacucccaaaggc

SEQ ID NO: 421877 - RNA, 19 nt, Artificial Sequence
  Description of Artificial Sequence: Synthetic oligonucleotide
uccacuauagacuugggug

SEQ ID NO: 421878 - RNA, 19 nt, Artificial Sequence
  Description of Artificial Sequence: Synthetic oligonucleotide
aaucuccuaaauuuaguag

SEQ ID NO: 421879 - RNA, 19 nt, Artificial Sequence
  Description of Artificial Sequence: Synthetic oligonucleotide
ucucauguugaucggaugg

SEQ ID NO: 421880 - RNA, 19 nt, Artificial Sequence
  Description of Artificial Sequence: Synthetic oligonucleotide
aaucaggggaaguccagcc

SEQ ID NO: 421881 - RNA, 19 nt, Artificial Sequence
  Description of Artificial Sequence: Synthetic oligonucleotide
agaauguagaaacuccugg

SEQ ID NO: 421882 - RNA, 19 nt, Artificial Sequence
  Description of Artificial Sequence: Synthetic oligonucleotide
aagagauuaacaaaucaag

SEQ ID NO: 421883 - RNA, 19 nt, Artificial Sequence
  Description of Artificial Sequence: Synthetic oligonucleotide
aauguauguagauuuggga

SEQ ID NO: 421884 - RNA, 19 nt, Artificial Sequence
  Description of Artificial Sequence: Synthetic oligonucleotide
auaggcguccacuauagac

SEQ ID NO: 421885 - RNA, 19 nt, Artificial Sequence
  Description of Artificial Sequence: Synthetic oligonucleotide
ugaccuauccauuaggugu

SEQ ID NO: 421886 - RNA, 19 nt, Artificial Sequence
  Description of Artificial Sequence: Synthetic oligonucleotide
ugguguaauguacagagga

SEQ ID NO: 421887 - RNA, 19 nt, Artificial Sequence
  Description of Artificial Sequence: Synthetic oligonucleotide
ugauagaccuccuuaaaca

SEQ ID NO: 421888 - RNA, 19 nt, Artificial Sequence
  Description of Artificial Sequence: Synthetic oligonucleotide
uucagcaagcgaauguugg

SEQ ID NO: 421889 - RNA, 19 nt, Artificial Sequence
  Description of Artificial Sequence: Synthetic oligonucleotide
ucugauagaaaacgguaga

SEQ ID NO: 421890 - RNA, 19 nt, Artificial Sequence
  Description of Artificial Sequence: Synthetic oligonucleotide
aaagagauuaacaaaucaa

SEQ ID NO: 421891 - RNA, 19 nt, Artificial Sequence
  Description of Artificial Sequence: Synthetic oligonucleotide
uuaucugaaccuucaugcg

SEQ ID NO: 421892 - RNA, 19 nt, Artificial Sequence
  Description of Artificial Sequence: Synthetic oligonucleotide
aacaauacaaagaguagga

SEQ ID NO: 421893 - RNA, 19 nt, Artificial Sequence
  Description of Artificial Sequence: Synthetic oligonucleotide
agaguugaacucucguggc

SEQ ID NO: 421894 - RNA, 19 nt, Artificial Sequence
  Description of Artificial Sequence: Synthetic oligonucleotide
gaaugucgauaguauaccg

SEQ ID NO: 421895 - RNA, 19 nt, Artificial Sequence
  Description of Artificial Sequence: Synthetic oligonucleotide
uaguauaccguucccgucc

SEQ ID NO: 421896 - RNA, 19 nt, Artificial Sequence
  Description of Artificial Sequence: Synthetic oligonucleotide
aggacucugauagaaaacg

SEQ ID NO: 421897 - RNA, 19 nt, Artificial Sequence
  Description of Artificial Sequence: Synthetic oligonucleotide
uugcaauauucccagccgg

SEQ ID NO: 421898 - RNA, 19 nt, Artificial Sequence
  Description of Artificial Sequence: Synthetic oligonucleotide
guuacuucggugaauacgc

SEQ ID NO: 421899 - RNA, 19 nt, Artificial Sequence
  Description of Artificial Sequence: Synthetic oligonucleotide
uuucaaagaacggugguga

SEQ ID NO: 421900 - RNA, 19 nt, Artificial Sequence
  Description of Artificial Sequence: Synthetic oligonucleotide
gaucggaugguacauaauc

SEQ ID NO: 421901 - RNA, 19 nt, Artificial Sequence
  Description of Artificial Sequence: Synthetic oligonucleotide
gauagaaaacgguagacgu

SEQ ID NO: 421902 - RNA, 19 nt, Artificial Sequence
  Description of Artificial Sequence: Synthetic oligonucleotide
ugauuauugauggucacgu

SEQ ID NO: 421903 - RNA, 19 nt, Artificial Sequence
  Description of Artificial Sequence: Synthetic oligonucleotide
ucaacaaguaguugaaaau

SEQ ID NO: 421904 - RNA, 19 nt, Artificial Sequence
  Description of Artificial Sequence: Synthetic oligonucleotide
augguacauaaucaugcac

SEQ ID NO: 421905 - RNA, 19 nt, Artificial Sequence
  Description of Artificial Sequence: Synthetic oligonucleotide
acguccauaucuugagucc

SEQ ID NO: 421906 - RNA, 19 nt, Artificial Sequence
  Description of Artificial Sequence: Synthetic oligonucleotide
cucugauagaaaacgguag

SEQ ID NO: 421907 - RNA, 19 nt, Artificial Sequence
  Description of Artificial Sequence: Synthetic oligonucleotide
aguugaagauuagucaggg

SEQ ID NO: 421908 - RNA, 19 nt, Artificial Sequence
  Description of Artificial Sequence: Synthetic oligonucleotide
ucggugaauacgcucguag

SEQ ID NO: 421909 - RNA, 19 nt, Artificial Sequence
  Description of Artificial Sequence: Synthetic oligonucleotide
agcccacuacaucaaaccc

SEQ ID NO: 421910 - RNA, 19 nt, Artificial Sequence
  Description of Artificial Sequence: Synthetic oligonucleotide
uuaaucccgcacuugggag

SEQ ID NO: 421911 - RNA, 19 nt, Artificial Sequence
  Description of Artificial Sequence: Synthetic oligonucleotide
gugaucaguaacuuaaaga

SEQ ID NO: 421912 - RNA, 19 nt, Artificial Sequence
  Description of Artificial Sequence: Synthetic oligonucleotide
gaaccguacucuuugccag

SEQ ID NO: 421913 - RNA, 19 nt, Artificial Sequence
  Description of Artificial Sequence: Synthetic oligonucleotide
agauauccuucagaaauac

SEQ ID NO: 421914 - RNA, 19 nt, Artificial Sequence
  Description of Artificial Sequence: Synthetic oligonucleotide
aaccguacucuuugccagc

SEQ ID NO: 421915 - RNA, 19 nt, Artificial Sequence
  Description of Artificial Sequence: Synthetic oligonucleotide
aaaucaacguccagugauc

SEQ ID NO: 421916 - RNA, 19 nt, Artificial Sequence
  Description of Artificial Sequence: Synthetic oligonucleotide
ugaaucuccuaaauuuagu

SEQ ID NO: 421917 - RNA, 19 nt, Artificial Sequence
  Description of Artificial Sequence: Synthetic oligonucleotide
auuuaguagcacauaggcg

SEQ ID NO: 421918 - RNA, 19 nt, Artificial Sequence
  Description of Artificial Sequence: Synthetic oligonucleotide
acgguagacguccauaucu

SEQ ID NO: 421919 - RNA, 19 nt, Artificial Sequence
  Description of Artificial Sequence: Synthetic oligonucleotide
aaacgguagacguccauau

SEQ ID NO: 421920 - RNA, 19 nt, Artificial Sequence
  Description of Artificial Sequence: Synthetic oligonucleotide
gucgauaguauaccguucc

SEQ ID NO: 421921 - RNA, 19 nt, Artificial Sequence
  Description of Artificial Sequence: Synthetic oligonucleotide
aguauaccguucccguccc

SEQ ID NO: 421922 - RNA, 19 nt, Artificial Sequence
  Description of Artificial Sequence: Synthetic oligonucleotide
acuucggugaauacgcucg

SEQ ID NO: 421923 - RNA, 19 nt, Artificial Sequence
  Description of Artificial Sequence: Synthetic oligonucleotide
cauaagaguugaacucucg

SEQ ID NO: 421924 - RNA, 19 nt, Artificial Sequence
  Description of Artificial Sequence: Synthetic oligonucleotide
aacgguagacguccauauc

SEQ ID NO: 421925 - RNA, 19 nt, Artificial Sequence
  Description of Artificial Sequence: Synthetic oligonucleotide
uccggggaagguuucauug

SEQ ID NO: 421926 - RNA, 19 nt, Artificial Sequence
  Description of Artificial Sequence: Synthetic oligonucleotide
caguugaagauuagucagg

SEQ ID NO: 421927 - RNA, 19 nt, Artificial Sequence
  Description of Artificial Sequence: Synthetic oligonucleotide
uucuagauuccaaauuaua

SEQ ID NO: 421928 - RNA, 19 nt, Artificial Sequence
  Description of Artificial Sequence: Synthetic oligonucleotide
agauuagucagggugaaaa

SEQ ID NO: 421929 - RNA, 19 nt, Artificial Sequence
  Description of Artificial Sequence: Synthetic oligonucleotide
aaugucgauaguauaccgu

SEQ ID NO: 421930 - RNA, 19 nt, Artificial Sequence
  Description of Artificial Sequence: Synthetic oligonucleotide
cacuacaucaaacccuagc

SEQ ID NO: 421931 - RNA, 19 nt, Artificial Sequence
  Description of Artificial Sequence: Synthetic oligonucleotide
gaguugaacucucguggcg

SEQ ID NO: 421932 - RNA, 19 nt, Artificial Sequence
  Description of Artificial Sequence: Synthetic oligonucleotide
ucaacguccagugaucagu

SEQ ID NO: 421933 - RNA, 19 nt, Artificial Sequence
  Description of Artificial Sequence: Synthetic oligonucleotide
cuguuguuacugaaucucc

SEQ ID NO: 421934 - RNA, 19 nt, Artificial Sequence
  Description of Artificial Sequence: Synthetic oligonucleotide
ugcaauauucccagccgga

SEQ ID NO: 421935 - RNA, 19 nt, Artificial Sequence
  Description of Artificial Sequence: Synthetic oligonucleotide
uuugaagugugaagaaguu

SEQ ID NO: 421936 - RNA, 19 nt, Artificial Sequence
  Description of Artificial Sequence: Synthetic oligonucleotide
acgcucguagcucucugcc

SEQ ID NO: 421937 - RNA, 19 nt, Artificial Sequence
  Description of Artificial Sequence: Synthetic oligonucleotide
ggaugguacauaaucaugc

SEQ ID NO: 421938 - RNA, 19 nt, Artificial Sequence
  Description of Artificial Sequence: Synthetic oligonucleotide
ucagcaagcgaauguuggc

SEQ ID NO: 421939 - RNA, 19 nt, Artificial Sequence
  Description of Artificial Sequence: Synthetic oligonucleotide
auuaugcuauuacguaaug

SEQ ID NO: 421940 - RNA, 19 nt, Artificial Sequence
  Description of Artificial Sequence: Synthetic oligonucleotide
auagaaaacgguagacguc

SEQ ID NO: 421941 - RNA, 19 nt, Artificial Sequence
  Description of Artificial Sequence: Synthetic oligonucleotide
uugcucaccuagaaggaga

SEQ ID NO: 421942 - RNA, 19 nt, Artificial Sequence
  Description of Artificial Sequence: Synthetic oligonucleotide
guugggucuagcaccaacg

SEQ ID NO: 421943 - RNA, 19 nt, Artificial Sequence
  Description of Artificial Sequence: Synthetic oligonucleotide
acaauacaaagaguaggag

SEQ ID NO: 421944 - RNA, 19 nt, Artificial Sequence
  Description of Artificial Sequence: Synthetic oligonucleotide
cauguugaucggaugguac

SEQ ID NO: 421945 - RNA, 19 nt, Artificial Sequence
  Description of Artificial Sequence: Synthetic oligonucleotide
uugguauuacugaccuucc

SEQ ID NO: 421946 - RNA, 19 nt, Artificial Sequence
  Description of Artificial Sequence: Synthetic oligonucleotide
aaauguuccccgugccaug

SEQ ID NO: 421947 - RNA, 19 nt, Artificial Sequence
  Description of Artificial Sequence: Synthetic oligonucleotide
gauaguauaccguucccgu

SEQ ID NO: 421948 - RNA, 19 nt, Artificial Sequence
  Description of Artificial Sequence: Synthetic oligonucleotide
uugaucggaugguacauaa

SEQ ID NO: 421949 - RNA, 19 nt, Artificial Sequence
  Description of Artificial Sequence: Synthetic oligonucleotide
gguuacuucggugaauacg

SEQ ID NO: 421950 - RNA, 19 nt, Artificial Sequence
  Description of Artificial Sequence: Synthetic oligonucleotide
aaucaacguccagugauca

SEQ ID NO: 421951 - RNA, 19 nt, Artificial Sequence
  Description of Artificial Sequence: Synthetic oligonucleotide
acagcuacaaggucucccu

SEQ ID NO: 421952 - RNA, 19 nt, Artificial Sequence
  Description of Artificial Sequence: Synthetic oligonucleotide
ucggaugguacauaaucau

SEQ ID NO: 421953 - RNA, 19 nt, Artificial Sequence
  Description of Artificial Sequence: Synthetic oligonucleotide
augucgauaguauaccguu

SEQ ID NO: 421954 - RNA, 19 nt, Artificial Sequence
  Description of Artificial Sequence: Synthetic oligonucleotide
auguugaucggaugguaca

SEQ ID NO: 421955 - RNA, 19 nt, Artificial Sequence
  Description of Artificial Sequence: Synthetic oligonucleotide
ucgauaguauaccguuccc

SEQ ID NO: 421956 - RNA, 19 nt, Artificial Sequence
  Description of Artificial Sequence: Synthetic oligonucleotide
gguuucauugagcagagaa

SEQ ID NO: 421957 - RNA, 19 nt, Artificial Sequence
  Description of Artificial Sequence: Synthetic oligonucleotide
ugguauuacugaccuuccc

SEQ ID NO: 421958 - RNA, 19 nt, Artificial Sequence
  Description of Artificial Sequence: Synthetic oligonucleotide
agccauagcccacuacauc

SEQ ID NO: 421959 - RNA, 19 nt, Artificial Sequence
  Description of Artificial Sequence: Synthetic oligonucleotide
ccacuauagacuugggugg

SEQ ID NO: 421960 - RNA, 19 nt, Artificial Sequence
  Description of Artificial Sequence: Synthetic oligonucleotide
uuaguagcacauaggcguc

SEQ ID NO: 421961 - RNA, 19 nt, Artificial Sequence
  Description of Artificial Sequence: Synthetic oligonucleotide
ucccgaccagguuacuucg

SEQ ID NO: 421962 - RNA, 19 nt, Artificial Sequence
  Description of Artificial Sequence: Synthetic oligonucleotide
agcgaauguuggcaaaugu

SEQ ID NO: 421963 - RNA, 19 nt, Artificial Sequence
  Description of Artificial Sequence: Synthetic oligonucleotide
aaaacgguagacguccaua

SEQ ID NO: 421964 - RNA, 19 nt, Artificial Sequence
  Description of Artificial Sequence: Synthetic oligonucleotide
ucucucauguugaucggau

SEQ ID NO: 421965 - RNA, 19 nt, Artificial Sequence
  Description of Artificial Sequence: Synthetic oligonucleotide
auggcgucauuuccucggc

SEQ ID NO: 421966 - RNA, 19 nt, Artificial Sequence
  Description of Artificial Sequence: Synthetic oligonucleotide
gguauuacugaccuuccca

SEQ ID NO: 421967 - RNA, 19 nt, Artificial Sequence
  Description of Artificial Sequence: Synthetic oligonucleotide
acgguggugacuuaaugua

SEQ ID NO: 421968 - RNA, 19 nt, Artificial Sequence
  Description of Artificial Sequence: Synthetic oligonucleotide
cugaccuauccauuaggug

SEQ ID NO: 421969 - RNA, 19 nt, Artificial Sequence
  Description of Artificial Sequence: Synthetic oligonucleotide
acacgucugagaauacugg

SEQ ID NO: 421970 - RNA, 19 nt, Artificial Sequence
  Description of Artificial Sequence: Synthetic oligonucleotide
ugucgauaguauaccguuc

SEQ ID NO: 421971 - RNA, 19 nt, Artificial Sequence
  Description of Artificial Sequence: Synthetic oligonucleotide
uugaagugugaagaaguuc

SEQ ID NO: 421972 - RNA, 19 nt, Artificial Sequence
  Description of Artificial Sequence: Synthetic oligonucleotide
gcccguaaagucuugcagg

SEQ ID NO: 421973 - RNA, 19 nt, Artificial Sequence
  Description of Artificial Sequence: Synthetic oligonucleotide
agcuacaaggucucccuga

SEQ ID NO: 421974 - RNA, 19 nt, Artificial Sequence
  Description of Artificial Sequence: Synthetic oligonucleotide
uguucagcaagcgaauguu

SEQ ID NO: 421975 - RNA, 19 nt, Artificial Sequence
  Description of Artificial Sequence: Synthetic oligonucleotide
aauguuccccgugccauga

SEQ ID NO: 421976 - RNA, 19 nt, Artificial Sequence
  Description of Artificial Sequence: Synthetic oligonucleotide
ucuagcaccaacggcgggu

SEQ ID NO: 421977 - RNA, 19 nt, Artificial Sequence
  Description of Artificial Sequence: Synthetic oligonucleotide
uucaaagaacgguggugac

SEQ ID NO: 421978 - RNA, 19 nt, Artificial Sequence
  Description of Artificial Sequence: Synthetic oligonucleotide
aauacgcucguagcucucu

SEQ ID NO: 421979 - RNA, 19 nt, Artificial Sequence
  Description of Artificial Sequence: Synthetic oligonucleotide
ucgaacacgucaaggguuu

SEQ ID NO: 421980 - RNA, 19 nt, Artificial Sequence
  Description of Artificial Sequence: Synthetic oligonucleotide
aagcgaauguuggcaaaug

SEQ ID NO: 421981 - RNA, 19 nt, Artificial Sequence
  Description of Artificial Sequence: Synthetic oligonucleotide
cucgaagguaguaggugac

SEQ ID NO: 421982 - RNA, 19 nt, Artificial Sequence
  Description of Artificial Sequence: Synthetic oligonucleotide
uggucuguuguuacugaau

SEQ ID NO: 421983 - RNA, 19 nt, Artificial Sequence
  Description of Artificial Sequence: Synthetic oligonucleotide
aucggaugguacauaauca

SEQ ID NO: 421984 - RNA, 19 nt, Artificial Sequence
  Description of Artificial Sequence: Synthetic oligonucleotide
cuaacaucacggucuucac

SEQ ID NO: 421985 - RNA, 19 nt, Artificial Sequence
  Description of Artificial Sequence: Synthetic oligonucleotide
accguacucuuugccagcc

SEQ ID NO: 421986 - RNA, 19 nt, Artificial Sequence
  Description of Artificial Sequence: Synthetic oligonucleotide
uacuucggugaauacgcuc

SEQ ID NO: 421987 - RNA, 19 nt, Artificial Sequence
  Description of Artificial Sequence: Synthetic oligonucleotide
aucaacguccagugaucag

SEQ ID NO: 421988 - RNA, 19 nt, Artificial Sequence
  Description of Artificial Sequence: Synthetic oligonucleotide
uggcacgcccguaaagucu

SEQ ID NO: 421989 - RNA, 19 nt, Artificial Sequence
  Description of Artificial Sequence: Synthetic oligonucleotide
caucuugcggaucauguaa

SEQ ID NO: 421990 - RNA, 19 nt, Artificial Sequence
  Description of Artificial Sequence: Synthetic oligonucleotide
ggcgucauuuccucggcgg

SEQ ID NO: 421991 - RNA, 19 nt, Artificial Sequence
  Description of Artificial Sequence: Synthetic oligonucleotide
aagaacgguggugacuuaa

SEQ ID NO: 421992 - RNA, 19 nt, Artificial Sequence
  Description of Artificial Sequence: Synthetic oligonucleotide
cuugcggaucauguaauuc

SEQ ID NO: 421993 - RNA, 19 nt, Artificial Sequence
  Description of Artificial Sequence: Synthetic oligonucleotide
uguugaucggaugguacau

SEQ ID NO: 421994 - RNA, 19 nt, Artificial Sequence
  Description of Artificial Sequence: Synthetic oligonucleotide
uuacuucggugaauacgcu

SEQ ID NO: 421995 - RNA, 19 nt, Artificial Sequence
  Description of Artificial Sequence: Synthetic oligonucleotide
uauaccguucccgucccgu

SEQ ID NO: 421996 - RNA, 19 nt, Artificial Sequence
  Description of Artificial Sequence: Synthetic oligonucleotide
agcaagcgaauguuggcaa

SEQ ID NO: 421997 - RNA, 19 nt, Artificial Sequence
  Description of Artificial Sequence: Synthetic oligonucleotide
acucugauagaaaacggua

SEQ ID NO: 421998 - RNA, 19 nt, Artificial Sequence
  Description of Artificial Sequence: Synthetic oligonucleotide
uggcgucauuuccucggcg

SEQ ID NO: 421999 - RNA, 19 nt, Artificial Sequence
  Description of Artificial Sequence: Synthetic oligonucleotide
acgggcugguuuaaauggc

SEQ ID NO: 422000 - RNA, 19 nt, Artificial Sequence
  Description of Artificial Sequence: Synthetic oligonucleotide
ucgaagguaguaggugacc

SEQ ID NO: 422001 - RNA, 19 nt, Artificial Sequence
  Description of Artificial Sequence: Synthetic oligonucleotide
gauggucccggcgauuaug

SEQ ID NO: 422002 - RNA, 19 nt, Artificial Sequence
  Description of Artificial Sequence: Synthetic oligonucleotide
guagacguccauaucuuga

SEQ ID NO: 422003 - RNA, 19 nt, Artificial Sequence
  Description of Artificial Sequence: Synthetic oligonucleotide
uacgcucguagcucucugc

SEQ ID NO: 422004 - RNA, 19 nt, Artificial Sequence
  Description of Artificial Sequence: Synthetic oligonucleotide
gauuaugcuauuacguaau

SEQ ID NO: 422005 - RNA, 19 nt, Artificial Sequence
  Description of Artificial Sequence: Synthetic oligonucleotide
auggcugaccuauccauua

SEQ ID NO: 422006 - RNA, 19 nt, Artificial Sequence
  Description of Artificial Sequence: Synthetic oligonucleotide
cuauagacuuggguggcug

SEQ ID NO: 422007 - RNA, 19 nt, Artificial Sequence
  Description of Artificial Sequence: Synthetic oligonucleotide
ggaaccguacucuuugcca

SEQ ID NO: 422008 - RNA, 19 nt, Artificial Sequence
  Description of Artificial Sequence: Synthetic oligonucleotide
cucucauguugaucggaug

SEQ ID NO: 422009 - RNA, 19 nt, Artificial Sequence
  Description of Artificial Sequence: Synthetic oligonucleotide
cacuauagacuuggguggc

SEQ ID NO: 422010 - RNA, 19 nt, Artificial Sequence
  Description of Artificial Sequence: Synthetic oligonucleotide
gcagccauagcccacuaca

SEQ ID NO: 422011 - RNA, 19 nt, Artificial Sequence
  Description of Artificial Sequence: Synthetic oligonucleotide
ggcugaccuauccauuagg

SEQ ID NO: 422012 - RNA, 19 nt, Artificial Sequence
  Description of Artificial Sequence: Synthetic oligonucleotide
ccucucaacaaguaguuga

SEQ ID NO: 422013 - RNA, 19 nt, Artificial Sequence
  Description of Artificial Sequence: Synthetic oligonucleotide
uauucccagccggagagau

SEQ ID NO: 422014 - RNA, 19 nt, Artificial Sequence
  Description of Artificial Sequence: Synthetic oligonucleotide
cucgaguuggccagauauc

SEQ ID NO: 422015 - RNA, 19 nt, Artificial Sequence
  Description of Artificial Sequence: Synthetic oligonucleotide
uccccgugccaugauggcg

SEQ ID NO: 422016 - RNA, 19 nt, Artificial Sequence
  Description of Artificial Sequence: Synthetic oligonucleotide
ugaucggaugguacauaau

SEQ ID NO: 422017 - RNA, 19 nt, Artificial Sequence
  Description of Artificial Sequence: Synthetic oligonucleotide
cguaaagucuugcaggaug

SEQ ID NO: 422018 - RNA, 19 nt, Artificial Sequence
  Description of Artificial Sequence: Synthetic oligonucleotide
uaccguucccgucccguga

SEQ ID NO: 422019 - RNA, 19 nt, Artificial Sequence
  Description of Artificial Sequence: Synthetic oligonucleotide
cucggcgggagccauaaga

SEQ ID NO: 422020 - RNA, 19 nt, Artificial Sequence
  Description of Artificial Sequence: Synthetic oligonucleotide
gugaucgccuccaccacag

SEQ ID NO: 422021 - RNA, 19 nt, Artificial Sequence
  Description of Artificial Sequence: Synthetic oligonucleotide
gacucugauagaaaacggu

SEQ ID NO: 422022 - RNA, 19 nt, Artificial Sequence
  Description of Artificial Sequence: Synthetic oligonucleotide
uucccgucccgugaguccc

SEQ ID NO: 422023 - RNA, 19 nt, Artificial Sequence
  Description of Artificial Sequence: Synthetic oligonucleotide
aggugugcaaauggguucu

SEQ ID NO: 422024 - RNA, 19 nt, Artificial Sequence
  Description of Artificial Sequence: Synthetic oligonucleotide
ucauguugaucggauggua

SEQ ID NO: 422025 - RNA, 19 nt, Artificial Sequence
  Description of Artificial Sequence: Synthetic oligonucleotide
gauuagucagggugaaaau

SEQ ID NO: 422026 - RNA, 19 nt, Artificial Sequence
  Description of Artificial Sequence: Synthetic oligonucleotide
ugaucgccuccaccacagg

SEQ ID NO: 422027 - RNA, 19 nt, Artificial Sequence
  Description of Artificial Sequence: Synthetic oligonucleotide
accguucccgucccgugag

SEQ ID NO: 422028 - RNA, 19 nt, Artificial Sequence
  Description of Artificial Sequence: Synthetic oligonucleotide
auaccguucccgucccgug

SEQ ID NO: 422029 - RNA, 19 nt, Artificial Sequence
  Description of Artificial Sequence: Synthetic oligonucleotide
auacgcucguagcucucug

SEQ ID NO: 422030 - RNA, 19 nt, Artificial Sequence
  Description of Artificial Sequence: Synthetic oligonucleotide
aacggcgggucuccugaga

SEQ ID NO: 422031 - RNA, 19 nt, Artificial Sequence
  Description of Artificial Sequence: Synthetic oligonucleotide
ggacagauaaggcaugacu

SEQ ID NO: 422032 - RNA, 19 nt, Artificial Sequence
  Description of Artificial Sequence: Synthetic oligonucleotide
ggugaauacgcucguagcu

SEQ ID NO: 422033 - RNA, 19 nt, Artificial Sequence
  Description of Artificial Sequence: Synthetic oligonucleotide
guuugcucaccuagaagga

SEQ ID NO: 422034 - RNA, 19 nt, Artificial Sequence
  Description of Artificial Sequence: Synthetic oligonucleotide
aucgaacacgucaaggguu

SEQ ID NO: 422035 - RNA, 19 nt, Artificial Sequence
  Description of Artificial Sequence: Synthetic oligonucleotide
guugaacucucguggcguc

SEQ ID NO: 422036 - RNA, 19 nt, Artificial Sequence
  Description of Artificial Sequence: Synthetic oligonucleotide
cagauauccuucagaaaua

SEQ ID NO: 422037 - RNA, 19 nt, Artificial Sequence
  Description of Artificial Sequence: Synthetic oligonucleotide
uugaacucucguggcguca

SEQ ID NO: 422038 - RNA, 19 nt, Artificial Sequence
  Description of Artificial Sequence: Synthetic oligonucleotide
gccggaaccguacucuuug

SEQ ID NO: 422039 - RNA, 19 nt, Artificial Sequence
  Description of Artificial Sequence: Synthetic oligonucleotide
acgcccguaaagucuugca

SEQ ID NO: 422040 - RNA, 19 nt, Artificial Sequence
  Description of Artificial Sequence: Synthetic oligonucleotide
aaagaacgguggugacuua

SEQ ID NO: 422041 - RNA, 19 nt, Artificial Sequence
  Description of Artificial Sequence: Synthetic oligonucleotide
gcgauuaugcuauuacgua

SEQ ID NO: 422042 - RNA, 19 nt, Artificial Sequence
  Description of Artificial Sequence: Synthetic oligonucleotide
gaguuggccagauauccuu

SEQ ID NO: 422043 - RNA, 19 nt, Artificial Sequence
  Description of Artificial Sequence: Synthetic oligonucleotide
gucaaguagcgagcagcag

SEQ ID NO: 422044 - RNA, 19 nt, Artificial Sequence
  Description of Artificial Sequence: Synthetic oligonucleotide
gcgucauuuccucggcggg

SEQ ID NO: 422045 - RNA, 19 nt, Artificial Sequence
  Description of Artificial Sequence: Synthetic oligonucleotide
cgauaguauaccguucccg

SEQ ID NO: 422046 - RNA, 19 nt, Artificial Sequence
  Description of Artificial Sequence: Synthetic oligonucleotide
guauaccguucccgucccg

SEQ ID NO: 422047 - RNA, 19 nt, Artificial Sequence
  Description of Artificial Sequence: Synthetic oligonucleotide
ggcgauuaugcuauuacgu

SEQ ID NO: 422048 - RNA, 19 nt, Artificial Sequence
  Description of Artificial Sequence: Synthetic oligonucleotide
gauauccuucagaaauacu

SEQ ID NO: 422049 - RNA, 19 nt, Artificial Sequence
  Description of Artificial Sequence: Synthetic oligonucleotide
cacgucaaggguuucuccu

SEQ ID NO: 422050 - RNA, 19 nt, Artificial Sequence
  Description of Artificial Sequence: Synthetic oligonucleotide
ccauaagaguugaacucuc

SEQ ID NO: 422051 - RNA, 19 nt, Artificial Sequence
  Description of Artificial Sequence: Synthetic oligonucleotide
caugcguggcuuaagguuu

SEQ ID NO: 422052 - RNA, 19 nt, Artificial Sequence
  Description of Artificial Sequence: Synthetic oligonucleotide
ccggcgauuaugcuauuac

SEQ ID NO: 422053 - RNA, 19 nt, Artificial Sequence
  Description of Artificial Sequence: Synthetic oligonucleotide
guccacuauagacuugggu

SEQ ID NO: 422054 - RNA, 19 nt, Artificial Sequence
  Description of Artificial Sequence: Synthetic oligonucleotide
ggcuaaguaguuggcccgg

SEQ ID NO: 422055 - RNA, 19 nt, Artificial Sequence
  Description of Artificial Sequence: Synthetic oligonucleotide
aucuugcggaucauguaau

SEQ ID NO: 422056 - RNA, 19 nt, Artificial Sequence
  Description of Artificial Sequence: Synthetic oligonucleotide
cacgucagugucgaaccuc

SEQ ID NO: 422057 - RNA, 19 nt, Artificial Sequence
  Description of Artificial Sequence: Synthetic oligonucleotide
cggcgauuaugcuauuacg

SEQ ID NO: 422058 - RNA, 19 nt, Artificial Sequence
  Description of Artificial Sequence: Synthetic oligonucleotide
gaaaacgguagacguccau

SEQ ID NO: 422059 - RNA, 19 nt, Artificial Sequence
  Description of Artificial Sequence: Synthetic oligonucleotide
cagcuacaaggucucccug

SEQ ID NO: 422060 - RNA, 19 nt, Artificial Sequence
  Description of Artificial Sequence: Synthetic oligonucleotide
agaacgguggugacuuaau

SEQ ID NO: 422061 - RNA, 19 nt, Artificial Sequence
  Description of Artificial Sequence: Synthetic oligonucleotide
cacgcccguaaagucuugc

SEQ ID NO: 422062 - RNA, 19 nt, Artificial Sequence
  Description of Artificial Sequence: Synthetic oligonucleotide
gcggaucauguaauucagg

SEQ ID NO: 422063 - RNA, 19 nt, Artificial Sequence
  Description of Artificial Sequence: Synthetic oligonucleotide
gaauacgcucguagcucuc

SEQ ID NO: 422064 - RNA, 19 nt, Artificial Sequence
  Description of Artificial Sequence: Synthetic oligonucleotide
ugccggaaccguacucuuu

SEQ ID NO: 422065 - RNA, 19 nt, Artificial Sequence
  Description of Artificial Sequence: Synthetic oligonucleotide
gcaccacgccuuuaauccc

SEQ ID NO: 422066 - RNA, 19 nt, Artificial Sequence
  Description of Artificial Sequence: Synthetic oligonucleotide
gcuaaguaguuggcccggg

SEQ ID NO: 422067 - RNA, 19 nt, Artificial Sequence
  Description of Artificial Sequence: Synthetic oligonucleotide
gggagaggcuaaguaguug

SEQ ID NO: 422068 - RNA, 19 nt, Artificial Sequence
  Description of Artificial Sequence: Synthetic oligonucleotide
uucggugaauacgcucgua

SEQ ID NO: 422069 - RNA, 19 nt, Artificial Sequence
  Description of Artificial Sequence: Synthetic oligonucleotide
gccuccauuauggaaguaa

SEQ ID NO: 422070 - RNA, 19 nt, Artificial Sequence
  Description of Artificial Sequence: Synthetic oligonucleotide
guugaucggaugguacaua

SEQ ID NO: 422071 - RNA, 19 nt, Artificial Sequence
  Description of Artificial Sequence: Synthetic oligonucleotide
gaccuauccauuagguguu

SEQ ID NO: 422072 - RNA, 19 nt, Artificial Sequence
  Description of Artificial Sequence: Synthetic oligonucleotide
ggucccggcgauuaugcua

SEQ ID NO: 422073 - RNA, 19 nt, Artificial Sequence
  Description of Artificial Sequence: Synthetic oligonucleotide
caacggcgggucuccugag

SEQ ID NO: 422074 - RNA, 19 nt, Artificial Sequence
  Description of Artificial Sequence: Synthetic oligonucleotide
cauaggcguccacuauaga

SEQ ID NO: 422075 - RNA, 19 nt, Artificial Sequence
  Description of Artificial Sequence: Synthetic oligonucleotide
ugacacgggcugguuuaaa

SEQ ID NO: 422076 - RNA, 19 nt, Artificial Sequence
  Description of Artificial Sequence: Synthetic oligonucleotide
ucccagccggagagaugug

SEQ ID NO: 422077 - RNA, 19 nt, Artificial Sequence
  Description of Artificial Sequence: Synthetic oligonucleotide
gauggcugaccuauccauu

SEQ ID NO: 422078 - RNA, 19 nt, Artificial Sequence
  Description of Artificial Sequence: Synthetic oligonucleotide
gucccggcgauuaugcuau

SEQ ID NO: 422079 - RNA, 19 nt, Artificial Sequence
  Description of Artificial Sequence: Synthetic oligonucleotide
gcaagcgaauguuggcaaa

SEQ ID NO: 422080 - RNA, 19 nt, Artificial Sequence
  Description of Artificial Sequence: Synthetic oligonucleotide
ucccgucccgugaguccca

SEQ ID NO: 422081 - RNA, 19 nt, Artificial Sequence
  Description of Artificial Sequence: Synthetic oligonucleotide
cggaaccguacucuuugcc

SEQ ID NO: 422082 - RNA, 19 nt, Artificial Sequence
  Description of Artificial Sequence: Synthetic oligonucleotide
augacacgggcugguuuaa

SEQ ID NO: 422083 - RNA, 19 nt, Artificial Sequence
  Description of Artificial Sequence: Synthetic oligonucleotide
gcucaccuagaaggagagg

SEQ ID NO: 422084 - RNA, 19 nt, Artificial Sequence
  Description of Artificial Sequence: Synthetic oligonucleotide
guaggugaccacaccacuu

SEQ ID NO: 422085 - RNA, 19 nt, Artificial Sequence
  Description of Artificial Sequence: Synthetic oligonucleotide
ucccaguauccagcuuuau

SEQ ID NO: 422086 - RNA, 19 nt, Artificial Sequence
  Description of Artificial Sequence: Synthetic oligonucleotide
cccgaccagguuacuucgg

SEQ ID NO: 422087 - RNA, 19 nt, Artificial Sequence
  Description of Artificial Sequence: Synthetic oligonucleotide
auguuccccgugccaugau

SEQ ID NO: 422088 - RNA, 19 nt, Artificial Sequence
  Description of Artificial Sequence: Synthetic oligonucleotide
ccggaaccguacucuuugc

SEQ ID NO: 422089 - RNA, 19 nt, Artificial Sequence
  Description of Artificial Sequence: Synthetic oligonucleotide
ugcguggcuuaagguuuuc

SEQ ID NO: 422090 - RNA, 19 nt, Artificial Sequence
  Description of Artificial Sequence: Synthetic oligonucleotide
guacauaaucaugcacuuu

SEQ ID NO: 422091 - RNA, 19 nt, Artificial Sequence
  Description of Artificial Sequence: Synthetic oligonucleotide
cacucucucgaagguagua

SEQ ID NO: 422092 - RNA, 19 nt, Artificial Sequence
  Description of Artificial Sequence: Synthetic oligonucleotide
cuucggugaauacgcucgu

SEQ ID NO: 422093 - RNA, 19 nt, Artificial Sequence
  Description of Artificial Sequence: Synthetic oligonucleotide
cgaccagguuacuucggug

SEQ ID NO: 422094 - RNA, 19 nt, Artificial Sequence
  Description of Artificial Sequence: Synthetic oligonucleotide
gcaccaacggcgggucucc

SEQ ID NO: 422095 - RNA, 19 nt, Artificial Sequence
  Description of Artificial Sequence: Synthetic oligonucleotide
ccggggaagguuucauuga

SEQ ID NO: 422096 - RNA, 19 nt, Artificial Sequence
  Description of Artificial Sequence: Synthetic oligonucleotide
ccacuacaucaaacccuag

SEQ ID NO: 422097 - RNA, 19 nt, Artificial Sequence
  Description of Artificial Sequence: Synthetic oligonucleotide
accuauccauuagguguuu

SEQ ID NO: 422098 - RNA, 19 nt, Artificial Sequence
  Description of Artificial Sequence: Synthetic oligonucleotide
gcgaauguuggcaaauguu

SEQ ID NO: 422099 - RNA, 19 nt, Artificial Sequence
  Description of Artificial Sequence: Synthetic oligonucleotide
cguccacuauagacuuggg

SEQ ID NO: 422100 - RNA, 19 nt, Artificial Sequence
  Description of Artificial Sequence: Synthetic oligonucleotide
gguuuucaggaaugucgau

SEQ ID NO: 422101 - RNA, 19 nt, Artificial Sequence
  Description of Artificial Sequence: Synthetic oligonucleotide
augcguggcuuaagguuuu

SEQ ID NO: 422102 - RNA, 19 nt, Artificial Sequence
  Description of Artificial Sequence: Synthetic oligonucleotide
gcugccggaaccguacucu

SEQ ID NO: 422103 - RNA, 19 nt, Artificial Sequence
  Description of Artificial Sequence: Synthetic oligonucleotide
cccucucaacaaguaguug

SEQ ID NO: 422104 - RNA, 19 nt, Artificial Sequence
  Description of Artificial Sequence: Synthetic oligonucleotide
gucucgggagcugccggaa

SEQ ID NO: 422105 - RNA, 19 nt, Artificial Sequence
  Description of Artificial Sequence: Synthetic oligonucleotide
gcacauaggcguccacuau

SEQ ID NO: 422106 - RNA, 19 nt, Artificial Sequence
  Description of Artificial Sequence: Synthetic oligonucleotide
gcucagcaaggugugcaaa

SEQ ID NO: 422107 - RNA, 19 nt, Artificial Sequence
  Description of Artificial Sequence: Synthetic oligonucleotide
gcuaacaguccugcuccua

SEQ ID NO: 422108 - RNA, 19 nt, Artificial Sequence
  Description of Artificial Sequence: Synthetic oligonucleotide
ccggguguugggauggacu

SEQ ID NO: 422109 - RNA, 19 nt, Artificial Sequence
  Description of Artificial Sequence: Synthetic oligonucleotide
gcguggcuuaagguuuuca

SEQ ID NO: 422110 - RNA, 19 nt, Artificial Sequence
  Description of Artificial Sequence: Synthetic oligonucleotide
cuccggggaagguuucauu

SEQ ID NO: 422111 - RNA, 19 nt, Artificial Sequence
  Description of Artificial Sequence: Synthetic oligonucleotide
ucccggcgauuaugcuauu

SEQ ID NO: 422112 - RNA, 19 nt, Artificial Sequence
  Description of Artificial Sequence: Synthetic oligonucleotide
cugccggaaccguacucuu

SEQ ID NO: 422113 - RNA, 19 nt, Artificial Sequence
  Description of Artificial Sequence: Synthetic oligonucleotide
cguucccgucccgugaguc

SEQ ID NO: 422114 - RNA, 19 nt, Artificial Sequence
  Description of Artificial Sequence: Synthetic oligonucleotide
caucucgaguuggccagau

SEQ ID NO: 422115 - RNA, 19 nt, Artificial Sequence
  Description of Artificial Sequence: Synthetic oligonucleotide
ccgaccagguuacuucggu

SEQ ID NO: 422116 - RNA, 19 nt, Artificial Sequence
  Description of Artificial Sequence: Synthetic oligonucleotide
ccccucucaacaaguaguu

SEQ ID NO: 422117 - RNA, 19 nt, Artificial Sequence
  Description of Artificial Sequence: Synthetic oligonucleotide
gcacgcccguaaagucuug

SEQ ID NO: 422118 - RNA, 19 nt, Artificial Sequence
  Description of Artificial Sequence: Synthetic oligonucleotide
cccgucccgugagucccag

SEQ ID NO: 422119 - RNA, 19 nt, Artificial Sequence
  Description of Artificial Sequence: Synthetic oligonucleotide
cccggcgauuaugcuauua

SEQ ID NO: 422120 - RNA, 19 nt, Artificial Sequence
  Description of Artificial Sequence: Synthetic oligonucleotide
ccguaaagucuugcaggau

SEQ ID NO: 422121 - RNA, 19 nt, Artificial Sequence
  Description of Artificial Sequence: Synthetic oligonucleotide
ccgucccgugagucccaga

SEQ ID NO: 422122 - RNA, 19 nt, Artificial Sequence
  Description of Artificial Sequence: Synthetic oligonucleotide
ccguucccgucccgugagu

SEQ ID NO: 422123 - RNA, 19 nt, Artificial Sequence
  Description of Artificial Sequence: Synthetic oligonucleotide
ucuaguucaguuaaaauag

SEQ ID NO: 422124 - RNA, 19 nt, Artificial Sequence
  Description of Artificial Sequence: Synthetic oligonucleotide
aaugcauagaaucugaaga

SEQ ID NO: 422125 - RNA, 19 nt, Artificial Sequence
  Description of Artificial Sequence: Synthetic oligonucleotide
uauaaucuagaaaugauug

SEQ ID NO: 422126 - RNA, 19 nt, Artificial Sequence
  Description of Artificial Sequence: Synthetic oligonucleotide
gauaauuaaaggacgaugg

SEQ ID NO: 422127 - RNA, 19 nt, Artificial Sequence
  Description of Artificial Sequence: Synthetic oligonucleotide
uaauaguuuacauacagca

SEQ ID NO: 422128 - RNA, 19 nt, Artificial Sequence
  Description of Artificial Sequence: Synthetic oligonucleotide
uaguuaugacauuagaugg

SEQ ID NO: 422129 - RNA, 19 nt, Artificial Sequence
  Description of Artificial Sequence: Synthetic oligonucleotide
ugcaguaaagcaaagcagg

SEQ ID NO: 422130 - RNA, 19 nt, Artificial Sequence
  Description of Artificial Sequence: Synthetic oligonucleotide
acagcaauauaucauauag

SEQ ID NO: 422131 - RNA, 19 nt, Artificial Sequence
  Description of Artificial Sequence: Synthetic oligonucleotide
auguauaggacauuuuccc

SEQ ID NO: 422132 - RNA, 19 nt, Artificial Sequence
  Description of Artificial Sequence: Synthetic oligonucleotide
aauaagaaccuucaaacaa

SEQ ID NO: 422133 - RNA, 19 nt, Artificial Sequence
  Description of Artificial Sequence: Synthetic oligonucleotide
cuuuauuacaguaagagga

SEQ ID NO: 422134 - RNA, 19 nt, Artificial Sequence
  Description of Artificial Sequence: Synthetic oligonucleotide
ugaauaaaggaguucaggc

SEQ ID NO: 422135 - RNA, 19 nt, Artificial Sequence
  Description of Artificial Sequence: Synthetic oligonucleotide
aguaauaguuuacauacag

SEQ ID NO: 422136 - RNA, 19 nt, Artificial Sequence
  Description of Artificial Sequence: Synthetic oligonucleotide
aaacauacuguacaaauau

SEQ ID NO: 422137 - RNA, 19 nt, Artificial Sequence
  Description of Artificial Sequence: Synthetic oligonucleotide
uaucauauaguuucuaucu

SEQ ID NO: 422138 - RNA, 19 nt, Artificial Sequence
  Description of Artificial Sequence: Synthetic oligonucleotide
uguacaaauauacuuggcu

SEQ ID NO: 422139 - RNA, 19 nt, Artificial Sequence
  Description of Artificial Sequence: Synthetic oligonucleotide
agugugaauuguuacaccg

SEQ ID NO: 422140 - RNA, 19 nt, Artificial Sequence
  Description of Artificial Sequence: Synthetic oligonucleotide
ucuaggguuguuaaugggg

SEQ ID NO: 422141 - RNA, 19 nt, Artificial Sequence
  Description of Artificial Sequence: Synthetic oligonucleotide
ugaaauugaaccaucaguu

SEQ ID NO: 422142 - RNA, 19 nt, Artificial Sequence
  Description of Artificial Sequence: Synthetic oligonucleotide
agugucaacaaucuucuuc

SEQ ID NO: 422143 - RNA, 19 nt, Artificial Sequence
  Description of Artificial Sequence: Synthetic oligonucleotide
uauaguuucuaucuguagu

SEQ ID NO: 422144 - RNA, 19 nt, Artificial Sequence
  Description of Artificial Sequence: Synthetic oligonucleotide
uuugauucagcaccauugg

SEQ ID NO: 422145 - RNA, 19 nt, Artificial Sequence
  Description of Artificial Sequence: Synthetic oligonucleotide
ucuaccugaauaaaggagu

SEQ ID NO: 422146 - RNA, 19 nt, Artificial Sequence
  Description of Artificial Sequence: Synthetic oligonucleotide
auaucauauaguuucuauc

SEQ ID NO: 422147 - RNA, 19 nt, Artificial Sequence
  Description of Artificial Sequence: Synthetic oligonucleotide
uaugacauuagauggauuc

SEQ ID NO: 422148 - RNA, 19 nt, Artificial Sequence
  Description of Artificial Sequence: Synthetic oligonucleotide
agaacaaaaccucucuaac

SEQ ID NO: 422149 - RNA, 19 nt, Artificial Sequence
  Description of Artificial Sequence: Synthetic oligonucleotide
ugaauuguuacaccguagc

SEQ ID NO: 422150 - RNA, 19 nt, Artificial Sequence
  Description of Artificial Sequence: Synthetic oligonucleotide
aguaaagcaaagcaggcug

SEQ ID NO: 422151 - RNA, 19 nt, Artificial Sequence
  Description of Artificial Sequence: Synthetic oligonucleotide
gacuauacaagucucaaca

SEQ ID NO: 422152 - RNA, 19 nt, Artificial Sequence
  Description of Artificial Sequence: Synthetic oligonucleotide
uuugagacacaauucaugu

SEQ ID NO: 422153 - RNA, 19 nt, Artificial Sequence
  Description of Artificial Sequence: Synthetic oligonucleotide
aauaaaagagcagccaucu

SEQ ID NO: 422154 - RNA, 19 nt, Artificial Sequence
  Description of Artificial Sequence: Synthetic oligonucleotide
aauucucacccaaacgucc

SEQ ID NO: 422155 - RNA, 19 nt, Artificial Sequence
  Description of Artificial Sequence: Synthetic oligonucleotide
agcaauauaucauauaguu

SEQ ID NO: 422156 - RNA, 19 nt, Artificial Sequence
  Description of Artificial Sequence: Synthetic oligonucleotide
aauuaaaaggcgucacucu

SEQ ID NO: 422157 - RNA, 19 nt, Artificial Sequence
  Description of Artificial Sequence: Synthetic oligonucleotide
auaauuaaaggacgauggg

SEQ ID NO: 422158 - RNA, 19 nt, Artificial Sequence
  Description of Artificial Sequence: Synthetic oligonucleotide
uugaauuucccuuuucuga

SEQ ID NO: 422159 - RNA, 19 nt, Artificial Sequence
  Description of Artificial Sequence: Synthetic oligonucleotide
cauuaauaaaagagcagcc

SEQ ID NO: 422160 - RNA, 19 nt, Artificial Sequence
  Description of Artificial Sequence: Synthetic oligonucleotide
acaagcgauaauuaaagga

SEQ ID NO: 422161 - RNA, 19 nt, Artificial Sequence
  Description of Artificial Sequence: Synthetic oligonucleotide
cuuugauucagcaccauug

SEQ ID NO: 422162 - RNA, 19 nt, Artificial Sequence
  Description of Artificial Sequence: Synthetic oligonucleotide
uuacucuuaaugcauagaa

SEQ ID NO: 422163 - RNA, 19 nt, Artificial Sequence
  Description of Artificial Sequence: Synthetic oligonucleotide
auguaaaacauacuguaca

SEQ ID NO: 422164 - RNA, 19 nt, Artificial Sequence
  Description of Artificial Sequence: Synthetic oligonucleotide
uuuaaaagaggcccuuuug

SEQ ID NO: 422165 - RNA, 19 nt, Artificial Sequence
  Description of Artificial Sequence: Synthetic oligonucleotide
aauaccaauuuucuaguaa

SEQ ID NO: 422166 - RNA, 19 nt, Artificial Sequence
  Description of Artificial Sequence: Synthetic oligonucleotide
uacugugaauuucacagcc

SEQ ID NO: 422167 - RNA, 19 nt, Artificial Sequence
  Description of Artificial Sequence: Synthetic oligonucleotide
uuuaagacaagcgauaauu

SEQ ID NO: 422168 - RNA, 19 nt, Artificial Sequence
  Description of Artificial Sequence: Synthetic oligonucleotide
gaaagcaugguugugggag

SEQ ID NO: 422169 - RNA, 19 nt, Artificial Sequence
  Description of Artificial Sequence: Synthetic oligonucleotide
cuuaguugaaguuacuauc

SEQ ID NO: 422170 - RNA, 19 nt, Artificial Sequence
  Description of Artificial Sequence: Synthetic oligonucleotide
uuauaaucuagaaaugauu

SEQ ID NO: 422171 - RNA, 19 nt, Artificial Sequence
  Description of Artificial Sequence: Synthetic oligonucleotide
aauuaaaggacgaugggau

SEQ ID NO: 422172 - RNA, 19 nt, Artificial Sequence
  Description of Artificial Sequence: Synthetic oligonucleotide
agugaacuaucaaauaugg

SEQ ID NO: 422173 - RNA, 19 nt, Artificial Sequence
  Description of Artificial Sequence: Synthetic oligonucleotide
uaguguuauuuuaagacaa

SEQ ID NO: 422174 - RNA, 19 nt, Artificial Sequence
  Description of Artificial Sequence: Synthetic oligonucleotide
gaucuaggguuguuaaugg

SEQ ID NO: 422175 - RNA, 19 nt, Artificial Sequence
  Description of Artificial Sequence: Synthetic oligonucleotide
ucccaaaaugaccagugag

SEQ ID NO: 422176 - RNA, 19 nt, Artificial Sequence
  Description of Artificial Sequence: Synthetic oligonucleotide
uugacuuaguugaaguuac

SEQ ID NO: 422177 - RNA, 19 nt, Artificial Sequence
  Description of Artificial Sequence: Synthetic oligonucleotide
uauuaggagggcuuauucc

SEQ ID NO: 422178 - RNA, 19 nt, Artificial Sequence
  Description of Artificial Sequence: Synthetic oligonucleotide
uaauuaaaggacgauggga

SEQ ID NO: 422179 - RNA, 19 nt, Artificial Sequence
  Description of Artificial Sequence: Synthetic oligonucleotide
agaguugccucccaaaaug

SEQ ID NO: 422180 - RNA, 19 nt, Artificial Sequence
  Description of Artificial Sequence: Synthetic oligonucleotide
ugauuaguuaugacauuag

SEQ ID NO: 422181 - RNA, 19 nt, Artificial Sequence
  Description of Artificial Sequence: Synthetic oligonucleotide
accaugugaccacagaauc

SEQ ID NO: 422182 - RNA, 19 nt, Artificial Sequence
  Description of Artificial Sequence: Synthetic oligonucleotide
gauacuacuggcauucuug

SEQ ID NO: 422183 - RNA, 19 nt, Artificial Sequence
  Description of Artificial Sequence: Synthetic oligonucleotide
uugauaacagcaauauauc

SEQ ID NO: 422184 - RNA, 19 nt, Artificial Sequence
  Description of Artificial Sequence: Synthetic oligonucleotide
uuguuaauggggcaguccu

SEQ ID NO: 422185 - RNA, 19 nt, Artificial Sequence
  Description of Artificial Sequence: Synthetic oligonucleotide
aaauucuaccuacuuuuga

SEQ ID NO: 422186 - RNA, 19 nt, Artificial Sequence
  Description of Artificial Sequence: Synthetic oligonucleotide
aucuagaaaugauugauaa

SEQ ID NO: 422187 - RNA, 19 nt, Artificial Sequence
  Description of Artificial Sequence: Synthetic oligonucleotide
aauaccaauuucucccuga

SEQ ID NO: 422188 - RNA, 19 nt, Artificial Sequence
  Description of Artificial Sequence: Synthetic oligonucleotide
cucauuaauaaaagagcag

SEQ ID NO: 422189 - RNA, 19 nt, Artificial Sequence
  Description of Artificial Sequence: Synthetic oligonucleotide
auaacagcaauauaucaua

SEQ ID NO: 422190 - RNA, 19 nt, Artificial Sequence
  Description of Artificial Sequence: Synthetic oligonucleotide
uacuauccuagaaaguucu

SEQ ID NO: 422191 - RNA, 19 nt, Artificial Sequence
  Description of Artificial Sequence: Synthetic oligonucleotide
ugauguaacuuuauuuuau

SEQ ID NO: 422192 - RNA, 19 nt, Artificial Sequence
  Description of Artificial Sequence: Synthetic oligonucleotide
gacgucacgagguaagacc

SEQ ID NO: 422193 - RNA, 19 nt, Artificial Sequence
  Description of Artificial Sequence: Synthetic oligonucleotide
uuuaaacagacgucacgag

SEQ ID NO: 422194 - RNA, 19 nt, Artificial Sequence
  Description of Artificial Sequence: Synthetic oligonucleotide
uacaguaagaggaaauuuu

SEQ ID NO: 422195 - RNA, 19 nt, Artificial Sequence
  Description of Artificial Sequence: Synthetic oligonucleotide
uuagauggauucacaagga

SEQ ID NO: 422196 - RNA, 19 nt, Artificial Sequence
  Description of Artificial Sequence: Synthetic oligonucleotide
auuaauaaaagagcagcca

SEQ ID NO: 422197 - RNA, 19 nt, Artificial Sequence
  Description of Artificial Sequence: Synthetic oligonucleotide
gacaagcgauaauuaaagg

SEQ ID NO: 422198 - RNA, 19 nt, Artificial Sequence
  Description of Artificial Sequence: Synthetic oligonucleotide
uaauuaaaaggcgucacuc

SEQ ID NO: 422199 - RNA, 19 nt, Artificial Sequence
  Description of Artificial Sequence: Synthetic oligonucleotide
cuagguuuguccuuccagc

SEQ ID NO: 422200 - RNA, 19 nt, Artificial Sequence
  Description of Artificial Sequence: Synthetic oligonucleotide
cuagaagaccccuuguuug

SEQ ID NO: 422201 - RNA, 19 nt, Artificial Sequence
  Description of Artificial Sequence: Synthetic oligonucleotide
uuugccugguaauagggcu

SEQ ID NO: 422202 - RNA, 19 nt, Artificial Sequence
  Description of Artificial Sequence: Synthetic oligonucleotide
uuauuaggagggcuuauuc

SEQ ID NO: 422203 - RNA, 19 nt, Artificial Sequence
  Description of Artificial Sequence: Synthetic oligonucleotide
ugcauuggccuacuuaaug

SEQ ID NO: 422204 - RNA, 19 nt, Artificial Sequence
  Description of Artificial Sequence: Synthetic oligonucleotide
uuuagaugcggacucacuu

SEQ ID NO: 422205 - RNA, 19 nt, Artificial Sequence
  Description of Artificial Sequence: Synthetic oligonucleotide
uucguguugcuacucacug

SEQ ID NO: 422206 - RNA, 19 nt, Artificial Sequence
  Description of Artificial Sequence: Synthetic oligonucleotide
uguuacaccguagcuaucc

SEQ ID NO: 422207 - RNA, 19 nt, Artificial Sequence
  Description of Artificial Sequence: Synthetic oligonucleotide
auauaguuucuaucuguag

SEQ ID NO: 422208 - RNA, 19 nt, Artificial Sequence
  Description of Artificial Sequence: Synthetic oligonucleotide
auaccaauuuucuaguaau

SEQ ID NO: 422209 - RNA, 19 nt, Artificial Sequence
  Description of Artificial Sequence: Synthetic oligonucleotide
uguugcuacucacuggugu

SEQ ID NO: 422210 - RNA, 19 nt, Artificial Sequence
  Description of Artificial Sequence: Synthetic oligonucleotide
uuggccuacuuaaugguug

SEQ ID NO: 422211 - RNA, 19 nt, Artificial Sequence
  Description of Artificial Sequence: Synthetic oligonucleotide
aauuguuacaccguagcua

SEQ ID NO: 422212 - RNA, 19 nt, Artificial Sequence
  Description of Artificial Sequence: Synthetic oligonucleotide
agacaagcgauaauuaaag

SEQ ID NO: 422213 - RNA, 19 nt, Artificial Sequence
  Description of Artificial Sequence: Synthetic oligonucleotide
agaucuaggguuguuaaug

SEQ ID NO: 422214 - RNA, 19 nt, Artificial Sequence
  Description of Artificial Sequence: Synthetic oligonucleotide
uuguuugacccacugauuu

SEQ ID NO: 422215 - RNA, 19 nt, Artificial Sequence
  Description of Artificial Sequence: Synthetic oligonucleotide
uucuaccuacuuuugauaa

SEQ ID NO: 422216 - RNA, 19 nt, Artificial Sequence
  Description of Artificial Sequence: Synthetic oligonucleotide
cuaacaagaauuaaaucua

SEQ ID NO: 422217 - RNA, 19 nt, Artificial Sequence
  Description of Artificial Sequence: Synthetic oligonucleotide
uguaauuaaaaggcgucac

SEQ ID NO: 422218 - RNA, 19 nt, Artificial Sequence
  Description of Artificial Sequence: Synthetic oligonucleotide
gauuaguuaugacauuaga

SEQ ID NO: 422219 - RNA, 19 nt, Artificial Sequence
  Description of Artificial Sequence: Synthetic oligonucleotide
ugaaucucgcuucuucgug

SEQ ID NO: 422220 - RNA, 19 nt, Artificial Sequence
  Description of Artificial Sequence: Synthetic oligonucleotide
aucauauaguuucuaucug

SEQ ID NO: 422221 - RNA, 19 nt, Artificial Sequence
  Description of Artificial Sequence: Synthetic oligonucleotide
guagcuauccuaugcacac

SEQ ID NO: 422222 - RNA, 19 nt, Artificial Sequence
  Description of Artificial Sequence: Synthetic oligonucleotide
aggcuggguaaacauauuc

SEQ ID NO: 422223 - RNA, 19 nt, Artificial Sequence
  Description of Artificial Sequence: Synthetic oligonucleotide
uuacuauccuagaaaguuc

SEQ ID NO: 422224 - RNA, 19 nt, Artificial Sequence
  Description of Artificial Sequence: Synthetic oligonucleotide
uuauuagacccauugccau

SEQ ID NO: 422225 - RNA, 19 nt, Artificial Sequence
  Description of Artificial Sequence: Synthetic oligonucleotide
cuaccuaacaagaguugcc

SEQ ID NO: 422226 - RNA, 19 nt, Artificial Sequence
  Description of Artificial Sequence: Synthetic oligonucleotide
aaaauagugugaauuguua

SEQ ID NO: 422227 - RNA, 19 nt, Artificial Sequence
  Description of Artificial Sequence: Synthetic oligonucleotide
agagcagccaucucaccuc

SEQ ID NO: 422228 - RNA, 19 nt, Artificial Sequence
  Description of Artificial Sequence: Synthetic oligonucleotide
augugaaauaagaaccuuc

SEQ ID NO: 422229 - RNA, 19 nt, Artificial Sequence
  Description of Artificial Sequence: Synthetic oligonucleotide
uuuaguccuuuagaugcgg

SEQ ID NO: 422230 - RNA, 19 nt, Artificial Sequence
  Description of Artificial Sequence: Synthetic oligonucleotide
gaauagaagaugagcuucc

SEQ ID NO: 422231 - RNA, 19 nt, Artificial Sequence
  Description of Artificial Sequence: Synthetic oligonucleotide
uuguaauuaaaaggcguca

SEQ ID NO: 422232 - RNA, 19 nt, Artificial Sequence
  Description of Artificial Sequence: Synthetic oligonucleotide
guugaagcagugcuaggag

SEQ ID NO: 422233 - RNA, 19 nt, Artificial Sequence
  Description of Artificial Sequence: Synthetic oligonucleotide
ucuugggauacuacuggca

SEQ ID NO: 422234 - RNA, 19 nt, Artificial Sequence
  Description of Artificial Sequence: Synthetic oligonucleotide
acauuagauggauucacaa

SEQ ID NO: 422235 - RNA, 19 nt, Artificial Sequence
  Description of Artificial Sequence: Synthetic oligonucleotide
guaauaguuuacauacagc

SEQ ID NO: 422236 - RNA, 19 nt, Artificial Sequence
  Description of Artificial Sequence: Synthetic oligonucleotide
uuacaguuacacagauuug

SEQ ID NO: 422237 - RNA, 19 nt, Artificial Sequence
  Description of Artificial Sequence: Synthetic oligonucleotide
aacguccucuguuuuagaa

SEQ ID NO: 422238 - RNA, 19 nt, Artificial Sequence
  Description of Artificial Sequence: Synthetic oligonucleotide
cuuaaugguugcuguguag

SEQ ID NO: 422239 - RNA, 19 nt, Artificial Sequence
  Description of Artificial Sequence: Synthetic oligonucleotide
aucuaggguuguuaauggg

SEQ ID NO: 422240 - RNA, 19 nt, Artificial Sequence
  Description of Artificial Sequence: Synthetic oligonucleotide
acgucacgagguaagaccc

SEQ ID NO: 422241 - RNA, 19 nt, Artificial Sequence
  Description of Artificial Sequence: Synthetic oligonucleotide
ugcggacucacuucuuggg

SEQ ID NO: 422242 - RNA, 19 nt, Artificial Sequence
  Description of Artificial Sequence: Synthetic oligonucleotide
uagaugcggacucacuucu

SEQ ID NO: 422243 - RNA, 19 nt, Artificial Sequence
  Description of Artificial Sequence: Synthetic oligonucleotide
uuagaugcggacucacuuc

SEQ ID NO: 422244 - RNA, 19 nt, Artificial Sequence
  Description of Artificial Sequence: Synthetic oligonucleotide
cacugauuugggaaguuug

SEQ ID NO: 422245 - RNA, 19 nt, Artificial Sequence
  Description of Artificial Sequence: Synthetic oligonucleotide
cuuauuccauuucuaccag

SEQ ID NO: 422246 - RNA, 19 nt, Artificial Sequence
  Description of Artificial Sequence: Synthetic oligonucleotide
uucuaguaauaguuuacau

SEQ ID NO: 422247 - RNA, 19 nt, Artificial Sequence
  Description of Artificial Sequence: Synthetic oligonucleotide
gcauuggccuacuuaaugg

SEQ ID NO: 422248 - RNA, 19 nt, Artificial Sequence
  Description of Artificial Sequence: Synthetic oligonucleotide
caucucaccucaaauacca

SEQ ID NO: 422249 - RNA, 19 nt, Artificial Sequence
  Description of Artificial Sequence: Synthetic oligonucleotide
uuuuaagacaagcgauaau

SEQ ID NO: 422250 - RNA, 19 nt, Artificial Sequence
  Description of Artificial Sequence: Synthetic oligonucleotide
gauggaugcuacuuaaaua

SEQ ID NO: 422251 - RNA, 19 nt, Artificial Sequence
  Description of Artificial Sequence: Synthetic oligonucleotide
aucuaccugaauaaaggag

SEQ ID NO: 422252 - RNA, 19 nt, Artificial Sequence
  Description of Artificial Sequence: Synthetic oligonucleotide
aagaguugccucccaaaau

SEQ ID NO: 422253 - RNA, 19 nt, Artificial Sequence
  Description of Artificial Sequence: Synthetic oligonucleotide
caggcgguuuuccagaccc

SEQ ID NO: 422254 - RNA, 19 nt, Artificial Sequence
  Description of Artificial Sequence: Synthetic oligonucleotide
acagauuugagcacaaaau

SEQ ID NO: 422255 - RNA, 19 nt, Artificial Sequence
  Description of Artificial Sequence: Synthetic oligonucleotide
auccgggucuagaagaccc

SEQ ID NO: 422256 - RNA, 19 nt, Artificial Sequence
  Description of Artificial Sequence: Synthetic oligonucleotide
uuuacucuuaaugcauaga

SEQ ID NO: 422257 - RNA, 19 nt, Artificial Sequence
  Description of Artificial Sequence: Synthetic oligonucleotide
ggauguauaggacauuuuc

SEQ ID NO: 422258 - RNA, 19 nt, Artificial Sequence
  Description of Artificial Sequence: Synthetic oligonucleotide
aguuugccugguaauaggg

SEQ ID NO: 422259 - RNA, 19 nt, Artificial Sequence
  Description of Artificial Sequence: Synthetic oligonucleotide
agguaagacccagaauggc

SEQ ID NO: 422260 - RNA, 19 nt, Artificial Sequence
  Description of Artificial Sequence: Synthetic oligonucleotide
cacuggacucugaugaagc

SEQ ID NO: 422261 - RNA, 19 nt, Artificial Sequence
  Description of Artificial Sequence: Synthetic oligonucleotide
guaaagcaaagcaggcugg

SEQ ID NO: 422262 - RNA, 19 nt, Artificial Sequence
  Description of Artificial Sequence: Synthetic oligonucleotide
cucuuuuaaacagacguca

SEQ ID NO: 422263 - RNA, 19 nt, Artificial Sequence
  Description of Artificial Sequence: Synthetic oligonucleotide
aauucaugucucauuaaua

SEQ ID NO: 422264 - RNA, 19 nt, Artificial Sequence
  Description of Artificial Sequence: Synthetic oligonucleotide
uggcgcuuaggacuuuggg

SEQ ID NO: 422265 - RNA, 19 nt, Artificial Sequence
  Description of Artificial Sequence: Synthetic oligonucleotide
uggaugcuacuuaaauaca

SEQ ID NO: 422266 - RNA, 19 nt, Artificial Sequence
  Description of Artificial Sequence: Synthetic oligonucleotide
cuauccuagaaaguucuac

SEQ ID NO: 422267 - RNA, 19 nt, Artificial Sequence
  Description of Artificial Sequence: Synthetic oligonucleotide
gguaagacccagaauggcg

SEQ ID NO: 422268 - RNA, 19 nt, Artificial Sequence
  Description of Artificial Sequence: Synthetic oligonucleotide
uugaaucucgcuucuucgu

SEQ ID NO: 422269 - RNA, 19 nt, Artificial Sequence
  Description of Artificial Sequence: Synthetic oligonucleotide
gacccacugauuugggaag

SEQ ID NO: 422270 - RNA, 19 nt, Artificial Sequence
  Description of Artificial Sequence: Synthetic oligonucleotide
aguuucguccuggagacug

SEQ ID NO: 422271 - RNA, 19 nt, Artificial Sequence
  Description of Artificial Sequence: Synthetic oligonucleotide
uccuaccuaacaagaguug

SEQ ID NO: 422272 - RNA, 19 nt, Artificial Sequence
  Description of Artificial Sequence: Synthetic oligonucleotide
ggggauuugagauggccgg

SEQ ID NO: 422273 - RNA, 19 nt, Artificial Sequence
  Description of Artificial Sequence: Synthetic oligonucleotide
gaaguggucugagaaagca

SEQ ID NO: 422274 - RNA, 19 nt, Artificial Sequence
  Description of Artificial Sequence: Synthetic oligonucleotide
cuagauccgggucuagaag

SEQ ID NO: 422275 - RNA, 19 nt, Artificial Sequence
  Description of Artificial Sequence: Synthetic oligonucleotide
agcaucuaccugaauaaag

SEQ ID NO: 422276 - RNA, 19 nt, Artificial Sequence
  Description of Artificial Sequence: Synthetic oligonucleotide
accuaacaagaguugccuc

SEQ ID NO: 422277 - RNA, 19 nt, Artificial Sequence
  Description of Artificial Sequence: Synthetic oligonucleotide
cuaugcacaccaugugacc

SEQ ID NO: 422278 - RNA, 19 nt, Artificial Sequence
  Description of Artificial Sequence: Synthetic oligonucleotide
ggauaagccugcuuguuug

SEQ ID NO: 422279 - RNA, 19 nt, Artificial Sequence
  Description of Artificial Sequence: Synthetic oligonucleotide
agauagaguuucguccugg

SEQ ID NO: 422280 - RNA, 19 nt, Artificial Sequence
  Description of Artificial Sequence: Synthetic oligonucleotide
ucuauacagcaguugugaa

SEQ ID NO: 422281 - RNA, 19 nt, Artificial Sequence
  Description of Artificial Sequence: Synthetic oligonucleotide
uacgcucgacuauacaagu

SEQ ID NO: 422282 - RNA, 19 nt, Artificial Sequence
  Description of Artificial Sequence: Synthetic oligonucleotide
aguucaguuaaaauaguuu

SEQ ID NO: 422283 - RNA, 19 nt, Artificial Sequence
  Description of Artificial Sequence: Synthetic oligonucleotide
cuacuuaaugguugcugug

SEQ ID NO: 422284 - RNA, 19 nt, Artificial Sequence
  Description of Artificial Sequence: Synthetic oligonucleotide
uucgucucaguuccuuucu

SEQ ID NO: 422285 - RNA, 19 nt, Artificial Sequence
  Description of Artificial Sequence: Synthetic oligonucleotide
uuucuaucuguaguguuau

SEQ ID NO: 422286 - RNA, 19 nt, Artificial Sequence
  Description of Artificial Sequence: Synthetic oligonucleotide
aguuaugacauuagaugga

SEQ ID NO: 422287 - RNA, 19 nt, Artificial Sequence
  Description of Artificial Sequence: Synthetic oligonucleotide
caacagucccacuagguga

SEQ ID NO: 422288 - RNA, 19 nt, Artificial Sequence
  Description of Artificial Sequence: Synthetic oligonucleotide
uuugggcuccacuggauuc

SEQ ID NO: 422289 - RNA, 19 nt, Artificial Sequence
  Description of Artificial Sequence: Synthetic oligonucleotide
ugcauagaaucugaagaaa

SEQ ID NO: 422290 - RNA, 19 nt, Artificial Sequence
  Description of Artificial Sequence: Synthetic oligonucleotide
uugccauuauucaucugau

SEQ ID NO: 422291 - RNA, 19 nt, Artificial Sequence
  Description of Artificial Sequence: Synthetic oligonucleotide
cauuacuucugaaauugaa

SEQ ID NO: 422292 - RNA, 19 nt, Artificial Sequence
  Description of Artificial Sequence: Synthetic oligonucleotide
guacgcucgacuauacaag

SEQ ID NO: 422293 - RNA, 19 nt, Artificial Sequence
  Description of Artificial Sequence: Synthetic oligonucleotide
auucuaccuacuuuugaua

SEQ ID NO: 422294 - RNA, 19 nt, Artificial Sequence
  Description of Artificial Sequence: Synthetic oligonucleotide
cagaacaaaaccucucuaa

SEQ ID NO: 422295 - RNA, 19 nt, Artificial Sequence
  Description of Artificial Sequence: Synthetic oligonucleotide
caccguagcuauccuaugc

SEQ ID NO: 422296 - RNA, 19 nt, Artificial Sequence
  Description of Artificial Sequence: Synthetic oligonucleotide
uugcuacucacuggugugg

SEQ ID NO: 422297 - RNA, 19 nt, Artificial Sequence
  Description of Artificial Sequence: Synthetic oligonucleotide
aguccuuuagaugcggacu

SEQ ID NO: 422298 - RNA, 19 nt, Artificial Sequence
  Description of Artificial Sequence: Synthetic oligonucleotide
gaacuguguuugcuggagc

SEQ ID NO: 422299 - RNA, 19 nt, Artificial Sequence
  Description of Artificial Sequence: Synthetic oligonucleotide
agacccacggugugcacag

SEQ ID NO: 422300 - RNA, 19 nt, Artificial Sequence
  Description of Artificial Sequence: Synthetic oligonucleotide
guuacuauccuagaaaguu

SEQ ID NO: 422301 - RNA, 19 nt, Artificial Sequence
  Description of Artificial Sequence: Synthetic oligonucleotide
aguuucuaucuguaguguu

SEQ ID NO: 422302 - RNA, 19 nt, Artificial Sequence
  Description of Artificial Sequence: Synthetic oligonucleotide
cauauaguuucuaucugua

SEQ ID NO: 422303 - RNA, 19 nt, Artificial Sequence
  Description of Artificial Sequence: Synthetic oligonucleotide
uguuaauggggcaguccuc

SEQ ID NO: 422304 - RNA, 19 nt, Artificial Sequence
  Description of Artificial Sequence: Synthetic oligonucleotide
caucuaccugaauaaagga

SEQ ID NO: 422305 - RNA, 19 nt, Artificial Sequence
  Description of Artificial Sequence: Synthetic oligonucleotide
cucuauacagcaguuguga

SEQ ID NO: 422306 - RNA, 19 nt, Artificial Sequence
  Description of Artificial Sequence: Synthetic oligonucleotide
uuuauuaggagggcuuauu

SEQ ID NO: 422307 - RNA, 19 nt, Artificial Sequence
  Description of Artificial Sequence: Synthetic oligonucleotide
gauagaguuucguccugga

SEQ ID NO: 422308 - RNA, 19 nt, Artificial Sequence
  Description of Artificial Sequence: Synthetic oligonucleotide
guuaauggggcaguccuca

SEQ ID NO: 422309 - RNA, 19 nt, Artificial Sequence
  Description of Artificial Sequence: Synthetic oligonucleotide
auccuaugcacaccaugug

SEQ ID NO: 422310 - RNA, 19 nt, Artificial Sequence
  Description of Artificial Sequence: Synthetic oligonucleotide
acuugacuuaguugaaguu

SEQ ID NO: 422311 - RNA, 19 nt, Artificial Sequence
  Description of Artificial Sequence: Synthetic oligonucleotide
uaguuucuaucuguagugu

SEQ ID NO: 422312 - RNA, 19 nt, Artificial Sequence
  Description of Artificial Sequence: Synthetic oligonucleotide
agcgauaauuaaaggacga

SEQ ID NO: 422313 - RNA, 19 nt, Artificial Sequence
  Description of Artificial Sequence: Synthetic oligonucleotide
caagugaacuaucaaauau

SEQ ID NO: 422314 - RNA, 19 nt, Artificial Sequence
  Description of Artificial Sequence: Synthetic oligonucleotide
aagcaugguugugggagag

SEQ ID NO: 422315 - RNA, 19 nt, Artificial Sequence
  Description of Artificial Sequence: Synthetic oligonucleotide
cuucgucucaguuccuuuc

SEQ ID NO: 422316 - RNA, 19 nt, Artificial Sequence
  Description of Artificial Sequence: Synthetic oligonucleotide
uaaaggacgaugggaugga

SEQ ID NO: 422317 - RNA, 19 nt, Artificial Sequence
  Description of Artificial Sequence: Synthetic oligonucleotide
aauggcgcuuaggacuuug

SEQ ID NO: 422318 - RNA, 19 nt, Artificial Sequence
  Description of Artificial Sequence: Synthetic oligonucleotide
acagacgucacgagguaag

SEQ ID NO: 422319 - RNA, 19 nt, Artificial Sequence
  Description of Artificial Sequence: Synthetic oligonucleotide
gagauagaguuucguccug

SEQ ID NO: 422320 - RNA, 19 nt, Artificial Sequence
  Description of Artificial Sequence: Synthetic oligonucleotide
agacgucacgagguaagac

SEQ ID NO: 422321 - RNA, 19 nt, Artificial Sequence
  Description of Artificial Sequence: Synthetic oligonucleotide
ucucccugauguaacuuua

SEQ ID NO: 422322 - RNA, 19 nt, Artificial Sequence
  Description of Artificial Sequence: Synthetic oligonucleotide
uauuagacccauugccauu

SEQ ID NO: 422323 - RNA, 19 nt, Artificial Sequence
  Description of Artificial Sequence: Synthetic oligonucleotide
cuugacuuaguugaaguua

SEQ ID NO: 422324 - RNA, 19 nt, Artificial Sequence
  Description of Artificial Sequence: Synthetic oligonucleotide
acacaauucaugucucauu

SEQ ID NO: 422325 - RNA, 19 nt, Artificial Sequence
  Description of Artificial Sequence: Synthetic oligonucleotide
guaauuaaaaggcgucacu

SEQ ID NO: 422326 - RNA, 19 nt, Artificial Sequence
  Description of Artificial Sequence: Synthetic oligonucleotide
aaucucgcuucuucguguu

SEQ ID NO: 422327 - RNA, 19 nt, Artificial Sequence
  Description of Artificial Sequence: Synthetic oligonucleotide
auaccaauuucucccugau

SEQ ID NO: 422328 - RNA, 19 nt, Artificial Sequence
  Description of Artificial Sequence: Synthetic oligonucleotide
gacauuagauggauucaca

SEQ ID NO: 422329 - RNA, 19 nt, Artificial Sequence
  Description of Artificial Sequence: Synthetic oligonucleotide
gguacgcucgacuauacaa

SEQ ID NO: 422330 - RNA, 19 nt, Artificial Sequence
  Description of Artificial Sequence: Synthetic oligonucleotide
uugacccacugauuuggga

SEQ ID NO: 422331 - RNA, 19 nt, Artificial Sequence
  Description of Artificial Sequence: Synthetic oligonucleotide
cauucaguguuuuacaguu

SEQ ID NO: 422332 - RNA, 19 nt, Artificial Sequence
  Description of Artificial Sequence: Synthetic oligonucleotide
acaauucaugucucauuaa

SEQ ID NO: 422333 - RNA, 19 nt, Artificial Sequence
  Description of Artificial Sequence: Synthetic oligonucleotide
gagucucuagauccggguc

SEQ ID NO: 422334 - RNA, 19 nt, Artificial Sequence
  Description of Artificial Sequence: Synthetic oligonucleotide
acuuaaugguugcugugua

SEQ ID NO: 422335 - RNA, 19 nt, Artificial Sequence
  Description of Artificial Sequence: Synthetic oligonucleotide
uccucaauucucacccaaa

SEQ ID NO: 422336 - RNA, 19 nt, Artificial Sequence
  Description of Artificial Sequence: Synthetic oligonucleotide
acuggacucugaugaagca

SEQ ID NO: 422337 - RNA, 19 nt, Artificial Sequence
  Description of Artificial Sequence: Synthetic oligonucleotide
gcaacagucccacuaggug

SEQ ID NO: 422338 - RNA, 19 nt, Artificial Sequence
  Description of Artificial Sequence: Synthetic oligonucleotide
uugccugguaauagggcuc

SEQ ID NO: 422339 - RNA, 19 nt, Artificial Sequence
  Description of Artificial Sequence: Synthetic oligonucleotide
ggguuguaauuaaaaggcg

SEQ ID NO: 422340 - RNA, 19 nt, Artificial Sequence
  Description of Artificial Sequence: Synthetic oligonucleotide
agauccgggucuagaagac

SEQ ID NO: 422341 - RNA, 19 nt, Artificial Sequence
  Description of Artificial Sequence: Synthetic oligonucleotide
auuagacccauugccauua

SEQ ID NO: 422342 - RNA, 19 nt, Artificial Sequence
  Description of Artificial Sequence: Synthetic oligonucleotide
uuaugacauuagauggauu

SEQ ID NO: 422343 - RNA, 19 nt, Artificial Sequence
  Description of Artificial Sequence: Synthetic oligonucleotide
ggagcaucuaccugaauaa

SEQ ID NO: 422344 - RNA, 19 nt, Artificial Sequence
  Description of Artificial Sequence: Synthetic oligonucleotide
cuggacucugaugaagcag

SEQ ID NO: 422345 - RNA, 19 nt, Artificial Sequence
  Description of Artificial Sequence: Synthetic oligonucleotide
gguaaaucagagucuuuga

SEQ ID NO: 422346 - RNA, 19 nt, Artificial Sequence
  Description of Artificial Sequence: Synthetic oligonucleotide
aagggguacgcucgacuau

SEQ ID NO: 422347 - RNA, 19 nt, Artificial Sequence
  Description of Artificial Sequence: Synthetic oligonucleotide
guuugccugguaauagggc

SEQ ID NO: 422348 - RNA, 19 nt, Artificial Sequence
  Description of Artificial Sequence: Synthetic oligonucleotide
cuaccuacuuuugauaaaa

SEQ ID NO: 422349 - RNA, 19 nt, Artificial Sequence
  Description of Artificial Sequence: Synthetic oligonucleotide
ugaggaccaagugaacuau

SEQ ID NO: 422350 - RNA, 19 nt, Artificial Sequence
  Description of Artificial Sequence: Synthetic oligonucleotide
agucucuauacagcaguug

SEQ ID NO: 422351 - RNA, 19 nt, Artificial Sequence
  Description of Artificial Sequence: Synthetic oligonucleotide
aguuacuauccuagaaagu

SEQ ID NO: 422352 - RNA, 19 nt, Artificial Sequence
  Description of Artificial Sequence: Synthetic oligonucleotide
ucguccuggagacugcauu

SEQ ID NO: 422353 - RNA, 19 nt, Artificial Sequence
  Description of Artificial Sequence: Synthetic oligonucleotide
cuggguaucuuuugaaucu

SEQ ID NO: 422354 - RNA, 19 nt, Artificial Sequence
  Description of Artificial Sequence: Synthetic oligonucleotide
acccauugccauuauucau

SEQ ID NO: 422355 - RNA, 19 nt, Artificial Sequence
  Description of Artificial Sequence: Synthetic oligonucleotide
aggaccaagugaacuauca

SEQ ID NO: 422356 - RNA, 19 nt, Artificial Sequence
  Description of Artificial Sequence: Synthetic oligonucleotide
agugcucacccgaggaagg

SEQ ID NO: 422357 - RNA, 19 nt, Artificial Sequence
  Description of Artificial Sequence: Synthetic oligonucleotide
acguccucuguuuuagaaa

SEQ ID NO: 422358 - RNA, 19 nt, Artificial Sequence
  Description of Artificial Sequence: Synthetic oligonucleotide
uaccuacuuuugauaaaau

SEQ ID NO: 422359 - RNA, 19 nt, Artificial Sequence
  Description of Artificial Sequence: Synthetic oligonucleotide
augaccagugaggaccaag

SEQ ID NO: 422360 - RNA, 19 nt, Artificial Sequence
  Description of Artificial Sequence: Synthetic oligonucleotide
acggugugcacaggacugc

SEQ ID NO: 422361 - RNA, 19 nt, Artificial Sequence
  Description of Artificial Sequence: Synthetic oligonucleotide
uccgggucuagaagacccc

SEQ ID NO: 422362 - RNA, 19 nt, Artificial Sequence
  Description of Artificial Sequence: Synthetic oligonucleotide
ucccugauguaacuuuauu

SEQ ID NO: 422363 - RNA, 19 nt, Artificial Sequence
  Description of Artificial Sequence: Synthetic oligonucleotide
gggcuuauuccauuucuac

SEQ ID NO: 422364 - RNA, 19 nt, Artificial Sequence
  Description of Artificial Sequence: Synthetic oligonucleotide
aacagacgucacgagguaa

SEQ ID NO: 422365 - RNA, 19 nt, Artificial Sequence
  Description of Artificial Sequence: Synthetic oligonucleotide
ccuaccuaacaagaguugc

SEQ ID NO: 422366 - RNA, 19 nt, Artificial Sequence
  Description of Artificial Sequence: Synthetic oligonucleotide
gucacgagguaagacccag

SEQ ID NO: 422367 - RNA, 19 nt, Artificial Sequence
  Description of Artificial Sequence: Synthetic oligonucleotide
cucgacuauacaagucuca

SEQ ID NO: 422368 - RNA, 19 nt, Artificial Sequence
  Description of Artificial Sequence: Synthetic oligonucleotide
auauucauugggaaccaua

SEQ ID NO: 422369 - RNA, 19 nt, Artificial Sequence
  Description of Artificial Sequence: Synthetic oligonucleotide
aguuuauuaggagggcuua

SEQ ID NO: 422370 - RNA, 19 nt, Artificial Sequence
  Description of Artificial Sequence: Synthetic oligonucleotide
caagaguugccucccaaaa

SEQ ID NO: 422371 - RNA, 19 nt, Artificial Sequence
  Description of Artificial Sequence: Synthetic oligonucleotide
gaaucucgcuucuucgugu

SEQ ID NO: 422372 - RNA, 19 nt, Artificial Sequence
  Description of Artificial Sequence: Synthetic oligonucleotide
uaagguuuuguuggcucau

SEQ ID NO: 422373 - RNA, 19 nt, Artificial Sequence
  Description of Artificial Sequence: Synthetic oligonucleotide
agauggccgggcugaagug

SEQ ID NO: 422374 - RNA, 19 nt, Artificial Sequence
  Description of Artificial Sequence: Synthetic oligonucleotide
gaaagggguacgcucgacu

SEQ ID NO: 422375 - RNA, 19 nt, Artificial Sequence
  Description of Artificial Sequence: Synthetic oligonucleotide
gugaggaccaagugaacua

SEQ ID NO: 422376 - RNA, 19 nt, Artificial Sequence
  Description of Artificial Sequence: Synthetic oligonucleotide
ucacgagguaagacccaga

SEQ ID NO: 422377 - RNA, 19 nt, Artificial Sequence
  Description of Artificial Sequence: Synthetic oligonucleotide
cuccaagugcucacccgag

SEQ ID NO: 422378 - RNA, 19 nt, Artificial Sequence
  Description of Artificial Sequence: Synthetic oligonucleotide
gacucacuucuugggauac

SEQ ID NO: 422379 - RNA, 19 nt, Artificial Sequence
  Description of Artificial Sequence: Synthetic oligonucleotide
gaagugcuaucugcacugc

SEQ ID NO: 422380 - RNA, 19 nt, Artificial Sequence
  Description of Artificial Sequence: Synthetic oligonucleotide
auuucuaccaggggagaua

SEQ ID NO: 422381 - RNA, 19 nt, Artificial Sequence
  Description of Artificial Sequence: Synthetic oligonucleotide
gguugaagcagugcuagga

SEQ ID NO: 422382 - RNA, 19 nt, Artificial Sequence
  Description of Artificial Sequence: Synthetic oligonucleotide
ccuagguuuguccuuccag

SEQ ID NO: 422383 - RNA, 19 nt, Artificial Sequence
  Description of Artificial Sequence: Synthetic oligonucleotide
auagggcucagcucugauu

SEQ ID NO: 422384 - RNA, 19 nt, Artificial Sequence
  Description of Artificial Sequence: Synthetic oligonucleotide
uugggauacuacuggcauu

SEQ ID NO: 422385 - RNA, 19 nt, Artificial Sequence
  Description of Artificial Sequence: Synthetic oligonucleotide
gcaguaaagcaaagcaggc

SEQ ID NO: 422386 - RNA, 19 nt, Artificial Sequence
  Description of Artificial Sequence: Synthetic oligonucleotide
uaccagguuuuccuagguu

SEQ ID NO: 422387 - RNA, 19 nt, Artificial Sequence
  Description of Artificial Sequence: Synthetic oligonucleotide
ccugccaggggauguauag

SEQ ID NO: 422388 - RNA, 19 nt, Artificial Sequence
  Description of Artificial Sequence: Synthetic oligonucleotide
gauccgggucuagaagacc

SEQ ID NO: 422389 - RNA, 19 nt, Artificial Sequence
  Description of Artificial Sequence: Synthetic oligonucleotide
uuacucggcccuggcuucg

SEQ ID NO: 422390 - RNA, 19 nt, Artificial Sequence
  Description of Artificial Sequence: Synthetic oligonucleotide
agcaacagucccacuaggu

SEQ ID NO: 422391 - RNA, 19 nt, Artificial Sequence
  Description of Artificial Sequence: Synthetic oligonucleotide
uuucguccuggagacugca

SEQ ID NO: 422392 - RNA, 19 nt, Artificial Sequence
  Description of Artificial Sequence: Synthetic oligonucleotide
cacgagguaagacccagaa

SEQ ID NO: 422393 - RNA, 19 nt, Artificial Sequence
  Description of Artificial Sequence: Synthetic oligonucleotide
acaccguagcuauccuaug

SEQ ID NO: 422394 - RNA, 19 nt, Artificial Sequence
  Description of Artificial Sequence: Synthetic oligonucleotide
guuaugacauuagauggau

SEQ ID NO: 422395 - RNA, 19 nt, Artificial Sequence
  Description of Artificial Sequence: Synthetic oligonucleotide
gcucugauuucacugccac

SEQ ID NO: 422396 - RNA, 19 nt, Artificial Sequence
  Description of Artificial Sequence: Synthetic oligonucleotide
gacaggguuacucggcccu

SEQ ID NO: 422397 - RNA, 19 nt, Artificial Sequence
  Description of Artificial Sequence: Synthetic oligonucleotide
acccaaacguccucuguuu

SEQ ID NO: 422398 - RNA, 19 nt, Artificial Sequence
  Description of Artificial Sequence: Synthetic oligonucleotide
acgagguaagacccagaau

SEQ ID NO: 422399 - RNA, 19 nt, Artificial Sequence
  Description of Artificial Sequence: Synthetic oligonucleotide
gguuguaauuaaaaggcgu

SEQ ID NO: 422400 - RNA, 19 nt, Artificial Sequence
  Description of Artificial Sequence: Synthetic oligonucleotide
gguugugggagagauuuca

SEQ ID NO: 422401 - RNA, 19 nt, Artificial Sequence
  Description of Artificial Sequence: Synthetic oligonucleotide
aagucucuauacagcaguu

SEQ ID NO: 422402 - RNA, 19 nt, Artificial Sequence
  Description of Artificial Sequence: Synthetic oligonucleotide
ugccauuauucaucugauu

SEQ ID NO: 422403 - RNA, 19 nt, Artificial Sequence
  Description of Artificial Sequence: Synthetic oligonucleotide
cagcaguugugaagaguac

SEQ ID NO: 422404 - RNA, 19 nt, Artificial Sequence
  Description of Artificial Sequence: Synthetic oligonucleotide
cucacccaaacguccucug

SEQ ID NO: 422405 - RNA, 19 nt, Artificial Sequence
  Description of Artificial Sequence: Synthetic oligonucleotide
uagcuauccuaugcacacc

SEQ ID NO: 422406 - RNA, 19 nt, Artificial Sequence
  Description of Artificial Sequence: Synthetic oligonucleotide
gggguguuaccugugggag

SEQ ID NO: 422407 - RNA, 19 nt, Artificial Sequence
  Description of Artificial Sequence: Synthetic oligonucleotide
cuacucacuggugugggga

SEQ ID NO: 422408 - RNA, 19 nt, Artificial Sequence
  Description of Artificial Sequence: Synthetic oligonucleotide
cugucuuugaaucucgcuu

SEQ ID NO: 422409 - RNA, 19 nt, Artificial Sequence
  Description of Artificial Sequence: Synthetic oligonucleotide
gauuugagauggccgggcu

SEQ ID NO: 422410 - RNA, 19 nt, Artificial Sequence
  Description of Artificial Sequence: Synthetic oligonucleotide
acccacggugugcacagga

SEQ ID NO: 422411 - RNA, 19 nt, Artificial Sequence
  Description of Artificial Sequence: Synthetic oligonucleotide
cuugggauacuacuggcau

SEQ ID NO: 422412 - RNA, 19 nt, Artificial Sequence
  Description of Artificial Sequence: Synthetic oligonucleotide
guugugggagagauuucac

SEQ ID NO: 422413 - RNA, 19 nt, Artificial Sequence
  Description of Artificial Sequence: Synthetic oligonucleotide
cugccaggggauguauagg

SEQ ID NO: 422414 - RNA, 19 nt, Artificial Sequence
  Description of Artificial Sequence: Synthetic oligonucleotide
cagcaauauaucauauagu

SEQ ID NO: 422415 - RNA, 19 nt, Artificial Sequence
  Description of Artificial Sequence: Synthetic oligonucleotide
ccagaauggcgcuuaggac

SEQ ID NO: 422416 - RNA, 19 nt, Artificial Sequence
  Description of Artificial Sequence: Synthetic oligonucleotide
guaauagggcucagcucug

SEQ ID NO: 422417 - RNA, 19 nt, Artificial Sequence
  Description of Artificial Sequence: Synthetic oligonucleotide
agaauggcgcuuaggacuu

SEQ ID NO: 422418 - RNA, 19 nt, Artificial Sequence
  Description of Artificial Sequence: Synthetic oligonucleotide
acgcucgacuauacaaguc

SEQ ID NO: 422419 - RNA, 19 nt, Artificial Sequence
  Description of Artificial Sequence: Synthetic oligonucleotide
cccagaauggcgcuuagga

SEQ ID NO: 422420 - RNA, 19 nt, Artificial Sequence
  Description of Artificial Sequence: Synthetic oligonucleotide
ugaaagggguacgcucgac

SEQ ID NO: 422421 - RNA, 19 nt, Artificial Sequence
  Description of Artificial Sequence: Synthetic oligonucleotide
ggauuugagauggccgggc

SEQ ID NO: 422422 - RNA, 19 nt, Artificial Sequence
  Description of Artificial Sequence: Synthetic oligonucleotide
ggcuggguaaacauauuca

SEQ ID NO: 422423 - RNA, 19 nt, Artificial Sequence
  Description of Artificial Sequence: Synthetic oligonucleotide
aaaggacgaugggauggau

SEQ ID NO: 422424 - RNA, 19 nt, Artificial Sequence
  Description of Artificial Sequence: Synthetic oligonucleotide
gaugggauggaugcuacuu

SEQ ID NO: 422425 - RNA, 19 nt, Artificial Sequence
  Description of Artificial Sequence: Synthetic oligonucleotide
gacacaauucaugucucau

SEQ ID NO: 422426 - RNA, 19 nt, Artificial Sequence
  Description of Artificial Sequence: Synthetic oligonucleotide
uggguaucuuuugaaucuu

SEQ ID NO: 422427 - RNA, 19 nt, Artificial Sequence
  Description of Artificial Sequence: Synthetic oligonucleotide
uuguuacaccguagcuauc

SEQ ID NO: 422428 - RNA, 19 nt, Artificial Sequence
  Description of Artificial Sequence: Synthetic oligonucleotide
aggcuuccacuugacuuag

SEQ ID NO: 422429 - RNA, 19 nt, Artificial Sequence
  Description of Artificial Sequence: Synthetic oligonucleotide
guccucaauucucacccaa

SEQ ID NO: 422430 - RNA, 19 nt, Artificial Sequence
  Description of Artificial Sequence: Synthetic oligonucleotide
ugcucacccgaggaaggcu

SEQ ID NO: 422431 - RNA, 19 nt, Artificial Sequence
  Description of Artificial Sequence: Synthetic oligonucleotide
ucucuagauccgggucuag

SEQ ID NO: 422432 - RNA, 19 nt, Artificial Sequence
  Description of Artificial Sequence: Synthetic oligonucleotide
uucuaucuguaguguuauu

SEQ ID NO: 422433 - RNA, 19 nt, Artificial Sequence
  Description of Artificial Sequence: Synthetic oligonucleotide
auggcgcuuaggacuuugg

SEQ ID NO: 422434 - RNA, 19 nt, Artificial Sequence
  Description of Artificial Sequence: Synthetic oligonucleotide
guuucguccuggagacugc

SEQ ID NO: 422435 - RNA, 19 nt, Artificial Sequence
  Description of Artificial Sequence: Synthetic oligonucleotide
gcuggguaaacauauucau

SEQ ID NO: 422436 - RNA, 19 nt, Artificial Sequence
  Description of Artificial Sequence: Synthetic oligonucleotide
gaggaccaagugaacuauc

SEQ ID NO: 422437 - RNA, 19 nt, Artificial Sequence
  Description of Artificial Sequence: Synthetic oligonucleotide
gccacaugauuaguuauga

SEQ ID NO: 422438 - RNA, 19 nt, Artificial Sequence
  Description of Artificial Sequence: Synthetic oligonucleotide
cuuuagaugcggacucacu

SEQ ID NO: 422439 - RNA, 19 nt, Artificial Sequence
  Description of Artificial Sequence: Synthetic oligonucleotide
gcuaucugcacugcuuuuc

SEQ ID NO: 422440 - RNA, 19 nt, Artificial Sequence
  Description of Artificial Sequence: Synthetic oligonucleotide
ggcauucuuggauaagccu

SEQ ID NO: 422441 - RNA, 19 nt, Artificial Sequence
  Description of Artificial Sequence: Synthetic oligonucleotide
uaaaggaguucaggcgguu

SEQ ID NO: 422442 - RNA, 19 nt, Artificial Sequence
  Description of Artificial Sequence: Synthetic oligonucleotide
ccacaugauuaguuaugac

SEQ ID NO: 422443 - RNA, 19 nt, Artificial Sequence
  Description of Artificial Sequence: Synthetic oligonucleotide
caagugcucacccgaggaa

SEQ ID NO: 422444 - RNA, 19 nt, Artificial Sequence
  Description of Artificial Sequence: Synthetic oligonucleotide
ggaaguuugccugguaaua

SEQ ID NO: 422445 - RNA, 19 nt, Artificial Sequence
  Description of Artificial Sequence: Synthetic oligonucleotide
agggguacgcucgacuaua

SEQ ID NO: 422446 - RNA, 19 nt, Artificial Sequence
  Description of Artificial Sequence: Synthetic oligonucleotide
acccacugauuugggaagu

SEQ ID NO: 422447 - RNA, 19 nt, Artificial Sequence
  Description of Artificial Sequence: Synthetic oligonucleotide
ggaccaagugaacuaucaa

SEQ ID NO: 422448 - RNA, 19 nt, Artificial Sequence
  Description of Artificial Sequence: Synthetic oligonucleotide
ccguagcuauccuaugcac

SEQ ID NO: 422449 - RNA, 19 nt, Artificial Sequence
  Description of Artificial Sequence: Synthetic oligonucleotide
ccuacuuaaugguugcugu

SEQ ID NO: 422450 - RNA, 19 nt, Artificial Sequence
  Description of Artificial Sequence: Synthetic oligonucleotide
guuacaccguagcuauccu

SEQ ID NO: 422451 - RNA, 19 nt, Artificial Sequence
  Description of Artificial Sequence: Synthetic oligonucleotide
cucuagauccgggucuaga

SEQ ID NO: 422452 - RNA, 19 nt, Artificial Sequence
  Description of Artificial Sequence: Synthetic oligonucleotide
gugaacuaucaaauauggu

SEQ ID NO: 422453 - RNA, 19 nt, Artificial Sequence
  Description of Artificial Sequence: Synthetic oligonucleotide
ccagaucuaggguuguuaa

SEQ ID NO: 422454 - RNA, 19 nt, Artificial Sequence
  Description of Artificial Sequence: Synthetic oligonucleotide
gugcucacccgaggaaggc

SEQ ID NO: 422455 - RNA, 19 nt, Artificial Sequence
  Description of Artificial Sequence: Synthetic oligonucleotide
gguuacucggcccuggcuu

SEQ ID NO: 422456 - RNA, 19 nt, Artificial Sequence
  Description of Artificial Sequence: Synthetic oligonucleotide
cacuaggugaacuguguuu

SEQ ID NO: 422457 - RNA, 19 nt, Artificial Sequence
  Description of Artificial Sequence: Synthetic oligonucleotide
caguuacagcauagcaaaa

SEQ ID NO: 422458 - RNA, 19 nt, Artificial Sequence
  Description of Artificial Sequence: Synthetic oligonucleotide
aaugaccagugaggaccaa

SEQ ID NO: 422459 - RNA, 19 nt, Artificial Sequence
  Description of Artificial Sequence: Synthetic oligonucleotide
cgacuauacaagucucaac

SEQ ID NO: 422460 - RNA, 19 nt, Artificial Sequence
  Description of Artificial Sequence: Synthetic oligonucleotide
cauggagcucacaugcuuu

SEQ ID NO: 422461 - RNA, 19 nt, Artificial Sequence
  Description of Artificial Sequence: Synthetic oligonucleotide
acucacuucuugggauacu

SEQ ID NO: 422462 - RNA, 19 nt, Artificial Sequence
  Description of Artificial Sequence: Synthetic oligonucleotide
gcgguuuuccagacccacg

SEQ ID NO: 422463 - RNA, 19 nt, Artificial Sequence
  Description of Artificial Sequence: Synthetic oligonucleotide
ggggcaguccucaauucuc

SEQ ID NO: 422464 - RNA, 19 nt, Artificial Sequence
  Description of Artificial Sequence: Synthetic oligonucleotide
acuauccuagaaaguucua

SEQ ID NO: 422465 - RNA, 19 nt, Artificial Sequence
  Description of Artificial Sequence: Synthetic oligonucleotide
ggcgguuuuccagacccac

SEQ ID NO: 422466 - RNA, 19 nt, Artificial Sequence
  Description of Artificial Sequence: Synthetic oligonucleotide
ccuuuagaugcggacucac

SEQ ID NO: 422467 - RNA, 19 nt, Artificial Sequence
  Description of Artificial Sequence: Synthetic oligonucleotide
gcggacucacuucuuggga

SEQ ID NO: 422468 - RNA, 19 nt, Artificial Sequence
  Description of Artificial Sequence: Synthetic oligonucleotide
uuaggacuuugggcuccac

SEQ ID NO: 422469 - RNA, 19 nt, Artificial Sequence
  Description of Artificial Sequence: Synthetic oligonucleotide
guuuauuaggagggcuuau

SEQ ID NO: 422470 - RNA, 19 nt, Artificial Sequence
  Description of Artificial Sequence: Synthetic oligonucleotide
cagacgucacgagguaaga

SEQ ID NO: 422471 - RNA, 19 nt, Artificial Sequence
  Description of Artificial Sequence: Synthetic oligonucleotide
cuuaggacuuugggcucca

SEQ ID NO: 422472 - RNA, 19 nt, Artificial Sequence
  Description of Artificial Sequence: Synthetic oligonucleotide
cagaucuaggguuguuaau

SEQ ID NO: 422473 - RNA, 19 nt, Artificial Sequence
  Description of Artificial Sequence: Synthetic oligonucleotide
ggucuagaagaccccuugu

SEQ ID NO: 422474 - RNA, 19 nt, Artificial Sequence
  Description of Artificial Sequence: Synthetic oligonucleotide
gacccacggugugcacagg

SEQ ID NO: 422475 - RNA, 19 nt, Artificial Sequence
  Description of Artificial Sequence: Synthetic oligonucleotide
gggcaguccucaauucuca

SEQ ID NO: 422476 - RNA, 19 nt, Artificial Sequence
  Description of Artificial Sequence: Synthetic oligonucleotide
ggguacgcucgacuauaca

SEQ ID NO: 422477 - RNA, 19 nt, Artificial Sequence
  Description of Artificial Sequence: Synthetic oligonucleotide
cagccaucucaccucaaau

SEQ ID NO: 422478 - RNA, 19 nt, Artificial Sequence
  Description of Artificial Sequence: Synthetic oligonucleotide
cauuucuaccaggggagau

SEQ ID NO: 422479 - RNA, 19 nt, Artificial Sequence
  Description of Artificial Sequence: Synthetic oligonucleotide
aggggauguauaggacauu

SEQ ID NO: 422480 - RNA, 19 nt, Artificial Sequence
  Description of Artificial Sequence: Synthetic oligonucleotide
ccaaacguccucuguuuua

SEQ ID NO: 422481 - RNA, 19 nt, Artificial Sequence
  Description of Artificial Sequence: Synthetic oligonucleotide
gcaugguugugggagagau

SEQ ID NO: 422482 - RNA, 19 nt, Artificial Sequence
  Description of Artificial Sequence: Synthetic oligonucleotide
cgcucgacuauacaagucu

SEQ ID NO: 422483 - RNA, 19 nt, Artificial Sequence
  Description of Artificial Sequence: Synthetic oligonucleotide
cugcauuggccuacuuaau

SEQ ID NO: 422484 - RNA, 19 nt, Artificial Sequence
  Description of Artificial Sequence: Synthetic oligonucleotide
aggcgguuuuccagaccca

SEQ ID NO: 422485 - RNA, 19 nt, Artificial Sequence
  Description of Artificial Sequence: Synthetic oligonucleotide
gggguacgcucgacuauac

SEQ ID NO: 422486 - RNA, 19 nt, Artificial Sequence
  Description of Artificial Sequence: Synthetic oligonucleotide
cccuuguuugacccacuga

SEQ ID NO: 422487 - RNA, 19 nt, Artificial Sequence
  Description of Artificial Sequence: Synthetic oligonucleotide
cgucacucuggcagcaaca

SEQ ID NO: 422488 - RNA, 19 nt, Artificial Sequence
  Description of Artificial Sequence: Synthetic oligonucleotide
cucgggcugggguuguaau

SEQ ID NO: 422489 - RNA, 19 nt, Artificial Sequence
  Description of Artificial Sequence: Synthetic oligonucleotide
cucacugguguggggauuu

SEQ ID NO: 422490 - RNA, 19 nt, Artificial Sequence
  Description of Artificial Sequence: Synthetic oligonucleotide
ccucucuaacaagaauuaa

SEQ ID NO: 422491 - RNA, 19 nt, Artificial Sequence
  Description of Artificial Sequence: Synthetic oligonucleotide
ggguuguuaauggggcagu

SEQ ID NO: 422492 - RNA, 19 nt, Artificial Sequence
  Description of Artificial Sequence: Synthetic oligonucleotide
ggguuacucggcccuggcu

SEQ ID NO: 422493 - RNA, 19 nt, Artificial Sequence
  Description of Artificial Sequence: Synthetic oligonucleotide
gaguuucguccuggagacu

SEQ ID NO: 422494 - RNA, 19 nt, Artificial Sequence
  Description of Artificial Sequence: Synthetic oligonucleotide
cccgaggaaggcuuccacu

SEQ ID NO: 422495 - RNA, 19 nt, Artificial Sequence
  Description of Artificial Sequence: Synthetic oligonucleotide
gccucccaaaaugaccagu

SEQ ID NO: 422496 - RNA, 19 nt, Artificial Sequence
  Description of Artificial Sequence: Synthetic oligonucleotide
gggauguauaggacauuuu

SEQ ID NO: 422497 - RNA, 19 nt, Artificial Sequence
  Description of Artificial Sequence: Synthetic oligonucleotide
cgucacgagguaagaccca

SEQ ID NO: 422498 - RNA, 19 nt, Artificial Sequence
  Description of Artificial Sequence: Synthetic oligonucleotide
uccucgggcugggguugua

SEQ ID NO: 422499 - RNA, 19 nt, Artificial Sequence
  Description of Artificial Sequence: Synthetic oligonucleotide
ggacgaugggauggaugcu

SEQ ID NO: 422500 - RNA, 19 nt, Artificial Sequence
  Description of Artificial Sequence: Synthetic oligonucleotide
cggacucacuucuugggau

SEQ ID NO: 422501 - RNA, 19 nt, Artificial Sequence
  Description of Artificial Sequence: Synthetic oligonucleotide
gcucacccgaggaaggcuu

SEQ ID NO: 422502 - RNA, 19 nt, Artificial Sequence
  Description of Artificial Sequence: Synthetic oligonucleotide
ccgggcugaagugcuaucu

SEQ ID NO: 422503 - RNA, 19 nt, Artificial Sequence
  Description of Artificial Sequence: Synthetic oligonucleotide
gggauacuacuggcauucu

SEQ ID NO: 422504 - RNA, 19 nt, Artificial Sequence
  Description of Artificial Sequence: Synthetic oligonucleotide
ccacuaggugaacuguguu

SEQ ID NO: 422505 - RNA, 19 nt, Artificial Sequence
  Description of Artificial Sequence: Synthetic oligonucleotide
gcuauccuaugcacaccau

SEQ ID NO: 422506 - RNA, 19 nt, Artificial Sequence
  Description of Artificial Sequence: Synthetic oligonucleotide
gaauggcgcuuaggacuuu

SEQ ID NO: 422507 - RNA, 19 nt, Artificial Sequence
  Description of Artificial Sequence: Synthetic oligonucleotide
ccgggucuagaagaccccu

SEQ ID NO: 422508 - RNA, 19 nt, Artificial Sequence
  Description of Artificial Sequence: Synthetic oligonucleotide
cgggucuagaagaccccuu

SEQ ID NO: 422509 - RNA, 19 nt, Artificial Sequence
  Description of Artificial Sequence: Synthetic oligonucleotide
uauuuuguaaacuacauac

SEQ ID NO: 422510 - RNA, 19 nt, Artificial Sequence
  Description of Artificial Sequence: Synthetic oligonucleotide
ucaacaaucggucagauaa

SEQ ID NO: 422511 - RNA, 19 nt, Artificial Sequence
  Description of Artificial Sequence: Synthetic oligonucleotide
uuuuaauagggaaucacgg

SEQ ID NO: 422512 - RNA, 19 nt, Artificial Sequence
  Description of Artificial Sequence: Synthetic oligonucleotide
uuaauagggaaucacggcg

SEQ ID NO: 422513 - RNA, 19 nt, Artificial Sequence
  Description of Artificial Sequence: Synthetic oligonucleotide
uuuguaaacuacauacugg

SEQ ID NO: 422514 - RNA, 19 nt, Artificial Sequence
  Description of Artificial Sequence: Synthetic oligonucleotide
uuguaaacuacauacuggg

SEQ ID NO: 422515 - RNA, 19 nt, Artificial Sequence
  Description of Artificial Sequence: Synthetic oligonucleotide
agaaaaguagaguuuaguc

SEQ ID NO: 422516 - RNA, 19 nt, Artificial Sequence
  Description of Artificial Sequence: Synthetic oligonucleotide
aaaaguagaguuuagucua

SEQ ID NO: 422517 - RNA, 19 nt, Artificial Sequence
  Description of Artificial Sequence: Synthetic oligonucleotide
auuauagaaaaguagaguu

SEQ ID NO: 422518 - RNA, 19 nt, Artificial Sequence
  Description of Artificial Sequence: Synthetic oligonucleotide
agauaauuauuuuguaaac

SEQ ID NO: 422519 - RNA, 19 nt, Artificial Sequence
  Description of Artificial Sequence: Synthetic oligonucleotide
ugggauuauagaaaaguag

SEQ ID NO: 422520 - RNA, 19 nt, Artificial Sequence
  Description of Artificial Sequence: Synthetic oligonucleotide
uagaguuuagucuacguac

SEQ ID NO: 422521 - RNA, 19 nt, Artificial Sequence
  Description of Artificial Sequence: Synthetic oligonucleotide
aaucacggcgguuaucaac

SEQ ID NO: 422522 - RNA, 19 nt, Artificial Sequence
  Description of Artificial Sequence: Synthetic oligonucleotide
uuuaauagggaaucacggc

SEQ ID NO: 422523 - RNA, 19 nt, Artificial Sequence
  Description of Artificial Sequence: Synthetic oligonucleotide
aauuauuuuguaaacuaca

SEQ ID NO: 422524 - RNA, 19 nt, Artificial Sequence
  Description of Artificial Sequence: Synthetic oligonucleotide
uaauagggaaucacggcgg

SEQ ID NO: 422525 - RNA, 19 nt, Artificial Sequence
  Description of Artificial Sequence: Synthetic oligonucleotide
auaauuauuuuguaaacua

SEQ ID NO: 422526 - RNA, 19 nt, Artificial Sequence
  Description of Artificial Sequence: Synthetic oligonucleotide
ugugccaucauccuggcaa

SEQ ID NO: 422527 - RNA, 19 nt, Artificial Sequence
  Description of Artificial Sequence: Synthetic oligonucleotide
ucuccugacagucuucagg

SEQ ID NO: 422528 - RNA, 19 nt, Artificial Sequence
  Description of Artificial Sequence: Synthetic oligonucleotide
ugugauuuuaauagggaau

SEQ ID NO: 422529 - RNA, 19 nt, Artificial Sequence
  Description of Artificial Sequence: Synthetic oligonucleotide
guuaucaacaaucggucag

SEQ ID NO: 422530 - RNA, 19 nt, Artificial Sequence
  Description of Artificial Sequence: Synthetic oligonucleotide
ucagauaauuauuuuguaa

SEQ ID NO: 422531 - RNA, 19 nt, Artificial Sequence
  Description of Artificial Sequence: Synthetic oligonucleotide
uuagucuacguacugucug

SEQ ID NO: 422532 - RNA, 19 nt, Artificial Sequence
  Description of Artificial Sequence: Synthetic oligonucleotide
aaagccaguuuguuuuggg

SEQ ID NO: 422533 - RNA, 19 nt, Artificial Sequence
  Description of Artificial Sequence: Synthetic oligonucleotide
uugcaugucucaaagccag

SEQ ID NO: 422534 - RNA, 19 nt, Artificial Sequence
  Description of Artificial Sequence: Synthetic oligonucleotide
uaaacuacauacuggguuc

SEQ ID NO: 422535 - RNA, 19 nt, Artificial Sequence
  Description of Artificial Sequence: Synthetic oligonucleotide
uguuuugggguccucagcu

SEQ ID NO: 422536 - RNA, 19 nt, Artificial Sequence
  Description of Artificial Sequence: Synthetic oligonucleotide
agaguugcaugucucaaag

SEQ ID NO: 422537 - RNA, 19 nt, Artificial Sequence
  Description of Artificial Sequence: Synthetic oligonucleotide
uauagaaaaguagaguuua

SEQ ID NO: 422538 - RNA, 19 nt, Artificial Sequence
  Description of Artificial Sequence: Synthetic oligonucleotide
aaggagggcgaagaguugc

SEQ ID NO: 422539 - RNA, 19 nt, Artificial Sequence
  Description of Artificial Sequence: Synthetic oligonucleotide
aagccaguuuguuuugggg

SEQ ID NO: 422540 - RNA, 19 nt, Artificial Sequence
  Description of Artificial Sequence: Synthetic oligonucleotide
ucugugauuuuaauaggga

SEQ ID NO: 422541 - RNA, 19 nt, Artificial Sequence
  Description of Artificial Sequence: Synthetic oligonucleotide
ugugaaggagugcagcacc

SEQ ID NO: 422542 - RNA, 19 nt, Artificial Sequence
  Description of Artificial Sequence: Synthetic oligonucleotide
ugaccuagugaacucuggg

SEQ ID NO: 422543 - RNA, 19 nt, Artificial Sequence
  Description of Artificial Sequence: Synthetic oligonucleotide
ugucugugauuuuaauagg

SEQ ID NO: 422544 - RNA, 19 nt, Artificial Sequence
  Description of Artificial Sequence: Synthetic oligonucleotide
acauacuggguucugaccu

SEQ ID NO: 422545 - RNA, 19 nt, Artificial Sequence
  Description of Artificial Sequence: Synthetic oligonucleotide
uuauagaaaaguagaguuu

SEQ ID NO: 422546 - RNA, 19 nt, Artificial Sequence
  Description of Artificial Sequence: Synthetic oligonucleotide
uuauuuuguaaacuacaua

SEQ ID NO: 422547 - RNA, 19 nt, Artificial Sequence
  Description of Artificial Sequence: Synthetic oligonucleotide
uugaugggauuauagaaaa

SEQ ID NO: 422548 - RNA, 19 nt, Artificial Sequence
  Description of Artificial Sequence: Synthetic oligonucleotide
cagauaauuauuuuguaaa

SEQ ID NO: 422549 - RNA, 19 nt, Artificial Sequence
  Description of Artificial Sequence: Synthetic oligonucleotide
uuuguuuugggguccucag

SEQ ID NO: 422550 - RNA, 19 nt, Artificial Sequence
  Description of Artificial Sequence: Synthetic oligonucleotide
gaaggagugcagcaccugg

SEQ ID NO: 422551 - RNA, 19 nt, Artificial Sequence
  Description of Artificial Sequence: Synthetic oligonucleotide
augucucaaagccaguuug

SEQ ID NO: 422552 - RNA, 19 nt, Artificial Sequence
  Description of Artificial Sequence: Synthetic oligonucleotide
uccucagcucuccugacag

SEQ ID NO: 422553 - RNA, 19 nt, Artificial Sequence
  Description of Artificial Sequence: Synthetic oligonucleotide
cuccugacagucuucaggc

SEQ ID NO: 422554 - RNA, 19 nt, Artificial Sequence
  Description of Artificial Sequence: Synthetic oligonucleotide
gucugugauuuuaauaggg

SEQ ID NO: 422555 - RNA, 19 nt, Artificial Sequence
  Description of Artificial Sequence: Synthetic oligonucleotide
uuuagucuacguacugucu

SEQ ID NO: 422556 - RNA, 19 nt, Artificial Sequence
  Description of Artificial Sequence: Synthetic oligonucleotide
ucuacguacugucugugau

SEQ ID NO: 422557 - RNA, 19 nt, Artificial Sequence
  Description of Artificial Sequence: Synthetic oligonucleotide
augccaugugccaucaucc

SEQ ID NO: 422558 - RNA, 19 nt, Artificial Sequence
  Description of Artificial Sequence: Synthetic oligonucleotide
uguaaacuacauacugggu

SEQ ID NO: 422559 - RNA, 19 nt, Artificial Sequence
  Description of Artificial Sequence: Synthetic oligonucleotide
gaugccaugugccaucauc

SEQ ID NO: 422560 - RNA, 19 nt, Artificial Sequence
  Description of Artificial Sequence: Synthetic oligonucleotide
uuuugggguccucagcucu

SEQ ID NO: 422561 - RNA, 19 nt, Artificial Sequence
  Description of Artificial Sequence: Synthetic oligonucleotide
gugauuuuaauagggaauc

SEQ ID NO: 422562 - RNA, 19 nt, Artificial Sequence
  Description of Artificial Sequence: Synthetic oligonucleotide
ugaugggauuauagaaaag

SEQ ID NO: 422563 - RNA, 19 nt, Artificial Sequence
  Description of Artificial Sequence: Synthetic oligonucleotide
aauagggaaucacggcggu

SEQ ID NO: 422564 - RNA, 19 nt, Artificial Sequence
  Description of Artificial Sequence: Synthetic oligonucleotide
gaugggauuauagaaaagu

SEQ ID NO: 422565 - RNA, 19 nt, Artificial Sequence
  Description of Artificial Sequence: Synthetic oligonucleotide
guuuagucuacguacuguc

SEQ ID NO: 422566 - RNA, 19 nt, Artificial Sequence
  Description of Artificial Sequence: Synthetic oligonucleotide
acaguccuugaucuugcac

SEQ ID NO: 422567 - RNA, 19 nt, Artificial Sequence
  Description of Artificial Sequence: Synthetic oligonucleotide
cuggcaaacagcugugaag

SEQ ID NO: 422568 - RNA, 19 nt, Artificial Sequence
  Description of Artificial Sequence: Synthetic oligonucleotide
aaguagaguuuagucuacg

SEQ ID NO: 422569 - RNA, 19 nt, Artificial Sequence
  Description of Artificial Sequence: Synthetic oligonucleotide
uacauacuggguucugacc

SEQ ID NO: 422570 - RNA, 19 nt, Artificial Sequence
  Description of Artificial Sequence: Synthetic oligonucleotide
uuaucaacaaucggucaga

SEQ ID NO: 422571 - RNA, 19 nt, Artificial Sequence
  Description of Artificial Sequence: Synthetic oligonucleotide
uagaaaaguagaguuuagu

SEQ ID NO: 422572 - RNA, 19 nt, Artificial Sequence
  Description of Artificial Sequence: Synthetic oligonucleotide
acggcgguuaucaacaauc

SEQ ID NO: 422573 - RNA, 19 nt, Artificial Sequence
  Description of Artificial Sequence: Synthetic oligonucleotide
agucuucaggcacuguaag

SEQ ID NO: 422574 - RNA, 19 nt, Artificial Sequence
  Description of Artificial Sequence: Synthetic oligonucleotide
ucugaccuagugaacucug

SEQ ID NO: 422575 - RNA, 19 nt, Artificial Sequence
  Description of Artificial Sequence: Synthetic oligonucleotide
aguagaguuuagucuacgu

SEQ ID NO: 422576 - RNA, 19 nt, Artificial Sequence
  Description of Artificial Sequence: Synthetic oligonucleotide
aagaguugcaugucucaaa

SEQ ID NO: 422577 - RNA, 19 nt, Artificial Sequence
  Description of Artificial Sequence: Synthetic oligonucleotide
ggauuauagaaaaguagag

SEQ ID NO: 422578 - RNA, 19 nt, Artificial Sequence
  Description of Artificial Sequence: Synthetic oligonucleotide
uuucuuucuuuguuguguc

SEQ ID NO: 422579 - RNA, 19 nt, Artificial Sequence
  Description of Artificial Sequence: Synthetic oligonucleotide
auggcacgaugccaugugc

SEQ ID NO: 422580 - RNA, 19 nt, Artificial Sequence
  Description of Artificial Sequence: Synthetic oligonucleotide
acagcugugaaggagugca

SEQ ID NO: 422581 - RNA, 19 nt, Artificial Sequence
  Description of Artificial Sequence: Synthetic oligonucleotide
aacagcugugaaggagugc

SEQ ID NO: 422582 - RNA, 19 nt, Artificial Sequence
  Description of Artificial Sequence: Synthetic oligonucleotide
agccaguuuguuuuggggu

SEQ ID NO: 422583 - RNA, 19 nt, Artificial Sequence
  Description of Artificial Sequence: Synthetic oligonucleotide
cuacauacuggguucugac

SEQ ID NO: 422584 - RNA, 19 nt, Artificial Sequence
  Description of Artificial Sequence: Synthetic oligonucleotide
ugcaccugggcauggcacg

SEQ ID NO: 422585 - RNA, 19 nt, Artificial Sequence
  Description of Artificial Sequence: Synthetic oligonucleotide
agcugugaaggagugcagc

SEQ ID NO: 422586 - RNA, 19 nt, Artificial Sequence
  Description of Artificial Sequence: Synthetic oligonucleotide
acugucugugauuuuaaua

SEQ ID NO: 422587 - RNA, 19 nt, Artificial Sequence
  Description of Artificial Sequence: Synthetic oligonucleotide
ugauuuuaauagggaauca

SEQ ID NO: 422588 - RNA, 19 nt, Artificial Sequence
  Description of Artificial Sequence: Synthetic oligonucleotide
ugucucaaagccaguuugu

SEQ ID NO: 422589 - RNA, 19 nt, Artificial Sequence
  Description of Artificial Sequence: Synthetic oligonucleotide
cugguuucccuccacgagc

SEQ ID NO: 422590 - RNA, 19 nt, Artificial Sequence
  Description of Artificial Sequence: Synthetic oligonucleotide
gggauuauagaaaaguaga

SEQ ID NO: 422591 - RNA, 19 nt, Artificial Sequence
  Description of Artificial Sequence: Synthetic oligonucleotide
uuguuuugggguccucagc

SEQ ID NO: 422592 - RNA, 19 nt, Artificial Sequence
  Description of Artificial Sequence: Synthetic oligonucleotide
gaguuuagucuacguacug

SEQ ID NO: 422593 - RNA, 19 nt, Artificial Sequence
  Description of Artificial Sequence: Synthetic oligonucleotide
ucaaagccaguuuguuuug

SEQ ID NO: 422594 - RNA, 19 nt, Artificial Sequence
  Description of Artificial Sequence: Synthetic oligonucleotide
acuggguucugaccuagug

SEQ ID NO: 422595 - RNA, 19 nt, Artificial Sequence
  Description of Artificial Sequence: Synthetic oligonucleotide
uggcacgaugccaugugcc

SEQ ID NO: 422596 - RNA, 19 nt, Artificial Sequence
  Description of Artificial Sequence: Synthetic oligonucleotide
ugcccacaguccuugaucu

SEQ ID NO: 422597 - RNA, 19 nt, Artificial Sequence
  Description of Artificial Sequence: Synthetic oligonucleotide
ccaugugccaucauccugg

SEQ ID NO: 422598 - RNA, 19 nt, Artificial Sequence
  Description of Artificial Sequence: Synthetic oligonucleotide
guaaacuacauacuggguu

SEQ ID NO: 422599 - RNA, 19 nt, Artificial Sequence
  Description of Artificial Sequence: Synthetic oligonucleotide
caucauccuggcaaacagc

SEQ ID NO: 422600 - RNA, 19 nt, Artificial Sequence
  Description of Artificial Sequence: Synthetic oligonucleotide
cacccuguagaacaggguc

SEQ ID NO: 422601 - RNA, 19 nt, Artificial Sequence
  Description of Artificial Sequence: Synthetic oligonucleotide
gagugcagcaccugguuuc

SEQ ID NO: 422602 - RNA, 19 nt, Artificial Sequence
  Description of Artificial Sequence: Synthetic oligonucleotide
aucauccuggcaaacagcu

SEQ ID NO: 422603 - RNA, 19 nt, Artificial Sequence
  Description of Artificial Sequence: Synthetic oligonucleotide
uagucuacguacugucugu

SEQ ID NO: 422604 - RNA, 19 nt, Artificial Sequence
  Description of Artificial Sequence: Synthetic oligonucleotide
ugguuucccuccacgagcu

SEQ ID NO: 422605 - RNA, 19 nt, Artificial Sequence
  Description of Artificial Sequence: Synthetic oligonucleotide
aguuuagucuacguacugu

SEQ ID NO: 422606 - RNA, 19 nt, Artificial Sequence
  Description of Artificial Sequence: Synthetic oligonucleotide
acagucuucaggcacugua

SEQ ID NO: 422607 - RNA, 19 nt, Artificial Sequence
  Description of Artificial Sequence: Synthetic oligonucleotide
auagaaaaguagaguuuag

SEQ ID NO: 422608 - RNA, 19 nt, Artificial Sequence
  Description of Artificial Sequence: Synthetic oligonucleotide
aaacuacauacuggguucu

SEQ ID NO: 422609 - RNA, 19 nt, Artificial Sequence
  Description of Artificial Sequence: Synthetic oligonucleotide
cugaccuagugaacucugg

SEQ ID NO: 422610 - RNA, 19 nt, Artificial Sequence
  Description of Artificial Sequence: Synthetic oligonucleotide
aacaaucggucagauaauu

SEQ ID NO: 422611 - RNA, 19 nt, Artificial Sequence
  Description of Artificial Sequence: Synthetic oligonucleotide
cugugauuuuaauagggaa

SEQ ID NO: 422612 - RNA, 19 nt, Artificial Sequence
  Description of Artificial Sequence: Synthetic oligonucleotide
agaaggagggcgaagaguu

SEQ ID NO: 422613 - RNA, 19 nt, Artificial Sequence
  Description of Artificial Sequence: Synthetic oligonucleotide
ucucaaagccaguuuguuu

SEQ ID NO: 422614 - RNA, 19 nt, Artificial Sequence
  Description of Artificial Sequence: Synthetic oligonucleotide
guagaguuuagucuacgua

SEQ ID NO: 422615 - RNA, 19 nt, Artificial Sequence
  Description of Artificial Sequence: Synthetic oligonucleotide
aucacggcgguuaucaaca

SEQ ID NO: 422616 - RNA, 19 nt, Artificial Sequence
  Description of Artificial Sequence: Synthetic oligonucleotide
agaguuuagucuacguacu

SEQ ID NO: 422617 - RNA, 19 nt, Artificial Sequence
  Description of Artificial Sequence: Synthetic oligonucleotide
aaucggucagauaauuauu

SEQ ID NO: 422618 - RNA, 19 nt, Artificial Sequence
  Description of Artificial Sequence: Synthetic oligonucleotide
aaacagcugugaaggagug

SEQ ID NO: 422619 - RNA, 19 nt, Artificial Sequence
  Description of Artificial Sequence: Synthetic oligonucleotide
ucauccuggcaaacagcug

SEQ ID NO: 422620 - RNA, 19 nt, Artificial Sequence
  Description of Artificial Sequence: Synthetic oligonucleotide
uacguacugucugugauuu

SEQ ID NO: 422621 - RNA, 19 nt, Artificial Sequence
  Description of Artificial Sequence: Synthetic oligonucleotide
uagggaaucacggcgguua

SEQ ID NO: 422622 - RNA, 19 nt, Artificial Sequence
  Description of Artificial Sequence: Synthetic oligonucleotide
cucaaagccaguuuguuuu

SEQ ID NO: 422623 - RNA, 19 nt, Artificial Sequence
  Description of Artificial Sequence: Synthetic oligonucleotide
ucagcucuccugacagucu

SEQ ID NO: 422624 - RNA, 19 nt, Artificial Sequence
  Description of Artificial Sequence: Synthetic oligonucleotide
ugcagcaccugguuucccu

SEQ ID NO: 422625 - RNA, 19 nt, Artificial Sequence
  Description of Artificial Sequence: Synthetic oligonucleotide
uucugaccuagugaacucu

SEQ ID NO: 422626 - RNA, 19 nt, Artificial Sequence
  Description of Artificial Sequence: Synthetic oligonucleotide
acuacauacuggguucuga

SEQ ID NO: 422627 - RNA, 19 nt, Artificial Sequence
  Description of Artificial Sequence: Synthetic oligonucleotide
caaagccaguuuguuuugg

SEQ ID NO: 422628 - RNA, 19 nt, Artificial Sequence
  Description of Artificial Sequence: Synthetic oligonucleotide
cauggcacgaugccaugug

SEQ ID NO: 422629 - RNA, 19 nt, Artificial Sequence
  Description of Artificial Sequence: Synthetic oligonucleotide
ggcgguuaucaacaaucgg

SEQ ID NO: 422630 - RNA, 19 nt, Artificial Sequence
  Description of Artificial Sequence: Synthetic oligonucleotide
caaucggucagauaauuau

SEQ ID NO: 422631 - RNA, 19 nt, Artificial Sequence
  Description of Artificial Sequence: Synthetic oligonucleotide
ggaaucacggcgguuauca

SEQ ID NO: 422632 - RNA, 19 nt, Artificial Sequence
  Description of Artificial Sequence: Synthetic oligonucleotide
aacuacauacuggguucug

SEQ ID NO: 422633 - RNA, 19 nt, Artificial Sequence
  Description of Artificial Sequence: Synthetic oligonucleotide
ucggucagauaauuauuuu

SEQ ID NO: 422634 - RNA, 19 nt, Artificial Sequence
  Description of Artificial Sequence: Synthetic oligonucleotide
gcaaacagcugugaaggag

SEQ ID NO: 422635 - RNA, 19 nt, Artificial Sequence
  Description of Artificial Sequence: Synthetic oligonucleotide
gucagauaauuauuuugua

SEQ ID NO: 422636 - RNA, 19 nt, Artificial Sequence
  Description of Artificial Sequence: Synthetic oligonucleotide
augggauuauagaaaagua

SEQ ID NO: 422637 - RNA, 19 nt, Artificial Sequence
  Description of Artificial Sequence: Synthetic oligonucleotide
cugggcauggcacgaugcc

SEQ ID NO: 422638 - RNA, 19 nt, Artificial Sequence
  Description of Artificial Sequence: Synthetic oligonucleotide
aucggucagauaauuauuu

SEQ ID NO: 422639 - RNA, 19 nt, Artificial Sequence
  Description of Artificial Sequence: Synthetic oligonucleotide
guugcaugucucaaagcca

SEQ ID NO: 422640 - RNA, 19 nt, Artificial Sequence
  Description of Artificial Sequence: Synthetic oligonucleotide
uacugucugugauuuuaau

SEQ ID NO: 422641 - RNA, 19 nt, Artificial Sequence
  Description of Artificial Sequence: Synthetic oligonucleotide
aaggagugcagcaccuggu

SEQ ID NO: 422642 - RNA, 19 nt, Artificial Sequence
  Description of Artificial Sequence: Synthetic oligonucleotide
accugguuucccuccacga

SEQ ID NO: 422643 - RNA, 19 nt, Artificial Sequence
  Description of Artificial Sequence: Synthetic oligonucleotide
cucagcucuccugacaguc

SEQ ID NO: 422644 - RNA, 19 nt, Artificial Sequence
  Description of Artificial Sequence: Synthetic oligonucleotide
ugccaugugccaucauccu

SEQ ID NO: 422645 - RNA, 19 nt, Artificial Sequence
  Description of Artificial Sequence: Synthetic oligonucleotide
gaagaguugcaugucucaa

SEQ ID NO: 422646 - RNA, 19 nt, Artificial Sequence
  Description of Artificial Sequence: Synthetic oligonucleotide
cauccuggcaaacagcugu

SEQ ID NO: 422647 - RNA, 19 nt, Artificial Sequence
  Description of Artificial Sequence: Synthetic oligonucleotide
ccaucauccuggcaaacag

SEQ ID NO: 422648 - RNA, 19 nt, Artificial Sequence
  Description of Artificial Sequence: Synthetic oligonucleotide
guucugaccuagugaacuc

SEQ ID NO: 422649 - RNA, 19 nt, Artificial Sequence
  Description of Artificial Sequence: Synthetic oligonucleotide
guuuguuuugggguccuca

SEQ ID NO: 422650 - RNA, 19 nt, Artificial Sequence
  Description of Artificial Sequence: Synthetic oligonucleotide
uuugggguccucagcucuc

SEQ ID NO: 422651 - RNA, 19 nt, Artificial Sequence
  Description of Artificial Sequence: Synthetic oligonucleotide
auacuggguucugaccuag

SEQ ID NO: 422652 - RNA, 19 nt, Artificial Sequence
  Description of Artificial Sequence: Synthetic oligonucleotide
ugaaggagugcagcaccug

SEQ ID NO: 422653 - RNA, 19 nt, Artificial Sequence
  Description of Artificial Sequence: Synthetic oligonucleotide
gguuaucaacaaucgguca

SEQ ID NO: 422654 - RNA, 19 nt, Artificial Sequence
  Description of Artificial Sequence: Synthetic oligonucleotide
caccugguuucccuccacg

SEQ ID NO: 422655 - RNA, 19 nt, Artificial Sequence
  Description of Artificial Sequence: Synthetic oligonucleotide
ggucagauaauuauuuugu

SEQ ID NO: 422656 - RNA, 19 nt, Artificial Sequence
  Description of Artificial Sequence: Synthetic oligonucleotide
uaucaacaaucggucagau

SEQ ID NO: 422657 - RNA, 19 nt, Artificial Sequence
  Description of Artificial Sequence: Synthetic oligonucleotide
cugcccacaguccuugauc

SEQ ID NO: 422658 - RNA, 19 nt, Artificial Sequence
  Description of Artificial Sequence: Synthetic oligonucleotide
ggucaccagaaggagggcg

SEQ ID NO: 422659 - RNA, 19 nt, Artificial Sequence
  Description of Artificial Sequence: Synthetic oligonucleotide
ugggcauggcacgaugcca

SEQ ID NO: 422660 - RNA, 19 nt, Artificial Sequence
  Description of Artificial Sequence: Synthetic oligonucleotide
caugugccaucauccuggc

SEQ ID NO: 422661 - RNA, 19 nt, Artificial Sequence
  Description of Artificial Sequence: Synthetic oligonucleotide
ccugacagucuucaggcac

SEQ ID NO: 422662 - RNA, 19 nt, Artificial Sequence
  Description of Artificial Sequence: Synthetic oligonucleotide
uccugacagucuucaggca

SEQ ID NO: 422663 - RNA, 19 nt, Artificial Sequence
  Description of Artificial Sequence: Synthetic oligonucleotide
ugcaugucucaaagccagu

SEQ ID NO: 422664 - RNA, 19 nt, Artificial Sequence
  Description of Artificial Sequence: Synthetic oligonucleotide
cugugaaggagugcagcac

SEQ ID NO: 422665 - RNA, 19 nt, Artificial Sequence
  Description of Artificial Sequence: Synthetic oligonucleotide
ugacagucuucaggcacug

SEQ ID NO: 422666 - RNA, 19 nt, Artificial Sequence
  Description of Artificial Sequence: Synthetic oligonucleotide
cggucagauaauuauuuug

SEQ ID NO: 422667 - RNA, 19 nt, Artificial Sequence
  Description of Artificial Sequence: Synthetic oligonucleotide
agucuacguacugucugug

SEQ ID NO: 422668 - RNA, 19 nt, Artificial Sequence
  Description of Artificial Sequence: Synthetic oligonucleotide
aucaacaaucggucagaua

SEQ ID NO: 422669 - RNA, 19 nt, Artificial Sequence
  Description of Artificial Sequence: Synthetic oligonucleotide
guuuugggguccucagcuc

SEQ ID NO: 422670 - RNA, 19 nt, Artificial Sequence
  Description of Artificial Sequence: Synthetic oligonucleotide
gaaggagggcgaagaguug

SEQ ID NO: 422671 - RNA, 19 nt, Artificial Sequence
  Description of Artificial Sequence: Synthetic oligonucleotide
acccuguagaacaggguca

SEQ ID NO: 422672 - RNA, 19 nt, Artificial Sequence
  Description of Artificial Sequence: Synthetic oligonucleotide
gccaguuuguuuugggguc

SEQ ID NO: 422673 - RNA, 19 nt, Artificial Sequence
  Description of Artificial Sequence: Synthetic oligonucleotide
aggagugcagcaccugguu

SEQ ID NO: 422674 - RNA, 19 nt, Artificial Sequence
  Description of Artificial Sequence: Synthetic oligonucleotide
gucuacguacugucuguga

SEQ ID NO: 422675 - RNA, 19 nt, Artificial Sequence
  Description of Artificial Sequence: Synthetic oligonucleotide
cagucuucaggcacuguaa

SEQ ID NO: 422676 - RNA, 19 nt, Artificial Sequence
  Description of Artificial Sequence: Synthetic oligonucleotide
gcugugaaggagugcagca

SEQ ID NO: 422677 - RNA, 19 nt, Artificial Sequence
  Description of Artificial Sequence: Synthetic oligonucleotide
ucggggcugcccacagucc

SEQ ID NO: 422678 - RNA, 19 nt, Artificial Sequence
  Description of Artificial Sequence: Synthetic oligonucleotide
accugggcauggcacgaug

SEQ ID NO: 422679 - RNA, 19 nt, Artificial Sequence
  Description of Artificial Sequence: Synthetic oligonucleotide
ucuugcaccugggcauggc

SEQ ID NO: 422680 - RNA, 19 nt, Artificial Sequence
  Description of Artificial Sequence: Synthetic oligonucleotide
gcgguuaucaacaaucggu

SEQ ID NO: 422681 - RNA, 19 nt, Artificial Sequence
  Description of Artificial Sequence: Synthetic oligonucleotide
acaaucggucagauaauua

SEQ ID NO: 422682 - RNA, 19 nt, Artificial Sequence
  Description of Artificial Sequence: Synthetic oligonucleotide
cgguuaucaacaaucgguc

SEQ ID NO: 422683 - RNA, 19 nt, Artificial Sequence
  Description of Artificial Sequence: Synthetic oligonucleotide
aguuuguuuugggguccuc

SEQ ID NO: 422684 - RNA, 19 nt, Artificial Sequence
  Description of Artificial Sequence: Synthetic oligonucleotide
uugggguccucagcucucc

SEQ ID NO: 422685 - RNA, 19 nt, Artificial Sequence
  Description of Artificial Sequence: Synthetic oligonucleotide
gucaccagaaggagggcga

SEQ ID NO: 422686 - RNA, 19 nt, Artificial Sequence
  Description of Artificial Sequence: Synthetic oligonucleotide
cagcugugaaggagugcag

SEQ ID NO: 422687 - RNA, 19 nt, Artificial Sequence
  Description of Artificial Sequence: Synthetic oligonucleotide
gguucugaccuagugaacu

SEQ ID NO: 422688 - RNA, 19 nt, Artificial Sequence
  Description of Artificial Sequence: Synthetic oligonucleotide
cuugcaccugggcauggca

SEQ ID NO: 422689 - RNA, 19 nt, Artificial Sequence
  Description of Artificial Sequence: Synthetic oligonucleotide
uacuggguucugaccuagu

SEQ ID NO: 422690 - RNA, 19 nt, Artificial Sequence
  Description of Artificial Sequence: Synthetic oligonucleotide
gccaugugccaucauccug

SEQ ID NO: 422691 - RNA, 19 nt, Artificial Sequence
  Description of Artificial Sequence: Synthetic oligonucleotide
uccuggcaaacagcuguga

SEQ ID NO: 422692 - RNA, 19 nt, Artificial Sequence
  Description of Artificial Sequence: Synthetic oligonucleotide
ccugguuucccuccacgag

SEQ ID NO: 422693 - RNA, 19 nt, Artificial Sequence
  Description of Artificial Sequence: Synthetic oligonucleotide
agggaaucacggcgguuau

SEQ ID NO: 422694 - RNA, 19 nt, Artificial Sequence
  Description of Artificial Sequence: Synthetic oligonucleotide
ggcacgaugccaugugcca

SEQ ID NO: 422695 - RNA, 19 nt, Artificial Sequence
  Description of Artificial Sequence: Synthetic oligonucleotide
gaaucacggcgguuaucaa

SEQ ID NO: 422696 - RNA, 19 nt, Artificial Sequence
  Description of Artificial Sequence: Synthetic oligonucleotide
ucaccagaaggagggcgaa

SEQ ID NO: 422697 - RNA, 19 nt, Artificial Sequence
  Description of Artificial Sequence: Synthetic oligonucleotide
ccugggcauggcacgaugc

SEQ ID NO: 422698 - RNA, 19 nt, Artificial Sequence
  Description of Artificial Sequence: Synthetic oligonucleotide
cugacagucuucaggcacu

SEQ ID NO: 422699 - RNA, 19 nt, Artificial Sequence
  Description of Artificial Sequence: Synthetic oligonucleotide
ggguccucagcucuccuga

SEQ ID NO: 422700 - RNA, 19 nt, Artificial Sequence
  Description of Artificial Sequence: Synthetic oligonucleotide
auccuggcaaacagcugug

SEQ ID NO: 422701 - RNA, 19 nt, Artificial Sequence
  Description of Artificial Sequence: Synthetic oligonucleotide
cauacuggguucugaccua

SEQ ID NO: 422702 - RNA, 19 nt, Artificial Sequence
  Description of Artificial Sequence: Synthetic oligonucleotide
guccucagcucuccugaca

SEQ ID NO: 422703 - RNA, 19 nt, Artificial Sequence
  Description of Artificial Sequence: Synthetic oligonucleotide
agcucuccugacagucuuc

SEQ ID NO: 422704 - RNA, 19 nt, Artificial Sequence
  Description of Artificial Sequence: Synthetic oligonucleotide
ucacggcgguuaucaacaa

SEQ ID NO: 422705 - RNA, 19 nt, Artificial Sequence
  Description of Artificial Sequence: Synthetic oligonucleotide
guacugucugugauuuuaa

SEQ ID NO: 422706 - RNA, 19 nt, Artificial Sequence
  Description of Artificial Sequence: Synthetic oligonucleotide
ccaguuuguuuuggggucc

SEQ ID NO: 422707 - RNA, 19 nt, Artificial Sequence
  Description of Artificial Sequence: Synthetic oligonucleotide
cggcgguuaucaacaaucg

SEQ ID NO: 422708 - RNA, 19 nt, Artificial Sequence
  Description of Artificial Sequence: Synthetic oligonucleotide
acgaugccaugugccauca

SEQ ID NO: 422709 - RNA, 19 nt, Artificial Sequence
  Description of Artificial Sequence: Synthetic oligonucleotide
gugccaucauccuggcaaa

SEQ ID NO: 422710 - RNA, 19 nt, Artificial Sequence
  Description of Artificial Sequence: Synthetic oligonucleotide
ugccaucauccuggcaaac

SEQ ID NO: 422711 - RNA, 19 nt, Artificial Sequence
  Description of Artificial Sequence: Synthetic oligonucleotide
augugccaucauccuggca

SEQ ID NO: 422712 - RNA, 19 nt, Artificial Sequence
  Description of Artificial Sequence: Synthetic oligonucleotide
gggguccucagcucuccug

SEQ ID NO: 422713 - RNA, 19 nt, Artificial Sequence
  Description of Artificial Sequence: Synthetic oligonucleotide
ggcaaacagcugugaagga

SEQ ID NO: 422714 - RNA, 19 nt, Artificial Sequence
  Description of Artificial Sequence: Synthetic oligonucleotide
caugucucaaagccaguuu

SEQ ID NO: 422715 - RNA, 19 nt, Artificial Sequence
  Description of Artificial Sequence: Synthetic oligonucleotide
aggagggcgaagaguugca

SEQ ID NO: 422716 - RNA, 19 nt, Artificial Sequence
  Description of Artificial Sequence: Synthetic oligonucleotide
cacaguccuugaucuugca

SEQ ID NO: 422717 - RNA, 19 nt, Artificial Sequence
  Description of Artificial Sequence: Synthetic oligonucleotide
caacaaucggucagauaau

SEQ ID NO: 422718 - RNA, 19 nt, Artificial Sequence
  Description of Artificial Sequence: Synthetic oligonucleotide
auagggaaucacggcgguu

SEQ ID NO: 422719 - RNA, 19 nt, Artificial Sequence
  Description of Artificial Sequence: Synthetic oligonucleotide
cuacguacugucugugauu

SEQ ID NO: 422720 - RNA, 19 nt, Artificial Sequence
  Description of Artificial Sequence: Synthetic oligonucleotide
gccaucauccuggcaaaca

SEQ ID NO: 422721 - RNA, 19 nt, Artificial Sequence
  Description of Artificial Sequence: Synthetic oligonucleotide
ggcauggcacgaugccaug

SEQ ID NO: 422722 - RNA, 19 nt, Artificial Sequence
  Description of Artificial Sequence: Synthetic oligonucleotide
gugaaggagugcagcaccu

SEQ ID NO: 422723 - RNA, 19 nt, Artificial Sequence
  Description of Artificial Sequence: Synthetic oligonucleotide
gcucuccugacagucuuca

SEQ ID NO: 422724 - RNA, 19 nt, Artificial Sequence
  Description of Artificial Sequence: Synthetic oligonucleotide
gguccucagcucuccugac

SEQ ID NO: 422725 - RNA, 19 nt, Artificial Sequence
  Description of Artificial Sequence: Synthetic oligonucleotide
acguacugucugugauuuu

SEQ ID NO: 422726 - RNA, 19 nt, Artificial Sequence
  Description of Artificial Sequence: Synthetic oligonucleotide
gucucaaagccaguuuguu

SEQ ID NO: 422727 - RNA, 19 nt, Artificial Sequence
  Description of Artificial Sequence: Synthetic oligonucleotide
ccuggcaaacagcugugaa

SEQ ID NO: 422728 - RNA, 19 nt, Artificial Sequence
  Description of Artificial Sequence: Synthetic oligonucleotide
gguuucccuccacgagcug

SEQ ID NO: 422729 - RNA, 19 nt, Artificial Sequence
  Description of Artificial Sequence: Synthetic oligonucleotide
cguacugucugugauuuua

SEQ ID NO: 422730 - RNA, 19 nt, Artificial Sequence
  Description of Artificial Sequence: Synthetic oligonucleotide
ggguucugaccuagugaac

SEQ ID NO: 422731 - RNA, 19 nt, Artificial Sequence
  Description of Artificial Sequence: Synthetic oligonucleotide
gggcugcccacaguccuug

SEQ ID NO: 422732 - RNA, 19 nt, Artificial Sequence
  Description of Artificial Sequence: Synthetic oligonucleotide
gggucaccagaaggagggc

SEQ ID NO: 422733 - RNA, 19 nt, Artificial Sequence
  Description of Artificial Sequence: Synthetic oligonucleotide
gacagucuucaggcacugu

SEQ ID NO: 422734 - RNA, 19 nt, Artificial Sequence
  Description of Artificial Sequence: Synthetic oligonucleotide
gggaaucacggcgguuauc

SEQ ID NO: 422735 - RNA, 19 nt, Artificial Sequence
  Description of Artificial Sequence: Synthetic oligonucleotide
cagcucuccugacagucuu

SEQ ID NO: 422736 - RNA, 19 nt, Artificial Sequence
  Description of Artificial Sequence: Synthetic oligonucleotide
gcaugucucaaagccaguu

SEQ ID NO: 422737 - RNA, 19 nt, Artificial Sequence
  Description of Artificial Sequence: Synthetic oligonucleotide
gggcauggcacgaugccau

SEQ ID NO: 422738 - RNA, 19 nt, Artificial Sequence
  Description of Artificial Sequence: Synthetic oligonucleotide
cacggcgguuaucaacaau

SEQ ID NO: 422739 - RNA, 19 nt, Artificial Sequence
  Description of Artificial Sequence: Synthetic oligonucleotide
caguuuguuuugggguccu

SEQ ID NO: 422740 - RNA, 19 nt, Artificial Sequence
  Description of Artificial Sequence: Synthetic oligonucleotide
gcaccugggcauggcacga

SEQ ID NO: 422741 - RNA, 19 nt, Artificial Sequence
  Description of Artificial Sequence: Synthetic oligonucleotide
gcauggcacgaugccaugu

SEQ ID NO: 422742 - RNA, 19 nt, Artificial Sequence
  Description of Artificial Sequence: Synthetic oligonucleotide
gcugcccacaguccuugau

SEQ ID NO: 422743 - RNA, 19 nt, Artificial Sequence
  Description of Artificial Sequence: Synthetic oligonucleotide
cuucggggcugcccacagu

SEQ ID NO: 422744 - RNA, 19 nt, Artificial Sequence
  Description of Artificial Sequence: Synthetic oligonucleotide
ggcugcccacaguccuuga

SEQ ID NO: 422745 - RNA, 19 nt, Artificial Sequence
  Description of Artificial Sequence: Synthetic oligonucleotide
ccacccuguagaacagggu

SEQ ID NO: 422746 - RNA, 19 nt, Artificial Sequence
  Description of Artificial Sequence: Synthetic oligonucleotide
gcacgaugccaugugccau

SEQ ID NO: 422747 - RNA, 19 nt, Artificial Sequence
  Description of Artificial Sequence: Synthetic oligonucleotide
ggagggcgaagaguugcau

SEQ ID NO: 422748 - RNA, 19 nt, Artificial Sequence
  Description of Artificial Sequence: Synthetic oligonucleotide
cggggcugcccacaguccu

SEQ ID NO: 422749 - RNA, 19 nt, Artificial Sequence
  Description of Artificial Sequence: Synthetic oligonucleotide
caccugggcauggcacgau

SEQ ID NO: 422750 - RNA, 19 nt, Artificial Sequence
  Description of Artificial Sequence: Synthetic oligonucleotide
ggggcugcccacaguccuu

SEQ ID NO: 422751 - RNA, 19 nt, Artificial Sequence
  Description of Artificial Sequence: Synthetic oligonucleotide
cgaugccaugugccaucau

SEQ ID NO: 422752 - RNA, 19 nt, Artificial Sequence
  Description of Artificial Sequence: Synthetic oligonucleotide
aauccgaucaucuucaaac

SEQ ID NO: 422753 - RNA, 19 nt, Artificial Sequence
  Description of Artificial Sequence: Synthetic oligonucleotide
uuuaauaugauacaacuau

SEQ ID NO: 422754 - RNA, 19 nt, Artificial Sequence
  Description of Artificial Sequence: Synthetic oligonucleotide
aauaccauuggagagcucc

SEQ ID NO: 422755 - RNA, 19 nt, Artificial Sequence
  Description of Artificial Sequence: Synthetic oligonucleotide
aauaugauacaacuaugac

SEQ ID NO: 422756 - RNA, 19 nt, Artificial Sequence
  Description of Artificial Sequence: Synthetic oligonucleotide
uaucuuaugagccaggaug

SEQ ID NO: 422757 - RNA, 19 nt, Artificial Sequence
  Description of Artificial Sequence: Synthetic oligonucleotide
uuagccgucauuaaacggg

SEQ ID NO: 422758 - RNA, 19 nt, Artificial Sequence
  Description of Artificial Sequence: Synthetic oligonucleotide
gaagacagaagguucaacg

SEQ ID NO: 422759 - RNA, 19 nt, Artificial Sequence
  Description of Artificial Sequence: Synthetic oligonucleotide
aauuuagccgucauuaaac

SEQ ID NO: 422760 - RNA, 19 nt, Artificial Sequence
  Description of Artificial Sequence: Synthetic oligonucleotide
aauuguccugucuacgagc

SEQ ID NO: 422761 - RNA, 19 nt, Artificial Sequence
  Description of Artificial Sequence: Synthetic oligonucleotide
uuucucgacaauauguggg

SEQ ID NO: 422762 - RNA, 19 nt, Artificial Sequence
  Description of Artificial Sequence: Synthetic oligonucleotide
agugauaucugguaagagg

SEQ ID NO: 422763 - RNA, 19 nt, Artificial Sequence
  Description of Artificial Sequence: Synthetic oligonucleotide
aacuuuccagauuuagccc

SEQ ID NO: 422764 - RNA, 19 nt, Artificial Sequence
  Description of Artificial Sequence: Synthetic oligonucleotide
guacuuauggcucacagag

SEQ ID NO: 422765 - RNA, 19 nt, Artificial Sequence
  Description of Artificial Sequence: Synthetic oligonucleotide
uagcuaaugaaucugggcc

SEQ ID NO: 422766 - RNA, 19 nt, Artificial Sequence
  Description of Artificial Sequence: Synthetic oligonucleotide
uguuaucacaauuuaguag

SEQ ID NO: 422767 - RNA, 19 nt, Artificial Sequence
  Description of Artificial Sequence: Synthetic oligonucleotide
uuuuaaugcagggagacag

SEQ ID NO: 422768 - RNA, 19 nt, Artificial Sequence
  Description of Artificial Sequence: Synthetic oligonucleotide
agacuuuuaaugcagggag

SEQ ID NO: 422769 - RNA, 19 nt, Artificial Sequence
  Description of Artificial Sequence: Synthetic oligonucleotide
auaugauacaacuaugacu

SEQ ID NO: 422770 - RNA, 19 nt, Artificial Sequence
  Description of Artificial Sequence: Synthetic oligonucleotide
ucuacgagcucucugacug

SEQ ID NO: 422771 - RNA, 19 nt, Artificial Sequence
  Description of Artificial Sequence: Synthetic oligonucleotide
aacacucaaacaguaacac

SEQ ID NO: 422772 - RNA, 19 nt, Artificial Sequence
  Description of Artificial Sequence: Synthetic oligonucleotide
ugauccaucccaccgaagg

SEQ ID NO: 422773 - RNA, 19 nt, Artificial Sequence
  Description of Artificial Sequence: Synthetic oligonucleotide
ucgaauuucuguaugcaag

SEQ ID NO: 422774 - RNA, 19 nt, Artificial Sequence
  Description of Artificial Sequence: Synthetic oligonucleotide
cuauauaugaugucagggc

SEQ ID NO: 422775 - RNA, 19 nt, Artificial Sequence
  Description of Artificial Sequence: Synthetic oligonucleotide
agagaauucaccuuuugcu

SEQ ID NO: 422776 - RNA, 19 nt, Artificial Sequence
  Description of Artificial Sequence: Synthetic oligonucleotide
uuaauaugauacaacuaug

SEQ ID NO: 422777 - RNA, 19 nt, Artificial Sequence
  Description of Artificial Sequence: Synthetic oligonucleotide
aaaugugcaagacucauua

SEQ ID NO: 422778 - RNA, 19 nt, Artificial Sequence
  Description of Artificial Sequence: Synthetic oligonucleotide
augaaaauagcacacccug

SEQ ID NO: 422779 - RNA, 19 nt, Artificial Sequence
  Description of Artificial Sequence: Synthetic oligonucleotide
aucacaauuuaguagauau

SEQ ID NO: 422780 - RNA, 19 nt, Artificial Sequence
  Description of Artificial Sequence: Synthetic oligonucleotide
aaaaggcucggaaauacac

SEQ ID NO: 422781 - RNA, 19 nt, Artificial Sequence
  Description of Artificial Sequence: Synthetic oligonucleotide
ugugcaagacucauuaucu

SEQ ID NO: 422782 - RNA, 19 nt, Artificial Sequence
  Description of Artificial Sequence: Synthetic oligonucleotide
gaguccguaauucuaaacc

SEQ ID NO: 422783 - RNA, 19 nt, Artificial Sequence
  Description of Artificial Sequence: Synthetic oligonucleotide
aaaacggaaagcuuggcuu

SEQ ID NO: 422784 - RNA, 19 nt, Artificial Sequence
  Description of Artificial Sequence: Synthetic oligonucleotide
caaagcuuuguaaaagggg

SEQ ID NO: 422785 - RNA, 19 nt, Artificial Sequence
  Description of Artificial Sequence: Synthetic oligonucleotide
aacgugaaggcuucaaaug

SEQ ID NO: 422786 - RNA, 19 nt, Artificial Sequence
  Description of Artificial Sequence: Synthetic oligonucleotide
aacuaugacuuuuggaaca

SEQ ID NO: 422787 - RNA, 19 nt, Artificial Sequence
  Description of Artificial Sequence: Synthetic oligonucleotide
ucagagacuuuuaaugcag

SEQ ID NO: 422788 - RNA, 19 nt, Artificial Sequence
  Description of Artificial Sequence: Synthetic oligonucleotide
cauuaaacgggcaaggauc

SEQ ID NO: 422789 - RNA, 19 nt, Artificial Sequence
  Description of Artificial Sequence: Synthetic oligonucleotide
ugucagagacuuuuaaugc

SEQ ID NO: 422790 - RNA, 19 nt, Artificial Sequence
  Description of Artificial Sequence: Synthetic oligonucleotide
uauccgauggagcaacagg

SEQ ID NO: 422791 - RNA, 19 nt, Artificial Sequence
  Description of Artificial Sequence: Synthetic oligonucleotide
augugcaagacucauuauc

SEQ ID NO: 422792 - RNA, 19 nt, Artificial Sequence
  Description of Artificial Sequence: Synthetic oligonucleotide
uuuaagcuggaaaaggcuc

SEQ ID NO: 422793 - RNA, 19 nt, Artificial Sequence
  Description of Artificial Sequence: Synthetic oligonucleotide
auuuagccgucauuaaacg

SEQ ID NO: 422794 - RNA, 19 nt, Artificial Sequence
  Description of Artificial Sequence: Synthetic oligonucleotide
agacugaugcuucauuugg

SEQ ID NO: 422795 - RNA, 19 nt, Artificial Sequence
  Description of Artificial Sequence: Synthetic oligonucleotide
acuuauggcucacagaggu

SEQ ID NO: 422796 - RNA, 19 nt, Artificial Sequence
  Description of Artificial Sequence: Synthetic oligonucleotide
guuaucagcuuucugauga

SEQ ID NO: 422797 - RNA, 19 nt, Artificial Sequence
  Description of Artificial Sequence: Synthetic oligonucleotide
uuuagccgucauuaaacgg

SEQ ID NO: 422798 - RNA, 19 nt, Artificial Sequence
  Description of Artificial Sequence: Synthetic oligonucleotide
aagacagaagguucaacgu

SEQ ID NO: 422799 - RNA, 19 nt, Artificial Sequence
  Description of Artificial Sequence: Synthetic oligonucleotide
agagaugaaaauagcacac

SEQ ID NO: 422800 - RNA, 19 nt, Artificial Sequence
  Description of Artificial Sequence: Synthetic oligonucleotide
uuauauccaacauccggag

SEQ ID NO: 422801 - RNA, 19 nt, Artificial Sequence
  Description of Artificial Sequence: Synthetic oligonucleotide
ugugcuuaaaauuucccau

SEQ ID NO: 422802 - RNA, 19 nt, Artificial Sequence
  Description of Artificial Sequence: Synthetic oligonucleotide
uauggcgaaacagucaugc

SEQ ID NO: 422803 - RNA, 19 nt, Artificial Sequence
  Description of Artificial Sequence: Synthetic oligonucleotide
gauuucgauuuuaugaagc

SEQ ID NO: 422804 - RNA, 19 nt, Artificial Sequence
  Description of Artificial Sequence: Synthetic oligonucleotide
uguggcugaguuuagcacc

SEQ ID NO: 422805 - RNA, 19 nt, Artificial Sequence
  Description of Artificial Sequence: Synthetic oligonucleotide
gaaaaucccacuguggcug

SEQ ID NO: 422806 - RNA, 19 nt, Artificial Sequence
  Description of Artificial Sequence: Synthetic oligonucleotide
agagacuuuuaaugcaggg

SEQ ID NO: 422807 - RNA, 19 nt, Artificial Sequence
  Description of Artificial Sequence: Synthetic oligonucleotide
ucggaaauacaccacgcca

SEQ ID NO: 422808 - RNA, 19 nt, Artificial Sequence
  Description of Artificial Sequence: Synthetic oligonucleotide
auauccaacauccggagaa

SEQ ID NO: 422809 - RNA, 19 nt, Artificial Sequence
  Description of Artificial Sequence: Synthetic oligonucleotide
acguaauucacagggaagg

SEQ ID NO: 422810 - RNA, 19 nt, Artificial Sequence
  Description of Artificial Sequence: Synthetic oligonucleotide
acgaaaugugucuucaucu

SEQ ID NO: 422811 - RNA, 19 nt, Artificial Sequence
  Description of Artificial Sequence: Synthetic oligonucleotide
ugaguuuagcaccuccacc

SEQ ID NO: 422812 - RNA, 19 nt, Artificial Sequence
  Description of Artificial Sequence: Synthetic oligonucleotide
ucuauggccuucccaaaag

SEQ ID NO: 422813 - RNA, 19 nt, Artificial Sequence
  Description of Artificial Sequence: Synthetic oligonucleotide
gauaucugguaagaggaag

SEQ ID NO: 422814 - RNA, 19 nt, Artificial Sequence
  Description of Artificial Sequence: Synthetic oligonucleotide
uuaugagccaggauggguc

SEQ ID NO: 422815 - RNA, 19 nt, Artificial Sequence
  Description of Artificial Sequence: Synthetic oligonucleotide
auacguauccagcugugag

SEQ ID NO: 422816 - RNA, 19 nt, Artificial Sequence
  Description of Artificial Sequence: Synthetic oligonucleotide
uguuucguggcauccguag

SEQ ID NO: 422817 - RNA, 19 nt, Artificial Sequence
  Description of Artificial Sequence: Synthetic oligonucleotide
auuauauccaacauccgga

SEQ ID NO: 422818 - RNA, 19 nt, Artificial Sequence
  Description of Artificial Sequence: Synthetic oligonucleotide
guuucucgacaauaugugg

SEQ ID NO: 422819 - RNA, 19 nt, Artificial Sequence
  Description of Artificial Sequence: Synthetic oligonucleotide
auuucgauuuuaugaagca

SEQ ID NO: 422820 - RNA, 19 nt, Artificial Sequence
  Description of Artificial Sequence: Synthetic oligonucleotide
uugcguuuuguucucauaa

SEQ ID NO: 422821 - RNA, 19 nt, Artificial Sequence
  Description of Artificial Sequence: Synthetic oligonucleotide
auaaagucagcuugugcug

SEQ ID NO: 422822 - RNA, 19 nt, Artificial Sequence
  Description of Artificial Sequence: Synthetic oligonucleotide
guagccauuauauccaaca

SEQ ID NO: 422823 - RNA, 19 nt, Artificial Sequence
  Description of Artificial Sequence: Synthetic oligonucleotide
gaugcguagagaugccccg

SEQ ID NO: 422824 - RNA, 19 nt, Artificial Sequence
  Description of Artificial Sequence: Synthetic oligonucleotide
augccaagguacuuauggc

SEQ ID NO: 422825 - RNA, 19 nt, Artificial Sequence
  Description of Artificial Sequence: Synthetic oligonucleotide
uacaacuaugacuuuugga

SEQ ID NO: 422826 - RNA, 19 nt, Artificial Sequence
  Description of Artificial Sequence: Synthetic oligonucleotide
aguccguaauucuaaaccu

SEQ ID NO: 422827 - RNA, 19 nt, Artificial Sequence
  Description of Artificial Sequence: Synthetic oligonucleotide
ggugugagcgucuugcucg

SEQ ID NO: 422828 - RNA, 19 nt, Artificial Sequence
  Description of Artificial Sequence: Synthetic oligonucleotide
ggucaauaaacaucuuugg

SEQ ID NO: 422829 - RNA, 19 nt, Artificial Sequence
  Description of Artificial Sequence: Synthetic oligonucleotide
ucgccaacguaauucacag

SEQ ID NO: 422830 - RNA, 19 nt, Artificial Sequence
  Description of Artificial Sequence: Synthetic oligonucleotide
gagaaaacggaaagcuugg

SEQ ID NO: 422831 - RNA, 19 nt, Artificial Sequence
  Description of Artificial Sequence: Synthetic oligonucleotide
uggcgaaacagucaugccu

SEQ ID NO: 422832 - RNA, 19 nt, Artificial Sequence
  Description of Artificial Sequence: Synthetic oligonucleotide
uccaacauccggagaaaag

SEQ ID NO: 422833 - RNA, 19 nt, Artificial Sequence
  Description of Artificial Sequence: Synthetic oligonucleotide
guagcuaaugaaucugggc

SEQ ID NO: 422834 - RNA, 19 nt, Artificial Sequence
  Description of Artificial Sequence: Synthetic oligonucleotide
aggaagcuaacgcucacag

SEQ ID NO: 422835 - RNA, 19 nt, Artificial Sequence
  Description of Artificial Sequence: Synthetic oligonucleotide
uucucgacaauaugugggc

SEQ ID NO: 422836 - RNA, 19 nt, Artificial Sequence
  Description of Artificial Sequence: Synthetic oligonucleotide
auacaacuaugacuuuugg

SEQ ID NO: 422837 - RNA, 19 nt, Artificial Sequence
  Description of Artificial Sequence: Synthetic oligonucleotide
cucugguccgaguauagcc

SEQ ID NO: 422838 - RNA, 19 nt, Artificial Sequence
  Description of Artificial Sequence: Synthetic oligonucleotide
uucucgaauuucuguaugc

SEQ ID NO: 422839 - RNA, 19 nt, Artificial Sequence
  Description of Artificial Sequence: Synthetic oligonucleotide
ugugugcucuucccgaugc

SEQ ID NO: 422840 - RNA, 19 nt, Artificial Sequence
  Description of Artificial Sequence: Synthetic oligonucleotide
ucugacacacucgccaacg

SEQ ID NO: 422841 - RNA, 19 nt, Artificial Sequence
  Description of Artificial Sequence: Synthetic oligonucleotide
uauaugaugucagggccag

SEQ ID NO: 422842 - RNA, 19 nt, Artificial Sequence
  Description of Artificial Sequence: Synthetic oligonucleotide
gaagcuaacgcucacaguu

SEQ ID NO: 422843 - RNA, 19 nt, Artificial Sequence
  Description of Artificial Sequence: Synthetic oligonucleotide
aagaggcuauauaugaugu

SEQ ID NO: 422844 - RNA, 19 nt, Artificial Sequence
  Description of Artificial Sequence: Synthetic oligonucleotide
ucggagaggccauacaaga

SEQ ID NO: 422845 - RNA, 19 nt, Artificial Sequence
  Description of Artificial Sequence: Synthetic oligonucleotide
uucucauaauauuugucau

SEQ ID NO: 422846 - RNA, 19 nt, Artificial Sequence
  Description of Artificial Sequence: Synthetic oligonucleotide
uuucguggcauccguagcu

SEQ ID NO: 422847 - RNA, 19 nt, Artificial Sequence
  Description of Artificial Sequence: Synthetic oligonucleotide
uuuguuucguggcauccgu

SEQ ID NO: 422848 - RNA, 19 nt, Artificial Sequence
  Description of Artificial Sequence: Synthetic oligonucleotide
cacauagggccucaguucc

SEQ ID NO: 422849 - RNA, 19 nt, Artificial Sequence
  Description of Artificial Sequence: Synthetic oligonucleotide
gucuugcucgcucugagag

SEQ ID NO: 422850 - RNA, 19 nt, Artificial Sequence
  Description of Artificial Sequence: Synthetic oligonucleotide
acaauuuaguagauauuuc

SEQ ID NO: 422851 - RNA, 19 nt, Artificial Sequence
  Description of Artificial Sequence: Synthetic oligonucleotide
gcuauauaugaugucaggg

SEQ ID NO: 422852 - RNA, 19 nt, Artificial Sequence
  Description of Artificial Sequence: Synthetic oligonucleotide
ugagcaucucauguuauca

SEQ ID NO: 422853 - RNA, 19 nt, Artificial Sequence
  Description of Artificial Sequence: Synthetic oligonucleotide
agcacauauggcgaaacag

SEQ ID NO: 422854 - RNA, 19 nt, Artificial Sequence
  Description of Artificial Sequence: Synthetic oligonucleotide
aagggcaacacgaaaugug

SEQ ID NO: 422855 - RNA, 19 nt, Artificial Sequence
  Description of Artificial Sequence: Synthetic oligonucleotide
cucgacaauaugugggcgg

SEQ ID NO: 422856 - RNA, 19 nt, Artificial Sequence
  Description of Artificial Sequence: Synthetic oligonucleotide
uacuuauggcucacagagg

SEQ ID NO: 422857 - RNA, 19 nt, Artificial Sequence
  Description of Artificial Sequence: Synthetic oligonucleotide
acgugaaggcuucaaaugu

SEQ ID NO: 422858 - RNA, 19 nt, Artificial Sequence
  Description of Artificial Sequence: Synthetic oligonucleotide
acaauaugugggcggacag

SEQ ID NO: 422859 - RNA, 19 nt, Artificial Sequence
  Description of Artificial Sequence: Synthetic oligonucleotide
cuucccgaugccaagguac

SEQ ID NO: 422860 - RNA, 19 nt, Artificial Sequence
  Description of Artificial Sequence: Synthetic oligonucleotide
gugauaucugguaagagga

SEQ ID NO: 422861 - RNA, 19 nt, Artificial Sequence
  Description of Artificial Sequence: Synthetic oligonucleotide
agaugcguagagaugcccc

SEQ ID NO: 422862 - RNA, 19 nt, Artificial Sequence
  Description of Artificial Sequence: Synthetic oligonucleotide
gaauuuagccgucauuaaa

SEQ ID NO: 422863 - RNA, 19 nt, Artificial Sequence
  Description of Artificial Sequence: Synthetic oligonucleotide
aacucaaucugcugggcuu

SEQ ID NO: 422864 - RNA, 19 nt, Artificial Sequence
  Description of Artificial Sequence: Synthetic oligonucleotide
cacauauggcgaaacaguc

SEQ ID NO: 422865 - RNA, 19 nt, Artificial Sequence
  Description of Artificial Sequence: Synthetic oligonucleotide
agaggcuauauaugauguc

SEQ ID NO: 422866 - RNA, 19 nt, Artificial Sequence
  Description of Artificial Sequence: Synthetic oligonucleotide
gguaggguguuuaagcugg

SEQ ID NO: 422867 - RNA, 19 nt, Artificial Sequence
  Description of Artificial Sequence: Synthetic oligonucleotide
caucaaccucaccugaucc

SEQ ID NO: 422868 - RNA, 19 nt, Artificial Sequence
  Description of Artificial Sequence: Synthetic oligonucleotide
uuaacaugggcaccgccau

SEQ ID NO: 422869 - RNA, 19 nt, Artificial Sequence
  Description of Artificial Sequence: Synthetic oligonucleotide
auccacggcagagaaaacg

SEQ ID NO: 422870 - RNA, 19 nt, Artificial Sequence
  Description of Artificial Sequence: Synthetic oligonucleotide
aaggcuggcaugaucagga

SEQ ID NO: 422871 - RNA, 19 nt, Artificial Sequence
  Description of Artificial Sequence: Synthetic oligonucleotide
cauccguagcuaaugaauc

SEQ ID NO: 422872 - RNA, 19 nt, Artificial Sequence
  Description of Artificial Sequence: Synthetic oligonucleotide
uaugugggcggacagguuu

SEQ ID NO: 422873 - RNA, 19 nt, Artificial Sequence
  Description of Artificial Sequence: Synthetic oligonucleotide
uauauccaacauccggaga

SEQ ID NO: 422874 - RNA, 19 nt, Artificial Sequence
  Description of Artificial Sequence: Synthetic oligonucleotide
auguuaucacaauuuagua

SEQ ID NO: 422875 - RNA, 19 nt, Artificial Sequence
  Description of Artificial Sequence: Synthetic oligonucleotide
ggagaggccauacaagaag

SEQ ID NO: 422876 - RNA, 19 nt, Artificial Sequence
  Description of Artificial Sequence: Synthetic oligonucleotide
caaucuauggccuucccaa

SEQ ID NO: 422877 - RNA, 19 nt, Artificial Sequence
  Description of Artificial Sequence: Synthetic oligonucleotide
ucagugauaucugguaaga

SEQ ID NO: 422878 - RNA, 19 nt, Artificial Sequence
  Description of Artificial Sequence: Synthetic oligonucleotide
auggcgaaacagucaugcc

SEQ ID NO: 422879 - RNA, 19 nt, Artificial Sequence
  Description of Artificial Sequence: Synthetic oligonucleotide
uucugauagaucugcugcu

SEQ ID NO: 422880 - RNA, 19 nt, Artificial Sequence
  Description of Artificial Sequence: Synthetic oligonucleotide
uccgauggagcaacaggag

SEQ ID NO: 422881 - RNA, 19 nt, Artificial Sequence
  Description of Artificial Sequence: Synthetic oligonucleotide
agaaaacggaaagcuuggc

SEQ ID NO: 422882 - RNA, 19 nt, Artificial Sequence
  Description of Artificial Sequence: Synthetic oligonucleotide
acguauccagcugugaguc

SEQ ID NO: 422883 - RNA, 19 nt, Artificial Sequence
  Description of Artificial Sequence: Synthetic oligonucleotide
gaucuuaaggcuggcauga

SEQ ID NO: 422884 - RNA, 19 nt, Artificial Sequence
  Description of Artificial Sequence: Synthetic oligonucleotide
cuccauuugcguuuuguuc

SEQ ID NO: 422885 - RNA, 19 nt, Artificial Sequence
  Description of Artificial Sequence: Synthetic oligonucleotide
acgguuugaaggugggguc

SEQ ID NO: 422886 - RNA, 19 nt, Artificial Sequence
  Description of Artificial Sequence: Synthetic oligonucleotide
cagagacuuuuaaugcagg

SEQ ID NO: 422887 - RNA, 19 nt, Artificial Sequence
  Description of Artificial Sequence: Synthetic oligonucleotide
uaacgcucacaguuguuug

SEQ ID NO: 422888 - RNA, 19 nt, Artificial Sequence
  Description of Artificial Sequence: Synthetic oligonucleotide
agggcgaugucaaacuugg

SEQ ID NO: 422889 - RNA, 19 nt, Artificial Sequence
  Description of Artificial Sequence: Synthetic oligonucleotide
aaauucaguucagaggcuu

SEQ ID NO: 422890 - RNA, 19 nt, Artificial Sequence
  Description of Artificial Sequence: Synthetic oligonucleotide
aacauccggagaaaagucu

SEQ ID NO: 422891 - RNA, 19 nt, Artificial Sequence
  Description of Artificial Sequence: Synthetic oligonucleotide
ggcgaugucaaacuuggug

SEQ ID NO: 422892 - RNA, 19 nt, Artificial Sequence
  Description of Artificial Sequence: Synthetic oligonucleotide
agucaugccuccugucuuc

SEQ ID NO: 422893 - RNA, 19 nt, Artificial Sequence
  Description of Artificial Sequence: Synthetic oligonucleotide
uguuuguuucguggcaucc

SEQ ID NO: 422894 - RNA, 19 nt, Artificial Sequence
  Description of Artificial Sequence: Synthetic oligonucleotide
cucggaaauacaccacgcc

SEQ ID NO: 422895 - RNA, 19 nt, Artificial Sequence
  Description of Artificial Sequence: Synthetic oligonucleotide
uagccgucauuaaacgggc

SEQ ID NO: 422896 - RNA, 19 nt, Artificial Sequence
  Description of Artificial Sequence: Synthetic oligonucleotide
auuaucuuaugagccagga

SEQ ID NO: 422897 - RNA, 19 nt, Artificial Sequence
  Description of Artificial Sequence: Synthetic oligonucleotide
agcauggguuguuaaauau

SEQ ID NO: 422898 - RNA, 19 nt, Artificial Sequence
  Description of Artificial Sequence: Synthetic oligonucleotide
aaugugcaagacucauuau

SEQ ID NO: 422899 - RNA, 19 nt, Artificial Sequence
  Description of Artificial Sequence: Synthetic oligonucleotide
uuaucacaauuuaguagau

SEQ ID NO: 422900 - RNA, 19 nt, Artificial Sequence
  Description of Artificial Sequence: Synthetic oligonucleotide
auuaaacgggcaaggaucu

SEQ ID NO: 422901 - RNA, 19 nt, Artificial Sequence
  Description of Artificial Sequence: Synthetic oligonucleotide
gagccguuaacaugggcac

SEQ ID NO: 422902 - RNA, 19 nt, Artificial Sequence
  Description of Artificial Sequence: Synthetic oligonucleotide
ugaguccguaauucuaaac

SEQ ID NO: 422903 - RNA, 19 nt, Artificial Sequence
  Description of Artificial Sequence: Synthetic oligonucleotide
uuaucuuaugagccaggau

SEQ ID NO: 422904 - RNA, 19 nt, Artificial Sequence
  Description of Artificial Sequence: Synthetic oligonucleotide
ugugagucaucagggagca

SEQ ID NO: 422905 - RNA, 19 nt, Artificial Sequence
  Description of Artificial Sequence: Synthetic oligonucleotide
uccguagcuaaugaaucug

SEQ ID NO: 422906 - RNA, 19 nt, Artificial Sequence
  Description of Artificial Sequence: Synthetic oligonucleotide
ucucgacaauaugugggcg

SEQ ID NO: 422907 - RNA, 19 nt, Artificial Sequence
  Description of Artificial Sequence: Synthetic oligonucleotide
agugguccauuccuuuauc

SEQ ID NO: 422908 - RNA, 19 nt, Artificial Sequence
  Description of Artificial Sequence: Synthetic oligonucleotide
ucucgaauuucuguaugca

SEQ ID NO: 422909 - RNA, 19 nt, Artificial Sequence
  Description of Artificial Sequence: Synthetic oligonucleotide
agauuuagcccaaucuaug

SEQ ID NO: 422910 - RNA, 19 nt, Artificial Sequence
  Description of Artificial Sequence: Synthetic oligonucleotide
caccugauccaucccaccg

SEQ ID NO: 422911 - RNA, 19 nt, Artificial Sequence
  Description of Artificial Sequence: Synthetic oligonucleotide
cacgaaaugugucuucauc

SEQ ID NO: 422912 - RNA, 19 nt, Artificial Sequence
  Description of Artificial Sequence: Synthetic oligonucleotide
agaauuuagccgucauuaa

SEQ ID NO: 422913 - RNA, 19 nt, Artificial Sequence
  Description of Artificial Sequence: Synthetic oligonucleotide
auccguagcuaaugaaucu

SEQ ID NO: 422914 - RNA, 19 nt, Artificial Sequence
  Description of Artificial Sequence: Synthetic oligonucleotide
aaucuauggccuucccaaa

SEQ ID NO: 422915 - RNA, 19 nt, Artificial Sequence
  Description of Artificial Sequence: Synthetic oligonucleotide
ccugcaagucuccugaagg

SEQ ID NO: 422916 - RNA, 19 nt, Artificial Sequence
  Description of Artificial Sequence: Synthetic oligonucleotide
uuauccgauggagcaacag

SEQ ID NO: 422917 - RNA, 19 nt, Artificial Sequence
  Description of Artificial Sequence: Synthetic oligonucleotide
gaaaacggaaagcuuggcu

SEQ ID NO: 422918 - RNA, 19 nt, Artificial Sequence
  Description of Artificial Sequence: Synthetic oligonucleotide
aggguguuuaagcuggaaa

SEQ ID NO: 422919 - RNA, 19 nt, Artificial Sequence
  Description of Artificial Sequence: Synthetic oligonucleotide
uagagaugccccgagucug

SEQ ID NO: 422920 - RNA, 19 nt, Artificial Sequence
  Description of Artificial Sequence: Synthetic oligonucleotide
uagucaaggaugccacaac

SEQ ID NO: 422921 - RNA, 19 nt, Artificial Sequence
  Description of Artificial Sequence: Synthetic oligonucleotide
gccaacauuccuaaggaag

SEQ ID NO: 422922 - RNA, 19 nt, Artificial Sequence
  Description of Artificial Sequence: Synthetic oligonucleotide
ggcucggaaauacaccacg

SEQ ID NO: 422923 - RNA, 19 nt, Artificial Sequence
  Description of Artificial Sequence: Synthetic oligonucleotide
ggauuucgauuuuaugaag

SEQ ID NO: 422924 - RNA, 19 nt, Artificial Sequence
  Description of Artificial Sequence: Synthetic oligonucleotide
gugcuuaaaauuucccauc

SEQ ID NO: 422925 - RNA, 19 nt, Artificial Sequence
  Description of Artificial Sequence: Synthetic oligonucleotide
guuuguuucguggcauccg

SEQ ID NO: 422926 - RNA, 19 nt, Artificial Sequence
  Description of Artificial Sequence: Synthetic oligonucleotide
gcggccaacauuccuaagg

SEQ ID NO: 422927 - RNA, 19 nt, Artificial Sequence
  Description of Artificial Sequence: Synthetic oligonucleotide
ugcguagagaugccccgag

SEQ ID NO: 422928 - RNA, 19 nt, Artificial Sequence
  Description of Artificial Sequence: Synthetic oligonucleotide
aaucccuuggaggccaaca

SEQ ID NO: 422929 - RNA, 19 nt, Artificial Sequence
  Description of Artificial Sequence: Synthetic oligonucleotide
agaaaugugcaagacucau

SEQ ID NO: 422930 - RNA, 19 nt, Artificial Sequence
  Description of Artificial Sequence: Synthetic oligonucleotide
ucagcauaggggacuguuc

SEQ ID NO: 422931 - RNA, 19 nt, Artificial Sequence
  Description of Artificial Sequence: Synthetic oligonucleotide
aggagaauccacggcagag

SEQ ID NO: 422932 - RNA, 19 nt, Artificial Sequence
  Description of Artificial Sequence: Synthetic oligonucleotide
guuaacaugggcaccgcca

SEQ ID NO: 422933 - RNA, 19 nt, Artificial Sequence
  Description of Artificial Sequence: Synthetic oligonucleotide
gaggccaacacugaagaaa

SEQ ID NO: 422934 - RNA, 19 nt, Artificial Sequence
  Description of Artificial Sequence: Synthetic oligonucleotide
accauuguguguagguuuc

SEQ ID NO: 422935 - RNA, 19 nt, Artificial Sequence
  Description of Artificial Sequence: Synthetic oligonucleotide
auauaugaugucagggcca

SEQ ID NO: 422936 - RNA, 19 nt, Artificial Sequence
  Description of Artificial Sequence: Synthetic oligonucleotide
gacaauaugugggcggaca

SEQ ID NO: 422937 - RNA, 19 nt, Artificial Sequence
  Description of Artificial Sequence: Synthetic oligonucleotide
gaucccuguaagaguacag

SEQ ID NO: 422938 - RNA, 19 nt, Artificial Sequence
  Description of Artificial Sequence: Synthetic oligonucleotide
aaggugugagcgucuugcu

SEQ ID NO: 422939 - RNA, 19 nt, Artificial Sequence
  Description of Artificial Sequence: Synthetic oligonucleotide
ugucuacgagcucucugac

SEQ ID NO: 422940 - RNA, 19 nt, Artificial Sequence
  Description of Artificial Sequence: Synthetic oligonucleotide
agcuaacgcucacaguugu

SEQ ID NO: 422941 - RNA, 19 nt, Artificial Sequence
  Description of Artificial Sequence: Synthetic oligonucleotide
ggaucuuaaggcuggcaug

SEQ ID NO: 422942 - RNA, 19 nt, Artificial Sequence
  Description of Artificial Sequence: Synthetic oligonucleotide
uuccagauuuagcccaauc

SEQ ID NO: 422943 - RNA, 19 nt, Artificial Sequence
  Description of Artificial Sequence: Synthetic oligonucleotide
gguuguuaaauauuucacu

SEQ ID NO: 422944 - RNA, 19 nt, Artificial Sequence
  Description of Artificial Sequence: Synthetic oligonucleotide
ugcguuuuguucucauaau

SEQ ID NO: 422945 - RNA, 19 nt, Artificial Sequence
  Description of Artificial Sequence: Synthetic oligonucleotide
gacacacucgccaacguaa

SEQ ID NO: 422946 - RNA, 19 nt, Artificial Sequence
  Description of Artificial Sequence: Synthetic oligonucleotide
uucccgaugccaagguacu

SEQ ID NO: 422947 - RNA, 19 nt, Artificial Sequence
  Description of Artificial Sequence: Synthetic oligonucleotide
gaugaaaauagcacacccu

SEQ ID NO: 422948 - RNA, 19 nt, Artificial Sequence
  Description of Artificial Sequence: Synthetic oligonucleotide
aacgggcaaggaucuuaag

SEQ ID NO: 422949 - RNA, 19 nt, Artificial Sequence
  Description of Artificial Sequence: Synthetic oligonucleotide
uggcauccguagcuaauga

SEQ ID NO: 422950 - RNA, 19 nt, Artificial Sequence
  Description of Artificial Sequence: Synthetic oligonucleotide
auuguccugucuacgagcu

SEQ ID NO: 422951 - RNA, 19 nt, Artificial Sequence
  Description of Artificial Sequence: Synthetic oligonucleotide
ggguguuuaagcuggaaaa

SEQ ID NO: 422952 - RNA, 19 nt, Artificial Sequence
  Description of Artificial Sequence: Synthetic oligonucleotide
cucgccaacguaauucaca

SEQ ID NO: 422953 - RNA, 19 nt, Artificial Sequence
  Description of Artificial Sequence: Synthetic oligonucleotide
ugcaagaauuuagccguca

SEQ ID NO: 422954 - RNA, 19 nt, Artificial Sequence
  Description of Artificial Sequence: Synthetic oligonucleotide
acacccugcucauacguau

SEQ ID NO: 422955 - RNA, 19 nt, Artificial Sequence
  Description of Artificial Sequence: Synthetic oligonucleotide
cugagcaucucauguuauc

SEQ ID NO: 422956 - RNA, 19 nt, Artificial Sequence
  Description of Artificial Sequence: Synthetic oligonucleotide
ugacacacucgccaacgua

SEQ ID NO: 422957 - RNA, 19 nt, Artificial Sequence
  Description of Artificial Sequence: Synthetic oligonucleotide
ucuugcucgcucugagaga

SEQ ID NO: 422958 - RNA, 19 nt, Artificial Sequence
  Description of Artificial Sequence: Synthetic oligonucleotide
ugcgagggcgaugucaaac

SEQ ID NO: 422959 - RNA, 19 nt, Artificial Sequence
  Description of Artificial Sequence: Synthetic oligonucleotide
agggcaacacgaaaugugu

SEQ ID NO: 422960 - RNA, 19 nt, Artificial Sequence
  Description of Artificial Sequence: Synthetic oligonucleotide
acauauggcgaaacaguca

SEQ ID NO: 422961 - RNA, 19 nt, Artificial Sequence
  Description of Artificial Sequence: Synthetic oligonucleotide
gagggcgaugucaaacuug

SEQ ID NO: 422962 - RNA, 19 nt, Artificial Sequence
  Description of Artificial Sequence: Synthetic oligonucleotide
uuaucagcuuucugaugau

SEQ ID NO: 422963 - RNA, 19 nt, Artificial Sequence
  Description of Artificial Sequence: Synthetic oligonucleotide
gaugcuucauuuggauuuc

SEQ ID NO: 422964 - RNA, 19 nt, Artificial Sequence
  Description of Artificial Sequence: Synthetic oligonucleotide
cauauggcgaaacagucau

SEQ ID NO: 422965 - RNA, 19 nt, Artificial Sequence
  Description of Artificial Sequence: Synthetic oligonucleotide
gagaugcguagagaugccc

SEQ ID NO: 422966 - RNA, 19 nt, Artificial Sequence
  Description of Artificial Sequence: Synthetic oligonucleotide
gaaaaggcucggaaauaca

SEQ ID NO: 422967 - RNA, 19 nt, Artificial Sequence
  Description of Artificial Sequence: Synthetic oligonucleotide
accugauccaucccaccga

SEQ ID NO: 422968 - RNA, 19 nt, Artificial Sequence
  Description of Artificial Sequence: Synthetic oligonucleotide
cauggguuguuaaauauuu

SEQ ID NO: 422969 - RNA, 19 nt, Artificial Sequence
  Description of Artificial Sequence: Synthetic oligonucleotide
agccguuaacaugggcacc

SEQ ID NO: 422970 - RNA, 19 nt, Artificial Sequence
  Description of Artificial Sequence: Synthetic oligonucleotide
ggacuguucugacacacuc

SEQ ID NO: 422971 - RNA, 19 nt, Artificial Sequence
  Description of Artificial Sequence: Synthetic oligonucleotide
ugacugucuugacaucuuu

SEQ ID NO: 422972 - RNA, 19 nt, Artificial Sequence
  Description of Artificial Sequence: Synthetic oligonucleotide
gaagugguccauuccuuua

SEQ ID NO: 422973 - RNA, 19 nt, Artificial Sequence
  Description of Artificial Sequence: Synthetic oligonucleotide
caacacgaaaugugucuuc

SEQ ID NO: 422974 - RNA, 19 nt, Artificial Sequence
  Description of Artificial Sequence: Synthetic oligonucleotide
ugggcggacagguuuccgu

SEQ ID NO: 422975 - RNA, 19 nt, Artificial Sequence
  Description of Artificial Sequence: Synthetic oligonucleotide
gaauucaccuuuugcucua

SEQ ID NO: 422976 - RNA, 19 nt, Artificial Sequence
  Description of Artificial Sequence: Synthetic oligonucleotide
agcugugagucaucaggga

SEQ ID NO: 422977 - RNA, 19 nt, Artificial Sequence
  Description of Artificial Sequence: Synthetic oligonucleotide
ggagccguuaacaugggca

SEQ ID NO: 422978 - RNA, 19 nt, Artificial Sequence
  Description of Artificial Sequence: Synthetic oligonucleotide
caucggagaggccauacaa

SEQ ID NO: 422979 - RNA, 19 nt, Artificial Sequence
  Description of Artificial Sequence: Synthetic oligonucleotide
guaugccugcuucaucuca

SEQ ID NO: 422980 - RNA, 19 nt, Artificial Sequence
  Description of Artificial Sequence: Synthetic oligonucleotide
gagcacauauggcgaaaca

SEQ ID NO: 422981 - RNA, 19 nt, Artificial Sequence
  Description of Artificial Sequence: Synthetic oligonucleotide
acuaugacuuuuggaacaa

SEQ ID NO: 422982 - RNA, 19 nt, Artificial Sequence
  Description of Artificial Sequence: Synthetic oligonucleotide
cagugauaucugguaagag

SEQ ID NO: 422983 - RNA, 19 nt, Artificial Sequence
  Description of Artificial Sequence: Synthetic oligonucleotide
gccguuaacaugggcaccg

SEQ ID NO: 422984 - RNA, 19 nt, Artificial Sequence
  Description of Artificial Sequence: Synthetic oligonucleotide
ccguagcuaaugaaucugg

SEQ ID NO: 422985 - RNA, 19 nt, Artificial Sequence
  Description of Artificial Sequence: Synthetic oligonucleotide
gcuuaaaauuucccaucug

SEQ ID NO: 422986 - RNA, 19 nt, Artificial Sequence
  Description of Artificial Sequence: Synthetic oligonucleotide
guggcauccguagcuaaug

SEQ ID NO: 422987 - RNA, 19 nt, Artificial Sequence
  Description of Artificial Sequence: Synthetic oligonucleotide
ugggagccguuaacauggg

SEQ ID NO: 422988 - RNA, 19 nt, Artificial Sequence
  Description of Artificial Sequence: Synthetic oligonucleotide
guagucaaggaugccacaa

SEQ ID NO: 422989 - RNA, 19 nt, Artificial Sequence
  Description of Artificial Sequence: Synthetic oligonucleotide
uguccggcagguuccguuc

SEQ ID NO: 422990 - RNA, 19 nt, Artificial Sequence
  Description of Artificial Sequence: Synthetic oligonucleotide
acaccacgccauugguggg

SEQ ID NO: 422991 - RNA, 19 nt, Artificial Sequence
  Description of Artificial Sequence: Synthetic oligonucleotide
uauccaacauccggagaaa

SEQ ID NO: 422992 - RNA, 19 nt, Artificial Sequence
  Description of Artificial Sequence: Synthetic oligonucleotide
agggaagggcaacacgaaa

SEQ ID NO: 422993 - RNA, 19 nt, Artificial Sequence
  Description of Artificial Sequence: Synthetic oligonucleotide
gucauuaaacgggcaagga

SEQ ID NO: 422994 - RNA, 19 nt, Artificial Sequence
  Description of Artificial Sequence: Synthetic oligonucleotide
accgccaucgggaccauug

SEQ ID NO: 422995 - RNA, 19 nt, Artificial Sequence
  Description of Artificial Sequence: Synthetic oligonucleotide
cagauuuagcccaaucuau

SEQ ID NO: 422996 - RNA, 19 nt, Artificial Sequence
  Description of Artificial Sequence: Synthetic oligonucleotide
ucuucccgaugccaaggua

SEQ ID NO: 422997 - RNA, 19 nt, Artificial Sequence
  Description of Artificial Sequence: Synthetic oligonucleotide
gaccauuguguguagguuu

SEQ ID NO: 422998 - RNA, 19 nt, Artificial Sequence
  Description of Artificial Sequence: Synthetic oligonucleotide
cguagcuaaugaaucuggg

SEQ ID NO: 422999 - RNA, 19 nt, Artificial Sequence
  Description of Artificial Sequence: Synthetic oligonucleotide
cauuguguguagguuucuc

SEQ ID NO: 423000 - RNA, 19 nt, Artificial Sequence
  Description of Artificial Sequence: Synthetic oligonucleotide
uggaucccuguaagaguac

SEQ ID NO: 423001 - RNA, 19 nt, Artificial Sequence
  Description of Artificial Sequence: Synthetic oligonucleotide
ggcgaaacagucaugccuc

SEQ ID NO: 423002 - RNA, 19 nt, Artificial Sequence
  Description of Artificial Sequence: Synthetic oligonucleotide
cacggcagagaaaacggaa

SEQ ID NO: 423003 - RNA, 19 nt, Artificial Sequence
  Description of Artificial Sequence: Synthetic oligonucleotide
gcucauacguauccagcug

SEQ ID NO: 423004 - RNA, 19 nt, Artificial Sequence
  Description of Artificial Sequence: Synthetic oligonucleotide
uuguuucguggcauccgua

SEQ ID NO: 423005 - RNA, 19 nt, Artificial Sequence
  Description of Artificial Sequence: Synthetic oligonucleotide
caucccaccgaaggucucc

SEQ ID NO: 423006 - RNA, 19 nt, Artificial Sequence
  Description of Artificial Sequence: Synthetic oligonucleotide
acacgaaaugugucuucau

SEQ ID NO: 423007 - RNA, 19 nt, Artificial Sequence
  Description of Artificial Sequence: Synthetic oligonucleotide
uuacuuugcugaguccgua

SEQ ID NO: 423008 - RNA, 19 nt, Artificial Sequence
  Description of Artificial Sequence: Synthetic oligonucleotide
cucauacguauccagcugu

SEQ ID NO: 423009 - RNA, 19 nt, Artificial Sequence
  Description of Artificial Sequence: Synthetic oligonucleotide
caacgugaaggcuucaaau

SEQ ID NO: 423010 - RNA, 19 nt, Artificial Sequence
  Description of Artificial Sequence: Synthetic oligonucleotide
gccauacaagaaguggucc

SEQ ID NO: 423011 - RNA, 19 nt, Artificial Sequence
  Description of Artificial Sequence: Synthetic oligonucleotide
caucuggcuucauggauaa

SEQ ID NO: 423012 - RNA, 19 nt, Artificial Sequence
  Description of Artificial Sequence: Synthetic oligonucleotide
ggcaacacgaaaugugucu

SEQ ID NO: 423013 - RNA, 19 nt, Artificial Sequence
  Description of Artificial Sequence: Synthetic oligonucleotide
augugggcggacagguuuc

SEQ ID NO: 423014 - RNA, 19 nt, Artificial Sequence
  Description of Artificial Sequence: Synthetic oligonucleotide
guauagccaggccaugugu

SEQ ID NO: 423015 - RNA, 19 nt, Artificial Sequence
  Description of Artificial Sequence: Synthetic oligonucleotide
acucgccaacguaauucac

SEQ ID NO: 423016 - RNA, 19 nt, Artificial Sequence
  Description of Artificial Sequence: Synthetic oligonucleotide
gugugagcgucuugcucgc

SEQ ID NO: 423017 - RNA, 19 nt, Artificial Sequence
  Description of Artificial Sequence: Synthetic oligonucleotide
cucaucggagaggccauac

SEQ ID NO: 423018 - RNA, 19 nt, Artificial Sequence
  Description of Artificial Sequence: Synthetic oligonucleotide
aggcucggaaauacaccac

SEQ ID NO: 423019 - RNA, 19 nt, Artificial Sequence
  Description of Artificial Sequence: Synthetic oligonucleotide
augcaagaauuuagccguc

SEQ ID NO: 423020 - RNA, 19 nt, Artificial Sequence
  Description of Artificial Sequence: Synthetic oligonucleotide
ugcggccaacauuccuaag

SEQ ID NO: 423021 - RNA, 19 nt, Artificial Sequence
  Description of Artificial Sequence: Synthetic oligonucleotide
cauagggccucaguuccuc

SEQ ID NO: 423022 - RNA, 19 nt, Artificial Sequence
  Description of Artificial Sequence: Synthetic oligonucleotide
cuucaucgauguccugcug

SEQ ID NO: 423023 - RNA, 19 nt, Artificial Sequence
  Description of Artificial Sequence: Synthetic oligonucleotide
auaccauuggagagcuccu

SEQ ID NO: 423024 - RNA, 19 nt, Artificial Sequence
  Description of Artificial Sequence: Synthetic oligonucleotide
ugugggcggacagguuucc

SEQ ID NO: 423025 - RNA, 19 nt, Artificial Sequence
  Description of Artificial Sequence: Synthetic oligonucleotide
auguccggcagguuccguu

SEQ ID NO: 423026 - RNA, 19 nt, Artificial Sequence
  Description of Artificial Sequence: Synthetic oligonucleotide
auaugaugucagggccagg

SEQ ID NO: 423027 - RNA, 19 nt, Artificial Sequence
  Description of Artificial Sequence: Synthetic oligonucleotide
cagcauaggggacuguucu

SEQ ID NO: 423028 - RNA, 19 nt, Artificial Sequence
  Description of Artificial Sequence: Synthetic oligonucleotide
ucguggcauccguagcuaa

SEQ ID NO: 423029 - RNA, 19 nt, Artificial Sequence
  Description of Artificial Sequence: Synthetic oligonucleotide
cgucauuaaacgggcaagg

SEQ ID NO: 423030 - RNA, 19 nt, Artificial Sequence
  Description of Artificial Sequence: Synthetic oligonucleotide
uccacgggguccccaucgu

SEQ ID NO: 423031 - RNA, 19 nt, Artificial Sequence
  Description of Artificial Sequence: Synthetic oligonucleotide
gagggguggcauucacuga

SEQ ID NO: 423032 - RNA, 19 nt, Artificial Sequence
  Description of Artificial Sequence: Synthetic oligonucleotide
gcuaaugaaucugggccac

SEQ ID NO: 423033 - RNA, 19 nt, Artificial Sequence
  Description of Artificial Sequence: Synthetic oligonucleotide
uaggguguuuaagcuggaa

SEQ ID NO: 423034 - RNA, 19 nt, Artificial Sequence
  Description of Artificial Sequence: Synthetic oligonucleotide
auacaagaagugguccauu

SEQ ID NO: 423035 - RNA, 19 nt, Artificial Sequence
  Description of Artificial Sequence: Synthetic oligonucleotide
uucguggcauccguagcua

SEQ ID NO: 423036 - RNA, 19 nt, Artificial Sequence
  Description of Artificial Sequence: Synthetic oligonucleotide
cacccugcucauacguauc

SEQ ID NO: 423037 - RNA, 19 nt, Artificial Sequence
  Description of Artificial Sequence: Synthetic oligonucleotide
gguucaacgugaaggcuuc

SEQ ID NO: 423038 - RNA, 19 nt, Artificial Sequence
  Description of Artificial Sequence: Synthetic oligonucleotide
caaccucaccugauccauc

SEQ ID NO: 423039 - RNA, 19 nt, Artificial Sequence
  Description of Artificial Sequence: Synthetic oligonucleotide
gcggacagguuuccguucc

SEQ ID NO: 423040 - RNA, 19 nt, Artificial Sequence
  Description of Artificial Sequence: Synthetic oligonucleotide
acugagcaucucauguuau

SEQ ID NO: 423041 - RNA, 19 nt, Artificial Sequence
  Description of Artificial Sequence: Synthetic oligonucleotide
ggccaugugugcucuuccc

SEQ ID NO: 423042 - RNA, 19 nt, Artificial Sequence
  Description of Artificial Sequence: Synthetic oligonucleotide
gaguauagccaggccaugu

SEQ ID NO: 423043 - RNA, 19 nt, Artificial Sequence
  Description of Artificial Sequence: Synthetic oligonucleotide
uugugcugauugugcuuaa

SEQ ID NO: 423044 - RNA, 19 nt, Artificial Sequence
  Description of Artificial Sequence: Synthetic oligonucleotide
cauacguauccagcuguga

SEQ ID NO: 423045 - RNA, 19 nt, Artificial Sequence
  Description of Artificial Sequence: Synthetic oligonucleotide
cacgguuugaagguggggu

SEQ ID NO: 423046 - RNA, 19 nt, Artificial Sequence
  Description of Artificial Sequence: Synthetic oligonucleotide
cguagagaugccccgaguc

SEQ ID NO: 423047 - RNA, 19 nt, Artificial Sequence
  Description of Artificial Sequence: Synthetic oligonucleotide
auauggcgaaacagucaug

SEQ ID NO: 423048 - RNA, 19 nt, Artificial Sequence
  Description of Artificial Sequence: Synthetic oligonucleotide
caccacgccauuggugggc

SEQ ID NO: 423049 - RNA, 19 nt, Artificial Sequence
  Description of Artificial Sequence: Synthetic oligonucleotide
uuguccugucuacgagcuc

SEQ ID NO: 423050 - RNA, 19 nt, Artificial Sequence
  Description of Artificial Sequence: Synthetic oligonucleotide
cccaccgaaggucuccugc

SEQ ID NO: 423051 - RNA, 19 nt, Artificial Sequence
  Description of Artificial Sequence: Synthetic oligonucleotide
ccaucgggaccauugugug

SEQ ID NO: 423052 - RNA, 19 nt, Artificial Sequence
  Description of Artificial Sequence: Synthetic oligonucleotide
caauccgaucaucuucaaa

SEQ ID NO: 423053 - RNA, 19 nt, Artificial Sequence
  Description of Artificial Sequence: Synthetic oligonucleotide
gcucggaaauacaccacgc

SEQ ID NO: 423054 - RNA, 19 nt, Artificial Sequence
  Description of Artificial Sequence: Synthetic oligonucleotide
gagcgucuugcucgcucug

SEQ ID NO: 423055 - RNA, 19 nt, Artificial Sequence
  Description of Artificial Sequence: Synthetic oligonucleotide
gcucuucccgaugccaagg

SEQ ID NO: 423056 - RNA, 19 nt, Artificial Sequence
  Description of Artificial Sequence: Synthetic oligonucleotide
ccgucauuaaacgggcaag

SEQ ID NO: 423057 - RNA, 19 nt, Artificial Sequence
  Description of Artificial Sequence: Synthetic oligonucleotide
gccacaacccagcuugguc

SEQ ID NO: 423058 - RNA, 19 nt, Artificial Sequence
  Description of Artificial Sequence: Synthetic oligonucleotide
ggagaauccacggcagaga

SEQ ID NO: 423059 - RNA, 19 nt, Artificial Sequence
  Description of Artificial Sequence: Synthetic oligonucleotide
ggccauacaagaagugguc

SEQ ID NO: 423060 - RNA, 19 nt, Artificial Sequence
  Description of Artificial Sequence: Synthetic oligonucleotide
ggcacgguuugaagguggg

SEQ ID NO: 423061 - RNA, 19 nt, Artificial Sequence
  Description of Artificial Sequence: Synthetic oligonucleotide
guccggcagguuccguucc

SEQ ID NO: 423062 - RNA, 19 nt, Artificial Sequence
  Description of Artificial Sequence: Synthetic oligonucleotide
guuccguuccaggcaaaga

SEQ ID NO: 423063 - RNA, 19 nt, Artificial Sequence
  Description of Artificial Sequence: Synthetic oligonucleotide
cuugcucgcucugagagau

SEQ ID NO: 423064 - RNA, 19 nt, Artificial Sequence
  Description of Artificial Sequence: Synthetic oligonucleotide
acgggguccccaucgugau

SEQ ID NO: 423065 - RNA, 19 nt, Artificial Sequence
  Description of Artificial Sequence: Synthetic oligonucleotide
ucaugccuccugucuucaa

SEQ ID NO: 423066 - RNA, 19 nt, Artificial Sequence
  Description of Artificial Sequence: Synthetic oligonucleotide
cuggcacgguuugaaggug

SEQ ID NO: 423067 - RNA, 19 nt, Artificial Sequence
  Description of Artificial Sequence: Synthetic oligonucleotide
uccgccugggagagagaau

SEQ ID NO: 423068 - RNA, 19 nt, Artificial Sequence
  Description of Artificial Sequence: Synthetic oligonucleotide
gaaaugugcaagacucauu

SEQ ID NO: 423069 - RNA, 19 nt, Artificial Sequence
  Description of Artificial Sequence: Synthetic oligonucleotide
gcugaguccguaauucuaa

SEQ ID NO: 423070 - RNA, 19 nt, Artificial Sequence
  Description of Artificial Sequence: Synthetic oligonucleotide
caagaauuuagccgucauu

SEQ ID NO: 423071 - RNA, 19 nt, Artificial Sequence
  Description of Artificial Sequence: Synthetic oligonucleotide
augcguagagaugccccga

SEQ ID NO: 423072 - RNA, 19 nt, Artificial Sequence
  Description of Artificial Sequence: Synthetic oligonucleotide
uuaaacgggcaaggaucuu

SEQ ID NO: 423073 - RNA, 19 nt, Artificial Sequence
  Description of Artificial Sequence: Synthetic oligonucleotide
cuggcaugaucaggaucag

SEQ ID NO: 423074 - RNA, 19 nt, Artificial Sequence
  Description of Artificial Sequence: Synthetic oligonucleotide
ggcacauagggccucaguu

SEQ ID NO: 423075 - RNA, 19 nt, Artificial Sequence
  Description of Artificial Sequence: Synthetic oligonucleotide
gcacauauggcgaaacagu

SEQ ID NO: 423076 - RNA, 19 nt, Artificial Sequence
  Description of Artificial Sequence: Synthetic oligonucleotide
agcgucuugcucgcucuga

SEQ ID NO: 423077 - RNA, 19 nt, Artificial Sequence
  Description of Artificial Sequence: Synthetic oligonucleotide
ccucguguagccauuauau

SEQ ID NO: 423078 - RNA, 19 nt, Artificial Sequence
  Description of Artificial Sequence: Synthetic oligonucleotide
gcgaaacagucaugccucc

SEQ ID NO: 423079 - RNA, 19 nt, Artificial Sequence
  Description of Artificial Sequence: Synthetic oligonucleotide
cuaacgcucacaguuguuu

SEQ ID NO: 423080 - RNA, 19 nt, Artificial Sequence
  Description of Artificial Sequence: Synthetic oligonucleotide
ccaagguacuuauggcuca

SEQ ID NO: 423081 - RNA, 19 nt, Artificial Sequence
  Description of Artificial Sequence: Synthetic oligonucleotide
ucccaccgaaggucuccug

SEQ ID NO: 423082 - RNA, 19 nt, Artificial Sequence
  Description of Artificial Sequence: Synthetic oligonucleotide
ccauuugcguuuuguucuc

SEQ ID NO: 423083 - RNA, 19 nt, Artificial Sequence
  Description of Artificial Sequence: Synthetic oligonucleotide
ggcauccguagcuaaugaa

SEQ ID NO: 423084 - RNA, 19 nt, Artificial Sequence
  Description of Artificial Sequence: Synthetic oligonucleotide
ggaucccuguaagaguaca

SEQ ID NO: 423085 - RNA, 19 nt, Artificial Sequence
  Description of Artificial Sequence: Synthetic oligonucleotide
ggggaauugggcccagcaa

SEQ ID NO: 423086 - RNA, 19 nt, Artificial Sequence
  Description of Artificial Sequence: Synthetic oligonucleotide
gucuacgagcucucugacu

SEQ ID NO: 423087 - RNA, 19 nt, Artificial Sequence
  Description of Artificial Sequence: Synthetic oligonucleotide
uguccgccugggagagaga

SEQ ID NO: 423088 - RNA, 19 nt, Artificial Sequence
  Description of Artificial Sequence: Synthetic oligonucleotide
cugcggccaacauuccuaa

SEQ ID NO: 423089 - RNA, 19 nt, Artificial Sequence
  Description of Artificial Sequence: Synthetic oligonucleotide
ccaacauccggagaaaagu

SEQ ID NO: 423090 - RNA, 19 nt, Artificial Sequence
  Description of Artificial Sequence: Synthetic oligonucleotide
guccgccugggagagagaa

SEQ ID NO: 423091 - RNA, 19 nt, Artificial Sequence
  Description of Artificial Sequence: Synthetic oligonucleotide
aucuuaaggcuggcaugau

SEQ ID NO: 423092 - RNA, 19 nt, Artificial Sequence
  Description of Artificial Sequence: Synthetic oligonucleotide
cauuugcguuuuguucuca

SEQ ID NO: 423093 - RNA, 19 nt, Artificial Sequence
  Description of Artificial Sequence: Synthetic oligonucleotide
cacacccugcucauacgua

SEQ ID NO: 423094 - RNA, 19 nt, Artificial Sequence
  Description of Artificial Sequence: Synthetic oligonucleotide
ccgauggagcaacaggaga

SEQ ID NO: 423095 - RNA, 19 nt, Artificial Sequence
  Description of Artificial Sequence: Synthetic oligonucleotide
gcacgguuugaaggugggg

SEQ ID NO: 423096 - RNA, 19 nt, Artificial Sequence
  Description of Artificial Sequence: Synthetic oligonucleotide
ucucaucggagaggccaua

SEQ ID NO: 423097 - RNA, 19 nt, Artificial Sequence
  Description of Artificial Sequence: Synthetic oligonucleotide
ggaaauacaccacgccauu

SEQ ID NO: 423098 - RNA, 19 nt, Artificial Sequence
  Description of Artificial Sequence: Synthetic oligonucleotide
gggaagggcaacacgaaau

SEQ ID NO: 423099 - RNA, 19 nt, Artificial Sequence
  Description of Artificial Sequence: Synthetic oligonucleotide
ugugagcgucuugcucgcu

SEQ ID NO: 423100 - RNA, 19 nt, Artificial Sequence
  Description of Artificial Sequence: Synthetic oligonucleotide
acgagcucucugacugucu

SEQ ID NO: 423101 - RNA, 19 nt, Artificial Sequence
  Description of Artificial Sequence: Synthetic oligonucleotide
gggcaacacgaaauguguc

SEQ ID NO: 423102 - RNA, 19 nt, Artificial Sequence
  Description of Artificial Sequence: Synthetic oligonucleotide
ggaagcuaacgcucacagu

SEQ ID NO: 423103 - RNA, 19 nt, Artificial Sequence
  Description of Artificial Sequence: Synthetic oligonucleotide
cccaaucuauggccuuccc

SEQ ID NO: 423104 - RNA, 19 nt, Artificial Sequence
  Description of Artificial Sequence: Synthetic oligonucleotide
gcaagaauuuagccgucau

SEQ ID NO: 423105 - RNA, 19 nt, Artificial Sequence
  Description of Artificial Sequence: Synthetic oligonucleotide
gcugcgagggcgaugucaa

SEQ ID NO: 423106 - RNA, 19 nt, Artificial Sequence
  Description of Artificial Sequence: Synthetic oligonucleotide
guaggguguuuaagcugga

SEQ ID NO: 423107 - RNA, 19 nt, Artificial Sequence
  Description of Artificial Sequence: Synthetic oligonucleotide
caucgggaccauugugugu

SEQ ID NO: 423108 - RNA, 19 nt, Artificial Sequence
  Description of Artificial Sequence: Synthetic oligonucleotide
gcccaaucuauggccuucc

SEQ ID NO: 423109 - RNA, 19 nt, Artificial Sequence
  Description of Artificial Sequence: Synthetic oligonucleotide
agccgucauuaaacgggca

SEQ ID NO: 423110 - RNA, 19 nt, Artificial Sequence
  Description of Artificial Sequence: Synthetic oligonucleotide
gcgagggcgaugucaaacu

SEQ ID NO: 423111 - RNA, 19 nt, Artificial Sequence
  Description of Artificial Sequence: Synthetic oligonucleotide
gaugggucuuuggcaauuu

SEQ ID NO: 423112 - RNA, 19 nt, Artificial Sequence
  Description of Artificial Sequence: Synthetic oligonucleotide
guucaacgugaaggcuuca

SEQ ID NO: 423113 - RNA, 19 nt, Artificial Sequence
  Description of Artificial Sequence: Synthetic oligonucleotide
ccaccgaaggucuccugca

SEQ ID NO: 423114 - RNA, 19 nt, Artificial Sequence
  Description of Artificial Sequence: Synthetic oligonucleotide
cugacacacucgccaacgu

SEQ ID NO: 423115 - RNA, 19 nt, Artificial Sequence
  Description of Artificial Sequence: Synthetic oligonucleotide
gcucucugacugucuugac

SEQ ID NO: 423116 - RNA, 19 nt, Artificial Sequence
  Description of Artificial Sequence: Synthetic oligonucleotide
cgccaacguaauucacagg

SEQ ID NO: 423117 - RNA, 19 nt, Artificial Sequence
  Description of Artificial Sequence: Synthetic oligonucleotide
cggaaauacaccacgccau

SEQ ID NO: 423118 - RNA, 19 nt, Artificial Sequence
  Description of Artificial Sequence: Synthetic oligonucleotide
gcaacacgaaaugugucuu

SEQ ID NO: 423119 - RNA, 19 nt, Artificial Sequence
  Description of Artificial Sequence: Synthetic oligonucleotide
gugagucaucagggagcac

SEQ ID NO: 423120 - RNA, 19 nt, Artificial Sequence
  Description of Artificial Sequence: Synthetic oligonucleotide
ccuuucugauagaucugcu

SEQ ID NO: 423121 - RNA, 19 nt, Artificial Sequence
  Description of Artificial Sequence: Synthetic oligonucleotide
ggaccauuguguguagguu

SEQ ID NO: 423122 - RNA, 19 nt, Artificial Sequence
  Description of Artificial Sequence: Synthetic oligonucleotide
ccguuaacaugggcaccgc

SEQ ID NO: 423123 - RNA, 19 nt, Artificial Sequence
  Description of Artificial Sequence: Synthetic oligonucleotide
cccucguguagccauuaua

SEQ ID NO: 423124 - RNA, 19 nt, Artificial Sequence
  Description of Artificial Sequence: Synthetic oligonucleotide
ggcauucacugagcaucuc

SEQ ID NO: 423125 - RNA, 19 nt, Artificial Sequence
  Description of Artificial Sequence: Synthetic oligonucleotide
cacacucgccaacguaauu

SEQ ID NO: 423126 - RNA, 19 nt, Artificial Sequence
  Description of Artificial Sequence: Synthetic oligonucleotide
cccgaugccaagguacuua

SEQ ID NO: 423127 - RNA, 19 nt, Artificial Sequence
  Description of Artificial Sequence: Synthetic oligonucleotide
ccucugguaggguguuuaa

SEQ ID NO: 423128 - RNA, 19 nt, Artificial Sequence
  Description of Artificial Sequence: Synthetic oligonucleotide
cugcgagggcgaugucaaa

SEQ ID NO: 423129 - RNA, 19 nt, Artificial Sequence
  Description of Artificial Sequence: Synthetic oligonucleotide
gccucccucguguagccau

SEQ ID NO: 423130 - RNA, 19 nt, Artificial Sequence
  Description of Artificial Sequence: Synthetic oligonucleotide
cgggaccauuguguguagg

SEQ ID NO: 423131 - RNA, 19 nt, Artificial Sequence
  Description of Artificial Sequence: Synthetic oligonucleotide
gggcggacagguuuccguu

SEQ ID NO: 423132 - RNA, 19 nt, Artificial Sequence
  Description of Artificial Sequence: Synthetic oligonucleotide
ccgaugccaagguacuuau

SEQ ID NO: 423133 - RNA, 19 nt, Artificial Sequence
  Description of Artificial Sequence: Synthetic oligonucleotide
caguaacacuugugaucau

SEQ ID NO: 423134 - RNA, 19 nt, Artificial Sequence
  Description of Artificial Sequence: Synthetic oligonucleotide
ccaaaagacuggaguguuu

SEQ ID NO: 423135 - RNA, 19 nt, Artificial Sequence
  Description of Artificial Sequence: Synthetic oligonucleotide
cgacaauaugugggcggac

SEQ ID NO: 423136 - RNA, 19 nt, Artificial Sequence
  Description of Artificial Sequence: Synthetic oligonucleotide
cguauccagcugugaguca

SEQ ID NO: 423137 - RNA, 19 nt, Artificial Sequence
  Description of Artificial Sequence: Synthetic oligonucleotide
cagcugcgagggcgauguc

SEQ ID NO: 423138 - RNA, 19 nt, Artificial Sequence
  Description of Artificial Sequence: Synthetic oligonucleotide
ccgccugggagagagaauu

SEQ ID NO: 423139 - RNA, 19 nt, Artificial Sequence
  Description of Artificial Sequence: Synthetic oligonucleotide
gcuaacgcucacaguuguu

SEQ ID NO: 423140 - RNA, 19 nt, Artificial Sequence
  Description of Artificial Sequence: Synthetic oligonucleotide
cguggcauccguagcuaau

SEQ ID NO: 423141 - RNA, 19 nt, Artificial Sequence
  Description of Artificial Sequence: Synthetic oligonucleotide
ccgccaucgggaccauugu

SEQ ID NO: 423142 - RNA, 19 nt, Artificial Sequence
  Description of Artificial Sequence: Synthetic oligonucleotide
gggcgaugucaaacuuggu

SEQ ID NO: 423143 - RNA, 19 nt, Artificial Sequence
  Description of Artificial Sequence: Synthetic oligonucleotide
cgagggcgaugucaaacuu

SEQ ID NO: 423144 - RNA, 19 nt, Artificial Sequence
  Description of Artificial Sequence: Synthetic oligonucleotide
gcaucauguccggcagguu

SEQ ID NO: 423145 - RNA, 19 nt, Artificial Sequence
  Description of Artificial Sequence: Synthetic oligonucleotide
cgcucacaguuguuuguuu

SEQ ID NO: 423146 - RNA, 19 nt, Artificial Sequence
  Description of Artificial Sequence: Synthetic oligonucleotide
caccgccaucgggaccauu

SEQ ID NO: 423147 - RNA, 19 nt, Artificial Sequence
  Description of Artificial Sequence: Synthetic oligonucleotide
cgggguccccaucgugauu

SEQ ID NO: 423148 - RNA, 19 nt, Artificial Sequence
  Description of Artificial Sequence: Synthetic oligonucleotide
aguaccauaacacaacucc

SEQ ID NO: 423149 - RNA, 19 nt, Artificial Sequence
  Description of Artificial Sequence: Synthetic oligonucleotide
uguuauuuggccuugaagc

SEQ ID NO: 423150 - RNA, 19 nt, Artificial Sequence
  Description of Artificial Sequence: Synthetic oligonucleotide
aaaacuaggugcuugugac

SEQ ID NO: 423151 - RNA, 19 nt, Artificial Sequence
  Description of Artificial Sequence: Synthetic oligonucleotide
uuuggauaaauuuuaacag

SEQ ID NO: 423152 - RNA, 19 nt, Artificial Sequence
  Description of Artificial Sequence: Synthetic oligonucleotide
aaucaaugagcauuuugcc

SEQ ID NO: 423153 - RNA, 19 nt, Artificial Sequence
  Description of Artificial Sequence: Synthetic oligonucleotide
gacacaacaaaccucacgg

SEQ ID NO: 423154 - RNA, 19 nt, Artificial Sequence
  Description of Artificial Sequence: Synthetic oligonucleotide
ucucuuuaaaacuaggugc

SEQ ID NO: 423155 - RNA, 19 nt, Artificial Sequence
  Description of Artificial Sequence: Synthetic oligonucleotide
auuuggauaaauuuuaaca

SEQ ID NO: 423156 - RNA, 19 nt, Artificial Sequence
  Description of Artificial Sequence: Synthetic oligonucleotide
uuaacauguggcauaaaag

SEQ ID NO: 423157 - RNA, 19 nt, Artificial Sequence
  Description of Artificial Sequence: Synthetic oligonucleotide
uugagccuaauacagaucc

SEQ ID NO: 423158 - RNA, 19 nt, Artificial Sequence
  Description of Artificial Sequence: Synthetic oligonucleotide
uguguaaggaauaacugca

SEQ ID NO: 423159 - RNA, 19 nt, Artificial Sequence
  Description of Artificial Sequence: Synthetic oligonucleotide
uauugaguagauauagaag

SEQ ID NO: 423160 - RNA, 19 nt, Artificial Sequence
  Description of Artificial Sequence: Synthetic oligonucleotide
aaguauagcugcccuauac

SEQ ID NO: 423161 - RNA, 19 nt, Artificial Sequence
  Description of Artificial Sequence: Synthetic oligonucleotide
gaaucaauuaacauguggc

SEQ ID NO: 423162 - RNA, 19 nt, Artificial Sequence
  Description of Artificial Sequence: Synthetic oligonucleotide
aaaucagugcaacuuaugu

SEQ ID NO: 423163 - RNA, 19 nt, Artificial Sequence
  Description of Artificial Sequence: Synthetic oligonucleotide
ucuuugauggaaaauacuc

SEQ ID NO: 423164 - RNA, 19 nt, Artificial Sequence
  Description of Artificial Sequence: Synthetic oligonucleotide
cuaguagacauacauauac

SEQ ID NO: 423165 - RNA, 19 nt, Artificial Sequence
  Description of Artificial Sequence: Synthetic oligonucleotide
cuguaaaaggccuuuaccc

SEQ ID NO: 423166 - RNA, 19 nt, Artificial Sequence
  Description of Artificial Sequence: Synthetic oligonucleotide
auuaguaguguacagagau

SEQ ID NO: 423167 - RNA, 19 nt, Artificial Sequence
  Description of Artificial Sequence: Synthetic oligonucleotide
aguauagcugcccuauacc

SEQ ID NO: 423168 - RNA, 19 nt, Artificial Sequence
  Description of Artificial Sequence: Synthetic oligonucleotide
ugaagaauguguaaggaau

SEQ ID NO: 423169 - RNA, 19 nt, Artificial Sequence
  Description of Artificial Sequence: Synthetic oligonucleotide
aaaucggaaucuucgguuc

SEQ ID NO: 423170 - RNA, 19 nt, Artificial Sequence
  Description of Artificial Sequence: Synthetic oligonucleotide
ugcuuuauugaguagauau

SEQ ID NO: 423171 - RNA, 19 nt, Artificial Sequence
  Description of Artificial Sequence: Synthetic oligonucleotide
uuugauggaaaauacuccu

SEQ ID NO: 423172 - RNA, 19 nt, Artificial Sequence
  Description of Artificial Sequence: Synthetic oligonucleotide
aauauuaguaguguacaga

SEQ ID NO: 423173 - RNA, 19 nt, Artificial Sequence
  Description of Artificial Sequence: Synthetic oligonucleotide
gauacauuguaguugagaa

SEQ ID NO: 423174 - RNA, 19 nt, Artificial Sequence
  Description of Artificial Sequence: Synthetic oligonucleotide
uuggaaaguaaauaacuga

SEQ ID NO: 423175 - RNA, 19 nt, Artificial Sequence
  Description of Artificial Sequence: Synthetic oligonucleotide
auagcccugucucauauac

SEQ ID NO: 423176 - RNA, 19 nt, Artificial Sequence
  Description of Artificial Sequence: Synthetic oligonucleotide
aaucggaaucuucgguucc

SEQ ID NO: 423177 - RNA, 19 nt, Artificial Sequence
  Description of Artificial Sequence: Synthetic oligonucleotide
uuuaagugcccuugggagg

SEQ ID NO: 423178 - RNA, 19 nt, Artificial Sequence
  Description of Artificial Sequence: Synthetic oligonucleotide
gauuguuuggcucuucaug

SEQ ID NO: 423179 - RNA, 19 nt, Artificial Sequence
  Description of Artificial Sequence: Synthetic oligonucleotide
ucaaugagcauuuugccau

SEQ ID NO: 423180 - RNA, 19 nt, Artificial Sequence
  Description of Artificial Sequence: Synthetic oligonucleotide
ugaauauuaguaguguaca

SEQ ID NO: 423181 - RNA, 19 nt, Artificial Sequence
  Description of Artificial Sequence: Synthetic oligonucleotide
uaaaacuaggugcuuguga

SEQ ID NO: 423182 - RNA, 19 nt, Artificial Sequence
  Description of Artificial Sequence: Synthetic oligonucleotide
aagcuacugccccagugcc

SEQ ID NO: 423183 - RNA, 19 nt, Artificial Sequence
  Description of Artificial Sequence: Synthetic oligonucleotide
uuccgcaucuguaaaaggc

SEQ ID NO: 423184 - RNA, 19 nt, Artificial Sequence
  Description of Artificial Sequence: Synthetic oligonucleotide
gaauauuaguaguguacag

SEQ ID NO: 423185 - RNA, 19 nt, Artificial Sequence
  Description of Artificial Sequence: Synthetic oligonucleotide
aaagcacuagcacaaaguu

SEQ ID NO: 423186 - RNA, 19 nt, Artificial Sequence
  Description of Artificial Sequence: Synthetic oligonucleotide
acuuauguggaaguauagc

SEQ ID NO: 423187 - RNA, 19 nt, Artificial Sequence
  Description of Artificial Sequence: Synthetic oligonucleotide
aaacccaggaugaauggac

SEQ ID NO: 423188 - RNA, 19 nt, Artificial Sequence
  Description of Artificial Sequence: Synthetic oligonucleotide
caugucagacaucaaaagc

SEQ ID NO: 423189 - RNA, 19 nt, Artificial Sequence
  Description of Artificial Sequence: Synthetic oligonucleotide
aaggcaagucauuugacaa

SEQ ID NO: 423190 - RNA, 19 nt, Artificial Sequence
  Description of Artificial Sequence: Synthetic oligonucleotide
ggagcuaaagaacaugagg

SEQ ID NO: 423191 - RNA, 19 nt, Artificial Sequence
  Description of Artificial Sequence: Synthetic oligonucleotide
cauucuaccacacgugggg

SEQ ID NO: 423192 - RNA, 19 nt, Artificial Sequence
  Description of Artificial Sequence: Synthetic oligonucleotide
gucucuuuaaaacuaggug

SEQ ID NO: 423193 - RNA, 19 nt, Artificial Sequence
  Description of Artificial Sequence: Synthetic oligonucleotide
uauagaagagcacauucua

SEQ ID NO: 423194 - RNA, 19 nt, Artificial Sequence
  Description of Artificial Sequence: Synthetic oligonucleotide
guuauuuggccuugaagcc

SEQ ID NO: 423195 - RNA, 19 nt, Artificial Sequence
  Description of Artificial Sequence: Synthetic oligonucleotide
auauacucacaagugcugc

SEQ ID NO: 423196 - RNA, 19 nt, Artificial Sequence
  Description of Artificial Sequence: Synthetic oligonucleotide
agggaacauggucucaucc

SEQ ID NO: 423197 - RNA, 19 nt, Artificial Sequence
  Description of Artificial Sequence: Synthetic oligonucleotide
uaguaguguacagagauga

SEQ ID NO: 423198 - RNA, 19 nt, Artificial Sequence
  Description of Artificial Sequence: Synthetic oligonucleotide
ugacaugucagacaucaaa

SEQ ID NO: 423199 - RNA, 19 nt, Artificial Sequence
  Description of Artificial Sequence: Synthetic oligonucleotide
aaaggauacuguacuugcc

SEQ ID NO: 423200 - RNA, 19 nt, Artificial Sequence
  Description of Artificial Sequence: Synthetic oligonucleotide
ccagacaacaggaugaugg

SEQ ID NO: 423201 - RNA, 19 nt, Artificial Sequence
  Description of Artificial Sequence: Synthetic oligonucleotide
ugugacaauguccaccgga

SEQ ID NO: 423202 - RNA, 19 nt, Artificial Sequence
  Description of Artificial Sequence: Synthetic oligonucleotide
ugaggcauagugaggauac

SEQ ID NO: 423203 - RNA, 19 nt, Artificial Sequence
  Description of Artificial Sequence: Synthetic oligonucleotide
aggccgaaacaacaguucc

SEQ ID NO: 423204 - RNA, 19 nt, Artificial Sequence
  Description of Artificial Sequence: Synthetic oligonucleotide
cuucgguagcuuaugagcc

SEQ ID NO: 423205 - RNA, 19 nt, Artificial Sequence
  Description of Artificial Sequence: Synthetic oligonucleotide
agaaugguaccaaguaucc

SEQ ID NO: 423206 - RNA, 19 nt, Artificial Sequence
  Description of Artificial Sequence: Synthetic oligonucleotide
acaacaaaccucacggagc

SEQ ID NO: 423207 - RNA, 19 nt, Artificial Sequence
  Description of Artificial Sequence: Synthetic oligonucleotide
uauagcugcccuauaccag

SEQ ID NO: 423208 - RNA, 19 nt, Artificial Sequence
  Description of Artificial Sequence: Synthetic oligonucleotide
gagcuaaagaacaugagga

SEQ ID NO: 423209 - RNA, 19 nt, Artificial Sequence
  Description of Artificial Sequence: Synthetic oligonucleotide
aaguucaggacacaacaaa

SEQ ID NO: 423210 - RNA, 19 nt, Artificial Sequence
  Description of Artificial Sequence: Synthetic oligonucleotide
aaaccgguaggguguggcc

SEQ ID NO: 423211 - RNA, 19 nt, Artificial Sequence
  Description of Artificial Sequence: Synthetic oligonucleotide
uccaacaagcuacugcccc

SEQ ID NO: 423212 - RNA, 19 nt, Artificial Sequence
  Description of Artificial Sequence: Synthetic oligonucleotide
ugaagcggcauuuggauaa

SEQ ID NO: 423213 - RNA, 19 nt, Artificial Sequence
  Description of Artificial Sequence: Synthetic oligonucleotide
ucaauuaacauguggcaua

SEQ ID NO: 423214 - RNA, 19 nt, Artificial Sequence
  Description of Artificial Sequence: Synthetic oligonucleotide
ccauucaucuauuaggucc

SEQ ID NO: 423215 - RNA, 19 nt, Artificial Sequence
  Description of Artificial Sequence: Synthetic oligonucleotide
gacagacagaucccuaggg

SEQ ID NO: 423216 - RNA, 19 nt, Artificial Sequence
  Description of Artificial Sequence: Synthetic oligonucleotide
acaugucagacaucaaaag

SEQ ID NO: 423217 - RNA, 19 nt, Artificial Sequence
  Description of Artificial Sequence: Synthetic oligonucleotide
auagugaggauacaggaua

SEQ ID NO: 423218 - RNA, 19 nt, Artificial Sequence
  Description of Artificial Sequence: Synthetic oligonucleotide
cuugccaaucacaagagca

SEQ ID NO: 423219 - RNA, 19 nt, Artificial Sequence
  Description of Artificial Sequence: Synthetic oligonucleotide
agcuuaugagcccaagguc

SEQ ID NO: 423220 - RNA, 19 nt, Artificial Sequence
  Description of Artificial Sequence: Synthetic oligonucleotide
gacgguuccgacucgggcg

SEQ ID NO: 423221 - RNA, 19 nt, Artificial Sequence
  Description of Artificial Sequence: Synthetic oligonucleotide
uacggauuccuacugcuug

SEQ ID NO: 423222 - RNA, 19 nt, Artificial Sequence
  Description of Artificial Sequence: Synthetic oligonucleotide
ucgguggcaaccauguuug

SEQ ID NO: 423223 - RNA, 19 nt, Artificial Sequence
  Description of Artificial Sequence: Synthetic oligonucleotide
aguucaggacacaacaaac

SEQ ID NO: 423224 - RNA, 19 nt, Artificial Sequence
  Description of Artificial Sequence: Synthetic oligonucleotide
cugucucauauacugaggc

SEQ ID NO: 423225 - RNA, 19 nt, Artificial Sequence
  Description of Artificial Sequence: Synthetic oligonucleotide
uccgcaucuguaaaaggcc

SEQ ID NO: 423226 - RNA, 19 nt, Artificial Sequence
  Description of Artificial Sequence: Synthetic oligonucleotide
caaaguucaggacacaaca

SEQ ID NO: 423227 - RNA, 19 nt, Artificial Sequence
  Description of Artificial Sequence: Synthetic oligonucleotide
ucuugcugagucaugggcu

SEQ ID NO: 423228 - RNA, 19 nt, Artificial Sequence
  Description of Artificial Sequence: Synthetic oligonucleotide
auugccggcggcugcagcc

SEQ ID NO: 423229 - RNA, 19 nt, Artificial Sequence
  Description of Artificial Sequence: Synthetic oligonucleotide
uggagagccaacuuucucu

SEQ ID NO: 423230 - RNA, 19 nt, Artificial Sequence
  Description of Artificial Sequence: Synthetic oligonucleotide
cauuuggauaaauuuuaac

SEQ ID NO: 423231 - RNA, 19 nt, Artificial Sequence
  Description of Artificial Sequence: Synthetic oligonucleotide
aucccuaggguacggauuc

SEQ ID NO: 423232 - RNA, 19 nt, Artificial Sequence
  Description of Artificial Sequence: Synthetic oligonucleotide
cuuaugagcccaagguccg

SEQ ID NO: 423233 - RNA, 19 nt, Artificial Sequence
  Description of Artificial Sequence: Synthetic oligonucleotide
augacagacagaucccuag

SEQ ID NO: 423234 - RNA, 19 nt, Artificial Sequence
  Description of Artificial Sequence: Synthetic oligonucleotide
augucagacaucaaaagcu

SEQ ID NO: 423235 - RNA, 19 nt, Artificial Sequence
  Description of Artificial Sequence: Synthetic oligonucleotide
uggccuugaagccuuaacu

SEQ ID NO: 423236 - RNA, 19 nt, Artificial Sequence
  Description of Artificial Sequence: Synthetic oligonucleotide
guagcuuaugagcccaagg

SEQ ID NO: 423237 - RNA, 19 nt, Artificial Sequence
  Description of Artificial Sequence: Synthetic oligonucleotide
ugcagugugaugaaucaau

SEQ ID NO: 423238 - RNA, 19 nt, Artificial Sequence
  Description of Artificial Sequence: Synthetic oligonucleotide
aauaacugcaaagggcccu

SEQ ID NO: 423239 - RNA, 19 nt, Artificial Sequence
  Description of Artificial Sequence: Synthetic oligonucleotide
aaccucacggagcuaaaga

SEQ ID NO: 423240 - RNA, 19 nt, Artificial Sequence
  Description of Artificial Sequence: Synthetic oligonucleotide
cacauucuaccacacgugg

SEQ ID NO: 423241 - RNA, 19 nt, Artificial Sequence
  Description of Artificial Sequence: Synthetic oligonucleotide
guaccaaguauccagcuca

SEQ ID NO: 423242 - RNA, 19 nt, Artificial Sequence
  Description of Artificial Sequence: Synthetic oligonucleotide
uagauauagaagagcacau

SEQ ID NO: 423243 - RNA, 19 nt, Artificial Sequence
  Description of Artificial Sequence: Synthetic oligonucleotide
uacuugccaaucacaagag

SEQ ID NO: 423244 - RNA, 19 nt, Artificial Sequence
  Description of Artificial Sequence: Synthetic oligonucleotide
acuuuaagugcccuuggga

SEQ ID NO: 423245 - RNA, 19 nt, Artificial Sequence
  Description of Artificial Sequence: Synthetic oligonucleotide
gcaaccaugagaugaaacc

SEQ ID NO: 423246 - RNA, 19 nt, Artificial Sequence
  Description of Artificial Sequence: Synthetic oligonucleotide
aggggaagcaaaccgguag

SEQ ID NO: 423247 - RNA, 19 nt, Artificial Sequence
  Description of Artificial Sequence: Synthetic oligonucleotide
uauacucacaagugcugcc

SEQ ID NO: 423248 - RNA, 19 nt, Artificial Sequence
  Description of Artificial Sequence: Synthetic oligonucleotide
acaggauacauuguaguug

SEQ ID NO: 423249 - RNA, 19 nt, Artificial Sequence
  Description of Artificial Sequence: Synthetic oligonucleotide
aacccaggaugaauggacc

SEQ ID NO: 423250 - RNA, 19 nt, Artificial Sequence
  Description of Artificial Sequence: Synthetic oligonucleotide
acuugagccuaauacagau

SEQ ID NO: 423251 - RNA, 19 nt, Artificial Sequence
  Description of Artificial Sequence: Synthetic oligonucleotide
gagucaugggcugagaaac

SEQ ID NO: 423252 - RNA, 19 nt, Artificial Sequence
  Description of Artificial Sequence: Synthetic oligonucleotide
gugaauauuaguaguguac

SEQ ID NO: 423253 - RNA, 19 nt, Artificial Sequence
  Description of Artificial Sequence: Synthetic oligonucleotide
agugcaacuuauguggaag

SEQ ID NO: 423254 - RNA, 19 nt, Artificial Sequence
  Description of Artificial Sequence: Synthetic oligonucleotide
uauaccagacuggcaaagg

SEQ ID NO: 423255 - RNA, 19 nt, Artificial Sequence
  Description of Artificial Sequence: Synthetic oligonucleotide
aaauaucugcagugugaug

SEQ ID NO: 423256 - RNA, 19 nt, Artificial Sequence
  Description of Artificial Sequence: Synthetic oligonucleotide
ugagccuaauacagauccg

SEQ ID NO: 423257 - RNA, 19 nt, Artificial Sequence
  Description of Artificial Sequence: Synthetic oligonucleotide
auguuuggaggucugguga

SEQ ID NO: 423258 - RNA, 19 nt, Artificial Sequence
  Description of Artificial Sequence: Synthetic oligonucleotide
cuuauguggaaguauagcu

SEQ ID NO: 423259 - RNA, 19 nt, Artificial Sequence
  Description of Artificial Sequence: Synthetic oligonucleotide
uggcuauccauucaucuau

SEQ ID NO: 423260 - RNA, 19 nt, Artificial Sequence
  Description of Artificial Sequence: Synthetic oligonucleotide
ugugucacucucugaacug

SEQ ID NO: 423261 - RNA, 19 nt, Artificial Sequence
  Description of Artificial Sequence: Synthetic oligonucleotide
aguuggaccuuuuggccuc

SEQ ID NO: 423262 - RNA, 19 nt, Artificial Sequence
  Description of Artificial Sequence: Synthetic oligonucleotide
cuguuauuuggccuugaag

SEQ ID NO: 423263 - RNA, 19 nt, Artificial Sequence
  Description of Artificial Sequence: Synthetic oligonucleotide
agguuauauaaugggacag

SEQ ID NO: 423264 - RNA, 19 nt, Artificial Sequence
  Description of Artificial Sequence: Synthetic oligonucleotide
caagcuacugccccagugc

SEQ ID NO: 423265 - RNA, 19 nt, Artificial Sequence
  Description of Artificial Sequence: Synthetic oligonucleotide
uucgguggcaaccauguuu

SEQ ID NO: 423266 - RNA, 19 nt, Artificial Sequence
  Description of Artificial Sequence: Synthetic oligonucleotide
aggauuguggugagggugc

SEQ ID NO: 423267 - RNA, 19 nt, Artificial Sequence
  Description of Artificial Sequence: Synthetic oligonucleotide
uaugaggaucuguacuuga

SEQ ID NO: 423268 - RNA, 19 nt, Artificial Sequence
  Description of Artificial Sequence: Synthetic oligonucleotide
aaauccucagaagcccggg

SEQ ID NO: 423269 - RNA, 19 nt, Artificial Sequence
  Description of Artificial Sequence: Synthetic oligonucleotide
aagaauguguaaggaauaa

SEQ ID NO: 423270 - RNA, 19 nt, Artificial Sequence
  Description of Artificial Sequence: Synthetic oligonucleotide
uguuccccacccuucauga

SEQ ID NO: 423271 - RNA, 19 nt, Artificial Sequence
  Description of Artificial Sequence: Synthetic oligonucleotide
cacaaaugaccagaguuag

SEQ ID NO: 423272 - RNA, 19 nt, Artificial Sequence
  Description of Artificial Sequence: Synthetic oligonucleotide
uuuggcaacugccaacaua

SEQ ID NO: 423273 - RNA, 19 nt, Artificial Sequence
  Description of Artificial Sequence: Synthetic oligonucleotide
aaaggcagguggaaauauc

SEQ ID NO: 423274 - RNA, 19 nt, Artificial Sequence
  Description of Artificial Sequence: Synthetic oligonucleotide
guauagcugcccuauacca

SEQ ID NO: 423275 - RNA, 19 nt, Artificial Sequence
  Description of Artificial Sequence: Synthetic oligonucleotide
acacauguagagacguccc

SEQ ID NO: 423276 - RNA, 19 nt, Artificial Sequence
  Description of Artificial Sequence: Synthetic oligonucleotide
uggacaaaaucagugcaac

SEQ ID NO: 423277 - RNA, 19 nt, Artificial Sequence
  Description of Artificial Sequence: Synthetic oligonucleotide
auauagaagagcacauucu

SEQ ID NO: 423278 - RNA, 19 nt, Artificial Sequence
  Description of Artificial Sequence: Synthetic oligonucleotide
gguccugucucuuuaaaac

SEQ ID NO: 423279 - RNA, 19 nt, Artificial Sequence
  Description of Artificial Sequence: Synthetic oligonucleotide
aggccuuuaccccuuaaga

SEQ ID NO: 423280 - RNA, 19 nt, Artificial Sequence
  Description of Artificial Sequence: Synthetic oligonucleotide
cuaggguacggauuccuac

SEQ ID NO: 423281 - RNA, 19 nt, Artificial Sequence
  Description of Artificial Sequence: Synthetic oligonucleotide
cugucucuuuaaaacuagg

SEQ ID NO: 423282 - RNA, 19 nt, Artificial Sequence
  Description of Artificial Sequence: Synthetic oligonucleotide
uggcaaccauguuuggagg

SEQ ID NO: 423283 - RNA, 19 nt, Artificial Sequence
  Description of Artificial Sequence: Synthetic oligonucleotide
gaaguugugcagguaccgg

SEQ ID NO: 423284 - RNA, 19 nt, Artificial Sequence
  Description of Artificial Sequence: Synthetic oligonucleotide
ucagaacuagugucugcag

SEQ ID NO: 423285 - RNA, 19 nt, Artificial Sequence
  Description of Artificial Sequence: Synthetic oligonucleotide
caggauacauuguaguuga

SEQ ID NO: 423286 - RNA, 19 nt, Artificial Sequence
  Description of Artificial Sequence: Synthetic oligonucleotide
guagacauacauauacuca

SEQ ID NO: 423287 - RNA, 19 nt, Artificial Sequence
  Description of Artificial Sequence: Synthetic oligonucleotide
gaaguucucggagggacag

SEQ ID NO: 423288 - RNA, 19 nt, Artificial Sequence
  Description of Artificial Sequence: Synthetic oligonucleotide
gcuucgguagcuuaugagc

SEQ ID NO: 423289 - RNA, 19 nt, Artificial Sequence
  Description of Artificial Sequence: Synthetic oligonucleotide
auaacacaacuccuugggu

SEQ ID NO: 423290 - RNA, 19 nt, Artificial Sequence
  Description of Artificial Sequence: Synthetic oligonucleotide
augguaccaaguauccagc

SEQ ID NO: 423291 - RNA, 19 nt, Artificial Sequence
  Description of Artificial Sequence: Synthetic oligonucleotide
aaacgcuucaggcggccca

SEQ ID NO: 423292 - RNA, 19 nt, Artificial Sequence
  Description of Artificial Sequence: Synthetic oligonucleotide
gguuauauaaugggacagg

SEQ ID NO: 423293 - RNA, 19 nt, Artificial Sequence
  Description of Artificial Sequence: Synthetic oligonucleotide
auuggaguuggaccuuuug

SEQ ID NO: 423294 - RNA, 19 nt, Artificial Sequence
  Description of Artificial Sequence: Synthetic oligonucleotide
uuuaaucauguugcuuccc

SEQ ID NO: 423295 - RNA, 19 nt, Artificial Sequence
  Description of Artificial Sequence: Synthetic oligonucleotide
uguggaaguauagcugccc

SEQ ID NO: 423296 - RNA, 19 nt, Artificial Sequence
  Description of Artificial Sequence: Synthetic oligonucleotide
uuaaaacuaggugcuugug

SEQ ID NO: 423297 - RNA, 19 nt, Artificial Sequence
  Description of Artificial Sequence: Synthetic oligonucleotide
ugagucaugggcugagaaa

SEQ ID NO: 423298 - RNA, 19 nt, Artificial Sequence
  Description of Artificial Sequence: Synthetic oligonucleotide
aucaauuaacauguggcau

SEQ ID NO: 423299 - RNA, 19 nt, Artificial Sequence
  Description of Artificial Sequence: Synthetic oligonucleotide
gcuaaagaacaugaggaag

SEQ ID NO: 423300 - RNA, 19 nt, Artificial Sequence
  Description of Artificial Sequence: Synthetic oligonucleotide
agcuucgguagcuuaugag

SEQ ID NO: 423301 - RNA, 19 nt, Artificial Sequence
  Description of Artificial Sequence: Synthetic oligonucleotide
uaggguacggauuccuacu

SEQ ID NO: 423302 - RNA, 19 nt, Artificial Sequence
  Description of Artificial Sequence: Synthetic oligonucleotide
ggcucgcuggcucagaagg

SEQ ID NO: 423303 - RNA, 19 nt, Artificial Sequence
  Description of Artificial Sequence: Synthetic oligonucleotide
agcaaccaugagaugaaac

SEQ ID NO: 423304 - RNA, 19 nt, Artificial Sequence
  Description of Artificial Sequence: Synthetic oligonucleotide
ccacccuucaugaagaaug

SEQ ID NO: 423305 - RNA, 19 nt, Artificial Sequence
  Description of Artificial Sequence: Synthetic oligonucleotide
ggagggguccauuuuaagc

SEQ ID NO: 423306 - RNA, 19 nt, Artificial Sequence
  Description of Artificial Sequence: Synthetic oligonucleotide
uucgguagcuuaugagccc

SEQ ID NO: 423307 - RNA, 19 nt, Artificial Sequence
  Description of Artificial Sequence: Synthetic oligonucleotide
uguuuggaggucuggugac

SEQ ID NO: 423308 - RNA, 19 nt, Artificial Sequence
  Description of Artificial Sequence: Synthetic oligonucleotide
gcuuaugagcccaaggucc

SEQ ID NO: 423309 - RNA, 19 nt, Artificial Sequence
  Description of Artificial Sequence: Synthetic oligonucleotide
cagaguuaggauuguggug

SEQ ID NO: 423310 - RNA, 19 nt, Artificial Sequence
  Description of Artificial Sequence: Synthetic oligonucleotide
cacuuuaagugcccuuggg

SEQ ID NO: 423311 - RNA, 19 nt, Artificial Sequence
  Description of Artificial Sequence: Synthetic oligonucleotide
agguggaaauaucugcagu

SEQ ID NO: 423312 - RNA, 19 nt, Artificial Sequence
  Description of Artificial Sequence: Synthetic oligonucleotide
uaagcagcuuggauccaug

SEQ ID NO: 423313 - RNA, 19 nt, Artificial Sequence
  Description of Artificial Sequence: Synthetic oligonucleotide
ugcccuauaccagacuggc

SEQ ID NO: 423314 - RNA, 19 nt, Artificial Sequence
  Description of Artificial Sequence: Synthetic oligonucleotide
auauacugaggcauaguga

SEQ ID NO: 423315 - RNA, 19 nt, Artificial Sequence
  Description of Artificial Sequence: Synthetic oligonucleotide
ucucauauacugaggcaua

SEQ ID NO: 423316 - RNA, 19 nt, Artificial Sequence
  Description of Artificial Sequence: Synthetic oligonucleotide
guaguguacagagaugaca

SEQ ID NO: 423317 - RNA, 19 nt, Artificial Sequence
  Description of Artificial Sequence: Synthetic oligonucleotide
aaaguucaggacacaacaa

SEQ ID NO: 423318 - RNA, 19 nt, Artificial Sequence
  Description of Artificial Sequence: Synthetic oligonucleotide
cagguuauauaaugggaca

SEQ ID NO: 423319 - RNA, 19 nt, Artificial Sequence
  Description of Artificial Sequence: Synthetic oligonucleotide
gagcacauucuaccacacg

SEQ ID NO: 423320 - RNA, 19 nt, Artificial Sequence
  Description of Artificial Sequence: Synthetic oligonucleotide
gaauaacugcaaagggccc

SEQ ID NO: 423321 - RNA, 19 nt, Artificial Sequence
  Description of Artificial Sequence: Synthetic oligonucleotide
ucaugggcugagaaacaga

SEQ ID NO: 423322 - RNA, 19 nt, Artificial Sequence
  Description of Artificial Sequence: Synthetic oligonucleotide
uuggcuauccauucaucua

SEQ ID NO: 423323 - RNA, 19 nt, Artificial Sequence
  Description of Artificial Sequence: Synthetic oligonucleotide
ggaguuggaccuuuuggcc

SEQ ID NO: 423324 - RNA, 19 nt, Artificial Sequence
  Description of Artificial Sequence: Synthetic oligonucleotide
uacucacaagugcugccug

SEQ ID NO: 423325 - RNA, 19 nt, Artificial Sequence
  Description of Artificial Sequence: Synthetic oligonucleotide
gagaccaaguugggaaggg

SEQ ID NO: 423326 - RNA, 19 nt, Artificial Sequence
  Description of Artificial Sequence: Synthetic oligonucleotide
cauuguaguugagaaauga

SEQ ID NO: 423327 - RNA, 19 nt, Artificial Sequence
  Description of Artificial Sequence: Synthetic oligonucleotide
aaacuggaagggagcugcc

SEQ ID NO: 423328 - RNA, 19 nt, Artificial Sequence
  Description of Artificial Sequence: Synthetic oligonucleotide
aguaguguacagagaugac

SEQ ID NO: 423329 - RNA, 19 nt, Artificial Sequence
  Description of Artificial Sequence: Synthetic oligonucleotide
agcagguuauauaauggga

SEQ ID NO: 423330 - RNA, 19 nt, Artificial Sequence
  Description of Artificial Sequence: Synthetic oligonucleotide
gaagggugacaugucagac

SEQ ID NO: 423331 - RNA, 19 nt, Artificial Sequence
  Description of Artificial Sequence: Synthetic oligonucleotide
gacagaucccuaggguacg

SEQ ID NO: 423332 - RNA, 19 nt, Artificial Sequence
  Description of Artificial Sequence: Synthetic oligonucleotide
cuauaccagacuggcaaag

SEQ ID NO: 423333 - RNA, 19 nt, Artificial Sequence
  Description of Artificial Sequence: Synthetic oligonucleotide
gauccguccaggcaaccuc

SEQ ID NO: 423334 - RNA, 19 nt, Artificial Sequence
  Description of Artificial Sequence: Synthetic oligonucleotide
gaggcacuacugaaagggg

SEQ ID NO: 423335 - RNA, 19 nt, Artificial Sequence
  Description of Artificial Sequence: Synthetic oligonucleotide
cacgugaagacagcagugc

SEQ ID NO: 423336 - RNA, 19 nt, Artificial Sequence
  Description of Artificial Sequence: Synthetic oligonucleotide
agcucauagcggccaaaag

SEQ ID NO: 423337 - RNA, 19 nt, Artificial Sequence
  Description of Artificial Sequence: Synthetic oligonucleotide
cugacuaaaggcaagucau

SEQ ID NO: 423338 - RNA, 19 nt, Artificial Sequence
  Description of Artificial Sequence: Synthetic oligonucleotide
ugacaagagaaaggcacaa

SEQ ID NO: 423339 - RNA, 19 nt, Artificial Sequence
  Description of Artificial Sequence: Synthetic oligonucleotide
gcauagugaggauacagga

SEQ ID NO: 423340 - RNA, 19 nt, Artificial Sequence
  Description of Artificial Sequence: Synthetic oligonucleotide
cugcccuauaccagacugg

SEQ ID NO: 423341 - RNA, 19 nt, Artificial Sequence
  Description of Artificial Sequence: Synthetic oligonucleotide
gcagguuauauaaugggac

SEQ ID NO: 423342 - RNA, 19 nt, Artificial Sequence
  Description of Artificial Sequence: Synthetic oligonucleotide
accaggugcugugaucccc

SEQ ID NO: 423343 - RNA, 19 nt, Artificial Sequence
  Description of Artificial Sequence: Synthetic oligonucleotide
caacuuauguggaaguaua

SEQ ID NO: 423344 - RNA, 19 nt, Artificial Sequence
  Description of Artificial Sequence: Synthetic oligonucleotide
uucgcggcauugccggcgg

SEQ ID NO: 423345 - RNA, 19 nt, Artificial Sequence
  Description of Artificial Sequence: Synthetic oligonucleotide
ggaaaauacuccuugcccu

SEQ ID NO: 423346 - RNA, 19 nt, Artificial Sequence
  Description of Artificial Sequence: Synthetic oligonucleotide
ugugauccccugggaaacg

SEQ ID NO: 423347 - RNA, 19 nt, Artificial Sequence
  Description of Artificial Sequence: Synthetic oligonucleotide
ggggaagcaaaccgguagg

SEQ ID NO: 423348 - RNA, 19 nt, Artificial Sequence
  Description of Artificial Sequence: Synthetic oligonucleotide
agagcacauucuaccacac

SEQ ID NO: 423349 - RNA, 19 nt, Artificial Sequence
  Description of Artificial Sequence: Synthetic oligonucleotide
agauuguuuggcucuucau

SEQ ID NO: 423350 - RNA, 19 nt, Artificial Sequence
  Description of Artificial Sequence: Synthetic oligonucleotide
ucccagucgugcauauucu

SEQ ID NO: 423351 - RNA, 19 nt, Artificial Sequence
  Description of Artificial Sequence: Synthetic oligonucleotide
ucccucuguuauuuggccu

SEQ ID NO: 423352 - RNA, 19 nt, Artificial Sequence
  Description of Artificial Sequence: Synthetic oligonucleotide
uagcuucgguagcuuauga

SEQ ID NO: 423353 - RNA, 19 nt, Artificial Sequence
  Description of Artificial Sequence: Synthetic oligonucleotide
caaaccgguaggguguggc

SEQ ID NO: 423354 - RNA, 19 nt, Artificial Sequence
  Description of Artificial Sequence: Synthetic oligonucleotide
gagcccaagguccgacagg

SEQ ID NO: 423355 - RNA, 19 nt, Artificial Sequence
  Description of Artificial Sequence: Synthetic oligonucleotide
gcugcccuauaccagacug

SEQ ID NO: 423356 - RNA, 19 nt, Artificial Sequence
  Description of Artificial Sequence: Synthetic oligonucleotide
cugaacuacugccuuucuc

SEQ ID NO: 423357 - RNA, 19 nt, Artificial Sequence
  Description of Artificial Sequence: Synthetic oligonucleotide
ucggagggacagaagcacu

SEQ ID NO: 423358 - RNA, 19 nt, Artificial Sequence
  Description of Artificial Sequence: Synthetic oligonucleotide
ucgguagcuuaugagccca

SEQ ID NO: 423359 - RNA, 19 nt, Artificial Sequence
  Description of Artificial Sequence: Synthetic oligonucleotide
agccuaauacagauccguc

SEQ ID NO: 423360 - RNA, 19 nt, Artificial Sequence
  Description of Artificial Sequence: Synthetic oligonucleotide
agaucccuaggguacggau

SEQ ID NO: 423361 - RNA, 19 nt, Artificial Sequence
  Description of Artificial Sequence: Synthetic oligonucleotide
gguuccaucugaacuacug

SEQ ID NO: 423362 - RNA, 19 nt, Artificial Sequence
  Description of Artificial Sequence: Synthetic oligonucleotide
uuaagcagcuuggauccau

SEQ ID NO: 423363 - RNA, 19 nt, Artificial Sequence
  Description of Artificial Sequence: Synthetic oligonucleotide
caguaccauaacacaacuc

SEQ ID NO: 423364 - RNA, 19 nt, Artificial Sequence
  Description of Artificial Sequence: Synthetic oligonucleotide
uccaccggauucacagcug

SEQ ID NO: 423365 - RNA, 19 nt, Artificial Sequence
  Description of Artificial Sequence: Synthetic oligonucleotide
uaccggagcagcacuuccu

SEQ ID NO: 423366 - RNA, 19 nt, Artificial Sequence
  Description of Artificial Sequence: Synthetic oligonucleotide
cuucgguuccaucugaacu

SEQ ID NO: 423367 - RNA, 19 nt, Artificial Sequence
  Description of Artificial Sequence: Synthetic oligonucleotide
ggacagggagaaauuagag

SEQ ID NO: 423368 - RNA, 19 nt, Artificial Sequence
  Description of Artificial Sequence: Synthetic oligonucleotide
caggaugaauggacccucc

SEQ ID NO: 423369 - RNA, 19 nt, Artificial Sequence
  Description of Artificial Sequence: Synthetic oligonucleotide
aggaugaauggacccuccu

SEQ ID NO: 423370 - RNA, 19 nt, Artificial Sequence
  Description of Artificial Sequence: Synthetic oligonucleotide
auacugaggcauagugagg

SEQ ID NO: 423371 - RNA, 19 nt, Artificial Sequence
  Description of Artificial Sequence: Synthetic oligonucleotide
aggugcugugauccccugg

SEQ ID NO: 423372 - RNA, 19 nt, Artificial Sequence
  Description of Artificial Sequence: Synthetic oligonucleotide
uggaaguauagcugcccua

SEQ ID NO: 423373 - RNA, 19 nt, Artificial Sequence
  Description of Artificial Sequence: Synthetic oligonucleotide
ugcaacuuauguggaagua

SEQ ID NO: 423374 - RNA, 19 nt, Artificial Sequence
  Description of Artificial Sequence: Synthetic oligonucleotide
cacugaggccgaaacaaca

SEQ ID NO: 423375 - RNA, 19 nt, Artificial Sequence
  Description of Artificial Sequence: Synthetic oligonucleotide
accauguuuggaggucugg

SEQ ID NO: 423376 - RNA, 19 nt, Artificial Sequence
  Description of Artificial Sequence: Synthetic oligonucleotide
aguuaggauuguggugagg

SEQ ID NO: 423377 - RNA, 19 nt, Artificial Sequence
  Description of Artificial Sequence: Synthetic oligonucleotide
guaccggagcagcacuucc

SEQ ID NO: 423378 - RNA, 19 nt, Artificial Sequence
  Description of Artificial Sequence: Synthetic oligonucleotide
ucgcuggcucagaaggaca

SEQ ID NO: 423379 - RNA, 19 nt, Artificial Sequence
  Description of Artificial Sequence: Synthetic oligonucleotide
gaggccgaaacaacaguuc

SEQ ID NO: 423380 - RNA, 19 nt, Artificial Sequence
  Description of Artificial Sequence: Synthetic oligonucleotide
cagacagaucccuagggua

SEQ ID NO: 423381 - RNA, 19 nt, Artificial Sequence
  Description of Artificial Sequence: Synthetic oligonucleotide
agcggccaaaagcaauugu

SEQ ID NO: 423382 - RNA, 19 nt, Artificial Sequence
  Description of Artificial Sequence: Synthetic oligonucleotide
ugguuuuauuggaguugga

SEQ ID NO: 423383 - RNA, 19 nt, Artificial Sequence
  Description of Artificial Sequence: Synthetic oligonucleotide
uaugagcccaagguccgac

SEQ ID NO: 423384 - RNA, 19 nt, Artificial Sequence
  Description of Artificial Sequence: Synthetic oligonucleotide
uuccuacugcuugggcucg

SEQ ID NO: 423385 - RNA, 19 nt, Artificial Sequence
  Description of Artificial Sequence: Synthetic oligonucleotide
uaccacacguggggaaggg

SEQ ID NO: 423386 - RNA, 19 nt, Artificial Sequence
  Description of Artificial Sequence: Synthetic oligonucleotide
ggauacauuguaguugaga

SEQ ID NO: 423387 - RNA, 19 nt, Artificial Sequence
  Description of Artificial Sequence: Synthetic oligonucleotide
uaccaaguauccagcucau

SEQ ID NO: 423388 - RNA, 19 nt, Artificial Sequence
  Description of Artificial Sequence: Synthetic oligonucleotide
acauuguaguugagaaaug

SEQ ID NO: 423389 - RNA, 19 nt, Artificial Sequence
  Description of Artificial Sequence: Synthetic oligonucleotide
gccuuuaccccuuaagaaa

SEQ ID NO: 423390 - RNA, 19 nt, Artificial Sequence
  Description of Artificial Sequence: Synthetic oligonucleotide
gagacgucccagucgugca

SEQ ID NO: 423391 - RNA, 19 nt, Artificial Sequence
  Description of Artificial Sequence: Synthetic oligonucleotide
ugcucgagaucuguagaaa

SEQ ID NO: 423392 - RNA, 19 nt, Artificial Sequence
  Description of Artificial Sequence: Synthetic oligonucleotide
caauuaacauguggcauaa

SEQ ID NO: 423393 - RNA, 19 nt, Artificial Sequence
  Description of Artificial Sequence: Synthetic oligonucleotide
agcuacugccccagugccc

SEQ ID NO: 423394 - RNA, 19 nt, Artificial Sequence
  Description of Artificial Sequence: Synthetic oligonucleotide
gguaccaaguauccagcuc

SEQ ID NO: 423395 - RNA, 19 nt, Artificial Sequence
  Description of Artificial Sequence: Synthetic oligonucleotide
caacaaaccucacggagcu

SEQ ID NO: 423396 - RNA, 19 nt, Artificial Sequence
  Description of Artificial Sequence: Synthetic oligonucleotide
gagccuaauacagauccgu

SEQ ID NO: 423397 - RNA, 19 nt, Artificial Sequence
  Description of Artificial Sequence: Synthetic oligonucleotide
auagcggccaaaagcaauu

SEQ ID NO: 423398 - RNA, 19 nt, Artificial Sequence
  Description of Artificial Sequence: Synthetic oligonucleotide
uuuaagcagcuuggaucca

SEQ ID NO: 423399 - RNA, 19 nt, Artificial Sequence
  Description of Artificial Sequence: Synthetic oligonucleotide
ccugacuaaaggcaaguca

SEQ ID NO: 423400 - RNA, 19 nt, Artificial Sequence
  Description of Artificial Sequence: Synthetic oligonucleotide
cucgcuggcucagaaggac

SEQ ID NO: 423401 - RNA, 19 nt, Artificial Sequence
  Description of Artificial Sequence: Synthetic oligonucleotide
guccugucucuuuaaaacu

SEQ ID NO: 423402 - RNA, 19 nt, Artificial Sequence
  Description of Artificial Sequence: Synthetic oligonucleotide
auauccaaucaaggugaca

SEQ ID NO: 423403 - RNA, 19 nt, Artificial Sequence
  Description of Artificial Sequence: Synthetic oligonucleotide
uggaccaggugcugugauc

SEQ ID NO: 423404 - RNA, 19 nt, Artificial Sequence
  Description of Artificial Sequence: Synthetic oligonucleotide
gggagaaugguaccaagua

SEQ ID NO: 423405 - RNA, 19 nt, Artificial Sequence
  Description of Artificial Sequence: Synthetic oligonucleotide
acguggggaaggguuccgc

SEQ ID NO: 423406 - RNA, 19 nt, Artificial Sequence
  Description of Artificial Sequence: Synthetic oligonucleotide
aauuaacauguggcauaaa

SEQ ID NO: 423407 - RNA, 19 nt, Artificial Sequence
  Description of Artificial Sequence: Synthetic oligonucleotide
aggguuccgcaucuguaaa

SEQ ID NO: 423408 - RNA, 19 nt, Artificial Sequence
  Description of Artificial Sequence: Synthetic oligonucleotide
ccucacggagcuaaagaac

SEQ ID NO: 423409 - RNA, 19 nt, Artificial Sequence
  Description of Artificial Sequence: Synthetic oligonucleotide
gugcucgagaucuguagaa

SEQ ID NO: 423410 - RNA, 19 nt, Artificial Sequence
  Description of Artificial Sequence: Synthetic oligonucleotide
gucagugcuaugaggaucu

SEQ ID NO: 423411 - RNA, 19 nt, Artificial Sequence
  Description of Artificial Sequence: Synthetic oligonucleotide
ucgggucagccugagccug

SEQ ID NO: 423412 - RNA, 19 nt, Artificial Sequence
  Description of Artificial Sequence: Synthetic oligonucleotide
uagcggccaaaagcaauug

SEQ ID NO: 423413 - RNA, 19 nt, Artificial Sequence
  Description of Artificial Sequence: Synthetic oligonucleotide
uggacccuccuaguagaca

SEQ ID NO: 423414 - RNA, 19 nt, Artificial Sequence
  Description of Artificial Sequence: Synthetic oligonucleotide
agcucgggucagccugagc

SEQ ID NO: 423415 - RNA, 19 nt, Artificial Sequence
  Description of Artificial Sequence: Synthetic oligonucleotide
uccaacccacagugaauau

SEQ ID NO: 423416 - RNA, 19 nt, Artificial Sequence
  Description of Artificial Sequence: Synthetic oligonucleotide
cacauguagagacguccca

SEQ ID NO: 423417 - RNA, 19 nt, Artificial Sequence
  Description of Artificial Sequence: Synthetic oligonucleotide
accggauucacagcuguuu

SEQ ID NO: 423418 - RNA, 19 nt, Artificial Sequence
  Description of Artificial Sequence: Synthetic oligonucleotide
aucggaaucuucgguucca

SEQ ID NO: 423419 - RNA, 19 nt, Artificial Sequence
  Description of Artificial Sequence: Synthetic oligonucleotide
uuaugagcccaagguccga

SEQ ID NO: 423420 - RNA, 19 nt, Artificial Sequence
  Description of Artificial Sequence: Synthetic oligonucleotide
cccuauaccagacuggcaa

SEQ ID NO: 423421 - RNA, 19 nt, Artificial Sequence
  Description of Artificial Sequence: Synthetic oligonucleotide
auggacccuccuaguagac

SEQ ID NO: 423422 - RNA, 19 nt, Artificial Sequence
  Description of Artificial Sequence: Synthetic oligonucleotide
ccuuuaccccuuaagaaaa

SEQ ID NO: 423423 - RNA, 19 nt, Artificial Sequence
  Description of Artificial Sequence: Synthetic oligonucleotide
agauccguccaggcaaccu

SEQ ID NO: 423424 - RNA, 19 nt, Artificial Sequence
  Description of Artificial Sequence: Synthetic oligonucleotide
ugaaaucaaugagcauuuu

SEQ ID NO: 423425 - RNA, 19 nt, Artificial Sequence
  Description of Artificial Sequence: Synthetic oligonucleotide
agaccaaguugggaagggu

SEQ ID NO: 423426 - RNA, 19 nt, Artificial Sequence
  Description of Artificial Sequence: Synthetic oligonucleotide
guggaaguauagcugcccu

SEQ ID NO: 423427 - RNA, 19 nt, Artificial Sequence
  Description of Artificial Sequence: Synthetic oligonucleotide
uagagacgucccagucgug

SEQ ID NO: 423428 - RNA, 19 nt, Artificial Sequence
  Description of Artificial Sequence: Synthetic oligonucleotide
acacaacuccuugggucag

SEQ ID NO: 423429 - RNA, 19 nt, Artificial Sequence
  Description of Artificial Sequence: Synthetic oligonucleotide
ugcuguaggggaggcacua

SEQ ID NO: 423430 - RNA, 19 nt, Artificial Sequence
  Description of Artificial Sequence: Synthetic oligonucleotide
guccaccggauucacagcu

SEQ ID NO: 423431 - RNA, 19 nt, Artificial Sequence
  Description of Artificial Sequence: Synthetic oligonucleotide
gcucgagaucuguagaaaa

SEQ ID NO: 423432 - RNA, 19 nt, Artificial Sequence
  Description of Artificial Sequence: Synthetic oligonucleotide
gcaacagaaaugacagaca

SEQ ID NO: 423433 - RNA, 19 nt, Artificial Sequence
  Description of Artificial Sequence: Synthetic oligonucleotide
gguacggauuccuacugcu

SEQ ID NO: 423434 - RNA, 19 nt, Artificial Sequence
  Description of Artificial Sequence: Synthetic oligonucleotide
gguagcuuaugagcccaag

SEQ ID NO: 423435 - RNA, 19 nt, Artificial Sequence
  Description of Artificial Sequence: Synthetic oligonucleotide
uccguccaggcaaccucac

SEQ ID NO: 423436 - RNA, 19 nt, Artificial Sequence
  Description of Artificial Sequence: Synthetic oligonucleotide
cuccaacccacagugaaua

SEQ ID NO: 423437 - RNA, 19 nt, Artificial Sequence
  Description of Artificial Sequence: Synthetic oligonucleotide
gaacuagugucugcagugu

SEQ ID NO: 423438 - RNA, 19 nt, Artificial Sequence
  Description of Artificial Sequence: Synthetic oligonucleotide
ggaucuguacuugagccua

SEQ ID NO: 423439 - RNA, 19 nt, Artificial Sequence
  Description of Artificial Sequence: Synthetic oligonucleotide
gggagggguccauuuuaag

SEQ ID NO: 423440 - RNA, 19 nt, Artificial Sequence
  Description of Artificial Sequence: Synthetic oligonucleotide
gugaagcggcauuuggaua

SEQ ID NO: 423441 - RNA, 19 nt, Artificial Sequence
  Description of Artificial Sequence: Synthetic oligonucleotide
gugcaacuuauguggaagu

SEQ ID NO: 423442 - RNA, 19 nt, Artificial Sequence
  Description of Artificial Sequence: Synthetic oligonucleotide
agcggcauuuggauaaauu

SEQ ID NO: 423443 - RNA, 19 nt, Artificial Sequence
  Description of Artificial Sequence: Synthetic oligonucleotide
gcuaugaggaucuguacuu

SEQ ID NO: 423444 - RNA, 19 nt, Artificial Sequence
  Description of Artificial Sequence: Synthetic oligonucleotide
agccugagccugacuaaag

SEQ ID NO: 423445 - RNA, 19 nt, Artificial Sequence
  Description of Artificial Sequence: Synthetic oligonucleotide
guuccgacucgggcggcgg

SEQ ID NO: 423446 - RNA, 19 nt, Artificial Sequence
  Description of Artificial Sequence: Synthetic oligonucleotide
gcggcauuuggauaaauuu

SEQ ID NO: 423447 - RNA, 19 nt, Artificial Sequence
  Description of Artificial Sequence: Synthetic oligonucleotide
agggcccuucgguggcaac

SEQ ID NO: 423448 - RNA, 19 nt, Artificial Sequence
  Description of Artificial Sequence: Synthetic oligonucleotide
caaguugggaagggugaca

SEQ ID NO: 423449 - RNA, 19 nt, Artificial Sequence
  Description of Artificial Sequence: Synthetic oligonucleotide
aggauacauuguaguugag

SEQ ID NO: 423450 - RNA, 19 nt, Artificial Sequence
  Description of Artificial Sequence: Synthetic oligonucleotide
gcuacugccccagugccca

SEQ ID NO: 423451 - RNA, 19 nt, Artificial Sequence
  Description of Artificial Sequence: Synthetic oligonucleotide
aaccucacugaggccgaaa

SEQ ID NO: 423452 - RNA, 19 nt, Artificial Sequence
  Description of Artificial Sequence: Synthetic oligonucleotide
ggcacuacugaaaggggaa

SEQ ID NO: 423453 - RNA, 19 nt, Artificial Sequence
  Description of Artificial Sequence: Synthetic oligonucleotide
cuugggcucgcuggcucag

SEQ ID NO: 423454 - RNA, 19 nt, Artificial Sequence
  Description of Artificial Sequence: Synthetic oligonucleotide
gagaaacagaagccauuuu

SEQ ID NO: 423455 - RNA, 19 nt, Artificial Sequence
  Description of Artificial Sequence: Synthetic oligonucleotide
aagcggcauuuggauaaau

SEQ ID NO: 423456 - RNA, 19 nt, Artificial Sequence
  Description of Artificial Sequence: Synthetic oligonucleotide
ucccuaggguacggauucc

SEQ ID NO: 423457 - RNA, 19 nt, Artificial Sequence
  Description of Artificial Sequence: Synthetic oligonucleotide
cacccuucaugaagaaugu

SEQ ID NO: 423458 - RNA, 19 nt, Artificial Sequence
  Description of Artificial Sequence: Synthetic oligonucleotide
gaucuguacuugagccuaa

SEQ ID NO: 423459 - RNA, 19 nt, Artificial Sequence
  Description of Artificial Sequence: Synthetic oligonucleotide
gcuauccauucaucuauua

SEQ ID NO: 423460 - RNA, 19 nt, Artificial Sequence
  Description of Artificial Sequence: Synthetic oligonucleotide
acgucccagucgugcauau

SEQ ID NO: 423461 - RNA, 19 nt, Artificial Sequence
  Description of Artificial Sequence: Synthetic oligonucleotide
gaucccuaggguacggauu

SEQ ID NO: 423462 - RNA, 19 nt, Artificial Sequence
  Description of Artificial Sequence: Synthetic oligonucleotide
gaagcggcauuuggauaaa

SEQ ID NO: 423463 - RNA, 19 nt, Artificial Sequence
  Description of Artificial Sequence: Synthetic oligonucleotide
cuguaggggaggcacuacu

SEQ ID NO: 423464 - RNA, 19 nt, Artificial Sequence
  Description of Artificial Sequence: Synthetic oligonucleotide
ggcaaccauguuuggaggu

SEQ ID NO: 423465 - RNA, 19 nt, Artificial Sequence
  Description of Artificial Sequence: Synthetic oligonucleotide
uccuacugcuugggcucgc

SEQ ID NO: 423466 - RNA, 19 nt, Artificial Sequence
  Description of Artificial Sequence: Synthetic oligonucleotide
gcagguaccggagcagcac

SEQ ID NO: 423467 - RNA, 19 nt, Artificial Sequence
  Description of Artificial Sequence: Synthetic oligonucleotide
cucagaaggacaggucacu

SEQ ID NO: 423468 - RNA, 19 nt, Artificial Sequence
  Description of Artificial Sequence: Synthetic oligonucleotide
cagauccguccaggcaacc

SEQ ID NO: 423469 - RNA, 19 nt, Artificial Sequence
  Description of Artificial Sequence: Synthetic oligonucleotide
ccuaguagacauacauaua

SEQ ID NO: 423470 - RNA, 19 nt, Artificial Sequence
  Description of Artificial Sequence: Synthetic oligonucleotide
ggucggagccaggacaguc

SEQ ID NO: 423471 - RNA, 19 nt, Artificial Sequence
  Description of Artificial Sequence: Synthetic oligonucleotide
cagcucauagcggccaaaa

SEQ ID NO: 423472 - RNA, 19 nt, Artificial Sequence
  Description of Artificial Sequence: Synthetic oligonucleotide
gguuccgacucgggcggcg

SEQ ID NO: 423473 - RNA, 19 nt, Artificial Sequence
  Description of Artificial Sequence: Synthetic oligonucleotide
gacgucccagucgugcaua

SEQ ID NO: 423474 - RNA, 19 nt, Artificial Sequence
  Description of Artificial Sequence: Synthetic oligonucleotide
ggagagccaacuuucucuu

SEQ ID NO: 423475 - RNA, 19 nt, Artificial Sequence
  Description of Artificial Sequence: Synthetic oligonucleotide
cccuucgguggcaaccaug

SEQ ID NO: 423476 - RNA, 19 nt, Artificial Sequence
  Description of Artificial Sequence: Synthetic oligonucleotide
cugcagugugaugaaucaa

SEQ ID NO: 423477 - RNA, 19 nt, Artificial Sequence
  Description of Artificial Sequence: Synthetic oligonucleotide
ccuauaccagacuggcaaa

SEQ ID NO: 423478 - RNA, 19 nt, Artificial Sequence
  Description of Artificial Sequence: Synthetic oligonucleotide
uugggcucgcuggcucaga

SEQ ID NO: 423479 - RNA, 19 nt, Artificial Sequence
  Description of Artificial Sequence: Synthetic oligonucleotide
cucuguuauuuggccuuga

SEQ ID NO: 423480 - RNA, 19 nt, Artificial Sequence
  Description of Artificial Sequence: Synthetic oligonucleotide
cagguaccggagcagcacu

SEQ ID NO: 423481 - RNA, 19 nt, Artificial Sequence
  Description of Artificial Sequence: Synthetic oligonucleotide
cagccugagccugacuaaa

SEQ ID NO: 423482 - RNA, 19 nt, Artificial Sequence
  Description of Artificial Sequence: Synthetic oligonucleotide
ccgacgguuccgacucggg

SEQ ID NO: 423483 - RNA, 19 nt, Artificial Sequence
  Description of Artificial Sequence: Synthetic oligonucleotide
cuacugccccagugcccac

SEQ ID NO: 423484 - RNA, 19 nt, Artificial Sequence
  Description of Artificial Sequence: Synthetic oligonucleotide
ucgcggcauugccggcggc

SEQ ID NO: 423485 - RNA, 19 nt, Artificial Sequence
  Description of Artificial Sequence: Synthetic oligonucleotide
ccgaaacaacaguuccuca

SEQ ID NO: 423486 - RNA, 19 nt, Artificial Sequence
  Description of Artificial Sequence: Synthetic oligonucleotide
gccugacuaaaggcaaguc

SEQ ID NO: 423487 - RNA, 19 nt, Artificial Sequence
  Description of Artificial Sequence: Synthetic oligonucleotide
agguaccggagcagcacuu

SEQ ID NO: 423488 - RNA, 19 nt, Artificial Sequence
  Description of Artificial Sequence: Synthetic oligonucleotide
cagaucccuaggguacgga

SEQ ID NO: 423489 - RNA, 19 nt, Artificial Sequence
  Description of Artificial Sequence: Synthetic oligonucleotide
gugacaugucagacaucaa

SEQ ID NO: 423490 - RNA, 19 nt, Artificial Sequence
  Description of Artificial Sequence: Synthetic oligonucleotide
gcaaaccgguagggugugg

SEQ ID NO: 423491 - RNA, 19 nt, Artificial Sequence
  Description of Artificial Sequence: Synthetic oligonucleotide
gcuguaggggaggcacuac

SEQ ID NO: 423492 - RNA, 19 nt, Artificial Sequence
  Description of Artificial Sequence: Synthetic oligonucleotide
ggcauugccggcggcugca

SEQ ID NO: 423493 - RNA, 19 nt, Artificial Sequence
  Description of Artificial Sequence: Synthetic oligonucleotide
aggucggagccaggacagu

SEQ ID NO: 423494 - RNA, 19 nt, Artificial Sequence
  Description of Artificial Sequence: Synthetic oligonucleotide
cccgacgguuccgacucgg

SEQ ID NO: 423495 - RNA, 19 nt, Artificial Sequence
  Description of Artificial Sequence: Synthetic oligonucleotide
ggccgaaacaacaguuccu

SEQ ID NO: 423496 - RNA, 19 nt, Artificial Sequence
  Description of Artificial Sequence: Synthetic oligonucleotide
guacggauuccuacugcuu

SEQ ID NO: 423497 - RNA, 19 nt, Artificial Sequence
  Description of Artificial Sequence: Synthetic oligonucleotide
ccaagauagcagguuauau

SEQ ID NO: 423498 - RNA, 19 nt, Artificial Sequence
  Description of Artificial Sequence: Synthetic oligonucleotide
ccgcaucuguaaaaggccu

SEQ ID NO: 423499 - RNA, 19 nt, Artificial Sequence
  Description of Artificial Sequence: Synthetic oligonucleotide
gcggcccaagcucggguca

SEQ ID NO: 423500 - RNA, 19 nt, Artificial Sequence
  Description of Artificial Sequence: Synthetic oligonucleotide
ccuaggguacggauuccua

SEQ ID NO: 423501 - RNA, 19 nt, Artificial Sequence
  Description of Artificial Sequence: Synthetic oligonucleotide
ccacaagggaaaugaaguu

SEQ ID NO: 423502 - RNA, 19 nt, Artificial Sequence
  Description of Artificial Sequence: Synthetic oligonucleotide
gggucagugcuaugaggau

SEQ ID NO: 423503 - RNA, 19 nt, Artificial Sequence
  Description of Artificial Sequence: Synthetic oligonucleotide
gcauugccggcggcugcag

SEQ ID NO: 423504 - RNA, 19 nt, Artificial Sequence
  Description of Artificial Sequence: Synthetic oligonucleotide
gcccgacgguuccgacucg

SEQ ID NO: 423505 - RNA, 19 nt, Artificial Sequence
  Description of Artificial Sequence: Synthetic oligonucleotide
ccacacguggggaaggguu

SEQ ID NO: 423506 - RNA, 19 nt, Artificial Sequence
  Description of Artificial Sequence: Synthetic oligonucleotide
cccaagauagcagguuaua

SEQ ID NO: 423507 - RNA, 19 nt, Artificial Sequence
  Description of Artificial Sequence: Synthetic oligonucleotide
guuggaccuuuuggccucu

SEQ ID NO: 423508 - RNA, 19 nt, Artificial Sequence
  Description of Artificial Sequence: Synthetic oligonucleotide
ccaccggauucacagcugu

SEQ ID NO: 423509 - RNA, 19 nt, Artificial Sequence
  Description of Artificial Sequence: Synthetic oligonucleotide
ccaggugcugugauccccu

SEQ ID NO: 423510 - RNA, 19 nt, Artificial Sequence
  Description of Artificial Sequence: Synthetic oligonucleotide
cccaaaggauacuguacuu

SEQ ID NO: 423511 - RNA, 19 nt, Artificial Sequence
  Description of Artificial Sequence: Synthetic oligonucleotide
gggcgcucuggagagccaa

SEQ ID NO: 423512 - RNA, 19 nt, Artificial Sequence
  Description of Artificial Sequence: Synthetic oligonucleotide
cacaacuccuugggucagu

SEQ ID NO: 423513 - RNA, 19 nt, Artificial Sequence
  Description of Artificial Sequence: Synthetic oligonucleotide
ccccaagauagcagguuau

SEQ ID NO: 423514 - RNA, 19 nt, Artificial Sequence
  Description of Artificial Sequence: Synthetic oligonucleotide
caccggauucacagcuguu

SEQ ID NO: 423515 - RNA, 19 nt, Artificial Sequence
  Description of Artificial Sequence: Synthetic oligonucleotide
ggcuauccauucaucuauu

SEQ ID NO: 423516 - RNA, 19 nt, Artificial Sequence
  Description of Artificial Sequence: Synthetic oligonucleotide
caaccucacugaggccgaa

SEQ ID NO: 423517 - RNA, 19 nt, Artificial Sequence
  Description of Artificial Sequence: Synthetic oligonucleotide
cuucgguggcaaccauguu

SEQ ID NO: 423518 - RNA, 19 nt, Artificial Sequence
  Description of Artificial Sequence: Synthetic oligonucleotide
ccaacccacagugaauauu

SEQ ID NO: 423519 - RNA, 19 nt, Artificial Sequence
  Description of Artificial Sequence: Synthetic oligonucleotide
ggucagccugagccugacu

SEQ ID NO: 423520 - RNA, 19 nt, Artificial Sequence
  Description of Artificial Sequence: Synthetic oligonucleotide
ggccuucccaaaggauacu

SEQ ID NO: 423521 - RNA, 19 nt, Artificial Sequence
  Description of Artificial Sequence: Synthetic oligonucleotide
cccuaggguacggauuccu

SEQ ID NO: 423522 - RNA, 19 nt, Artificial Sequence
  Description of Artificial Sequence: Synthetic oligonucleotide
cggcccaagcucgggucag

SEQ ID NO: 423523 - RNA, 19 nt, Artificial Sequence
  Description of Artificial Sequence: Synthetic oligonucleotide
ggggcgcucuggagagcca

SEQ ID NO: 423524 - RNA, 19 nt, Artificial Sequence
  Description of Artificial Sequence: Synthetic oligonucleotide
cgguagcuuaugagcccaa

SEQ ID NO: 423525 - RNA, 19 nt, Artificial Sequence
  Description of Artificial Sequence: Synthetic oligonucleotide
ccguccaggcaaccucacu

SEQ ID NO: 423526 - RNA, 19 nt, Artificial Sequence
  Description of Artificial Sequence: Synthetic oligonucleotide
ccuacugcuugggcucgcu

SEQ ID NO: 423527 - RNA, 19 nt, Artificial Sequence
  Description of Artificial Sequence: Synthetic oligonucleotide
gcccuucgguggcaaccau

SEQ ID NO: 423528 - RNA, 19 nt, Artificial Sequence
  Description of Artificial Sequence: Synthetic oligonucleotide
cgguuccaucugaacuacu

SEQ ID NO: 423529 - RNA, 19 nt, Artificial Sequence
  Description of Artificial Sequence: Synthetic oligonucleotide
ccgguaggguguggccacu

SEQ ID NO: 423530 - RNA, 19 nt, Artificial Sequence
  Description of Artificial Sequence: Synthetic oligonucleotide
cggcugcagcccgacgguu

SEQ ID NO: 423531 - RNA, 19 nt, Artificial Sequence
  Description of Artificial Sequence: Synthetic oligonucleotide
uacaacuuaagccaggugg

SEQ ID NO: 423532 - RNA, 19 nt, Artificial Sequence
  Description of Artificial Sequence: Synthetic oligonucleotide
ugaaagaugcgauugauug

SEQ ID NO: 423533 - RNA, 19 nt, Artificial Sequence
  Description of Artificial Sequence: Synthetic oligonucleotide
aaagaugcgauugauuggg

SEQ ID NO: 423534 - RNA, 19 nt, Artificial Sequence
  Description of Artificial Sequence: Synthetic oligonucleotide
accaccaaaacucuccugc

SEQ ID NO: 423535 - RNA, 19 nt, Artificial Sequence
  Description of Artificial Sequence: Synthetic oligonucleotide
uuuguguugauguaggacu

SEQ ID NO: 423536 - RNA, 19 nt, Artificial Sequence
  Description of Artificial Sequence: Synthetic oligonucleotide
gaagauggcaaacacgugc

SEQ ID NO: 423537 - RNA, 19 nt, Artificial Sequence
  Description of Artificial Sequence: Synthetic oligonucleotide
uguaccccaagaaagaaca

SEQ ID NO: 423538 - RNA, 19 nt, Artificial Sequence
  Description of Artificial Sequence: Synthetic oligonucleotide
uauauacaacuuaagccag

SEQ ID NO: 423539 - RNA, 19 nt, Artificial Sequence
  Description of Artificial Sequence: Synthetic oligonucleotide
aaggcuagaguuccccuac

SEQ ID NO: 423540 - RNA, 19 nt, Artificial Sequence
  Description of Artificial Sequence: Synthetic oligonucleotide
gguugugugguuaauaugg

SEQ ID NO: 423541 - RNA, 19 nt, Artificial Sequence
  Description of Artificial Sequence: Synthetic oligonucleotide
aaugucaaucagaagaaga

SEQ ID NO: 423542 - RNA, 19 nt, Artificial Sequence
  Description of Artificial Sequence: Synthetic oligonucleotide
gaugcgauugauugggccc

SEQ ID NO: 423543 - RNA, 19 nt, Artificial Sequence
  Description of Artificial Sequence: Synthetic oligonucleotide
gaugaguauagguaggcca

SEQ ID NO: 423544 - RNA, 19 nt, Artificial Sequence
  Description of Artificial Sequence: Synthetic oligonucleotide
aggaacgaagccuuccagc

SEQ ID NO: 423545 - RNA, 19 nt, Artificial Sequence
  Description of Artificial Sequence: Synthetic oligonucleotide
uugauagcguagcugaucu

SEQ ID NO: 423546 - RNA, 19 nt, Artificial Sequence
  Description of Artificial Sequence: Synthetic oligonucleotide
agaugcgauugauugggcc

SEQ ID NO: 423547 - RNA, 19 nt, Artificial Sequence
  Description of Artificial Sequence: Synthetic oligonucleotide
guacaugcgcagcauaucg

SEQ ID NO: 423548 - RNA, 19 nt, Artificial Sequence
  Description of Artificial Sequence: Synthetic oligonucleotide
aauggcucucuucuuguug

SEQ ID NO: 423549 - RNA, 19 nt, Artificial Sequence
  Description of Artificial Sequence: Synthetic oligonucleotide
aucaaacugauguuguuga

SEQ ID NO: 423550 - RNA, 19 nt, Artificial Sequence
  Description of Artificial Sequence: Synthetic oligonucleotide
auaauggugggccggcugg

SEQ ID NO: 423551 - RNA, 19 nt, Artificial Sequence
  Description of Artificial Sequence: Synthetic oligonucleotide
uggcaaacacgcuuugugg

SEQ ID NO: 423552 - RNA, 19 nt, Artificial Sequence
  Description of Artificial Sequence: Synthetic oligonucleotide
gaacccuaggaaaaguagg

SEQ ID NO: 423553 - RNA, 19 nt, Artificial Sequence
  Description of Artificial Sequence: Synthetic oligonucleotide
uugagagcgugguacaugc

SEQ ID NO: 423554 - RNA, 19 nt, Artificial Sequence
  Description of Artificial Sequence: Synthetic oligonucleotide
guauagguaggccagcagc

SEQ ID NO: 423555 - RNA, 19 nt, Artificial Sequence
  Description of Artificial Sequence: Synthetic oligonucleotide
acuuaagccaggugggcgg

SEQ ID NO: 423556 - RNA, 19 nt, Artificial Sequence
  Description of Artificial Sequence: Synthetic oligonucleotide
aacuuaagccaggugggcg

SEQ ID NO: 423557 - RNA, 19 nt, Artificial Sequence
  Description of Artificial Sequence: Synthetic oligonucleotide
aaacacgugcuuguuggac

SEQ ID NO: 423558 - RNA, 19 nt, Artificial Sequence
  Description of Artificial Sequence: Synthetic oligonucleotide
aauauggccaaagaagaua

SEQ ID NO: 423559 - RNA, 19 nt, Artificial Sequence
  Description of Artificial Sequence: Synthetic oligonucleotide
ugaggcggugcugagaagg

SEQ ID NO: 423560 - RNA, 19 nt, Artificial Sequence
  Description of Artificial Sequence: Synthetic oligonucleotide
aacacgugcuuguuggaca

SEQ ID NO: 423561 - RNA, 19 nt, Artificial Sequence
  Description of Artificial Sequence: Synthetic oligonucleotide
cuuuguauuguugaucaug

SEQ ID NO: 423562 - RNA, 19 nt, Artificial Sequence
  Description of Artificial Sequence: Synthetic oligonucleotide
cucgauucgcuucucaaag

SEQ ID NO: 423563 - RNA, 19 nt, Artificial Sequence
  Description of Artificial Sequence: Synthetic oligonucleotide
aaaguaggacaguuccugu

SEQ ID NO: 423564 - RNA, 19 nt, Artificial Sequence
  Description of Artificial Sequence: Synthetic oligonucleotide
uggaugaaggccuuuguau

SEQ ID NO: 423565 - RNA, 19 nt, Artificial Sequence
  Description of Artificial Sequence: Synthetic oligonucleotide
agaguuccccuacaccagc

SEQ ID NO: 423566 - RNA, 19 nt, Artificial Sequence
  Description of Artificial Sequence: Synthetic oligonucleotide
aaggaacgaagccuuccag

SEQ ID NO: 423567 - RNA, 19 nt, Artificial Sequence
  Description of Artificial Sequence: Synthetic oligonucleotide
ugccugauccuucucuggg

SEQ ID NO: 423568 - RNA, 19 nt, Artificial Sequence
  Description of Artificial Sequence: Synthetic oligonucleotide
uccgugcuggccgagaugg

SEQ ID NO: 423569 - RNA, 19 nt, Artificial Sequence
  Description of Artificial Sequence: Synthetic oligonucleotide
uuuuguguugauguaggac

SEQ ID NO: 423570 - RNA, 19 nt, Artificial Sequence
  Description of Artificial Sequence: Synthetic oligonucleotide
ugcggguccauggaaaagg

SEQ ID NO: 423571 - RNA, 19 nt, Artificial Sequence
  Description of Artificial Sequence: Synthetic oligonucleotide
uuuggcaugaggucacgga

SEQ ID NO: 423572 - RNA, 19 nt, Artificial Sequence
  Description of Artificial Sequence: Synthetic oligonucleotide
uaaagguugcccacaggga

SEQ ID NO: 423573 - RNA, 19 nt, Artificial Sequence
  Description of Artificial Sequence: Synthetic oligonucleotide
gagagcgugguacaugcgc

SEQ ID NO: 423574 - RNA, 19 nt, Artificial Sequence
  Description of Artificial Sequence: Synthetic oligonucleotide
accccaagaaagaacaagg

SEQ ID NO: 423575 - RNA, 19 nt, Artificial Sequence
  Description of Artificial Sequence: Synthetic oligonucleotide
gaugcacuagcgcccaucc

SEQ ID NO: 423576 - RNA, 19 nt, Artificial Sequence
  Description of Artificial Sequence: Synthetic oligonucleotide
uauacaacuuaagccaggu

SEQ ID NO: 423577 - RNA, 19 nt, Artificial Sequence
  Description of Artificial Sequence: Synthetic oligonucleotide
gucaaucagaagaagaauc

SEQ ID NO: 423578 - RNA, 19 nt, Artificial Sequence
  Description of Artificial Sequence: Synthetic oligonucleotide
ugcguguggggucaucggg

SEQ ID NO: 423579 - RNA, 19 nt, Artificial Sequence
  Description of Artificial Sequence: Synthetic oligonucleotide
ccuaggaaaaguaggacag

SEQ ID NO: 423580 - RNA, 19 nt, Artificial Sequence
  Description of Artificial Sequence: Synthetic oligonucleotide
ucguccuuguaccaagaca

SEQ ID NO: 423581 - RNA, 19 nt, Artificial Sequence
  Description of Artificial Sequence: Synthetic oligonucleotide
uagaguuccccuacaccag

SEQ ID NO: 423582 - RNA, 19 nt, Artificial Sequence
  Description of Artificial Sequence: Synthetic oligonucleotide
uaauauggccaaagaagau

SEQ ID NO: 423583 - RNA, 19 nt, Artificial Sequence
  Description of Artificial Sequence: Synthetic oligonucleotide
acaggcguggauacggugc

SEQ ID NO: 423584 - RNA, 19 nt, Artificial Sequence
  Description of Artificial Sequence: Synthetic oligonucleotide
gauggcaaacacgugcuug

SEQ ID NO: 423585 - RNA, 19 nt, Artificial Sequence
  Description of Artificial Sequence: Synthetic oligonucleotide
aguucgaucugccguaagu

SEQ ID NO: 423586 - RNA, 19 nt, Artificial Sequence
  Description of Artificial Sequence: Synthetic oligonucleotide
gaguccaccagauuucgga

SEQ ID NO: 423587 - RNA, 19 nt, Artificial Sequence
  Description of Artificial Sequence: Synthetic oligonucleotide
gauaauggugggccggcug

SEQ ID NO: 423588 - RNA, 19 nt, Artificial Sequence
  Description of Artificial Sequence: Synthetic oligonucleotide
aacccuaggaaaaguagga

SEQ ID NO: 423589 - RNA, 19 nt, Artificial Sequence
  Description of Artificial Sequence: Synthetic oligonucleotide
gaucucucgucguagaucu

SEQ ID NO: 423590 - RNA, 19 nt, Artificial Sequence
  Description of Artificial Sequence: Synthetic oligonucleotide
agccaagugucaucaacag

SEQ ID NO: 423591 - RNA, 19 nt, Artificial Sequence
  Description of Artificial Sequence: Synthetic oligonucleotide
aucgucccgccgcugagcc

SEQ ID NO: 423592 - RNA, 19 nt, Artificial Sequence
  Description of Artificial Sequence: Synthetic oligonucleotide
caaaccaagcauugggauc

SEQ ID NO: 423593 - RNA, 19 nt, Artificial Sequence
  Description of Artificial Sequence: Synthetic oligonucleotide
aguauagguaggccagcag

SEQ ID NO: 423594 - RNA, 19 nt, Artificial Sequence
  Description of Artificial Sequence: Synthetic oligonucleotide
aguucaaggaaagcguuca

SEQ ID NO: 423595 - RNA, 19 nt, Artificial Sequence
  Description of Artificial Sequence: Synthetic oligonucleotide
augcgauugauugggcccc

SEQ ID NO: 423596 - RNA, 19 nt, Artificial Sequence
  Description of Artificial Sequence: Synthetic oligonucleotide
agcauugggaucaggaucu

SEQ ID NO: 423597 - RNA, 19 nt, Artificial Sequence
  Description of Artificial Sequence: Synthetic oligonucleotide
ugucuugauagcguagcug

SEQ ID NO: 423598 - RNA, 19 nt, Artificial Sequence
  Description of Artificial Sequence: Synthetic oligonucleotide
uguugucugggacucccca

SEQ ID NO: 423599 - RNA, 19 nt, Artificial Sequence
  Description of Artificial Sequence: Synthetic oligonucleotide
ucuggucugcugaugagua

SEQ ID NO: 423600 - RNA, 19 nt, Artificial Sequence
  Description of Artificial Sequence: Synthetic oligonucleotide
uagcguagcugaucucucg

SEQ ID NO: 423601 - RNA, 19 nt, Artificial Sequence
  Description of Artificial Sequence: Synthetic oligonucleotide
uggcaaauccaaugaaguc

SEQ ID NO: 423602 - RNA, 19 nt, Artificial Sequence
  Description of Artificial Sequence: Synthetic oligonucleotide
uggcaugaggucacggaug

SEQ ID NO: 423603 - RNA, 19 nt, Artificial Sequence
  Description of Artificial Sequence: Synthetic oligonucleotide
ugcagccuagucgagcagg

SEQ ID NO: 423604 - RNA, 19 nt, Artificial Sequence
  Description of Artificial Sequence: Synthetic oligonucleotide
aggcacuuaacagugguca

SEQ ID NO: 423605 - RNA, 19 nt, Artificial Sequence
  Description of Artificial Sequence: Synthetic oligonucleotide
ugaugaguauagguaggcc

SEQ ID NO: 423606 - RNA, 19 nt, Artificial Sequence
  Description of Artificial Sequence: Synthetic oligonucleotide
auauacaacuuaagccagg

SEQ ID NO: 423607 - RNA, 19 nt, Artificial Sequence
  Description of Artificial Sequence: Synthetic oligonucleotide
acgucccgaaucuugaggu

SEQ ID NO: 423608 - RNA, 19 nt, Artificial Sequence
  Description of Artificial Sequence: Synthetic oligonucleotide
aaguaggacaguuccugua

SEQ ID NO: 423609 - RNA, 19 nt, Artificial Sequence
  Description of Artificial Sequence: Synthetic oligonucleotide
cagcauaucgucccgccgc

SEQ ID NO: 423610 - RNA, 19 nt, Artificial Sequence
  Description of Artificial Sequence: Synthetic oligonucleotide
ugauccguggaugucuuga

SEQ ID NO: 423611 - RNA, 19 nt, Artificial Sequence
  Description of Artificial Sequence: Synthetic oligonucleotide
ugucaaucagaagaagaau

SEQ ID NO: 423612 - RNA, 19 nt, Artificial Sequence
  Description of Artificial Sequence: Synthetic oligonucleotide
aagaugcgauugauugggc

SEQ ID NO: 423613 - RNA, 19 nt, Artificial Sequence
  Description of Artificial Sequence: Synthetic oligonucleotide
augucaaucagaagaagaa

SEQ ID NO: 423614 - RNA, 19 nt, Artificial Sequence
  Description of Artificial Sequence: Synthetic oligonucleotide
cugaugaguauagguaggc

SEQ ID NO: 423615 - RNA, 19 nt, Artificial Sequence
  Description of Artificial Sequence: Synthetic oligonucleotide
caaacacgcuuuguggucc

SEQ ID NO: 423616 - RNA, 19 nt, Artificial Sequence
  Description of Artificial Sequence: Synthetic oligonucleotide
agucguguugucugggacu

SEQ ID NO: 423617 - RNA, 19 nt, Artificial Sequence
  Description of Artificial Sequence: Synthetic oligonucleotide
uggucaaaccaagcauugg

SEQ ID NO: 423618 - RNA, 19 nt, Artificial Sequence
  Description of Artificial Sequence: Synthetic oligonucleotide
agccaguucgaucugccgu

SEQ ID NO: 423619 - RNA, 19 nt, Artificial Sequence
  Description of Artificial Sequence: Synthetic oligonucleotide
cuugcguguggggucaucg

SEQ ID NO: 423620 - RNA, 19 nt, Artificial Sequence
  Description of Artificial Sequence: Synthetic oligonucleotide
uggccaaagaagauauaua

SEQ ID NO: 423621 - RNA, 19 nt, Artificial Sequence
  Description of Artificial Sequence: Synthetic oligonucleotide
guagacauuccucugcucu

SEQ ID NO: 423622 - RNA, 19 nt, Artificial Sequence
  Description of Artificial Sequence: Synthetic oligonucleotide
uacaugcgcagcauaucgu

SEQ ID NO: 423623 - RNA, 19 nt, Artificial Sequence
  Description of Artificial Sequence: Synthetic oligonucleotide
gaugguaucugaggcggug

SEQ ID NO: 423624 - RNA, 19 nt, Artificial Sequence
  Description of Artificial Sequence: Synthetic oligonucleotide
cacgucccgaaucuugagg

SEQ ID NO: 423625 - RNA, 19 nt, Artificial Sequence
  Description of Artificial Sequence: Synthetic oligonucleotide
guaggacaguuccuguacc

SEQ ID NO: 423626 - RNA, 19 nt, Artificial Sequence
  Description of Artificial Sequence: Synthetic oligonucleotide
ucuuccugggagucacaag

SEQ ID NO: 423627 - RNA, 19 nt, Artificial Sequence
  Description of Artificial Sequence: Synthetic oligonucleotide
auacaacuuaagccaggug

SEQ ID NO: 423628 - RNA, 19 nt, Artificial Sequence
  Description of Artificial Sequence: Synthetic oligonucleotide
gauagcguagcugaucucu

SEQ ID NO: 423629 - RNA, 19 nt, Artificial Sequence
  Description of Artificial Sequence: Synthetic oligonucleotide
cuguaccccaagaaagaac

SEQ ID NO: 423630 - RNA, 19 nt, Artificial Sequence
  Description of Artificial Sequence: Synthetic oligonucleotide
ugagagcgugguacaugcg

SEQ ID NO: 423631 - RNA, 19 nt, Artificial Sequence
  Description of Artificial Sequence: Synthetic oligonucleotide
ggggaauccgugcuggccg

SEQ ID NO: 423632 - RNA, 19 nt, Artificial Sequence
  Description of Artificial Sequence: Synthetic oligonucleotide
cugccguaaguccuuguag

SEQ ID NO: 423633 - RNA, 19 nt, Artificial Sequence
  Description of Artificial Sequence: Synthetic oligonucleotide
aauccgugcuggccgagau

SEQ ID NO: 423634 - RNA, 19 nt, Artificial Sequence
  Description of Artificial Sequence: Synthetic oligonucleotide
guaggaguccaccagauuu

SEQ ID NO: 423635 - RNA, 19 nt, Artificial Sequence
  Description of Artificial Sequence: Synthetic oligonucleotide
aucugcagaugcacuagcg

SEQ ID NO: 423636 - RNA, 19 nt, Artificial Sequence
  Description of Artificial Sequence: Synthetic oligonucleotide
uacugccaaccagagaucu

SEQ ID NO: 423637 - RNA, 19 nt, Artificial Sequence
  Description of Artificial Sequence: Synthetic oligonucleotide
aagaacccuaggaaaagua

SEQ ID NO: 423638 - RNA, 19 nt, Artificial Sequence
  Description of Artificial Sequence: Synthetic oligonucleotide
uugcguguggggucaucgg

SEQ ID NO: 423639 - RNA, 19 nt, Artificial Sequence
  Description of Artificial Sequence: Synthetic oligonucleotide
agccuagucgagcagggau

SEQ ID NO: 423640 - RNA, 19 nt, Artificial Sequence
  Description of Artificial Sequence: Synthetic oligonucleotide
ucgauucgcuucucaaagu

SEQ ID NO: 423641 - RNA, 19 nt, Artificial Sequence
  Description of Artificial Sequence: Synthetic oligonucleotide
ucaaacugauguuguugau

SEQ ID NO: 423642 - RNA, 19 nt, Artificial Sequence
  Description of Artificial Sequence: Synthetic oligonucleotide
guugugugguuaauauggc

SEQ ID NO: 423643 - RNA, 19 nt, Artificial Sequence
  Description of Artificial Sequence: Synthetic oligonucleotide
ugggcggccagcacugagc

SEQ ID NO: 423644 - RNA, 19 nt, Artificial Sequence
  Description of Artificial Sequence: Synthetic oligonucleotide
ugagagccguccugauccg

SEQ ID NO: 423645 - RNA, 19 nt, Artificial Sequence
  Description of Artificial Sequence: Synthetic oligonucleotide
ucccgaaucuugagguugu

SEQ ID NO: 423646 - RNA, 19 nt, Artificial Sequence
  Description of Artificial Sequence: Synthetic oligonucleotide
caguucaaggaaagcguuc

SEQ ID NO: 423647 - RNA, 19 nt, Artificial Sequence
  Description of Artificial Sequence: Synthetic oligonucleotide
agcguagcugaucucucgu

SEQ ID NO: 423648 - RNA, 19 nt, Artificial Sequence
  Description of Artificial Sequence: Synthetic oligonucleotide
aguccaccagauuucggau

SEQ ID NO: 423649 - RNA, 19 nt, Artificial Sequence
  Description of Artificial Sequence: Synthetic oligonucleotide
agucgagcagggauggcuc

SEQ ID NO: 423650 - RNA, 19 nt, Artificial Sequence
  Description of Artificial Sequence: Synthetic oligonucleotide
cucccucauugucaugucc

SEQ ID NO: 423651 - RNA, 19 nt, Artificial Sequence
  Description of Artificial Sequence: Synthetic oligonucleotide
auaucgucccgccgcugag

SEQ ID NO: 423652 - RNA, 19 nt, Artificial Sequence
  Description of Artificial Sequence: Synthetic oligonucleotide
auagcguagcugaucucuc

SEQ ID NO: 423653 - RNA, 19 nt, Artificial Sequence
  Description of Artificial Sequence: Synthetic oligonucleotide
ucagguugugugguuaaua

SEQ ID NO: 423654 - RNA, 19 nt, Artificial Sequence
  Description of Artificial Sequence: Synthetic oligonucleotide
guuccccuacaccagccug

SEQ ID NO: 423655 - RNA, 19 nt, Artificial Sequence
  Description of Artificial Sequence: Synthetic oligonucleotide
uguagacauuccucugcuc

SEQ ID NO: 423656 - RNA, 19 nt, Artificial Sequence
  Description of Artificial Sequence: Synthetic oligonucleotide
aagagaccccugauguucu

SEQ ID NO: 423657 - RNA, 19 nt, Artificial Sequence
  Description of Artificial Sequence: Synthetic oligonucleotide
accagauuucggauggucu

SEQ ID NO: 423658 - RNA, 19 nt, Artificial Sequence
  Description of Artificial Sequence: Synthetic oligonucleotide
gucgagcagggauggcucg

SEQ ID NO: 423659 - RNA, 19 nt, Artificial Sequence
  Description of Artificial Sequence: Synthetic oligonucleotide
uggucugcugaugaguaua

SEQ ID NO: 423660 - RNA, 19 nt, Artificial Sequence
  Description of Artificial Sequence: Synthetic oligonucleotide
guagguggugacgauccgc

SEQ ID NO: 423661 - RNA, 19 nt, Artificial Sequence
  Description of Artificial Sequence: Synthetic oligonucleotide
acacaggucggcgcugugg

SEQ ID NO: 423662 - RNA, 19 nt, Artificial Sequence
  Description of Artificial Sequence: Synthetic oligonucleotide
ggugcaugauggucuuugg

SEQ ID NO: 423663 - RNA, 19 nt, Artificial Sequence
  Description of Artificial Sequence: Synthetic oligonucleotide
gacgauccgcucugucucc

SEQ ID NO: 423664 - RNA, 19 nt, Artificial Sequence
  Description of Artificial Sequence: Synthetic oligonucleotide
gaccaccaaaacucuccug

SEQ ID NO: 423665 - RNA, 19 nt, Artificial Sequence
  Description of Artificial Sequence: Synthetic oligonucleotide
gcugaugaguauagguagg

SEQ ID NO: 423666 - RNA, 19 nt, Artificial Sequence
  Description of Artificial Sequence: Synthetic oligonucleotide
gcaguaauggggcccagac

SEQ ID NO: 423667 - RNA, 19 nt, Artificial Sequence
  Description of Artificial Sequence: Synthetic oligonucleotide
guugucugggacuccccac

SEQ ID NO: 423668 - RNA, 19 nt, Artificial Sequence
  Description of Artificial Sequence: Synthetic oligonucleotide
guaggacugcucaauguca

SEQ ID NO: 423669 - RNA, 19 nt, Artificial Sequence
  Description of Artificial Sequence: Synthetic oligonucleotide
caacuuaagccaggugggc

SEQ ID NO: 423670 - RNA, 19 nt, Artificial Sequence
  Description of Artificial Sequence: Synthetic oligonucleotide
gugugguuaauauggccaa

SEQ ID NO: 423671 - RNA, 19 nt, Artificial Sequence
  Description of Artificial Sequence: Synthetic oligonucleotide
ucucucgucguagaucuuu

SEQ ID NO: 423672 - RNA, 19 nt, Artificial Sequence
  Description of Artificial Sequence: Synthetic oligonucleotide
agcugaucucucgucguag

SEQ ID NO: 423673 - RNA, 19 nt, Artificial Sequence
  Description of Artificial Sequence: Synthetic oligonucleotide
uggguagacuccagcucga

SEQ ID NO: 423674 - RNA, 19 nt, Artificial Sequence
  Description of Artificial Sequence: Synthetic oligonucleotide
acgugcuuguuggacauga

SEQ ID NO: 423675 - RNA, 19 nt, Artificial Sequence
  Description of Artificial Sequence: Synthetic oligonucleotide
ggugugggaccccucacug

SEQ ID NO: 423676 - RNA, 19 nt, Artificial Sequence
  Description of Artificial Sequence: Synthetic oligonucleotide
ucgagcagggauggcucgg

SEQ ID NO: 423677 - RNA, 19 nt, Artificial Sequence
  Description of Artificial Sequence: Synthetic oligonucleotide
uguugagcugcgugcuccu

SEQ ID NO: 423678 - RNA, 19 nt, Artificial Sequence
  Description of Artificial Sequence: Synthetic oligonucleotide
gccccuucggaucaccagg

SEQ ID NO: 423679 - RNA, 19 nt, Artificial Sequence
  Description of Artificial Sequence: Synthetic oligonucleotide
gucaucggggcggaaauuc

SEQ ID NO: 423680 - RNA, 19 nt, Artificial Sequence
  Description of Artificial Sequence: Synthetic oligonucleotide
cucucgucguagaucuuuc

SEQ ID NO: 423681 - RNA, 19 nt, Artificial Sequence
  Description of Artificial Sequence: Synthetic oligonucleotide
ggcggaaauucuuguauuc

SEQ ID NO: 423682 - RNA, 19 nt, Artificial Sequence
  Description of Artificial Sequence: Synthetic oligonucleotide
agagcgugguacaugcgca

SEQ ID NO: 423683 - RNA, 19 nt, Artificial Sequence
  Description of Artificial Sequence: Synthetic oligonucleotide
agagaccccugauguucuc

SEQ ID NO: 423684 - RNA, 19 nt, Artificial Sequence
  Description of Artificial Sequence: Synthetic oligonucleotide
agaucuucccuugucccaa

SEQ ID NO: 423685 - RNA, 19 nt, Artificial Sequence
  Description of Artificial Sequence: Synthetic oligonucleotide
ugugguuaauauggccaaa

SEQ ID NO: 423686 - RNA, 19 nt, Artificial Sequence
  Description of Artificial Sequence: Synthetic oligonucleotide
acacgcuuugugguccagg

SEQ ID NO: 423687 - RNA, 19 nt, Artificial Sequence
  Description of Artificial Sequence: Synthetic oligonucleotide
ccaaaacucuccugcacug

SEQ ID NO: 423688 - RNA, 19 nt, Artificial Sequence
  Description of Artificial Sequence: Synthetic oligonucleotide
cuuaagccaggugggcggc

SEQ ID NO: 423689 - RNA, 19 nt, Artificial Sequence
  Description of Artificial Sequence: Synthetic oligonucleotide
cucguccuuguaccaagac

SEQ ID NO: 423690 - RNA, 19 nt, Artificial Sequence
  Description of Artificial Sequence: Synthetic oligonucleotide
cguagcugaucucucgucg

SEQ ID NO: 423691 - RNA, 19 nt, Artificial Sequence
  Description of Artificial Sequence: Synthetic oligonucleotide
cauaucgucccgccgcuga

SEQ ID NO: 423692 - RNA, 19 nt, Artificial Sequence
  Description of Artificial Sequence: Synthetic oligonucleotide
uagcugaucucucgucgua

SEQ ID NO: 423693 - RNA, 19 nt, Artificial Sequence
  Description of Artificial Sequence: Synthetic oligonucleotide
aggucggcgcuguggagug

SEQ ID NO: 423694 - RNA, 19 nt, Artificial Sequence
  Description of Artificial Sequence: Synthetic oligonucleotide
augaaagaugcgauugauu

SEQ ID NO: 423695 - RNA, 19 nt, Artificial Sequence
  Description of Artificial Sequence: Synthetic oligonucleotide
gaguuccccuacaccagcc

SEQ ID NO: 423696 - RNA, 19 nt, Artificial Sequence
  Description of Artificial Sequence: Synthetic oligonucleotide
gucugcugaugaguauagg

SEQ ID NO: 423697 - RNA, 19 nt, Artificial Sequence
  Description of Artificial Sequence: Synthetic oligonucleotide
auacggugcugguacugau

SEQ ID NO: 423698 - RNA, 19 nt, Artificial Sequence
  Description of Artificial Sequence: Synthetic oligonucleotide
ugggcggauaauggugggc

SEQ ID NO: 423699 - RNA, 19 nt, Artificial Sequence
  Description of Artificial Sequence: Synthetic oligonucleotide
cacaggcguggauacggug

SEQ ID NO: 423700 - RNA, 19 nt, Artificial Sequence
  Description of Artificial Sequence: Synthetic oligonucleotide
ugauagcguagcugaucuc

SEQ ID NO: 423701 - RNA, 19 nt, Artificial Sequence
  Description of Artificial Sequence: Synthetic oligonucleotide
gcagcauaucgucccgccg

SEQ ID NO: 423702 - RNA, 19 nt, Artificial Sequence
  Description of Artificial Sequence: Synthetic oligonucleotide
cacugugggugcacgagga

SEQ ID NO: 423703 - RNA, 19 nt, Artificial Sequence
  Description of Artificial Sequence: Synthetic oligonucleotide
ggcggauaauggugggccg

SEQ ID NO: 423704 - RNA, 19 nt, Artificial Sequence
  Description of Artificial Sequence: Synthetic oligonucleotide
caaaccacauugggcugag

SEQ ID NO: 423705 - RNA, 19 nt, Artificial Sequence
  Description of Artificial Sequence: Synthetic oligonucleotide
cacguaggaguccaccaga

SEQ ID NO: 423706 - RNA, 19 nt, Artificial Sequence
  Description of Artificial Sequence: Synthetic oligonucleotide
gcguucaugaaagaugcga

SEQ ID NO: 423707 - RNA, 19 nt, Artificial Sequence
  Description of Artificial Sequence: Synthetic oligonucleotide
gcaaacacgcuuugugguc

SEQ ID NO: 423708 - RNA, 19 nt, Artificial Sequence
  Description of Artificial Sequence: Synthetic oligonucleotide
gucggcgcuguggaguggg

SEQ ID NO: 423709 - RNA, 19 nt, Artificial Sequence
  Description of Artificial Sequence: Synthetic oligonucleotide
aaccaagcauugggaucag

SEQ ID NO: 423710 - RNA, 19 nt, Artificial Sequence
  Description of Artificial Sequence: Synthetic oligonucleotide
uaagggacuccaggccuga

SEQ ID NO: 423711 - RNA, 19 nt, Artificial Sequence
  Description of Artificial Sequence: Synthetic oligonucleotide
gucguagaucuuucucauc

SEQ ID NO: 423712 - RNA, 19 nt, Artificial Sequence
  Description of Artificial Sequence: Synthetic oligonucleotide
cagguugugugguuaauau

SEQ ID NO: 423713 - RNA, 19 nt, Artificial Sequence
  Description of Artificial Sequence: Synthetic oligonucleotide
ccuagucgagcagggaugg

SEQ ID NO: 423714 - RNA, 19 nt, Artificial Sequence
  Description of Artificial Sequence: Synthetic oligonucleotide
cacaggucggcgcugugga

SEQ ID NO: 423715 - RNA, 19 nt, Artificial Sequence
  Description of Artificial Sequence: Synthetic oligonucleotide
ggacugcucaaugucaauc

SEQ ID NO: 423716 - RNA, 19 nt, Artificial Sequence
  Description of Artificial Sequence: Synthetic oligonucleotide
acaggucggcgcuguggag

SEQ ID NO: 423717 - RNA, 19 nt, Artificial Sequence
  Description of Artificial Sequence: Synthetic oligonucleotide
ccuuguaccaagacaggga

SEQ ID NO: 423718 - RNA, 19 nt, Artificial Sequence
  Description of Artificial Sequence: Synthetic oligonucleotide
cucacugcaggaggccggc

SEQ ID NO: 423719 - RNA, 19 nt, Artificial Sequence
  Description of Artificial Sequence: Synthetic oligonucleotide
gccguaaguccuuguagac

SEQ ID NO: 423720 - RNA, 19 nt, Artificial Sequence
  Description of Artificial Sequence: Synthetic oligonucleotide
caccagauuucggaugguc

SEQ ID NO: 423721 - RNA, 19 nt, Artificial Sequence
  Description of Artificial Sequence: Synthetic oligonucleotide
caaggcuagaguuccccua

SEQ ID NO: 423722 - RNA, 19 nt, Artificial Sequence
  Description of Artificial Sequence: Synthetic oligonucleotide
caaacacgugcuuguugga

SEQ ID NO: 423723 - RNA, 19 nt, Artificial Sequence
  Description of Artificial Sequence: Synthetic oligonucleotide
ggcuagaguuccccuacac

SEQ ID NO: 423724 - RNA, 19 nt, Artificial Sequence
  Description of Artificial Sequence: Synthetic oligonucleotide
uccuugguucuccccucuc

SEQ ID NO: 423725 - RNA, 19 nt, Artificial Sequence
  Description of Artificial Sequence: Synthetic oligonucleotide
auccgugcuggccgagaug

SEQ ID NO: 423726 - RNA, 19 nt, Artificial Sequence
  Description of Artificial Sequence: Synthetic oligonucleotide
cuggccgagaugguaucug

SEQ ID NO: 423727 - RNA, 19 nt, Artificial Sequence
  Description of Artificial Sequence: Synthetic oligonucleotide
cucgaaggaacgaagccuu

SEQ ID NO: 423728 - RNA, 19 nt, Artificial Sequence
  Description of Artificial Sequence: Synthetic oligonucleotide
aggcggugcugagaagggg

SEQ ID NO: 423729 - RNA, 19 nt, Artificial Sequence
  Description of Artificial Sequence: Synthetic oligonucleotide
cagcugacucuuccaugag

SEQ ID NO: 423730 - RNA, 19 nt, Artificial Sequence
  Description of Artificial Sequence: Synthetic oligonucleotide
ugcuggccgagaugguauc

SEQ ID NO: 423731 - RNA, 19 nt, Artificial Sequence
  Description of Artificial Sequence: Synthetic oligonucleotide
aggcuagaguuccccuaca

SEQ ID NO: 423732 - RNA, 19 nt, Artificial Sequence
  Description of Artificial Sequence: Synthetic oligonucleotide
gagccgcccuucaucaaac

SEQ ID NO: 423733 - RNA, 19 nt, Artificial Sequence
  Description of Artificial Sequence: Synthetic oligonucleotide
uccccuacaccagccugga

SEQ ID NO: 423734 - RNA, 19 nt, Artificial Sequence
  Description of Artificial Sequence: Synthetic oligonucleotide
augcacuagcgcccauccu

SEQ ID NO: 423735 - RNA, 19 nt, Artificial Sequence
  Description of Artificial Sequence: Synthetic oligonucleotide
caguucgaucugccguaag

SEQ ID NO: 423736 - RNA, 19 nt, Artificial Sequence
  Description of Artificial Sequence: Synthetic oligonucleotide
gcagccuagucgagcaggg

SEQ ID NO: 423737 - RNA, 19 nt, Artificial Sequence
  Description of Artificial Sequence: Synthetic oligonucleotide
gguggugacgauccgcucu

SEQ ID NO: 423738 - RNA, 19 nt, Artificial Sequence
  Description of Artificial Sequence: Synthetic oligonucleotide
ggugagagccguccugauc

SEQ ID NO: 423739 - RNA, 19 nt, Artificial Sequence
  Description of Artificial Sequence: Synthetic oligonucleotide
cuagggaggacaggguaaa

SEQ ID NO: 423740 - RNA, 19 nt, Artificial Sequence
  Description of Artificial Sequence: Synthetic oligonucleotide
ccucacugcaggaggccgg

SEQ ID NO: 423741 - RNA, 19 nt, Artificial Sequence
  Description of Artificial Sequence: Synthetic oligonucleotide
cugauccguggaugucuug

SEQ ID NO: 423742 - RNA, 19 nt, Artificial Sequence
  Description of Artificial Sequence: Synthetic oligonucleotide
ccguggaugucuugauagc

SEQ ID NO: 423743 - RNA, 19 nt, Artificial Sequence
  Description of Artificial Sequence: Synthetic oligonucleotide
ggauacggugcugguacug

SEQ ID NO: 423744 - RNA, 19 nt, Artificial Sequence
  Description of Artificial Sequence: Synthetic oligonucleotide
gaccccugauguucuccuc

SEQ ID NO: 423745 - RNA, 19 nt, Artificial Sequence
  Description of Artificial Sequence: Synthetic oligonucleotide
cugcggguccauggaaaag

SEQ ID NO: 423746 - RNA, 19 nt, Artificial Sequence
  Description of Artificial Sequence: Synthetic oligonucleotide
guaauggggcccagaccac

SEQ ID NO: 423747 - RNA, 19 nt, Artificial Sequence
  Description of Artificial Sequence: Synthetic oligonucleotide
gccuagucgagcagggaug

SEQ ID NO: 423748 - RNA, 19 nt, Artificial Sequence
  Description of Artificial Sequence: Synthetic oligonucleotide
agcacacuuuuggggugag

SEQ ID NO: 423749 - RNA, 19 nt, Artificial Sequence
  Description of Artificial Sequence: Synthetic oligonucleotide
cauuguuggcaaacacgcu

SEQ ID NO: 423750 - RNA, 19 nt, Artificial Sequence
  Description of Artificial Sequence: Synthetic oligonucleotide
aucugaggcggugcugaga

SEQ ID NO: 423751 - RNA, 19 nt, Artificial Sequence
  Description of Artificial Sequence: Synthetic oligonucleotide
ccgaaucuugagguugucc

SEQ ID NO: 423752 - RNA, 19 nt, Artificial Sequence
  Description of Artificial Sequence: Synthetic oligonucleotide
aggcaccucuggcugucga

SEQ ID NO: 423753 - RNA, 19 nt, Artificial Sequence
  Description of Artificial Sequence: Synthetic oligonucleotide
gugguacaugcgcagcaua

SEQ ID NO: 423754 - RNA, 19 nt, Artificial Sequence
  Description of Artificial Sequence: Synthetic oligonucleotide
cuagucgagcagggauggc

SEQ ID NO: 423755 - RNA, 19 nt, Artificial Sequence
  Description of Artificial Sequence: Synthetic oligonucleotide
ggaguccaccagauuucgg

SEQ ID NO: 423756 - RNA, 19 nt, Artificial Sequence
  Description of Artificial Sequence: Synthetic oligonucleotide
ucggaucaccaggauccuc

SEQ ID NO: 423757 - RNA, 19 nt, Artificial Sequence
  Description of Artificial Sequence: Synthetic oligonucleotide
agccgcccuucaucaaacu

SEQ ID NO: 423758 - RNA, 19 nt, Artificial Sequence
  Description of Artificial Sequence: Synthetic oligonucleotide
ggcugucgagacugggcug

SEQ ID NO: 423759 - RNA, 19 nt, Artificial Sequence
  Description of Artificial Sequence: Synthetic oligonucleotide
guguugucugggacucccc

SEQ ID NO: 423760 - RNA, 19 nt, Artificial Sequence
  Description of Artificial Sequence: Synthetic oligonucleotide
uccaggccgggaugggauu

SEQ ID NO: 423761 - RNA, 19 nt, Artificial Sequence
  Description of Artificial Sequence: Synthetic oligonucleotide
ggcccagaccaccaaaacu

SEQ ID NO: 423762 - RNA, 19 nt, Artificial Sequence
  Description of Artificial Sequence: Synthetic oligonucleotide
cacuagcgcccauccugug

SEQ ID NO: 423763 - RNA, 19 nt, Artificial Sequence
  Description of Artificial Sequence: Synthetic oligonucleotide
cguaaguccuuguagacau

SEQ ID NO: 423764 - RNA, 19 nt, Artificial Sequence
  Description of Artificial Sequence: Synthetic oligonucleotide
gcucgaaggaacgaagccu

SEQ ID NO: 423765 - RNA, 19 nt, Artificial Sequence
  Description of Artificial Sequence: Synthetic oligonucleotide
gcgugguacaugcgcagca

SEQ ID NO: 423766 - RNA, 19 nt, Artificial Sequence
  Description of Artificial Sequence: Synthetic oligonucleotide
gccaguucgaucugccgua

SEQ ID NO: 423767 - RNA, 19 nt, Artificial Sequence
  Description of Artificial Sequence: Synthetic oligonucleotide
guacuccuuggagccgccc

SEQ ID NO: 423768 - RNA, 19 nt, Artificial Sequence
  Description of Artificial Sequence: Synthetic oligonucleotide
cgcagcauaucgucccgcc

SEQ ID NO: 423769 - RNA, 19 nt, Artificial Sequence
  Description of Artificial Sequence: Synthetic oligonucleotide
gguggaugaaggccuuugu

SEQ ID NO: 423770 - RNA, 19 nt, Artificial Sequence
  Description of Artificial Sequence: Synthetic oligonucleotide
gcguagcugaucucucguc

SEQ ID NO: 423771 - RNA, 19 nt, Artificial Sequence
  Description of Artificial Sequence: Synthetic oligonucleotide
ccugauugggaauggcucu

SEQ ID NO: 423772 - RNA, 19 nt, Artificial Sequence
  Description of Artificial Sequence: Synthetic oligonucleotide
cccucauugucauguccuc

SEQ ID NO: 423773 - RNA, 19 nt, Artificial Sequence
  Description of Artificial Sequence: Synthetic oligonucleotide
gggcgucuggcugggagcc

SEQ ID NO: 423774 - RNA, 19 nt, Artificial Sequence
  Description of Artificial Sequence: Synthetic oligonucleotide
ucuugcguguggggucauc

SEQ ID NO: 423775 - RNA, 19 nt, Artificial Sequence
  Description of Artificial Sequence: Synthetic oligonucleotide
ggucuugcgugugggguca

SEQ ID NO: 423776 - RNA, 19 nt, Artificial Sequence
  Description of Artificial Sequence: Synthetic oligonucleotide
ccaaccagagaucuucccu

SEQ ID NO: 423777 - RNA, 19 nt, Artificial Sequence
  Description of Artificial Sequence: Synthetic oligonucleotide
gcugcggguccauggaaaa

SEQ ID NO: 423778 - RNA, 19 nt, Artificial Sequence
  Description of Artificial Sequence: Synthetic oligonucleotide
gcgcucuucugcugggcac

SEQ ID NO: 423779 - RNA, 19 nt, Artificial Sequence
  Description of Artificial Sequence: Synthetic oligonucleotide
gggaauccgugcuggccga

SEQ ID NO: 423780 - RNA, 19 nt, Artificial Sequence
  Description of Artificial Sequence: Synthetic oligonucleotide
guccugauccguggauguc

SEQ ID NO: 423781 - RNA, 19 nt, Artificial Sequence
  Description of Artificial Sequence: Synthetic oligonucleotide
ccaguacuccuuggagccg

SEQ ID NO: 423782 - RNA, 19 nt, Artificial Sequence
  Description of Artificial Sequence: Synthetic oligonucleotide
gccgagaaggaggcugcag

SEQ ID NO: 423783 - RNA, 19 nt, Artificial Sequence
  Description of Artificial Sequence: Synthetic oligonucleotide
caggcguggauacggugcu

SEQ ID NO: 423784 - RNA, 19 nt, Artificial Sequence
  Description of Artificial Sequence: Synthetic oligonucleotide
ggccgggaugggauugggg

SEQ ID NO: 423785 - RNA, 19 nt, Artificial Sequence
  Description of Artificial Sequence: Synthetic oligonucleotide
ucgucccgccgcugagccu

SEQ ID NO: 423786 - RNA, 19 nt, Artificial Sequence
  Description of Artificial Sequence: Synthetic oligonucleotide
cacgugcuuguuggacaug

SEQ ID NO: 423787 - RNA, 19 nt, Artificial Sequence
  Description of Artificial Sequence: Synthetic oligonucleotide
ccguaaguccuuguagaca

SEQ ID NO: 423788 - RNA, 19 nt, Artificial Sequence
  Description of Artificial Sequence: Synthetic oligonucleotide
cguucaugaaagaugcgau

SEQ ID NO: 423789 - RNA, 19 nt, Artificial Sequence
  Description of Artificial Sequence: Synthetic oligonucleotide
aggcguggauacggugcug

SEQ ID NO: 423790 - RNA, 19 nt, Artificial Sequence
  Description of Artificial Sequence: Synthetic oligonucleotide
ggcucggcugggcggauaa

SEQ ID NO: 423791 - RNA, 19 nt, Artificial Sequence
  Description of Artificial Sequence: Synthetic oligonucleotide
ccuguaccccaagaaagaa

SEQ ID NO: 423792 - RNA, 19 nt, Artificial Sequence
  Description of Artificial Sequence: Synthetic oligonucleotide
gcgccgagaaggaggcugc

SEQ ID NO: 423793 - RNA, 19 nt, Artificial Sequence
  Description of Artificial Sequence: Synthetic oligonucleotide
cccucgauucgcuucucaa

SEQ ID NO: 423794 - RNA, 19 nt, Artificial Sequence
  Description of Artificial Sequence: Synthetic oligonucleotide
cggauaauggugggccggc

SEQ ID NO: 423795 - RNA, 19 nt, Artificial Sequence
  Description of Artificial Sequence: Synthetic oligonucleotide
gugcuggccgagaugguau

SEQ ID NO: 423796 - RNA, 19 nt, Artificial Sequence
  Description of Artificial Sequence: Synthetic oligonucleotide
caugguggaugaaggccuu

SEQ ID NO: 423797 - RNA, 19 nt, Artificial Sequence
  Description of Artificial Sequence: Synthetic oligonucleotide
cugagcuucucagcacacu

SEQ ID NO: 423798 - RNA, 19 nt, Artificial Sequence
  Description of Artificial Sequence: Synthetic oligonucleotide
ccccuucggaucaccagga

SEQ ID NO: 423799 - RNA, 19 nt, Artificial Sequence
  Description of Artificial Sequence: Synthetic oligonucleotide
gggucaucggggcggaaau

SEQ ID NO: 423800 - RNA, 19 nt, Artificial Sequence
  Description of Artificial Sequence: Synthetic oligonucleotide
ggggucaucggggcggaaa

SEQ ID NO: 423801 - RNA, 19 nt, Artificial Sequence
  Description of Artificial Sequence: Synthetic oligonucleotide
gcgugcuccucugcugggc

SEQ ID NO: 423802 - RNA, 19 nt, Artificial Sequence
  Description of Artificial Sequence: Synthetic oligonucleotide
gagagccguccugauccgu

SEQ ID NO: 423803 - RNA, 19 nt, Artificial Sequence
  Description of Artificial Sequence: Synthetic oligonucleotide
ccccugauugggaauggcu

SEQ ID NO: 423804 - RNA, 19 nt, Artificial Sequence
  Description of Artificial Sequence: Synthetic oligonucleotide
ccucguccuuguaccaaga

SEQ ID NO: 423805 - RNA, 19 nt, Artificial Sequence
  Description of Artificial Sequence: Synthetic oligonucleotide
gcccucgauucgcuucuca

SEQ ID NO: 423806 - RNA, 19 nt, Artificial Sequence
  Description of Artificial Sequence: Synthetic oligonucleotide
cagcgggcgcucuucugcu

SEQ ID NO: 423807 - RNA, 19 nt, Artificial Sequence
  Description of Artificial Sequence: Synthetic oligonucleotide
gcacuagcgcccauccugu

SEQ ID NO: 423808 - RNA, 19 nt, Artificial Sequence
  Description of Artificial Sequence: Synthetic oligonucleotide
ggucggcgcuguggagugg

SEQ ID NO: 423809 - RNA, 19 nt, Artificial Sequence
  Description of Artificial Sequence: Synthetic oligonucleotide
cgucguagaucuuucucau

SEQ ID NO: 423810 - RNA, 19 nt, Artificial Sequence
  Description of Artificial Sequence: Synthetic oligonucleotide
ggauaauggugggccggcu

SEQ ID NO: 423811 - RNA, 19 nt, Artificial Sequence
  Description of Artificial Sequence: Synthetic oligonucleotide
ggguagacuccagcucgaa

SEQ ID NO: 423812 - RNA, 19 nt, Artificial Sequence
  Description of Artificial Sequence: Synthetic oligonucleotide
cgggcgcucuucugcuggg

SEQ ID NO: 423813 - RNA, 19 nt, Artificial Sequence
  Description of Artificial Sequence: Synthetic oligonucleotide
gauggucagccagccccuu

SEQ ID NO: 423814 - RNA, 19 nt, Artificial Sequence
  Description of Artificial Sequence: Synthetic oligonucleotide
ggugggccggcugggcgca

SEQ ID NO: 423815 - RNA, 19 nt, Artificial Sequence
  Description of Artificial Sequence: Synthetic oligonucleotide
cguccugauccguggaugu

SEQ ID NO: 423816 - RNA, 19 nt, Artificial Sequence
  Description of Artificial Sequence: Synthetic oligonucleotide
gcggguccauggaaaaggu

SEQ ID NO: 423817 - RNA, 19 nt, Artificial Sequence
  Description of Artificial Sequence: Synthetic oligonucleotide
ccagcggcagcauguacuu

SEQ ID NO: 423818 - RNA, 19 nt, Artificial Sequence
  Description of Artificial Sequence: Synthetic oligonucleotide
cccgaaucuugagguuguc

SEQ ID NO: 423819 - RNA, 19 nt, Artificial Sequence
  Description of Artificial Sequence: Synthetic oligonucleotide
cccaaggaugcaguuccua

SEQ ID NO: 423820 - RNA, 19 nt, Artificial Sequence
  Description of Artificial Sequence: Synthetic oligonucleotide
gcuggccgagaugguaucu

SEQ ID NO: 423821 - RNA, 19 nt, Artificial Sequence
  Description of Artificial Sequence: Synthetic oligonucleotide
gcguggauacggugcuggu

SEQ ID NO: 423822 - RNA, 19 nt, Artificial Sequence
  Description of Artificial Sequence: Synthetic oligonucleotide
ccaguucgaucugccguaa

SEQ ID NO: 423823 - RNA, 19 nt, Artificial Sequence
  Description of Artificial Sequence: Synthetic oligonucleotide
gcacaggcguggauacggu

SEQ ID NO: 423824 - RNA, 19 nt, Artificial Sequence
  Description of Artificial Sequence: Synthetic oligonucleotide
ggcgucuggcugggagcca

SEQ ID NO: 423825 - RNA, 19 nt, Artificial Sequence
  Description of Artificial Sequence: Synthetic oligonucleotide
ggucaucggggcggaaauu

SEQ ID NO: 423826 - RNA, 19 nt, Artificial Sequence
  Description of Artificial Sequence: Synthetic oligonucleotide
cguaggaguccaccagauu

SEQ ID NO: 423827 - RNA, 19 nt, Artificial Sequence
  Description of Artificial Sequence: Synthetic oligonucleotide
gucuugcguguggggucau

SEQ ID NO: 423828 - RNA, 19 nt, Artificial Sequence
  Description of Artificial Sequence: Synthetic oligonucleotide
cccuucggaucaccaggau

SEQ ID NO: 423829 - RNA, 19 nt, Artificial Sequence
  Description of Artificial Sequence: Synthetic oligonucleotide
cgucccgaaucuugagguu

SEQ ID NO: 423830 - RNA, 19 nt, Artificial Sequence
  Description of Artificial Sequence: Synthetic oligonucleotide
gcucggcugggcggauaau

SEQ ID NO: 423831 - RNA, 19 nt, Artificial Sequence
  Description of Artificial Sequence: Synthetic oligonucleotide
aagaaaauaccucagacgg

SEQ ID NO: 423832 - RNA, 19 nt, Artificial Sequence
  Description of Artificial Sequence: Synthetic oligonucleotide
aaaauuacaaauaccagcc

SEQ ID NO: 423833 - RNA, 19 nt, Artificial Sequence
  Description of Artificial Sequence: Synthetic oligonucleotide
aauaagaucguacucuuuc

SEQ ID NO: 423834 - RNA, 19 nt, Artificial Sequence
  Description of Artificial Sequence: Synthetic oligonucleotide
aaauccuuacuguuuaugc

SEQ ID NO: 423835 - RNA, 19 nt, Artificial Sequence
  Description of Artificial Sequence: Synthetic oligonucleotide
aagacuagcagacagagcu

SEQ ID NO: 423836 - RNA, 19 nt, Artificial Sequence
  Description of Artificial Sequence: Synthetic oligonucleotide
uuuuaaauagaguagguga

SEQ ID NO: 423837 - RNA, 19 nt, Artificial Sequence
  Description of Artificial Sequence: Synthetic oligonucleotide
aaauucaugaguauuacuc

SEQ ID NO: 423838 - RNA, 19 nt, Artificial Sequence
  Description of Artificial Sequence: Synthetic oligonucleotide
uauuaaagugccaucauag

SEQ ID NO: 423839 - RNA, 19 nt, Artificial Sequence
  Description of Artificial Sequence: Synthetic oligonucleotide
aaugccaacaugucaacuc

SEQ ID NO: 423840 - RNA, 19 nt, Artificial Sequence
  Description of Artificial Sequence: Synthetic oligonucleotide
auauguggaaccuuuggcc

SEQ ID NO: 423841 - RNA, 19 nt, Artificial Sequence
  Description of Artificial Sequence: Synthetic oligonucleotide
uguaucugcgcucagauga

SEQ ID NO: 423842 - RNA, 19 nt, Artificial Sequence
  Description of Artificial Sequence: Synthetic oligonucleotide
aauauaccuuagaagaccc

SEQ ID NO: 423843 - RNA, 19 nt, Artificial Sequence
  Description of Artificial Sequence: Synthetic oligonucleotide
agaaaguaagguuacugac

SEQ ID NO: 423844 - RNA, 19 nt, Artificial Sequence
  Description of Artificial Sequence: Synthetic oligonucleotide
uauucuuacuaauaagaag

SEQ ID NO: 423845 - RNA, 19 nt, Artificial Sequence
  Description of Artificial Sequence: Synthetic oligonucleotide
uucaacauuaugcguaagg

SEQ ID NO: 423846 - RNA, 19 nt, Artificial Sequence
  Description of Artificial Sequence: Synthetic oligonucleotide
ugaccaugaaaauauuugg

SEQ ID NO: 423847 - RNA, 19 nt, Artificial Sequence
  Description of Artificial Sequence: Synthetic oligonucleotide
uuuaaauagaguaggugac

SEQ ID NO: 423848 - RNA, 19 nt, Artificial Sequence
  Description of Artificial Sequence: Synthetic oligonucleotide
aaaagaaucaugagugaac

SEQ ID NO: 423849 - RNA, 19 nt, Artificial Sequence
  Description of Artificial Sequence: Synthetic oligonucleotide
ugaacaauaagaucguacu

SEQ ID NO: 423850 - RNA, 19 nt, Artificial Sequence
  Description of Artificial Sequence: Synthetic oligonucleotide
uguagauaaacgcagcacu

SEQ ID NO: 423851 - RNA, 19 nt, Artificial Sequence
  Description of Artificial Sequence: Synthetic oligonucleotide
aaaucauaacuucugcucu

SEQ ID NO: 423852 - RNA, 19 nt, Artificial Sequence
  Description of Artificial Sequence: Synthetic oligonucleotide
uuauauaucauaguugcac

SEQ ID NO: 423853 - RNA, 19 nt, Artificial Sequence
  Description of Artificial Sequence: Synthetic oligonucleotide
ugaaacagaaaguacuagc

SEQ ID NO: 423854 - RNA, 19 nt, Artificial Sequence
  Description of Artificial Sequence: Synthetic oligonucleotide
cuaagaacagucuuaucgg

SEQ ID NO: 423855 - RNA, 19 nt, Artificial Sequence
  Description of Artificial Sequence: Synthetic oligonucleotide
aaaguaagguuacugacaa

SEQ ID NO: 423856 - RNA, 19 nt, Artificial Sequence
  Description of Artificial Sequence: Synthetic oligonucleotide
acaaauaccagccuacuca

SEQ ID NO: 423857 - RNA, 19 nt, Artificial Sequence
  Description of Artificial Sequence: Synthetic oligonucleotide
ugaacaaaugacuugaauu

SEQ ID NO: 423858 - RNA, 19 nt, Artificial Sequence
  Description of Artificial Sequence: Synthetic oligonucleotide
caugagugaacauagcgcc

SEQ ID NO: 423859 - RNA, 19 nt, Artificial Sequence
  Description of Artificial Sequence: Synthetic oligonucleotide
ucaugagugaacauagcgc

SEQ ID NO: 423860 - RNA, 19 nt, Artificial Sequence
  Description of Artificial Sequence: Synthetic oligonucleotide
acaauugguuuucaaaauc

SEQ ID NO: 423861 - RNA, 19 nt, Artificial Sequence
  Description of Artificial Sequence: Synthetic oligonucleotide
guaggugacauuuacauga

SEQ ID NO: 423862 - RNA, 19 nt, Artificial Sequence
  Description of Artificial Sequence: Synthetic oligonucleotide
auagauucuccuuuuacug

SEQ ID NO: 423863 - RNA, 19 nt, Artificial Sequence
  Description of Artificial Sequence: Synthetic oligonucleotide
auaaacgcagcacuugagg

SEQ ID NO: 423864 - RNA, 19 nt, Artificial Sequence
  Description of Artificial Sequence: Synthetic oligonucleotide
acaaucgucaccuuaagaa

SEQ ID NO: 423865 - RNA, 19 nt, Artificial Sequence
  Description of Artificial Sequence: Synthetic oligonucleotide
ucuaauuccuugaugcucu

SEQ ID NO: 423866 - RNA, 19 nt, Artificial Sequence
  Description of Artificial Sequence: Synthetic oligonucleotide
cauguaaucccuugguugg

SEQ ID NO: 423867 - RNA, 19 nt, Artificial Sequence
  Description of Artificial Sequence: Synthetic oligonucleotide
aaaaugccaacaugucaac

SEQ ID NO: 423868 - RNA, 19 nt, Artificial Sequence
  Description of Artificial Sequence: Synthetic oligonucleotide
uggugaaacagaaaguacu

SEQ ID NO: 423869 - RNA, 19 nt, Artificial Sequence
  Description of Artificial Sequence: Synthetic oligonucleotide
uaaucauuagcauggaaaa

SEQ ID NO: 423870 - RNA, 19 nt, Artificial Sequence
  Description of Artificial Sequence: Synthetic oligonucleotide
uuauucuuacuaauaagaa

SEQ ID NO: 423871 - RNA, 19 nt, Artificial Sequence
  Description of Artificial Sequence: Synthetic oligonucleotide
uauauaucauaguugcaca

SEQ ID NO: 423872 - RNA, 19 nt, Artificial Sequence
  Description of Artificial Sequence: Synthetic oligonucleotide
ggauuuucaacauuaugcg

SEQ ID NO: 423873 - RNA, 19 nt, Artificial Sequence
  Description of Artificial Sequence: Synthetic oligonucleotide
gauauguggaaccuuuggc

SEQ ID NO: 423874 - RNA, 19 nt, Artificial Sequence
  Description of Artificial Sequence: Synthetic oligonucleotide
cagacaaucuucaaugccc

SEQ ID NO: 423875 - RNA, 19 nt, Artificial Sequence
  Description of Artificial Sequence: Synthetic oligonucleotide
uaauauaccuuagaagacc

SEQ ID NO: 423876 - RNA, 19 nt, Artificial Sequence
  Description of Artificial Sequence: Synthetic oligonucleotide
uuaaaggcuagguuuaccu

SEQ ID NO: 423877 - RNA, 19 nt, Artificial Sequence
  Description of Artificial Sequence: Synthetic oligonucleotide
auuguugacaucaggauag

SEQ ID NO: 423878 - RNA, 19 nt, Artificial Sequence
  Description of Artificial Sequence: Synthetic oligonucleotide
uccuauuacuacaugcaag

SEQ ID NO: 423879 - RNA, 19 nt, Artificial Sequence
  Description of Artificial Sequence: Synthetic oligonucleotide
ugguuucugauacacaugu

SEQ ID NO: 423880 - RNA, 19 nt, Artificial Sequence
  Description of Artificial Sequence: Synthetic oligonucleotide
acaaaacuugcucugaagu

SEQ ID NO: 423881 - RNA, 19 nt, Artificial Sequence
  Description of Artificial Sequence: Synthetic oligonucleotide
gaacauagcgcccacagca

SEQ ID NO: 423882 - RNA, 19 nt, Artificial Sequence
  Description of Artificial Sequence: Synthetic oligonucleotide
aacauuaugcguaaggaaa

SEQ ID NO: 423883 - RNA, 19 nt, Artificial Sequence
  Description of Artificial Sequence: Synthetic oligonucleotide
aaaacuugcucugaagugu

SEQ ID NO: 423884 - RNA, 19 nt, Artificial Sequence
  Description of Artificial Sequence: Synthetic oligonucleotide
agagguaaucauuagcaug

SEQ ID NO: 423885 - RNA, 19 nt, Artificial Sequence
  Description of Artificial Sequence: Synthetic oligonucleotide
guucuaguuaccaagaaac

SEQ ID NO: 423886 - RNA, 19 nt, Artificial Sequence
  Description of Artificial Sequence: Synthetic oligonucleotide
cgauguaugacucauaugg

SEQ ID NO: 423887 - RNA, 19 nt, Artificial Sequence
  Description of Artificial Sequence: Synthetic oligonucleotide
uuaaagugccaucauagua

SEQ ID NO: 423888 - RNA, 19 nt, Artificial Sequence
  Description of Artificial Sequence: Synthetic oligonucleotide
ucaacaagcacgagguuca

SEQ ID NO: 423889 - RNA, 19 nt, Artificial Sequence
  Description of Artificial Sequence: Synthetic oligonucleotide
ucuccuauuacuacaugca

SEQ ID NO: 423890 - RNA, 19 nt, Artificial Sequence
  Description of Artificial Sequence: Synthetic oligonucleotide
auuacaaauaccagccuac

SEQ ID NO: 423891 - RNA, 19 nt, Artificial Sequence
  Description of Artificial Sequence: Synthetic oligonucleotide
aaaguaccuuacugaaaac

SEQ ID NO: 423892 - RNA, 19 nt, Artificial Sequence
  Description of Artificial Sequence: Synthetic oligonucleotide
gucuuaucggaauagauuc

SEQ ID NO: 423893 - RNA, 19 nt, Artificial Sequence
  Description of Artificial Sequence: Synthetic oligonucleotide
aauuguugacaucaggaua

SEQ ID NO: 423894 - RNA, 19 nt, Artificial Sequence
  Description of Artificial Sequence: Synthetic oligonucleotide
ucuaguuaccaagaaacug

SEQ ID NO: 423895 - RNA, 19 nt, Artificial Sequence
  Description of Artificial Sequence: Synthetic oligonucleotide
auaguugcacaacuugagg

SEQ ID NO: 423896 - RNA, 19 nt, Artificial Sequence
  Description of Artificial Sequence: Synthetic oligonucleotide
aaauguauguacacaaaga

SEQ ID NO: 423897 - RNA, 19 nt, Artificial Sequence
  Description of Artificial Sequence: Synthetic oligonucleotide
agguuuacaaauucaugag

SEQ ID NO: 423898 - RNA, 19 nt, Artificial Sequence
  Description of Artificial Sequence: Synthetic oligonucleotide
gaaaauaccucagacggac

SEQ ID NO: 423899 - RNA, 19 nt, Artificial Sequence
  Description of Artificial Sequence: Synthetic oligonucleotide
uuuuacuggugcaccaucc

SEQ ID NO: 423900 - RNA, 19 nt, Artificial Sequence
  Description of Artificial Sequence: Synthetic oligonucleotide
ugacaugccauguaauccc

SEQ ID NO: 423901 - RNA, 19 nt, Artificial Sequence
  Description of Artificial Sequence: Synthetic oligonucleotide
ucaacauuaugcguaagga

SEQ ID NO: 423902 - RNA, 19 nt, Artificial Sequence
  Description of Artificial Sequence: Synthetic oligonucleotide
uugaacuagccaauguucu

SEQ ID NO: 423903 - RNA, 19 nt, Artificial Sequence
  Description of Artificial Sequence: Synthetic oligonucleotide
uagccaauguucuaguuac

SEQ ID NO: 423904 - RNA, 19 nt, Artificial Sequence
  Description of Artificial Sequence: Synthetic oligonucleotide
uggccauuuuauuaaagug

SEQ ID NO: 423905 - RNA, 19 nt, Artificial Sequence
  Description of Artificial Sequence: Synthetic oligonucleotide
aguaccuucugucuuccuc

SEQ ID NO: 423906 - RNA, 19 nt, Artificial Sequence
  Description of Artificial Sequence: Synthetic oligonucleotide
gauucaaauuuagaaggcc

SEQ ID NO: 423907 - RNA, 19 nt, Artificial Sequence
  Description of Artificial Sequence: Synthetic oligonucleotide
cauaguugcacaacuugag

SEQ ID NO: 423908 - RNA, 19 nt, Artificial Sequence
  Description of Artificial Sequence: Synthetic oligonucleotide
aaauuacaaauaccagccu

SEQ ID NO: 423909 - RNA, 19 nt, Artificial Sequence
  Description of Artificial Sequence: Synthetic oligonucleotide
aaauaccucagacggacau

SEQ ID NO: 423910 - RNA, 19 nt, Artificial Sequence
  Description of Artificial Sequence: Synthetic oligonucleotide
aaaggcuagguuuaccuuu

SEQ ID NO: 423911 - RNA, 19 nt, Artificial Sequence
  Description of Artificial Sequence: Synthetic oligonucleotide
ugaauuuaguguuuuguuu

SEQ ID NO: 423912 - RNA, 19 nt, Artificial Sequence
  Description of Artificial Sequence: Synthetic oligonucleotide
aagaucguacucuuucacu

SEQ ID NO: 423913 - RNA, 19 nt, Artificial Sequence
  Description of Artificial Sequence: Synthetic oligonucleotide
uuauuaaagugccaucaua

SEQ ID NO: 423914 - RNA, 19 nt, Artificial Sequence
  Description of Artificial Sequence: Synthetic oligonucleotide
caugaaaugguagauccag

SEQ ID NO: 423915 - RNA, 19 nt, Artificial Sequence
  Description of Artificial Sequence: Synthetic oligonucleotide
uguucuaguuaccaagaaa

SEQ ID NO: 423916 - RNA, 19 nt, Artificial Sequence
  Description of Artificial Sequence: Synthetic oligonucleotide
cccacuuccauuuuaauag

SEQ ID NO: 423917 - RNA, 19 nt, Artificial Sequence
  Description of Artificial Sequence: Synthetic oligonucleotide
aaguaccuuacugaaaacu

SEQ ID NO: 423918 - RNA, 19 nt, Artificial Sequence
  Description of Artificial Sequence: Synthetic oligonucleotide
accucagacggacauuggc

SEQ ID NO: 423919 - RNA, 19 nt, Artificial Sequence
  Description of Artificial Sequence: Synthetic oligonucleotide
agaagccgugccuuaaaac

SEQ ID NO: 423920 - RNA, 19 nt, Artificial Sequence
  Description of Artificial Sequence: Synthetic oligonucleotide
aagcuggugaacaauaaga

SEQ ID NO: 423921 - RNA, 19 nt, Artificial Sequence
  Description of Artificial Sequence: Synthetic oligonucleotide
gugccuuaaaacuuugcag

SEQ ID NO: 423922 - RNA, 19 nt, Artificial Sequence
  Description of Artificial Sequence: Synthetic oligonucleotide
ucugccuacaucucgggcu

SEQ ID NO: 423923 - RNA, 19 nt, Artificial Sequence
  Description of Artificial Sequence: Synthetic oligonucleotide
gacaaaacuugcucugaag

SEQ ID NO: 423924 - RNA, 19 nt, Artificial Sequence
  Description of Artificial Sequence: Synthetic oligonucleotide
auguaugacucauauggcu

SEQ ID NO: 423925 - RNA, 19 nt, Artificial Sequence
  Description of Artificial Sequence: Synthetic oligonucleotide
agaacccacauggugaaac

SEQ ID NO: 423926 - RNA, 19 nt, Artificial Sequence
  Description of Artificial Sequence: Synthetic oligonucleotide
ugauacuuugacuuauuau

SEQ ID NO: 423927 - RNA, 19 nt, Artificial Sequence
  Description of Artificial Sequence: Synthetic oligonucleotide
cuuucgccaucauuaaggg

SEQ ID NO: 423928 - RNA, 19 nt, Artificial Sequence
  Description of Artificial Sequence: Synthetic oligonucleotide
aaucaugagugaacauagc

SEQ ID NO: 423929 - RNA, 19 nt, Artificial Sequence
  Description of Artificial Sequence: Synthetic oligonucleotide
uuacaugaguuugaacuag

SEQ ID NO: 423930 - RNA, 19 nt, Artificial Sequence
  Description of Artificial Sequence: Synthetic oligonucleotide
uguaugacucauauggcuu

SEQ ID NO: 423931 - RNA, 19 nt, Artificial Sequence
  Description of Artificial Sequence: Synthetic oligonucleotide
acauuaguguaucugcgcu

SEQ ID NO: 423932 - RNA, 19 nt, Artificial Sequence
  Description of Artificial Sequence: Synthetic oligonucleotide
agauucaaaucgcugguga

SEQ ID NO: 423933 - RNA, 19 nt, Artificial Sequence
  Description of Artificial Sequence: Synthetic oligonucleotide
auuaaagugccaucauagu

SEQ ID NO: 423934 - RNA, 19 nt, Artificial Sequence
  Description of Artificial Sequence: Synthetic oligonucleotide
uuaaauagaguaggugaca

SEQ ID NO: 423935 - RNA, 19 nt, Artificial Sequence
  Description of Artificial Sequence: Synthetic oligonucleotide
uaagaucguacucuuucac

SEQ ID NO: 423936 - RNA, 19 nt, Artificial Sequence
  Description of Artificial Sequence: Synthetic oligonucleotide
gaacuagccaauguucuag

SEQ ID NO: 423937 - RNA, 19 nt, Artificial Sequence
  Description of Artificial Sequence: Synthetic oligonucleotide
aagguuacugacaaaacuu

SEQ ID NO: 423938 - RNA, 19 nt, Artificial Sequence
  Description of Artificial Sequence: Synthetic oligonucleotide
auaagggcugcuuagguuu

SEQ ID NO: 423939 - RNA, 19 nt, Artificial Sequence
  Description of Artificial Sequence: Synthetic oligonucleotide
aguugcacaacuugaggcu

SEQ ID NO: 423940 - RNA, 19 nt, Artificial Sequence
  Description of Artificial Sequence: Synthetic oligonucleotide
aaugguagauccagaagca

SEQ ID NO: 423941 - RNA, 19 nt, Artificial Sequence
  Description of Artificial Sequence: Synthetic oligonucleotide
gaggauaaggaagacuagc

SEQ ID NO: 423942 - RNA, 19 nt, Artificial Sequence
  Description of Artificial Sequence: Synthetic oligonucleotide
uucuaguuaccaagaaacu

SEQ ID NO: 423943 - RNA, 19 nt, Artificial Sequence
  Description of Artificial Sequence: Synthetic oligonucleotide
ugaggauaaggaagacuag

SEQ ID NO: 423944 - RNA, 19 nt, Artificial Sequence
  Description of Artificial Sequence: Synthetic oligonucleotide
ucuaugugcagacaaucuu

SEQ ID NO: 423945 - RNA, 19 nt, Artificial Sequence
  Description of Artificial Sequence: Synthetic oligonucleotide
auuggcaccgauguaugac

SEQ ID NO: 423946 - RNA, 19 nt, Artificial Sequence
  Description of Artificial Sequence: Synthetic oligonucleotide
gugaacauagcgcccacag

SEQ ID NO: 423947 - RNA, 19 nt, Artificial Sequence
  Description of Artificial Sequence: Synthetic oligonucleotide
uaccagccuacucacauga

SEQ ID NO: 423948 - RNA, 19 nt, Artificial Sequence
  Description of Artificial Sequence: Synthetic oligonucleotide
acuguagauaaacgcagca

SEQ ID NO: 423949 - RNA, 19 nt, Artificial Sequence
  Description of Artificial Sequence: Synthetic oligonucleotide
caaauaccagccuacucac

SEQ ID NO: 423950 - RNA, 19 nt, Artificial Sequence
  Description of Artificial Sequence: Synthetic oligonucleotide
gccaugaaaugguagaucc

SEQ ID NO: 423951 - RNA, 19 nt, Artificial Sequence
  Description of Artificial Sequence: Synthetic oligonucleotide
auuuucaacauuaugcgua

SEQ ID NO: 423952 - RNA, 19 nt, Artificial Sequence
  Description of Artificial Sequence: Synthetic oligonucleotide
auaagaucguacucuuuca

SEQ ID NO: 423953 - RNA, 19 nt, Artificial Sequence
  Description of Artificial Sequence: Synthetic oligonucleotide
ugcucuagccucuuuccag

SEQ ID NO: 423954 - RNA, 19 nt, Artificial Sequence
  Description of Artificial Sequence: Synthetic oligonucleotide
aaauagguuuaaagaaaug

SEQ ID NO: 423955 - RNA, 19 nt, Artificial Sequence
  Description of Artificial Sequence: Synthetic oligonucleotide
ucaaauuuagaaggccaug

SEQ ID NO: 423956 - RNA, 19 nt, Artificial Sequence
  Description of Artificial Sequence: Synthetic oligonucleotide
uuugcacauagagaauaag

SEQ ID NO: 423957 - RNA, 19 nt, Artificial Sequence
  Description of Artificial Sequence: Synthetic oligonucleotide
auucaaauuuagaaggcca

SEQ ID NO: 423958 - RNA, 19 nt, Artificial Sequence
  Description of Artificial Sequence: Synthetic oligonucleotide
uaaauagaguaggugacau

SEQ ID NO: 423959 - RNA, 19 nt, Artificial Sequence
  Description of Artificial Sequence: Synthetic oligonucleotide
gaauaagagguaaucauua

SEQ ID NO: 423960 - RNA, 19 nt, Artificial Sequence
  Description of Artificial Sequence: Synthetic oligonucleotide
agauccagaagcaccuacc

SEQ ID NO: 423961 - RNA, 19 nt, Artificial Sequence
  Description of Artificial Sequence: Synthetic oligonucleotide
ucuuaucggaauagauucu

SEQ ID NO: 423962 - RNA, 19 nt, Artificial Sequence
  Description of Artificial Sequence: Synthetic oligonucleotide
aagcaccuaccauucaaca

SEQ ID NO: 423963 - RNA, 19 nt, Artificial Sequence
  Description of Artificial Sequence: Synthetic oligonucleotide
gauguaugacucauauggc

SEQ ID NO: 423964 - RNA, 19 nt, Artificial Sequence
  Description of Artificial Sequence: Synthetic oligonucleotide
gaagccgugccuuaaaacu

SEQ ID NO: 423965 - RNA, 19 nt, Artificial Sequence
  Description of Artificial Sequence: Synthetic oligonucleotide
auauaucauaguugcacaa

SEQ ID NO: 423966 - RNA, 19 nt, Artificial Sequence
  Description of Artificial Sequence: Synthetic oligonucleotide
cuagguuuaccuuuccuga

SEQ ID NO: 423967 - RNA, 19 nt, Artificial Sequence
  Description of Artificial Sequence: Synthetic oligonucleotide
agcacuugaggauaaggaa

SEQ ID NO: 423968 - RNA, 19 nt, Artificial Sequence
  Description of Artificial Sequence: Synthetic oligonucleotide
agaucguacucuuucacua

SEQ ID NO: 423969 - RNA, 19 nt, Artificial Sequence
  Description of Artificial Sequence: Synthetic oligonucleotide
aaucgucaccuuaagaaaa

SEQ ID NO: 423970 - RNA, 19 nt, Artificial Sequence
  Description of Artificial Sequence: Synthetic oligonucleotide
gucaacuccacccugcaga

SEQ ID NO: 423971 - RNA, 19 nt, Artificial Sequence
  Description of Artificial Sequence: Synthetic oligonucleotide
gcuuucgccaucauuaagg

SEQ ID NO: 423972 - RNA, 19 nt, Artificial Sequence
  Description of Artificial Sequence: Synthetic oligonucleotide
aguguaucugcgcucagau

SEQ ID NO: 423973 - RNA, 19 nt, Artificial Sequence
  Description of Artificial Sequence: Synthetic oligonucleotide
uaaggcuaguucuuucacu

SEQ ID NO: 423974 - RNA, 19 nt, Artificial Sequence
  Description of Artificial Sequence: Synthetic oligonucleotide
uacaaauaccagccuacuc

SEQ ID NO: 423975 - RNA, 19 nt, Artificial Sequence
  Description of Artificial Sequence: Synthetic oligonucleotide
aacuagccaauguucuagu

SEQ ID NO: 423976 - RNA, 19 nt, Artificial Sequence
  Description of Artificial Sequence: Synthetic oligonucleotide
aucguacucuuucacuaag

SEQ ID NO: 423977 - RNA, 19 nt, Artificial Sequence
  Description of Artificial Sequence: Synthetic oligonucleotide
aauucaauucuaauuccuu

SEQ ID NO: 423978 - RNA, 19 nt, Artificial Sequence
  Description of Artificial Sequence: Synthetic oligonucleotide
ugcuugaaguaccuucugu

SEQ ID NO: 423979 - RNA, 19 nt, Artificial Sequence
  Description of Artificial Sequence: Synthetic oligonucleotide
gauaaacgcagcacuugag

SEQ ID NO: 423980 - RNA, 19 nt, Artificial Sequence
  Description of Artificial Sequence: Synthetic oligonucleotide
auuaguguaucugcgcuca

SEQ ID NO: 423981 - RNA, 19 nt, Artificial Sequence
  Description of Artificial Sequence: Synthetic oligonucleotide
caauucuaauuccuugaug

SEQ ID NO: 423982 - RNA, 19 nt, Artificial Sequence
  Description of Artificial Sequence: Synthetic oligonucleotide
caguuguaacuccaugugc

SEQ ID NO: 423983 - RNA, 19 nt, Artificial Sequence
  Description of Artificial Sequence: Synthetic oligonucleotide
auagaagagauaguguuuu

SEQ ID NO: 423984 - RNA, 19 nt, Artificial Sequence
  Description of Artificial Sequence: Synthetic oligonucleotide
gugaacaauaagaucguac

SEQ ID NO: 423985 - RNA, 19 nt, Artificial Sequence
  Description of Artificial Sequence: Synthetic oligonucleotide
uugggucauacccugcuaa

SEQ ID NO: 423986 - RNA, 19 nt, Artificial Sequence
  Description of Artificial Sequence: Synthetic oligonucleotide
uggugaacaauaagaucgu

SEQ ID NO: 423987 - RNA, 19 nt, Artificial Sequence
  Description of Artificial Sequence: Synthetic oligonucleotide
aaucgcuggugaaaguuug

SEQ ID NO: 423988 - RNA, 19 nt, Artificial Sequence
  Description of Artificial Sequence: Synthetic oligonucleotide
accaucuuuagcucacuga

SEQ ID NO: 423989 - RNA, 19 nt, Artificial Sequence
  Description of Artificial Sequence: Synthetic oligonucleotide
ugugauuccggagauucaa

SEQ ID NO: 423990 - RNA, 19 nt, Artificial Sequence
  Description of Artificial Sequence: Synthetic oligonucleotide
caucuuuagcucacugagc

SEQ ID NO: 423991 - RNA, 19 nt, Artificial Sequence
  Description of Artificial Sequence: Synthetic oligonucleotide
caaauuuagaaggccauga

SEQ ID NO: 423992 - RNA, 19 nt, Artificial Sequence
  Description of Artificial Sequence: Synthetic oligonucleotide
ugcuuucgccaucauuaag

SEQ ID NO: 423993 - RNA, 19 nt, Artificial Sequence
  Description of Artificial Sequence: Synthetic oligonucleotide
ccaucuuuagcucacugag

SEQ ID NO: 423994 - RNA, 19 nt, Artificial Sequence
  Description of Artificial Sequence: Synthetic oligonucleotide
uuggcaccgauguaugacu

SEQ ID NO: 423995 - RNA, 19 nt, Artificial Sequence
  Description of Artificial Sequence: Synthetic oligonucleotide
aggcugguuaaauacaauu

SEQ ID NO: 423996 - RNA, 19 nt, Artificial Sequence
  Description of Artificial Sequence: Synthetic oligonucleotide
acauaagggcugcuuaggu

SEQ ID NO: 423997 - RNA, 19 nt, Artificial Sequence
  Description of Artificial Sequence: Synthetic oligonucleotide
uaaucccuugguuggaaaa

SEQ ID NO: 423998 - RNA, 19 nt, Artificial Sequence
  Description of Artificial Sequence: Synthetic oligonucleotide
cuuaucggaauagauucuc

SEQ ID NO: 423999 - RNA, 19 nt, Artificial Sequence
  Description of Artificial Sequence: Synthetic oligonucleotide
uacuguuuaugcugaugca

SEQ ID NO: 424000 - RNA, 19 nt, Artificial Sequence
  Description of Artificial Sequence: Synthetic oligonucleotide
auauaccuuagaagacccc

SEQ ID NO: 424001 - RNA, 19 nt, Artificial Sequence
  Description of Artificial Sequence: Synthetic oligonucleotide
aaugcccacuuccauuuua

SEQ ID NO: 424002 - RNA, 19 nt, Artificial Sequence
  Description of Artificial Sequence: Synthetic oligonucleotide
agaauaagagguaaucauu

SEQ ID NO: 424003 - RNA, 19 nt, Artificial Sequence
  Description of Artificial Sequence: Synthetic oligonucleotide
uguccuauucugccuacau

SEQ ID NO: 424004 - RNA, 19 nt, Artificial Sequence
  Description of Artificial Sequence: Synthetic oligonucleotide
ugggucauacccugcuaag

SEQ ID NO: 424005 - RNA, 19 nt, Artificial Sequence
  Description of Artificial Sequence: Synthetic oligonucleotide
ggcacuuacaugaagagaa

SEQ ID NO: 424006 - RNA, 19 nt, Artificial Sequence
  Description of Artificial Sequence: Synthetic oligonucleotide
gaauuguugacaucaggau

SEQ ID NO: 424007 - RNA, 19 nt, Artificial Sequence
  Description of Artificial Sequence: Synthetic oligonucleotide
agguuacugacaaaacuug

SEQ ID NO: 424008 - RNA, 19 nt, Artificial Sequence
  Description of Artificial Sequence: Synthetic oligonucleotide
agggcaacaucaaucucac

SEQ ID NO: 424009 - RNA, 19 nt, Artificial Sequence
  Description of Artificial Sequence: Synthetic oligonucleotide
aaauggacucaggcuguuc

SEQ ID NO: 424010 - RNA, 19 nt, Artificial Sequence
  Description of Artificial Sequence: Synthetic oligonucleotide
aaucccuugguuggaaaau

SEQ ID NO: 424011 - RNA, 19 nt, Artificial Sequence
  Description of Artificial Sequence: Synthetic oligonucleotide
ugcuuagguuuucucauuu

SEQ ID NO: 424012 - RNA, 19 nt, Artificial Sequence
  Description of Artificial Sequence: Synthetic oligonucleotide
ucuccuuuuacuggugcac

SEQ ID NO: 424013 - RNA, 19 nt, Artificial Sequence
  Description of Artificial Sequence: Synthetic oligonucleotide
uccggagauucaaaucgcu

SEQ ID NO: 424014 - RNA, 19 nt, Artificial Sequence
  Description of Artificial Sequence: Synthetic oligonucleotide
ucguacucuuucacuaagu

SEQ ID NO: 424015 - RNA, 19 nt, Artificial Sequence
  Description of Artificial Sequence: Synthetic oligonucleotide
cuguagauaaacgcagcac

SEQ ID NO: 424016 - RNA, 19 nt, Artificial Sequence
  Description of Artificial Sequence: Synthetic oligonucleotide
uuacuggugcaccauccau

SEQ ID NO: 424017 - RNA, 19 nt, Artificial Sequence
  Description of Artificial Sequence: Synthetic oligonucleotide
ugucaacuccacccugcag

SEQ ID NO: 424018 - RNA, 19 nt, Artificial Sequence
  Description of Artificial Sequence: Synthetic oligonucleotide
uucugccuacaucucgggc

SEQ ID NO: 424019 - RNA, 19 nt, Artificial Sequence
  Description of Artificial Sequence: Synthetic oligonucleotide
cacaucucucauugugggg

SEQ ID NO: 424020 - RNA, 19 nt, Artificial Sequence
  Description of Artificial Sequence: Synthetic oligonucleotide
cauuaguguaucugcgcuc

SEQ ID NO: 424021 - RNA, 19 nt, Artificial Sequence
  Description of Artificial Sequence: Synthetic oligonucleotide
uaccuuagaagaccccaaa

SEQ ID NO: 424022 - RNA, 19 nt, Artificial Sequence
  Description of Artificial Sequence: Synthetic oligonucleotide
ugaacuagccaauguucua

SEQ ID NO: 424023 - RNA, 19 nt, Artificial Sequence
  Description of Artificial Sequence: Synthetic oligonucleotide
aguaccuuacugaaaacuu

SEQ ID NO: 424024 - RNA, 19 nt, Artificial Sequence
  Description of Artificial Sequence: Synthetic oligonucleotide
cuuacuguuuaugcugaug

SEQ ID NO: 424025 - RNA, 19 nt, Artificial Sequence
  Description of Artificial Sequence: Synthetic oligonucleotide
ugggaccaucuuuagcuca

SEQ ID NO: 424026 - RNA, 19 nt, Artificial Sequence
  Description of Artificial Sequence: Synthetic oligonucleotide
cacauaagggcugcuuagg

SEQ ID NO: 424027 - RNA, 19 nt, Artificial Sequence
  Description of Artificial Sequence: Synthetic oligonucleotide
gaagcaccuaccauucaac

SEQ ID NO: 424028 - RNA, 19 nt, Artificial Sequence
  Description of Artificial Sequence: Synthetic oligonucleotide
acucacaugaaaauccuua

SEQ ID NO: 424029 - RNA, 19 nt, Artificial Sequence
  Description of Artificial Sequence: Synthetic oligonucleotide
acuacaugcaagugaccau

SEQ ID NO: 424030 - RNA, 19 nt, Artificial Sequence
  Description of Artificial Sequence: Synthetic oligonucleotide
agcacauaagggcugcuua

SEQ ID NO: 424031 - RNA, 19 nt, Artificial Sequence
  Description of Artificial Sequence: Synthetic oligonucleotide
auuacucuugucauugaaa

SEQ ID NO: 424032 - RNA, 19 nt, Artificial Sequence
  Description of Artificial Sequence: Synthetic oligonucleotide
agucuuaucggaauagauu

SEQ ID NO: 424033 - RNA, 19 nt, Artificial Sequence
  Description of Artificial Sequence: Synthetic oligonucleotide
caacauuaugcguaaggaa

SEQ ID NO: 424034 - RNA, 19 nt, Artificial Sequence
  Description of Artificial Sequence: Synthetic oligonucleotide
gagauucaaaucgcuggug

SEQ ID NO: 424035 - RNA, 19 nt, Artificial Sequence
  Description of Artificial Sequence: Synthetic oligonucleotide
accauccauuauuucauau

SEQ ID NO: 424036 - RNA, 19 nt, Artificial Sequence
  Description of Artificial Sequence: Synthetic oligonucleotide
uuguugacaucaggauagg

SEQ ID NO: 424037 - RNA, 19 nt, Artificial Sequence
  Description of Artificial Sequence: Synthetic oligonucleotide
caaucgucaccuuaagaaa

SEQ ID NO: 424038 - RNA, 19 nt, Artificial Sequence
  Description of Artificial Sequence: Synthetic oligonucleotide
acuggugcaccauccauua

SEQ ID NO: 424039 - RNA, 19 nt, Artificial Sequence
  Description of Artificial Sequence: Synthetic oligonucleotide
aacgcagcacuugaggaua

SEQ ID NO: 424040 - RNA, 19 nt, Artificial Sequence
  Description of Artificial Sequence: Synthetic oligonucleotide
ggacacgauauguggaacc

SEQ ID NO: 424041 - RNA, 19 nt, Artificial Sequence
  Description of Artificial Sequence: Synthetic oligonucleotide
guaagguuacugacaaaac

SEQ ID NO: 424042 - RNA, 19 nt, Artificial Sequence
  Description of Artificial Sequence: Synthetic oligonucleotide
uuuguccuauucugccuac

SEQ ID NO: 424043 - RNA, 19 nt, Artificial Sequence
  Description of Artificial Sequence: Synthetic oligonucleotide
aggugcuuuucuccacagg

SEQ ID NO: 424044 - RNA, 19 nt, Artificial Sequence
  Description of Artificial Sequence: Synthetic oligonucleotide
ccacauuaguguaucugcg

SEQ ID NO: 424045 - RNA, 19 nt, Artificial Sequence
  Description of Artificial Sequence: Synthetic oligonucleotide
uaauuccuugaugcucuag

SEQ ID NO: 424046 - RNA, 19 nt, Artificial Sequence
  Description of Artificial Sequence: Synthetic oligonucleotide
uaccucagacggacauugg

SEQ ID NO: 424047 - RNA, 19 nt, Artificial Sequence
  Description of Artificial Sequence: Synthetic oligonucleotide
aacuugaggcugguuaaau

SEQ ID NO: 424048 - RNA, 19 nt, Artificial Sequence
  Description of Artificial Sequence: Synthetic oligonucleotide
gguuuaccuuuccugaaac

SEQ ID NO: 424049 - RNA, 19 nt, Artificial Sequence
  Description of Artificial Sequence: Synthetic oligonucleotide
caguguuuccaagaaagca

SEQ ID NO: 424050 - RNA, 19 nt, Artificial Sequence
  Description of Artificial Sequence: Synthetic oligonucleotide
acauuaugcguaaggaaaa

SEQ ID NO: 424051 - RNA, 19 nt, Artificial Sequence
  Description of Artificial Sequence: Synthetic oligonucleotide
auaguaaaauagguuuaaa

SEQ ID NO: 424052 - RNA, 19 nt, Artificial Sequence
  Description of Artificial Sequence: Synthetic oligonucleotide
ugcuugcuggccauuuuau

SEQ ID NO: 424053 - RNA, 19 nt, Artificial Sequence
  Description of Artificial Sequence: Synthetic oligonucleotide
agacagagcuggacgcucc

SEQ ID NO: 424054 - RNA, 19 nt, Artificial Sequence
  Description of Artificial Sequence: Synthetic oligonucleotide
gaucguacucuuucacuaa

SEQ ID NO: 424055 - RNA, 19 nt, Artificial Sequence
  Description of Artificial Sequence: Synthetic oligonucleotide
gaacccacauggugaaaca

SEQ ID NO: 424056 - RNA, 19 nt, Artificial Sequence
  Description of Artificial Sequence: Synthetic oligonucleotide
aaaucgcuggugaaaguuu

SEQ ID NO: 424057 - RNA, 19 nt, Artificial Sequence
  Description of Artificial Sequence: Synthetic oligonucleotide
gauagguagcaagcuggug

SEQ ID NO: 424058 - RNA, 19 nt, Artificial Sequence
  Description of Artificial Sequence: Synthetic oligonucleotide
auguucuaguuaccaagaa

SEQ ID NO: 424059 - RNA, 19 nt, Artificial Sequence
  Description of Artificial Sequence: Synthetic oligonucleotide
uggcuacaguucuuguucu

SEQ ID NO: 424060 - RNA, 19 nt, Artificial Sequence
  Description of Artificial Sequence: Synthetic oligonucleotide
cagccuacucacaugaaaa

SEQ ID NO: 424061 - RNA, 19 nt, Artificial Sequence
  Description of Artificial Sequence: Synthetic oligonucleotide
aaaauaccucagacggaca

SEQ ID NO: 424062 - RNA, 19 nt, Artificial Sequence
  Description of Artificial Sequence: Synthetic oligonucleotide
cuagccaauguucuaguua

SEQ ID NO: 424063 - RNA, 19 nt, Artificial Sequence
  Description of Artificial Sequence: Synthetic oligonucleotide
cuccuuuuacuggugcacc

SEQ ID NO: 424064 - RNA, 19 nt, Artificial Sequence
  Description of Artificial Sequence: Synthetic oligonucleotide
uucaccucuuggcuacagu

SEQ ID NO: 424065 - RNA, 19 nt, Artificial Sequence
  Description of Artificial Sequence: Synthetic oligonucleotide
gguuacugacaaaacuugc

SEQ ID NO: 424066 - RNA, 19 nt, Artificial Sequence
  Description of Artificial Sequence: Synthetic oligonucleotide
gcugggaccaucuuuagcu

SEQ ID NO: 424067 - RNA, 19 nt, Artificial Sequence
  Description of Artificial Sequence: Synthetic oligonucleotide
gcagcuuaagaauucucca

SEQ ID NO: 424068 - RNA, 19 nt, Artificial Sequence
  Description of Artificial Sequence: Synthetic oligonucleotide
auagagaauaagagguaau

SEQ ID NO: 424069 - RNA, 19 nt, Artificial Sequence
  Description of Artificial Sequence: Synthetic oligonucleotide
agaaaauaccucagacgga

SEQ ID NO: 424070 - RNA, 19 nt, Artificial Sequence
  Description of Artificial Sequence: Synthetic oligonucleotide
gaacagucuuaucggaaua

SEQ ID NO: 424071 - RNA, 19 nt, Artificial Sequence
  Description of Artificial Sequence: Synthetic oligonucleotide
cuggccauuuuauuaaagu

SEQ ID NO: 424072 - RNA, 19 nt, Artificial Sequence
  Description of Artificial Sequence: Synthetic oligonucleotide
augucaacuccacccugca

SEQ ID NO: 424073 - RNA, 19 nt, Artificial Sequence
  Description of Artificial Sequence: Synthetic oligonucleotide
cugccuacaucucgggcug

SEQ ID NO: 424074 - RNA, 19 nt, Artificial Sequence
  Description of Artificial Sequence: Synthetic oligonucleotide
gagaagccgugccuuaaaa

SEQ ID NO: 424075 - RNA, 19 nt, Artificial Sequence
  Description of Artificial Sequence: Synthetic oligonucleotide
ggucauacccugcuaagaa

SEQ ID NO: 424076 - RNA, 19 nt, Artificial Sequence
  Description of Artificial Sequence: Synthetic oligonucleotide
uggcaccgauguaugacuc

SEQ ID NO: 424077 - RNA, 19 nt, Artificial Sequence
  Description of Artificial Sequence: Synthetic oligonucleotide
cuuucuugaucaguuguaa

SEQ ID NO: 424078 - RNA, 19 nt, Artificial Sequence
  Description of Artificial Sequence: Synthetic oligonucleotide
acuagccaauguucuaguu

SEQ ID NO: 424079 - RNA, 19 nt, Artificial Sequence
  Description of Artificial Sequence: Synthetic oligonucleotide
gcagcacuugaggauaagg

SEQ ID NO: 424080 - RNA, 19 nt, Artificial Sequence
  Description of Artificial Sequence: Synthetic oligonucleotide
agccaauguucuaguuacc

SEQ ID NO: 424081 - RNA, 19 nt, Artificial Sequence
  Description of Artificial Sequence: Synthetic oligonucleotide
cgauauguggaaccuuugg

SEQ ID NO: 424082 - RNA, 19 nt, Artificial Sequence
  Description of Artificial Sequence: Synthetic oligonucleotide
aguucuccggguaaggcua

SEQ ID NO: 424083 - RNA, 19 nt, Artificial Sequence
  Description of Artificial Sequence: Synthetic oligonucleotide
ccuauuacuacaugcaagu

SEQ ID NO: 424084 - RNA, 19 nt, Artificial Sequence
  Description of Artificial Sequence: Synthetic oligonucleotide
guauuacucuugucauuga

SEQ ID NO: 424085 - RNA, 19 nt, Artificial Sequence
  Description of Artificial Sequence: Synthetic oligonucleotide
cuccuauuacuacaugcaa

SEQ ID NO: 424086 - RNA, 19 nt, Artificial Sequence
  Description of Artificial Sequence: Synthetic oligonucleotide
ccaaaaugccaacauguca

SEQ ID NO: 424087 - RNA, 19 nt, Artificial Sequence
  Description of Artificial Sequence: Synthetic oligonucleotide
ccugugauuccggagauuc

SEQ ID NO: 424088 - RNA, 19 nt, Artificial Sequence
  Description of Artificial Sequence: Synthetic oligonucleotide
gagucaguucuccggguaa

SEQ ID NO: 424089 - RNA, 19 nt, Artificial Sequence
  Description of Artificial Sequence: Synthetic oligonucleotide
ccucagaaaguaagguuac

SEQ ID NO: 424090 - RNA, 19 nt, Artificial Sequence
  Description of Artificial Sequence: Synthetic oligonucleotide
caggacacgauauguggaa

SEQ ID NO: 424091 - RNA, 19 nt, Artificial Sequence
  Description of Artificial Sequence: Synthetic oligonucleotide
caccuaccauucaacacca

SEQ ID NO: 424092 - RNA, 19 nt, Artificial Sequence
  Description of Artificial Sequence: Synthetic oligonucleotide
cugggaccaucuuuagcuc

SEQ ID NO: 424093 - RNA, 19 nt, Artificial Sequence
  Description of Artificial Sequence: Synthetic oligonucleotide
acaugcaagugaccaugaa

SEQ ID NO: 424094 - RNA, 19 nt, Artificial Sequence
  Description of Artificial Sequence: Synthetic oligonucleotide
ucgcuggugaaaguuuguc

SEQ ID NO: 424095 - RNA, 19 nt, Artificial Sequence
  Description of Artificial Sequence: Synthetic oligonucleotide
cucuaugugcagacaaucu

SEQ ID NO: 424096 - RNA, 19 nt, Artificial Sequence
  Description of Artificial Sequence: Synthetic oligonucleotide
accuacaaauucaauucua

SEQ ID NO: 424097 - RNA, 19 nt, Artificial Sequence
  Description of Artificial Sequence: Synthetic oligonucleotide
gacacgauauguggaaccu

SEQ ID NO: 424098 - RNA, 19 nt, Artificial Sequence
  Description of Artificial Sequence: Synthetic oligonucleotide
cuacucacaugaaaauccu

SEQ ID NO: 424099 - RNA, 19 nt, Artificial Sequence
  Description of Artificial Sequence: Synthetic oligonucleotide
ggugaaaguuuguccucug

SEQ ID NO: 424100 - RNA, 19 nt, Artificial Sequence
  Description of Artificial Sequence: Synthetic oligonucleotide
gagugaacauagcgcccac

SEQ ID NO: 424101 - RNA, 19 nt, Artificial Sequence
  Description of Artificial Sequence: Synthetic oligonucleotide
uguuucuguuguggugcug

SEQ ID NO: 424102 - RNA, 19 nt, Artificial Sequence
  Description of Artificial Sequence: Synthetic oligonucleotide
uaucugcgcucagaugacu

SEQ ID NO: 424103 - RNA, 19 nt, Artificial Sequence
  Description of Artificial Sequence: Synthetic oligonucleotide
guaaucccuugguuggaaa

SEQ ID NO: 424104 - RNA, 19 nt, Artificial Sequence
  Description of Artificial Sequence: Synthetic oligonucleotide
aucgucaccuuaagaaaau

SEQ ID NO: 424105 - RNA, 19 nt, Artificial Sequence
  Description of Artificial Sequence: Synthetic oligonucleotide
acgauauguggaaccuuug

SEQ ID NO: 424106 - RNA, 19 nt, Artificial Sequence
  Description of Artificial Sequence: Synthetic oligonucleotide
auaccuuagaagaccccaa

SEQ ID NO: 424107 - RNA, 19 nt, Artificial Sequence
  Description of Artificial Sequence: Synthetic oligonucleotide
gugucaaggaauacuggua

SEQ ID NO: 424108 - RNA, 19 nt, Artificial Sequence
  Description of Artificial Sequence: Synthetic oligonucleotide
gguaaucauuagcauggaa

SEQ ID NO: 424109 - RNA, 19 nt, Artificial Sequence
  Description of Artificial Sequence: Synthetic oligonucleotide
auccauuauuucauauuua

SEQ ID NO: 424110 - RNA, 19 nt, Artificial Sequence
  Description of Artificial Sequence: Synthetic oligonucleotide
ggagauucaaaucgcuggu

SEQ ID NO: 424111 - RNA, 19 nt, Artificial Sequence
  Description of Artificial Sequence: Synthetic oligonucleotide
agugaacauagcgcccaca

SEQ ID NO: 424112 - RNA, 19 nt, Artificial Sequence
  Description of Artificial Sequence: Synthetic oligonucleotide
guaucugcgcucagaugac

SEQ ID NO: 424113 - RNA, 19 nt, Artificial Sequence
  Description of Artificial Sequence: Synthetic oligonucleotide
ucgucaccuuaagaaaaua

SEQ ID NO: 424114 - RNA, 19 nt, Artificial Sequence
  Description of Artificial Sequence: Synthetic oligonucleotide
gguagauccagaagcaccu

SEQ ID NO: 424115 - RNA, 19 nt, Artificial Sequence
  Description of Artificial Sequence: Synthetic oligonucleotide
cuugaggauaaggaagacu

SEQ ID NO: 424116 - RNA, 19 nt, Artificial Sequence
  Description of Artificial Sequence: Synthetic oligonucleotide
cguacucuuucacuaaguc

SEQ ID NO: 424117 - RNA, 19 nt, Artificial Sequence
  Description of Artificial Sequence: Synthetic oligonucleotide
cacgauauguggaaccuuu

SEQ ID NO: 424118 - RNA, 19 nt, Artificial Sequence
  Description of Artificial Sequence: Synthetic oligonucleotide
ugcccacuuccauuuuaau

SEQ ID NO: 424119 - RNA, 19 nt, Artificial Sequence
  Description of Artificial Sequence: Synthetic oligonucleotide
caaacucuaugugcagaca

SEQ ID NO: 424120 - RNA, 19 nt, Artificial Sequence
  Description of Artificial Sequence: Synthetic oligonucleotide
gcuggccauuuuauuaaag

SEQ ID NO: 424121 - RNA, 19 nt, Artificial Sequence
  Description of Artificial Sequence: Synthetic oligonucleotide
gugaaaguuuguccucugu

SEQ ID NO: 424122 - RNA, 19 nt, Artificial Sequence
  Description of Artificial Sequence: Synthetic oligonucleotide
cagucuuaucggaauagau

SEQ ID NO: 424123 - RNA, 19 nt, Artificial Sequence
  Description of Artificial Sequence: Synthetic oligonucleotide
cagacagagcuggacgcuc

SEQ ID NO: 424124 - RNA, 19 nt, Artificial Sequence
  Description of Artificial Sequence: Synthetic oligonucleotide
guccaauuccugugaucuc

SEQ ID NO: 424125 - RNA, 19 nt, Artificial Sequence
  Description of Artificial Sequence: Synthetic oligonucleotide
gccuacucacaugaaaauc

SEQ ID NO: 424126 - RNA, 19 nt, Artificial Sequence
  Description of Artificial Sequence: Synthetic oligonucleotide
cugugauuccggagauuca

SEQ ID NO: 424127 - RNA, 19 nt, Artificial Sequence
  Description of Artificial Sequence: Synthetic oligonucleotide
gcugcuuagguuuucucau

SEQ ID NO: 424128 - RNA, 19 nt, Artificial Sequence
  Description of Artificial Sequence: Synthetic oligonucleotide
ccuauucugccuacaucuc

SEQ ID NO: 424129 - RNA, 19 nt, Artificial Sequence
  Description of Artificial Sequence: Synthetic oligonucleotide
cauuaagggcaacaucaau

SEQ ID NO: 424130 - RNA, 19 nt, Artificial Sequence
  Description of Artificial Sequence: Synthetic oligonucleotide
ggguaaggcuaguucuuuc

SEQ ID NO: 424131 - RNA, 19 nt, Artificial Sequence
  Description of Artificial Sequence: Synthetic oligonucleotide
guucuccggguaaggcuag

SEQ ID NO: 424132 - RNA, 19 nt, Artificial Sequence
  Description of Artificial Sequence: Synthetic oligonucleotide
caaugacaugccauguaau

SEQ ID NO: 424133 - RNA, 19 nt, Artificial Sequence
  Description of Artificial Sequence: Synthetic oligonucleotide
cauaagggcugcuuagguu

SEQ ID NO: 424134 - RNA, 19 nt, Artificial Sequence
  Description of Artificial Sequence: Synthetic oligonucleotide
aucgcuggugaaaguuugu

SEQ ID NO: 424135 - RNA, 19 nt, Artificial Sequence
  Description of Artificial Sequence: Synthetic oligonucleotide
cugcuuucgccaucauuaa

SEQ ID NO: 424136 - RNA, 19 nt, Artificial Sequence
  Description of Artificial Sequence: Synthetic oligonucleotide
caaaucgcuggugaaaguu

SEQ ID NO: 424137 - RNA, 19 nt, Artificial Sequence
  Description of Artificial Sequence: Synthetic oligonucleotide
ccgauguaugacucauaug

SEQ ID NO: 424138 - RNA, 19 nt, Artificial Sequence
  Description of Artificial Sequence: Synthetic oligonucleotide
acuagcagacagagcugga

SEQ ID NO: 424139 - RNA, 19 nt, Artificial Sequence
  Description of Artificial Sequence: Synthetic oligonucleotide
caucucgggcuguucugca

SEQ ID NO: 424140 - RNA, 19 nt, Artificial Sequence
  Description of Artificial Sequence: Synthetic oligonucleotide
gacaugccauguaaucccu

SEQ ID NO: 424141 - RNA, 19 nt, Artificial Sequence
  Description of Artificial Sequence: Synthetic oligonucleotide
ccaauguucuaguuaccaa

SEQ ID NO: 424142 - RNA, 19 nt, Artificial Sequence
  Description of Artificial Sequence: Synthetic oligonucleotide
ccaggacacgauaugugga

SEQ ID NO: 424143 - RNA, 19 nt, Artificial Sequence
  Description of Artificial Sequence: Synthetic oligonucleotide
acccugcuaagaacagucu

SEQ ID NO: 424144 - RNA, 19 nt, Artificial Sequence
  Description of Artificial Sequence: Synthetic oligonucleotide
uucucacaaucgucaccuu

SEQ ID NO: 424145 - RNA, 19 nt, Artificial Sequence
  Description of Artificial Sequence: Synthetic oligonucleotide
acacgauauguggaaccuu

SEQ ID NO: 424146 - RNA, 19 nt, Artificial Sequence
  Description of Artificial Sequence: Synthetic oligonucleotide
gugauuccggagauucaaa

SEQ ID NO: 424147 - RNA, 19 nt, Artificial Sequence
  Description of Artificial Sequence: Synthetic oligonucleotide
ggcaccgauguaugacuca

SEQ ID NO: 424148 - RNA, 19 nt, Artificial Sequence
  Description of Artificial Sequence: Synthetic oligonucleotide
agccgugccuuaaaacuuu

SEQ ID NO: 424149 - RNA, 19 nt, Artificial Sequence
  Description of Artificial Sequence: Synthetic oligonucleotide
ggguccaauuccugugauc

SEQ ID NO: 424150 - RNA, 19 nt, Artificial Sequence
  Description of Artificial Sequence: Synthetic oligonucleotide
ccgugccuuaaaacuuugc

SEQ ID NO: 424151 - RNA, 19 nt, Artificial Sequence
  Description of Artificial Sequence: Synthetic oligonucleotide
caccauccauuauuucaua

SEQ ID NO: 424152 - RNA, 19 nt, Artificial Sequence
  Description of Artificial Sequence: Synthetic oligonucleotide
ccagccuacucacaugaaa

SEQ ID NO: 424153 - RNA, 19 nt, Artificial Sequence
  Description of Artificial Sequence: Synthetic oligonucleotide
caacuugaggcugguuaaa

SEQ ID NO: 424154 - RNA, 19 nt, Artificial Sequence
  Description of Artificial Sequence: Synthetic oligonucleotide
caccagguugguuucugau

SEQ ID NO: 424155 - RNA, 19 nt, Artificial Sequence
  Description of Artificial Sequence: Synthetic oligonucleotide
ggcuagguuuaccuuuccu

SEQ ID NO: 424156 - RNA, 19 nt, Artificial Sequence
  Description of Artificial Sequence: Synthetic oligonucleotide
agacggacauuggcaccga

SEQ ID NO: 424157 - RNA, 19 nt, Artificial Sequence
  Description of Artificial Sequence: Synthetic oligonucleotide
guagauccagaagcaccua

SEQ ID NO: 424158 - RNA, 19 nt, Artificial Sequence
  Description of Artificial Sequence: Synthetic oligonucleotide
cugagucaguucuccgggu

SEQ ID NO: 424159 - RNA, 19 nt, Artificial Sequence
  Description of Artificial Sequence: Synthetic oligonucleotide
gcuccaggacacgauaugu

SEQ ID NO: 424160 - RNA, 19 nt, Artificial Sequence
  Description of Artificial Sequence: Synthetic oligonucleotide
ggcugcuuaaaggcuaggu

SEQ ID NO: 424161 - RNA, 19 nt, Artificial Sequence
  Description of Artificial Sequence: Synthetic oligonucleotide
ggauagguagcaagcuggu

SEQ ID NO: 424162 - RNA, 19 nt, Artificial Sequence
  Description of Artificial Sequence: Synthetic oligonucleotide
caccgauguaugacucaua

SEQ ID NO: 424163 - RNA, 19 nt, Artificial Sequence
  Description of Artificial Sequence: Synthetic oligonucleotide
gccgugccuuaaaacuuug

SEQ ID NO: 424164 - RNA, 19 nt, Artificial Sequence
  Description of Artificial Sequence: Synthetic oligonucleotide
gguuucugauacacaugua

SEQ ID NO: 424165 - RNA, 19 nt, Artificial Sequence
  Description of Artificial Sequence: Synthetic oligonucleotide
accagccuacucacaugaa

SEQ ID NO: 424166 - RNA, 19 nt, Artificial Sequence
  Description of Artificial Sequence: Synthetic oligonucleotide
acgcagcacuugaggauaa

SEQ ID NO: 424167 - RNA, 19 nt, Artificial Sequence
  Description of Artificial Sequence: Synthetic oligonucleotide
gacggacauuggcaccgau

SEQ ID NO: 424168 - RNA, 19 nt, Artificial Sequence
  Description of Artificial Sequence: Synthetic oligonucleotide
caacaagcacgagguucaa

SEQ ID NO: 424169 - RNA, 19 nt, Artificial Sequence
  Description of Artificial Sequence: Synthetic oligonucleotide
gggcaacaucaaucucaca

SEQ ID NO: 424170 - RNA, 19 nt, Artificial Sequence
  Description of Artificial Sequence: Synthetic oligonucleotide
ggcuacaguucuuguucuu

SEQ ID NO: 424171 - RNA, 19 nt, Artificial Sequence
  Description of Artificial Sequence: Synthetic oligonucleotide
ggaccaucuuuagcucacu

SEQ ID NO: 424172 - RNA, 19 nt, Artificial Sequence
  Description of Artificial Sequence: Synthetic oligonucleotide
gccuacaucucgggcuguu

SEQ ID NO: 424173 - RNA, 19 nt, Artificial Sequence
  Description of Artificial Sequence: Synthetic oligonucleotide
acaucaaucauacagaggc

SEQ ID NO: 424174 - RNA, 19 nt, Artificial Sequence
  Description of Artificial Sequence: Synthetic oligonucleotide
uaugguaagaucuuuaucc

SEQ ID NO: 424175 - RNA, 19 nt, Artificial Sequence
  Description of Artificial Sequence: Synthetic oligonucleotide
aucaacaccagccaagagc

SEQ ID NO: 424176 - RNA, 19 nt, Artificial Sequence
  Description of Artificial Sequence: Synthetic oligonucleotide
caaucuaucaacaccagcc

SEQ ID NO: 424177 - RNA, 19 nt, Artificial Sequence
  Description of Artificial Sequence: Synthetic oligonucleotide
uugacggguauacagaagg

SEQ ID NO: 424178 - RNA, 19 nt, Artificial Sequence
  Description of Artificial Sequence: Synthetic oligonucleotide
aagauccagagcuacaauc

SEQ ID NO: 424179 - RNA, 19 nt, Artificial Sequence
  Description of Artificial Sequence: Synthetic oligonucleotide
aauggcaccacccaugcug

SEQ ID NO: 424180 - RNA, 19 nt, Artificial Sequence
  Description of Artificial Sequence: Synthetic oligonucleotide
acuucgaagauccagagcu

SEQ ID NO: 424181 - RNA, 19 nt, Artificial Sequence
  Description of Artificial Sequence: Synthetic oligonucleotide
acuugaagguuuuaggacg

SEQ ID NO: 424182 - RNA, 19 nt, Artificial Sequence
  Description of Artificial Sequence: Synthetic oligonucleotide
auugacucaaaguacugac

SEQ ID NO: 424183 - RNA, 19 nt, Artificial Sequence
  Description of Artificial Sequence: Synthetic oligonucleotide
uuuaggacgaccacgcaag

SEQ ID NO: 424184 - RNA, 19 nt, Artificial Sequence
  Description of Artificial Sequence: Synthetic oligonucleotide
uucuccaugacuucgaaga

SEQ ID NO: 424185 - RNA, 19 nt, Artificial Sequence
  Description of Artificial Sequence: Synthetic oligonucleotide
caugcuauuaagugcaucc

SEQ ID NO: 424186 - RNA, 19 nt, Artificial Sequence
  Description of Artificial Sequence: Synthetic oligonucleotide
ucauacagaggccuaagag

SEQ ID NO: 424187 - RNA, 19 nt, Artificial Sequence
  Description of Artificial Sequence: Synthetic oligonucleotide
aaagguaccugacuggugu

SEQ ID NO: 424188 - RNA, 19 nt, Artificial Sequence
  Description of Artificial Sequence: Synthetic oligonucleotide
uguacucugcugaugauug

SEQ ID NO: 424189 - RNA, 19 nt, Artificial Sequence
  Description of Artificial Sequence: Synthetic oligonucleotide
ucuaucaacaccagccaag

SEQ ID NO: 424190 - RNA, 19 nt, Artificial Sequence
  Description of Artificial Sequence: Synthetic oligonucleotide
ugcccgaucagcaugacug

SEQ ID NO: 424191 - RNA, 19 nt, Artificial Sequence
  Description of Artificial Sequence: Synthetic oligonucleotide
ucaggaaccaacuaugaaa

SEQ ID NO: 424192 - RNA, 19 nt, Artificial Sequence
  Description of Artificial Sequence: Synthetic oligonucleotide
gauacgugcaguacaaccg

SEQ ID NO: 424193 - RNA, 19 nt, Artificial Sequence
  Description of Artificial Sequence: Synthetic oligonucleotide
auggccuaaaccuccaugg

SEQ ID NO: 424194 - RNA, 19 nt, Artificial Sequence
  Description of Artificial Sequence: Synthetic oligonucleotide
cuacuauggauuuggagcc

SEQ ID NO: 424195 - RNA, 19 nt, Artificial Sequence
  Description of Artificial Sequence: Synthetic oligonucleotide
ucugcaugcuauuaagugc

SEQ ID NO: 424196 - RNA, 19 nt, Artificial Sequence
  Description of Artificial Sequence: Synthetic oligonucleotide
ucuagaagaggcaagcguc

SEQ ID NO: 424197 - RNA, 19 nt, Artificial Sequence
  Description of Artificial Sequence: Synthetic oligonucleotide
ugccggaucaggaaagugg

SEQ ID NO: 424198 - RNA, 19 nt, Artificial Sequence
  Description of Artificial Sequence: Synthetic oligonucleotide
uucugcaugcuauuaagug

SEQ ID NO: 424199 - RNA, 19 nt, Artificial Sequence
  Description of Artificial Sequence: Synthetic oligonucleotide
agagcuacaauccuacacu

SEQ ID NO: 424200 - RNA, 19 nt, Artificial Sequence
  Description of Artificial Sequence: Synthetic oligonucleotide
guuaagacugggauaaagg

SEQ ID NO: 424201 - RNA, 19 nt, Artificial Sequence
  Description of Artificial Sequence: Synthetic oligonucleotide
ugcgauguauuuacaacag

SEQ ID NO: 424202 - RNA, 19 nt, Artificial Sequence
  Description of Artificial Sequence: Synthetic oligonucleotide
aagguuuuaggacgaccac

SEQ ID NO: 424203 - RNA, 19 nt, Artificial Sequence
  Description of Artificial Sequence: Synthetic oligonucleotide
uccauugacucaaaguacu

SEQ ID NO: 424204 - RNA, 19 nt, Artificial Sequence
  Description of Artificial Sequence: Synthetic oligonucleotide
uggauaauccccgaaacca

SEQ ID NO: 424205 - RNA, 19 nt, Artificial Sequence
  Description of Artificial Sequence: Synthetic oligonucleotide
ucuacagaggaacauggaa

SEQ ID NO: 424206 - RNA, 19 nt, Artificial Sequence
  Description of Artificial Sequence: Synthetic oligonucleotide
ucacuaacagccaggaaac

SEQ ID NO: 424207 - RNA, 19 nt, Artificial Sequence
  Description of Artificial Sequence: Synthetic oligonucleotide
ucgagggccgacaucaagg

SEQ ID NO: 424208 - RNA, 19 nt, Artificial Sequence
  Description of Artificial Sequence: Synthetic oligonucleotide
gaauaggacaacuaagaaa

SEQ ID NO: 424209 - RNA, 19 nt, Artificial Sequence
  Description of Artificial Sequence: Synthetic oligonucleotide
ugcgguaagaccugcaucu

SEQ ID NO: 424210 - RNA, 19 nt, Artificial Sequence
  Description of Artificial Sequence: Synthetic oligonucleotide
ucuggugcgauguauuuac

SEQ ID NO: 424211 - RNA, 19 nt, Artificial Sequence
  Description of Artificial Sequence: Synthetic oligonucleotide
uuggauaauccccgaaacc

SEQ ID NO: 424212 - RNA, 19 nt, Artificial Sequence
  Description of Artificial Sequence: Synthetic oligonucleotide
uacaauccuacacuguacu

SEQ ID NO: 424213 - RNA, 19 nt, Artificial Sequence
  Description of Artificial Sequence: Synthetic oligonucleotide
gucacuaacagccaggaaa

SEQ ID NO: 424214 - RNA, 19 nt, Artificial Sequence
  Description of Artificial Sequence: Synthetic oligonucleotide
acacgucacagaaagaugg

SEQ ID NO: 424215 - RNA, 19 nt, Artificial Sequence
  Description of Artificial Sequence: Synthetic oligonucleotide
aacagagcucaauguagag

SEQ ID NO: 424216 - RNA, 19 nt, Artificial Sequence
  Description of Artificial Sequence: Synthetic oligonucleotide
uuuuaggacgaccacgcaa

SEQ ID NO: 424217 - RNA, 19 nt, Artificial Sequence
  Description of Artificial Sequence: Synthetic oligonucleotide
agagauuggauaauccccg

SEQ ID NO: 424218 - RNA, 19 nt, Artificial Sequence
  Description of Artificial Sequence: Synthetic oligonucleotide
acuaacagccaggaaacac

SEQ ID NO: 424219 - RNA, 19 nt, Artificial Sequence
  Description of Artificial Sequence: Synthetic oligonucleotide
ugacuuuuguuucuccaug

SEQ ID NO: 424220 - RNA, 19 nt, Artificial Sequence
  Description of Artificial Sequence: Synthetic oligonucleotide
accggugucacauggcugg

SEQ ID NO: 424221 - RNA, 19 nt, Artificial Sequence
  Description of Artificial Sequence: Synthetic oligonucleotide
agaugagggcucaugaggc

SEQ ID NO: 424222 - RNA, 19 nt, Artificial Sequence
  Description of Artificial Sequence: Synthetic oligonucleotide
accauugagacucgggcag

SEQ ID NO: 424223 - RNA, 19 nt, Artificial Sequence
  Description of Artificial Sequence: Synthetic oligonucleotide
aaccauugagacucgggca

SEQ ID NO: 424224 - RNA, 19 nt, Artificial Sequence
  Description of Artificial Sequence: Synthetic oligonucleotide
caaccauugagacucgggc

SEQ ID NO: 424225 - RNA, 19 nt, Artificial Sequence
  Description of Artificial Sequence: Synthetic oligonucleotide
aacaguuaagacugggaua

SEQ ID NO: 424226 - RNA, 19 nt, Artificial Sequence
  Description of Artificial Sequence: Synthetic oligonucleotide
ugguuaaauucauucauua

SEQ ID NO: 424227 - RNA, 19 nt, Artificial Sequence
  Description of Artificial Sequence: Synthetic oligonucleotide
agacuuagaacaguuaaga

SEQ ID NO: 424228 - RNA, 19 nt, Artificial Sequence
  Description of Artificial Sequence: Synthetic oligonucleotide
uuagccuguggcuuugugc

SEQ ID NO: 424229 - RNA, 19 nt, Artificial Sequence
  Description of Artificial Sequence: Synthetic oligonucleotide
ggauaaagguaccugacug

SEQ ID NO: 424230 - RNA, 19 nt, Artificial Sequence
  Description of Artificial Sequence: Synthetic oligonucleotide
uuccauugacucaaaguac

SEQ ID NO: 424231 - RNA, 19 nt, Artificial Sequence
  Description of Artificial Sequence: Synthetic oligonucleotide
cacacauuggaauccuccg

SEQ ID NO: 424232 - RNA, 19 nt, Artificial Sequence
  Description of Artificial Sequence: Synthetic oligonucleotide
uuuugacggguauacagaa

SEQ ID NO: 424233 - RNA, 19 nt, Artificial Sequence
  Description of Artificial Sequence: Synthetic oligonucleotide
uccagagcuacaauccuac

SEQ ID NO: 424234 - RNA, 19 nt, Artificial Sequence
  Description of Artificial Sequence: Synthetic oligonucleotide
uaaagguugggagauauuu

SEQ ID NO: 424235 - RNA, 19 nt, Artificial Sequence
  Description of Artificial Sequence: Synthetic oligonucleotide
acgucgacaacuguggccg

SEQ ID NO: 424236 - RNA, 19 nt, Artificial Sequence
  Description of Artificial Sequence: Synthetic oligonucleotide
ugcuaguccaugauguuuc

SEQ ID NO: 424237 - RNA, 19 nt, Artificial Sequence
  Description of Artificial Sequence: Synthetic oligonucleotide
ugcauugcccaucccauga

SEQ ID NO: 424238 - RNA, 19 nt, Artificial Sequence
  Description of Artificial Sequence: Synthetic oligonucleotide
ugacggguauacagaaggg

SEQ ID NO: 424239 - RNA, 19 nt, Artificial Sequence
  Description of Artificial Sequence: Synthetic oligonucleotide
aguacugacuccacgggac

SEQ ID NO: 424240 - RNA, 19 nt, Artificial Sequence
  Description of Artificial Sequence: Synthetic oligonucleotide
gaagguuuuaggacgacca

SEQ ID NO: 424241 - RNA, 19 nt, Artificial Sequence
  Description of Artificial Sequence: Synthetic oligonucleotide
aaaccugugccggaucagg

SEQ ID NO: 424242 - RNA, 19 nt, Artificial Sequence
  Description of Artificial Sequence: Synthetic oligonucleotide
aguuaagacugggauaaag

SEQ ID NO: 424243 - RNA, 19 nt, Artificial Sequence
  Description of Artificial Sequence: Synthetic oligonucleotide
uuugacggguauacagaag

SEQ ID NO: 424244 - RNA, 19 nt, Artificial Sequence
  Description of Artificial Sequence: Synthetic oligonucleotide
ggcuacacgucacagaaag

SEQ ID NO: 424245 - RNA, 19 nt, Artificial Sequence
  Description of Artificial Sequence: Synthetic oligonucleotide
agaucauaaauaacaaaga

SEQ ID NO: 424246 - RNA, 19 nt, Artificial Sequence
  Description of Artificial Sequence: Synthetic oligonucleotide
auaauccccgaaaccagcc

SEQ ID NO: 424247 - RNA, 19 nt, Artificial Sequence
  Description of Artificial Sequence: Synthetic oligonucleotide
gacggguauacagaagggg

SEQ ID NO: 424248 - RNA, 19 nt, Artificial Sequence
  Description of Artificial Sequence: Synthetic oligonucleotide
acgaccacgcaagaaauuc

SEQ ID NO: 424249 - RNA, 19 nt, Artificial Sequence
  Description of Artificial Sequence: Synthetic oligonucleotide
acaauccuacacuguacuc

SEQ ID NO: 424250 - RNA, 19 nt, Artificial Sequence
  Description of Artificial Sequence: Synthetic oligonucleotide
uguacaucuggggaugccc

SEQ ID NO: 424251 - RNA, 19 nt, Artificial Sequence
  Description of Artificial Sequence: Synthetic oligonucleotide
cuaacagccaggaaacaca

SEQ ID NO: 424252 - RNA, 19 nt, Artificial Sequence
  Description of Artificial Sequence: Synthetic oligonucleotide
aucaaucauacagaggccu

SEQ ID NO: 424253 - RNA, 19 nt, Artificial Sequence
  Description of Artificial Sequence: Synthetic oligonucleotide
caugacuucgaagauccag

SEQ ID NO: 424254 - RNA, 19 nt, Artificial Sequence
  Description of Artificial Sequence: Synthetic oligonucleotide
ugugcauugcccaucccau

SEQ ID NO: 424255 - RNA, 19 nt, Artificial Sequence
  Description of Artificial Sequence: Synthetic oligonucleotide
agaacauccucaaggaaug

SEQ ID NO: 424256 - RNA, 19 nt, Artificial Sequence
  Description of Artificial Sequence: Synthetic oligonucleotide
gacucgggcagacucuagg

SEQ ID NO: 424257 - RNA, 19 nt, Artificial Sequence
  Description of Artificial Sequence: Synthetic oligonucleotide
aacacuagcccaaggaaaa

SEQ ID NO: 424258 - RNA, 19 nt, Artificial Sequence
  Description of Artificial Sequence: Synthetic oligonucleotide
cagagcuacaauccuacac

SEQ ID NO: 424259 - RNA, 19 nt, Artificial Sequence
  Description of Artificial Sequence: Synthetic oligonucleotide
ugcuauuaagugcauccau

SEQ ID NO: 424260 - RNA, 19 nt, Artificial Sequence
  Description of Artificial Sequence: Synthetic oligonucleotide
uccaaucuaucaacaccag

SEQ ID NO: 424261 - RNA, 19 nt, Artificial Sequence
  Description of Artificial Sequence: Synthetic oligonucleotide
agaaaagucccgcuuccgu

SEQ ID NO: 424262 - RNA, 19 nt, Artificial Sequence
  Description of Artificial Sequence: Synthetic oligonucleotide
gugcgauguauuuacaaca

SEQ ID NO: 424263 - RNA, 19 nt, Artificial Sequence
  Description of Artificial Sequence: Synthetic oligonucleotide
acgucacagaaagaugggc

SEQ ID NO: 424264 - RNA, 19 nt, Artificial Sequence
  Description of Artificial Sequence: Synthetic oligonucleotide
uucaggaaccaacuaugaa

SEQ ID NO: 424265 - RNA, 19 nt, Artificial Sequence
  Description of Artificial Sequence: Synthetic oligonucleotide
uguguuuaaccugggcugc

SEQ ID NO: 424266 - RNA, 19 nt, Artificial Sequence
  Description of Artificial Sequence: Synthetic oligonucleotide
uuagcugaugcugugugaa

SEQ ID NO: 424267 - RNA, 19 nt, Artificial Sequence
  Description of Artificial Sequence: Synthetic oligonucleotide
augagggcucaugaggccc

SEQ ID NO: 424268 - RNA, 19 nt, Artificial Sequence
  Description of Artificial Sequence: Synthetic oligonucleotide
uccuacacuguacucugcu

SEQ ID NO: 424269 - RNA, 19 nt, Artificial Sequence
  Description of Artificial Sequence: Synthetic oligonucleotide
cugcaugcuauuaagugca

SEQ ID NO: 424270 - RNA, 19 nt, Artificial Sequence
  Description of Artificial Sequence: Synthetic oligonucleotide
cuacagaggaacauggaaa

SEQ ID NO: 424271 - RNA, 19 nt, Artificial Sequence
  Description of Artificial Sequence: Synthetic oligonucleotide
caucaaucauacagaggcc

SEQ ID NO: 424272 - RNA, 19 nt, Artificial Sequence
  Description of Artificial Sequence: Synthetic oligonucleotide
aaauggcgugcccugggca

SEQ ID NO: 424273 - RNA, 19 nt, Artificial Sequence
  Description of Artificial Sequence: Synthetic oligonucleotide
ugcguggccacacugcggu

SEQ ID NO: 424274 - RNA, 19 nt, Artificial Sequence
  Description of Artificial Sequence: Synthetic oligonucleotide
ugugaacugcaauggcacc

SEQ ID NO: 424275 - RNA, 19 nt, Artificial Sequence
  Description of Artificial Sequence: Synthetic oligonucleotide
ucuuguuuacugacucacu

SEQ ID NO: 424276 - RNA, 19 nt, Artificial Sequence
  Description of Artificial Sequence: Synthetic oligonucleotide
agguuucgaaucuggccac

SEQ ID NO: 424277 - RNA, 19 nt, Artificial Sequence
  Description of Artificial Sequence: Synthetic oligonucleotide
gagcucaauguagagggag

SEQ ID NO: 424278 - RNA, 19 nt, Artificial Sequence
  Description of Artificial Sequence: Synthetic oligonucleotide
uuggcacaccuucaggaac

SEQ ID NO: 424279 - RNA, 19 nt, Artificial Sequence
  Description of Artificial Sequence: Synthetic oligonucleotide
uggagagggcuacacguca

SEQ ID NO: 424280 - RNA, 19 nt, Artificial Sequence
  Description of Artificial Sequence: Synthetic oligonucleotide
cuacaauccuacacuguac

SEQ ID NO: 424281 - RNA, 19 nt, Artificial Sequence
  Description of Artificial Sequence: Synthetic oligonucleotide
cuuuugacggguauacaga

SEQ ID NO: 424282 - RNA, 19 nt, Artificial Sequence
  Description of Artificial Sequence: Synthetic oligonucleotide
acaugugggagugggagag

SEQ ID NO: 424283 - RNA, 19 nt, Artificial Sequence
  Description of Artificial Sequence: Synthetic oligonucleotide
uaucaacaccagccaagag

SEQ ID NO: 424284 - RNA, 19 nt, Artificial Sequence
  Description of Artificial Sequence: Synthetic oligonucleotide
aacauccucaaggaaugga

SEQ ID NO: 424285 - RNA, 19 nt, Artificial Sequence
  Description of Artificial Sequence: Synthetic oligonucleotide
cuaugguaagaucuuuauc

SEQ ID NO: 424286 - RNA, 19 nt, Artificial Sequence
  Description of Artificial Sequence: Synthetic oligonucleotide
aguuuaggaauaggacaac

SEQ ID NO: 424287 - RNA, 19 nt, Artificial Sequence
  Description of Artificial Sequence: Synthetic oligonucleotide
cucuuguuuacugacucac

SEQ ID NO: 424288 - RNA, 19 nt, Artificial Sequence
  Description of Artificial Sequence: Synthetic oligonucleotide
uuucgaaucuggccacucu

SEQ ID NO: 424289 - RNA, 19 nt, Artificial Sequence
  Description of Artificial Sequence: Synthetic oligonucleotide
gugcaugcucuuuucgagg

SEQ ID NO: 424290 - RNA, 19 nt, Artificial Sequence
  Description of Artificial Sequence: Synthetic oligonucleotide
ggugucacauggcugggcg

SEQ ID NO: 424291 - RNA, 19 nt, Artificial Sequence
  Description of Artificial Sequence: Synthetic oligonucleotide
ucaaucauacagaggccua

SEQ ID NO: 424292 - RNA, 19 nt, Artificial Sequence
  Description of Artificial Sequence: Synthetic oligonucleotide
uuuagccuguggcuuugug

SEQ ID NO: 424293 - RNA, 19 nt, Artificial Sequence
  Description of Artificial Sequence: Synthetic oligonucleotide
ugccgugaacacuagccca

SEQ ID NO: 424294 - RNA, 19 nt, Artificial Sequence
  Description of Artificial Sequence: Synthetic oligonucleotide
uucgaagauccagagcuac

SEQ ID NO: 424295 - RNA, 19 nt, Artificial Sequence
  Description of Artificial Sequence: Synthetic oligonucleotide
auccucaaggaauggagau

SEQ ID NO: 424296 - RNA, 19 nt, Artificial Sequence
  Description of Artificial Sequence: Synthetic oligonucleotide
ugcaguacaaccggucaca

SEQ ID NO: 424297 - RNA, 19 nt, Artificial Sequence
  Description of Artificial Sequence: Synthetic oligonucleotide
aaugcuuuugacggguaua

SEQ ID NO: 424298 - RNA, 19 nt, Artificial Sequence
  Description of Artificial Sequence: Synthetic oligonucleotide
gguuuuaggacgaccacgc

SEQ ID NO: 424299 - RNA, 19 nt, Artificial Sequence
  Description of Artificial Sequence: Synthetic oligonucleotide
uggggaugccccucuacag

SEQ ID NO: 424300 - RNA, 19 nt, Artificial Sequence
  Description of Artificial Sequence: Synthetic oligonucleotide
ggugcaugcucuuuucgag

SEQ ID NO: 424301 - RNA, 19 nt, Artificial Sequence
  Description of Artificial Sequence: Synthetic oligonucleotide
acacauuggaauccuccga

SEQ ID NO: 424302 - RNA, 19 nt, Artificial Sequence
  Description of Artificial Sequence: Synthetic oligonucleotide
ggugcgauguauuuacaac

SEQ ID NO: 424303 - RNA, 19 nt, Artificial Sequence
  Description of Artificial Sequence: Synthetic oligonucleotide
aucauacagaggccuaaga

SEQ ID NO: 424304 - RNA, 19 nt, Artificial Sequence
  Description of Artificial Sequence: Synthetic oligonucleotide
uaauccccgaaaccagcca

SEQ ID NO: 424305 - RNA, 19 nt, Artificial Sequence
  Description of Artificial Sequence: Synthetic oligonucleotide
cacgucgacaacuguggcc

SEQ ID NO: 424306 - RNA, 19 nt, Artificial Sequence
  Description of Artificial Sequence: Synthetic oligonucleotide
caggugcccagacaugugg

SEQ ID NO: 424307 - RNA, 19 nt, Artificial Sequence
  Description of Artificial Sequence: Synthetic oligonucleotide
ugugcaugggcuguguuua

SEQ ID NO: 424308 - RNA, 19 nt, Artificial Sequence
  Description of Artificial Sequence: Synthetic oligonucleotide
agggguuuguacaucuggg

SEQ ID NO: 424309 - RNA, 19 nt, Artificial Sequence
  Description of Artificial Sequence: Synthetic oligonucleotide
cagcaguuuaggaauagga

SEQ ID NO: 424310 - RNA, 19 nt, Artificial Sequence
  Description of Artificial Sequence: Synthetic oligonucleotide
ugagacucgggcagacucu

SEQ ID NO: 424311 - RNA, 19 nt, Artificial Sequence
  Description of Artificial Sequence: Synthetic oligonucleotide
uucgaaucuggccacucuu

SEQ ID NO: 424312 - RNA, 19 nt, Artificial Sequence
  Description of Artificial Sequence: Synthetic oligonucleotide
uggugcgauguauuuacaa

SEQ ID NO: 424313 - RNA, 19 nt, Artificial Sequence
  Description of Artificial Sequence: Synthetic oligonucleotide
gggugaaaacuggagaggg

SEQ ID NO: 424314 - RNA, 19 nt, Artificial Sequence
  Description of Artificial Sequence: Synthetic oligonucleotide
gagaaaagucccgcuuccg

SEQ ID NO: 424315 - RNA, 19 nt, Artificial Sequence
  Description of Artificial Sequence: Synthetic oligonucleotide
cacuagcccaaggaaaagg

SEQ ID NO: 424316 - RNA, 19 nt, Artificial Sequence
  Description of Artificial Sequence: Synthetic oligonucleotide
ucgaagauccagagcuaca

SEQ ID NO: 424317 - RNA, 19 nt, Artificial Sequence
  Description of Artificial Sequence: Synthetic oligonucleotide
ucgaaucuggccacucuuc

SEQ ID NO: 424318 - RNA, 19 nt, Artificial Sequence
  Description of Artificial Sequence: Synthetic oligonucleotide
ugguaggcguccgaggugc

SEQ ID NO: 424319 - RNA, 19 nt, Artificial Sequence
  Description of Artificial Sequence: Synthetic oligonucleotide
cuugaagguuuuaggacga

SEQ ID NO: 424320 - RNA, 19 nt, Artificial Sequence
  Description of Artificial Sequence: Synthetic oligonucleotide
cugcugaugauugcugccg

SEQ ID NO: 424321 - RNA, 19 nt, Artificial Sequence
  Description of Artificial Sequence: Synthetic oligonucleotide
cacaggauuuagccugugg

SEQ ID NO: 424322 - RNA, 19 nt, Artificial Sequence
  Description of Artificial Sequence: Synthetic oligonucleotide
gggguuuguacaucugggg

SEQ ID NO: 424323 - RNA, 19 nt, Artificial Sequence
  Description of Artificial Sequence: Synthetic oligonucleotide
ugcuugcuaucuacuaccu

SEQ ID NO: 424324 - RNA, 19 nt, Artificial Sequence
  Description of Artificial Sequence: Synthetic oligonucleotide
gacuuguaauuccuucaca

SEQ ID NO: 424325 - RNA, 19 nt, Artificial Sequence
  Description of Artificial Sequence: Synthetic oligonucleotide
gaaaccagccaucccagua

SEQ ID NO: 424326 - RNA, 19 nt, Artificial Sequence
  Description of Artificial Sequence: Synthetic oligonucleotide
aggcguccgaggugcaugc

SEQ ID NO: 424327 - RNA, 19 nt, Artificial Sequence
  Description of Artificial Sequence: Synthetic oligonucleotide
cugccgugaacacuagccc

SEQ ID NO: 424328 - RNA, 19 nt, Artificial Sequence
  Description of Artificial Sequence: Synthetic oligonucleotide
gaggcuugguaccagguua

SEQ ID NO: 424329 - RNA, 19 nt, Artificial Sequence
  Description of Artificial Sequence: Synthetic oligonucleotide
gaugguaggcguccgaggu

SEQ ID NO: 424330 - RNA, 19 nt, Artificial Sequence
  Description of Artificial Sequence: Synthetic oligonucleotide
aagucggucccagacucug

SEQ ID NO: 424331 - RNA, 19 nt, Artificial Sequence
  Description of Artificial Sequence: Synthetic oligonucleotide
aucuaucaacaccagccaa

SEQ ID NO: 424332 - RNA, 19 nt, Artificial Sequence
  Description of Artificial Sequence: Synthetic oligonucleotide
gaacacuagcccaaggaaa

SEQ ID NO: 424333 - RNA, 19 nt, Artificial Sequence
  Description of Artificial Sequence: Synthetic oligonucleotide
gagggcgagaugguaggcg

SEQ ID NO: 424334 - RNA, 19 nt, Artificial Sequence
  Description of Artificial Sequence: Synthetic oligonucleotide
ugccaagaacauccucaag

SEQ ID NO: 424335 - RNA, 19 nt, Artificial Sequence
  Description of Artificial Sequence: Synthetic oligonucleotide
auugcugccgugaacacua

SEQ ID NO: 424336 - RNA, 19 nt, Artificial Sequence
  Description of Artificial Sequence: Synthetic oligonucleotide
acggguauacagaaggggu

SEQ ID NO: 424337 - RNA, 19 nt, Artificial Sequence
  Description of Artificial Sequence: Synthetic oligonucleotide
gcuauuaagugcauccaug

SEQ ID NO: 424338 - RNA, 19 nt, Artificial Sequence
  Description of Artificial Sequence: Synthetic oligonucleotide
ucuuuucgagggccgacau

SEQ ID NO: 424339 - RNA, 19 nt, Artificial Sequence
  Description of Artificial Sequence: Synthetic oligonucleotide
gugugcauugcccauccca

SEQ ID NO: 424340 - RNA, 19 nt, Artificial Sequence
  Description of Artificial Sequence: Synthetic oligonucleotide
gcuaucuacuaccucuccc

SEQ ID NO: 424341 - RNA, 19 nt, Artificial Sequence
  Description of Artificial Sequence: Synthetic oligonucleotide
agggccgacaucaagggga

SEQ ID NO: 424342 - RNA, 19 nt, Artificial Sequence
  Description of Artificial Sequence: Synthetic oligonucleotide
ccagguguauggauggucc

SEQ ID NO: 424343 - RNA, 19 nt, Artificial Sequence
  Description of Artificial Sequence: Synthetic oligonucleotide
acugcgguaagaccugcau

SEQ ID NO: 424344 - RNA, 19 nt, Artificial Sequence
  Description of Artificial Sequence: Synthetic oligonucleotide
uggggaugcuaguccauga

SEQ ID NO: 424345 - RNA, 19 nt, Artificial Sequence
  Description of Artificial Sequence: Synthetic oligonucleotide
aucuuggcuccgcucugac

SEQ ID NO: 424346 - RNA, 19 nt, Artificial Sequence
  Description of Artificial Sequence: Synthetic oligonucleotide
gacucuagguuucgaaucu

SEQ ID NO: 424347 - RNA, 19 nt, Artificial Sequence
  Description of Artificial Sequence: Synthetic oligonucleotide
agauuggauaauccccgaa

SEQ ID NO: 424348 - RNA, 19 nt, Artificial Sequence
  Description of Artificial Sequence: Synthetic oligonucleotide
gggaaccggugucacaugg

SEQ ID NO: 424349 - RNA, 19 nt, Artificial Sequence
  Description of Artificial Sequence: Synthetic oligonucleotide
gccacuguuggacaagggc

SEQ ID NO: 424350 - RNA, 19 nt, Artificial Sequence
  Description of Artificial Sequence: Synthetic oligonucleotide
uccacaggauuuagccugu

SEQ ID NO: 424351 - RNA, 19 nt, Artificial Sequence
  Description of Artificial Sequence: Synthetic oligonucleotide
gacuggggaugcuagucca

SEQ ID NO: 424352 - RNA, 19 nt, Artificial Sequence
  Description of Artificial Sequence: Synthetic oligonucleotide
uugugcaugggcuguguuu

SEQ ID NO: 424353 - RNA, 19 nt, Artificial Sequence
  Description of Artificial Sequence: Synthetic oligonucleotide
uggaggcuucacccuaggc

SEQ ID NO: 424354 - RNA, 19 nt, Artificial Sequence
  Description of Artificial Sequence: Synthetic oligonucleotide
gauuuagccuguggcuuug

SEQ ID NO: 424355 - RNA, 19 nt, Artificial Sequence
  Description of Artificial Sequence: Synthetic oligonucleotide
ugcccagacaugugggagu

SEQ ID NO: 424356 - RNA, 19 nt, Artificial Sequence
  Description of Artificial Sequence: Synthetic oligonucleotide
gcugccgugaacacuagcc

SEQ ID NO: 424357 - RNA, 19 nt, Artificial Sequence
  Description of Artificial Sequence: Synthetic oligonucleotide
gagauuggauaauccccga

SEQ ID NO: 424358 - RNA, 19 nt, Artificial Sequence
  Description of Artificial Sequence: Synthetic oligonucleotide
cgauacgugcaguacaacc

SEQ ID NO: 424359 - RNA, 19 nt, Artificial Sequence
  Description of Artificial Sequence: Synthetic oligonucleotide
ggauaauccccgaaaccag

SEQ ID NO: 424360 - RNA, 19 nt, Artificial Sequence
  Description of Artificial Sequence: Synthetic oligonucleotide
guacaucuggggaugcccc

SEQ ID NO: 424361 - RNA, 19 nt, Artificial Sequence
  Description of Artificial Sequence: Synthetic oligonucleotide
ugauugcugccgugaacac

SEQ ID NO: 424362 - RNA, 19 nt, Artificial Sequence
  Description of Artificial Sequence: Synthetic oligonucleotide
ggguuuguacaucugggga

SEQ ID NO: 424363 - RNA, 19 nt, Artificial Sequence
  Description of Artificial Sequence: Synthetic oligonucleotide
aggauuuagccuguggcuu

SEQ ID NO: 424364 - RNA, 19 nt, Artificial Sequence
  Description of Artificial Sequence: Synthetic oligonucleotide
gcucaauguagagggaggg

SEQ ID NO: 424365 - RNA, 19 nt, Artificial Sequence
  Description of Artificial Sequence: Synthetic oligonucleotide
guccccacgauacgugcag

SEQ ID NO: 424366 - RNA, 19 nt, Artificial Sequence
  Description of Artificial Sequence: Synthetic oligonucleotide
cccguacauagcuucaacc

SEQ ID NO: 424367 - RNA, 19 nt, Artificial Sequence
  Description of Artificial Sequence: Synthetic oligonucleotide
guuagcugaugcuguguga

SEQ ID NO: 424368 - RNA, 19 nt, Artificial Sequence
  Description of Artificial Sequence: Synthetic oligonucleotide
ggguacauuugcaggaugc

SEQ ID NO: 424369 - RNA, 19 nt, Artificial Sequence
  Description of Artificial Sequence: Synthetic oligonucleotide
cuaucaacaccagccaaga

SEQ ID NO: 424370 - RNA, 19 nt, Artificial Sequence
  Description of Artificial Sequence: Synthetic oligonucleotide
cauugacucaaaguacuga

SEQ ID NO: 424371 - RNA, 19 nt, Artificial Sequence
  Description of Artificial Sequence: Synthetic oligonucleotide
ucaggggcgucuucaugga

SEQ ID NO: 424372 - RNA, 19 nt, Artificial Sequence
  Description of Artificial Sequence: Synthetic oligonucleotide
gcaagcgucacuuggcaca

SEQ ID NO: 424373 - RNA, 19 nt, Artificial Sequence
  Description of Artificial Sequence: Synthetic oligonucleotide
ccaaccauugagacucggg

SEQ ID NO: 424374 - RNA, 19 nt, Artificial Sequence
  Description of Artificial Sequence: Synthetic oligonucleotide
auggacugcguggccacac

SEQ ID NO: 424375 - RNA, 19 nt, Artificial Sequence
  Description of Artificial Sequence: Synthetic oligonucleotide
gaacugcaauggcaccacc

SEQ ID NO: 424376 - RNA, 19 nt, Artificial Sequence
  Description of Artificial Sequence: Synthetic oligonucleotide
gaaccggugucacauggcu

SEQ ID NO: 424377 - RNA, 19 nt, Artificial Sequence
  Description of Artificial Sequence: Synthetic oligonucleotide
gugcaguacaaccggucac

SEQ ID NO: 424378 - RNA, 19 nt, Artificial Sequence
  Description of Artificial Sequence: Synthetic oligonucleotide
gggaugcuaguccaugaug

SEQ ID NO: 424379 - RNA, 19 nt, Artificial Sequence
  Description of Artificial Sequence: Synthetic oligonucleotide
auggaugguccuucuuggu

SEQ ID NO: 424380 - RNA, 19 nt, Artificial Sequence
  Description of Artificial Sequence: Synthetic oligonucleotide
augguaggcguccgaggug

SEQ ID NO: 424381 - RNA, 19 nt, Artificial Sequence
  Description of Artificial Sequence: Synthetic oligonucleotide
guggagugagaagcugugg

SEQ ID NO: 424382 - RNA, 19 nt, Artificial Sequence
  Description of Artificial Sequence: Synthetic oligonucleotide
gcuguguuuaaccugggcu

SEQ ID NO: 424383 - RNA, 19 nt, Artificial Sequence
  Description of Artificial Sequence: Synthetic oligonucleotide
uaggcguccgaggugcaug

SEQ ID NO: 424384 - RNA, 19 nt, Artificial Sequence
  Description of Artificial Sequence: Synthetic oligonucleotide
cagguuagcugaugcugug

SEQ ID NO: 424385 - RNA, 19 nt, Artificial Sequence
  Description of Artificial Sequence: Synthetic oligonucleotide
cacgauacgugcaguacaa

SEQ ID NO: 424386 - RNA, 19 nt, Artificial Sequence
  Description of Artificial Sequence: Synthetic oligonucleotide
cuauggauuuggagccuuc

SEQ ID NO: 424387 - RNA, 19 nt, Artificial Sequence
  Description of Artificial Sequence: Synthetic oligonucleotide
agaggccuaagaggcuugg

SEQ ID NO: 424388 - RNA, 19 nt, Artificial Sequence
  Description of Artificial Sequence: Synthetic oligonucleotide
aaccggugucacauggcug

SEQ ID NO: 424389 - RNA, 19 nt, Artificial Sequence
  Description of Artificial Sequence: Synthetic oligonucleotide
guacucugcugaugauugc

SEQ ID NO: 424390 - RNA, 19 nt, Artificial Sequence
  Description of Artificial Sequence: Synthetic oligonucleotide
ugcugccgugaacacuagc

SEQ ID NO: 424391 - RNA, 19 nt, Artificial Sequence
  Description of Artificial Sequence: Synthetic oligonucleotide
cuaaaccuccauggagaag

SEQ ID NO: 424392 - RNA, 19 nt, Artificial Sequence
  Description of Artificial Sequence: Synthetic oligonucleotide
acgauacgugcaguacaac

SEQ ID NO: 424393 - RNA, 19 nt, Artificial Sequence
  Description of Artificial Sequence: Synthetic oligonucleotide
aggaucaugccaagaacau

SEQ ID NO: 424394 - RNA, 19 nt, Artificial Sequence
  Description of Artificial Sequence: Synthetic oligonucleotide
cuacacgucacagaaagau

SEQ ID NO: 424395 - RNA, 19 nt, Artificial Sequence
  Description of Artificial Sequence: Synthetic oligonucleotide
acgugcaguacaaccgguc

SEQ ID NO: 424396 - RNA, 19 nt, Artificial Sequence
  Description of Artificial Sequence: Synthetic oligonucleotide
uguuuaaccugggcugcuc

SEQ ID NO: 424397 - RNA, 19 nt, Artificial Sequence
  Description of Artificial Sequence: Synthetic oligonucleotide
cugcgguaagaccugcauc

SEQ ID NO: 424398 - RNA, 19 nt, Artificial Sequence
  Description of Artificial Sequence: Synthetic oligonucleotide
gguugggagauauuuauuu

SEQ ID NO: 424399 - RNA, 19 nt, Artificial Sequence
  Description of Artificial Sequence: Synthetic oligonucleotide
aggcuugguaccagguuag

SEQ ID NO: 424400 - RNA, 19 nt, Artificial Sequence
  Description of Artificial Sequence: Synthetic oligonucleotide
aaccugugccggaucagga

SEQ ID NO: 424401 - RNA, 19 nt, Artificial Sequence
  Description of Artificial Sequence: Synthetic oligonucleotide
gccgacaucaaggggaggc

SEQ ID NO: 424402 - RNA, 19 nt, Artificial Sequence
  Description of Artificial Sequence: Synthetic oligonucleotide
ugcuuuugacggguauaca

SEQ ID NO: 424403 - RNA, 19 nt, Artificial Sequence
  Description of Artificial Sequence: Synthetic oligonucleotide
ucccgcuuccguccagggc

SEQ ID NO: 424404 - RNA, 19 nt, Artificial Sequence
  Description of Artificial Sequence: Synthetic oligonucleotide
aggaaccaacuaugaaaau

SEQ ID NO: 424405 - RNA, 19 nt, Artificial Sequence
  Description of Artificial Sequence: Synthetic oligonucleotide
caauccuacacuguacucu

SEQ ID NO: 424406 - RNA, 19 nt, Artificial Sequence
  Description of Artificial Sequence: Synthetic oligonucleotide
cuaugauuccuucuacuau

SEQ ID NO: 424407 - RNA, 19 nt, Artificial Sequence
  Description of Artificial Sequence: Synthetic oligonucleotide
ccguacauagcuucaacca

SEQ ID NO: 424408 - RNA, 19 nt, Artificial Sequence
  Description of Artificial Sequence: Synthetic oligonucleotide
cagggguaggaaguuguug

SEQ ID NO: 424409 - RNA, 19 nt, Artificial Sequence
  Description of Artificial Sequence: Synthetic oligonucleotide
auccuacacuguacucugc

SEQ ID NO: 424410 - RNA, 19 nt, Artificial Sequence
  Description of Artificial Sequence: Synthetic oligonucleotide
aaagucggucccagacucu

SEQ ID NO: 424411 - RNA, 19 nt, Artificial Sequence
  Description of Artificial Sequence: Synthetic oligonucleotide
cguacauagcuucaaccac

SEQ ID NO: 424412 - RNA, 19 nt, Artificial Sequence
  Description of Artificial Sequence: Synthetic oligonucleotide
auggcgugcccugggcagc

SEQ ID NO: 424413 - RNA, 19 nt, Artificial Sequence
  Description of Artificial Sequence: Synthetic oligonucleotide
cuuuucgagggccgacauc

SEQ ID NO: 424414 - RNA, 19 nt, Artificial Sequence
  Description of Artificial Sequence: Synthetic oligonucleotide
ugugccggaucaggaaagu

SEQ ID NO: 424415 - RNA, 19 nt, Artificial Sequence
  Description of Artificial Sequence: Synthetic oligonucleotide
augcuaguccaugauguuu

SEQ ID NO: 424416 - RNA, 19 nt, Artificial Sequence
  Description of Artificial Sequence: Synthetic oligonucleotide
uggacugcguggccacacu

SEQ ID NO: 424417 - RNA, 19 nt, Artificial Sequence
  Description of Artificial Sequence: Synthetic oligonucleotide
caagcgucacuuggcacac

SEQ ID NO: 424418 - RNA, 19 nt, Artificial Sequence
  Description of Artificial Sequence: Synthetic oligonucleotide
gaccccagacugcgcaggc

SEQ ID NO: 424419 - RNA, 19 nt, Artificial Sequence
  Description of Artificial Sequence: Synthetic oligonucleotide
uggccgaagcucugucccc

SEQ ID NO: 424420 - RNA, 19 nt, Artificial Sequence
  Description of Artificial Sequence: Synthetic oligonucleotide
guacugacuccacgggaca

SEQ ID NO: 424421 - RNA, 19 nt, Artificial Sequence
  Description of Artificial Sequence: Synthetic oligonucleotide
uugaagguuuuaggacgac

SEQ ID NO: 424422 - RNA, 19 nt, Artificial Sequence
  Description of Artificial Sequence: Synthetic oligonucleotide
auccgcaucuuggcuccgc

SEQ ID NO: 424423 - RNA, 19 nt, Artificial Sequence
  Description of Artificial Sequence: Synthetic oligonucleotide
guuuuaggacgaccacgca

SEQ ID NO: 424424 - RNA, 19 nt, Artificial Sequence
  Description of Artificial Sequence: Synthetic oligonucleotide
cuggcuuacaggcagguuu

SEQ ID NO: 424425 - RNA, 19 nt, Artificial Sequence
  Description of Artificial Sequence: Synthetic oligonucleotide
gcaucuggccuaugguaag

SEQ ID NO: 424426 - RNA, 19 nt, Artificial Sequence
  Description of Artificial Sequence: Synthetic oligonucleotide
gccuaaaccuccauggaga

SEQ ID NO: 424427 - RNA, 19 nt, Artificial Sequence
  Description of Artificial Sequence: Synthetic oligonucleotide
gccugggguacauuugcag

SEQ ID NO: 424428 - RNA, 19 nt, Artificial Sequence
  Description of Artificial Sequence: Synthetic oligonucleotide
gagacagcggcaucacagu

SEQ ID NO: 424429 - RNA, 19 nt, Artificial Sequence
  Description of Artificial Sequence: Synthetic oligonucleotide
uaggacgaccacgcaagaa

SEQ ID NO: 424430 - RNA, 19 nt, Artificial Sequence
  Description of Artificial Sequence: Synthetic oligonucleotide
cugcguggccacacugcgg

SEQ ID NO: 424431 - RNA, 19 nt, Artificial Sequence
  Description of Artificial Sequence: Synthetic oligonucleotide
gugcauccauggcuguacc

SEQ ID NO: 424432 - RNA, 19 nt, Artificial Sequence
  Description of Artificial Sequence: Synthetic oligonucleotide
agucccgcuuccguccagg

SEQ ID NO: 424433 - RNA, 19 nt, Artificial Sequence
  Description of Artificial Sequence: Synthetic oligonucleotide
ggaugcuaguccaugaugu

SEQ ID NO: 424434 - RNA, 19 nt, Artificial Sequence
  Description of Artificial Sequence: Synthetic oligonucleotide
aagucccgcuuccguccag

SEQ ID NO: 424435 - RNA, 19 nt, Artificial Sequence
  Description of Artificial Sequence: Synthetic oligonucleotide
gguccccguacauagcuuc

SEQ ID NO: 424436 - RNA, 19 nt, Artificial Sequence
  Description of Artificial Sequence: Synthetic oligonucleotide
caaaccugugccggaucag

SEQ ID NO: 424437 - RNA, 19 nt, Artificial Sequence
  Description of Artificial Sequence: Synthetic oligonucleotide
ccgaucagcaugacuggag

SEQ ID NO: 424438 - RNA, 19 nt, Artificial Sequence
  Description of Artificial Sequence: Synthetic oligonucleotide
ugcgcaggccacuguugga

SEQ ID NO: 424439 - RNA, 19 nt, Artificial Sequence
  Description of Artificial Sequence: Synthetic oligonucleotide
gguuuguacaucuggggau

SEQ ID NO: 424440 - RNA, 19 nt, Artificial Sequence
  Description of Artificial Sequence: Synthetic oligonucleotide
gcaaaccugugccggauca

SEQ ID NO: 424441 - RNA, 19 nt, Artificial Sequence
  Description of Artificial Sequence: Synthetic oligonucleotide
guuuaaccugggcugcucu

SEQ ID NO: 424442 - RNA, 19 nt, Artificial Sequence
  Description of Artificial Sequence: Synthetic oligonucleotide
acuauggauuuggagccuu

SEQ ID NO: 424443 - RNA, 19 nt, Artificial Sequence
  Description of Artificial Sequence: Synthetic oligonucleotide
uugcugccgugaacacuag

SEQ ID NO: 424444 - RNA, 19 nt, Artificial Sequence
  Description of Artificial Sequence: Synthetic oligonucleotide
ucggucccagacucuggac

SEQ ID NO: 424445 - RNA, 19 nt, Artificial Sequence
  Description of Artificial Sequence: Synthetic oligonucleotide
uuucgagggccgacaucaa

SEQ ID NO: 424446 - RNA, 19 nt, Artificial Sequence
  Description of Artificial Sequence: Synthetic oligonucleotide
cacgcaagaaauucugcau

SEQ ID NO: 424447 - RNA, 19 nt, Artificial Sequence
  Description of Artificial Sequence: Synthetic oligonucleotide
cccgaaaccagccauccca

SEQ ID NO: 424448 - RNA, 19 nt, Artificial Sequence
  Description of Artificial Sequence: Synthetic oligonucleotide
gccacacugcgguaagacc

SEQ ID NO: 424449 - RNA, 19 nt, Artificial Sequence
  Description of Artificial Sequence: Synthetic oligonucleotide
guuucgaaucuggccacuc

SEQ ID NO: 424450 - RNA, 19 nt, Artificial Sequence
  Description of Artificial Sequence: Synthetic oligonucleotide
cacauuggaauccuccgau

SEQ ID NO: 424451 - RNA, 19 nt, Artificial Sequence
  Description of Artificial Sequence: Synthetic oligonucleotide
acaucaaggggaggccgca

SEQ ID NO: 424452 - RNA, 19 nt, Artificial Sequence
  Description of Artificial Sequence: Synthetic oligonucleotide
aacuguggccgaagcucug

SEQ ID NO: 424453 - RNA, 19 nt, Artificial Sequence
  Description of Artificial Sequence: Synthetic oligonucleotide
agggaaccggugucacaug

SEQ ID NO: 424454 - RNA, 19 nt, Artificial Sequence
  Description of Artificial Sequence: Synthetic oligonucleotide
accugacugguguuuuauu

SEQ ID NO: 424455 - RNA, 19 nt, Artificial Sequence
  Description of Artificial Sequence: Synthetic oligonucleotide
gaugcuaguccaugauguu

SEQ ID NO: 424456 - RNA, 19 nt, Artificial Sequence
  Description of Artificial Sequence: Synthetic oligonucleotide
ccuacacuguacucugcug

SEQ ID NO: 424457 - RNA, 19 nt, Artificial Sequence
  Description of Artificial Sequence: Synthetic oligonucleotide
ggcgagaugguaggcgucc

SEQ ID NO: 424458 - RNA, 19 nt, Artificial Sequence
  Description of Artificial Sequence: Synthetic oligonucleotide
gcugaugauugcugccgug

SEQ ID NO: 424459 - RNA, 19 nt, Artificial Sequence
  Description of Artificial Sequence: Synthetic oligonucleotide
cucuacagggaaccggugu

SEQ ID NO: 424460 - RNA, 19 nt, Artificial Sequence
  Description of Artificial Sequence: Synthetic oligonucleotide
cucuuuucgagggccgaca

SEQ ID NO: 424461 - RNA, 19 nt, Artificial Sequence
  Description of Artificial Sequence: Synthetic oligonucleotide
gcgauguauuuacaacaga

SEQ ID NO: 424462 - RNA, 19 nt, Artificial Sequence
  Description of Artificial Sequence: Synthetic oligonucleotide
guuugacuuggccaaccau

SEQ ID NO: 424463 - RNA, 19 nt, Artificial Sequence
  Description of Artificial Sequence: Synthetic oligonucleotide
ggacugcguggccacacug

SEQ ID NO: 424464 - RNA, 19 nt, Artificial Sequence
  Description of Artificial Sequence: Synthetic oligonucleotide
ccuaggcaaggaagggagc

SEQ ID NO: 424465 - RNA, 19 nt, Artificial Sequence
  Description of Artificial Sequence: Synthetic oligonucleotide
aggccgcacgucgacaacu

SEQ ID NO: 424466 - RNA, 19 nt, Artificial Sequence
  Description of Artificial Sequence: Synthetic oligonucleotide
uccccguacauagcuucaa

SEQ ID NO: 424467 - RNA, 19 nt, Artificial Sequence
  Description of Artificial Sequence: Synthetic oligonucleotide
ggagugagaagcugugggu

SEQ ID NO: 424468 - RNA, 19 nt, Artificial Sequence
  Description of Artificial Sequence: Synthetic oligonucleotide
gcucuguccccacgauacg

SEQ ID NO: 424469 - RNA, 19 nt, Artificial Sequence
  Description of Artificial Sequence: Synthetic oligonucleotide
agaccugcaucuggaacuu

SEQ ID NO: 424470 - RNA, 19 nt, Artificial Sequence
  Description of Artificial Sequence: Synthetic oligonucleotide
ggcaagcgucacuuggcac

SEQ ID NO: 424471 - RNA, 19 nt, Artificial Sequence
  Description of Artificial Sequence: Synthetic oligonucleotide
ccgcacgucgacaacugug

SEQ ID NO: 424472 - RNA, 19 nt, Artificial Sequence
  Description of Artificial Sequence: Synthetic oligonucleotide
gugccggaucaggaaagug

SEQ ID NO: 424473 - RNA, 19 nt, Artificial Sequence
  Description of Artificial Sequence: Synthetic oligonucleotide
gacugggauaaagguaccu

SEQ ID NO: 424474 - RNA, 19 nt, Artificial Sequence
  Description of Artificial Sequence: Synthetic oligonucleotide
ccacacugcgguaagaccu

SEQ ID NO: 424475 - RNA, 19 nt, Artificial Sequence
  Description of Artificial Sequence: Synthetic oligonucleotide
cuucaagacuuagaacagu

SEQ ID NO: 424476 - RNA, 19 nt, Artificial Sequence
  Description of Artificial Sequence: Synthetic oligonucleotide
gaggccgcacgucgacaac

SEQ ID NO: 424477 - RNA, 19 nt, Artificial Sequence
  Description of Artificial Sequence: Synthetic oligonucleotide
ggagggagguccccguaca

SEQ ID NO: 424478 - RNA, 19 nt, Artificial Sequence
  Description of Artificial Sequence: Synthetic oligonucleotide
gagacucgggcagacucua

SEQ ID NO: 424479 - RNA, 19 nt, Artificial Sequence
  Description of Artificial Sequence: Synthetic oligonucleotide
cuggugcgauguauuuaca

SEQ ID NO: 424480 - RNA, 19 nt, Artificial Sequence
  Description of Artificial Sequence: Synthetic oligonucleotide
ccacgauacgugcaguaca

SEQ ID NO: 424481 - RNA, 19 nt, Artificial Sequence
  Description of Artificial Sequence: Synthetic oligonucleotide
caucaaggggaggccgcac

SEQ ID NO: 424482 - RNA, 19 nt, Artificial Sequence
  Description of Artificial Sequence: Synthetic oligonucleotide
caggggcgucuucauggac

SEQ ID NO: 424483 - RNA, 19 nt, Artificial Sequence
  Description of Artificial Sequence: Synthetic oligonucleotide
guuggacaagggcccugga

SEQ ID NO: 424484 - RNA, 19 nt, Artificial Sequence
  Description of Artificial Sequence: Synthetic oligonucleotide
caucuggccuaugguaaga

SEQ ID NO: 424485 - RNA, 19 nt, Artificial Sequence
  Description of Artificial Sequence: Synthetic oligonucleotide
ugccaucguuucugcugac

SEQ ID NO: 424486 - RNA, 19 nt, Artificial Sequence
  Description of Artificial Sequence: Synthetic oligonucleotide
gccuguggaaauggcgugc

SEQ ID NO: 424487 - RNA, 19 nt, Artificial Sequence
  Description of Artificial Sequence: Synthetic oligonucleotide
uccccacgauacgugcagu

SEQ ID NO: 424488 - RNA, 19 nt, Artificial Sequence
  Description of Artificial Sequence: Synthetic oligonucleotide
ccuaaaccuccauggagaa

SEQ ID NO: 424489 - RNA, 19 nt, Artificial Sequence
  Description of Artificial Sequence: Synthetic oligonucleotide
cuuccguccagggcccauc

SEQ ID NO: 424490 - RNA, 19 nt, Artificial Sequence
  Description of Artificial Sequence: Synthetic oligonucleotide
ggaggccgcacgucgacaa

SEQ ID NO: 424491 - RNA, 19 nt, Artificial Sequence
  Description of Artificial Sequence: Synthetic oligonucleotide
ccuaugguaagaucuuuau

SEQ ID NO: 424492 - RNA, 19 nt, Artificial Sequence
  Description of Artificial Sequence: Synthetic oligonucleotide
ggagagggcuacacgucac

SEQ ID NO: 424493 - RNA, 19 nt, Artificial Sequence
  Description of Artificial Sequence: Synthetic oligonucleotide
gggccgacaucaaggggag

SEQ ID NO: 424494 - RNA, 19 nt, Artificial Sequence
  Description of Artificial Sequence: Synthetic oligonucleotide
gcaugcuauuaagugcauc

SEQ ID NO: 424495 - RNA, 19 nt, Artificial Sequence
  Description of Artificial Sequence: Synthetic oligonucleotide
agccugggguacauuugca

SEQ ID NO: 424496 - RNA, 19 nt, Artificial Sequence
  Description of Artificial Sequence: Synthetic oligonucleotide
caaugcuuuugacggguau

SEQ ID NO: 424497 - RNA, 19 nt, Artificial Sequence
  Description of Artificial Sequence: Synthetic oligonucleotide
guggccucuggugcgaugu

SEQ ID NO: 424498 - RNA, 19 nt, Artificial Sequence
  Description of Artificial Sequence: Synthetic oligonucleotide
gccaaccauugagacucgg

SEQ ID NO: 424499 - RNA, 19 nt, Artificial Sequence
  Description of Artificial Sequence: Synthetic oligonucleotide
cucuggugcgauguauuua

SEQ ID NO: 424500 - RNA, 19 nt, Artificial Sequence
  Description of Artificial Sequence: Synthetic oligonucleotide
ccgacaucaaggggaggcc

SEQ ID NO: 424501 - RNA, 19 nt, Artificial Sequence
  Description of Artificial Sequence: Synthetic oligonucleotide
cgugcaguacaaccgguca

SEQ ID NO: 424502 - RNA, 19 nt, Artificial Sequence
  Description of Artificial Sequence: Synthetic oligonucleotide
gcucacccagacgggaagc

SEQ ID NO: 424503 - RNA, 19 nt, Artificial Sequence
  Description of Artificial Sequence: Synthetic oligonucleotide
gacgggaagccaugugcuu

SEQ ID NO: 424504 - RNA, 19 nt, Artificial Sequence
  Description of Artificial Sequence: Synthetic oligonucleotide
gcgagaugguaggcguccg

SEQ ID NO: 424505 - RNA, 19 nt, Artificial Sequence
  Description of Artificial Sequence: Synthetic oligonucleotide
guccccguacauagcuuca

SEQ ID NO: 424506 - RNA, 19 nt, Artificial Sequence
  Description of Artificial Sequence: Synthetic oligonucleotide
ccagacgggaagccaugug

SEQ ID NO: 424507 - RNA, 19 nt, Artificial Sequence
  Description of Artificial Sequence: Synthetic oligonucleotide
gcguccgaggugcaugcuc

SEQ ID NO: 424508 - RNA, 19 nt, Artificial Sequence
  Description of Artificial Sequence: Synthetic oligonucleotide
cacccagacgggaagccau

SEQ ID NO: 424509 - RNA, 19 nt, Artificial Sequence
  Description of Artificial Sequence: Synthetic oligonucleotide
cauccgcaucuuggcuccg

SEQ ID NO: 424510 - RNA, 19 nt, Artificial Sequence
  Description of Artificial Sequence: Synthetic oligonucleotide
cagcggcaucacaguggcc

SEQ ID NO: 424511 - RNA, 19 nt, Artificial Sequence
  Description of Artificial Sequence: Synthetic oligonucleotide
ccagguuagcugaugcugu

SEQ ID NO: 424512 - RNA, 19 nt, Artificial Sequence
  Description of Artificial Sequence: Synthetic oligonucleotide
gucgacaacuguggccgaa

SEQ ID NO: 424513 - RNA, 19 nt, Artificial Sequence
  Description of Artificial Sequence: Synthetic oligonucleotide
gugcaugggcuguguuuaa

SEQ ID NO: 424514 - RNA, 19 nt, Artificial Sequence
  Description of Artificial Sequence: Synthetic oligonucleotide
ggucacuaacagccaggaa

SEQ ID NO: 424515 - RNA, 19 nt, Artificial Sequence
  Description of Artificial Sequence: Synthetic oligonucleotide
gccuaugguaagaucuuua

SEQ ID NO: 424516 - RNA, 19 nt, Artificial Sequence
  Description of Artificial Sequence: Synthetic oligonucleotide
ggcuugguaccagguuagc

SEQ ID NO: 424517 - RNA, 19 nt, Artificial Sequence
  Description of Artificial Sequence: Synthetic oligonucleotide
gcgguaagaccugcaucug

SEQ ID NO: 424518 - RNA, 19 nt, Artificial Sequence
  Description of Artificial Sequence: Synthetic oligonucleotide
ggggaggccgcacgucgac

SEQ ID NO: 424519 - RNA, 19 nt, Artificial Sequence
  Description of Artificial Sequence: Synthetic oligonucleotide
gcuacacgucacagaaaga

SEQ ID NO: 424520 - RNA, 19 nt, Artificial Sequence
  Description of Artificial Sequence: Synthetic oligonucleotide
guguuuaaccugggcugcu

SEQ ID NO: 424521 - RNA, 19 nt, Artificial Sequence
  Description of Artificial Sequence: Synthetic oligonucleotide
gugcccgaucagcaugacu

SEQ ID NO: 424522 - RNA, 19 nt, Artificial Sequence
  Description of Artificial Sequence: Synthetic oligonucleotide
gccaucguuucugcugaca

SEQ ID NO: 424523 - RNA, 19 nt, Artificial Sequence
  Description of Artificial Sequence: Synthetic oligonucleotide
ggccgaagcucugucccca

SEQ ID NO: 424524 - RNA, 19 nt, Artificial Sequence
  Description of Artificial Sequence: Synthetic oligonucleotide
ccagagcuacaauccuaca

SEQ ID NO: 424525 - RNA, 19 nt, Artificial Sequence
  Description of Artificial Sequence: Synthetic oligonucleotide
gccccucuacagggaaccg

SEQ ID NO: 424526 - RNA, 19 nt, Artificial Sequence
  Description of Artificial Sequence: Synthetic oligonucleotide
ccgugaacacuagcccaag

SEQ ID NO: 424527 - RNA, 19 nt, Artificial Sequence
  Description of Artificial Sequence: Synthetic oligonucleotide
ggggcucacccagacggga

SEQ ID NO: 424528 - RNA, 19 nt, Artificial Sequence
  Description of Artificial Sequence: Synthetic oligonucleotide
gcucuggaggcuucacccu

SEQ ID NO: 424529 - RNA, 19 nt, Artificial Sequence
  Description of Artificial Sequence: Synthetic oligonucleotide
caguuaagacugggauaaa

SEQ ID NO: 424530 - RNA, 19 nt, Artificial Sequence
  Description of Artificial Sequence: Synthetic oligonucleotide
ccggaucaggaaaguggca

SEQ ID NO: 424531 - RNA, 19 nt, Artificial Sequence
  Description of Artificial Sequence: Synthetic oligonucleotide
ccgcaucuuggcuccgcuc

SEQ ID NO: 424532 - RNA, 19 nt, Artificial Sequence
  Description of Artificial Sequence: Synthetic oligonucleotide
ggccgacaucaaggggagg

SEQ ID NO: 424533 - RNA, 19 nt, Artificial Sequence
  Description of Artificial Sequence: Synthetic oligonucleotide
gguuucgaaucuggccacu

SEQ ID NO: 424534 - RNA, 19 nt, Artificial Sequence
  Description of Artificial Sequence: Synthetic oligonucleotide
gcccuggaaaacaaugcuu

SEQ ID NO: 424535 - RNA, 19 nt, Artificial Sequence
  Description of Artificial Sequence: Synthetic oligonucleotide
gggcgagaugguaggcguc

SEQ ID NO: 424536 - RNA, 19 nt, Artificial Sequence
  Description of Artificial Sequence: Synthetic oligonucleotide
cguccgaggugcaugcucu

SEQ ID NO: 424537 - RNA, 19 nt, Artificial Sequence
  Description of Artificial Sequence: Synthetic oligonucleotide
cccgaucagcaugacugga

SEQ ID NO: 424538 - RNA, 19 nt, Artificial Sequence
  Description of Artificial Sequence: Synthetic oligonucleotide
ccgggcagaggagggcgag

SEQ ID NO: 424539 - RNA, 19 nt, Artificial Sequence
  Description of Artificial Sequence: Synthetic oligonucleotide
gggcgucuucauggacugc

SEQ ID NO: 424540 - RNA, 19 nt, Artificial Sequence
  Description of Artificial Sequence: Synthetic oligonucleotide
guaggcguccgaggugcau

SEQ ID NO: 424541 - RNA, 19 nt, Artificial Sequence
  Description of Artificial Sequence: Synthetic oligonucleotide
gggcucacccagacgggaa

SEQ ID NO: 424542 - RNA, 19 nt, Artificial Sequence
  Description of Artificial Sequence: Synthetic oligonucleotide
cuccagguguauggauggu

SEQ ID NO: 424543 - RNA, 19 nt, Artificial Sequence
  Description of Artificial Sequence: Synthetic oligonucleotide
cgagaugguaggcguccga

SEQ ID NO: 424544 - RNA, 19 nt, Artificial Sequence
  Description of Artificial Sequence: Synthetic oligonucleotide
gguaggcguccgaggugca

SEQ ID NO: 424545 - RNA, 19 nt, Artificial Sequence
  Description of Artificial Sequence: Synthetic oligonucleotide
ggccucuggugcgauguau

SEQ ID NO: 424546 - RNA, 19 nt, Artificial Sequence
  Description of Artificial Sequence: Synthetic oligonucleotide
gccgcacgucgacaacugu

SEQ ID NO: 424547 - RNA, 19 nt, Artificial Sequence
  Description of Artificial Sequence: Synthetic oligonucleotide
gcgucuucauggacugcgu

SEQ ID NO: 424548 - RNA, 19 nt, Artificial Sequence
  Description of Artificial Sequence: Synthetic oligonucleotide
ccucccugccuguggaaau

SEQ ID NO: 424549 - RNA, 19 nt, Artificial Sequence
  Description of Artificial Sequence: Synthetic oligonucleotide
cgaaaccagccaucccagu

SEQ ID NO: 424550 - RNA, 19 nt, Artificial Sequence
  Description of Artificial Sequence: Synthetic oligonucleotide
cgucgacaacuguggccga

SEQ ID NO: 424551 - RNA, 19 nt, Artificial Sequence
  Description of Artificial Sequence: Synthetic oligonucleotide
gcguggccacacugcggua

SEQ ID NO: 424552 - RNA, 19 nt, Artificial Sequence
  Description of Artificial Sequence: Synthetic oligonucleotide
ggcguccgaggugcaugcu

SEQ ID NO: 424553 - RNA, 19 nt, Artificial Sequence
  Description of Artificial Sequence: Synthetic oligonucleotide
gcuuccguccagggcccau

SEQ ID NO: 424554 - RNA, 19 nt, Artificial Sequence
  Description of Artificial Sequence: Synthetic oligonucleotide
gcgucacuuggcacaccuu

SEQ ID NO: 424555 - RNA, 19 nt, Artificial Sequence
  Description of Artificial Sequence: Synthetic oligonucleotide
cgcuuccguccagggccca

SEQ ID NO: 424556 - RNA, 19 nt, Artificial Sequence
  Description of Artificial Sequence: Synthetic oligonucleotide
aaugcagggaacuaggugc

SEQ ID NO: 424557 - RNA, 19 nt, Artificial Sequence
  Description of Artificial Sequence: Synthetic oligonucleotide
ugaauucacaacaagacgg

SEQ ID NO: 424558 - RNA, 19 nt, Artificial Sequence
  Description of Artificial Sequence: Synthetic oligonucleotide
aacaauguaauucucucuc

SEQ ID NO: 424559 - RNA, 19 nt, Artificial Sequence
  Description of Artificial Sequence: Synthetic oligonucleotide
uuuaagagaugucaggcgg

SEQ ID NO: 424560 - RNA, 19 nt, Artificial Sequence
  Description of Artificial Sequence: Synthetic oligonucleotide
aaaagguuucaccaagugg

SEQ ID NO: 424561 - RNA, 19 nt, Artificial Sequence
  Description of Artificial Sequence: Synthetic oligonucleotide
aguaauauggcaccacacc

SEQ ID NO: 424562 - RNA, 19 nt, Artificial Sequence
  Description of Artificial Sequence: Synthetic oligonucleotide
aagacggaaauccagaacu

SEQ ID NO: 424563 - RNA, 19 nt, Artificial Sequence
  Description of Artificial Sequence: Synthetic oligonucleotide
ugugcuacuacauuaaugu

SEQ ID NO: 424564 - RNA, 19 nt, Artificial Sequence
  Description of Artificial Sequence: Synthetic oligonucleotide
cuuuccuacgaacagaugg

SEQ ID NO: 424565 - RNA, 19 nt, Artificial Sequence
  Description of Artificial Sequence: Synthetic oligonucleotide
auuaauguagcccaguacu

SEQ ID NO: 424566 - RNA, 19 nt, Artificial Sequence
  Description of Artificial Sequence: Synthetic oligonucleotide
uugcauaggagcuuuaggg

SEQ ID NO: 424567 - RNA, 19 nt, Artificial Sequence
  Description of Artificial Sequence: Synthetic oligonucleotide
agcuuuaggguauauaggg

SEQ ID NO: 424568 - RNA, 19 nt, Artificial Sequence
  Description of Artificial Sequence: Synthetic oligonucleotide
ugcuacuacauuaauguag

SEQ ID NO: 424569 - RNA, 19 nt, Artificial Sequence
  Description of Artificial Sequence: Synthetic oligonucleotide
acuacauuaauguagccca

SEQ ID NO: 424570 - RNA, 19 nt, Artificial Sequence
  Description of Artificial Sequence: Synthetic oligonucleotide
ugcaacucuguacauaagg

SEQ ID NO: 424571 - RNA, 19 nt, Artificial Sequence
  Description of Artificial Sequence: Synthetic oligonucleotide
aagucuugcuaauggaugg

SEQ ID NO: 424572 - RNA, 19 nt, Artificial Sequence
  Description of Artificial Sequence: Synthetic oligonucleotide
agaucaagagcuuuccuac

SEQ ID NO: 424573 - RNA, 19 nt, Artificial Sequence
  Description of Artificial Sequence: Synthetic oligonucleotide
uuaaauaucggcagaugug

SEQ ID NO: 424574 - RNA, 19 nt, Artificial Sequence
  Description of Artificial Sequence: Synthetic oligonucleotide
ucugcuaugcacagcaggg

SEQ ID NO: 424575 - RNA, 19 nt, Artificial Sequence
  Description of Artificial Sequence: Synthetic oligonucleotide
auuaaauaucggcagaugu

SEQ ID NO: 424576 - RNA, 19 nt, Artificial Sequence
  Description of Artificial Sequence: Synthetic oligonucleotide
acaagcagcacuuuucagg

SEQ ID NO: 424577 - RNA, 19 nt, Artificial Sequence
  Description of Artificial Sequence: Synthetic oligonucleotide
aaagcggugaacuguuuuc

SEQ ID NO: 424578 - RNA, 19 nt, Artificial Sequence
  Description of Artificial Sequence: Synthetic oligonucleotide
acucuuacuagauacuguc

SEQ ID NO: 424579 - RNA, 19 nt, Artificial Sequence
  Description of Artificial Sequence: Synthetic oligonucleotide
ugcuaagacaguaaucaag

SEQ ID NO: 424580 - RNA, 19 nt, Artificial Sequence
  Description of Artificial Sequence: Synthetic oligonucleotide
aaaguaauauggcaccaca

SEQ ID NO: 424581 - RNA, 19 nt, Artificial Sequence
  Description of Artificial Sequence: Synthetic oligonucleotide
ugauuggugagacaagagc

SEQ ID NO: 424582 - RNA, 19 nt, Artificial Sequence
  Description of Artificial Sequence: Synthetic oligonucleotide
cuugaaaccgcucuucucc

SEQ ID NO: 424583 - RNA, 19 nt, Artificial Sequence
  Description of Artificial Sequence: Synthetic oligonucleotide
gaagaucuuguauaagcag

SEQ ID NO: 424584 - RNA, 19 nt, Artificial Sequence
  Description of Artificial Sequence: Synthetic oligonucleotide
aaaaguaauauggcaccac

SEQ ID NO: 424585 - RNA, 19 nt, Artificial Sequence
  Description of Artificial Sequence: Synthetic oligonucleotide
ucuuggcccaaucauacag

SEQ ID NO: 424586 - RNA, 19 nt, Artificial Sequence
  Description of Artificial Sequence: Synthetic oligonucleotide
acugcuaagacaguaauca

SEQ ID NO: 424587 - RNA, 19 nt, Artificial Sequence
  Description of Artificial Sequence: Synthetic oligonucleotide
uuguauaagcaguuuaaga

SEQ ID NO: 424588 - RNA, 19 nt, Artificial Sequence
  Description of Artificial Sequence: Synthetic oligonucleotide
uggaggauaugcaucaagc

SEQ ID NO: 424589 - RNA, 19 nt, Artificial Sequence
  Description of Artificial Sequence: Synthetic oligonucleotide
cacaacaagacggaaaucc

SEQ ID NO: 424590 - RNA, 19 nt, Artificial Sequence
  Description of Artificial Sequence: Synthetic oligonucleotide
guaauauggcaccacaccc

SEQ ID NO: 424591 - RNA, 19 nt, Artificial Sequence
  Description of Artificial Sequence: Synthetic oligonucleotide
uaggauauuaggaccacca

SEQ ID NO: 424592 - RNA, 19 nt, Artificial Sequence
  Description of Artificial Sequence: Synthetic oligonucleotide
uucacaacaagacggaaau

SEQ ID NO: 424593 - RNA, 19 nt, Artificial Sequence
  Description of Artificial Sequence: Synthetic oligonucleotide
ugcaaugcagggaacuagg

SEQ ID NO: 424594 - RNA, 19 nt, Artificial Sequence
  Description of Artificial Sequence: Synthetic oligonucleotide
uaaauaucggcagauguga

SEQ ID NO: 424595 - RNA, 19 nt, Artificial Sequence
  Description of Artificial Sequence: Synthetic oligonucleotide
ugcacaauggccagaagga

SEQ ID NO: 424596 - RNA, 19 nt, Artificial Sequence
  Description of Artificial Sequence: Synthetic oligonucleotide
ggagcuuuaggguauauag

SEQ ID NO: 424597 - RNA, 19 nt, Artificial Sequence
  Description of Artificial Sequence: Synthetic oligonucleotide
aacuaggugcuuugucacc

SEQ ID NO: 424598 - RNA, 19 nt, Artificial Sequence
  Description of Artificial Sequence: Synthetic oligonucleotide
ucuaggugaaucaccuggg

SEQ ID NO: 424599 - RNA, 19 nt, Artificial Sequence
  Description of Artificial Sequence: Synthetic oligonucleotide
uuuccuacgaacagauggc

SEQ ID NO: 424600 - RNA, 19 nt, Artificial Sequence
  Description of Artificial Sequence: Synthetic oligonucleotide
ugcuaugcacagcagggcg

SEQ ID NO: 424601 - RNA, 19 nt, Artificial Sequence
  Description of Artificial Sequence: Synthetic oligonucleotide
uugagggguuuccacaugg

SEQ ID NO: 424602 - RNA, 19 nt, Artificial Sequence
  Description of Artificial Sequence: Synthetic oligonucleotide
uuacuagauacugucuugg

SEQ ID NO: 424603 - RNA, 19 nt, Artificial Sequence
  Description of Artificial Sequence: Synthetic oligonucleotide
uuaauguagcccaguacug

SEQ ID NO: 424604 - RNA, 19 nt, Artificial Sequence
  Description of Artificial Sequence: Synthetic oligonucleotide
ugcuagaaaaggaauggac

SEQ ID NO: 424605 - RNA, 19 nt, Artificial Sequence
  Description of Artificial Sequence: Synthetic oligonucleotide
ucauaaaugggcccaugug

SEQ ID NO: 424606 - RNA, 19 nt, Artificial Sequence
  Description of Artificial Sequence: Synthetic oligonucleotide
uucgcuguggaccaacuca

SEQ ID NO: 424607 - RNA, 19 nt, Artificial Sequence
  Description of Artificial Sequence: Synthetic oligonucleotide
uaaaacaccaccccauuua

SEQ ID NO: 424608 - RNA, 19 nt, Artificial Sequence
  Description of Artificial Sequence: Synthetic oligonucleotide
gucucaacaacuuugugca

SEQ ID NO: 424609 - RNA, 19 nt, Artificial Sequence
  Description of Artificial Sequence: Synthetic oligonucleotide
ucuugcuaauggaugguag

SEQ ID NO: 424610 - RNA, 19 nt, Artificial Sequence
  Description of Artificial Sequence: Synthetic oligonucleotide
aaagucuugcuaauggaug

SEQ ID NO: 424611 - RNA, 19 nt, Artificial Sequence
  Description of Artificial Sequence: Synthetic oligonucleotide
ugcaaaccgcaccuuaggg

SEQ ID NO: 424612 - RNA, 19 nt, Artificial Sequence
  Description of Artificial Sequence: Synthetic oligonucleotide
aaguaauauggcaccacac

SEQ ID NO: 424613 - RNA, 19 nt, Artificial Sequence
  Description of Artificial Sequence: Synthetic oligonucleotide
uuuaggguauauagggcug

SEQ ID NO: 424614 - RNA, 19 nt, Artificial Sequence
  Description of Artificial Sequence: Synthetic oligonucleotide
uuuagaaagcggugaacug

SEQ ID NO: 424615 - RNA, 19 nt, Artificial Sequence
  Description of Artificial Sequence: Synthetic oligonucleotide
caugucguaagcuuugcug

SEQ ID NO: 424616 - RNA, 19 nt, Artificial Sequence
  Description of Artificial Sequence: Synthetic oligonucleotide
ucacauucgucuuccauca

SEQ ID NO: 424617 - RNA, 19 nt, Artificial Sequence
  Description of Artificial Sequence: Synthetic oligonucleotide
ucuuacuagauacugucuu

SEQ ID NO: 424618 - RNA, 19 nt, Artificial Sequence
  Description of Artificial Sequence: Synthetic oligonucleotide
agauuguaaaaugucagca

SEQ ID NO: 424619 - RNA, 19 nt, Artificial Sequence
  Description of Artificial Sequence: Synthetic oligonucleotide
gaggauaugcaucaagcuc

SEQ ID NO: 424620 - RNA, 19 nt, Artificial Sequence
  Description of Artificial Sequence: Synthetic oligonucleotide
auaugcaucaagcucugga

SEQ ID NO: 424621 - RNA, 19 nt, Artificial Sequence
  Description of Artificial Sequence: Synthetic oligonucleotide
ggugcuaucagcuguacug

SEQ ID NO: 424622 - RNA, 19 nt, Artificial Sequence
  Description of Artificial Sequence: Synthetic oligonucleotide
uggaccaacucacuggugu

SEQ ID NO: 424623 - RNA, 19 nt, Artificial Sequence
  Description of Artificial Sequence: Synthetic oligonucleotide
auaucggcagaugugaaag

SEQ ID NO: 424624 - RNA, 19 nt, Artificial Sequence
  Description of Artificial Sequence: Synthetic oligonucleotide
cagauuguaaaaugucagc

SEQ ID NO: 424625 - RNA, 19 nt, Artificial Sequence
  Description of Artificial Sequence: Synthetic oligonucleotide
gcuaagacaguaaucaagg

SEQ ID NO: 424626 - RNA, 19 nt, Artificial Sequence
  Description of Artificial Sequence: Synthetic oligonucleotide
ugucuuggcccaaucauac

SEQ ID NO: 424627 - RNA, 19 nt, Artificial Sequence
  Description of Artificial Sequence: Synthetic oligonucleotide
cugcucaaagccauguagg

SEQ ID NO: 424628 - RNA, 19 nt, Artificial Sequence
  Description of Artificial Sequence: Synthetic oligonucleotide
aaagaucaagagcuuuccu

SEQ ID NO: 424629 - RNA, 19 nt, Artificial Sequence
  Description of Artificial Sequence: Synthetic oligonucleotide
auuuucucuaggugaauca

SEQ ID NO: 424630 - RNA, 19 nt, Artificial Sequence
  Description of Artificial Sequence: Synthetic oligonucleotide
cuugcauaggagcuuuagg

SEQ ID NO: 424631 - RNA, 19 nt, Artificial Sequence
  Description of Artificial Sequence: Synthetic oligonucleotide
cuuacuagauacugucuug

SEQ ID NO: 424632 - RNA, 19 nt, Artificial Sequence
  Description of Artificial Sequence: Synthetic oligonucleotide
cauaaaugggcccauguga

SEQ ID NO: 424633 - RNA, 19 nt, Artificial Sequence
  Description of Artificial Sequence: Synthetic oligonucleotide
uauuaggaccaccacuuuc

SEQ ID NO: 424634 - RNA, 19 nt, Artificial Sequence
  Description of Artificial Sequence: Synthetic oligonucleotide
gugucugccucuaaaauag

SEQ ID NO: 424635 - RNA, 19 nt, Artificial Sequence
  Description of Artificial Sequence: Synthetic oligonucleotide
agcgaacagagugaaaagg

SEQ ID NO: 424636 - RNA, 19 nt, Artificial Sequence
  Description of Artificial Sequence: Synthetic oligonucleotide
ucugucuuggcccaaucau

SEQ ID NO: 424637 - RNA, 19 nt, Artificial Sequence
  Description of Artificial Sequence: Synthetic oligonucleotide
uacuagauacugucuuggg

SEQ ID NO: 424638 - RNA, 19 nt, Artificial Sequence
  Description of Artificial Sequence: Synthetic oligonucleotide
ucuagauacuggaggauau

SEQ ID NO: 424639 - RNA, 19 nt, Artificial Sequence
  Description of Artificial Sequence: Synthetic oligonucleotide
aggauaugcaucaagcucu

SEQ ID NO: 424640 - RNA, 19 nt, Artificial Sequence
  Description of Artificial Sequence: Synthetic oligonucleotide
guggccagcgaacagagug

SEQ ID NO: 424641 - RNA, 19 nt, Artificial Sequence
  Description of Artificial Sequence: Synthetic oligonucleotide
ugcauaggagcuuuagggu

SEQ ID NO: 424642 - RNA, 19 nt, Artificial Sequence
  Description of Artificial Sequence: Synthetic oligonucleotide
aacaacaagcagcacuuuu

SEQ ID NO: 424643 - RNA, 19 nt, Artificial Sequence
  Description of Artificial Sequence: Synthetic oligonucleotide
ugguaguaggacucgaggu

SEQ ID NO: 424644 - RNA, 19 nt, Artificial Sequence
  Description of Artificial Sequence: Synthetic oligonucleotide
aacaagacggaaauccaga

SEQ ID NO: 424645 - RNA, 19 nt, Artificial Sequence
  Description of Artificial Sequence: Synthetic oligonucleotide
cuaagacaguaaucaaggc

SEQ ID NO: 424646 - RNA, 19 nt, Artificial Sequence
  Description of Artificial Sequence: Synthetic oligonucleotide
cuuguauaagcaguuuaag

SEQ ID NO: 424647 - RNA, 19 nt, Artificial Sequence
  Description of Artificial Sequence: Synthetic oligonucleotide
uaauggaugguaguaggac

SEQ ID NO: 424648 - RNA, 19 nt, Artificial Sequence
  Description of Artificial Sequence: Synthetic oligonucleotide
cagaaguagcucugcagcg

SEQ ID NO: 424649 - RNA, 19 nt, Artificial Sequence
  Description of Artificial Sequence: Synthetic oligonucleotide
ucacucuuacuagauacug

SEQ ID NO: 424650 - RNA, 19 nt, Artificial Sequence
  Description of Artificial Sequence: Synthetic oligonucleotide
gaaaccgcucuucuccucc

SEQ ID NO: 424651 - RNA, 19 nt, Artificial Sequence
  Description of Artificial Sequence: Synthetic oligonucleotide
ugaaucaccuggguuagca

SEQ ID NO: 424652 - RNA, 19 nt, Artificial Sequence
  Description of Artificial Sequence: Synthetic oligonucleotide
gagcuuuaggguauauagg

SEQ ID NO: 424653 - RNA, 19 nt, Artificial Sequence
  Description of Artificial Sequence: Synthetic oligonucleotide
uuuacuccuuugcaacucu

SEQ ID NO: 424654 - RNA, 19 nt, Artificial Sequence
  Description of Artificial Sequence: Synthetic oligonucleotide
ugcuaauggaugguaguag

SEQ ID NO: 424655 - RNA, 19 nt, Artificial Sequence
  Description of Artificial Sequence: Synthetic oligonucleotide
uucacucuuacuagauacu

SEQ ID NO: 424656 - RNA, 19 nt, Artificial Sequence
  Description of Artificial Sequence: Synthetic oligonucleotide
acguaagaacaugagaaug

SEQ ID NO: 424657 - RNA, 19 nt, Artificial Sequence
  Description of Artificial Sequence: Synthetic oligonucleotide
ugaagugugggagagucuc

SEQ ID NO: 424658 - RNA, 19 nt, Artificial Sequence
  Description of Artificial Sequence: Synthetic oligonucleotide
gaaguagcucugcagcggc

SEQ ID NO: 424659 - RNA, 19 nt, Artificial Sequence
  Description of Artificial Sequence: Synthetic oligonucleotide
uggguuagcaguccuucca

SEQ ID NO: 424660 - RNA, 19 nt, Artificial Sequence
  Description of Artificial Sequence: Synthetic oligonucleotide
uccuacgaacagauggcag

SEQ ID NO: 424661 - RNA, 19 nt, Artificial Sequence
  Description of Artificial Sequence: Synthetic oligonucleotide
gauguuuacuugguucaag

SEQ ID NO: 424662 - RNA, 19 nt, Artificial Sequence
  Description of Artificial Sequence: Synthetic oligonucleotide
cucaacaacuuugugcaag

SEQ ID NO: 424663 - RNA, 19 nt, Artificial Sequence
  Description of Artificial Sequence: Synthetic oligonucleotide
ugucaggcggauguuagcc

SEQ ID NO: 424664 - RNA, 19 nt, Artificial Sequence
  Description of Artificial Sequence: Synthetic oligonucleotide
auauagggcugucugucug

SEQ ID NO: 424665 - RNA, 19 nt, Artificial Sequence
  Description of Artificial Sequence: Synthetic oligonucleotide
ugucguaagcuuugcugag

SEQ ID NO: 424666 - RNA, 19 nt, Artificial Sequence
  Description of Artificial Sequence: Synthetic oligonucleotide
gaugucaggcggauguuag

SEQ ID NO: 424667 - RNA, 19 nt, Artificial Sequence
  Description of Artificial Sequence: Synthetic oligonucleotide
gacaaauguuucugugggc

SEQ ID NO: 424668 - RNA, 19 nt, Artificial Sequence
  Description of Artificial Sequence: Synthetic oligonucleotide
ugucacccguucuugaaac

SEQ ID NO: 424669 - RNA, 19 nt, Artificial Sequence
  Description of Artificial Sequence: Synthetic oligonucleotide
agaaguagcucugcagcgg

SEQ ID NO: 424670 - RNA, 19 nt, Artificial Sequence
  Description of Artificial Sequence: Synthetic oligonucleotide
cuggauagucuucuggcac

SEQ ID NO: 424671 - RNA, 19 nt, Artificial Sequence
  Description of Artificial Sequence: Synthetic oligonucleotide
uguagcccaguacuguuuc

SEQ ID NO: 424672 - RNA, 19 nt, Artificial Sequence
  Description of Artificial Sequence: Synthetic oligonucleotide
ucaggcggauguuagccug

SEQ ID NO: 424673 - RNA, 19 nt, Artificial Sequence
  Description of Artificial Sequence: Synthetic oligonucleotide
gcuacuacauuaauguagc

SEQ ID NO: 424674 - RNA, 19 nt, Artificial Sequence
  Description of Artificial Sequence: Synthetic oligonucleotide
gguaguaggacucgaggug

SEQ ID NO: 424675 - RNA, 19 nt, Artificial Sequence
  Description of Artificial Sequence: Synthetic oligonucleotide
augucaggcggauguuagc

SEQ ID NO: 424676 - RNA, 19 nt, Artificial Sequence
  Description of Artificial Sequence: Synthetic oligonucleotide
gcaguuuaagauaaacugc

SEQ ID NO: 424677 - RNA, 19 nt, Artificial Sequence
  Description of Artificial Sequence: Synthetic oligonucleotide
gaugguaguaggacucgag

SEQ ID NO: 424678 - RNA, 19 nt, Artificial Sequence
  Description of Artificial Sequence: Synthetic oligonucleotide
ucgauucccugcuccaaag

SEQ ID NO: 424679 - RNA, 19 nt, Artificial Sequence
  Description of Artificial Sequence: Synthetic oligonucleotide
ccuacgaacagauggcagg

SEQ ID NO: 424680 - RNA, 19 nt, Artificial Sequence
  Description of Artificial Sequence: Synthetic oligonucleotide
auggccacuagacagccaa

SEQ ID NO: 424681 - RNA, 19 nt, Artificial Sequence
  Description of Artificial Sequence: Synthetic oligonucleotide
agacaguaaucaaggcugc

SEQ ID NO: 424682 - RNA, 19 nt, Artificial Sequence
  Description of Artificial Sequence: Synthetic oligonucleotide
gauauuaggaccaccacuu

SEQ ID NO: 424683 - RNA, 19 nt, Artificial Sequence
  Description of Artificial Sequence: Synthetic oligonucleotide
uguaauucucucucagcuu

SEQ ID NO: 424684 - RNA, 19 nt, Artificial Sequence
  Description of Artificial Sequence: Synthetic oligonucleotide
ggaacuaggugcuuuguca

SEQ ID NO: 424685 - RNA, 19 nt, Artificial Sequence
  Description of Artificial Sequence: Synthetic oligonucleotide
cuuuaggguauauagggcu

SEQ ID NO: 424686 - RNA, 19 nt, Artificial Sequence
  Description of Artificial Sequence: Synthetic oligonucleotide
caagagcuuuccuacgaac

SEQ ID NO: 424687 - RNA, 19 nt, Artificial Sequence
  Description of Artificial Sequence: Synthetic oligonucleotide
gcaaaccgcaccuuagggg

SEQ ID NO: 424688 - RNA, 19 nt, Artificial Sequence
  Description of Artificial Sequence: Synthetic oligonucleotide
uagauacugucuugggagu

SEQ ID NO: 424689 - RNA, 19 nt, Artificial Sequence
  Description of Artificial Sequence: Synthetic oligonucleotide
acauuaaauaucggcagau

SEQ ID NO: 424690 - RNA, 19 nt, Artificial Sequence
  Description of Artificial Sequence: Synthetic oligonucleotide
uacuccuuugcaacucugu

SEQ ID NO: 424691 - RNA, 19 nt, Artificial Sequence
  Description of Artificial Sequence: Synthetic oligonucleotide
cuacauuaauguagcccag

SEQ ID NO: 424692 - RNA, 19 nt, Artificial Sequence
  Description of Artificial Sequence: Synthetic oligonucleotide
auguuagccugugaggcag

SEQ ID NO: 424693 - RNA, 19 nt, Artificial Sequence
  Description of Artificial Sequence: Synthetic oligonucleotide
ucgcuagugauuuucucua

SEQ ID NO: 424694 - RNA, 19 nt, Artificial Sequence
  Description of Artificial Sequence: Synthetic oligonucleotide
guauauagggcugucuguc

SEQ ID NO: 424695 - RNA, 19 nt, Artificial Sequence
  Description of Artificial Sequence: Synthetic oligonucleotide
ggguauauagggcugucug

SEQ ID NO: 424696 - RNA, 19 nt, Artificial Sequence
  Description of Artificial Sequence: Synthetic oligonucleotide
caguacuguuucuagcaac

SEQ ID NO: 424697 - RNA, 19 nt, Artificial Sequence
  Description of Artificial Sequence: Synthetic oligonucleotide
gcuagugauuuucucuagg

SEQ ID NO: 424698 - RNA, 19 nt, Artificial Sequence
  Description of Artificial Sequence: Synthetic oligonucleotide
guaggacucgaggugacag

SEQ ID NO: 424699 - RNA, 19 nt, Artificial Sequence
  Description of Artificial Sequence: Synthetic oligonucleotide
acaagacggaaauccagaa

SEQ ID NO: 424700 - RNA, 19 nt, Artificial Sequence
  Description of Artificial Sequence: Synthetic oligonucleotide
guaguugagggguuuccac

SEQ ID NO: 424701 - RNA, 19 nt, Artificial Sequence
  Description of Artificial Sequence: Synthetic oligonucleotide
ucgcuguggaccaacucac

SEQ ID NO: 424702 - RNA, 19 nt, Artificial Sequence
  Description of Artificial Sequence: Synthetic oligonucleotide
ucguaagcuuugcugagua

SEQ ID NO: 424703 - RNA, 19 nt, Artificial Sequence
  Description of Artificial Sequence: Synthetic oligonucleotide
caacuuugugcaaggcagc

SEQ ID NO: 424704 - RNA, 19 nt, Artificial Sequence
  Description of Artificial Sequence: Synthetic oligonucleotide
caagacggaaauccagaac

SEQ ID NO: 424705 - RNA, 19 nt, Artificial Sequence
  Description of Artificial Sequence: Synthetic oligonucleotide
uucuagauacuggaggaua

SEQ ID NO: 424706 - RNA, 19 nt, Artificial Sequence
  Description of Artificial Sequence: Synthetic oligonucleotide
agaugugaaaguaccaaaa

SEQ ID NO: 424707 - RNA, 19 nt, Artificial Sequence
  Description of Artificial Sequence: Synthetic oligonucleotide
uggaugguaguaggacucg

SEQ ID NO: 424708 - RNA, 19 nt, Artificial Sequence
  Description of Artificial Sequence: Synthetic oligonucleotide
auaaaugggcccaugugau

SEQ ID NO: 424709 - RNA, 19 nt, Artificial Sequence
  Description of Artificial Sequence: Synthetic oligonucleotide
uucugugggagccccgaga

SEQ ID NO: 424710 - RNA, 19 nt, Artificial Sequence
  Description of Artificial Sequence: Synthetic oligonucleotide
gcggauguuagccugugag

SEQ ID NO: 424711 - RNA, 19 nt, Artificial Sequence
  Description of Artificial Sequence: Synthetic oligonucleotide
uguuagccugugaggcagg

SEQ ID NO: 424712 - RNA, 19 nt, Artificial Sequence
  Description of Artificial Sequence: Synthetic oligonucleotide
cauuucgcuagugauuuuc

SEQ ID NO: 424713 - RNA, 19 nt, Artificial Sequence
  Description of Artificial Sequence: Synthetic oligonucleotide
aagcggugaacuguuuucu

SEQ ID NO: 424714 - RNA, 19 nt, Artificial Sequence
  Description of Artificial Sequence: Synthetic oligonucleotide
uugaaaccgcucuucuccu

SEQ ID NO: 424715 - RNA, 19 nt, Artificial Sequence
  Description of Artificial Sequence: Synthetic oligonucleotide
aaaaggccuuucaacuucu

SEQ ID NO: 424716 - RNA, 19 nt, Artificial Sequence
  Description of Artificial Sequence: Synthetic oligonucleotide
gugaaaguaccaaaaguaa

SEQ ID NO: 424717 - RNA, 19 nt, Artificial Sequence
  Description of Artificial Sequence: Synthetic oligonucleotide
uacauuaauguagcccagu

SEQ ID NO: 424718 - RNA, 19 nt, Artificial Sequence
  Description of Artificial Sequence: Synthetic oligonucleotide
uucccaacuuccucuagau

SEQ ID NO: 424719 - RNA, 19 nt, Artificial Sequence
  Description of Artificial Sequence: Synthetic oligonucleotide
uuaggguauauagggcugu

SEQ ID NO: 424720 - RNA, 19 nt, Artificial Sequence
  Description of Artificial Sequence: Synthetic oligonucleotide
agcccaguacuguuucuag

SEQ ID NO: 424721 - RNA, 19 nt, Artificial Sequence
  Description of Artificial Sequence: Synthetic oligonucleotide
ucuagcaaccucugcucaa

SEQ ID NO: 424722 - RNA, 19 nt, Artificial Sequence
  Description of Artificial Sequence: Synthetic oligonucleotide
accgguaugaaaggcucuc

SEQ ID NO: 424723 - RNA, 19 nt, Artificial Sequence
  Description of Artificial Sequence: Synthetic oligonucleotide
aaaguggaggucaccucug

SEQ ID NO: 424724 - RNA, 19 nt, Artificial Sequence
  Description of Artificial Sequence: Synthetic oligonucleotide
uagggcucgccaaaacuuc

SEQ ID NO: 424725 - RNA, 19 nt, Artificial Sequence
  Description of Artificial Sequence: Synthetic oligonucleotide
ccacguaagaacaugagaa

SEQ ID NO: 424726 - RNA, 19 nt, Artificial Sequence
  Description of Artificial Sequence: Synthetic oligonucleotide
cagcgaacagagugaaaag

SEQ ID NO: 424727 - RNA, 19 nt, Artificial Sequence
  Description of Artificial Sequence: Synthetic oligonucleotide
acaguguaguagcuagggu

SEQ ID NO: 424728 - RNA, 19 nt, Artificial Sequence
  Description of Artificial Sequence: Synthetic oligonucleotide
agaaccgguaugaaaggcu

SEQ ID NO: 424729 - RNA, 19 nt, Artificial Sequence
  Description of Artificial Sequence: Synthetic oligonucleotide
uggccagcgaacagaguga

SEQ ID NO: 424730 - RNA, 19 nt, Artificial Sequence
  Description of Artificial Sequence: Synthetic oligonucleotide
agagucucaacaacuuugu

SEQ ID NO: 424731 - RNA, 19 nt, Artificial Sequence
  Description of Artificial Sequence: Synthetic oligonucleotide
auucacaacaagacggaaa

SEQ ID NO: 424732 - RNA, 19 nt, Artificial Sequence
  Description of Artificial Sequence: Synthetic oligonucleotide
ugucugccucuaaaauagc

SEQ ID NO: 424733 - RNA, 19 nt, Artificial Sequence
  Description of Artificial Sequence: Synthetic oligonucleotide
aaccgcaccuuaggggagg

SEQ ID NO: 424734 - RNA, 19 nt, Artificial Sequence
  Description of Artificial Sequence: Synthetic oligonucleotide
uuccuacgaacagauggca

SEQ ID NO: 424735 - RNA, 19 nt, Artificial Sequence
  Description of Artificial Sequence: Synthetic oligonucleotide
uacgaacagauggcagggg

SEQ ID NO: 424736 - RNA, 19 nt, Artificial Sequence
  Description of Artificial Sequence: Synthetic oligonucleotide
uuacuugguucaagguguc

SEQ ID NO: 424737 - RNA, 19 nt, Artificial Sequence
  Description of Artificial Sequence: Synthetic oligonucleotide
guaguaggacucgagguga

SEQ ID NO: 424738 - RNA, 19 nt, Artificial Sequence
  Description of Artificial Sequence: Synthetic oligonucleotide
gcgaacagagugaaaaggc

SEQ ID NO: 424739 - RNA, 19 nt, Artificial Sequence
  Description of Artificial Sequence: Synthetic oligonucleotide
uaucggcagaugugaaagu

SEQ ID NO: 424740 - RNA, 19 nt, Artificial Sequence
  Description of Artificial Sequence: Synthetic oligonucleotide
cacccguucuugaaaccgc

SEQ ID NO: 424741 - RNA, 19 nt, Artificial Sequence
  Description of Artificial Sequence: Synthetic oligonucleotide
aaauaucggcagaugugaa

SEQ ID NO: 424742 - RNA, 19 nt, Artificial Sequence
  Description of Artificial Sequence: Synthetic oligonucleotide
cagaaccgguaugaaaggc

SEQ ID NO: 424743 - RNA, 19 nt, Artificial Sequence
  Description of Artificial Sequence: Synthetic oligonucleotide
gugcaaugcagggaacuag

SEQ ID NO: 424744 - RNA, 19 nt, Artificial Sequence
  Description of Artificial Sequence: Synthetic oligonucleotide
ugguaguugagggguuucc

SEQ ID NO: 424745 - RNA, 19 nt, Artificial Sequence
  Description of Artificial Sequence: Synthetic oligonucleotide
uaagagaugucaggcggau

SEQ ID NO: 424746 - RNA, 19 nt, Artificial Sequence
  Description of Artificial Sequence: Synthetic oligonucleotide
accuuaggggaggagucuc

SEQ ID NO: 424747 - RNA, 19 nt, Artificial Sequence
  Description of Artificial Sequence: Synthetic oligonucleotide
uggugcuaucagcuguacu

SEQ ID NO: 424748 - RNA, 19 nt, Artificial Sequence
  Description of Artificial Sequence: Synthetic oligonucleotide
cagacagacuucgcugugg

SEQ ID NO: 424749 - RNA, 19 nt, Artificial Sequence
  Description of Artificial Sequence: Synthetic oligonucleotide
gaaggacacugacaaauau

SEQ ID NO: 424750 - RNA, 19 nt, Artificial Sequence
  Description of Artificial Sequence: Synthetic oligonucleotide
agaucuuguauaagcaguu

SEQ ID NO: 424751 - RNA, 19 nt, Artificial Sequence
  Description of Artificial Sequence: Synthetic oligonucleotide
aaaggccuuucaacuucuc

SEQ ID NO: 424752 - RNA, 19 nt, Artificial Sequence
  Description of Artificial Sequence: Synthetic oligonucleotide
cagacuucgcuguggacca

SEQ ID NO: 424753 - RNA, 19 nt, Artificial Sequence
  Description of Artificial Sequence: Synthetic oligonucleotide
uaguaggacucgaggugac

SEQ ID NO: 424754 - RNA, 19 nt, Artificial Sequence
  Description of Artificial Sequence: Synthetic oligonucleotide
ugugcaaugcagggaacua

SEQ ID NO: 424755 - RNA, 19 nt, Artificial Sequence
  Description of Artificial Sequence: Synthetic oligonucleotide
uaggacucgaggugacagu

SEQ ID NO: 424756 - RNA, 19 nt, Artificial Sequence
  Description of Artificial Sequence: Synthetic oligonucleotide
gcaggacccauuucgcuag

SEQ ID NO: 424757 - RNA, 19 nt, Artificial Sequence
  Description of Artificial Sequence: Synthetic oligonucleotide
auuucgcuagugauuuucu

SEQ ID NO: 424758 - RNA, 19 nt, Artificial Sequence
  Description of Artificial Sequence: Synthetic oligonucleotide
gauuggaagccaggagcug

SEQ ID NO: 424759 - RNA, 19 nt, Artificial Sequence
  Description of Artificial Sequence: Synthetic oligonucleotide
cagcgauggcaucaggcug

SEQ ID NO: 424760 - RNA, 19 nt, Artificial Sequence
  Description of Artificial Sequence: Synthetic oligonucleotide
gacucgaggugacagugua

SEQ ID NO: 424761 - RNA, 19 nt, Artificial Sequence
  Description of Artificial Sequence: Synthetic oligonucleotide
aguuuaagauaaacugcaa

SEQ ID NO: 424762 - RNA, 19 nt, Artificial Sequence
  Description of Artificial Sequence: Synthetic oligonucleotide
uaaaugggcccaugugauu

SEQ ID NO: 424763 - RNA, 19 nt, Artificial Sequence
  Description of Artificial Sequence: Synthetic oligonucleotide
caaaguggaggucaccucu

SEQ ID NO: 424764 - RNA, 19 nt, Artificial Sequence
  Description of Artificial Sequence: Synthetic oligonucleotide
ucccaacuuccucuagauc

SEQ ID NO: 424765 - RNA, 19 nt, Artificial Sequence
  Description of Artificial Sequence: Synthetic oligonucleotide
auauuaggaccaccacuuu

SEQ ID NO: 424766 - RNA, 19 nt, Artificial Sequence
  Description of Artificial Sequence: Synthetic oligonucleotide
caccccauuuacuccuuug

SEQ ID NO: 424767 - RNA, 19 nt, Artificial Sequence
  Description of Artificial Sequence: Synthetic oligonucleotide
aaaccgcaccuuaggggag

SEQ ID NO: 424768 - RNA, 19 nt, Artificial Sequence
  Description of Artificial Sequence: Synthetic oligonucleotide
accaacucacugguguucu

SEQ ID NO: 424769 - RNA, 19 nt, Artificial Sequence
  Description of Artificial Sequence: Synthetic oligonucleotide
cguaagaacaugagaauga

SEQ ID NO: 424770 - RNA, 19 nt, Artificial Sequence
  Description of Artificial Sequence: Synthetic oligonucleotide
augcacagcagggcgcuuc

SEQ ID NO: 424771 - RNA, 19 nt, Artificial Sequence
  Description of Artificial Sequence: Synthetic oligonucleotide
ccucuaaccacagagacaa

SEQ ID NO: 424772 - RNA, 19 nt, Artificial Sequence
  Description of Artificial Sequence: Synthetic oligonucleotide
ggccagugcuuccaaagug

SEQ ID NO: 424773 - RNA, 19 nt, Artificial Sequence
  Description of Artificial Sequence: Synthetic oligonucleotide
gucacccguucuugaaacc

SEQ ID NO: 424774 - RNA, 19 nt, Artificial Sequence
  Description of Artificial Sequence: Synthetic oligonucleotide
cuagacagccaaugaucca

SEQ ID NO: 424775 - RNA, 19 nt, Artificial Sequence
  Description of Artificial Sequence: Synthetic oligonucleotide
ugaaaccgcucuucuccuc

SEQ ID NO: 424776 - RNA, 19 nt, Artificial Sequence
  Description of Artificial Sequence: Synthetic oligonucleotide
ucucaacaacuuugugcaa

SEQ ID NO: 424777 - RNA, 19 nt, Artificial Sequence
  Description of Artificial Sequence: Synthetic oligonucleotide
gcuagaaaaggaauggacu

SEQ ID NO: 424778 - RNA, 19 nt, Artificial Sequence
  Description of Artificial Sequence: Synthetic oligonucleotide
aggcaggacccauuucgcu

SEQ ID NO: 424779 - RNA, 19 nt, Artificial Sequence
  Description of Artificial Sequence: Synthetic oligonucleotide
gcuuuaggguauauagggc

SEQ ID NO: 424780 - RNA, 19 nt, Artificial Sequence
  Description of Artificial Sequence: Synthetic oligonucleotide
caacucacugguguucuuc

SEQ ID NO: 424781 - RNA, 19 nt, Artificial Sequence
  Description of Artificial Sequence: Synthetic oligonucleotide
gacagacuucgcuguggac

SEQ ID NO: 424782 - RNA, 19 nt, Artificial Sequence
  Description of Artificial Sequence: Synthetic oligonucleotide
aaccgguaugaaaggcucu

SEQ ID NO: 424783 - RNA, 19 nt, Artificial Sequence
  Description of Artificial Sequence: Synthetic oligonucleotide
gaaagcggugaacuguuuu

SEQ ID NO: 424784 - RNA, 19 nt, Artificial Sequence
  Description of Artificial Sequence: Synthetic oligonucleotide
agcaaugcaguuggucaga

SEQ ID NO: 424785 - RNA, 19 nt, Artificial Sequence
  Description of Artificial Sequence: Synthetic oligonucleotide
uuccaaaguggaggucacc

SEQ ID NO: 424786 - RNA, 19 nt, Artificial Sequence
  Description of Artificial Sequence: Synthetic oligonucleotide
ugucugcaaaagguuucac

SEQ ID NO: 424787 - RNA, 19 nt, Artificial Sequence
  Description of Artificial Sequence: Synthetic oligonucleotide
ugauuuucucuaggugaau

SEQ ID NO: 424788 - RNA, 19 nt, Artificial Sequence
  Description of Artificial Sequence: Synthetic oligonucleotide
ggccaugaaggacacugac

SEQ ID NO: 424789 - RNA, 19 nt, Artificial Sequence
  Description of Artificial Sequence: Synthetic oligonucleotide
aggguauauagggcugucu

SEQ ID NO: 424790 - RNA, 19 nt, Artificial Sequence
  Description of Artificial Sequence: Synthetic oligonucleotide
gagggauggccagugcuuc

SEQ ID NO: 424791 - RNA, 19 nt, Artificial Sequence
  Description of Artificial Sequence: Synthetic oligonucleotide
gcauaggagcuuuagggua

SEQ ID NO: 424792 - RNA, 19 nt, Artificial Sequence
  Description of Artificial Sequence: Synthetic oligonucleotide
gcugaugaagugugggaga

SEQ ID NO: 424793 - RNA, 19 nt, Artificial Sequence
  Description of Artificial Sequence: Synthetic oligonucleotide
agauguuuacuugguucaa

SEQ ID NO: 424794 - RNA, 19 nt, Artificial Sequence
  Description of Artificial Sequence: Synthetic oligonucleotide
gcuaucagcuguacugcag

SEQ ID NO: 424795 - RNA, 19 nt, Artificial Sequence
  Description of Artificial Sequence: Synthetic oligonucleotide
cuucgcuguggaccaacuc

SEQ ID NO: 424796 - RNA, 19 nt, Artificial Sequence
  Description of Artificial Sequence: Synthetic oligonucleotide
agguuucaccaaguggcca

SEQ ID NO: 424797 - RNA, 19 nt, Artificial Sequence
  Description of Artificial Sequence: Synthetic oligonucleotide
cggcagaugugaaaguacc

SEQ ID NO: 424798 - RNA, 19 nt, Artificial Sequence
  Description of Artificial Sequence: Synthetic oligonucleotide
cugucuuggcccaaucaua

SEQ ID NO: 424799 - RNA, 19 nt, Artificial Sequence
  Description of Artificial Sequence: Synthetic oligonucleotide
gguauauagggcugucugu

SEQ ID NO: 424800 - RNA, 19 nt, Artificial Sequence
  Description of Artificial Sequence: Synthetic oligonucleotide
cggauguuagccugugagg

SEQ ID NO: 424801 - RNA, 19 nt, Artificial Sequence
  Description of Artificial Sequence: Synthetic oligonucleotide
gaagugugggagagucuca

SEQ ID NO: 424802 - RNA, 19 nt, Artificial Sequence
  Description of Artificial Sequence: Synthetic oligonucleotide
ggugagacaagagcucuuc

SEQ ID NO: 424803 - RNA, 19 nt, Artificial Sequence
  Description of Artificial Sequence: Synthetic oligonucleotide
aggugucugcaaaagguuu

SEQ ID NO: 424804 - RNA, 19 nt, Artificial Sequence
  Description of Artificial Sequence: Synthetic oligonucleotide
cauucgucuuccaucaauu

SEQ ID NO: 424805 - RNA, 19 nt, Artificial Sequence
  Description of Artificial Sequence: Synthetic oligonucleotide
agauacugucuugggagua

SEQ ID NO: 424806 - RNA, 19 nt, Artificial Sequence
  Description of Artificial Sequence: Synthetic oligonucleotide
cugcuaagacaguaaucaa

SEQ ID NO: 424807 - RNA, 19 nt, Artificial Sequence
  Description of Artificial Sequence: Synthetic oligonucleotide
uaggguauauagggcuguc

SEQ ID NO: 424808 - RNA, 19 nt, Artificial Sequence
  Description of Artificial Sequence: Synthetic oligonucleotide
gggaacuaggugcuuuguc

SEQ ID NO: 424809 - RNA, 19 nt, Artificial Sequence
  Description of Artificial Sequence: Synthetic oligonucleotide
cugcuagaaaaggaaugga

SEQ ID NO: 424810 - RNA, 19 nt, Artificial Sequence
  Description of Artificial Sequence: Synthetic oligonucleotide
ccagcgaacagagugaaaa

SEQ ID NO: 424811 - RNA, 19 nt, Artificial Sequence
  Description of Artificial Sequence: Synthetic oligonucleotide
aaccgcucuucuccuccaa

SEQ ID NO: 424812 - RNA, 19 nt, Artificial Sequence
  Description of Artificial Sequence: Synthetic oligonucleotide
cucuuacuagauacugucu

SEQ ID NO: 424813 - RNA, 19 nt, Artificial Sequence
  Description of Artificial Sequence: Synthetic oligonucleotide
acucgaggugacaguguag

SEQ ID NO: 424814 - RNA, 19 nt, Artificial Sequence
  Description of Artificial Sequence: Synthetic oligonucleotide
cacguaagaacaugagaau

SEQ ID NO: 424815 - RNA, 19 nt, Artificial Sequence
  Description of Artificial Sequence: Synthetic oligonucleotide
ggauaugcaucaagcucug

SEQ ID NO: 424816 - RNA, 19 nt, Artificial Sequence
  Description of Artificial Sequence: Synthetic oligonucleotide
cucgaggugacaguguagu

SEQ ID NO: 424817 - RNA, 19 nt, Artificial Sequence
  Description of Artificial Sequence: Synthetic oligonucleotide
ggccacuagacagccaaug

SEQ ID NO: 424818 - RNA, 19 nt, Artificial Sequence
  Description of Artificial Sequence: Synthetic oligonucleotide
aggagcuuuaggguauaua

SEQ ID NO: 424819 - RNA, 19 nt, Artificial Sequence
  Description of Artificial Sequence: Synthetic oligonucleotide
cugaguagggcucgccaaa

SEQ ID NO: 424820 - RNA, 19 nt, Artificial Sequence
  Description of Artificial Sequence: Synthetic oligonucleotide
gucuuggcccaaucauaca

SEQ ID NO: 424821 - RNA, 19 nt, Artificial Sequence
  Description of Artificial Sequence: Synthetic oligonucleotide
ggaauggacucuggaagca

SEQ ID NO: 424822 - RNA, 19 nt, Artificial Sequence
  Description of Artificial Sequence: Synthetic oligonucleotide
agggaacuaggugcuuugu

SEQ ID NO: 424823 - RNA, 19 nt, Artificial Sequence
  Description of Artificial Sequence: Synthetic oligonucleotide
cuagcaaccucugcucaaa

SEQ ID NO: 424824 - RNA, 19 nt, Artificial Sequence
  Description of Artificial Sequence: Synthetic oligonucleotide
ggcgcuucccaggacauuc

SEQ ID NO: 424825 - RNA, 19 nt, Artificial Sequence
  Description of Artificial Sequence: Synthetic oligonucleotide
cccacguaagaacaugaga

SEQ ID NO: 424826 - RNA, 19 nt, Artificial Sequence
  Description of Artificial Sequence: Synthetic oligonucleotide
cugagggauggccagugcu

SEQ ID NO: 424827 - RNA, 19 nt, Artificial Sequence
  Description of Artificial Sequence: Synthetic oligonucleotide
ggcaggacccauuucgcua

SEQ ID NO: 424828 - RNA, 19 nt, Artificial Sequence
  Description of Artificial Sequence: Synthetic oligonucleotide
ccccacguaagaacaugag

SEQ ID NO: 424829 - RNA, 19 nt, Artificial Sequence
  Description of Artificial Sequence: Synthetic oligonucleotide
agggcucgccaaaacuuca

SEQ ID NO: 424830 - RNA, 19 nt, Artificial Sequence
  Description of Artificial Sequence: Synthetic oligonucleotide
acccguucuugaaaccgcu

SEQ ID NO: 424831 - RNA, 19 nt, Artificial Sequence
  Description of Artificial Sequence: Synthetic oligonucleotide
aggacccauuucgcuagug

SEQ ID NO: 424832 - RNA, 19 nt, Artificial Sequence
  Description of Artificial Sequence: Synthetic oligonucleotide
acuucgcuguggaccaacu

SEQ ID NO: 424833 - RNA, 19 nt, Artificial Sequence
  Description of Artificial Sequence: Synthetic oligonucleotide
guagggcucgccaaaacuu

SEQ ID NO: 424834 - RNA, 19 nt, Artificial Sequence
  Description of Artificial Sequence: Synthetic oligonucleotide
gaucuuguauaagcaguuu

SEQ ID NO: 424835 - RNA, 19 nt, Artificial Sequence
  Description of Artificial Sequence: Synthetic oligonucleotide
gugagacaagagcucuucu

SEQ ID NO: 424836 - RNA, 19 nt, Artificial Sequence
  Description of Artificial Sequence: Synthetic oligonucleotide
gucuugcuaauggauggua

SEQ ID NO: 424837 - RNA, 19 nt, Artificial Sequence
  Description of Artificial Sequence: Synthetic oligonucleotide
cuuucggggcaucuucugu

SEQ ID NO: 424838 - RNA, 19 nt, Artificial Sequence
  Description of Artificial Sequence: Synthetic oligonucleotide
ggcucgccaaaacuucaca

SEQ ID NO: 424839 - RNA, 19 nt, Artificial Sequence
  Description of Artificial Sequence: Synthetic oligonucleotide
ccuccaagccuauuuucca

SEQ ID NO: 424840 - RNA, 19 nt, Artificial Sequence
  Description of Artificial Sequence: Synthetic oligonucleotide
cguaagcuuugcugaguag

SEQ ID NO: 424841 - RNA, 19 nt, Artificial Sequence
  Description of Artificial Sequence: Synthetic oligonucleotide
ccgguaugaaaggcucucg

SEQ ID NO: 424842 - RNA, 19 nt, Artificial Sequence
  Description of Artificial Sequence: Synthetic oligonucleotide
cugugcaaugcagggaacu

SEQ ID NO: 424843 - RNA, 19 nt, Artificial Sequence
  Description of Artificial Sequence: Synthetic oligonucleotide
gcgcugagcagacagacuu

SEQ ID NO: 424844 - RNA, 19 nt, Artificial Sequence
  Description of Artificial Sequence: Synthetic oligonucleotide
guaguagcuagggucuuuu

SEQ ID NO: 424845 - RNA, 19 nt, Artificial Sequence
  Description of Artificial Sequence: Synthetic oligonucleotide
ggaugguaguaggacucga

SEQ ID NO: 424846 - RNA, 19 nt, Artificial Sequence
  Description of Artificial Sequence: Synthetic oligonucleotide
gucguaagcuuugcugagu

SEQ ID NO: 424847 - RNA, 19 nt, Artificial Sequence
  Description of Artificial Sequence: Synthetic oligonucleotide
gcaaaagguuucaccaagu

SEQ ID NO: 424848 - RNA, 19 nt, Artificial Sequence
  Description of Artificial Sequence: Synthetic oligonucleotide
gcuuuccuacgaacagaug

SEQ ID NO: 424849 - RNA, 19 nt, Artificial Sequence
  Description of Artificial Sequence: Synthetic oligonucleotide
ggacacugacaaauauuua

SEQ ID NO: 424850 - RNA, 19 nt, Artificial Sequence
  Description of Artificial Sequence: Synthetic oligonucleotide
caaugugcucuugcaagau

SEQ ID NO: 424851 - RNA, 19 nt, Artificial Sequence
  Description of Artificial Sequence: Synthetic oligonucleotide
ccaccauggccacuagaca

SEQ ID NO: 424852 - RNA, 19 nt, Artificial Sequence
  Description of Artificial Sequence: Synthetic oligonucleotide
cccguucuugaaaccgcuc

SEQ ID NO: 424853 - RNA, 19 nt, Artificial Sequence
  Description of Artificial Sequence: Synthetic oligonucleotide
ccguucuugaaaccgcucu

SEQ ID NO: 424854 - RNA, 19 nt, Artificial Sequence
  Description of Artificial Sequence: Synthetic oligonucleotide
uaugcacagcagggcgcuu

SEQ ID NO: 424855 - RNA, 19 nt, Artificial Sequence
  Description of Artificial Sequence: Synthetic oligonucleotide
cacauucgucuuccaucaa

SEQ ID NO: 424856 - RNA, 19 nt, Artificial Sequence
  Description of Artificial Sequence: Synthetic oligonucleotide
ccaagccuauuuuccagcu

SEQ ID NO: 424857 - RNA, 19 nt, Artificial Sequence
  Description of Artificial Sequence: Synthetic oligonucleotide
cgguaugaaaggcucucga

SEQ ID NO: 424858 - RNA, 19 nt, Artificial Sequence
  Description of Artificial Sequence: Synthetic oligonucleotide
ccacuagacagccaaugau

SEQ ID NO: 424859 - RNA, 19 nt, Artificial Sequence
  Description of Artificial Sequence: Synthetic oligonucleotide
ggccagcgaacagagugaa

SEQ ID NO: 424860 - RNA, 19 nt, Artificial Sequence
  Description of Artificial Sequence: Synthetic oligonucleotide
gagaugucaggcggauguu

SEQ ID NO: 424861 - RNA, 19 nt, Artificial Sequence
  Description of Artificial Sequence: Synthetic oligonucleotide
gcaaugcagggaacuaggu

SEQ ID NO: 424862 - RNA, 19 nt, Artificial Sequence
  Description of Artificial Sequence: Synthetic oligonucleotide
ggaccaacucacugguguu

SEQ ID NO: 424863 - RNA, 19 nt, Artificial Sequence
  Description of Artificial Sequence: Synthetic oligonucleotide
ccccaaugugcucuugcaa

SEQ ID NO: 424864 - RNA, 19 nt, Artificial Sequence
  Description of Artificial Sequence: Synthetic oligonucleotide
agacuucgcuguggaccaa

SEQ ID NO: 424865 - RNA, 19 nt, Artificial Sequence
  Description of Artificial Sequence: Synthetic oligonucleotide
ggacucgaggugacagugu

SEQ ID NO: 424866 - RNA, 19 nt, Artificial Sequence
  Description of Artificial Sequence: Synthetic oligonucleotide
cauggccgucagcagcgau

SEQ ID NO: 424867 - RNA, 19 nt, Artificial Sequence
  Description of Artificial Sequence: Synthetic oligonucleotide
ggaccugaugcuggacacu

SEQ ID NO: 424868 - RNA, 19 nt, Artificial Sequence
  Description of Artificial Sequence: Synthetic oligonucleotide
ggccgucagcagcgauggc

SEQ ID NO: 424869 - RNA, 19 nt, Artificial Sequence
  Description of Artificial Sequence: Synthetic oligonucleotide
caccacuuucaaccaccuu

SEQ ID NO: 424870 - RNA, 19 nt, Artificial Sequence
  Description of Artificial Sequence: Synthetic oligonucleotide
caggacccauuucgcuagu

SEQ ID NO: 424871 - RNA, 19 nt, Artificial Sequence
  Description of Artificial Sequence: Synthetic oligonucleotide
gccagcgaacagagugaaa

SEQ ID NO: 424872 - RNA, 19 nt, Artificial Sequence
  Description of Artificial Sequence: Synthetic oligonucleotide
gccugucuuucggggcauc

SEQ ID NO: 424873 - RNA, 19 nt, Artificial Sequence
  Description of Artificial Sequence: Synthetic oligonucleotide
ccauuucgcuagugauuuu

SEQ ID NO: 424874 - RNA, 19 nt, Artificial Sequence
  Description of Artificial Sequence: Synthetic oligonucleotide
cgcuguggaccaacucacu

SEQ ID NO: 424875 - RNA, 19 nt, Artificial Sequence
  Description of Artificial Sequence: Synthetic oligonucleotide
gggcgcuucccaggacauu

SEQ ID NO: 424876 - RNA, 19 nt, Artificial Sequence
  Description of Artificial Sequence: Synthetic oligonucleotide
cccgagaggcagggauuuu

SEQ ID NO: 424877 - RNA, 19 nt, Artificial Sequence
  Description of Artificial Sequence: Synthetic oligonucleotide
aauacuagcgacuuggacc

SEQ ID NO: 424878 - RNA, 19 nt, Artificial Sequence
  Description of Artificial Sequence: Synthetic oligonucleotide
auuaucugaagacaugucc

SEQ ID NO: 424879 - RNA, 19 nt, Artificial Sequence
  Description of Artificial Sequence: Synthetic oligonucleotide
auuagaaacauuguuaguc

SEQ ID NO: 424880 - RNA, 19 nt, Artificial Sequence
  Description of Artificial Sequence: Synthetic oligonucleotide
ucuaaaucugaauuauucg

SEQ ID NO: 424881 - RNA, 19 nt, Artificial Sequence
  Description of Artificial Sequence: Synthetic oligonucleotide
ucauuagaaacauuguuag

SEQ ID NO: 424882 - RNA, 19 nt, Artificial Sequence
  Description of Artificial Sequence: Synthetic oligonucleotide
aaagucacccuucagagca

SEQ ID NO: 424883 - RNA, 19 nt, Artificial Sequence
  Description of Artificial Sequence: Synthetic oligonucleotide
aauaaaggucuucugucac

SEQ ID NO: 424884 - RNA, 19 nt, Artificial Sequence
  Description of Artificial Sequence: Synthetic oligonucleotide
gaugguauaaucuucucug

SEQ ID NO: 424885 - RNA, 19 nt, Artificial Sequence
  Description of Artificial Sequence: Synthetic oligonucleotide
ucaauuagggcccagcccc

SEQ ID NO: 424886 - RNA, 19 nt, Artificial Sequence
  Description of Artificial Sequence: Synthetic oligonucleotide
aucauaauaggccacguag

SEQ ID NO: 424887 - RNA, 19 nt, Artificial Sequence
  Description of Artificial Sequence: Synthetic oligonucleotide
aauauaaucuguuggcccu

SEQ ID NO: 424888 - RNA, 19 nt, Artificial Sequence
  Description of Artificial Sequence: Synthetic oligonucleotide
ugaagcaauaauaccacag

SEQ ID NO: 424889 - RNA, 19 nt, Artificial Sequence
  Description of Artificial Sequence: Synthetic oligonucleotide
accaaucccaaacaaaugg

SEQ ID NO: 424890 - RNA, 19 nt, Artificial Sequence
  Description of Artificial Sequence: Synthetic oligonucleotide
uguaaggaauucaucagag

SEQ ID NO: 424891 - RNA, 19 nt, Artificial Sequence
  Description of Artificial Sequence: Synthetic oligonucleotide
uguuaauuccaaaaugaug

SEQ ID NO: 424892 - RNA, 19 nt, Artificial Sequence
  Description of Artificial Sequence: Synthetic oligonucleotide
uuuagagaugaaaauuugc

SEQ ID NO: 424893 - RNA, 19 nt, Artificial Sequence
  Description of Artificial Sequence: Synthetic oligonucleotide
ugagguaguaccuauuugc

SEQ ID NO: 424894 - RNA, 19 nt, Artificial Sequence
  Description of Artificial Sequence: Synthetic oligonucleotide
uaucccaugaguuagccca

SEQ ID NO: 424895 - RNA, 19 nt, Artificial Sequence
  Description of Artificial Sequence: Synthetic oligonucleotide
ugccgaauuaaaauaagcc

SEQ ID NO: 424896 - RNA, 19 nt, Artificial Sequence
  Description of Artificial Sequence: Synthetic oligonucleotide
ucugauaccaaugaugucu

SEQ ID NO: 424897 - RNA, 19 nt, Artificial Sequence
  Description of Artificial Sequence: Synthetic oligonucleotide
ucucuaaagaauuggcuag

SEQ ID NO: 424898 - RNA, 19 nt, Artificial Sequence
  Description of Artificial Sequence: Synthetic oligonucleotide
cauuuaacugggauggucg

SEQ ID NO: 424899 - RNA, 19 nt, Artificial Sequence
  Description of Artificial Sequence: Synthetic oligonucleotide
uauguugucagcugaagga

SEQ ID NO: 424900 - RNA, 19 nt, Artificial Sequence
  Description of Artificial Sequence: Synthetic oligonucleotide
aaaucggucaucgaccuuc

SEQ ID NO: 424901 - RNA, 19 nt, Artificial Sequence
  Description of Artificial Sequence: Synthetic oligonucleotide
aaaauuugcucauuagaaa

SEQ ID NO: 424902 - RNA, 19 nt, Artificial Sequence
  Description of Artificial Sequence: Synthetic oligonucleotide
aagcgacugagguaguacc

SEQ ID NO: 424903 - RNA, 19 nt, Artificial Sequence
  Description of Artificial Sequence: Synthetic oligonucleotide
uguaagagcuggcugauga

SEQ ID NO: 424904 - RNA, 19 nt, Artificial Sequence
  Description of Artificial Sequence: Synthetic oligonucleotide
ucuucuuaggcuuagccgu

SEQ ID NO: 424905 - RNA, 19 nt, Artificial Sequence
  Description of Artificial Sequence: Synthetic oligonucleotide
gaauuuucccgauaacucc

SEQ ID NO: 424906 - RNA, 19 nt, Artificial Sequence
  Description of Artificial Sequence: Synthetic oligonucleotide
aaaacugugggccugucaa

SEQ ID NO: 424907 - RNA, 19 nt, Artificial Sequence
  Description of Artificial Sequence: Synthetic oligonucleotide
uuuaucaacuucgucauca

SEQ ID NO: 424908 - RNA, 19 nt, Artificial Sequence
  Description of Artificial Sequence: Synthetic oligonucleotide
uuuugguaacuuuacagac

SEQ ID NO: 424909 - RNA, 19 nt, Artificial Sequence
  Description of Artificial Sequence: Synthetic oligonucleotide
auuugauauguguaaaugu

SEQ ID NO: 424910 - RNA, 19 nt, Artificial Sequence
  Description of Artificial Sequence: Synthetic oligonucleotide
aaaucuguggcaguaaaca

SEQ ID NO: 424911 - RNA, 19 nt, Artificial Sequence
  Description of Artificial Sequence: Synthetic oligonucleotide
uugccuauaagcauccuug

SEQ ID NO: 424912 - RNA, 19 nt, Artificial Sequence
  Description of Artificial Sequence: Synthetic oligonucleotide
aguuuccuaauuuucguag

SEQ ID NO: 424913 - RNA, 19 nt, Artificial Sequence
  Description of Artificial Sequence: Synthetic oligonucleotide
uaauaccacagcuugggag

SEQ ID NO: 424914 - RNA, 19 nt, Artificial Sequence
  Description of Artificial Sequence: Synthetic oligonucleotide
gaauucaucagagugguac

SEQ ID NO: 424915 - RNA, 19 nt, Artificial Sequence
  Description of Artificial Sequence: Synthetic oligonucleotide
cucggaaggaacaugaaug

SEQ ID NO: 424916 - RNA, 19 nt, Artificial Sequence
  Description of Artificial Sequence: Synthetic oligonucleotide
cuugaagcgacugagguag

SEQ ID NO: 424917 - RNA, 19 nt, Artificial Sequence
  Description of Artificial Sequence: Synthetic oligonucleotide
agucaauuagggcccagcc

SEQ ID NO: 424918 - RNA, 19 nt, Artificial Sequence
  Description of Artificial Sequence: Synthetic oligonucleotide
uuagaaacauuguuagucu

SEQ ID NO: 424919 - RNA, 19 nt, Artificial Sequence
  Description of Artificial Sequence: Synthetic oligonucleotide
ugagaucugauaccaauga

SEQ ID NO: 424920 - RNA, 19 nt, Artificial Sequence
  Description of Artificial Sequence: Synthetic oligonucleotide
cuaacaucagugcugcugg

SEQ ID NO: 424921 - RNA, 19 nt, Artificial Sequence
  Description of Artificial Sequence: Synthetic oligonucleotide
gauuugauauguguaaaug

SEQ ID NO: 424922 - RNA, 19 nt, Artificial Sequence
  Description of Artificial Sequence: Synthetic oligonucleotide
aaagccccgccucuaauuc

SEQ ID NO: 424923 - RNA, 19 nt, Artificial Sequence
  Description of Artificial Sequence: Synthetic oligonucleotide
uauuugccgaguuaacucc

SEQ ID NO: 424924 - RNA, 19 nt, Artificial Sequence
  Description of Artificial Sequence: Synthetic oligonucleotide
uuuccuaauuuucguaggc

SEQ ID NO: 424925 - RNA, 19 nt, Artificial Sequence
  Description of Artificial Sequence: Synthetic oligonucleotide
cuaaucgaggugcugaagc

SEQ ID NO: 424926 - RNA, 19 nt, Artificial Sequence
  Description of Artificial Sequence: Synthetic oligonucleotide
aaggagucacacaaagccc

SEQ ID NO: 424927 - RNA, 19 nt, Artificial Sequence
  Description of Artificial Sequence: Synthetic oligonucleotide
gguaauacuagcgacuugg

SEQ ID NO: 424928 - RNA, 19 nt, Artificial Sequence
  Description of Artificial Sequence: Synthetic oligonucleotide
agcuauaauaaaaggacuc

SEQ ID NO: 424929 - RNA, 19 nt, Artificial Sequence
  Description of Artificial Sequence: Synthetic oligonucleotide
aaucuguuggcccuacacu

SEQ ID NO: 424930 - RNA, 19 nt, Artificial Sequence
  Description of Artificial Sequence: Synthetic oligonucleotide
gauaauggggaugauccag

SEQ ID NO: 424931 - RNA, 19 nt, Artificial Sequence
  Description of Artificial Sequence: Synthetic oligonucleotide
uauggaauaaaggucuucu

SEQ ID NO: 424932 - RNA, 19 nt, Artificial Sequence
  Description of Artificial Sequence: Synthetic oligonucleotide
uugauuuagagaugaaaau

SEQ ID NO: 424933 - RNA, 19 nt, Artificial Sequence
  Description of Artificial Sequence: Synthetic oligonucleotide
auacuagcgacuuggacca

SEQ ID NO: 424934 - RNA, 19 nt, Artificial Sequence
  Description of Artificial Sequence: Synthetic oligonucleotide
uccuaauuuucguaggcug

SEQ ID NO: 424935 - RNA, 19 nt, Artificial Sequence
  Description of Artificial Sequence: Synthetic oligonucleotide
aaugcuuucugccgaauua

SEQ ID NO: 424936 - RNA, 19 nt, Artificial Sequence
  Description of Artificial Sequence: Synthetic oligonucleotide
ugguagaaaacccuggaua

SEQ ID NO: 424937 - RNA, 19 nt, Artificial Sequence
  Description of Artificial Sequence: Synthetic oligonucleotide
ugaaugaaguugaauuuuc

SEQ ID NO: 424938 - RNA, 19 nt, Artificial Sequence
  Description of Artificial Sequence: Synthetic oligonucleotide
ucauuaucugaagacaugu

SEQ ID NO: 424939 - RNA, 19 nt, Artificial Sequence
  Description of Artificial Sequence: Synthetic oligonucleotide
ucugccgaauuaaaauaag

SEQ ID NO: 424940 - RNA, 19 nt, Artificial Sequence
  Description of Artificial Sequence: Synthetic oligonucleotide
ugaauuauucgugucuggc

SEQ ID NO: 424941 - RNA, 19 nt, Artificial Sequence
  Description of Artificial Sequence: Synthetic oligonucleotide
ucauaauaggccacguagu

SEQ ID NO: 424942 - RNA, 19 nt, Artificial Sequence
  Description of Artificial Sequence: Synthetic oligonucleotide
uaagcauccuugaagcgac

SEQ ID NO: 424943 - RNA, 19 nt, Artificial Sequence
  Description of Artificial Sequence: Synthetic oligonucleotide
uaaucuguuggcccuacac

SEQ ID NO: 424944 - RNA, 19 nt, Artificial Sequence
  Description of Artificial Sequence: Synthetic oligonucleotide
ugguauaaucuucucuggc

SEQ ID NO: 424945 - RNA, 19 nt, Artificial Sequence
  Description of Artificial Sequence: Synthetic oligonucleotide
ucugaauuauucgugucug

SEQ ID NO: 424946 - RNA, 19 nt, Artificial Sequence
  Description of Artificial Sequence: Synthetic oligonucleotide
ucggaaggaacaugaaugc

SEQ ID NO: 424947 - RNA, 19 nt, Artificial Sequence
  Description of Artificial Sequence: Synthetic oligonucleotide
uagagaugaaaauuugcuc

SEQ ID NO: 424948 - RNA, 19 nt, Artificial Sequence
  Description of Artificial Sequence: Synthetic oligonucleotide
gaauaaaggucuucuguca

SEQ ID NO: 424949 - RNA, 19 nt, Artificial Sequence
  Description of Artificial Sequence: Synthetic oligonucleotide
cuauuugccgaguuaacuc

SEQ ID NO: 424950 - RNA, 19 nt, Artificial Sequence
  Description of Artificial Sequence: Synthetic oligonucleotide
ucuaccaaucccaaacaaa

SEQ ID NO: 424951 - RNA, 19 nt, Artificial Sequence
  Description of Artificial Sequence: Synthetic oligonucleotide
uaaaaggacucugagucca

SEQ ID NO: 424952 - RNA, 19 nt, Artificial Sequence
  Description of Artificial Sequence: Synthetic oligonucleotide
uaucugaagacaugucccc

SEQ ID NO: 424953 - RNA, 19 nt, Artificial Sequence
  Description of Artificial Sequence: Synthetic oligonucleotide
ugauauguguaaaugucuu

SEQ ID NO: 424954 - RNA, 19 nt, Artificial Sequence
  Description of Artificial Sequence: Synthetic oligonucleotide
cuuggguaauacuagcgac

SEQ ID NO: 424955 - RNA, 19 nt, Artificial Sequence
  Description of Artificial Sequence: Synthetic oligonucleotide
uggcaguaaacauccacag

SEQ ID NO: 424956 - RNA, 19 nt, Artificial Sequence
  Description of Artificial Sequence: Synthetic oligonucleotide
gggacuuggaauuuguaag

SEQ ID NO: 424957 - RNA, 19 nt, Artificial Sequence
  Description of Artificial Sequence: Synthetic oligonucleotide
aucugaauuauucgugucu

SEQ ID NO: 424958 - RNA, 19 nt, Artificial Sequence
  Description of Artificial Sequence: Synthetic oligonucleotide
ucguuagcccacauuaucu

SEQ ID NO: 424959 - RNA, 19 nt, Artificial Sequence
  Description of Artificial Sequence: Synthetic oligonucleotide
uacacucucuaaagaauug

SEQ ID NO: 424960 - RNA, 19 nt, Artificial Sequence
  Description of Artificial Sequence: Synthetic oligonucleotide
uuggguaauacuagcgacu

SEQ ID NO: 424961 - RNA, 19 nt, Artificial Sequence
  Description of Artificial Sequence: Synthetic oligonucleotide
uucugccgaauuaaaauaa

SEQ ID NO: 424962 - RNA, 19 nt, Artificial Sequence
  Description of Artificial Sequence: Synthetic oligonucleotide
uuagccguuguauacuggu

SEQ ID NO: 424963 - RNA, 19 nt, Artificial Sequence
  Description of Artificial Sequence: Synthetic oligonucleotide
agacauguccccaucauag

SEQ ID NO: 424964 - RNA, 19 nt, Artificial Sequence
  Description of Artificial Sequence: Synthetic oligonucleotide
gagacguuggauuugauau

SEQ ID NO: 424965 - RNA, 19 nt, Artificial Sequence
  Description of Artificial Sequence: Synthetic oligonucleotide
uaauacuagcgacuuggac

SEQ ID NO: 424966 - RNA, 19 nt, Artificial Sequence
  Description of Artificial Sequence: Synthetic oligonucleotide
uuucugccgaauuaaaaua

SEQ ID NO: 424967 - RNA, 19 nt, Artificial Sequence
  Description of Artificial Sequence: Synthetic oligonucleotide
ucaaguagucgucucucca

SEQ ID NO: 424968 - RNA, 19 nt, Artificial Sequence
  Description of Artificial Sequence: Synthetic oligonucleotide
augcuaacaucagugcugc

SEQ ID NO: 424969 - RNA, 19 nt, Artificial Sequence
  Description of Artificial Sequence: Synthetic oligonucleotide
guuagcccacauuaucugg

SEQ ID NO: 424970 - RNA, 19 nt, Artificial Sequence
  Description of Artificial Sequence: Synthetic oligonucleotide
agagacauuuaacugggau

SEQ ID NO: 424971 - RNA, 19 nt, Artificial Sequence
  Description of Artificial Sequence: Synthetic oligonucleotide
ucaaaucuaugacggcuug

SEQ ID NO: 424972 - RNA, 19 nt, Artificial Sequence
  Description of Artificial Sequence: Synthetic oligonucleotide
ccgaauuaaaauaagccac

SEQ ID NO: 424973 - RNA, 19 nt, Artificial Sequence
  Description of Artificial Sequence: Synthetic oligonucleotide
cugccgaauuaaaauaagc

SEQ ID NO: 424974 - RNA, 19 nt, Artificial Sequence
  Description of Artificial Sequence: Synthetic oligonucleotide
cuucgucaucauaauaggc

SEQ ID NO: 424975 - RNA, 19 nt, Artificial Sequence
  Description of Artificial Sequence: Synthetic oligonucleotide
aagcuauaauaaaaggacu

SEQ ID NO: 424976 - RNA, 19 nt, Artificial Sequence
  Description of Artificial Sequence: Synthetic oligonucleotide
cacucucuaaagaauuggc

SEQ ID NO: 424977 - RNA, 19 nt, Artificial Sequence
  Description of Artificial Sequence: Synthetic oligonucleotide
aggcuuagccguuguauac

SEQ ID NO: 424978 - RNA, 19 nt, Artificial Sequence
  Description of Artificial Sequence: Synthetic oligonucleotide
caucaguacgcguauguug

SEQ ID NO: 424979 - RNA, 19 nt, Artificial Sequence
  Description of Artificial Sequence: Synthetic oligonucleotide
ugcaagcccauuuccauga

SEQ ID NO: 424980 - RNA, 19 nt, Artificial Sequence
  Description of Artificial Sequence: Synthetic oligonucleotide
aucagagugguacgaauca

SEQ ID NO: 424981 - RNA, 19 nt, Artificial Sequence
  Description of Artificial Sequence: Synthetic oligonucleotide
uuguauacugguuuacuuu

SEQ ID NO: 424982 - RNA, 19 nt, Artificial Sequence
  Description of Artificial Sequence: Synthetic oligonucleotide
ugaagacauguccccauca

SEQ ID NO: 424983 - RNA, 19 nt, Artificial Sequence
  Description of Artificial Sequence: Synthetic oligonucleotide
uucguuagcccacauuauc

SEQ ID NO: 424984 - RNA, 19 nt, Artificial Sequence
  Description of Artificial Sequence: Synthetic oligonucleotide
aagccccgccucuaauucc

SEQ ID NO: 424985 - RNA, 19 nt, Artificial Sequence
  Description of Artificial Sequence: Synthetic oligonucleotide
aauguucacauuggauuug

SEQ ID NO: 424986 - RNA, 19 nt, Artificial Sequence
  Description of Artificial Sequence: Synthetic oligonucleotide
acgaaucauuaucugaaga

SEQ ID NO: 424987 - RNA, 19 nt, Artificial Sequence
  Description of Artificial Sequence: Synthetic oligonucleotide
gagauccuggaucauguac

SEQ ID NO: 424988 - RNA, 19 nt, Artificial Sequence
  Description of Artificial Sequence: Synthetic oligonucleotide
ggaacuucucaucaccagg

SEQ ID NO: 424989 - RNA, 19 nt, Artificial Sequence
  Description of Artificial Sequence: Synthetic oligonucleotide
uuuucguaggcugccaaug

SEQ ID NO: 424990 - RNA, 19 nt, Artificial Sequence
  Description of Artificial Sequence: Synthetic oligonucleotide
uuaacugggauggucgaga

SEQ ID NO: 424991 - RNA, 19 nt, Artificial Sequence
  Description of Artificial Sequence: Synthetic oligonucleotide
uucauguagcucuguaaga

SEQ ID NO: 424992 - RNA, 19 nt, Artificial Sequence
  Description of Artificial Sequence: Synthetic oligonucleotide
auaagcauccuugaagcga

SEQ ID NO: 424993 - RNA, 19 nt, Artificial Sequence
  Description of Artificial Sequence: Synthetic oligonucleotide
uaaucgaggugcugaagca

SEQ ID NO: 424994 - RNA, 19 nt, Artificial Sequence
  Description of Artificial Sequence: Synthetic oligonucleotide
ggcaaagcccaucaguacg

SEQ ID NO: 424995 - RNA, 19 nt, Artificial Sequence
  Description of Artificial Sequence: Synthetic oligonucleotide
uuugcaagcccauuuccau

SEQ ID NO: 424996 - RNA, 19 nt, Artificial Sequence
  Description of Artificial Sequence: Synthetic oligonucleotide
aauuuucguaggcugccaa

SEQ ID NO: 424997 - RNA, 19 nt, Artificial Sequence
  Description of Artificial Sequence: Synthetic oligonucleotide
acacucucuaaagaauugg

SEQ ID NO: 424998 - RNA, 19 nt, Artificial Sequence
  Description of Artificial Sequence: Synthetic oligonucleotide
cuaauuuucguaggcugcc

SEQ ID NO: 424999 - RNA, 19 nt, Artificial Sequence
  Description of Artificial Sequence: Synthetic oligonucleotide
uaaagucacccuucagagc

SEQ ID NO: 425000 - RNA, 19 nt, Artificial Sequence
  Description of Artificial Sequence: Synthetic oligonucleotide
uggcuuguuaauuccaaaa

SEQ ID NO: 425001 - RNA, 19 nt, Artificial Sequence
  Description of Artificial Sequence: Synthetic oligonucleotide
auaauaggccacguaguag

SEQ ID NO: 425002 - RNA, 19 nt, Artificial Sequence
  Description of Artificial Sequence: Synthetic oligonucleotide
ugccgaguuaacuccaucu

SEQ ID NO: 425003 - RNA, 19 nt, Artificial Sequence
  Description of Artificial Sequence: Synthetic oligonucleotide
aaguuuccuaauuuucgua

SEQ ID NO: 425004 - RNA, 19 nt, Artificial Sequence
  Description of Artificial Sequence: Synthetic oligonucleotide
cuagcgacuuggaccaugg

SEQ ID NO: 425005 - RNA, 19 nt, Artificial Sequence
  Description of Artificial Sequence: Synthetic oligonucleotide
ucaagcuucuucucaacua

SEQ ID NO: 425006 - RNA, 19 nt, Artificial Sequence
  Description of Artificial Sequence: Synthetic oligonucleotide
caacaguagccucggaagg

SEQ ID NO: 425007 - RNA, 19 nt, Artificial Sequence
  Description of Artificial Sequence: Synthetic oligonucleotide
aguacgcguauguugucag

SEQ ID NO: 425008 - RNA, 19 nt, Artificial Sequence
  Description of Artificial Sequence: Synthetic oligonucleotide
cauuagcuacuucagguuc

SEQ ID NO: 425009 - RNA, 19 nt, Artificial Sequence
  Description of Artificial Sequence: Synthetic oligonucleotide
uccggaguaccaaucucag

SEQ ID NO: 425010 - RNA, 19 nt, Artificial Sequence
  Description of Artificial Sequence: Synthetic oligonucleotide
uuccuuaugcaaagcuuca

SEQ ID NO: 425011 - RNA, 19 nt, Artificial Sequence
  Description of Artificial Sequence: Synthetic oligonucleotide
cauucguuagcccacauua

SEQ ID NO: 425012 - RNA, 19 nt, Artificial Sequence
  Description of Artificial Sequence: Synthetic oligonucleotide
gucgagaaggcaucugucc

SEQ ID NO: 425013 - RNA, 19 nt, Artificial Sequence
  Description of Artificial Sequence: Synthetic oligonucleotide
ucuaugacggcuugccuau

SEQ ID NO: 425014 - RNA, 19 nt, Artificial Sequence
  Description of Artificial Sequence: Synthetic oligonucleotide
cugaauuauucgugucugg

SEQ ID NO: 425015 - RNA, 19 nt, Artificial Sequence
  Description of Artificial Sequence: Synthetic oligonucleotide
gacugccuaaucgaggugc

SEQ ID NO: 425016 - RNA, 19 nt, Artificial Sequence
  Description of Artificial Sequence: Synthetic oligonucleotide
gguaguaccuauuugccga

SEQ ID NO: 425017 - RNA, 19 nt, Artificial Sequence
  Description of Artificial Sequence: Synthetic oligonucleotide
uucgugucuggcauugugu

SEQ ID NO: 425018 - RNA, 19 nt, Artificial Sequence
  Description of Artificial Sequence: Synthetic oligonucleotide
auaaaggucuucugucacu

SEQ ID NO: 425019 - RNA, 19 nt, Artificial Sequence
  Description of Artificial Sequence: Synthetic oligonucleotide
gagguaguaccuauuugcc

SEQ ID NO: 425020 - RNA, 19 nt, Artificial Sequence
  Description of Artificial Sequence: Synthetic oligonucleotide
cuaaagaauuggcuagcug

SEQ ID NO: 425021 - RNA, 19 nt, Artificial Sequence
  Description of Artificial Sequence: Synthetic oligonucleotide
uuucguaggcugccaaugu

SEQ ID NO: 425022 - RNA, 19 nt, Artificial Sequence
  Description of Artificial Sequence: Synthetic oligonucleotide
agcaggcuagacccggagc

SEQ ID NO: 425023 - RNA, 19 nt, Artificial Sequence
  Description of Artificial Sequence: Synthetic oligonucleotide
uggucgagaaggcaucugu

SEQ ID NO: 425024 - RNA, 19 nt, Artificial Sequence
  Description of Artificial Sequence: Synthetic oligonucleotide
uguagcucuguaagagcug

SEQ ID NO: 425025 - RNA, 19 nt, Artificial Sequence
  Description of Artificial Sequence: Synthetic oligonucleotide
gucaauuagggcccagccc

SEQ ID NO: 425026 - RNA, 19 nt, Artificial Sequence
  Description of Artificial Sequence: Synthetic oligonucleotide
ugcauccuguacaaaucug

SEQ ID NO: 425027 - RNA, 19 nt, Artificial Sequence
  Description of Artificial Sequence: Synthetic oligonucleotide
caucagagugguacgaauc

SEQ ID NO: 425028 - RNA, 19 nt, Artificial Sequence
  Description of Artificial Sequence: Synthetic oligonucleotide
caacuaugggaacauccag

SEQ ID NO: 425029 - RNA, 19 nt, Artificial Sequence
  Description of Artificial Sequence: Synthetic oligonucleotide
caaaaugaugcuucuuaca

SEQ ID NO: 425030 - RNA, 19 nt, Artificial Sequence
  Description of Artificial Sequence: Synthetic oligonucleotide
ugaguuggucaggucauag

SEQ ID NO: 425031 - RNA, 19 nt, Artificial Sequence
  Description of Artificial Sequence: Synthetic oligonucleotide
ucuaaagaauuggcuagcu

SEQ ID NO: 425032 - RNA, 19 nt, Artificial Sequence
  Description of Artificial Sequence: Synthetic oligonucleotide
cauagaaaguuaacuuuca

SEQ ID NO: 425033 - RNA, 19 nt, Artificial Sequence
  Description of Artificial Sequence: Synthetic oligonucleotide
ugcugaauuucauuagcua

SEQ ID NO: 425034 - RNA, 19 nt, Artificial Sequence
  Description of Artificial Sequence: Synthetic oligonucleotide
cucucuaaagaauuggcua

SEQ ID NO: 425035 - RNA, 19 nt, Artificial Sequence
  Description of Artificial Sequence: Synthetic oligonucleotide
auucgugucuggcauugug

SEQ ID NO: 425036 - RNA, 19 nt, Artificial Sequence
  Description of Artificial Sequence: Synthetic oligonucleotide
aucaguacgcguauguugu

SEQ ID NO: 425037 - RNA, 19 nt, Artificial Sequence
  Description of Artificial Sequence: Synthetic oligonucleotide
uucugagagaccacagaau

SEQ ID NO: 425038 - RNA, 19 nt, Artificial Sequence
  Description of Artificial Sequence: Synthetic oligonucleotide
aagacauguccccaucaua

SEQ ID NO: 425039 - RNA, 19 nt, Artificial Sequence
  Description of Artificial Sequence: Synthetic oligonucleotide
uaccuauuugccgaguuaa

SEQ ID NO: 425040 - RNA, 19 nt, Artificial Sequence
  Description of Artificial Sequence: Synthetic oligonucleotide
ccuucuaccaaucccaaac

SEQ ID NO: 425041 - RNA, 19 nt, Artificial Sequence
  Description of Artificial Sequence: Synthetic oligonucleotide
agacguuggauuugauaug

SEQ ID NO: 425042 - RNA, 19 nt, Artificial Sequence
  Description of Artificial Sequence: Synthetic oligonucleotide
aucuaugacggcuugccua

SEQ ID NO: 425043 - RNA, 19 nt, Artificial Sequence
  Description of Artificial Sequence: Synthetic oligonucleotide
agcgacuuggaccauggaa

SEQ ID NO: 425044 - RNA, 19 nt, Artificial Sequence
  Description of Artificial Sequence: Synthetic oligonucleotide
aggaggagcacauccacau

SEQ ID NO: 425045 - RNA, 19 nt, Artificial Sequence
  Description of Artificial Sequence: Synthetic oligonucleotide
uccucaaguagucgucucu

SEQ ID NO: 425046 - RNA, 19 nt, Artificial Sequence
  Description of Artificial Sequence: Synthetic oligonucleotide
gguacgaaucauuaucuga

SEQ ID NO: 425047 - RNA, 19 nt, Artificial Sequence
  Description of Artificial Sequence: Synthetic oligonucleotide
cagcucagucauuuuauug

SEQ ID NO: 425048 - RNA, 19 nt, Artificial Sequence
  Description of Artificial Sequence: Synthetic oligonucleotide
guacgaaucauuaucugaa

SEQ ID NO: 425049 - RNA, 19 nt, Artificial Sequence
  Description of Artificial Sequence: Synthetic oligonucleotide
accaacaguagccucggaa

SEQ ID NO: 425050 - RNA, 19 nt, Artificial Sequence
  Description of Artificial Sequence: Synthetic oligonucleotide
gauaacuccuucuaccaau

SEQ ID NO: 425051 - RNA, 19 nt, Artificial Sequence
  Description of Artificial Sequence: Synthetic oligonucleotide
aaaugggguucccgggaug

SEQ ID NO: 425052 - RNA, 19 nt, Artificial Sequence
  Description of Artificial Sequence: Synthetic oligonucleotide
ucacacaaagccccgccuc

SEQ ID NO: 425053 - RNA, 19 nt, Artificial Sequence
  Description of Artificial Sequence: Synthetic oligonucleotide
gggaccgacugccuaaucg

SEQ ID NO: 425054 - RNA, 19 nt, Artificial Sequence
  Description of Artificial Sequence: Synthetic oligonucleotide
aacagagacguuggauuug

SEQ ID NO: 425055 - RNA, 19 nt, Artificial Sequence
  Description of Artificial Sequence: Synthetic oligonucleotide
acauguccccaucauagaa

SEQ ID NO: 425056 - RNA, 19 nt, Artificial Sequence
  Description of Artificial Sequence: Synthetic oligonucleotide
agcuuggguaauacuagcg

SEQ ID NO: 425057 - RNA, 19 nt, Artificial Sequence
  Description of Artificial Sequence: Synthetic oligonucleotide
ugggaguuugcccaccaau

SEQ ID NO: 425058 - RNA, 19 nt, Artificial Sequence
  Description of Artificial Sequence: Synthetic oligonucleotide
cuuagccguuguauacugg

SEQ ID NO: 425059 - RNA, 19 nt, Artificial Sequence
  Description of Artificial Sequence: Synthetic oligonucleotide
uacgcguauguugucagcu

SEQ ID NO: 425060 - RNA, 19 nt, Artificial Sequence
  Description of Artificial Sequence: Synthetic oligonucleotide
ugaccaacaguagccucgg

SEQ ID NO: 425061 - RNA, 19 nt, Artificial Sequence
  Description of Artificial Sequence: Synthetic oligonucleotide
uucccgauaacuccuucua

SEQ ID NO: 425062 - RNA, 19 nt, Artificial Sequence
  Description of Artificial Sequence: Synthetic oligonucleotide
ccuaauuuucguaggcugc

SEQ ID NO: 425063 - RNA, 19 nt, Artificial Sequence
  Description of Artificial Sequence: Synthetic oligonucleotide
uaugacggcuugccuauaa

SEQ ID NO: 425064 - RNA, 19 nt, Artificial Sequence
  Description of Artificial Sequence: Synthetic oligonucleotide
cucuaaagaauuggcuagc

SEQ ID NO: 425065 - RNA, 19 nt, Artificial Sequence
  Description of Artificial Sequence: Synthetic oligonucleotide
aaagcccaucaguacgcgu

SEQ ID NO: 425066 - RNA, 19 nt, Artificial Sequence
  Description of Artificial Sequence: Synthetic oligonucleotide
uuccuaauuuucguaggcu

SEQ ID NO: 425067 - RNA, 19 nt, Artificial Sequence
  Description of Artificial Sequence: Synthetic oligonucleotide
auaauaccacagcuuggga

SEQ ID NO: 425068 - RNA, 19 nt, Artificial Sequence
  Description of Artificial Sequence: Synthetic oligonucleotide
ugccuauaagcauccuuga

SEQ ID NO: 425069 - RNA, 19 nt, Artificial Sequence
  Description of Artificial Sequence: Synthetic oligonucleotide
gacggcuugccuauaagca

SEQ ID NO: 425070 - RNA, 19 nt, Artificial Sequence
  Description of Artificial Sequence: Synthetic oligonucleotide
cuuggaauuuguaaggaau

SEQ ID NO: 425071 - RNA, 19 nt, Artificial Sequence
  Description of Artificial Sequence: Synthetic oligonucleotide
ugguuuacuuuaucaacuu

SEQ ID NO: 425072 - RNA, 19 nt, Artificial Sequence
  Description of Artificial Sequence: Synthetic oligonucleotide
agagacguuggauuugaua

SEQ ID NO: 425073 - RNA, 19 nt, Artificial Sequence
  Description of Artificial Sequence: Synthetic oligonucleotide
gaguuaacuccaucuuuca

SEQ ID NO: 425074 - RNA, 19 nt, Artificial Sequence
  Description of Artificial Sequence: Synthetic oligonucleotide
guaguaccuauuugccgag

SEQ ID NO: 425075 - RNA, 19 nt, Artificial Sequence
  Description of Artificial Sequence: Synthetic oligonucleotide
aguuaacuccaucuuucau

SEQ ID NO: 425076 - RNA, 19 nt, Artificial Sequence
  Description of Artificial Sequence: Synthetic oligonucleotide
uggcccuacacucucuaaa

SEQ ID NO: 425077 - RNA, 19 nt, Artificial Sequence
  Description of Artificial Sequence: Synthetic oligonucleotide
guacugguucaacugauaa

SEQ ID NO: 425078 - RNA, 19 nt, Artificial Sequence
  Description of Artificial Sequence: Synthetic oligonucleotide
aucauuaucugaagacaug

SEQ ID NO: 425079 - RNA, 19 nt, Artificial Sequence
  Description of Artificial Sequence: Synthetic oligonucleotide
ggaguuugcccaccaaugc

SEQ ID NO: 425080 - RNA, 19 nt, Artificial Sequence
  Description of Artificial Sequence: Synthetic oligonucleotide
uguacugguucaacugaua

SEQ ID NO: 425081 - RNA, 19 nt, Artificial Sequence
  Description of Artificial Sequence: Synthetic oligonucleotide
cugagguaguaccuauuug

SEQ ID NO: 425082 - RNA, 19 nt, Artificial Sequence
  Description of Artificial Sequence: Synthetic oligonucleotide
ucugagacacagaccuggu

SEQ ID NO: 425083 - RNA, 19 nt, Artificial Sequence
  Description of Artificial Sequence: Synthetic oligonucleotide
ugucacuggaaugccuugc

SEQ ID NO: 425084 - RNA, 19 nt, Artificial Sequence
  Description of Artificial Sequence: Synthetic oligonucleotide
ccuugcaucaaaucuauga

SEQ ID NO: 425085 - RNA, 19 nt, Artificial Sequence
  Description of Artificial Sequence: Synthetic oligonucleotide
gaagcgacugagguaguac

SEQ ID NO: 425086 - RNA, 19 nt, Artificial Sequence
  Description of Artificial Sequence: Synthetic oligonucleotide
ucaucgaccuucugccaga

SEQ ID NO: 425087 - RNA, 19 nt, Artificial Sequence
  Description of Artificial Sequence: Synthetic oligonucleotide
aaguugaauuuucccgaua

SEQ ID NO: 425088 - RNA, 19 nt, Artificial Sequence
  Description of Artificial Sequence: Synthetic oligonucleotide
cagcuuggguaauacuagc

SEQ ID NO: 425089 - RNA, 19 nt, Artificial Sequence
  Description of Artificial Sequence: Synthetic oligonucleotide
cugguuuacuuuaucaacu

SEQ ID NO: 425090 - RNA, 19 nt, Artificial Sequence
  Description of Artificial Sequence: Synthetic oligonucleotide
ucccgauaacuccuucuac

SEQ ID NO: 425091 - RNA, 19 nt, Artificial Sequence
  Description of Artificial Sequence: Synthetic oligonucleotide
aguaccuauuugccgaguu

SEQ ID NO: 425092 - RNA, 19 nt, Artificial Sequence
  Description of Artificial Sequence: Synthetic oligonucleotide
augacggcuugccuauaag

SEQ ID NO: 425093 - RNA, 19 nt, Artificial Sequence
  Description of Artificial Sequence: Synthetic oligonucleotide
uuggaccauggaacugcgg

SEQ ID NO: 425094 - RNA, 19 nt, Artificial Sequence
  Description of Artificial Sequence: Synthetic oligonucleotide
cccgauaacuccuucuacc

SEQ ID NO: 425095 - RNA, 19 nt, Artificial Sequence
  Description of Artificial Sequence: Synthetic oligonucleotide
aaacugugggccugucaaa

SEQ ID NO: 425096 - RNA, 19 nt, Artificial Sequence
  Description of Artificial Sequence: Synthetic oligonucleotide
cuagacccggagcuggggc

SEQ ID NO: 425097 - RNA, 19 nt, Artificial Sequence
  Description of Artificial Sequence: Synthetic oligonucleotide
gcuaacaucagugcugcug

SEQ ID NO: 425098 - RNA, 19 nt, Artificial Sequence
  Description of Artificial Sequence: Synthetic oligonucleotide
agccguuguauacugguuu

SEQ ID NO: 425099 - RNA, 19 nt, Artificial Sequence
  Description of Artificial Sequence: Synthetic oligonucleotide
ucgugucuggcauugugua

SEQ ID NO: 425100 - RNA, 19 nt, Artificial Sequence
  Description of Artificial Sequence: Synthetic oligonucleotide
ggaacugcggaucuuugca

SEQ ID NO: 425101 - RNA, 19 nt, Artificial Sequence
  Description of Artificial Sequence: Synthetic oligonucleotide
cauacugucugcugauaga

SEQ ID NO: 425102 - RNA, 19 nt, Artificial Sequence
  Description of Artificial Sequence: Synthetic oligonucleotide
uaauuuucguaggcugcca

SEQ ID NO: 425103 - RNA, 19 nt, Artificial Sequence
  Description of Artificial Sequence: Synthetic oligonucleotide
agcucuugagguuccaguu

SEQ ID NO: 425104 - RNA, 19 nt, Artificial Sequence
  Description of Artificial Sequence: Synthetic oligonucleotide
guaggcagaguuggaaagc

SEQ ID NO: 425105 - RNA, 19 nt, Artificial Sequence
  Description of Artificial Sequence: Synthetic oligonucleotide
auaauggggaugauccaga

SEQ ID NO: 425106 - RNA, 19 nt, Artificial Sequence
  Description of Artificial Sequence: Synthetic oligonucleotide
aguccacauccggaguacc

SEQ ID NO: 425107 - RNA, 19 nt, Artificial Sequence
  Description of Artificial Sequence: Synthetic oligonucleotide
uucucaacuaugggaacau

SEQ ID NO: 425108 - RNA, 19 nt, Artificial Sequence
  Description of Artificial Sequence: Synthetic oligonucleotide
gguauaaucuucucuggcu

SEQ ID NO: 425109 - RNA, 19 nt, Artificial Sequence
  Description of Artificial Sequence: Synthetic oligonucleotide
acggcuugccuauaagcau

SEQ ID NO: 425110 - RNA, 19 nt, Artificial Sequence
  Description of Artificial Sequence: Synthetic oligonucleotide
auucaucagagugguacga

SEQ ID NO: 425111 - RNA, 19 nt, Artificial Sequence
  Description of Artificial Sequence: Synthetic oligonucleotide
caugaccaacaguagccuc

SEQ ID NO: 425112 - RNA, 19 nt, Artificial Sequence
  Description of Artificial Sequence: Synthetic oligonucleotide
aagcccaucaguacgcgua

SEQ ID NO: 425113 - RNA, 19 nt, Artificial Sequence
  Description of Artificial Sequence: Synthetic oligonucleotide
agaaacauuguuagucuuu

SEQ ID NO: 425114 - RNA, 19 nt, Artificial Sequence
  Description of Artificial Sequence: Synthetic oligonucleotide
acagagacguuggauuuga

SEQ ID NO: 425115 - RNA, 19 nt, Artificial Sequence
  Description of Artificial Sequence: Synthetic oligonucleotide
ugucuggcauuguguaaac

SEQ ID NO: 425116 - RNA, 19 nt, Artificial Sequence
  Description of Artificial Sequence: Synthetic oligonucleotide
uucguaggcugccaauguu

SEQ ID NO: 425117 - RNA, 19 nt, Artificial Sequence
  Description of Artificial Sequence: Synthetic oligonucleotide
gacguuggauuugauaugu

SEQ ID NO: 425118 - RNA, 19 nt, Artificial Sequence
  Description of Artificial Sequence: Synthetic oligonucleotide
uuugccgaguuaacuccau

SEQ ID NO: 425119 - RNA, 19 nt, Artificial Sequence
  Description of Artificial Sequence: Synthetic oligonucleotide
uugcccaccaaugcuuucu

SEQ ID NO: 425120 - RNA, 19 nt, Artificial Sequence
  Description of Artificial Sequence: Synthetic oligonucleotide
auuauucgugucuggcauu

SEQ ID NO: 425121 - RNA, 19 nt, Artificial Sequence
  Description of Artificial Sequence: Synthetic oligonucleotide
gcgacuuggaccauggaac

SEQ ID NO: 425122 - RNA, 19 nt, Artificial Sequence
  Description of Artificial Sequence: Synthetic oligonucleotide
accuauuugccgaguuaac

SEQ ID NO: 425123 - RNA, 19 nt, Artificial Sequence
  Description of Artificial Sequence: Synthetic oligonucleotide
guaccaaucucagugagau

SEQ ID NO: 425124 - RNA, 19 nt, Artificial Sequence
  Description of Artificial Sequence: Synthetic oligonucleotide
ugcccaccaaugcuuucug

SEQ ID NO: 425125 - RNA, 19 nt, Artificial Sequence
  Description of Artificial Sequence: Synthetic oligonucleotide
aaaaucggucaucgaccuu

SEQ ID NO: 425126 - RNA, 19 nt, Artificial Sequence
  Description of Artificial Sequence: Synthetic oligonucleotide
gaacugcggaucuuugcaa

SEQ ID NO: 425127 - RNA, 19 nt, Artificial Sequence
  Description of Artificial Sequence: Synthetic oligonucleotide
aggcuagacccggagcugg

SEQ ID NO: 425128 - RNA, 19 nt, Artificial Sequence
  Description of Artificial Sequence: Synthetic oligonucleotide
gcuuggguaauacuagcga

SEQ ID NO: 425129 - RNA, 19 nt, Artificial Sequence
  Description of Artificial Sequence: Synthetic oligonucleotide
augucuucgugaggcuuac

SEQ ID NO: 425130 - RNA, 19 nt, Artificial Sequence
  Description of Artificial Sequence: Synthetic oligonucleotide
acgcguauguugucagcug

SEQ ID NO: 425131 - RNA, 19 nt, Artificial Sequence
  Description of Artificial Sequence: Synthetic oligonucleotide
accgacugccuaaucgagg

SEQ ID NO: 425132 - RNA, 19 nt, Artificial Sequence
  Description of Artificial Sequence: Synthetic oligonucleotide
gaccgacugccuaaucgag

SEQ ID NO: 425133 - RNA, 19 nt, Artificial Sequence
  Description of Artificial Sequence: Synthetic oligonucleotide
gaguccccauucguuagcc

SEQ ID NO: 425134 - RNA, 19 nt, Artificial Sequence
  Description of Artificial Sequence: Synthetic oligonucleotide
ucagagugguacgaaucau

SEQ ID NO: 425135 - RNA, 19 nt, Artificial Sequence
  Description of Artificial Sequence: Synthetic oligonucleotide
cugaagacauguccccauc

SEQ ID NO: 425136 - RNA, 19 nt, Artificial Sequence
  Description of Artificial Sequence: Synthetic oligonucleotide
cagucaauuagggcccagc

SEQ ID NO: 425137 - RNA, 19 nt, Artificial Sequence
  Description of Artificial Sequence: Synthetic oligonucleotide
agcccagcuuggguaauac

SEQ ID NO: 425138 - RNA, 19 nt, Artificial Sequence
  Description of Artificial Sequence: Synthetic oligonucleotide
guuagcccagcuuggguaa

SEQ ID NO: 425139 - RNA, 19 nt, Artificial Sequence
  Description of Artificial Sequence: Synthetic oligonucleotide
aguaccaaucucagugaga

SEQ ID NO: 425140 - RNA, 19 nt, Artificial Sequence
  Description of Artificial Sequence: Synthetic oligonucleotide
auaaucuguuggcccuaca

SEQ ID NO: 425141 - RNA, 19 nt, Artificial Sequence
  Description of Artificial Sequence: Synthetic oligonucleotide
cgaguuaacuccaucuuuc

SEQ ID NO: 425142 - RNA, 19 nt, Artificial Sequence
  Description of Artificial Sequence: Synthetic oligonucleotide
aagaauuggcuagcugcuu

SEQ ID NO: 425143 - RNA, 19 nt, Artificial Sequence
  Description of Artificial Sequence: Synthetic oligonucleotide
guaaggaauucaucagagu

SEQ ID NO: 425144 - RNA, 19 nt, Artificial Sequence
  Description of Artificial Sequence: Synthetic oligonucleotide
aggagcacauccacaucuc

SEQ ID NO: 425145 - RNA, 19 nt, Artificial Sequence
  Description of Artificial Sequence: Synthetic oligonucleotide
gggaguuugcccaccaaug

SEQ ID NO: 425146 - RNA, 19 nt, Artificial Sequence
  Description of Artificial Sequence: Synthetic oligonucleotide
acuagcgacuuggaccaug

SEQ ID NO: 425147 - RNA, 19 nt, Artificial Sequence
  Description of Artificial Sequence: Synthetic oligonucleotide
gcuuagccguuguauacug

SEQ ID NO: 425148 - RNA, 19 nt, Artificial Sequence
  Description of Artificial Sequence: Synthetic oligonucleotide
caauguucacauuggauuu

SEQ ID NO: 425149 - RNA, 19 nt, Artificial Sequence
  Description of Artificial Sequence: Synthetic oligonucleotide
acugccaaguuuaucccau

SEQ ID NO: 425150 - RNA, 19 nt, Artificial Sequence
  Description of Artificial Sequence: Synthetic oligonucleotide
guacgcguauguugucagc

SEQ ID NO: 425151 - RNA, 19 nt, Artificial Sequence
  Description of Artificial Sequence: Synthetic oligonucleotide
gaagacauguccccaucau

SEQ ID NO: 425152 - RNA, 19 nt, Artificial Sequence
  Description of Artificial Sequence: Synthetic oligonucleotide
ucggugcucugccucugca

SEQ ID NO: 425153 - RNA, 19 nt, Artificial Sequence
  Description of Artificial Sequence: Synthetic oligonucleotide
ggaaggaacaugaaugcua

SEQ ID NO: 425154 - RNA, 19 nt, Artificial Sequence
  Description of Artificial Sequence: Synthetic oligonucleotide
uccuucuaccaaucccaaa

SEQ ID NO: 425155 - RNA, 19 nt, Artificial Sequence
  Description of Artificial Sequence: Synthetic oligonucleotide
uugccgaguuaacuccauc

SEQ ID NO: 425156 - RNA, 19 nt, Artificial Sequence
  Description of Artificial Sequence: Synthetic oligonucleotide
ugagauccuggaucaugua

SEQ ID NO: 425157 - RNA, 19 nt, Artificial Sequence
  Description of Artificial Sequence: Synthetic oligonucleotide
ugauaccaaugaugucuuc

SEQ ID NO: 425158 - RNA, 19 nt, Artificial Sequence
  Description of Artificial Sequence: Synthetic oligonucleotide
aaucggucaucgaccuucu

SEQ ID NO: 425159 - RNA, 19 nt, Artificial Sequence
  Description of Artificial Sequence: Synthetic oligonucleotide
cuacacucucuaaagaauu

SEQ ID NO: 425160 - RNA, 19 nt, Artificial Sequence
  Description of Artificial Sequence: Synthetic oligonucleotide
ggaccgacugccuaaucga

SEQ ID NO: 425161 - RNA, 19 nt, Artificial Sequence
  Description of Artificial Sequence: Synthetic oligonucleotide
ucaguacgcguauguuguc

SEQ ID NO: 425162 - RNA, 19 nt, Artificial Sequence
  Description of Artificial Sequence: Synthetic oligonucleotide
uuugcccaccaaugcuuuc

SEQ ID NO: 425163 - RNA, 19 nt, Artificial Sequence
  Description of Artificial Sequence: Synthetic oligonucleotide
uagccguuguauacugguu

SEQ ID NO: 425164 - RNA, 19 nt, Artificial Sequence
  Description of Artificial Sequence: Synthetic oligonucleotide
cauuagaaacauuguuagu

SEQ ID NO: 425165 - RNA, 19 nt, Artificial Sequence
  Description of Artificial Sequence: Synthetic oligonucleotide
guaauacuagcgacuugga

SEQ ID NO: 425166 - RNA, 19 nt, Artificial Sequence
  Description of Artificial Sequence: Synthetic oligonucleotide
gcuauaauaaaaggacucu

SEQ ID NO: 425167 - RNA, 19 nt, Artificial Sequence
  Description of Artificial Sequence: Synthetic oligonucleotide
guaccuauuugccgaguua

SEQ ID NO: 425168 - RNA, 19 nt, Artificial Sequence
  Description of Artificial Sequence: Synthetic oligonucleotide
gggacggccaucccucucc

SEQ ID NO: 425169 - RNA, 19 nt, Artificial Sequence
  Description of Artificial Sequence: Synthetic oligonucleotide
cuccucaaguagucgucuc

SEQ ID NO: 425170 - RNA, 19 nt, Artificial Sequence
  Description of Artificial Sequence: Synthetic oligonucleotide
gaccuggucucugacagcu

SEQ ID NO: 425171 - RNA, 19 nt, Artificial Sequence
  Description of Artificial Sequence: Synthetic oligonucleotide
uggcagacugggaccgacu

SEQ ID NO: 425172 - RNA, 19 nt, Artificial Sequence
  Description of Artificial Sequence: Synthetic oligonucleotide
ugaagcgacugagguagua

SEQ ID NO: 425173 - RNA, 19 nt, Artificial Sequence
  Description of Artificial Sequence: Synthetic oligonucleotide
cugugggccugucaaagaa

SEQ ID NO: 425174 - RNA, 19 nt, Artificial Sequence
  Description of Artificial Sequence: Synthetic oligonucleotide
auucguuagcccacauuau

SEQ ID NO: 425175 - RNA, 19 nt, Artificial Sequence
  Description of Artificial Sequence: Synthetic oligonucleotide
uugaagcgacugagguagu

SEQ ID NO: 425176 - RNA, 19 nt, Artificial Sequence
  Description of Artificial Sequence: Synthetic oligonucleotide
uuggcccuacacucucuaa

SEQ ID NO: 425177 - RNA, 19 nt, Artificial Sequence
  Description of Artificial Sequence: Synthetic oligonucleotide
uaccaaucucagugagauc

SEQ ID NO: 425178 - RNA, 19 nt, Artificial Sequence
  Description of Artificial Sequence: Synthetic oligonucleotide
agcccaucaguacgcguau

SEQ ID NO: 425179 - RNA, 19 nt, Artificial Sequence
  Description of Artificial Sequence: Synthetic oligonucleotide
cugccucugcacugaguug

SEQ ID NO: 425180 - RNA, 19 nt, Artificial Sequence
  Description of Artificial Sequence: Synthetic oligonucleotide
ggauuugauauguguaaau

SEQ ID NO: 425181 - RNA, 19 nt, Artificial Sequence
  Description of Artificial Sequence: Synthetic oligonucleotide
ccaucccucuccucggugc

SEQ ID NO: 425182 - RNA, 19 nt, Artificial Sequence
  Description of Artificial Sequence: Synthetic oligonucleotide
aacuuucauuucaggcuuu

SEQ ID NO: 425183 - RNA, 19 nt, Artificial Sequence
  Description of Artificial Sequence: Synthetic oligonucleotide
accauaggcuugugacuaa

SEQ ID NO: 425184 - RNA, 19 nt, Artificial Sequence
  Description of Artificial Sequence: Synthetic oligonucleotide
ggaugauccagaaguccac

SEQ ID NO: 425185 - RNA, 19 nt, Artificial Sequence
  Description of Artificial Sequence: Synthetic oligonucleotide
uagcgacuuggaccaugga

SEQ ID NO: 425186 - RNA, 19 nt, Artificial Sequence
  Description of Artificial Sequence: Synthetic oligonucleotide
acugccuaaucgaggugcu

SEQ ID NO: 425187 - RNA, 19 nt, Artificial Sequence
  Description of Artificial Sequence: Synthetic oligonucleotide
gaguuagcccagcuugggu

SEQ ID NO: 425188 - RNA, 19 nt, Artificial Sequence
  Description of Artificial Sequence: Synthetic oligonucleotide
uaguaccuauuugccgagu

SEQ ID NO: 425189 - RNA, 19 nt, Artificial Sequence
  Description of Artificial Sequence: Synthetic oligonucleotide
acauuggauuuggucugcu

SEQ ID NO: 425190 - RNA, 19 nt, Artificial Sequence
  Description of Artificial Sequence: Synthetic oligonucleotide
cccagcuuggguaauacua

SEQ ID NO: 425191 - RNA, 19 nt, Artificial Sequence
  Description of Artificial Sequence: Synthetic oligonucleotide
gagugguacgaaucauuau

SEQ ID NO: 425192 - RNA, 19 nt, Artificial Sequence
  Description of Artificial Sequence: Synthetic oligonucleotide
gaugaguuccugguggcuu

SEQ ID NO: 425193 - RNA, 19 nt, Artificial Sequence
  Description of Artificial Sequence: Synthetic oligonucleotide
cguuagcccacauuaucug

SEQ ID NO: 425194 - RNA, 19 nt, Artificial Sequence
  Description of Artificial Sequence: Synthetic oligonucleotide
auggucgagaaggcaucug

SEQ ID NO: 425195 - RNA, 19 nt, Artificial Sequence
  Description of Artificial Sequence: Synthetic oligonucleotide
ggguaauacuagcgacuug

SEQ ID NO: 425196 - RNA, 19 nt, Artificial Sequence
  Description of Artificial Sequence: Synthetic oligonucleotide
caguacgcguauguuguca

SEQ ID NO: 425197 - RNA, 19 nt, Artificial Sequence
  Description of Artificial Sequence: Synthetic oligonucleotide
agcccauuuccaugaccaa

SEQ ID NO: 425198 - RNA, 19 nt, Artificial Sequence
  Description of Artificial Sequence: Synthetic oligonucleotide
caucgaccuucugccagag

SEQ ID NO: 425199 - RNA, 19 nt, Artificial Sequence
  Description of Artificial Sequence: Synthetic oligonucleotide
cacccuucagagcagcugu

SEQ ID NO: 425200 - RNA, 19 nt, Artificial Sequence
  Description of Artificial Sequence: Synthetic oligonucleotide
caguagaaacuuggaguca

SEQ ID NO: 425201 - RNA, 19 nt, Artificial Sequence
  Description of Artificial Sequence: Synthetic oligonucleotide
gucauaggucaagcuauaa

SEQ ID NO: 425202 - RNA, 19 nt, Artificial Sequence
  Description of Artificial Sequence: Synthetic oligonucleotide
ugcuaacaucagugcugcu

SEQ ID NO: 425203 - RNA, 19 nt, Artificial Sequence
  Description of Artificial Sequence: Synthetic oligonucleotide
ccgggaugcccuuuucccc

SEQ ID NO: 425204 - RNA, 19 nt, Artificial Sequence
  Description of Artificial Sequence: Synthetic oligonucleotide
cuggcagacugggaccgac

SEQ ID NO: 425205 - RNA, 19 nt, Artificial Sequence
  Description of Artificial Sequence: Synthetic oligonucleotide
uccugggaguuugcccacc

SEQ ID NO: 425206 - RNA, 19 nt, Artificial Sequence
  Description of Artificial Sequence: Synthetic oligonucleotide
cugauaccaaugaugucuu

SEQ ID NO: 425207 - RNA, 19 nt, Artificial Sequence
  Description of Artificial Sequence: Synthetic oligonucleotide
gucacacaaagccccgccu

SEQ ID NO: 425208 - RNA, 19 nt, Artificial Sequence
  Description of Artificial Sequence: Synthetic oligonucleotide
acguuggauuugauaugug

SEQ ID NO: 425209 - RNA, 19 nt, Artificial Sequence
  Description of Artificial Sequence: Synthetic oligonucleotide
cuccuucuaccaaucccaa

SEQ ID NO: 425210 - RNA, 19 nt, Artificial Sequence
  Description of Artificial Sequence: Synthetic oligonucleotide
ggauggucgagaaggcauc

SEQ ID NO: 425211 - RNA, 19 nt, Artificial Sequence
  Description of Artificial Sequence: Synthetic oligonucleotide
agucgucucuccagcuucu

SEQ ID NO: 425212 - RNA, 19 nt, Artificial Sequence
  Description of Artificial Sequence: Synthetic oligonucleotide
ugggaccgacugccuaauc

SEQ ID NO: 425213 - RNA, 19 nt, Artificial Sequence
  Description of Artificial Sequence: Synthetic oligonucleotide
gccuauaagcauccuugaa

SEQ ID NO: 425214 - RNA, 19 nt, Artificial Sequence
  Description of Artificial Sequence: Synthetic oligonucleotide
cacacaaagccccgccucu

SEQ ID NO: 425215 - RNA, 19 nt, Artificial Sequence
  Description of Artificial Sequence: Synthetic oligonucleotide
cccaaacaaaugggguucc

SEQ ID NO: 425216 - RNA, 19 nt, Artificial Sequence
  Description of Artificial Sequence: Synthetic oligonucleotide
gcuagacccggagcugggg

SEQ ID NO: 425217 - RNA, 19 nt, Artificial Sequence
  Description of Artificial Sequence: Synthetic oligonucleotide
ccuaaucgaggugcugaag

SEQ ID NO: 425218 - RNA, 19 nt, Artificial Sequence
  Description of Artificial Sequence: Synthetic oligonucleotide
gccguuguauacugguuua

SEQ ID NO: 425219 - RNA, 19 nt, Artificial Sequence
  Description of Artificial Sequence: Synthetic oligonucleotide
ggucaucgaccuucugcca

SEQ ID NO: 425220 - RNA, 19 nt, Artificial Sequence
  Description of Artificial Sequence: Synthetic oligonucleotide
aggggacggccaucccucu

SEQ ID NO: 425221 - RNA, 19 nt, Artificial Sequence
  Description of Artificial Sequence: Synthetic oligonucleotide
cggcuugccuauaagcauc

SEQ ID NO: 425222 - RNA, 19 nt, Artificial Sequence
  Description of Artificial Sequence: Synthetic oligonucleotide
ugucuucgugaggcuuacu

SEQ ID NO: 425223 - RNA, 19 nt, Artificial Sequence
  Description of Artificial Sequence: Synthetic oligonucleotide
caaagccccgccucuaauu

SEQ ID NO: 425224 - RNA, 19 nt, Artificial Sequence
  Description of Artificial Sequence: Synthetic oligonucleotide
cucugugagcagcaucggu

SEQ ID NO: 425225 - RNA, 19 nt, Artificial Sequence
  Description of Artificial Sequence: Synthetic oligonucleotide
caaugcuuucugccgaauu

SEQ ID NO: 425226 - RNA, 19 nt, Artificial Sequence
  Description of Artificial Sequence: Synthetic oligonucleotide
gccuaaucgaggugcugaa

SEQ ID NO: 425227 - RNA, 19 nt, Artificial Sequence
  Description of Artificial Sequence: Synthetic oligonucleotide
gggauggucgagaaggcau

SEQ ID NO: 425228 - RNA, 19 nt, Artificial Sequence
  Description of Artificial Sequence: Synthetic oligonucleotide
gcggaucuuugcaaaggga

SEQ ID NO: 425229 - RNA, 19 nt, Artificial Sequence
  Description of Artificial Sequence: Synthetic oligonucleotide
ccguuguauacugguuuac

SEQ ID NO: 425230 - RNA, 19 nt, Artificial Sequence
  Description of Artificial Sequence: Synthetic oligonucleotide
ccgacugccuaaucgaggu

SEQ ID NO: 425231 - RNA, 19 nt, Artificial Sequence
  Description of Artificial Sequence: Synthetic oligonucleotide
cauuggauuuggucugcuu

SEQ ID NO: 425232 - RNA, 19 nt, Artificial Sequence
  Description of Artificial Sequence: Synthetic oligonucleotide
gccaucccucuccucggug

SEQ ID NO: 425233 - RNA, 19 nt, Artificial Sequence
  Description of Artificial Sequence: Synthetic oligonucleotide
ccacguaguaggcagaguu

SEQ ID NO: 425234 - RNA, 19 nt, Artificial Sequence
  Description of Artificial Sequence: Synthetic oligonucleotide
cccacauuaucugguagaa

SEQ ID NO: 425235 - RNA, 19 nt, Artificial Sequence
  Description of Artificial Sequence: Synthetic oligonucleotide
ggcuuagccguuguauacu

SEQ ID NO: 425236 - RNA, 19 nt, Artificial Sequence
  Description of Artificial Sequence: Synthetic oligonucleotide
cuggaaugccuugcaucaa

SEQ ID NO: 425237 - RNA, 19 nt, Artificial Sequence
  Description of Artificial Sequence: Synthetic oligonucleotide
cgcguauguugucagcuga

SEQ ID NO: 425238 - RNA, 19 nt, Artificial Sequence
  Description of Artificial Sequence: Synthetic oligonucleotide
gccgaguuaacuccaucuu

SEQ ID NO: 425239 - RNA, 19 nt, Artificial Sequence
  Description of Artificial Sequence: Synthetic oligonucleotide
ccccgccucuaauuccagc

SEQ ID NO: 425240 - RNA, 19 nt, Artificial Sequence
  Description of Artificial Sequence: Synthetic oligonucleotide
uacuagcgacuuggaccau

SEQ ID NO: 425241 - RNA, 19 nt, Artificial Sequence
  Description of Artificial Sequence: Synthetic oligonucleotide
gcguauguugucagcugaa

SEQ ID NO: 425242 - RNA, 19 nt, Artificial Sequence
  Description of Artificial Sequence: Synthetic oligonucleotide
gccuugcaucaaaucuaug

SEQ ID NO: 425243 - RNA, 19 nt, Artificial Sequence
  Description of Artificial Sequence: Synthetic oligonucleotide
guucccgggaugcccuuuu

SEQ ID NO: 425244 - RNA, 19 nt, Artificial Sequence
  Description of Artificial Sequence: Synthetic oligonucleotide
ccgaguuaacuccaucuuu

SEQ ID NO: 425245 - RNA, 19 nt, Artificial Sequence
  Description of Artificial Sequence: Synthetic oligonucleotide
ggggacggccaucccucuc

SEQ ID NO: 425246 - RNA, 19 nt, Artificial Sequence
  Description of Artificial Sequence: Synthetic oligonucleotide
cgacugccuaaucgaggug

SEQ ID NO: 425247 - RNA, 19 nt, Artificial Sequence
  Description of Artificial Sequence: Synthetic oligonucleotide
cagagacguuggauuugau

SEQ ID NO: 425248 - RNA, 19 nt, Artificial Sequence
  Description of Artificial Sequence: Synthetic oligonucleotide
cuaugacggcuugccuaua

SEQ ID NO: 425249 - RNA, 19 nt, Artificial Sequence
  Description of Artificial Sequence: Synthetic oligonucleotide
gcccagcuuggguaauacu

SEQ ID NO: 425250 - RNA, 19 nt, Artificial Sequence
  Description of Artificial Sequence: Synthetic oligonucleotide
gccucggaaggaacaugaa

SEQ ID NO: 425251 - RNA, 19 nt, Artificial Sequence
  Description of Artificial Sequence: Synthetic oligonucleotide
ccauucguuagcccacauu

SEQ ID NO: 425252 - RNA, 19 nt, Artificial Sequence
  Description of Artificial Sequence: Synthetic oligonucleotide
cugggaccgacugccuaau

SEQ ID NO: 425253 - RNA, 19 nt, Artificial Sequence
  Description of Artificial Sequence: Synthetic oligonucleotide
ccggaguaccaaucucagu

SEQ ID NO: 425254 - RNA, 19 nt, Artificial Sequence
  Description of Artificial Sequence: Synthetic oligonucleotide
ccccauucguuagcccaca

SEQ ID NO: 425255 - RNA, 19 nt, Artificial Sequence
  Description of Artificial Sequence: Synthetic oligonucleotide
ggccuuuugcaagcccauu

SEQ ID NO: 425256 - RNA, 19 nt, Artificial Sequence
  Description of Artificial Sequence: Synthetic oligonucleotide
ccaaugcuuucugccgaau

SEQ ID NO: 425257 - RNA, 19 nt, Artificial Sequence
  Description of Artificial Sequence: Synthetic oligonucleotide
cccauucguuagcccacau

SEQ ID NO: 425258 - RNA, 19 nt, Artificial Sequence
  Description of Artificial Sequence: Synthetic oligonucleotide
ugucuaacuauucagagca

SEQ ID NO: 425259 - RNA, 19 nt, Artificial Sequence
  Description of Artificial Sequence: Synthetic oligonucleotide
uugauuaagagccaaaagu

SEQ ID NO: 425260 - RNA, 19 nt, Artificial Sequence
  Description of Artificial Sequence: Synthetic oligonucleotide
aagaguugcucauuguccc

SEQ ID NO: 425261 - RNA, 19 nt, Artificial Sequence
  Description of Artificial Sequence: Synthetic oligonucleotide
uucauauugagagagauga

SEQ ID NO: 425262 - RNA, 19 nt, Artificial Sequence
  Description of Artificial Sequence: Synthetic oligonucleotide
ucgguaaccaggauuaagg

SEQ ID NO: 425263 - RNA, 19 nt, Artificial Sequence
  Description of Artificial Sequence: Synthetic oligonucleotide
uuuagagcagugaauaaga

SEQ ID NO: 425264 - RNA, 19 nt, Artificial Sequence
  Description of Artificial Sequence: Synthetic oligonucleotide
acaguuaggaucugugccc

SEQ ID NO: 425265 - RNA, 19 nt, Artificial Sequence
  Description of Artificial Sequence: Synthetic oligonucleotide
uuuguaauaauuccagcuc

SEQ ID NO: 425266 - RNA, 19 nt, Artificial Sequence
  Description of Artificial Sequence: Synthetic oligonucleotide
uuuaguggugcuauguuca

SEQ ID NO: 425267 - RNA, 19 nt, Artificial Sequence
  Description of Artificial Sequence: Synthetic oligonucleotide
aggauuaagguugauauag

SEQ ID NO: 425268 - RNA, 19 nt, Artificial Sequence
  Description of Artificial Sequence: Synthetic oligonucleotide
guggaguugauuaagagcc

SEQ ID NO: 425269 - RNA, 19 nt, Artificial Sequence
  Description of Artificial Sequence: Synthetic oligonucleotide
gaaggcuacagcuagcggc

SEQ ID NO: 425270 - RNA, 19 nt, Artificial Sequence
  Description of Artificial Sequence: Synthetic oligonucleotide
ugagaccucagcuuugugg

SEQ ID NO: 425271 - RNA, 19 nt, Artificial Sequence
  Description of Artificial Sequence: Synthetic oligonucleotide
ugauuaagagccaaaaguu

SEQ ID NO: 425272 - RNA, 19 nt, Artificial Sequence
  Description of Artificial Sequence: Synthetic oligonucleotide
uuaacaaccuugcaggauc

SEQ ID NO: 425273 - RNA, 19 nt, Artificial Sequence
  Description of Artificial Sequence: Synthetic oligonucleotide
uguggaguugauuaagagc

SEQ ID NO: 425274 - RNA, 19 nt, Artificial Sequence
  Description of Artificial Sequence: Synthetic oligonucleotide
cauauugagagagaugagg

SEQ ID NO: 425275 - RNA, 19 nt, Artificial Sequence
  Description of Artificial Sequence: Synthetic oligonucleotide
auuugguagacucgguaac

SEQ ID NO: 425276 - RNA, 19 nt, Artificial Sequence
  Description of Artificial Sequence: Synthetic oligonucleotide
guugauauagguuguagca

SEQ ID NO: 425277 - RNA, 19 nt, Artificial Sequence
  Description of Artificial Sequence: Synthetic oligonucleotide
agagccaaaaguucucacg

SEQ ID NO: 425278 - RNA, 19 nt, Artificial Sequence
  Description of Artificial Sequence: Synthetic oligonucleotide
uuaugguagagaaaccaga

SEQ ID NO: 425279 - RNA, 19 nt, Artificial Sequence
  Description of Artificial Sequence: Synthetic oligonucleotide
aacugaacguguccacacc

SEQ ID NO: 425280 - RNA, 19 nt, Artificial Sequence
  Description of Artificial Sequence: Synthetic oligonucleotide
ugggacacuagcacaauag

SEQ ID NO: 425281 - RNA, 19 nt, Artificial Sequence
  Description of Artificial Sequence: Synthetic oligonucleotide
ugaguguggccaaagaacu

SEQ ID NO: 425282 - RNA, 19 nt, Artificial Sequence
  Description of Artificial Sequence: Synthetic oligonucleotide
ucaaguggcggcaaagagc

SEQ ID NO: 425283 - RNA, 19 nt, Artificial Sequence
  Description of Artificial Sequence: Synthetic oligonucleotide
ugauauagguuguagcacu

SEQ ID NO: 425284 - RNA, 19 nt, Artificial Sequence
  Description of Artificial Sequence: Synthetic oligonucleotide
gaacugaccagccaaggug

SEQ ID NO: 425285 - RNA, 19 nt, Artificial Sequence
  Description of Artificial Sequence: Synthetic oligonucleotide
gagaccucagcuuuguggc

SEQ ID NO: 425286 - RNA, 19 nt, Artificial Sequence
  Description of Artificial Sequence: Synthetic oligonucleotide
cuuaugguagagaaaccag

SEQ ID NO: 425287 - RNA, 19 nt, Artificial Sequence
  Description of Artificial Sequence: Synthetic oligonucleotide
uguaauaauuccagcucca

SEQ ID NO: 425288 - RNA, 19 nt, Artificial Sequence
  Description of Artificial Sequence: Synthetic oligonucleotide
ugggguaagggcauagaag

SEQ ID NO: 425289 - RNA, 19 nt, Artificial Sequence
  Description of Artificial Sequence: Synthetic oligonucleotide
uucagacgggcucagaacu

SEQ ID NO: 425290 - RNA, 19 nt, Artificial Sequence
  Description of Artificial Sequence: Synthetic oligonucleotide
acacuagcacaauaggguc

SEQ ID NO: 425291 - RNA, 19 nt, Artificial Sequence
  Description of Artificial Sequence: Synthetic oligonucleotide
cacaguuaggaucugugcc

SEQ ID NO: 425292 - RNA, 19 nt, Artificial Sequence
  Description of Artificial Sequence: Synthetic oligonucleotide
acgggcucagaacugaacg

SEQ ID NO: 425293 - RNA, 19 nt, Artificial Sequence
  Description of Artificial Sequence: Synthetic oligonucleotide
ugugacgguggucagggcc

SEQ ID NO: 425294 - RNA, 19 nt, Artificial Sequence
  Description of Artificial Sequence: Synthetic oligonucleotide
gucaaacagagucagcacc

SEQ ID NO: 425295 - RNA, 19 nt, Artificial Sequence
  Description of Artificial Sequence: Synthetic oligonucleotide
uuugacgggauguccuugg

SEQ ID NO: 425296 - RNA, 19 nt, Artificial Sequence
  Description of Artificial Sequence: Synthetic oligonucleotide
guuuagagcagugaauaag

SEQ ID NO: 425297 - RNA, 19 nt, Artificial Sequence
  Description of Artificial Sequence: Synthetic oligonucleotide
auuaagagccaaaaguucu

SEQ ID NO: 425298 - RNA, 19 nt, Artificial Sequence
  Description of Artificial Sequence: Synthetic oligonucleotide
ugugcacuuugucuccucg

SEQ ID NO: 425299 - RNA, 19 nt, Artificial Sequence
  Description of Artificial Sequence: Synthetic oligonucleotide
agguuguagcacugggucc

SEQ ID NO: 425300 - RNA, 19 nt, Artificial Sequence
  Description of Artificial Sequence: Synthetic oligonucleotide
uccugucuaacuauucaga

SEQ ID NO: 425301 - RNA, 19 nt, Artificial Sequence
  Description of Artificial Sequence: Synthetic oligonucleotide
aaguccguagguuucucga

SEQ ID NO: 425302 - RNA, 19 nt, Artificial Sequence
  Description of Artificial Sequence: Synthetic oligonucleotide
uuuuaacaaccuugcagga

SEQ ID NO: 425303 - RNA, 19 nt, Artificial Sequence
  Description of Artificial Sequence: Synthetic oligonucleotide
cauagaguggccaggcggc

SEQ ID NO: 425304 - RNA, 19 nt, Artificial Sequence
  Description of Artificial Sequence: Synthetic oligonucleotide
gauuaagagccaaaaguuc

SEQ ID NO: 425305 - RNA, 19 nt, Artificial Sequence
  Description of Artificial Sequence: Synthetic oligonucleotide
cauagagccacugugaaga

SEQ ID NO: 425306 - RNA, 19 nt, Artificial Sequence
  Description of Artificial Sequence: Synthetic oligonucleotide
ucauauugagagagaugag

SEQ ID NO: 425307 - RNA, 19 nt, Artificial Sequence
  Description of Artificial Sequence: Synthetic oligonucleotide
gucuguuuauuuuaacaac

SEQ ID NO: 425308 - RNA, 19 nt, Artificial Sequence
  Description of Artificial Sequence: Synthetic oligonucleotide
aacaagcucuccaugacgu

SEQ ID NO: 425309 - RNA, 19 nt, Artificial Sequence
  Description of Artificial Sequence: Synthetic oligonucleotide
gacucaacagugcuuagga

SEQ ID NO: 425310 - RNA, 19 nt, Artificial Sequence
  Description of Artificial Sequence: Synthetic oligonucleotide
caucuauuugguagacucg

SEQ ID NO: 425311 - RNA, 19 nt, Artificial Sequence
  Description of Artificial Sequence: Synthetic oligonucleotide
uuaagagccaaaaguucuc

SEQ ID NO: 425312 - RNA, 19 nt, Artificial Sequence
  Description of Artificial Sequence: Synthetic oligonucleotide
aucaaguggcggcaaagag

SEQ ID NO: 425313 - RNA, 19 nt, Artificial Sequence
  Description of Artificial Sequence: Synthetic oligonucleotide
cugucuaacuauucagagc

SEQ ID NO: 425314 - RNA, 19 nt, Artificial Sequence
  Description of Artificial Sequence: Synthetic oligonucleotide
ugaauuugacgggaugucc

SEQ ID NO: 425315 - RNA, 19 nt, Artificial Sequence
  Description of Artificial Sequence: Synthetic oligonucleotide
uucauagagccacugugaa

SEQ ID NO: 425316 - RNA, 19 nt, Artificial Sequence
  Description of Artificial Sequence: Synthetic oligonucleotide
ucuaacuauucagagcacu

SEQ ID NO: 425317 - RNA, 19 nt, Artificial Sequence
  Description of Artificial Sequence: Synthetic oligonucleotide
ucucgagcccgguagaggc

SEQ ID NO: 425318 - RNA, 19 nt, Artificial Sequence
  Description of Artificial Sequence: Synthetic oligonucleotide
gaauaagacuuugcaggcg

SEQ ID NO: 425319 - RNA, 19 nt, Artificial Sequence
  Description of Artificial Sequence: Synthetic oligonucleotide
agcagaguggaucugcaca

SEQ ID NO: 425320 - RNA, 19 nt, Artificial Sequence
  Description of Artificial Sequence: Synthetic oligonucleotide
uaagguugauauagguugu

SEQ ID NO: 425321 - RNA, 19 nt, Artificial Sequence
  Description of Artificial Sequence: Synthetic oligonucleotide
cacgugagaacuuccgggg

SEQ ID NO: 425322 - RNA, 19 nt, Artificial Sequence
  Description of Artificial Sequence: Synthetic oligonucleotide
gucaugaucccaguguagg

SEQ ID NO: 425323 - RNA, 19 nt, Artificial Sequence
  Description of Artificial Sequence: Synthetic oligonucleotide
cagugcuuaggaaugaguc

SEQ ID NO: 425324 - RNA, 19 nt, Artificial Sequence
  Description of Artificial Sequence: Synthetic oligonucleotide
auagcacaggccuggggcg

SEQ ID NO: 425325 - RNA, 19 nt, Artificial Sequence
  Description of Artificial Sequence: Synthetic oligonucleotide
gaauguggccaauuaugug

SEQ ID NO: 425326 - RNA, 19 nt, Artificial Sequence
  Description of Artificial Sequence: Synthetic oligonucleotide
uuucucacgaggucuguga

SEQ ID NO: 425327 - RNA, 19 nt, Artificial Sequence
  Description of Artificial Sequence: Synthetic oligonucleotide
ggucucaugguccaggacc

SEQ ID NO: 425328 - RNA, 19 nt, Artificial Sequence
  Description of Artificial Sequence: Synthetic oligonucleotide
agaugaaaagaugucccag

SEQ ID NO: 425329 - RNA, 19 nt, Artificial Sequence
  Description of Artificial Sequence: Synthetic oligonucleotide
uacccgugcaacauugggc

SEQ ID NO: 425330 - RNA, 19 nt, Artificial Sequence
  Description of Artificial Sequence: Synthetic oligonucleotide
uugauauagguuguagcac

SEQ ID NO: 425331 - RNA, 19 nt, Artificial Sequence
  Description of Artificial Sequence: Synthetic oligonucleotide
gaaguccguagguuucucg

SEQ ID NO: 425332 - RNA, 19 nt, Artificial Sequence
  Description of Artificial Sequence: Synthetic oligonucleotide
cucucuaguguucgcaggg

SEQ ID NO: 425333 - RNA, 19 nt, Artificial Sequence
  Description of Artificial Sequence: Synthetic oligonucleotide
uuugguagacucgguaacc

SEQ ID NO: 425334 - RNA, 19 nt, Artificial Sequence
  Description of Artificial Sequence: Synthetic oligonucleotide
ucauagagccacugugaag

SEQ ID NO: 425335 - RNA, 19 nt, Artificial Sequence
  Description of Artificial Sequence: Synthetic oligonucleotide
gagguuccgccacacaaag

SEQ ID NO: 425336 - RNA, 19 nt, Artificial Sequence
  Description of Artificial Sequence: Synthetic oligonucleotide
cacugugaagauugguucc

SEQ ID NO: 425337 - RNA, 19 nt, Artificial Sequence
  Description of Artificial Sequence: Synthetic oligonucleotide
aaggagucccaacuugggu

SEQ ID NO: 425338 - RNA, 19 nt, Artificial Sequence
  Description of Artificial Sequence: Synthetic oligonucleotide
gauuaagguugauauaggu

SEQ ID NO: 425339 - RNA, 19 nt, Artificial Sequence
  Description of Artificial Sequence: Synthetic oligonucleotide
gagaguaugaagggcauca

SEQ ID NO: 425340 - RNA, 19 nt, Artificial Sequence
  Description of Artificial Sequence: Synthetic oligonucleotide
gguugauauagguuguagc

SEQ ID NO: 425341 - RNA, 19 nt, Artificial Sequence
  Description of Artificial Sequence: Synthetic oligonucleotide
ucucacgaggucugugacg

SEQ ID NO: 425342 - RNA, 19 nt, Artificial Sequence
  Description of Artificial Sequence: Synthetic oligonucleotide
gaaugagucccuuuccuaa

SEQ ID NO: 425343 - RNA, 19 nt, Artificial Sequence
  Description of Artificial Sequence: Synthetic oligonucleotide
ucguagaccggacuggauc

SEQ ID NO: 425344 - RNA, 19 nt, Artificial Sequence
  Description of Artificial Sequence: Synthetic oligonucleotide
uguacucgccccaguaccc

SEQ ID NO: 425345 - RNA, 19 nt, Artificial Sequence
  Description of Artificial Sequence: Synthetic oligonucleotide
agccaaaaguucucacgcg

SEQ ID NO: 425346 - RNA, 19 nt, Artificial Sequence
  Description of Artificial Sequence: Synthetic oligonucleotide
uguucgcagggguagguca

SEQ ID NO: 425347 - RNA, 19 nt, Artificial Sequence
  Description of Artificial Sequence: Synthetic oligonucleotide
cacaauaggguccgugacc

SEQ ID NO: 425348 - RNA, 19 nt, Artificial Sequence
  Description of Artificial Sequence: Synthetic oligonucleotide
acaguggagucaaacagag

SEQ ID NO: 425349 - RNA, 19 nt, Artificial Sequence
  Description of Artificial Sequence: Synthetic oligonucleotide
aggcgggugucccuuaugg

SEQ ID NO: 425350 - RNA, 19 nt, Artificial Sequence
  Description of Artificial Sequence: Synthetic oligonucleotide
acaauaggguccgugacca

SEQ ID NO: 425351 - RNA, 19 nt, Artificial Sequence
  Description of Artificial Sequence: Synthetic oligonucleotide
acugaacguguccacaccu

SEQ ID NO: 425352 - RNA, 19 nt, Artificial Sequence
  Description of Artificial Sequence: Synthetic oligonucleotide
uuucauaccuggcuacaau

SEQ ID NO: 425353 - RNA, 19 nt, Artificial Sequence
  Description of Artificial Sequence: Synthetic oligonucleotide
cuguacucgccccaguacc

SEQ ID NO: 425354 - RNA, 19 nt, Artificial Sequence
  Description of Artificial Sequence: Synthetic oligonucleotide
guaugaagggcaucagcug

SEQ ID NO: 425355 - RNA, 19 nt, Artificial Sequence
  Description of Artificial Sequence: Synthetic oligonucleotide
cuguggaguugauuaagag

SEQ ID NO: 425356 - RNA, 19 nt, Artificial Sequence
  Description of Artificial Sequence: Synthetic oligonucleotide
uccguagguuucucgagcc

SEQ ID NO: 425357 - RNA, 19 nt, Artificial Sequence
  Description of Artificial Sequence: Synthetic oligonucleotide
agaguugcucauugucccg

SEQ ID NO: 425358 - RNA, 19 nt, Artificial Sequence
  Description of Artificial Sequence: Synthetic oligonucleotide
uuaguggugcuauguucag

SEQ ID NO: 425359 - RNA, 19 nt, Artificial Sequence
  Description of Artificial Sequence: Synthetic oligonucleotide
cacuagcacaauagggucc

SEQ ID NO: 425360 - RNA, 19 nt, Artificial Sequence
  Description of Artificial Sequence: Synthetic oligonucleotide
acaaccuugcaggaucacg

SEQ ID NO: 425361 - RNA, 19 nt, Artificial Sequence
  Description of Artificial Sequence: Synthetic oligonucleotide
aauuugacgggauguccuu

SEQ ID NO: 425362 - RNA, 19 nt, Artificial Sequence
  Description of Artificial Sequence: Synthetic oligonucleotide
aacagugcuuaggaaugag

SEQ ID NO: 425363 - RNA, 19 nt, Artificial Sequence
  Description of Artificial Sequence: Synthetic oligonucleotide
cagcccguaguuuagagca

SEQ ID NO: 425364 - RNA, 19 nt, Artificial Sequence
  Description of Artificial Sequence: Synthetic oligonucleotide
agaacugaccagccaaggu

SEQ ID NO: 425365 - RNA, 19 nt, Artificial Sequence
  Description of Artificial Sequence: Synthetic oligonucleotide
gaucacguagcagcgcagg

SEQ ID NO: 425366 - RNA, 19 nt, Artificial Sequence
  Description of Artificial Sequence: Synthetic oligonucleotide
ucuauuugguagacucggu

SEQ ID NO: 425367 - RNA, 19 nt, Artificial Sequence
  Description of Artificial Sequence: Synthetic oligonucleotide
gaugaaaagaugucccagu

SEQ ID NO: 425368 - RNA, 19 nt, Artificial Sequence
  Description of Artificial Sequence: Synthetic oligonucleotide
caugacguuugcucccugg

SEQ ID NO: 425369 - RNA, 19 nt, Artificial Sequence
  Description of Artificial Sequence: Synthetic oligonucleotide
aguugauuaagagccaaaa

SEQ ID NO: 425370 - RNA, 19 nt, Artificial Sequence
  Description of Artificial Sequence: Synthetic oligonucleotide
cuacccgugcaacauuggg

SEQ ID NO: 425371 - RNA, 19 nt, Artificial Sequence
  Description of Artificial Sequence: Synthetic oligonucleotide
gcuucauagagccacugug

SEQ ID NO: 425372 - RNA, 19 nt, Artificial Sequence
  Description of Artificial Sequence: Synthetic oligonucleotide
aggaucacguagcagcgca

SEQ ID NO: 425373 - RNA, 19 nt, Artificial Sequence
  Description of Artificial Sequence: Synthetic oligonucleotide
ucagcccguaguuuagagc

SEQ ID NO: 425374 - RNA, 19 nt, Artificial Sequence
  Description of Artificial Sequence: Synthetic oligonucleotide
auauagguuguagcacugg

SEQ ID NO: 425375 - RNA, 19 nt, Artificial Sequence
  Description of Artificial Sequence: Synthetic oligonucleotide
agaagcaagccacaagcuu

SEQ ID NO: 425376 - RNA, 19 nt, Artificial Sequence
  Description of Artificial Sequence: Synthetic oligonucleotide
gguuucucgagcccgguag

SEQ ID NO: 425377 - RNA, 19 nt, Artificial Sequence
  Description of Artificial Sequence: Synthetic oligonucleotide
cuucauagagccacuguga

SEQ ID NO: 425378 - RNA, 19 nt, Artificial Sequence
  Description of Artificial Sequence: Synthetic oligonucleotide
cugggcauagguagggcag

SEQ ID NO: 425379 - RNA, 19 nt, Artificial Sequence
  Description of Artificial Sequence: Synthetic oligonucleotide
gaugucuccuguccaguac

SEQ ID NO: 425380 - RNA, 19 nt, Artificial Sequence
  Description of Artificial Sequence: Synthetic oligonucleotide
aggguccgugaccacaaac

SEQ ID NO: 425381 - RNA, 19 nt, Artificial Sequence
  Description of Artificial Sequence: Synthetic oligonucleotide
uuuaacaaccuugcaggau

SEQ ID NO: 425382 - RNA, 19 nt, Artificial Sequence
  Description of Artificial Sequence: Synthetic oligonucleotide
ugguagacucgguaaccag

SEQ ID NO: 425383 - RNA, 19 nt, Artificial Sequence
  Description of Artificial Sequence: Synthetic oligonucleotide
aaacugugggcaucuggaa

SEQ ID NO: 425384 - RNA, 19 nt, Artificial Sequence
  Description of Artificial Sequence: Synthetic oligonucleotide
ggaucuguggaguugauua

SEQ ID NO: 425385 - RNA, 19 nt, Artificial Sequence
  Description of Artificial Sequence: Synthetic oligonucleotide
aguccguagguuucucgag

SEQ ID NO: 425386 - RNA, 19 nt, Artificial Sequence
  Description of Artificial Sequence: Synthetic oligonucleotide
ucuaguguucgcaggggua

SEQ ID NO: 425387 - RNA, 19 nt, Artificial Sequence
  Description of Artificial Sequence: Synthetic oligonucleotide
ccaagaugaaaagaugucc

SEQ ID NO: 425388 - RNA, 19 nt, Artificial Sequence
  Description of Artificial Sequence: Synthetic oligonucleotide
aacuugggugccgguaagg

SEQ ID NO: 425389 - RNA, 19 nt, Artificial Sequence
  Description of Artificial Sequence: Synthetic oligonucleotide
cuucagacgggcucagaac

SEQ ID NO: 425390 - RNA, 19 nt, Artificial Sequence
  Description of Artificial Sequence: Synthetic oligonucleotide
gggacacuagcacaauagg

SEQ ID NO: 425391 - RNA, 19 nt, Artificial Sequence
  Description of Artificial Sequence: Synthetic oligonucleotide
ucucuaguguucgcagggg

SEQ ID NO: 425392 - RNA, 19 nt, Artificial Sequence
  Description of Artificial Sequence: Synthetic oligonucleotide
ucccagauccagccaaaca

SEQ ID NO: 425393 - RNA, 19 nt, Artificial Sequence
  Description of Artificial Sequence: Synthetic oligonucleotide
gguagacucgguaaccagg

SEQ ID NO: 425394 - RNA, 19 nt, Artificial Sequence
  Description of Artificial Sequence: Synthetic oligonucleotide
cauugggcaucaaguggcg

SEQ ID NO: 425395 - RNA, 19 nt, Artificial Sequence
  Description of Artificial Sequence: Synthetic oligonucleotide
agguugauauagguuguag

SEQ ID NO: 425396 - RNA, 19 nt, Artificial Sequence
  Description of Artificial Sequence: Synthetic oligonucleotide
augucuccuguccaguaca

SEQ ID NO: 425397 - RNA, 19 nt, Artificial Sequence
  Description of Artificial Sequence: Synthetic oligonucleotide
aacaaccuugcaggaucac

SEQ ID NO: 425398 - RNA, 19 nt, Artificial Sequence
  Description of Artificial Sequence: Synthetic oligonucleotide
uuccgccacacaaaggcau

SEQ ID NO: 425399 - RNA, 19 nt, Artificial Sequence
  Description of Artificial Sequence: Synthetic oligonucleotide
gacucgguaaccaggauua

SEQ ID NO: 425400 - RNA, 19 nt, Artificial Sequence
  Description of Artificial Sequence: Synthetic oligonucleotide
agacucgguaaccaggauu

SEQ ID NO: 425401 - RNA, 19 nt, Artificial Sequence
  Description of Artificial Sequence: Synthetic oligonucleotide
cugucgagacuguugccag

SEQ ID NO: 425402 - RNA, 19 nt, Artificial Sequence
  Description of Artificial Sequence: Synthetic oligonucleotide
auaccuggcuacaauuuug

SEQ ID NO: 425403 - RNA, 19 nt, Artificial Sequence
  Description of Artificial Sequence: Synthetic oligonucleotide
acacauuuaguggugcuau

SEQ ID NO: 425404 - RNA, 19 nt, Artificial Sequence
  Description of Artificial Sequence: Synthetic oligonucleotide
uucucgagcccgguagagg

SEQ ID NO: 425405 - RNA, 19 nt, Artificial Sequence
  Description of Artificial Sequence: Synthetic oligonucleotide
ggguaggucacacuugcug

SEQ ID NO: 425406 - RNA, 19 nt, Artificial Sequence
  Description of Artificial Sequence: Synthetic oligonucleotide
acaugaguguggccaaaga

SEQ ID NO: 425407 - RNA, 19 nt, Artificial Sequence
  Description of Artificial Sequence: Synthetic oligonucleotide
guccguagguuucucgagc

SEQ ID NO: 425408 - RNA, 19 nt, Artificial Sequence
  Description of Artificial Sequence: Synthetic oligonucleotide
gccaauuaugugcacuuug

SEQ ID NO: 425409 - RNA, 19 nt, Artificial Sequence
  Description of Artificial Sequence: Synthetic oligonucleotide
agccaaacaagcucuccau

SEQ ID NO: 425410 - RNA, 19 nt, Artificial Sequence
  Description of Artificial Sequence: Synthetic oligonucleotide
agagccuacccgugcaaca

SEQ ID NO: 425411 - RNA, 19 nt, Artificial Sequence
  Description of Artificial Sequence: Synthetic oligonucleotide
gauaagcucuggcaggagu

SEQ ID NO: 425412 - RNA, 19 nt, Artificial Sequence
  Description of Artificial Sequence: Synthetic oligonucleotide
aaugcaucuggaaguccgu

SEQ ID NO: 425413 - RNA, 19 nt, Artificial Sequence
  Description of Artificial Sequence: Synthetic oligonucleotide
uuucucgagcccgguagag

SEQ ID NO: 425414 - RNA, 19 nt, Artificial Sequence
  Description of Artificial Sequence: Synthetic oligonucleotide
ccacgugagaacuuccggg

SEQ ID NO: 425415 - RNA, 19 nt, Artificial Sequence
  Description of Artificial Sequence: Synthetic oligonucleotide
gguuguagcacuggguccc

SEQ ID NO: 425416 - RNA, 19 nt, Artificial Sequence
  Description of Artificial Sequence: Synthetic oligonucleotide
cucgguaaccaggauuaag

SEQ ID NO: 425417 - RNA, 19 nt, Artificial Sequence
  Description of Artificial Sequence: Synthetic oligonucleotide
ugcuuaggaaugagucccu

SEQ ID NO: 425418 - RNA, 19 nt, Artificial Sequence
  Description of Artificial Sequence: Synthetic oligonucleotide
cugaauuugacgggauguc

SEQ ID NO: 425419 - RNA, 19 nt, Artificial Sequence
  Description of Artificial Sequence: Synthetic oligonucleotide
guagguuucucgagcccgg

SEQ ID NO: 425420 - RNA, 19 nt, Artificial Sequence
  Description of Artificial Sequence: Synthetic oligonucleotide
auagguuguagcacugggu

SEQ ID NO: 425421 - RNA, 19 nt, Artificial Sequence
  Description of Artificial Sequence: Synthetic oligonucleotide
guagacucgguaaccagga

SEQ ID NO: 425422 - RNA, 19 nt, Artificial Sequence
  Description of Artificial Sequence: Synthetic oligonucleotide
gaauuugacgggauguccu

SEQ ID NO: 425423 - RNA, 19 nt, Artificial Sequence
  Description of Artificial Sequence: Synthetic oligonucleotide
ccuugcaggaucacguagc

SEQ ID NO: 425424 - RNA, 19 nt, Artificial Sequence
  Description of Artificial Sequence: Synthetic oligonucleotide
uucaggcaaugcccuggag

SEQ ID NO: 425425 - RNA, 19 nt, Artificial Sequence
  Description of Artificial Sequence: Synthetic oligonucleotide
aguuaggaucugugcccuc

SEQ ID NO: 425426 - RNA, 19 nt, Artificial Sequence
  Description of Artificial Sequence: Synthetic oligonucleotide
aaccuugcaggaucacgua

SEQ ID NO: 425427 - RNA, 19 nt, Artificial Sequence
  Description of Artificial Sequence: Synthetic oligonucleotide
guuccccuuuaugaagggg

SEQ ID NO: 425428 - RNA, 19 nt, Artificial Sequence
  Description of Artificial Sequence: Synthetic oligonucleotide
uagcacaauaggguccgug

SEQ ID NO: 425429 - RNA, 19 nt, Artificial Sequence
  Description of Artificial Sequence: Synthetic oligonucleotide
cacauuuaguggugcuaug

SEQ ID NO: 425430 - RNA, 19 nt, Artificial Sequence
  Description of Artificial Sequence: Synthetic oligonucleotide
uuugcucccuggccugaca

SEQ ID NO: 425431 - RNA, 19 nt, Artificial Sequence
  Description of Artificial Sequence: Synthetic oligonucleotide
cuauuugguagacucggua

SEQ ID NO: 425432 - RNA, 19 nt, Artificial Sequence
  Description of Artificial Sequence: Synthetic oligonucleotide
gaccggacuggaucgcccc

SEQ ID NO: 425433 - RNA, 19 nt, Artificial Sequence
  Description of Artificial Sequence: Synthetic oligonucleotide
aaggcgggugucccuuaug

SEQ ID NO: 425434 - RNA, 19 nt, Artificial Sequence
  Description of Artificial Sequence: Synthetic oligonucleotide
ggacuaauguuccccacuc

SEQ ID NO: 425435 - RNA, 19 nt, Artificial Sequence
  Description of Artificial Sequence: Synthetic oligonucleotide
auuugacgggauguccuug

SEQ ID NO: 425436 - RNA, 19 nt, Artificial Sequence
  Description of Artificial Sequence: Synthetic oligonucleotide
acgggauguccuugggcag

SEQ ID NO: 425437 - RNA, 19 nt, Artificial Sequence
  Description of Artificial Sequence: Synthetic oligonucleotide
gcacaguuaggaucugugc

SEQ ID NO: 425438 - RNA, 19 nt, Artificial Sequence
  Description of Artificial Sequence: Synthetic oligonucleotide
cguagaccggacuggaucg

SEQ ID NO: 425439 - RNA, 19 nt, Artificial Sequence
  Description of Artificial Sequence: Synthetic oligonucleotide
ugccgguaaggaagucucc

SEQ ID NO: 425440 - RNA, 19 nt, Artificial Sequence
  Description of Artificial Sequence: Synthetic oligonucleotide
cugaacguguccacaccuc

SEQ ID NO: 425441 - RNA, 19 nt, Artificial Sequence
  Description of Artificial Sequence: Synthetic oligonucleotide
cuggccggaugacacuccg

SEQ ID NO: 425442 - RNA, 19 nt, Artificial Sequence
  Description of Artificial Sequence: Synthetic oligonucleotide
cuugcaggaucacguagca

SEQ ID NO: 425443 - RNA, 19 nt, Artificial Sequence
  Description of Artificial Sequence: Synthetic oligonucleotide
agaccggacuggaucgccc

SEQ ID NO: 425444 - RNA, 19 nt, Artificial Sequence
  Description of Artificial Sequence: Synthetic oligonucleotide
caaccuugcaggaucacgu

SEQ ID NO: 425445 - RNA, 19 nt, Artificial Sequence
  Description of Artificial Sequence: Synthetic oligonucleotide
ugucgagacuguugccaga

SEQ ID NO: 425446 - RNA, 19 nt, Artificial Sequence
  Description of Artificial Sequence: Synthetic oligonucleotide
uaguggugcuauguucagc

SEQ ID NO: 425447 - RNA, 19 nt, Artificial Sequence
  Description of Artificial Sequence: Synthetic oligonucleotide
acgugagaacuuccggggu

SEQ ID NO: 425448 - RNA, 19 nt, Artificial Sequence
  Description of Artificial Sequence: Synthetic oligonucleotide
ugggcauagguagggcagc

SEQ ID NO: 425449 - RNA, 19 nt, Artificial Sequence
  Description of Artificial Sequence: Synthetic oligonucleotide
acuugggugccgguaagga

SEQ ID NO: 425450 - RNA, 19 nt, Artificial Sequence
  Description of Artificial Sequence: Synthetic oligonucleotide
gucgagacuguugccagac

SEQ ID NO: 425451 - RNA, 19 nt, Artificial Sequence
  Description of Artificial Sequence: Synthetic oligonucleotide
cagccaaacaagcucucca

SEQ ID NO: 425452 - RNA, 19 nt, Artificial Sequence
  Description of Artificial Sequence: Synthetic oligonucleotide
aagguugauauagguugua

SEQ ID NO: 425453 - RNA, 19 nt, Artificial Sequence
  Description of Artificial Sequence: Synthetic oligonucleotide
acagugcuuaggaaugagu

SEQ ID NO: 425454 - RNA, 19 nt, Artificial Sequence
  Description of Artificial Sequence: Synthetic oligonucleotide
gccaaaaguucucacgcga

SEQ ID NO: 425455 - RNA, 19 nt, Artificial Sequence
  Description of Artificial Sequence: Synthetic oligonucleotide
ggccggaugacacuccgug

SEQ ID NO: 425456 - RNA, 19 nt, Artificial Sequence
  Description of Artificial Sequence: Synthetic oligonucleotide
ccaagaacuuucucacgag

SEQ ID NO: 425457 - RNA, 19 nt, Artificial Sequence
  Description of Artificial Sequence: Synthetic oligonucleotide
accaggauuaagguugaua

SEQ ID NO: 425458 - RNA, 19 nt, Artificial Sequence
  Description of Artificial Sequence: Synthetic oligonucleotide
caggccgaggcccuuggug

SEQ ID NO: 425459 - RNA, 19 nt, Artificial Sequence
  Description of Artificial Sequence: Synthetic oligonucleotide
uccugucgagacuguugcc

SEQ ID NO: 425460 - RNA, 19 nt, Artificial Sequence
  Description of Artificial Sequence: Synthetic oligonucleotide
ccggaugacacuccguggc

SEQ ID NO: 425461 - RNA, 19 nt, Artificial Sequence
  Description of Artificial Sequence: Synthetic oligonucleotide
gcucccauugggcaucaag

SEQ ID NO: 425462 - RNA, 19 nt, Artificial Sequence
  Description of Artificial Sequence: Synthetic oligonucleotide
gguuccccuuuaugaaggg

SEQ ID NO: 425463 - RNA, 19 nt, Artificial Sequence
  Description of Artificial Sequence: Synthetic oligonucleotide
guaaggaagucuccagccu

SEQ ID NO: 425464 - RNA, 19 nt, Artificial Sequence
  Description of Artificial Sequence: Synthetic oligonucleotide
ucgagacuguugccagaca

SEQ ID NO: 425465 - RNA, 19 nt, Artificial Sequence
  Description of Artificial Sequence: Synthetic oligonucleotide
cuuucucacgaggucugug

SEQ ID NO: 425466 - RNA, 19 nt, Artificial Sequence
  Description of Artificial Sequence: Synthetic oligonucleotide
caacuugggugccgguaag

SEQ ID NO: 425467 - RNA, 19 nt, Artificial Sequence
  Description of Artificial Sequence: Synthetic oligonucleotide
uagaccggacuggaucgcc

SEQ ID NO: 425468 - RNA, 19 nt, Artificial Sequence
  Description of Artificial Sequence: Synthetic oligonucleotide
ccaggauuaagguugauau

SEQ ID NO: 425469 - RNA, 19 nt, Artificial Sequence
  Description of Artificial Sequence: Synthetic oligonucleotide
auagagccacugugaagau

SEQ ID NO: 425470 - RNA, 19 nt, Artificial Sequence
  Description of Artificial Sequence: Synthetic oligonucleotide
gcaagagagguuccgccac

SEQ ID NO: 425471 - RNA, 19 nt, Artificial Sequence
  Description of Artificial Sequence: Synthetic oligonucleotide
cacugauggcaaagagaug

SEQ ID NO: 425472 - RNA, 19 nt, Artificial Sequence
  Description of Artificial Sequence: Synthetic oligonucleotide
agucccaacuugggugccg

SEQ ID NO: 425473 - RNA, 19 nt, Artificial Sequence
  Description of Artificial Sequence: Synthetic oligonucleotide
ccuuaugguagagaaacca

SEQ ID NO: 425474 - RNA, 19 nt, Artificial Sequence
  Description of Artificial Sequence: Synthetic oligonucleotide
uggcuucauagagccacug

SEQ ID NO: 425475 - RNA, 19 nt, Artificial Sequence
  Description of Artificial Sequence: Synthetic oligonucleotide
cccaguacccagcaccugc

SEQ ID NO: 425476 - RNA, 19 nt, Artificial Sequence
  Description of Artificial Sequence: Synthetic oligonucleotide
uggggcgacagcuccuguc

SEQ ID NO: 425477 - RNA, 19 nt, Artificial Sequence
  Description of Artificial Sequence: Synthetic oligonucleotide
uugucccgcaugcgguaga

SEQ ID NO: 425478 - RNA, 19 nt, Artificial Sequence
  Description of Artificial Sequence: Synthetic oligonucleotide
uagacucgguaaccaggau

SEQ ID NO: 425479 - RNA, 19 nt, Artificial Sequence
  Description of Artificial Sequence: Synthetic oligonucleotide
gugccgguaaggaagucuc

SEQ ID NO: 425480 - RNA, 19 nt, Artificial Sequence
  Description of Artificial Sequence: Synthetic oligonucleotide
gaguugauuaagagccaaa

SEQ ID NO: 425481 - RNA, 19 nt, Artificial Sequence
  Description of Artificial Sequence: Synthetic oligonucleotide
ucgggccacggguagcgcu

SEQ ID NO: 425482 - RNA, 19 nt, Artificial Sequence
  Description of Artificial Sequence: Synthetic oligonucleotide
gcacaauaggguccgugac

SEQ ID NO: 425483 - RNA, 19 nt, Artificial Sequence
  Description of Artificial Sequence: Synthetic oligonucleotide
caucaaguggcggcaaaga

SEQ ID NO: 425484 - RNA, 19 nt, Artificial Sequence
  Description of Artificial Sequence: Synthetic oligonucleotide
ggcacugauggcaaagaga

SEQ ID NO: 425485 - RNA, 19 nt, Artificial Sequence
  Description of Artificial Sequence: Synthetic oligonucleotide
uggcuacaauuuuguaaua

SEQ ID NO: 425486 - RNA, 19 nt, Artificial Sequence
  Description of Artificial Sequence: Synthetic oligonucleotide
gacgggcucagaacugaac

SEQ ID NO: 425487 - RNA, 19 nt, Artificial Sequence
  Description of Artificial Sequence: Synthetic oligonucleotide
guaguuuagagcagugaau

SEQ ID NO: 425488 - RNA, 19 nt, Artificial Sequence
  Description of Artificial Sequence: Synthetic oligonucleotide
gcuagcggccggcucagag

SEQ ID NO: 425489 - RNA, 19 nt, Artificial Sequence
  Description of Artificial Sequence: Synthetic oligonucleotide
caggauuaagguugauaua

SEQ ID NO: 425490 - RNA, 19 nt, Artificial Sequence
  Description of Artificial Sequence: Synthetic oligonucleotide
gacuaauguuccccacucu

SEQ ID NO: 425491 - RNA, 19 nt, Artificial Sequence
  Description of Artificial Sequence: Synthetic oligonucleotide
gcuucagacgggcucagaa

SEQ ID NO: 425492 - RNA, 19 nt, Artificial Sequence
  Description of Artificial Sequence: Synthetic oligonucleotide
cguagguuucucgagcccg

SEQ ID NO: 425493 - RNA, 19 nt, Artificial Sequence
  Description of Artificial Sequence: Synthetic oligonucleotide
aguguaggucagugaggaa

SEQ ID NO: 425494 - RNA, 19 nt, Artificial Sequence
  Description of Artificial Sequence: Synthetic oligonucleotide
gccggaugacacuccgugg

SEQ ID NO: 425495 - RNA, 19 nt, Artificial Sequence
  Description of Artificial Sequence: Synthetic oligonucleotide
gcaacauugggcuccuucu

SEQ ID NO: 425496 - RNA, 19 nt, Artificial Sequence
  Description of Artificial Sequence: Synthetic oligonucleotide
gguggcuucggcacugaug

SEQ ID NO: 425497 - RNA, 19 nt, Artificial Sequence
  Description of Artificial Sequence: Synthetic oligonucleotide
cagggugugccacagggcu

SEQ ID NO: 425498 - RNA, 19 nt, Artificial Sequence
  Description of Artificial Sequence: Synthetic oligonucleotide
acaagcucuccaugacguu

SEQ ID NO: 425499 - RNA, 19 nt, Artificial Sequence
  Description of Artificial Sequence: Synthetic oligonucleotide
gcggcaaagagcagggcug

SEQ ID NO: 425500 - RNA, 19 nt, Artificial Sequence
  Description of Artificial Sequence: Synthetic oligonucleotide
ggcacacauuuaguggugc

SEQ ID NO: 425501 - RNA, 19 nt, Artificial Sequence
  Description of Artificial Sequence: Synthetic oligonucleotide
ugucccgcaugcgguagac

SEQ ID NO: 425502 - RNA, 19 nt, Artificial Sequence
  Description of Artificial Sequence: Synthetic oligonucleotide
guucgcagggguaggucac

SEQ ID NO: 425503 - RNA, 19 nt, Artificial Sequence
  Description of Artificial Sequence: Synthetic oligonucleotide
gucuaacuauucagagcac

SEQ ID NO: 425504 - RNA, 19 nt, Artificial Sequence
  Description of Artificial Sequence: Synthetic oligonucleotide
agguuccgccacacaaagg

SEQ ID NO: 425505 - RNA, 19 nt, Artificial Sequence
  Description of Artificial Sequence: Synthetic oligonucleotide
acggguagcgcuggagaca

SEQ ID NO: 425506 - RNA, 19 nt, Artificial Sequence
  Description of Artificial Sequence: Synthetic oligonucleotide
uucgcagggguaggucaca

SEQ ID NO: 425507 - RNA, 19 nt, Artificial Sequence
  Description of Artificial Sequence: Synthetic oligonucleotide
ggcuacagcuagcggccgg

SEQ ID NO: 425508 - RNA, 19 nt, Artificial Sequence
  Description of Artificial Sequence: Synthetic oligonucleotide
ccgguaaggaagucuccag

SEQ ID NO: 425509 - RNA, 19 nt, Artificial Sequence
  Description of Artificial Sequence: Synthetic oligonucleotide
cccuuaugguagagaaacc

SEQ ID NO: 425510 - RNA, 19 nt, Artificial Sequence
  Description of Artificial Sequence: Synthetic oligonucleotide
guagaccggacuggaucgc

SEQ ID NO: 425511 - RNA, 19 nt, Artificial Sequence
  Description of Artificial Sequence: Synthetic oligonucleotide
auagaguggccaggcggca

SEQ ID NO: 425512 - RNA, 19 nt, Artificial Sequence
  Description of Artificial Sequence: Synthetic oligonucleotide
agggugugccacagggcuc

SEQ ID NO: 425513 - RNA, 19 nt, Artificial Sequence
  Description of Artificial Sequence: Synthetic oligonucleotide
cagagccuacccgugcaac

SEQ ID NO: 425514 - RNA, 19 nt, Artificial Sequence
  Description of Artificial Sequence: Synthetic oligonucleotide
caauaggguccgugaccac

SEQ ID NO: 425515 - RNA, 19 nt, Artificial Sequence
  Description of Artificial Sequence: Synthetic oligonucleotide
gguaaccaggauuaagguu

SEQ ID NO: 425516 - RNA, 19 nt, Artificial Sequence
  Description of Artificial Sequence: Synthetic oligonucleotide
gacacuccguggcggggca

SEQ ID NO: 425517 - RNA, 19 nt, Artificial Sequence
  Description of Artificial Sequence: Synthetic oligonucleotide
aggcgcuuccaguguggug

SEQ ID NO: 425518 - RNA, 19 nt, Artificial Sequence
  Description of Artificial Sequence: Synthetic oligonucleotide
caucucaaaagggccugca

SEQ ID NO: 425519 - RNA, 19 nt, Artificial Sequence
  Description of Artificial Sequence: Synthetic oligonucleotide
ggcgcuuccaguguggugu

SEQ ID NO: 425520 - RNA, 19 nt, Artificial Sequence
  Description of Artificial Sequence: Synthetic oligonucleotide
cauuuaguggugcuauguu

SEQ ID NO: 425521 - RNA, 19 nt, Artificial Sequence
  Description of Artificial Sequence: Synthetic oligonucleotide
caggguucccaggccuugg

SEQ ID NO: 425522 - RNA, 19 nt, Artificial Sequence
  Description of Artificial Sequence: Synthetic oligonucleotide
ccaauuaugugcacuuugu

SEQ ID NO: 425523 - RNA, 19 nt, Artificial Sequence
  Description of Artificial Sequence: Synthetic oligonucleotide
gaccagccaagguguuuuc

SEQ ID NO: 425524 - RNA, 19 nt, Artificial Sequence
  Description of Artificial Sequence: Synthetic oligonucleotide
ggcggggcaagagagguuc

SEQ ID NO: 425525 - RNA, 19 nt, Artificial Sequence
  Description of Artificial Sequence: Synthetic oligonucleotide
ccgugcaacauugggcucc

SEQ ID NO: 425526 - RNA, 19 nt, Artificial Sequence
  Description of Artificial Sequence: Synthetic oligonucleotide
ugguugcccacagcagggu

SEQ ID NO: 425527 - RNA, 19 nt, Artificial Sequence
  Description of Artificial Sequence: Synthetic oligonucleotide
cagcgcaggguucacaggu

SEQ ID NO: 425528 - RNA, 19 nt, Artificial Sequence
  Description of Artificial Sequence: Synthetic oligonucleotide
gcagcgcaggguucacagg

SEQ ID NO: 425529 - RNA, 19 nt, Artificial Sequence
  Description of Artificial Sequence: Synthetic oligonucleotide
cuccggcggcagcagagug

SEQ ID NO: 425530 - RNA, 19 nt, Artificial Sequence
  Description of Artificial Sequence: Synthetic oligonucleotide
gagucccaacuugggugcc

SEQ ID NO: 425531 - RNA, 19 nt, Artificial Sequence
  Description of Artificial Sequence: Synthetic oligonucleotide
ggcggcaaagagcagggcu

SEQ ID NO: 425532 - RNA, 19 nt, Artificial Sequence
  Description of Artificial Sequence: Synthetic oligonucleotide
gcgggugucccuuauggua

SEQ ID NO: 425533 - RNA, 19 nt, Artificial Sequence
  Description of Artificial Sequence: Synthetic oligonucleotide
agcccguaguuuagagcag

SEQ ID NO: 425534 - RNA, 19 nt, Artificial Sequence
  Description of Artificial Sequence: Synthetic oligonucleotide
gccuacccgugcaacauug

SEQ ID NO: 425535 - RNA, 19 nt, Artificial Sequence
  Description of Artificial Sequence: Synthetic oligonucleotide
cucuaguguucgcaggggu

SEQ ID NO: 425536 - RNA, 19 nt, Artificial Sequence
  Description of Artificial Sequence: Synthetic oligonucleotide
gcuacagcuagcggccggc

SEQ ID NO: 425537 - RNA, 19 nt, Artificial Sequence
  Description of Artificial Sequence: Synthetic oligonucleotide
cugugacgguggucagggc

SEQ ID NO: 425538 - RNA, 19 nt, Artificial Sequence
  Description of Artificial Sequence: Synthetic oligonucleotide
uagcagcgcaggguucaca

SEQ ID NO: 425539 - RNA, 19 nt, Artificial Sequence
  Description of Artificial Sequence: Synthetic oligonucleotide
cugggacacuagcacaaua

SEQ ID NO: 425540 - RNA, 19 nt, Artificial Sequence
  Description of Artificial Sequence: Synthetic oligonucleotide
ccugucgagacuguugcca

SEQ ID NO: 425541 - RNA, 19 nt, Artificial Sequence
  Description of Artificial Sequence: Synthetic oligonucleotide
ccagagaacaguggaguca

SEQ ID NO: 425542 - RNA, 19 nt, Artificial Sequence
  Description of Artificial Sequence: Synthetic oligonucleotide
ggaucacguagcagcgcag

SEQ ID NO: 425543 - RNA, 19 nt, Artificial Sequence
  Description of Artificial Sequence: Synthetic oligonucleotide
cucgccccaguacccagca

SEQ ID NO: 425544 - RNA, 19 nt, Artificial Sequence
  Description of Artificial Sequence: Synthetic oligonucleotide
agccuacccgugcaacauu

SEQ ID NO: 425545 - RNA, 19 nt, Artificial Sequence
  Description of Artificial Sequence: Synthetic oligonucleotide
ccagccaaacaagcucucc

SEQ ID NO: 425546 - RNA, 19 nt, Artificial Sequence
  Description of Artificial Sequence: Synthetic oligonucleotide
aaccaggauuaagguugau

SEQ ID NO: 425547 - RNA, 19 nt, Artificial Sequence
  Description of Artificial Sequence: Synthetic oligonucleotide
ucccaacuugggugccggu

SEQ ID NO: 425548 - RNA, 19 nt, Artificial Sequence
  Description of Artificial Sequence: Synthetic oligonucleotide
guacucgccccaguaccca

SEQ ID NO: 425549 - RNA, 19 nt, Artificial Sequence
  Description of Artificial Sequence: Synthetic oligonucleotide
cuagcggccggcucagagu

SEQ ID NO: 425550 - RNA, 19 nt, Artificial Sequence
  Description of Artificial Sequence: Synthetic oligonucleotide
ugacgguggucagggcccu

SEQ ID NO: 425551 - RNA, 19 nt, Artificial Sequence
  Description of Artificial Sequence: Synthetic oligonucleotide
gccgguaaggaagucucca

SEQ ID NO: 425552 - RNA, 19 nt, Artificial Sequence
  Description of Artificial Sequence: Synthetic oligonucleotide
guguucgcagggguagguc

SEQ ID NO: 425553 - RNA, 19 nt, Artificial Sequence
  Description of Artificial Sequence: Synthetic oligonucleotide
cacguagcagcgcaggguu

SEQ ID NO: 425554 - RNA, 19 nt, Artificial Sequence
  Description of Artificial Sequence: Synthetic oligonucleotide
ccgcaugcgguagaccagg

SEQ ID NO: 425555 - RNA, 19 nt, Artificial Sequence
  Description of Artificial Sequence: Synthetic oligonucleotide
ccaauucugagaguaugaa

SEQ ID NO: 425556 - RNA, 19 nt, Artificial Sequence
  Description of Artificial Sequence: Synthetic oligonucleotide
guuugcucccuggccugac

SEQ ID NO: 425557 - RNA, 19 nt, Artificial Sequence
  Description of Artificial Sequence: Synthetic oligonucleotide
ccaacuugggugccgguaa

SEQ ID NO: 425558 - RNA, 19 nt, Artificial Sequence
  Description of Artificial Sequence: Synthetic oligonucleotide
ccguagguuucucgagccc

SEQ ID NO: 425559 - RNA, 19 nt, Artificial Sequence
  Description of Artificial Sequence: Synthetic oligonucleotide
gagccuacccgugcaacau

SEQ ID NO: 425560 - RNA, 19 nt, Artificial Sequence
  Description of Artificial Sequence: Synthetic oligonucleotide
ggcgacagcuccugucuaa

SEQ ID NO: 425561 - RNA, 19 nt, Artificial Sequence
  Description of Artificial Sequence: Synthetic oligonucleotide
acucgguaaccaggauuaa

SEQ ID NO: 425562 - RNA, 19 nt, Artificial Sequence
  Description of Artificial Sequence: Synthetic oligonucleotide
guagcagcgcaggguucac

SEQ ID NO: 425563 - RNA, 19 nt, Artificial Sequence
  Description of Artificial Sequence: Synthetic oligonucleotide
ggccgaggcccuugguggc

SEQ ID NO: 425564 - RNA, 19 nt, Artificial Sequence
  Description of Artificial Sequence: Synthetic oligonucleotide
caagcucuccaugacguuu

SEQ ID NO: 425565 - RNA, 19 nt, Artificial Sequence
  Description of Artificial Sequence: Synthetic oligonucleotide
ccuggccggaugacacucc

SEQ ID NO: 425566 - RNA, 19 nt, Artificial Sequence
  Description of Artificial Sequence: Synthetic oligonucleotide
cuccguggcggggcauugc

SEQ ID NO: 425567 - RNA, 19 nt, Artificial Sequence
  Description of Artificial Sequence: Synthetic oligonucleotide
gaaggcgggugucccuuau

SEQ ID NO: 425568 - RNA, 19 nt, Artificial Sequence
  Description of Artificial Sequence: Synthetic oligonucleotide
ggugccgguaaggaagucu

SEQ ID NO: 425569 - RNA, 19 nt, Artificial Sequence
  Description of Artificial Sequence: Synthetic oligonucleotide
gcgacagcuccugucuaac

SEQ ID NO: 425570 - RNA, 19 nt, Artificial Sequence
  Description of Artificial Sequence: Synthetic oligonucleotide
ccaggcuucguagaccgga

SEQ ID NO: 425571 - RNA, 19 nt, Artificial Sequence
  Description of Artificial Sequence: Synthetic oligonucleotide
agacgggcucagaacugaa

SEQ ID NO: 425572 - RNA, 19 nt, Artificial Sequence
  Description of Artificial Sequence: Synthetic oligonucleotide
agcuucagacgggcucaga

SEQ ID NO: 425573 - RNA, 19 nt, Artificial Sequence
  Description of Artificial Sequence: Synthetic oligonucleotide
gucccgcaugcgguagacc

SEQ ID NO: 425574 - RNA, 19 nt, Artificial Sequence
  Description of Artificial Sequence: Synthetic oligonucleotide
ccacggguagcgcuggaga

SEQ ID NO: 425575 - RNA, 19 nt, Artificial Sequence
  Description of Artificial Sequence: Synthetic oligonucleotide
gccacggguagcgcuggag

SEQ ID NO: 425576 - RNA, 19 nt, Artificial Sequence
  Description of Artificial Sequence: Synthetic oligonucleotide
ggaaguccguagguuucuc

SEQ ID NO: 425577 - RNA, 19 nt, Artificial Sequence
  Description of Artificial Sequence: Synthetic oligonucleotide
gagcagugaauaagacuuu

SEQ ID NO: 425578 - RNA, 19 nt, Artificial Sequence
  Description of Artificial Sequence: Synthetic oligonucleotide
gcgugggguaagggcauag

SEQ ID NO: 425579 - RNA, 19 nt, Artificial Sequence
  Description of Artificial Sequence: Synthetic oligonucleotide
ggcauagguagggcagcca

SEQ ID NO: 425580 - RNA, 19 nt, Artificial Sequence
  Description of Artificial Sequence: Synthetic oligonucleotide
caguggagucaaacagagu

SEQ ID NO: 425581 - RNA, 19 nt, Artificial Sequence
  Description of Artificial Sequence: Synthetic oligonucleotide
cggguagcgcuggagacac

SEQ ID NO: 425582 - RNA, 19 nt, Artificial Sequence
  Description of Artificial Sequence: Synthetic oligonucleotide
gcggcagggugugccacag

SEQ ID NO: 425583 - RNA, 19 nt, Artificial Sequence
  Description of Artificial Sequence: Synthetic oligonucleotide
gccagggcgugggguaagg

SEQ ID NO: 425584 - RNA, 19 nt, Artificial Sequence
  Description of Artificial Sequence: Synthetic oligonucleotide
gcgcuuccaguguggugug

SEQ ID NO: 425585 - RNA, 19 nt, Artificial Sequence
  Description of Artificial Sequence: Synthetic oligonucleotide
gggccacggguagcgcugg

SEQ ID NO: 425586 - RNA, 19 nt, Artificial Sequence
  Description of Artificial Sequence: Synthetic oligonucleotide
cugugcccuccagguaguc

SEQ ID NO: 425587 - RNA, 19 nt, Artificial Sequence
  Description of Artificial Sequence: Synthetic oligonucleotide
cggacuggaucgccccucc

SEQ ID NO: 425588 - RNA, 19 nt, Artificial Sequence
  Description of Artificial Sequence: Synthetic oligonucleotide
cugcacaguuaggaucugu

SEQ ID NO: 425589 - RNA, 19 nt, Artificial Sequence
  Description of Artificial Sequence: Synthetic oligonucleotide
cccuggccggaugacacuc

SEQ ID NO: 425590 - RNA, 19 nt, Artificial Sequence
  Description of Artificial Sequence: Synthetic oligonucleotide
ggacuggaucgccccucca

SEQ ID NO: 425591 - RNA, 19 nt, Artificial Sequence
  Description of Artificial Sequence: Synthetic oligonucleotide
cugucugcgcgggcugaga

SEQ ID NO: 425592 - RNA, 19 nt, Artificial Sequence
  Description of Artificial Sequence: Synthetic oligonucleotide
cccgugcaacauugggcuc

SEQ ID NO: 425593 - RNA, 19 nt, Artificial Sequence
  Description of Artificial Sequence: Synthetic oligonucleotide
ggcgggugucccuuauggu

SEQ ID NO: 425594 - RNA, 19 nt, Artificial Sequence
  Description of Artificial Sequence: Synthetic oligonucleotide
cgggccacggguagcgcug

SEQ ID NO: 425595 - RNA, 19 nt, Artificial Sequence
  Description of Artificial Sequence: Synthetic oligonucleotide
cgguaaccaggauuaaggu

SEQ ID NO: 425596 - RNA, 19 nt, Artificial Sequence
  Description of Artificial Sequence: Synthetic oligonucleotide
ccaugacguuugcucccug

SEQ ID NO: 425597 - RNA, 19 nt, Artificial Sequence
  Description of Artificial Sequence: Synthetic oligonucleotide
gccgaggcccuugguggcc

SEQ ID NO: 425598 - RNA, 19 nt, Artificial Sequence
  Description of Artificial Sequence: Synthetic oligonucleotide
gacgguggucagggcccuc

SEQ ID NO: 425599 - RNA, 19 nt, Artificial Sequence
  Description of Artificial Sequence: Synthetic oligonucleotide
caaugcccuggaggaaugu

SEQ ID NO: 425600 - RNA, 19 nt, Artificial Sequence
  Description of Artificial Sequence: Synthetic oligonucleotide
gggguaguuuccaucuauu

SEQ ID NO: 425601 - RNA, 19 nt, Artificial Sequence
  Description of Artificial Sequence: Synthetic oligonucleotide
ggccagggcgugggguaag

SEQ ID NO: 425602 - RNA, 19 nt, Artificial Sequence
  Description of Artificial Sequence: Synthetic oligonucleotide
cagcaggaucuguggaguu

SEQ ID NO: 425603 - RNA, 19 nt, Artificial Sequence
  Description of Artificial Sequence: Synthetic oligonucleotide
gcccguaguuuagagcagu

SEQ ID NO: 425604 - RNA, 19 nt, Artificial Sequence
  Description of Artificial Sequence: Synthetic oligonucleotide
gcggggcaagagagguucc

SEQ ID NO: 425605 - RNA, 19 nt, Artificial Sequence
  Description of Artificial Sequence: Synthetic oligonucleotide
ccugggaguuggguggcca

SEQ ID NO: 425606 - RNA, 19 nt, Artificial Sequence
  Description of Artificial Sequence: Synthetic oligonucleotide
ccgaggcccuugguggccc

SEQ ID NO: 425607 - RNA, 19 nt, Artificial Sequence
  Description of Artificial Sequence: Synthetic oligonucleotide
acacuccguggcggggcau

SEQ ID NO: 425608 - RNA, 19 nt, Artificial Sequence
  Description of Artificial Sequence: Synthetic oligonucleotide
caggaccacgugagaacuu

SEQ ID NO: 425609 - RNA, 19 nt, Artificial Sequence
  Description of Artificial Sequence: Synthetic oligonucleotide
cuacagcuagcggccggcu

SEQ ID NO: 425610 - RNA, 19 nt, Artificial Sequence
  Description of Artificial Sequence: Synthetic oligonucleotide
gggcgacagcuccugucua

SEQ ID NO: 425611 - RNA, 19 nt, Artificial Sequence
  Description of Artificial Sequence: Synthetic oligonucleotide
agcuagcggccggcucaga

SEQ ID NO: 425612 - RNA, 19 nt, Artificial Sequence
  Description of Artificial Sequence: Synthetic oligonucleotide
cuagcacaauaggguccgu

SEQ ID NO: 425613 - RNA, 19 nt, Artificial Sequence
  Description of Artificial Sequence: Synthetic oligonucleotide
ccguggcggggcauugcca

SEQ ID NO: 425614 - RNA, 19 nt, Artificial Sequence
  Description of Artificial Sequence: Synthetic oligonucleotide
cgugggguaagggcauaga

SEQ ID NO: 425615 - RNA, 19 nt, Artificial Sequence
  Description of Artificial Sequence: Synthetic oligonucleotide
gggguaggucacacuugcu

SEQ ID NO: 425616 - RNA, 19 nt, Artificial Sequence
  Description of Artificial Sequence: Synthetic oligonucleotide
gggugccgguaaggaaguc

SEQ ID NO: 425617 - RNA, 19 nt, Artificial Sequence
  Description of Artificial Sequence: Synthetic oligonucleotide
cgggguaguuuccaucuau

SEQ ID NO: 425618 - RNA, 19 nt, Artificial Sequence
  Description of Artificial Sequence: Synthetic oligonucleotide
gggcacuauggcacugaau

SEQ ID NO: 425619 - RNA, 19 nt, Artificial Sequence
  Description of Artificial Sequence: Synthetic oligonucleotide
ggcggggcauugccaggcu

SEQ ID NO: 425620 - RNA, 19 nt, Artificial Sequence
  Description of Artificial Sequence: Synthetic oligonucleotide
ccacaugaguguggccaaa

SEQ ID NO: 425621 - RNA, 19 nt, Artificial Sequence
  Description of Artificial Sequence: Synthetic oligonucleotide
cuggugcauuggccugggu

SEQ ID NO: 425622 - RNA, 19 nt, Artificial Sequence
  Description of Artificial Sequence: Synthetic oligonucleotide
cacuccguggcggggcauu

SEQ ID NO: 425623 - RNA, 19 nt, Artificial Sequence
  Description of Artificial Sequence: Synthetic oligonucleotide
ccgggguaguuuccaucua

SEQ ID NO: 425624 - RNA, 19 nt, Artificial Sequence
  Description of Artificial Sequence: Synthetic oligonucleotide
ccugggacacuagcacaau

SEQ ID NO: 425625 - RNA, 19 nt, Artificial Sequence
  Description of Artificial Sequence: Synthetic oligonucleotide
cgcagggguaggucacacu

SEQ ID NO: 425626 - RNA, 19 nt, Artificial Sequence
  Description of Artificial Sequence: Synthetic oligonucleotide
gcgccaggaccagccccau

SEQ ID NO: 425627 - RNA, 19 nt, Artificial Sequence
  Description of Artificial Sequence: Synthetic oligonucleotide
ucuaaaucaauccauaugc

SEQ ID NO: 425628 - RNA, 19 nt, Artificial Sequence
  Description of Artificial Sequence: Synthetic oligonucleotide
uuuuauacggaauaaauga

SEQ ID NO: 425629 - RNA, 19 nt, Artificial Sequence
  Description of Artificial Sequence: Synthetic oligonucleotide
uuuccuguaaauaacgugg

SEQ ID NO: 425630 - RNA, 19 nt, Artificial Sequence
  Description of Artificial Sequence: Synthetic oligonucleotide
agaacugucacguggaggc

SEQ ID NO: 425631 - RNA, 19 nt, Artificial Sequence
  Description of Artificial Sequence: Synthetic oligonucleotide
agcaauaucaauuuuauaa

SEQ ID NO: 425632 - RNA, 19 nt, Artificial Sequence
  Description of Artificial Sequence: Synthetic oligonucleotide
aaguuaauuaaacuguugu

SEQ ID NO: 425633 - RNA, 19 nt, Artificial Sequence
  Description of Artificial Sequence: Synthetic oligonucleotide
aauaacgugguuacuacgc

SEQ ID NO: 425634 - RNA, 19 nt, Artificial Sequence
  Description of Artificial Sequence: Synthetic oligonucleotide
auaaaugauauucauuaag

SEQ ID NO: 425635 - RNA, 19 nt, Artificial Sequence
  Description of Artificial Sequence: Synthetic oligonucleotide
gagacuaaaacucauagga

SEQ ID NO: 425636 - RNA, 19 nt, Artificial Sequence
  Description of Artificial Sequence: Synthetic oligonucleotide
uuguuggacacacagaugc

SEQ ID NO: 425637 - RNA, 19 nt, Artificial Sequence
  Description of Artificial Sequence: Synthetic oligonucleotide
aaagucaauucacuucccc

SEQ ID NO: 425638 - RNA, 19 nt, Artificial Sequence
  Description of Artificial Sequence: Synthetic oligonucleotide
acauuucucgaacagaccg

SEQ ID NO: 425639 - RNA, 19 nt, Artificial Sequence
  Description of Artificial Sequence: Synthetic oligonucleotide
ugguaaauagugaaugggg

SEQ ID NO: 425640 - RNA, 19 nt, Artificial Sequence
  Description of Artificial Sequence: Synthetic oligonucleotide
aaucugaaauaguacauca

SEQ ID NO: 425641 - RNA, 19 nt, Artificial Sequence
  Description of Artificial Sequence: Synthetic oligonucleotide
uuuaauucccaauugguaa

SEQ ID NO: 425642 - RNA, 19 nt, Artificial Sequence
  Description of Artificial Sequence: Synthetic oligonucleotide
acaugugggacauauaaag

SEQ ID NO: 425643 - RNA, 19 nt, Artificial Sequence
  Description of Artificial Sequence: Synthetic oligonucleotide
uuugcuuguagccuaaugu

SEQ ID NO: 425644 - RNA, 19 nt, Artificial Sequence
  Description of Artificial Sequence: Synthetic oligonucleotide
uuaauuaaacuguuguacu

SEQ ID NO: 425645 - RNA, 19 nt, Artificial Sequence
  Description of Artificial Sequence: Synthetic oligonucleotide
ugcauuuucaccccuaacu

SEQ ID NO: 425646 - RNA, 19 nt, Artificial Sequence
  Description of Artificial Sequence: Synthetic oligonucleotide
aaauaacgugguuacuacg

SEQ ID NO: 425647 - RNA, 19 nt, Artificial Sequence
  Description of Artificial Sequence: Synthetic oligonucleotide
uucgauaaaagcgccaugg

SEQ ID NO: 425648 - RNA, 19 nt, Artificial Sequence
  Description of Artificial Sequence: Synthetic oligonucleotide
aacuaauuguuggacacac

SEQ ID NO: 425649 - RNA, 19 nt, Artificial Sequence
  Description of Artificial Sequence: Synthetic oligonucleotide
uucuaaaucaauccauaug

SEQ ID NO: 425650 - RNA, 19 nt, Artificial Sequence
  Description of Artificial Sequence: Synthetic oligonucleotide
guaccuaacuaauuguugg

SEQ ID NO: 425651 - RNA, 19 nt, Artificial Sequence
  Description of Artificial Sequence: Synthetic oligonucleotide
acgagaacagaaaacagcc

SEQ ID NO: 425652 - RNA, 19 nt, Artificial Sequence
  Description of Artificial Sequence: Synthetic oligonucleotide
uuugugaaagagaagugac

SEQ ID NO: 425653 - RNA, 19 nt, Artificial Sequence
  Description of Artificial Sequence: Synthetic oligonucleotide
uauacggaauaaaugauau

SEQ ID NO: 425654 - RNA, 19 nt, Artificial Sequence
  Description of Artificial Sequence: Synthetic oligonucleotide
uacggaauaaaugauauuc

SEQ ID NO: 425655 - RNA, 19 nt, Artificial Sequence
  Description of Artificial Sequence: Synthetic oligonucleotide
uuugcgauccccaacguac

SEQ ID NO: 425656 - RNA, 19 nt, Artificial Sequence
  Description of Artificial Sequence: Synthetic oligonucleotide
gacaggacgucaucgaugg

SEQ ID NO: 425657 - RNA, 19 nt, Artificial Sequence
  Description of Artificial Sequence: Synthetic oligonucleotide
caagguucgauaaaagcgc

SEQ ID NO: 425658 - RNA, 19 nt, Artificial Sequence
  Description of Artificial Sequence: Synthetic oligonucleotide
uggauaaacgagaacagaa

SEQ ID NO: 425659 - RNA, 19 nt, Artificial Sequence
  Description of Artificial Sequence: Synthetic oligonucleotide
aagcuuaucaaguuuccga

SEQ ID NO: 425660 - RNA, 19 nt, Artificial Sequence
  Description of Artificial Sequence: Synthetic oligonucleotide
ucacguaugucauaacugc

SEQ ID NO: 425661 - RNA, 19 nt, Artificial Sequence
  Description of Artificial Sequence: Synthetic oligonucleotide
aucaugucuacacuagggg

SEQ ID NO: 425662 - RNA, 19 nt, Artificial Sequence
  Description of Artificial Sequence: Synthetic oligonucleotide
uaaauagugaauggggcag

SEQ ID NO: 425663 - RNA, 19 nt, Artificial Sequence
  Description of Artificial Sequence: Synthetic oligonucleotide
ugaaauaguacaucacaga

SEQ ID NO: 425664 - RNA, 19 nt, Artificial Sequence
  Description of Artificial Sequence: Synthetic oligonucleotide
cuaacuaauuguuggacac

SEQ ID NO: 425665 - RNA, 19 nt, Artificial Sequence
  Description of Artificial Sequence: Synthetic oligonucleotide
gauaaaagcgccauggaca

SEQ ID NO: 425666 - RNA, 19 nt, Artificial Sequence
  Description of Artificial Sequence: Synthetic oligonucleotide
aacuucuauauacaucaca

SEQ ID NO: 425667 - RNA, 19 nt, Artificial Sequence
  Description of Artificial Sequence: Synthetic oligonucleotide
auagcgcaugacuuuauac

SEQ ID NO: 425668 - RNA, 19 nt, Artificial Sequence
  Description of Artificial Sequence: Synthetic oligonucleotide
gauaucgagauauccagca

SEQ ID NO: 425669 - RNA, 19 nt, Artificial Sequence
  Description of Artificial Sequence: Synthetic oligonucleotide
auaaacgagaacagaaaac

SEQ ID NO: 425670 - RNA, 19 nt, Artificial Sequence
  Description of Artificial Sequence: Synthetic oligonucleotide
aaguagguauccccaaaag

SEQ ID NO: 425671 - RNA, 19 nt, Artificial Sequence
  Description of Artificial Sequence: Synthetic oligonucleotide
uuacuacgcaaccacguag

SEQ ID NO: 425672 - RNA, 19 nt, Artificial Sequence
  Description of Artificial Sequence: Synthetic oligonucleotide
uuuauacggaauaaaugau

SEQ ID NO: 425673 - RNA, 19 nt, Artificial Sequence
  Description of Artificial Sequence: Synthetic oligonucleotide
aaauuuccuaucuuagcau

SEQ ID NO: 425674 - RNA, 19 nt, Artificial Sequence
  Description of Artificial Sequence: Synthetic oligonucleotide
uaaauaacgugguuacuac

SEQ ID NO: 425675 - RNA, 19 nt, Artificial Sequence
  Description of Artificial Sequence: Synthetic oligonucleotide
uaucgagauauccagcaac

SEQ ID NO: 425676 - RNA, 19 nt, Artificial Sequence
  Description of Artificial Sequence: Synthetic oligonucleotide
gauaaacgagaacagaaaa

SEQ ID NO: 425677 - RNA, 19 nt, Artificial Sequence
  Description of Artificial Sequence: Synthetic oligonucleotide
ugucauaacugcccaaucu

SEQ ID NO: 425678 - RNA, 19 nt, Artificial Sequence
  Description of Artificial Sequence: Synthetic oligonucleotide
aagcaaauugggaccagcc

SEQ ID NO: 425679 - RNA, 19 nt, Artificial Sequence
  Description of Artificial Sequence: Synthetic oligonucleotide
ucucacguaugucauaacu

SEQ ID NO: 425680 - RNA, 19 nt, Artificial Sequence
  Description of Artificial Sequence: Synthetic oligonucleotide
uuauacggaauaaaugaua

SEQ ID NO: 425681 - RNA, 19 nt, Artificial Sequence
  Description of Artificial Sequence: Synthetic oligonucleotide
uaugaugcuuuucucuggc

SEQ ID NO: 425682 - RNA, 19 nt, Artificial Sequence
  Description of Artificial Sequence: Synthetic oligonucleotide
aacguaccuaacuaauugu

SEQ ID NO: 425683 - RNA, 19 nt, Artificial Sequence
  Description of Artificial Sequence: Synthetic oligonucleotide
aaaaggaauucugagcggu

SEQ ID NO: 425684 - RNA, 19 nt, Artificial Sequence
  Description of Artificial Sequence: Synthetic oligonucleotide
aguaucaucauaguucuga

SEQ ID NO: 425685 - RNA, 19 nt, Artificial Sequence
  Description of Artificial Sequence: Synthetic oligonucleotide
uacgcaaccacguagucaa

SEQ ID NO: 425686 - RNA, 19 nt, Artificial Sequence
  Description of Artificial Sequence: Synthetic oligonucleotide
ggagauaugguccuaauga

SEQ ID NO: 425687 - RNA, 19 nt, Artificial Sequence
  Description of Artificial Sequence: Synthetic oligonucleotide
cacguagucaaauuagaac

SEQ ID NO: 425688 - RNA, 19 nt, Artificial Sequence
  Description of Artificial Sequence: Synthetic oligonucleotide
agcaaauugggaccagccg

SEQ ID NO: 425689 - RNA, 19 nt, Artificial Sequence
  Description of Artificial Sequence: Synthetic oligonucleotide
gcaagguucgauaaaagcg

SEQ ID NO: 425690 - RNA, 19 nt, Artificial Sequence
  Description of Artificial Sequence: Synthetic oligonucleotide
aacgugguuacuacgcaac

SEQ ID NO: 425691 - RNA, 19 nt, Artificial Sequence
  Description of Artificial Sequence: Synthetic oligonucleotide
aguagguauccccaaaagu

SEQ ID NO: 425692 - RNA, 19 nt, Artificial Sequence
  Description of Artificial Sequence: Synthetic oligonucleotide
aagguucgauaaaagcgcc

SEQ ID NO: 425693 - RNA, 19 nt, Artificial Sequence
  Description of Artificial Sequence: Synthetic oligonucleotide
ucucaaguagguaucccca

SEQ ID NO: 425694 - RNA, 19 nt, Artificial Sequence
  Description of Artificial Sequence: Synthetic oligonucleotide
uucguuaccaggagguggc

SEQ ID NO: 425695 - RNA, 19 nt, Artificial Sequence
  Description of Artificial Sequence: Synthetic oligonucleotide
uagcgcaugacuuuauaca

SEQ ID NO: 425696 - RNA, 19 nt, Artificial Sequence
  Description of Artificial Sequence: Synthetic oligonucleotide
uucccaauugguaaauagu

SEQ ID NO: 425697 - RNA, 19 nt, Artificial Sequence
  Description of Artificial Sequence: Synthetic oligonucleotide
guagguauccccaaaaguc

SEQ ID NO: 425698 - RNA, 19 nt, Artificial Sequence
  Description of Artificial Sequence: Synthetic oligonucleotide
uuaauucccaauugguaaa

SEQ ID NO: 425699 - RNA, 19 nt, Artificial Sequence
  Description of Artificial Sequence: Synthetic oligonucleotide
uguaaccacuuuccugugg

SEQ ID NO: 425700 - RNA, 19 nt, Artificial Sequence
  Description of Artificial Sequence: Synthetic oligonucleotide
uccuaucuuagcaucuuug

SEQ ID NO: 425701 - RNA, 19 nt, Artificial Sequence
  Description of Artificial Sequence: Synthetic oligonucleotide
uccucaagccccuacaccu

SEQ ID NO: 425702 - RNA, 19 nt, Artificial Sequence
  Description of Artificial Sequence: Synthetic oligonucleotide
cuuguagccuaauguaacc

SEQ ID NO: 425703 - RNA, 19 nt, Artificial Sequence
  Description of Artificial Sequence: Synthetic oligonucleotide
uaauuaaacuguuguacua

SEQ ID NO: 425704 - RNA, 19 nt, Artificial Sequence
  Description of Artificial Sequence: Synthetic oligonucleotide
caacguaccuaacuaauug

SEQ ID NO: 425705 - RNA, 19 nt, Artificial Sequence
  Description of Artificial Sequence: Synthetic oligonucleotide
aaucaaaccguugucccca

SEQ ID NO: 425706 - RNA, 19 nt, Artificial Sequence
  Description of Artificial Sequence: Synthetic oligonucleotide
acguaugucauaacugccc

SEQ ID NO: 425707 - RNA, 19 nt, Artificial Sequence
  Description of Artificial Sequence: Synthetic oligonucleotide
aagaacugucacguggagg

SEQ ID NO: 425708 - RNA, 19 nt, Artificial Sequence
  Description of Artificial Sequence: Synthetic oligonucleotide
uguuacauuuccccuauuu

SEQ ID NO: 425709 - RNA, 19 nt, Artificial Sequence
  Description of Artificial Sequence: Synthetic oligonucleotide
guaaauagugaauggggca

SEQ ID NO: 425710 - RNA, 19 nt, Artificial Sequence
  Description of Artificial Sequence: Synthetic oligonucleotide
cucacguaugucauaacug

SEQ ID NO: 425711 - RNA, 19 nt, Artificial Sequence
  Description of Artificial Sequence: Synthetic oligonucleotide
ccuaauguaaccacuuucc

SEQ ID NO: 425712 - RNA, 19 nt, Artificial Sequence
  Description of Artificial Sequence: Synthetic oligonucleotide
gauaugguccuaaugaaaa

SEQ ID NO: 425713 - RNA, 19 nt, Artificial Sequence
  Description of Artificial Sequence: Synthetic oligonucleotide
aaccacguagucaaauuag

SEQ ID NO: 425714 - RNA, 19 nt, Artificial Sequence
  Description of Artificial Sequence: Synthetic oligonucleotide
gagauauccagcaaccgac

SEQ ID NO: 425715 - RNA, 19 nt, Artificial Sequence
  Description of Artificial Sequence: Synthetic oligonucleotide
ucgugcaaaaggaauucug

SEQ ID NO: 425716 - RNA, 19 nt, Artificial Sequence
  Description of Artificial Sequence: Synthetic oligonucleotide
cucucaaguagguaucccc

SEQ ID NO: 425717 - RNA, 19 nt, Artificial Sequence
  Description of Artificial Sequence: Synthetic oligonucleotide
auaaaagcgccauggacau

SEQ ID NO: 425718 - RNA, 19 nt, Artificial Sequence
  Description of Artificial Sequence: Synthetic oligonucleotide
aguuaauuaaacuguugua

SEQ ID NO: 425719 - RNA, 19 nt, Artificial Sequence
  Description of Artificial Sequence: Synthetic oligonucleotide
gucacguggaggcugaacc

SEQ ID NO: 425720 - RNA, 19 nt, Artificial Sequence
  Description of Artificial Sequence: Synthetic oligonucleotide
ugcccaaucugaaauagua

SEQ ID NO: 425721 - RNA, 19 nt, Artificial Sequence
  Description of Artificial Sequence: Synthetic oligonucleotide
uguagccuaauguaaccac

SEQ ID NO: 425722 - RNA, 19 nt, Artificial Sequence
  Description of Artificial Sequence: Synthetic oligonucleotide
aucgguuugagguccuggg

SEQ ID NO: 425723 - RNA, 19 nt, Artificial Sequence
  Description of Artificial Sequence: Synthetic oligonucleotide
cauuucucgaacagaccgg

SEQ ID NO: 425724 - RNA, 19 nt, Artificial Sequence
  Description of Artificial Sequence: Synthetic oligonucleotide
aggagugcauuuucacccc

SEQ ID NO: 425725 - RNA, 19 nt, Artificial Sequence
  Description of Artificial Sequence: Synthetic oligonucleotide
ugguuacuacgcaaccacg

SEQ ID NO: 425726 - RNA, 19 nt, Artificial Sequence
  Description of Artificial Sequence: Synthetic oligonucleotide
uguacuagacagcaacuuu

SEQ ID NO: 425727 - RNA, 19 nt, Artificial Sequence
  Description of Artificial Sequence: Synthetic oligonucleotide
guuacauuuccccuauuuc

SEQ ID NO: 425728 - RNA, 19 nt, Artificial Sequence
  Description of Artificial Sequence: Synthetic oligonucleotide
uacugcgccaucgugaccc

SEQ ID NO: 425729 - RNA, 19 nt, Artificial Sequence
  Description of Artificial Sequence: Synthetic oligonucleotide
gauauccagcaaccgaccc

SEQ ID NO: 425730 - RNA, 19 nt, Artificial Sequence
  Description of Artificial Sequence: Synthetic oligonucleotide
agcgaguccugccagugcg

SEQ ID NO: 425731 - RNA, 19 nt, Artificial Sequence
  Description of Artificial Sequence: Synthetic oligonucleotide
auccauaugcaaccauuuc

SEQ ID NO: 425732 - RNA, 19 nt, Artificial Sequence
  Description of Artificial Sequence: Synthetic oligonucleotide
cuaugaugcuuuucucugg

SEQ ID NO: 425733 - RNA, 19 nt, Artificial Sequence
  Description of Artificial Sequence: Synthetic oligonucleotide
accuaacuaauuguuggac

SEQ ID NO: 425734 - RNA, 19 nt, Artificial Sequence
  Description of Artificial Sequence: Synthetic oligonucleotide
ugccuucucacguauguca

SEQ ID NO: 425735 - RNA, 19 nt, Artificial Sequence
  Description of Artificial Sequence: Synthetic oligonucleotide
uccuacgcuggauaaacga

SEQ ID NO: 425736 - RNA, 19 nt, Artificial Sequence
  Description of Artificial Sequence: Synthetic oligonucleotide
aaacucauaggaaaucaau

SEQ ID NO: 425737 - RNA, 19 nt, Artificial Sequence
  Description of Artificial Sequence: Synthetic oligonucleotide
ugugggacauauaaagauu

SEQ ID NO: 425738 - RNA, 19 nt, Artificial Sequence
  Description of Artificial Sequence: Synthetic oligonucleotide
guuccgguggcuuuuggcc

SEQ ID NO: 425739 - RNA, 19 nt, Artificial Sequence
  Description of Artificial Sequence: Synthetic oligonucleotide
ugcuuguagccuaauguaa

SEQ ID NO: 425740 - RNA, 19 nt, Artificial Sequence
  Description of Artificial Sequence: Synthetic oligonucleotide
uacuacgcaaccacguagu

SEQ ID NO: 425741 - RNA, 19 nt, Artificial Sequence
  Description of Artificial Sequence: Synthetic oligonucleotide
auacaucacagcccauagg

SEQ ID NO: 425742 - RNA, 19 nt, Artificial Sequence
  Description of Artificial Sequence: Synthetic oligonucleotide
acgugguuacuacgcaacc

SEQ ID NO: 425743 - RNA, 19 nt, Artificial Sequence
  Description of Artificial Sequence: Synthetic oligonucleotide
caaaaugaggguauguuua

SEQ ID NO: 425744 - RNA, 19 nt, Artificial Sequence
  Description of Artificial Sequence: Synthetic oligonucleotide
cacuguugaacucuugcac

SEQ ID NO: 425745 - RNA, 19 nt, Artificial Sequence
  Description of Artificial Sequence: Synthetic oligonucleotide
aacucauaggaaaucaauu

SEQ ID NO: 425746 - RNA, 19 nt, Artificial Sequence
  Description of Artificial Sequence: Synthetic oligonucleotide
agccgauaucgagauaucc

SEQ ID NO: 425747 - RNA, 19 nt, Artificial Sequence
  Description of Artificial Sequence: Synthetic oligonucleotide
gcaaauugggaccagccgc

SEQ ID NO: 425748 - RNA, 19 nt, Artificial Sequence
  Description of Artificial Sequence: Synthetic oligonucleotide
gguaaauagugaauggggc

SEQ ID NO: 425749 - RNA, 19 nt, Artificial Sequence
  Description of Artificial Sequence: Synthetic oligonucleotide
cauuaagccagaggaaaag

SEQ ID NO: 425750 - RNA, 19 nt, Artificial Sequence
  Description of Artificial Sequence: Synthetic oligonucleotide
cuucguuaccaggaggugg

SEQ ID NO: 425751 - RNA, 19 nt, Artificial Sequence
  Description of Artificial Sequence: Synthetic oligonucleotide
acagccgauaucgagauau

SEQ ID NO: 425752 - RNA, 19 nt, Artificial Sequence
  Description of Artificial Sequence: Synthetic oligonucleotide
guuugugaaagagaaguga

SEQ ID NO: 425753 - RNA, 19 nt, Artificial Sequence
  Description of Artificial Sequence: Synthetic oligonucleotide
uugcuuguagccuaaugua

SEQ ID NO: 425754 - RNA, 19 nt, Artificial Sequence
  Description of Artificial Sequence: Synthetic oligonucleotide
cuguggagaaaccaguauc

SEQ ID NO: 425755 - RNA, 19 nt, Artificial Sequence
  Description of Artificial Sequence: Synthetic oligonucleotide
aguauucaagaacacccau

SEQ ID NO: 425756 - RNA, 19 nt, Artificial Sequence
  Description of Artificial Sequence: Synthetic oligonucleotide
aaaccguuguccccacucu

SEQ ID NO: 425757 - RNA, 19 nt, Artificial Sequence
  Description of Artificial Sequence: Synthetic oligonucleotide
agcgcaugacuuuauacau

SEQ ID NO: 425758 - RNA, 19 nt, Artificial Sequence
  Description of Artificial Sequence: Synthetic oligonucleotide
ucuguagugucgccgcccc

SEQ ID NO: 425759 - RNA, 19 nt, Artificial Sequence
  Description of Artificial Sequence: Synthetic oligonucleotide
gugguuacuacgcaaccac

SEQ ID NO: 425760 - RNA, 19 nt, Artificial Sequence
  Description of Artificial Sequence: Synthetic oligonucleotide
acuuauacacagagacagc

SEQ ID NO: 425761 - RNA, 19 nt, Artificial Sequence
  Description of Artificial Sequence: Synthetic oligonucleotide
cacguaugucauaacugcc

SEQ ID NO: 425762 - RNA, 19 nt, Artificial Sequence
  Description of Artificial Sequence: Synthetic oligonucleotide
agccugauguuccgguggc

SEQ ID NO: 425763 - RNA, 19 nt, Artificial Sequence
  Description of Artificial Sequence: Synthetic oligonucleotide
ucgguguggugaaauuucc

SEQ ID NO: 425764 - RNA, 19 nt, Artificial Sequence
  Description of Artificial Sequence: Synthetic oligonucleotide
guaaauaacgugguuacua

SEQ ID NO: 425765 - RNA, 19 nt, Artificial Sequence
  Description of Artificial Sequence: Synthetic oligonucleotide
aauagcgcaugacuuuaua

SEQ ID NO: 425766 - RNA, 19 nt, Artificial Sequence
  Description of Artificial Sequence: Synthetic oligonucleotide
aaaacucauaggaaaucaa

SEQ ID NO: 425767 - RNA, 19 nt, Artificial Sequence
  Description of Artificial Sequence: Synthetic oligonucleotide
auaacgugguuacuacgca

SEQ ID NO: 425768 - RNA, 19 nt, Artificial Sequence
  Description of Artificial Sequence: Synthetic oligonucleotide
agauauccagcaaccgacc

SEQ ID NO: 425769 - RNA, 19 nt, Artificial Sequence
  Description of Artificial Sequence: Synthetic oligonucleotide
acuaaaacucauaggaaau

SEQ ID NO: 425770 - RNA, 19 nt, Artificial Sequence
  Description of Artificial Sequence: Synthetic oligonucleotide
uuccuacgcuggauaaacg

SEQ ID NO: 425771 - RNA, 19 nt, Artificial Sequence
  Description of Artificial Sequence: Synthetic oligonucleotide
gagauaugguccuaaugaa

SEQ ID NO: 425772 - RNA, 19 nt, Artificial Sequence
  Description of Artificial Sequence: Synthetic oligonucleotide
ggcaagguucgauaaaagc

SEQ ID NO: 425773 - RNA, 19 nt, Artificial Sequence
  Description of Artificial Sequence: Synthetic oligonucleotide
agguauccccaaaaguccc

SEQ ID NO: 425774 - RNA, 19 nt, Artificial Sequence
  Description of Artificial Sequence: Synthetic oligonucleotide
uucucgaacagaccggguu

SEQ ID NO: 425775 - RNA, 19 nt, Artificial Sequence
  Description of Artificial Sequence: Synthetic oligonucleotide
acacagagacagcaauauc

SEQ ID NO: 425776 - RNA, 19 nt, Artificial Sequence
  Description of Artificial Sequence: Synthetic oligonucleotide
uuggccgcccugcacauca

SEQ ID NO: 425777 - RNA, 19 nt, Artificial Sequence
  Description of Artificial Sequence: Synthetic oligonucleotide
ucgagauauccagcaaccg

SEQ ID NO: 425778 - RNA, 19 nt, Artificial Sequence
  Description of Artificial Sequence: Synthetic oligonucleotide
uuagccagcgaguccugcc

SEQ ID NO: 425779 - RNA, 19 nt, Artificial Sequence
  Description of Artificial Sequence: Synthetic oligonucleotide
ugcucuguagugucgccgc

SEQ ID NO: 425780 - RNA, 19 nt, Artificial Sequence
  Description of Artificial Sequence: Synthetic oligonucleotide
cuuccuacgcuggauaaac

SEQ ID NO: 425781 - RNA, 19 nt, Artificial Sequence
  Description of Artificial Sequence: Synthetic oligonucleotide
acagugcuuaacaagauuu

SEQ ID NO: 425782 - RNA, 19 nt, Artificial Sequence
  Description of Artificial Sequence: Synthetic oligonucleotide
auuuaauucccaauuggua

SEQ ID NO: 425783 - RNA, 19 nt, Artificial Sequence
  Description of Artificial Sequence: Synthetic oligonucleotide
uggguuggcgucuuccggc

SEQ ID NO: 425784 - RNA, 19 nt, Artificial Sequence
  Description of Artificial Sequence: Synthetic oligonucleotide
uaucgguuugagguccugg

SEQ ID NO: 425785 - RNA, 19 nt, Artificial Sequence
  Description of Artificial Sequence: Synthetic oligonucleotide
caaucugaaauaguacauc

SEQ ID NO: 425786 - RNA, 19 nt, Artificial Sequence
  Description of Artificial Sequence: Synthetic oligonucleotide
aguuucuauugcacagagc

SEQ ID NO: 425787 - RNA, 19 nt, Artificial Sequence
  Description of Artificial Sequence: Synthetic oligonucleotide
uuguagccuaauguaacca

SEQ ID NO: 425788 - RNA, 19 nt, Artificial Sequence
  Description of Artificial Sequence: Synthetic oligonucleotide
ugcuaucgguuugaggucc

SEQ ID NO: 425789 - RNA, 19 nt, Artificial Sequence
  Description of Artificial Sequence: Synthetic oligonucleotide
acuacgcaaccacguaguc

SEQ ID NO: 425790 - RNA, 19 nt, Artificial Sequence
  Description of Artificial Sequence: Synthetic oligonucleotide
acucucaaguagguauccc

SEQ ID NO: 425791 - RNA, 19 nt, Artificial Sequence
  Description of Artificial Sequence: Synthetic oligonucleotide
ggaauugugaagaacuguc

SEQ ID NO: 425792 - RNA, 19 nt, Artificial Sequence
  Description of Artificial Sequence: Synthetic oligonucleotide
uccccaacguaccuaacua

SEQ ID NO: 425793 - RNA, 19 nt, Artificial Sequence
  Description of Artificial Sequence: Synthetic oligonucleotide
uaacuaauuguuggacaca

SEQ ID NO: 425794 - RNA, 19 nt, Artificial Sequence
  Description of Artificial Sequence: Synthetic oligonucleotide
ugcugcuaucgguuugagg

SEQ ID NO: 425795 - RNA, 19 nt, Artificial Sequence
  Description of Artificial Sequence: Synthetic oligonucleotide
gaugugcucuguagugucg

SEQ ID NO: 425796 - RNA, 19 nt, Artificial Sequence
  Description of Artificial Sequence: Synthetic oligonucleotide
uauccagcaaccgacccuc

SEQ ID NO: 425797 - RNA, 19 nt, Artificial Sequence
  Description of Artificial Sequence: Synthetic oligonucleotide
agggaacuugcugcuaucg

SEQ ID NO: 425798 - RNA, 19 nt, Artificial Sequence
  Description of Artificial Sequence: Synthetic oligonucleotide
ucucgaacagaccggguuu

SEQ ID NO: 425799 - RNA, 19 nt, Artificial Sequence
  Description of Artificial Sequence: Synthetic oligonucleotide
ucucgucucggcuccuggg

SEQ ID NO: 425800 - RNA, 19 nt, Artificial Sequence
  Description of Artificial Sequence: Synthetic oligonucleotide
gguauguuuaauguacaac

SEQ ID NO: 425801 - RNA, 19 nt, Artificial Sequence
  Description of Artificial Sequence: Synthetic oligonucleotide
acccucuaucuucacucac

SEQ ID NO: 425802 - RNA, 19 nt, Artificial Sequence
  Description of Artificial Sequence: Synthetic oligonucleotide
ccgauaucgagauauccag

SEQ ID NO: 425803 - RNA, 19 nt, Artificial Sequence
  Description of Artificial Sequence: Synthetic oligonucleotide
uuuggagauaugguccuaa

SEQ ID NO: 425804 - RNA, 19 nt, Artificial Sequence
  Description of Artificial Sequence: Synthetic oligonucleotide
uaacgugguuacuacgcaa

SEQ ID NO: 425805 - RNA, 19 nt, Artificial Sequence
  Description of Artificial Sequence: Synthetic oligonucleotide
aggggagucucgucucggc

SEQ ID NO: 425806 - RNA, 19 nt, Artificial Sequence
  Description of Artificial Sequence: Synthetic oligonucleotide
agugcuuaacaagauuuaa

SEQ ID NO: 425807 - RNA, 19 nt, Artificial Sequence
  Description of Artificial Sequence: Synthetic oligonucleotide
uuuugcgauccccaacgua

SEQ ID NO: 425808 - RNA, 19 nt, Artificial Sequence
  Description of Artificial Sequence: Synthetic oligonucleotide
aacaugugggacauauaaa

SEQ ID NO: 425809 - RNA, 19 nt, Artificial Sequence
  Description of Artificial Sequence: Synthetic oligonucleotide
aaaagucccuucuggccuu

SEQ ID NO: 425810 - RNA, 19 nt, Artificial Sequence
  Description of Artificial Sequence: Synthetic oligonucleotide
ucacguggaggcugaacca

SEQ ID NO: 425811 - RNA, 19 nt, Artificial Sequence
  Description of Artificial Sequence: Synthetic oligonucleotide
uugcgauccccaacguacc

SEQ ID NO: 425812 - RNA, 19 nt, Artificial Sequence
  Description of Artificial Sequence: Synthetic oligonucleotide
acgggaugcaguuuuguuu

SEQ ID NO: 425813 - RNA, 19 nt, Artificial Sequence
  Description of Artificial Sequence: Synthetic oligonucleotide
uuucuauugcacagagcuu

SEQ ID NO: 425814 - RNA, 19 nt, Artificial Sequence
  Description of Artificial Sequence: Synthetic oligonucleotide
aacugcccaaucugaaaua

SEQ ID NO: 425815 - RNA, 19 nt, Artificial Sequence
  Description of Artificial Sequence: Synthetic oligonucleotide
acacaugcgugccuucuca

SEQ ID NO: 425816 - RNA, 19 nt, Artificial Sequence
  Description of Artificial Sequence: Synthetic oligonucleotide
cuacgcuggauaaacgaga

SEQ ID NO: 425817 - RNA, 19 nt, Artificial Sequence
  Description of Artificial Sequence: Synthetic oligonucleotide
uucuuccuacgcuggauaa

SEQ ID NO: 425818 - RNA, 19 nt, Artificial Sequence
  Description of Artificial Sequence: Synthetic oligonucleotide
auauacaucacagcccaua

SEQ ID NO: 425819 - RNA, 19 nt, Artificial Sequence
  Description of Artificial Sequence: Synthetic oligonucleotide
uggcuguuacauuuccccu

SEQ ID NO: 425820 - RNA, 19 nt, Artificial Sequence
  Description of Artificial Sequence: Synthetic oligonucleotide
uuugccucgguguggugaa

SEQ ID NO: 425821 - RNA, 19 nt, Artificial Sequence
  Description of Artificial Sequence: Synthetic oligonucleotide
gcgccauggacauuucucg

SEQ ID NO: 425822 - RNA, 19 nt, Artificial Sequence
  Description of Artificial Sequence: Synthetic oligonucleotide
aucaaaccguuguccccac

SEQ ID NO: 425823 - RNA, 19 nt, Artificial Sequence
  Description of Artificial Sequence: Synthetic oligonucleotide
cagcaaccgacccucgugc

SEQ ID NO: 425824 - RNA, 19 nt, Artificial Sequence
  Description of Artificial Sequence: Synthetic oligonucleotide
ugguauccauuuucuaaau

SEQ ID NO: 425825 - RNA, 19 nt, Artificial Sequence
  Description of Artificial Sequence: Synthetic oligonucleotide
aacuugcugcuaucgguuu

SEQ ID NO: 425826 - RNA, 19 nt, Artificial Sequence
  Description of Artificial Sequence: Synthetic oligonucleotide
gaacaguauucaagaacac

SEQ ID NO: 425827 - RNA, 19 nt, Artificial Sequence
  Description of Artificial Sequence: Synthetic oligonucleotide
uuccgguggcuuuuggccu

SEQ ID NO: 425828 - RNA, 19 nt, Artificial Sequence
  Description of Artificial Sequence: Synthetic oligonucleotide
acgcuggauaaacgagaac

SEQ ID NO: 425829 - RNA, 19 nt, Artificial Sequence
  Description of Artificial Sequence: Synthetic oligonucleotide
gaccccguccucgaggaag

SEQ ID NO: 425830 - RNA, 19 nt, Artificial Sequence
  Description of Artificial Sequence: Synthetic oligonucleotide
agccgcucucccaauagcg

SEQ ID NO: 425831 - RNA, 19 nt, Artificial Sequence
  Description of Artificial Sequence: Synthetic oligonucleotide
agauaugguccuaaugaaa

SEQ ID NO: 425832 - RNA, 19 nt, Artificial Sequence
  Description of Artificial Sequence: Synthetic oligonucleotide
cuauugcccuugcagccag

SEQ ID NO: 425833 - RNA, 19 nt, Artificial Sequence
  Description of Artificial Sequence: Synthetic oligonucleotide
uaauucccaauugguaaau

SEQ ID NO: 425834 - RNA, 19 nt, Artificial Sequence
  Description of Artificial Sequence: Synthetic oligonucleotide
agcgguuuucauccacucu

SEQ ID NO: 425835 - RNA, 19 nt, Artificial Sequence
  Description of Artificial Sequence: Synthetic oligonucleotide
cuagacagcaacuuugguu

SEQ ID NO: 425836 - RNA, 19 nt, Artificial Sequence
  Description of Artificial Sequence: Synthetic oligonucleotide
ccaauugguaaauagugaa

SEQ ID NO: 425837 - RNA, 19 nt, Artificial Sequence
  Description of Artificial Sequence: Synthetic oligonucleotide
auacggaauaaaugauauu

SEQ ID NO: 425838 - RNA, 19 nt, Artificial Sequence
  Description of Artificial Sequence: Synthetic oligonucleotide
guacuuauacacagagaca

SEQ ID NO: 425839 - RNA, 19 nt, Artificial Sequence
  Description of Artificial Sequence: Synthetic oligonucleotide
auggcggucguggugagga

SEQ ID NO: 425840 - RNA, 19 nt, Artificial Sequence
  Description of Artificial Sequence: Synthetic oligonucleotide
cucgucucggcuccugggc

SEQ ID NO: 425841 - RNA, 19 nt, Artificial Sequence
  Description of Artificial Sequence: Synthetic oligonucleotide
ccuacgcuggauaaacgag

SEQ ID NO: 425842 - RNA, 19 nt, Artificial Sequence
  Description of Artificial Sequence: Synthetic oligonucleotide
cacuuuccuguggagaaac

SEQ ID NO: 425843 - RNA, 19 nt, Artificial Sequence
  Description of Artificial Sequence: Synthetic oligonucleotide
cugacuacugacugccaca

SEQ ID NO: 425844 - RNA, 19 nt, Artificial Sequence
  Description of Artificial Sequence: Synthetic oligonucleotide
gguacugcgccaucgugac

SEQ ID NO: 425845 - RNA, 19 nt, Artificial Sequence
  Description of Artificial Sequence: Synthetic oligonucleotide
uuggagauaugguccuaau

SEQ ID NO: 425846 - RNA, 19 nt, Artificial Sequence
  Description of Artificial Sequence: Synthetic oligonucleotide
gcuuaacaagauuuaaugu

SEQ ID NO: 425847 - RNA, 19 nt, Artificial Sequence
  Description of Artificial Sequence: Synthetic oligonucleotide
uauauacaucacagcccau

SEQ ID NO: 425848 - RNA, 19 nt, Artificial Sequence
  Description of Artificial Sequence: Synthetic oligonucleotide
guuacuacgcaaccacgua

SEQ ID NO: 425849 - RNA, 19 nt, Artificial Sequence
  Description of Artificial Sequence: Synthetic oligonucleotide
ugcgauccccaacguaccu

SEQ ID NO: 425850 - RNA, 19 nt, Artificial Sequence
  Description of Artificial Sequence: Synthetic oligonucleotide
gaugcagcgcuuagccagc

SEQ ID NO: 425851 - RNA, 19 nt, Artificial Sequence
  Description of Artificial Sequence: Synthetic oligonucleotide
ugaauuccaaagggaacuu

SEQ ID NO: 425852 - RNA, 19 nt, Artificial Sequence
  Description of Artificial Sequence: Synthetic oligonucleotide
cacucucaaguagguaucc

SEQ ID NO: 425853 - RNA, 19 nt, Artificial Sequence
  Description of Artificial Sequence: Synthetic oligonucleotide
aggcugaaccacagcagac

SEQ ID NO: 425854 - RNA, 19 nt, Artificial Sequence
  Description of Artificial Sequence: Synthetic oligonucleotide
auguaaccacuuuccugug

SEQ ID NO: 425855 - RNA, 19 nt, Artificial Sequence
  Description of Artificial Sequence: Synthetic oligonucleotide
auguacuagacagcaacuu

SEQ ID NO: 425856 - RNA, 19 nt, Artificial Sequence
  Description of Artificial Sequence: Synthetic oligonucleotide
accacguagucaaauuaga

SEQ ID NO: 425857 - RNA, 19 nt, Artificial Sequence
  Description of Artificial Sequence: Synthetic oligonucleotide
uuuccuaucuuagcaucuu

SEQ ID NO: 425858 - RNA, 19 nt, Artificial Sequence
  Description of Artificial Sequence: Synthetic oligonucleotide
caggcuucguuaccaggag

SEQ ID NO: 425859 - RNA, 19 nt, Artificial Sequence
  Description of Artificial Sequence: Synthetic oligonucleotide
gcuuaucaaguuuccgaug

SEQ ID NO: 425860 - RNA, 19 nt, Artificial Sequence
  Description of Artificial Sequence: Synthetic oligonucleotide
ucucccaauagcgcaugac

SEQ ID NO: 425861 - RNA, 19 nt, Artificial Sequence
  Description of Artificial Sequence: Synthetic oligonucleotide
gugcucuguagugucgccg

SEQ ID NO: 425862 - RNA, 19 nt, Artificial Sequence
  Description of Artificial Sequence: Synthetic oligonucleotide
gagcgguuuucauccacuc

SEQ ID NO: 425863 - RNA, 19 nt, Artificial Sequence
  Description of Artificial Sequence: Synthetic oligonucleotide
uucugacuacugacugcca

SEQ ID NO: 425864 - RNA, 19 nt, Artificial Sequence
  Description of Artificial Sequence: Synthetic oligonucleotide
ccuaacuaauuguuggaca

SEQ ID NO: 425865 - RNA, 19 nt, Artificial Sequence
  Description of Artificial Sequence: Synthetic oligonucleotide
acugcgccaucgugacccc

SEQ ID NO: 425866 - RNA, 19 nt, Artificial Sequence
  Description of Artificial Sequence: Synthetic oligonucleotide
accuugauucaugaagcaa

SEQ ID NO: 425867 - RNA, 19 nt, Artificial Sequence
  Description of Artificial Sequence: Synthetic oligonucleotide
cuggauaaacgagaacaga

SEQ ID NO: 425868 - RNA, 19 nt, Artificial Sequence
  Description of Artificial Sequence: Synthetic oligonucleotide
gucucgucucggcuccugg

SEQ ID NO: 425869 - RNA, 19 nt, Artificial Sequence
  Description of Artificial Sequence: Synthetic oligonucleotide
cuaauguaaccacuuuccu

SEQ ID NO: 425870 - RNA, 19 nt, Artificial Sequence
  Description of Artificial Sequence: Synthetic oligonucleotide
ucugagcgguuuucaucca

SEQ ID NO: 425871 - RNA, 19 nt, Artificial Sequence
  Description of Artificial Sequence: Synthetic oligonucleotide
gcuuguagccuaauguaac

SEQ ID NO: 425872 - RNA, 19 nt, Artificial Sequence
  Description of Artificial Sequence: Synthetic oligonucleotide
cguaccuaacuaauuguug

SEQ ID NO: 425873 - RNA, 19 nt, Artificial Sequence
  Description of Artificial Sequence: Synthetic oligonucleotide
gucaauucacuuccccaaa

SEQ ID NO: 425874 - RNA, 19 nt, Artificial Sequence
  Description of Artificial Sequence: Synthetic oligonucleotide
ggagucucgucucggcucc

SEQ ID NO: 425875 - RNA, 19 nt, Artificial Sequence
  Description of Artificial Sequence: Synthetic oligonucleotide
uucucacguaugucauaac

SEQ ID NO: 425876 - RNA, 19 nt, Artificial Sequence
  Description of Artificial Sequence: Synthetic oligonucleotide
ggauaaacgagaacagaaa

SEQ ID NO: 425877 - RNA, 19 nt, Artificial Sequence
  Description of Artificial Sequence: Synthetic oligonucleotide
ugcgugccuucucacguau

SEQ ID NO: 425878 - RNA, 19 nt, Artificial Sequence
  Description of Artificial Sequence: Synthetic oligonucleotide
caaauugggaccagccgcu

SEQ ID NO: 425879 - RNA, 19 nt, Artificial Sequence
  Description of Artificial Sequence: Synthetic oligonucleotide
cacaugcgugccuucucac

SEQ ID NO: 425880 - RNA, 19 nt, Artificial Sequence
  Description of Artificial Sequence: Synthetic oligonucleotide
uguggagcucagagacgga

SEQ ID NO: 425881 - RNA, 19 nt, Artificial Sequence
  Description of Artificial Sequence: Synthetic oligonucleotide
caauugguaaauagugaau

SEQ ID NO: 425882 - RNA, 19 nt, Artificial Sequence
  Description of Artificial Sequence: Synthetic oligonucleotide
acguaccuaacuaauuguu

SEQ ID NO: 425883 - RNA, 19 nt, Artificial Sequence
  Description of Artificial Sequence: Synthetic oligonucleotide
ugacgggaugcaguuuugu

SEQ ID NO: 425884 - RNA, 19 nt, Artificial Sequence
  Description of Artificial Sequence: Synthetic oligonucleotide
aagccccuacaccuauuuu

SEQ ID NO: 425885 - RNA, 19 nt, Artificial Sequence
  Description of Artificial Sequence: Synthetic oligonucleotide
agccagcgaguccugccag

SEQ ID NO: 425886 - RNA, 19 nt, Artificial Sequence
  Description of Artificial Sequence: Synthetic oligonucleotide
gugcauuuucaccccuaac

SEQ ID NO: 425887 - RNA, 19 nt, Artificial Sequence
  Description of Artificial Sequence: Synthetic oligonucleotide
ggaacuugcugcuaucggu

SEQ ID NO: 425888 - RNA, 19 nt, Artificial Sequence
  Description of Artificial Sequence: Synthetic oligonucleotide
ucaaaccguuguccccacu

SEQ ID NO: 425889 - RNA, 19 nt, Artificial Sequence
  Description of Artificial Sequence: Synthetic oligonucleotide
ccgacccucgugcaaaagg

SEQ ID NO: 425890 - RNA, 19 nt, Artificial Sequence
  Description of Artificial Sequence: Synthetic oligonucleotide
caccuugauucaugaagca

SEQ ID NO: 425891 - RNA, 19 nt, Artificial Sequence
  Description of Artificial Sequence: Synthetic oligonucleotide
uggccauuaggagugcauu

SEQ ID NO: 425892 - RNA, 19 nt, Artificial Sequence
  Description of Artificial Sequence: Synthetic oligonucleotide
aucgugaccccguccucga

SEQ ID NO: 425893 - RNA, 19 nt, Artificial Sequence
  Description of Artificial Sequence: Synthetic oligonucleotide
guagucaaauuagaacagu

SEQ ID NO: 425894 - RNA, 19 nt, Artificial Sequence
  Description of Artificial Sequence: Synthetic oligonucleotide
caauccauaugcaaccauu

SEQ ID NO: 425895 - RNA, 19 nt, Artificial Sequence
  Description of Artificial Sequence: Synthetic oligonucleotide
gggcucguccuccaggagc

SEQ ID NO: 425896 - RNA, 19 nt, Artificial Sequence
  Description of Artificial Sequence: Synthetic oligonucleotide
agcaaccgacccucgugca

SEQ ID NO: 425897 - RNA, 19 nt, Artificial Sequence
  Description of Artificial Sequence: Synthetic oligonucleotide
agugcgcgauggugcacag

SEQ ID NO: 425898 - RNA, 19 nt, Artificial Sequence
  Description of Artificial Sequence: Synthetic oligonucleotide
cuugcugcuaucgguuuga

SEQ ID NO: 425899 - RNA, 19 nt, Artificial Sequence
  Description of Artificial Sequence: Synthetic oligonucleotide
acgucaucgaugguggcua

SEQ ID NO: 425900 - RNA, 19 nt, Artificial Sequence
  Description of Artificial Sequence: Synthetic oligonucleotide
ugggcucguccuccaggag

SEQ ID NO: 425901 - RNA, 19 nt, Artificial Sequence
  Description of Artificial Sequence: Synthetic oligonucleotide
guaugucauaacugcccaa

SEQ ID NO: 425902 - RNA, 19 nt, Artificial Sequence
  Description of Artificial Sequence: Synthetic oligonucleotide
ugucacguggaggcugaac

SEQ ID NO: 425903 - RNA, 19 nt, Artificial Sequence
  Description of Artificial Sequence: Synthetic oligonucleotide
cuuccggcagggccccugg

SEQ ID NO: 425904 - RNA, 19 nt, Artificial Sequence
  Description of Artificial Sequence: Synthetic oligonucleotide
guagccuaauguaaccacu

SEQ ID NO: 425905 - RNA, 19 nt, Artificial Sequence
  Description of Artificial Sequence: Synthetic oligonucleotide
aaccgacccucgugcaaaa

SEQ ID NO: 425906 - RNA, 19 nt, Artificial Sequence
  Description of Artificial Sequence: Synthetic oligonucleotide
gccgauaucgagauaucca

SEQ ID NO: 425907 - RNA, 19 nt, Artificial Sequence
  Description of Artificial Sequence: Synthetic oligonucleotide
uuuuggagauaugguccua

SEQ ID NO: 425908 - RNA, 19 nt, Artificial Sequence
  Description of Artificial Sequence: Synthetic oligonucleotide
cgauaucgagauauccagc

SEQ ID NO: 425909 - RNA, 19 nt, Artificial Sequence
  Description of Artificial Sequence: Synthetic oligonucleotide
augugacccucuaucuuca

SEQ ID NO: 425910 - RNA, 19 nt, Artificial Sequence
  Description of Artificial Sequence: Synthetic oligonucleotide
ucgugaccccguccucgag

SEQ ID NO: 425911 - RNA, 19 nt, Artificial Sequence
  Description of Artificial Sequence: Synthetic oligonucleotide
caugcgugccuucucacgu

SEQ ID NO: 425912 - RNA, 19 nt, Artificial Sequence
  Description of Artificial Sequence: Synthetic oligonucleotide
ggcucguccuccaggagcc

SEQ ID NO: 425913 - RNA, 19 nt, Artificial Sequence
  Description of Artificial Sequence: Synthetic oligonucleotide
agguucgauaaaagcgcca

SEQ ID NO: 425914 - RNA, 19 nt, Artificial Sequence
  Description of Artificial Sequence: Synthetic oligonucleotide
gaacuugcugcuaucgguu

SEQ ID NO: 425915 - RNA, 19 nt, Artificial Sequence
  Description of Artificial Sequence: Synthetic oligonucleotide
uauugcccuugcagccagu

SEQ ID NO: 425916 - RNA, 19 nt, Artificial Sequence
  Description of Artificial Sequence: Synthetic oligonucleotide
cagcgaguccugccagugc

SEQ ID NO: 425917 - RNA, 19 nt, Artificial Sequence
  Description of Artificial Sequence: Synthetic oligonucleotide
acauggcggucguggugag

SEQ ID NO: 425918 - RNA, 19 nt, Artificial Sequence
  Description of Artificial Sequence: Synthetic oligonucleotide
caggggagucucgucucgg

SEQ ID NO: 425919 - RNA, 19 nt, Artificial Sequence
  Description of Artificial Sequence: Synthetic oligonucleotide
ccagcaaccgacccucgug

SEQ ID NO: 425920 - RNA, 19 nt, Artificial Sequence
  Description of Artificial Sequence: Synthetic oligonucleotide
cagccgauaucgagauauc

SEQ ID NO: 425921 - RNA, 19 nt, Artificial Sequence
  Description of Artificial Sequence: Synthetic oligonucleotide
auggccauuaggagugcau

SEQ ID NO: 425922 - RNA, 19 nt, Artificial Sequence
  Description of Artificial Sequence: Synthetic oligonucleotide
gcccaaucugaaauaguac

SEQ ID NO: 425923 - RNA, 19 nt, Artificial Sequence
  Description of Artificial Sequence: Synthetic oligonucleotide
caguguaggaguccacugu

SEQ ID NO: 425924 - RNA, 19 nt, Artificial Sequence
  Description of Artificial Sequence: Synthetic oligonucleotide
ccacuguugaacucuugca

SEQ ID NO: 425925 - RNA, 19 nt, Artificial Sequence
  Description of Artificial Sequence: Synthetic oligonucleotide
gguuacuacgcaaccacgu

SEQ ID NO: 425926 - RNA, 19 nt, Artificial Sequence
  Description of Artificial Sequence: Synthetic oligonucleotide
gacgggaugcaguuuuguu

SEQ ID NO: 425927 - RNA, 19 nt, Artificial Sequence
  Description of Artificial Sequence: Synthetic oligonucleotide
cgagauauccagcaaccga

SEQ ID NO: 425928 - RNA, 19 nt, Artificial Sequence
  Description of Artificial Sequence: Synthetic oligonucleotide
ccacguagucaaauuagaa

SEQ ID NO: 425929 - RNA, 19 nt, Artificial Sequence
  Description of Artificial Sequence: Synthetic oligonucleotide
cuaucgguuugagguccug

SEQ ID NO: 425930 - RNA, 19 nt, Artificial Sequence
  Description of Artificial Sequence: Synthetic oligonucleotide
ggugacgggaugcaguuuu

SEQ ID NO: 425931 - RNA, 19 nt, Artificial Sequence
  Description of Artificial Sequence: Synthetic oligonucleotide
guacugcgccaucgugacc

SEQ ID NO: 425932 - RNA, 19 nt, Artificial Sequence
  Description of Artificial Sequence: Synthetic oligonucleotide
gugacgggaugcaguuuug

SEQ ID NO: 425933 - RNA, 19 nt, Artificial Sequence
  Description of Artificial Sequence: Synthetic oligonucleotide
cguaugucauaacugccca

SEQ ID NO: 425934 - RNA, 19 nt, Artificial Sequence
  Description of Artificial Sequence: Synthetic oligonucleotide
gguucgauaaaagcgccau

SEQ ID NO: 425935 - RNA, 19 nt, Artificial Sequence
  Description of Artificial Sequence: Synthetic oligonucleotide
augcgugccuucucacgua

SEQ ID NO: 425936 - RNA, 19 nt, Artificial Sequence
  Description of Artificial Sequence: Synthetic oligonucleotide
cauggcggucguggugagg

SEQ ID NO: 425937 - RNA, 19 nt, Artificial Sequence
  Description of Artificial Sequence: Synthetic oligonucleotide
caaccgacccucgugcaaa

SEQ ID NO: 425938 - RNA, 19 nt, Artificial Sequence
  Description of Artificial Sequence: Synthetic oligonucleotide
ggcggucguggugaggaag

SEQ ID NO: 425939 - RNA, 19 nt, Artificial Sequence
  Description of Artificial Sequence: Synthetic oligonucleotide
ucguuaccaggagguggcu

SEQ ID NO: 425940 - RNA, 19 nt, Artificial Sequence
  Description of Artificial Sequence: Synthetic oligonucleotide
gcgucuuccggcagggccc

SEQ ID NO: 425941 - RNA, 19 nt, Artificial Sequence
  Description of Artificial Sequence: Synthetic oligonucleotide
gcggucguggugaggaagc

SEQ ID NO: 425942 - RNA, 19 nt, Artificial Sequence
  Description of Artificial Sequence: Synthetic oligonucleotide
cagugcgcgauggugcaca

SEQ ID NO: 425943 - RNA, 19 nt, Artificial Sequence
  Description of Artificial Sequence: Synthetic oligonucleotide
acaggacgucaucgauggu

SEQ ID NO: 425944 - RNA, 19 nt, Artificial Sequence
  Description of Artificial Sequence: Synthetic oligonucleotide
cgugaccccguccucgagg

SEQ ID NO: 425945 - RNA, 19 nt, Artificial Sequence
  Description of Artificial Sequence: Synthetic oligonucleotide
accgacccucgugcaaaag

SEQ ID NO: 425946 - RNA, 19 nt, Artificial Sequence
  Description of Artificial Sequence: Synthetic oligonucleotide
gcuucguuaccaggaggug

SEQ ID NO: 425947 - RNA, 19 nt, Artificial Sequence
  Description of Artificial Sequence: Synthetic oligonucleotide
cagaggagcaaagacuuuu

SEQ ID NO: 425948 - RNA, 19 nt, Artificial Sequence
  Description of Artificial Sequence: Synthetic oligonucleotide
gcuguuacauuuccccuau

SEQ ID NO: 425949 - RNA, 19 nt, Artificial Sequence
  Description of Artificial Sequence: Synthetic oligonucleotide
cuggccgggcagacaggac

SEQ ID NO: 425950 - RNA, 19 nt, Artificial Sequence
  Description of Artificial Sequence: Synthetic oligonucleotide
ggacagccgauaucgagau

SEQ ID NO: 425951 - RNA, 19 nt, Artificial Sequence
  Description of Artificial Sequence: Synthetic oligonucleotide
gacggaggcgggcgccuuc

SEQ ID NO: 425952 - RNA, 19 nt, Artificial Sequence
  Description of Artificial Sequence: Synthetic oligonucleotide
gccgcucucccaauagcgc

SEQ ID NO: 425953 - RNA, 19 nt, Artificial Sequence
  Description of Artificial Sequence: Synthetic oligonucleotide
ugguggcuaugaugcuuuu

SEQ ID NO: 425954 - RNA, 19 nt, Artificial Sequence
  Description of Artificial Sequence: Synthetic oligonucleotide
cucucaagugagucuggau

SEQ ID NO: 425955 - RNA, 19 nt, Artificial Sequence
  Description of Artificial Sequence: Synthetic oligonucleotide
cugcccaaucugaaauagu

SEQ ID NO: 425956 - RNA, 19 nt, Artificial Sequence
  Description of Artificial Sequence: Synthetic oligonucleotide
cgacccucgugcaaaagga

SEQ ID NO: 425957 - RNA, 19 nt, Artificial Sequence
  Description of Artificial Sequence: Synthetic oligonucleotide
gccagugcgcgauggugca

SEQ ID NO: 425958 - RNA, 19 nt, Artificial Sequence
  Description of Artificial Sequence: Synthetic oligonucleotide
caagccccuacaccuauuu

SEQ ID NO: 425959 - RNA, 19 nt, Artificial Sequence
  Description of Artificial Sequence: Synthetic oligonucleotide
cucgugcaaaaggaauucu

SEQ ID NO: 425960 - RNA, 19 nt, Artificial Sequence
  Description of Artificial Sequence: Synthetic oligonucleotide
gacagccgauaucgagaua

SEQ ID NO: 425961 - RNA, 19 nt, Artificial Sequence
  Description of Artificial Sequence: Synthetic oligonucleotide
caauagcgcaugacuuuau

SEQ ID NO: 425962 - RNA, 19 nt, Artificial Sequence
  Description of Artificial Sequence: Synthetic oligonucleotide
uggcggucguggugaggaa

SEQ ID NO: 425963 - RNA, 19 nt, Artificial Sequence
  Description of Artificial Sequence: Synthetic oligonucleotide
gcucucaagugagucugga

SEQ ID NO: 425964 - RNA, 19 nt, Artificial Sequence
  Description of Artificial Sequence: Synthetic oligonucleotide
caaagggaacuugcugcua

SEQ ID NO: 425965 - RNA, 19 nt, Artificial Sequence
  Description of Artificial Sequence: Synthetic oligonucleotide
gaacugucacguggaggcu

SEQ ID NO: 425966 - RNA, 19 nt, Artificial Sequence
  Description of Artificial Sequence: Synthetic oligonucleotide
ccgcucucccaauagcgca

SEQ ID NO: 425967 - RNA, 19 nt, Artificial Sequence
  Description of Artificial Sequence: Synthetic oligonucleotide
cucaagccccuacaccuau

SEQ ID NO: 425968 - RNA, 19 nt, Artificial Sequence
  Description of Artificial Sequence: Synthetic oligonucleotide
gcaaccgacccucgugcaa

SEQ ID NO: 425969 - RNA, 19 nt, Artificial Sequence
  Description of Artificial Sequence: Synthetic oligonucleotide
ccaauagcgcaugacuuua

SEQ ID NO: 425970 - RNA, 19 nt, Artificial Sequence
  Description of Artificial Sequence: Synthetic oligonucleotide
ggaugcaguuuuguuuugu

SEQ ID NO: 425971 - RNA, 19 nt, Artificial Sequence
  Description of Artificial Sequence: Synthetic oligonucleotide
ggccauuaggagugcauuu

SEQ ID NO: 425972 - RNA, 19 nt, Artificial Sequence
  Description of Artificial Sequence: Synthetic oligonucleotide
ggagugcauuuucaccccu

SEQ ID NO: 425973 - RNA, 19 nt, Artificial Sequence
  Description of Artificial Sequence: Synthetic oligonucleotide
gcaugacuuuauacauaca

SEQ ID NO: 425974 - RNA, 19 nt, Artificial Sequence
  Description of Artificial Sequence: Synthetic oligonucleotide
ggccgcccugcacaucaug

SEQ ID NO: 425975 - RNA, 19 nt, Artificial Sequence
  Description of Artificial Sequence: Synthetic oligonucleotide
gguauccccaaaagucccu

SEQ ID NO: 425976 - RNA, 19 nt, Artificial Sequence
  Description of Artificial Sequence: Synthetic oligonucleotide
cgugguuacuacgcaacca

SEQ ID NO: 425977 - RNA, 19 nt, Artificial Sequence
  Description of Artificial Sequence: Synthetic oligonucleotide
cgauccccaacguaccuaa

SEQ ID NO: 425978 - RNA, 19 nt, Artificial Sequence
  Description of Artificial Sequence: Synthetic oligonucleotide
gcgcgauggugcacagggg

SEQ ID NO: 425979 - RNA, 19 nt, Artificial Sequence
  Description of Artificial Sequence: Synthetic oligonucleotide
ccaacguaccuaacuaauu

SEQ ID NO: 425980 - RNA, 19 nt, Artificial Sequence
  Description of Artificial Sequence: Synthetic oligonucleotide
gccauuaggagugcauuuu

SEQ ID NO: 425981 - RNA, 19 nt, Artificial Sequence
  Description of Artificial Sequence: Synthetic oligonucleotide
caucgaugguggcuaugau

SEQ ID NO: 425982 - RNA, 19 nt, Artificial Sequence
  Description of Artificial Sequence: Synthetic oligonucleotide
gcgaguccugccagugcgc

SEQ ID NO: 425983 - RNA, 19 nt, Artificial Sequence
  Description of Artificial Sequence: Synthetic oligonucleotide
gcgcaugacuuuauacaua

SEQ ID NO: 425984 - RNA, 19 nt, Artificial Sequence
  Description of Artificial Sequence: Synthetic oligonucleotide
ccuguggagaaaccaguau

SEQ ID NO: 425985 - RNA, 19 nt, Artificial Sequence
  Description of Artificial Sequence: Synthetic oligonucleotide
gagacggaggcgggcgccu

SEQ ID NO: 425986 - RNA, 19 nt, Artificial Sequence
  Description of Artificial Sequence: Synthetic oligonucleotide
ccccuauuuccuguaaaua

SEQ ID NO: 425987 - RNA, 19 nt, Artificial Sequence
  Description of Artificial Sequence: Synthetic oligonucleotide
cccucgugcaaaaggaauu

SEQ ID NO: 425988 - RNA, 19 nt, Artificial Sequence
  Description of Artificial Sequence: Synthetic oligonucleotide
cccugggcaagguucgaua

SEQ ID NO: 425989 - RNA, 19 nt, Artificial Sequence
  Description of Artificial Sequence: Synthetic oligonucleotide
gccgcccugcacaucaugu

SEQ ID NO: 425990 - RNA, 19 nt, Artificial Sequence
  Description of Artificial Sequence: Synthetic oligonucleotide
agacggaggcgggcgccuu

SEQ ID NO: 425991 - RNA, 19 nt, Artificial Sequence
  Description of Artificial Sequence: Synthetic oligonucleotide
gcgugccuucucacguaug

SEQ ID NO: 425992 - RNA, 19 nt, Artificial Sequence
  Description of Artificial Sequence: Synthetic oligonucleotide
gcgauccccaacguaccua

SEQ ID NO: 425993 - RNA, 19 nt, Artificial Sequence
  Description of Artificial Sequence: Synthetic oligonucleotide
cgaggaagcuuaucaaguu

SEQ ID NO: 425994 - RNA, 19 nt, Artificial Sequence
  Description of Artificial Sequence: Synthetic oligonucleotide
ccuaacugaagcgcuguuu

SEQ ID NO: 425995 - RNA, 19 nt, Artificial Sequence
  Description of Artificial Sequence: Synthetic oligonucleotide
cgcuuagccagcgaguccu

SEQ ID NO: 425996 - RNA, 19 nt, Artificial Sequence
  Description of Artificial Sequence: Synthetic oligonucleotide
cgccaucgugaccccgucc

SEQ ID NO: 425997 - RNA, 19 nt, Artificial Sequence
  Description of Artificial Sequence: Synthetic oligonucleotide
ccgggcagacaggacguca

SEQ ID NO: 425998 - RNA, 19 nt, Artificial Sequence
  Description of Artificial Sequence: Synthetic oligonucleotide
ggcuuuuggccugcugaau

SEQ ID NO: 425999 - RNA, 19 nt, Artificial Sequence
  Description of Artificial Sequence: Synthetic oligonucleotide
ccagugcgcgauggugcac

SEQ ID NO: 426000 - RNA, 19 nt, Artificial Sequence
  Description of Artificial Sequence: Synthetic oligonucleotide
gcuaucgguuugagguccu

SEQ ID NO: 426001 - RNA, 19 nt, Artificial Sequence
  Description of Artificial Sequence: Synthetic oligonucleotide
cuguuacauuuccccuauu

SEQ ID NO: 426002 - RNA, 19 nt, Artificial Sequence
  Description of Artificial Sequence: Synthetic oligonucleotide
gagucucgucucggcuccu

SEQ ID NO: 426003 - RNA, 19 nt, Artificial Sequence
  Description of Artificial Sequence: Synthetic oligonucleotide
gccucgguguggugaaauu

SEQ ID NO: 426004 - RNA, 19 nt, Artificial Sequence
  Description of Artificial Sequence: Synthetic oligonucleotide
cgguguggugaaauuuccu

SEQ ID NO: 426005 - RNA, 19 nt, Artificial Sequence
  Description of Artificial Sequence: Synthetic oligonucleotide
gccuucgaggagggaucuc

SEQ ID NO: 426006 - RNA, 19 nt, Artificial Sequence
  Description of Artificial Sequence: Synthetic oligonucleotide
cugucacguggaggcugaa

SEQ ID NO: 426007 - RNA, 19 nt, Artificial Sequence
  Description of Artificial Sequence: Synthetic oligonucleotide
gccugauguuccgguggcu

SEQ ID NO: 426008 - RNA, 19 nt, Artificial Sequence
  Description of Artificial Sequence: Synthetic oligonucleotide
cccuaacugaagcgcuguu

SEQ ID NO: 426009 - RNA, 19 nt, Artificial Sequence
  Description of Artificial Sequence: Synthetic oligonucleotide
gggugacgggaugcaguuu

SEQ ID NO: 426010 - RNA, 19 nt, Artificial Sequence
  Description of Artificial Sequence: Synthetic oligonucleotide
cgucaucgaugguggcuau

SEQ ID NO: 426011 - RNA, 19 nt, Artificial Sequence
  Description of Artificial Sequence: Synthetic oligonucleotide
ccccugggcaagguucgau

SEQ ID NO: 426012 - RNA, 19 nt, Artificial Sequence
  Description of Artificial Sequence: Synthetic oligonucleotide
ucuuuauagaauaugaucc

SEQ ID NO: 426013 - RNA, 19 nt, Artificial Sequence
  Description of Artificial Sequence: Synthetic oligonucleotide
aauacuagcugucaccgcc

SEQ ID NO: 426014 - RNA, 19 nt, Artificial Sequence
  Description of Artificial Sequence: Synthetic oligonucleotide
aaauugaacauucuagguc

SEQ ID NO: 426015 - RNA, 19 nt, Artificial Sequence
  Description of Artificial Sequence: Synthetic oligonucleotide
uuagccaacgauuagaaag

SEQ ID NO: 426016 - RNA, 19 nt, Artificial Sequence
  Description of Artificial Sequence: Synthetic oligonucleotide
agauauacgaaauugaaca

SEQ ID NO: 426017 - RNA, 19 nt, Artificial Sequence
  Description of Artificial Sequence: Synthetic oligonucleotide
aaaacgaucucagugacac

SEQ ID NO: 426018 - RNA, 19 nt, Artificial Sequence
  Description of Artificial Sequence: Synthetic oligonucleotide
aauugaacauucuagguca

SEQ ID NO: 426019 - RNA, 19 nt, Artificial Sequence
  Description of Artificial Sequence: Synthetic oligonucleotide
aauaugauccuuuuguaga

SEQ ID NO: 426020 - RNA, 19 nt, Artificial Sequence
  Description of Artificial Sequence: Synthetic oligonucleotide
acgagcauauuacagaggc

SEQ ID NO: 426021 - RNA, 19 nt, Artificial Sequence
  Description of Artificial Sequence: Synthetic oligonucleotide
agauguuagagguacaggg

SEQ ID NO: 426022 - RNA, 19 nt, Artificial Sequence
  Description of Artificial Sequence: Synthetic oligonucleotide
agcaaaugaggauuggagc

SEQ ID NO: 426023 - RNA, 19 nt, Artificial Sequence
  Description of Artificial Sequence: Synthetic oligonucleotide
gaauaugauccuuuuguag

SEQ ID NO: 426024 - RNA, 19 nt, Artificial Sequence
  Description of Artificial Sequence: Synthetic oligonucleotide
uguagaacaaaaguuacac

SEQ ID NO: 426025 - RNA, 19 nt, Artificial Sequence
  Description of Artificial Sequence: Synthetic oligonucleotide
gaugauauagggcgugucg

SEQ ID NO: 426026 - RNA, 19 nt, Artificial Sequence
  Description of Artificial Sequence: Synthetic oligonucleotide
uacuguuagauguuagagg

SEQ ID NO: 426027 - RNA, 19 nt, Artificial Sequence
  Description of Artificial Sequence: Synthetic oligonucleotide
aauacuguuagauguuaga

SEQ ID NO: 426028 - RNA, 19 nt, Artificial Sequence
  Description of Artificial Sequence: Synthetic oligonucleotide
uuucagucaaguuaaagau

SEQ ID NO: 426029 - RNA, 19 nt, Artificial Sequence
  Description of Artificial Sequence: Synthetic oligonucleotide
aacgauuagaaaggauucc

SEQ ID NO: 426030 - RNA, 19 nt, Artificial Sequence
  Description of Artificial Sequence: Synthetic oligonucleotide
uaguccaggagaauuauug

SEQ ID NO: 426031 - RNA, 19 nt, Artificial Sequence
  Description of Artificial Sequence: Synthetic oligonucleotide
auaccaagcccugagaggc

SEQ ID NO: 426032 - RNA, 19 nt, Artificial Sequence
  Description of Artificial Sequence: Synthetic oligonucleotide
uucguuuucagucaaguua

SEQ ID NO: 426033 - RNA, 19 nt, Artificial Sequence
  Description of Artificial Sequence: Synthetic oligonucleotide
ucaauacuagcugucaccg

SEQ ID NO: 426034 - RNA, 19 nt, Artificial Sequence
  Description of Artificial Sequence: Synthetic oligonucleotide
aguugauacagcaaucccc

SEQ ID NO: 426035 - RNA, 19 nt, Artificial Sequence
  Description of Artificial Sequence: Synthetic oligonucleotide
ugauccaccuggaaaaugc

SEQ ID NO: 426036 - RNA, 19 nt, Artificial Sequence
  Description of Artificial Sequence: Synthetic oligonucleotide
aauggggugucaugagccc

SEQ ID NO: 426037 - RNA, 19 nt, Artificial Sequence
  Description of Artificial Sequence: Synthetic oligonucleotide
uuaugaggcagcaacgcca

SEQ ID NO: 426038 - RNA, 19 nt, Artificial Sequence
  Description of Artificial Sequence: Synthetic oligonucleotide
ucuaaguaugccauugccu

SEQ ID NO: 426039 - RNA, 19 nt, Artificial Sequence
  Description of Artificial Sequence: Synthetic oligonucleotide
aacauucuaggucagugau

SEQ ID NO: 426040 - RNA, 19 nt, Artificial Sequence
  Description of Artificial Sequence: Synthetic oligonucleotide
ugugugcuugaucuggccg

SEQ ID NO: 426041 - RNA, 19 nt, Artificial Sequence
  Description of Artificial Sequence: Synthetic oligonucleotide
uguuagauguuagagguac

SEQ ID NO: 426042 - RNA, 19 nt, Artificial Sequence
  Description of Artificial Sequence: Synthetic oligonucleotide
uucgugaugagguugucug

SEQ ID NO: 426043 - RNA, 19 nt, Artificial Sequence
  Description of Artificial Sequence: Synthetic oligonucleotide
gauuagucagaaauuaaac

SEQ ID NO: 426044 - RNA, 19 nt, Artificial Sequence
  Description of Artificial Sequence: Synthetic oligonucleotide
aacgaucucagugacaccu

SEQ ID NO: 426045 - RNA, 19 nt, Artificial Sequence
  Description of Artificial Sequence: Synthetic oligonucleotide
uuuaugaggcagcaacgcc

SEQ ID NO: 426046 - RNA, 19 nt, Artificial Sequence
  Description of Artificial Sequence: Synthetic oligonucleotide
uaggucagugauuagucag

SEQ ID NO: 426047 - RNA, 19 nt, Artificial Sequence
  Description of Artificial Sequence: Synthetic oligonucleotide
ucguuuucagucaaguuaa

SEQ ID NO: 426048 - RNA, 19 nt, Artificial Sequence
  Description of Artificial Sequence: Synthetic oligonucleotide
acggacaagacuuuguacu

SEQ ID NO: 426049 - RNA, 19 nt, Artificial Sequence
  Description of Artificial Sequence: Synthetic oligonucleotide
gacuuuguacuucuggaug

SEQ ID NO: 426050 - RNA, 19 nt, Artificial Sequence
  Description of Artificial Sequence: Synthetic oligonucleotide
uccuaucaguucuuuauag

SEQ ID NO: 426051 - RNA, 19 nt, Artificial Sequence
  Description of Artificial Sequence: Synthetic oligonucleotide
uauagaaccccguuccuga

SEQ ID NO: 426052 - RNA, 19 nt, Artificial Sequence
  Description of Artificial Sequence: Synthetic oligonucleotide
acgaaauugaacauucuag

SEQ ID NO: 426053 - RNA, 19 nt, Artificial Sequence
  Description of Artificial Sequence: Synthetic oligonucleotide
agaagaaauacuguuagau

SEQ ID NO: 426054 - RNA, 19 nt, Artificial Sequence
  Description of Artificial Sequence: Synthetic oligonucleotide
aaagugugcuuuugccaac

SEQ ID NO: 426055 - RNA, 19 nt, Artificial Sequence
  Description of Artificial Sequence: Synthetic oligonucleotide
agcguuugaagaugaaguc

SEQ ID NO: 426056 - RNA, 19 nt, Artificial Sequence
  Description of Artificial Sequence: Synthetic oligonucleotide
ucaacggugcuucacgcgc

SEQ ID NO: 426057 - RNA, 19 nt, Artificial Sequence
  Description of Artificial Sequence: Synthetic oligonucleotide
agucaauacuagcugucac

SEQ ID NO: 426058 - RNA, 19 nt, Artificial Sequence
  Description of Artificial Sequence: Synthetic oligonucleotide
ugaacauucuaggucagug

SEQ ID NO: 426059 - RNA, 19 nt, Artificial Sequence
  Description of Artificial Sequence: Synthetic oligonucleotide
caaagcgacauacaguuuc

SEQ ID NO: 426060 - RNA, 19 nt, Artificial Sequence
  Description of Artificial Sequence: Synthetic oligonucleotide
uuauagaauaugauccuuu

SEQ ID NO: 426061 - RNA, 19 nt, Artificial Sequence
  Description of Artificial Sequence: Synthetic oligonucleotide
aguuacaccaauaacaauu

SEQ ID NO: 426062 - RNA, 19 nt, Artificial Sequence
  Description of Artificial Sequence: Synthetic oligonucleotide
uccaacaacaccucagagu

SEQ ID NO: 426063 - RNA, 19 nt, Artificial Sequence
  Description of Artificial Sequence: Synthetic oligonucleotide
uccucaacggugcuucacg

SEQ ID NO: 426064 - RNA, 19 nt, Artificial Sequence
  Description of Artificial Sequence: Synthetic oligonucleotide
ugggucugaugaaugacag

SEQ ID NO: 426065 - RNA, 19 nt, Artificial Sequence
  Description of Artificial Sequence: Synthetic oligonucleotide
uacgaaauugaacauucua

SEQ ID NO: 426066 - RNA, 19 nt, Artificial Sequence
  Description of Artificial Sequence: Synthetic oligonucleotide
cagauauacgaaauugaac

SEQ ID NO: 426067 - RNA, 19 nt, Artificial Sequence
  Description of Artificial Sequence: Synthetic oligonucleotide
ugugaucucggguugcacc

SEQ ID NO: 426068 - RNA, 19 nt, Artificial Sequence
  Description of Artificial Sequence: Synthetic oligonucleotide
agacuuggagcuuucgaag

SEQ ID NO: 426069 - RNA, 19 nt, Artificial Sequence
  Description of Artificial Sequence: Synthetic oligonucleotide
auguuagagguacagggca

SEQ ID NO: 426070 - RNA, 19 nt, Artificial Sequence
  Description of Artificial Sequence: Synthetic oligonucleotide
cagcaaaugaggauuggag

SEQ ID NO: 426071 - RNA, 19 nt, Artificial Sequence
  Description of Artificial Sequence: Synthetic oligonucleotide
ggaaugucaaaccaagaug

SEQ ID NO: 426072 - RNA, 19 nt, Artificial Sequence
  Description of Artificial Sequence: Synthetic oligonucleotide
aaacgaucucagugacacc

SEQ ID NO: 426073 - RNA, 19 nt, Artificial Sequence
  Description of Artificial Sequence: Synthetic oligonucleotide
caacgauuagaaaggauuc

SEQ ID NO: 426074 - RNA, 19 nt, Artificial Sequence
  Description of Artificial Sequence: Synthetic oligonucleotide
gauguuagagguacagggc

SEQ ID NO: 426075 - RNA, 19 nt, Artificial Sequence
  Description of Artificial Sequence: Synthetic oligonucleotide
gaauggggugucaugagcc

SEQ ID NO: 426076 - RNA, 19 nt, Artificial Sequence
  Description of Artificial Sequence: Synthetic oligonucleotide
uuaccaucccggcaagaag

SEQ ID NO: 426077 - RNA, 19 nt, Artificial Sequence
  Description of Artificial Sequence: Synthetic oligonucleotide
ugggcguucguuuucaguc

SEQ ID NO: 426078 - RNA, 19 nt, Artificial Sequence
  Description of Artificial Sequence: Synthetic oligonucleotide
cagagcacgagcauauuac

SEQ ID NO: 426079 - RNA, 19 nt, Artificial Sequence
  Description of Artificial Sequence: Synthetic oligonucleotide
agcacgagcauauuacaga

SEQ ID NO: 426080 - RNA, 19 nt, Artificial Sequence
  Description of Artificial Sequence: Synthetic oligonucleotide
guacagauccaaaacagac

SEQ ID NO: 426081 - RNA, 19 nt, Artificial Sequence
  Description of Artificial Sequence: Synthetic oligonucleotide
agagugauccaccuggaaa

SEQ ID NO: 426082 - RNA, 19 nt, Artificial Sequence
  Description of Artificial Sequence: Synthetic oligonucleotide
aacccaggcugccauaacu

SEQ ID NO: 426083 - RNA, 19 nt, Artificial Sequence
  Description of Artificial Sequence: Synthetic oligonucleotide
uucaccuauguaccuggag

SEQ ID NO: 426084 - RNA, 19 nt, Artificial Sequence
  Description of Artificial Sequence: Synthetic oligonucleotide
aaagcggccagcaucuuca

SEQ ID NO: 426085 - RNA, 19 nt, Artificial Sequence
  Description of Artificial Sequence: Synthetic oligonucleotide
agugauuagucagaaauua

SEQ ID NO: 426086 - RNA, 19 nt, Artificial Sequence
  Description of Artificial Sequence: Synthetic oligonucleotide
aacauaccaagcccugaga

SEQ ID NO: 426087 - RNA, 19 nt, Artificial Sequence
  Description of Artificial Sequence: Synthetic oligonucleotide
uagggcgugucguacuugg

SEQ ID NO: 426088 - RNA, 19 nt, Artificial Sequence
  Description of Artificial Sequence: Synthetic oligonucleotide
cucugucuuaccaucccgg

SEQ ID NO: 426089 - RNA, 19 nt, Artificial Sequence
  Description of Artificial Sequence: Synthetic oligonucleotide
agaaucugagggccgagug

SEQ ID NO: 426090 - RNA, 19 nt, Artificial Sequence
  Description of Artificial Sequence: Synthetic oligonucleotide
aagaucacccacccaggca

SEQ ID NO: 426091 - RNA, 19 nt, Artificial Sequence
  Description of Artificial Sequence: Synthetic oligonucleotide
agaaaggauuccaacaaca

SEQ ID NO: 426092 - RNA, 19 nt, Artificial Sequence
  Description of Artificial Sequence: Synthetic oligonucleotide
uucuaggucagugauuagu

SEQ ID NO: 426093 - RNA, 19 nt, Artificial Sequence
  Description of Artificial Sequence: Synthetic oligonucleotide
gacauacaguuucugugug

SEQ ID NO: 426094 - RNA, 19 nt, Artificial Sequence
  Description of Artificial Sequence: Synthetic oligonucleotide
acaugaacaaguucuugau

SEQ ID NO: 426095 - RNA, 19 nt, Artificial Sequence
  Description of Artificial Sequence: Synthetic oligonucleotide
agaaccccguuccugaugu

SEQ ID NO: 426096 - RNA, 19 nt, Artificial Sequence
  Description of Artificial Sequence: Synthetic oligonucleotide
aaccauucucacacacugc

SEQ ID NO: 426097 - RNA, 19 nt, Artificial Sequence
  Description of Artificial Sequence: Synthetic oligonucleotide
auaugauccuuuuguagaa

SEQ ID NO: 426098 - RNA, 19 nt, Artificial Sequence
  Description of Artificial Sequence: Synthetic oligonucleotide
agcacagauaauucucugu

SEQ ID NO: 426099 - RNA, 19 nt, Artificial Sequence
  Description of Artificial Sequence: Synthetic oligonucleotide
ugucguacuuggcucgaag

SEQ ID NO: 426100 - RNA, 19 nt, Artificial Sequence
  Description of Artificial Sequence: Synthetic oligonucleotide
cuuggcucgaagucuuggg

SEQ ID NO: 426101 - RNA, 19 nt, Artificial Sequence
  Description of Artificial Sequence: Synthetic oligonucleotide
gacaagcugaaggagucag

SEQ ID NO: 426102 - RNA, 19 nt, Artificial Sequence
  Description of Artificial Sequence: Synthetic oligonucleotide
agaauaugauccuuuugua

SEQ ID NO: 426103 - RNA, 19 nt, Artificial Sequence
  Description of Artificial Sequence: Synthetic oligonucleotide
guuuaugaggcagcaacgc

SEQ ID NO: 426104 - RNA, 19 nt, Artificial Sequence
  Description of Artificial Sequence: Synthetic oligonucleotide
gaugacuggccauuucuuc

SEQ ID NO: 426105 - RNA, 19 nt, Artificial Sequence
  Description of Artificial Sequence: Synthetic oligonucleotide
guaccuggagcugugaggc

SEQ ID NO: 426106 - RNA, 19 nt, Artificial Sequence
  Description of Artificial Sequence: Synthetic oligonucleotide
gaacauucuaggucaguga

SEQ ID NO: 426107 - RNA, 19 nt, Artificial Sequence
  Description of Artificial Sequence: Synthetic oligonucleotide
cuggccauuucuucacugg

SEQ ID NO: 426108 - RNA, 19 nt, Artificial Sequence
  Description of Artificial Sequence: Synthetic oligonucleotide
uuuauagaauaugauccuu

SEQ ID NO: 426109 - RNA, 19 nt, Artificial Sequence
  Description of Artificial Sequence: Synthetic oligonucleotide
ucguacuuggcucgaaguc

SEQ ID NO: 426110 - RNA, 19 nt, Artificial Sequence
  Description of Artificial Sequence: Synthetic oligonucleotide
uugucugaagccugcguga

SEQ ID NO: 426111 - RNA, 19 nt, Artificial Sequence
  Description of Artificial Sequence: Synthetic oligonucleotide
aggcgguaagggaagaagc

SEQ ID NO: 426112 - RNA, 19 nt, Artificial Sequence
  Description of Artificial Sequence: Synthetic oligonucleotide
agacguagcuucgugauga

SEQ ID NO: 426113 - RNA, 19 nt, Artificial Sequence
  Description of Artificial Sequence: Synthetic oligonucleotide
agagucaauacuagcuguc

SEQ ID NO: 426114 - RNA, 19 nt, Artificial Sequence
  Description of Artificial Sequence: Synthetic oligonucleotide
agcgacauacaguuucugu

SEQ ID NO: 426115 - RNA, 19 nt, Artificial Sequence
  Description of Artificial Sequence: Synthetic oligonucleotide
ugcacgcuccuugagcugg

SEQ ID NO: 426116 - RNA, 19 nt, Artificial Sequence
  Description of Artificial Sequence: Synthetic oligonucleotide
acgauuagaaaggauucca

SEQ ID NO: 426117 - RNA, 19 nt, Artificial Sequence
  Description of Artificial Sequence: Synthetic oligonucleotide
aagaugggucugaugaaug

SEQ ID NO: 426118 - RNA, 19 nt, Artificial Sequence
  Description of Artificial Sequence: Synthetic oligonucleotide
uuucccaaccccagugugu

SEQ ID NO: 426119 - RNA, 19 nt, Artificial Sequence
  Description of Artificial Sequence: Synthetic oligonucleotide
agagcgagccccaccaggc

SEQ ID NO: 426120 - RNA, 19 nt, Artificial Sequence
  Description of Artificial Sequence: Synthetic oligonucleotide
gacggacaagacuuuguac

SEQ ID NO: 426121 - RNA, 19 nt, Artificial Sequence
  Description of Artificial Sequence: Synthetic oligonucleotide
uccaaaccuucccgaaaag

SEQ ID NO: 426122 - RNA, 19 nt, Artificial Sequence
  Description of Artificial Sequence: Synthetic oligonucleotide
ugaucuggccgccuggcaa

SEQ ID NO: 426123 - RNA, 19 nt, Artificial Sequence
  Description of Artificial Sequence: Synthetic oligonucleotide
gauauagggcgugucguac

SEQ ID NO: 426124 - RNA, 19 nt, Artificial Sequence
  Description of Artificial Sequence: Synthetic oligonucleotide
agaugggucugaugaauga

SEQ ID NO: 426125 - RNA, 19 nt, Artificial Sequence
  Description of Artificial Sequence: Synthetic oligonucleotide
caugaacaaguucuugauc

SEQ ID NO: 426126 - RNA, 19 nt, Artificial Sequence
  Description of Artificial Sequence: Synthetic oligonucleotide
agagcacgagcauauuaca

SEQ ID NO: 426127 - RNA, 19 nt, Artificial Sequence
  Description of Artificial Sequence: Synthetic oligonucleotide
cacgguggcaccugcacgc

SEQ ID NO: 426128 - RNA, 19 nt, Artificial Sequence
  Description of Artificial Sequence: Synthetic oligonucleotide
auauagaaccccguuccug

SEQ ID NO: 426129 - RNA, 19 nt, Artificial Sequence
  Description of Artificial Sequence: Synthetic oligonucleotide
auaacuagccauaguccag

SEQ ID NO: 426130 - RNA, 19 nt, Artificial Sequence
  Description of Artificial Sequence: Synthetic oligonucleotide
uggaguugauacagcaauc

SEQ ID NO: 426131 - RNA, 19 nt, Artificial Sequence
  Description of Artificial Sequence: Synthetic oligonucleotide
cauauuacagaggcccaag

SEQ ID NO: 426132 - RNA, 19 nt, Artificial Sequence
  Description of Artificial Sequence: Synthetic oligonucleotide
ccauaacuagccauagucc

SEQ ID NO: 426133 - RNA, 19 nt, Artificial Sequence
  Description of Artificial Sequence: Synthetic oligonucleotide
auauacgaaauugaacauu

SEQ ID NO: 426134 - RNA, 19 nt, Artificial Sequence
  Description of Artificial Sequence: Synthetic oligonucleotide
cucaacggugcuucacgcg

SEQ ID NO: 426135 - RNA, 19 nt, Artificial Sequence
  Description of Artificial Sequence: Synthetic oligonucleotide
aaggagaaucugagggccg

SEQ ID NO: 426136 - RNA, 19 nt, Artificial Sequence
  Description of Artificial Sequence: Synthetic oligonucleotide
gagcacgagcauauuacag

SEQ ID NO: 426137 - RNA, 19 nt, Artificial Sequence
  Description of Artificial Sequence: Synthetic oligonucleotide
uggagacguagcuucguga

SEQ ID NO: 426138 - RNA, 19 nt, Artificial Sequence
  Description of Artificial Sequence: Synthetic oligonucleotide
gcacgagcauauuacagag

SEQ ID NO: 426139 - RNA, 19 nt, Artificial Sequence
  Description of Artificial Sequence: Synthetic oligonucleotide
cugaugaaugacagcucag

SEQ ID NO: 426140 - RNA, 19 nt, Artificial Sequence
  Description of Artificial Sequence: Synthetic oligonucleotide
uuuagccaacgauuagaaa

SEQ ID NO: 426141 - RNA, 19 nt, Artificial Sequence
  Description of Artificial Sequence: Synthetic oligonucleotide
gauauacgaaauugaacau

SEQ ID NO: 426142 - RNA, 19 nt, Artificial Sequence
  Description of Artificial Sequence: Synthetic oligonucleotide
cuuuagccaacgauuagaa

SEQ ID NO: 426143 - RNA, 19 nt, Artificial Sequence
  Description of Artificial Sequence: Synthetic oligonucleotide
acuagccauaguccaggag

SEQ ID NO: 426144 - RNA, 19 nt, Artificial Sequence
  Description of Artificial Sequence: Synthetic oligonucleotide
gguuuaugaggcagcaacg

SEQ ID NO: 426145 - RNA, 19 nt, Artificial Sequence
  Description of Artificial Sequence: Synthetic oligonucleotide
gaugggucugaugaaugac

SEQ ID NO: 426146 - RNA, 19 nt, Artificial Sequence
  Description of Artificial Sequence: Synthetic oligonucleotide
gaaucugagggccgaguga

SEQ ID NO: 426147 - RNA, 19 nt, Artificial Sequence
  Description of Artificial Sequence: Synthetic oligonucleotide
cuucacgcgcucagcacgg

SEQ ID NO: 426148 - RNA, 19 nt, Artificial Sequence
  Description of Artificial Sequence: Synthetic oligonucleotide
cucaagcuucagauauacg

SEQ ID NO: 426149 - RNA, 19 nt, Artificial Sequence
  Description of Artificial Sequence: Synthetic oligonucleotide
cuucccgaaaagccaagug

SEQ ID NO: 426150 - RNA, 19 nt, Artificial Sequence
  Description of Artificial Sequence: Synthetic oligonucleotide
cacaaagcgacauacaguu

SEQ ID NO: 426151 - RNA, 19 nt, Artificial Sequence
  Description of Artificial Sequence: Synthetic oligonucleotide
auauagggcgugucguacu

SEQ ID NO: 426152 - RNA, 19 nt, Artificial Sequence
  Description of Artificial Sequence: Synthetic oligonucleotide
cacgagcauauuacagagg

SEQ ID NO: 426153 - RNA, 19 nt, Artificial Sequence
  Description of Artificial Sequence: Synthetic oligonucleotide
gcguuugaagaugaagucg

SEQ ID NO: 426154 - RNA, 19 nt, Artificial Sequence
  Description of Artificial Sequence: Synthetic oligonucleotide
uucccaaccccagugugug

SEQ ID NO: 426155 - RNA, 19 nt, Artificial Sequence
  Description of Artificial Sequence: Synthetic oligonucleotide
agcgagccccaccaggcgg

SEQ ID NO: 426156 - RNA, 19 nt, Artificial Sequence
  Description of Artificial Sequence: Synthetic oligonucleotide
uccgugggcaucuuccggu

SEQ ID NO: 426157 - RNA, 19 nt, Artificial Sequence
  Description of Artificial Sequence: Synthetic oligonucleotide
gauuggagcaaagguaaaa

SEQ ID NO: 426158 - RNA, 19 nt, Artificial Sequence
  Description of Artificial Sequence: Synthetic oligonucleotide
gcuucacgcgcucagcacg

SEQ ID NO: 426159 - RNA, 19 nt, Artificial Sequence
  Description of Artificial Sequence: Synthetic oligonucleotide
gucucgguuuaugaggcag

SEQ ID NO: 426160 - RNA, 19 nt, Artificial Sequence
  Description of Artificial Sequence: Synthetic oligonucleotide
gacacgguggcaccugcac

SEQ ID NO: 426161 - RNA, 19 nt, Artificial Sequence
  Description of Artificial Sequence: Synthetic oligonucleotide
ugagaugacuggccauuuc

SEQ ID NO: 426162 - RNA, 19 nt, Artificial Sequence
  Description of Artificial Sequence: Synthetic oligonucleotide
gagacguagcuucgugaug

SEQ ID NO: 426163 - RNA, 19 nt, Artificial Sequence
  Description of Artificial Sequence: Synthetic oligonucleotide
uauagggcgugucguacuu

SEQ ID NO: 426164 - RNA, 19 nt, Artificial Sequence
  Description of Artificial Sequence: Synthetic oligonucleotide
gaaagcggccagcaucuuc

SEQ ID NO: 426165 - RNA, 19 nt, Artificial Sequence
  Description of Artificial Sequence: Synthetic oligonucleotide
gagguacagggcaacucag

SEQ ID NO: 426166 - RNA, 19 nt, Artificial Sequence
  Description of Artificial Sequence: Synthetic oligonucleotide
cacgcgcucagcacgggcc

SEQ ID NO: 426167 - RNA, 19 nt, Artificial Sequence
  Description of Artificial Sequence: Synthetic oligonucleotide
gagucaauacuagcuguca

SEQ ID NO: 426168 - RNA, 19 nt, Artificial Sequence
  Description of Artificial Sequence: Synthetic oligonucleotide
uuagagguacagggcaacu

SEQ ID NO: 426169 - RNA, 19 nt, Artificial Sequence
  Description of Artificial Sequence: Synthetic oligonucleotide
ugccauaacuagccauagu

SEQ ID NO: 426170 - RNA, 19 nt, Artificial Sequence
  Description of Artificial Sequence: Synthetic oligonucleotide
cugucacauauagaacccc

SEQ ID NO: 426171 - RNA, 19 nt, Artificial Sequence
  Description of Artificial Sequence: Synthetic oligonucleotide
ggucugaugaaugacagcu

SEQ ID NO: 426172 - RNA, 19 nt, Artificial Sequence
  Description of Artificial Sequence: Synthetic oligonucleotide
aggauuccaacaacaccuc

SEQ ID NO: 426173 - RNA, 19 nt, Artificial Sequence
  Description of Artificial Sequence: Synthetic oligonucleotide
augggucugaugaaugaca

SEQ ID NO: 426174 - RNA, 19 nt, Artificial Sequence
  Description of Artificial Sequence: Synthetic oligonucleotide
ucucggguugcacccacau

SEQ ID NO: 426175 - RNA, 19 nt, Artificial Sequence
  Description of Artificial Sequence: Synthetic oligonucleotide
gaaaaugcacagguggggu

SEQ ID NO: 426176 - RNA, 19 nt, Artificial Sequence
  Description of Artificial Sequence: Synthetic oligonucleotide
ucaugagcccaagccacca

SEQ ID NO: 426177 - RNA, 19 nt, Artificial Sequence
  Description of Artificial Sequence: Synthetic oligonucleotide
auucuaggucagugauuag

SEQ ID NO: 426178 - RNA, 19 nt, Artificial Sequence
  Description of Artificial Sequence: Synthetic oligonucleotide
ucgaagucuuggggcagcg

SEQ ID NO: 426179 - RNA, 19 nt, Artificial Sequence
  Description of Artificial Sequence: Synthetic oligonucleotide
uugaucuggccgccuggca

SEQ ID NO: 426180 - RNA, 19 nt, Artificial Sequence
  Description of Artificial Sequence: Synthetic oligonucleotide
aaccuucccgaaaagccaa

SEQ ID NO: 426181 - RNA, 19 nt, Artificial Sequence
  Description of Artificial Sequence: Synthetic oligonucleotide
guuagagguacagggcaac

SEQ ID NO: 426182 - RNA, 19 nt, Artificial Sequence
  Description of Artificial Sequence: Synthetic oligonucleotide
aagcgacauacaguuucug

SEQ ID NO: 426183 - RNA, 19 nt, Artificial Sequence
  Description of Artificial Sequence: Synthetic oligonucleotide
ugcuucacgcgcucagcac

SEQ ID NO: 426184 - RNA, 19 nt, Artificial Sequence
  Description of Artificial Sequence: Synthetic oligonucleotide
gacguagcuucgugaugag

SEQ ID NO: 426185 - RNA, 19 nt, Artificial Sequence
  Description of Artificial Sequence: Synthetic oligonucleotide
ugugugaucucggguugca

SEQ ID NO: 426186 - RNA, 19 nt, Artificial Sequence
  Description of Artificial Sequence: Synthetic oligonucleotide
ugucugaagccugcgugac

SEQ ID NO: 426187 - RNA, 19 nt, Artificial Sequence
  Description of Artificial Sequence: Synthetic oligonucleotide
ccguuccugauguaguccg

SEQ ID NO: 426188 - RNA, 19 nt, Artificial Sequence
  Description of Artificial Sequence: Synthetic oligonucleotide
agcuucagauauacgaaau

SEQ ID NO: 426189 - RNA, 19 nt, Artificial Sequence
  Description of Artificial Sequence: Synthetic oligonucleotide
cuggagacguagcuucgug

SEQ ID NO: 426190 - RNA, 19 nt, Artificial Sequence
  Description of Artificial Sequence: Synthetic oligonucleotide
cuccaaaccuucccgaaaa

SEQ ID NO: 426191 - RNA, 19 nt, Artificial Sequence
  Description of Artificial Sequence: Synthetic oligonucleotide
uuuucacauacuggcugaa

SEQ ID NO: 426192 - RNA, 19 nt, Artificial Sequence
  Description of Artificial Sequence: Synthetic oligonucleotide
gucaaaccaagaugggucu

SEQ ID NO: 426193 - RNA, 19 nt, Artificial Sequence
  Description of Artificial Sequence: Synthetic oligonucleotide
gcagcguuugaagaugaag

SEQ ID NO: 426194 - RNA, 19 nt, Artificial Sequence
  Description of Artificial Sequence: Synthetic oligonucleotide
uacuuggcucgaagucuug

SEQ ID NO: 426195 - RNA, 19 nt, Artificial Sequence
  Description of Artificial Sequence: Synthetic oligonucleotide
aucaaccacuggccugguc

SEQ ID NO: 426196 - RNA, 19 nt, Artificial Sequence
  Description of Artificial Sequence: Synthetic oligonucleotide
cauggguagggugggguug

SEQ ID NO: 426197 - RNA, 19 nt, Artificial Sequence
  Description of Artificial Sequence: Synthetic oligonucleotide
caccaggcgguaagggaag

SEQ ID NO: 426198 - RNA, 19 nt, Artificial Sequence
  Description of Artificial Sequence: Synthetic oligonucleotide
cugcgugacacgguggcac

SEQ ID NO: 426199 - RNA, 19 nt, Artificial Sequence
  Description of Artificial Sequence: Synthetic oligonucleotide
ugacacgguggcaccugca

SEQ ID NO: 426200 - RNA, 19 nt, Artificial Sequence
  Description of Artificial Sequence: Synthetic oligonucleotide
auacgaaauugaacauucu

SEQ ID NO: 426201 - RNA, 19 nt, Artificial Sequence
  Description of Artificial Sequence: Synthetic oligonucleotide
cuuaccaucccggcaagaa

SEQ ID NO: 426202 - RNA, 19 nt, Artificial Sequence
  Description of Artificial Sequence: Synthetic oligonucleotide
cuagugggcguucguuuuc

SEQ ID NO: 426203 - RNA, 19 nt, Artificial Sequence
  Description of Artificial Sequence: Synthetic oligonucleotide
gauccaccuggaaaaugca

SEQ ID NO: 426204 - RNA, 19 nt, Artificial Sequence
  Description of Artificial Sequence: Synthetic oligonucleotide
uggcugaaaauggucucaa

SEQ ID NO: 426205 - RNA, 19 nt, Artificial Sequence
  Description of Artificial Sequence: Synthetic oligonucleotide
auagaaccccguuccugau

SEQ ID NO: 426206 - RNA, 19 nt, Artificial Sequence
  Description of Artificial Sequence: Synthetic oligonucleotide
uagugggcguucguuuuca

SEQ ID NO: 426207 - RNA, 19 nt, Artificial Sequence
  Description of Artificial Sequence: Synthetic oligonucleotide
ucccaaccccagugugugg

SEQ ID NO: 426208 - RNA, 19 nt, Artificial Sequence
  Description of Artificial Sequence: Synthetic oligonucleotide
ucugugcaccauggcgccg

SEQ ID NO: 426209 - RNA, 19 nt, Artificial Sequence
  Description of Artificial Sequence: Synthetic oligonucleotide
aggagaaucugagggccga

SEQ ID NO: 426210 - RNA, 19 nt, Artificial Sequence
  Description of Artificial Sequence: Synthetic oligonucleotide
gugauccaccuggaaaaug

SEQ ID NO: 426211 - RNA, 19 nt, Artificial Sequence
  Description of Artificial Sequence: Synthetic oligonucleotide
agugggcguucguuuucag

SEQ ID NO: 426212 - RNA, 19 nt, Artificial Sequence
  Description of Artificial Sequence: Synthetic oligonucleotide
guugcacccuucagagucc

SEQ ID NO: 426213 - RNA, 19 nt, Artificial Sequence
  Description of Artificial Sequence: Synthetic oligonucleotide
aucuggggugguaugugug

SEQ ID NO: 426214 - RNA, 19 nt, Artificial Sequence
  Description of Artificial Sequence: Synthetic oligonucleotide
gcgugucguacuuggcucg

SEQ ID NO: 426215 - RNA, 19 nt, Artificial Sequence
  Description of Artificial Sequence: Synthetic oligonucleotide
auccuuacucagaccagcu

SEQ ID NO: 426216 - RNA, 19 nt, Artificial Sequence
  Description of Artificial Sequence: Synthetic oligonucleotide
gacccuuuagccaacgauu

SEQ ID NO: 426217 - RNA, 19 nt, Artificial Sequence
  Description of Artificial Sequence: Synthetic oligonucleotide
ucuuaccaucccggcaaga

SEQ ID NO: 426218 - RNA, 19 nt, Artificial Sequence
  Description of Artificial Sequence: Synthetic oligonucleotide
ccaacgauuagaaaggauu

SEQ ID NO: 426219 - RNA, 19 nt, Artificial Sequence
  Description of Artificial Sequence: Synthetic oligonucleotide
gugacacgguggcaccugc

SEQ ID NO: 426220 - RNA, 19 nt, Artificial Sequence
  Description of Artificial Sequence: Synthetic oligonucleotide
caaacauaccaagcccuga

SEQ ID NO: 426221 - RNA, 19 nt, Artificial Sequence
  Description of Artificial Sequence: Synthetic oligonucleotide
ggcgugucguacuuggcuc

SEQ ID NO: 426222 - RNA, 19 nt, Artificial Sequence
  Description of Artificial Sequence: Synthetic oligonucleotide
gugaaagcggccagcaucu

SEQ ID NO: 426223 - RNA, 19 nt, Artificial Sequence
  Description of Artificial Sequence: Synthetic oligonucleotide
auacuagcugucaccgcca

SEQ ID NO: 426224 - RNA, 19 nt, Artificial Sequence
  Description of Artificial Sequence: Synthetic oligonucleotide
acccuuuagccaacgauua

SEQ ID NO: 426225 - RNA, 19 nt, Artificial Sequence
  Description of Artificial Sequence: Synthetic oligonucleotide
aucuggccgccuggcaagc

SEQ ID NO: 426226 - RNA, 19 nt, Artificial Sequence
  Description of Artificial Sequence: Synthetic oligonucleotide
caacgccaaccauucucac

SEQ ID NO: 426227 - RNA, 19 nt, Artificial Sequence
  Description of Artificial Sequence: Synthetic oligonucleotide
gugggcaucuuccggucuc

SEQ ID NO: 426228 - RNA, 19 nt, Artificial Sequence
  Description of Artificial Sequence: Synthetic oligonucleotide
agccaacgauuagaaagga

SEQ ID NO: 426229 - RNA, 19 nt, Artificial Sequence
  Description of Artificial Sequence: Synthetic oligonucleotide
agcacuggagacguagcuu

SEQ ID NO: 426230 - RNA, 19 nt, Artificial Sequence
  Description of Artificial Sequence: Synthetic oligonucleotide
cuggcugaaaauggucuca

SEQ ID NO: 426231 - RNA, 19 nt, Artificial Sequence
  Description of Artificial Sequence: Synthetic oligonucleotide
ugaucucggguugcaccca

SEQ ID NO: 426232 - RNA, 19 nt, Artificial Sequence
  Description of Artificial Sequence: Synthetic oligonucleotide
cuuccggucucgguuuaug

SEQ ID NO: 426233 - RNA, 19 nt, Artificial Sequence
  Description of Artificial Sequence: Synthetic oligonucleotide
agcaauccccaugccugag

SEQ ID NO: 426234 - RNA, 19 nt, Artificial Sequence
  Description of Artificial Sequence: Synthetic oligonucleotide
gggucugaugaaugacagc

SEQ ID NO: 426235 - RNA, 19 nt, Artificial Sequence
  Description of Artificial Sequence: Synthetic oligonucleotide
cucggguugcacccacaug

SEQ ID NO: 426236 - RNA, 19 nt, Artificial Sequence
  Description of Artificial Sequence: Synthetic oligonucleotide
cugucaccgccagaggcug

SEQ ID NO: 426237 - RNA, 19 nt, Artificial Sequence
  Description of Artificial Sequence: Synthetic oligonucleotide
auggggugucaugagccca

SEQ ID NO: 426238 - RNA, 19 nt, Artificial Sequence
  Description of Artificial Sequence: Synthetic oligonucleotide
ccucaacggugcuucacgc

SEQ ID NO: 426239 - RNA, 19 nt, Artificial Sequence
  Description of Artificial Sequence: Synthetic oligonucleotide
gagguaccccaaacauacc

SEQ ID NO: 426240 - RNA, 19 nt, Artificial Sequence
  Description of Artificial Sequence: Synthetic oligonucleotide
cucgguuuaugaggcagca

SEQ ID NO: 426241 - RNA, 19 nt, Artificial Sequence
  Description of Artificial Sequence: Synthetic oligonucleotide
acccguguccacagguguc

SEQ ID NO: 426242 - RNA, 19 nt, Artificial Sequence
  Description of Artificial Sequence: Synthetic oligonucleotide
uucacgcgcucagcacggg

SEQ ID NO: 426243 - RNA, 19 nt, Artificial Sequence
  Description of Artificial Sequence: Synthetic oligonucleotide
cccuuaucuccaaaccuuc

SEQ ID NO: 426244 - RNA, 19 nt, Artificial Sequence
  Description of Artificial Sequence: Synthetic oligonucleotide
agggcgugucguacuuggc

SEQ ID NO: 426245 - RNA, 19 nt, Artificial Sequence
  Description of Artificial Sequence: Synthetic oligonucleotide
agguacagggcaacucaga

SEQ ID NO: 426246 - RNA, 19 nt, Artificial Sequence
  Description of Artificial Sequence: Synthetic oligonucleotide
ucgguuuaugaggcagcaa

SEQ ID NO: 426247 - RNA, 19 nt, Artificial Sequence
  Description of Artificial Sequence: Synthetic oligonucleotide
aucugacccuuuagccaac

SEQ ID NO: 426248 - RNA, 19 nt, Artificial Sequence
  Description of Artificial Sequence: Synthetic oligonucleotide
auagggcgugucguacuug

SEQ ID NO: 426249 - RNA, 19 nt, Artificial Sequence
  Description of Artificial Sequence: Synthetic oligonucleotide
ggcgguaagggaagaagca

SEQ ID NO: 426250 - RNA, 19 nt, Artificial Sequence
  Description of Artificial Sequence: Synthetic oligonucleotide
gccugcgugacacgguggc

SEQ ID NO: 426251 - RNA, 19 nt, Artificial Sequence
  Description of Artificial Sequence: Synthetic oligonucleotide
agggccgagugagaugacu

SEQ ID NO: 426252 - RNA, 19 nt, Artificial Sequence
  Description of Artificial Sequence: Synthetic oligonucleotide
acauucuaggucagugauu

SEQ ID NO: 426253 - RNA, 19 nt, Artificial Sequence
  Description of Artificial Sequence: Synthetic oligonucleotide
ggacggacaagacuuugua

SEQ ID NO: 426254 - RNA, 19 nt, Artificial Sequence
  Description of Artificial Sequence: Synthetic oligonucleotide
cuucaccuauguaccugga

SEQ ID NO: 426255 - RNA, 19 nt, Artificial Sequence
  Description of Artificial Sequence: Synthetic oligonucleotide
ggacaagacuuuguacuuc

SEQ ID NO: 426256 - RNA, 19 nt, Artificial Sequence
  Description of Artificial Sequence: Synthetic oligonucleotide
acgcgcucagcacgggcca

SEQ ID NO: 426257 - RNA, 19 nt, Artificial Sequence
  Description of Artificial Sequence: Synthetic oligonucleotide
gcacgggccagcccgacac

SEQ ID NO: 426258 - RNA, 19 nt, Artificial Sequence
  Description of Artificial Sequence: Synthetic oligonucleotide
uggggugguaugugugcuu

SEQ ID NO: 426259 - RNA, 19 nt, Artificial Sequence
  Description of Artificial Sequence: Synthetic oligonucleotide
ggagacguagcuucgugau

SEQ ID NO: 426260 - RNA, 19 nt, Artificial Sequence
  Description of Artificial Sequence: Synthetic oligonucleotide
ugcacccuucagaguccca

SEQ ID NO: 426261 - RNA, 19 nt, Artificial Sequence
  Description of Artificial Sequence: Synthetic oligonucleotide
auaguccaggagaauuauu

SEQ ID NO: 426262 - RNA, 19 nt, Artificial Sequence
  Description of Artificial Sequence: Synthetic oligonucleotide
gucucuuggcuggaauguc

SEQ ID NO: 426263 - RNA, 19 nt, Artificial Sequence
  Description of Artificial Sequence: Synthetic oligonucleotide
guucguuuucagucaaguu

SEQ ID NO: 426264 - RNA, 19 nt, Artificial Sequence
  Description of Artificial Sequence: Synthetic oligonucleotide
ccagaugauauagggcgug

SEQ ID NO: 426265 - RNA, 19 nt, Artificial Sequence
  Description of Artificial Sequence: Synthetic oligonucleotide
cgagcauauuacagaggcc

SEQ ID NO: 426266 - RNA, 19 nt, Artificial Sequence
  Description of Artificial Sequence: Synthetic oligonucleotide
ggggcagcguuugaagaug

SEQ ID NO: 426267 - RNA, 19 nt, Artificial Sequence
  Description of Artificial Sequence: Synthetic oligonucleotide
augccauucuggacccuug

SEQ ID NO: 426268 - RNA, 19 nt, Artificial Sequence
  Description of Artificial Sequence: Synthetic oligonucleotide
gccgagugagaugacuggc

SEQ ID NO: 426269 - RNA, 19 nt, Artificial Sequence
  Description of Artificial Sequence: Synthetic oligonucleotide
cccgacacuguccagguaa

SEQ ID NO: 426270 - RNA, 19 nt, Artificial Sequence
  Description of Artificial Sequence: Synthetic oligonucleotide
cagaugugauuuucacaua

SEQ ID NO: 426271 - RNA, 19 nt, Artificial Sequence
  Description of Artificial Sequence: Synthetic oligonucleotide
cuuucgaagcacagauaau

SEQ ID NO: 426272 - RNA, 19 nt, Artificial Sequence
  Description of Artificial Sequence: Synthetic oligonucleotide
acccaggcugccauaacua

SEQ ID NO: 426273 - RNA, 19 nt, Artificial Sequence
  Description of Artificial Sequence: Synthetic oligonucleotide
ggguugcacccacaugaac

SEQ ID NO: 426274 - RNA, 19 nt, Artificial Sequence
  Description of Artificial Sequence: Synthetic oligonucleotide
ucuggccgccuggcaagcc

SEQ ID NO: 426275 - RNA, 19 nt, Artificial Sequence
  Description of Artificial Sequence: Synthetic oligonucleotide
cacagggcccucccuuauc

SEQ ID NO: 426276 - RNA, 19 nt, Artificial Sequence
  Description of Artificial Sequence: Synthetic oligonucleotide
ccaggagaauuauugccaa

SEQ ID NO: 426277 - RNA, 19 nt, Artificial Sequence
  Description of Artificial Sequence: Synthetic oligonucleotide
ccgacacuguccagguaag

SEQ ID NO: 426278 - RNA, 19 nt, Artificial Sequence
  Description of Artificial Sequence: Synthetic oligonucleotide
guagcuucgugaugagguu

SEQ ID NO: 426279 - RNA, 19 nt, Artificial Sequence
  Description of Artificial Sequence: Synthetic oligonucleotide
gggugucaugagcccaagc

SEQ ID NO: 426280 - RNA, 19 nt, Artificial Sequence
  Description of Artificial Sequence: Synthetic oligonucleotide
ccagguaagucccagcccu

SEQ ID NO: 426281 - RNA, 19 nt, Artificial Sequence
  Description of Artificial Sequence: Synthetic oligonucleotide
cagagugauccaccuggaa

SEQ ID NO: 426282 - RNA, 19 nt, Artificial Sequence
  Description of Artificial Sequence: Synthetic oligonucleotide
ugggguugccuggcccuug

SEQ ID NO: 426283 - RNA, 19 nt, Artificial Sequence
  Description of Artificial Sequence: Synthetic oligonucleotide
ccaccaggcgguaagggaa

SEQ ID NO: 426284 - RNA, 19 nt, Artificial Sequence
  Description of Artificial Sequence: Synthetic oligonucleotide
acaaagcgacauacaguuu

SEQ ID NO: 426285 - RNA, 19 nt, Artificial Sequence
  Description of Artificial Sequence: Synthetic oligonucleotide
ggaaggcggcccacaaagc

SEQ ID NO: 426286 - RNA, 19 nt, Artificial Sequence
  Description of Artificial Sequence: Synthetic oligonucleotide
gcauauuacagaggcccaa

SEQ ID NO: 426287 - RNA, 19 nt, Artificial Sequence
  Description of Artificial Sequence: Synthetic oligonucleotide
gugggcguucguuuucagu

SEQ ID NO: 426288 - RNA, 19 nt, Artificial Sequence
  Description of Artificial Sequence: Synthetic oligonucleotide
cagacuccuucaccuaugu

SEQ ID NO: 426289 - RNA, 19 nt, Artificial Sequence
  Description of Artificial Sequence: Synthetic oligonucleotide
cgauuagaaaggauuccaa

SEQ ID NO: 426290 - RNA, 19 nt, Artificial Sequence
  Description of Artificial Sequence: Synthetic oligonucleotide
ggcguucguuuucagucaa

SEQ ID NO: 426291 - RNA, 19 nt, Artificial Sequence
  Description of Artificial Sequence: Synthetic oligonucleotide
gcgguaagggaagaagcaa

SEQ ID NO: 426292 - RNA, 19 nt, Artificial Sequence
  Description of Artificial Sequence: Synthetic oligonucleotide
ccacaaagcgacauacagu

SEQ ID NO: 426293 - RNA, 19 nt, Artificial Sequence
  Description of Artificial Sequence: Synthetic oligonucleotide
gggcgugucguacuuggcu

SEQ ID NO: 426294 - RNA, 19 nt, Artificial Sequence
  Description of Artificial Sequence: Synthetic oligonucleotide
gaagccugcgugacacggu

SEQ ID NO: 426295 - RNA, 19 nt, Artificial Sequence
  Description of Artificial Sequence: Synthetic oligonucleotide
ccacccguguccacaggug

SEQ ID NO: 426296 - RNA, 19 nt, Artificial Sequence
  Description of Artificial Sequence: Synthetic oligonucleotide
ggcccuacccaaagccuug

SEQ ID NO: 426297 - RNA, 19 nt, Artificial Sequence
  Description of Artificial Sequence: Synthetic oligonucleotide
cacccguguccacaggugu

SEQ ID NO: 426298 - RNA, 19 nt, Artificial Sequence
  Description of Artificial Sequence: Synthetic oligonucleotide
ccaagaugggucugaugaa

SEQ ID NO: 426299 - RNA, 19 nt, Artificial Sequence
  Description of Artificial Sequence: Synthetic oligonucleotide
ggacaucccaucugacccu

SEQ ID NO: 426300 - RNA, 19 nt, Artificial Sequence
  Description of Artificial Sequence: Synthetic oligonucleotide
gggagguaccccaaacaua

SEQ ID NO: 426301 - RNA, 19 nt, Artificial Sequence
  Description of Artificial Sequence: Synthetic oligonucleotide
cagaugauauagggcgugu

SEQ ID NO: 426302 - RNA, 19 nt, Artificial Sequence
  Description of Artificial Sequence: Synthetic oligonucleotide
gacccagacuuggagcuuu

SEQ ID NO: 426303 - RNA, 19 nt, Artificial Sequence
  Description of Artificial Sequence: Synthetic oligonucleotide
cauggaaauugcccuucuu

SEQ ID NO: 426304 - RNA, 19 nt, Artificial Sequence
  Description of Artificial Sequence: Synthetic oligonucleotide
gggcaucuuccggucucgg

SEQ ID NO: 426305 - RNA, 19 nt, Artificial Sequence
  Description of Artificial Sequence: Synthetic oligonucleotide
cccgaaaagccaaguguua

SEQ ID NO: 426306 - RNA, 19 nt, Artificial Sequence
  Description of Artificial Sequence: Synthetic oligonucleotide
gcuagugggcguucguuuu

SEQ ID NO: 426307 - RNA, 19 nt, Artificial Sequence
  Description of Artificial Sequence: Synthetic oligonucleotide
gacaucccaucugacccuu

SEQ ID NO: 426308 - RNA, 19 nt, Artificial Sequence
  Description of Artificial Sequence: Synthetic oligonucleotide
gggcagcguuugaagauga

SEQ ID NO: 426309 - RNA, 19 nt, Artificial Sequence
  Description of Artificial Sequence: Synthetic oligonucleotide
gaaccccguuccugaugua

SEQ ID NO: 426310 - RNA, 19 nt, Artificial Sequence
  Description of Artificial Sequence: Synthetic oligonucleotide
gugagaugacuggccauuu

SEQ ID NO: 426311 - RNA, 19 nt, Artificial Sequence
  Description of Artificial Sequence: Synthetic oligonucleotide
ccgugggcaucuuccgguc

SEQ ID NO: 426312 - RNA, 19 nt, Artificial Sequence
  Description of Artificial Sequence: Synthetic oligonucleotide
gugucguacuuggcucgaa

SEQ ID NO: 426313 - RNA, 19 nt, Artificial Sequence
  Description of Artificial Sequence: Synthetic oligonucleotide
gcccacccguguccacagg

SEQ ID NO: 426314 - RNA, 19 nt, Artificial Sequence
  Description of Artificial Sequence: Synthetic oligonucleotide
gugcaccauggcgccgaac

SEQ ID NO: 426315 - RNA, 19 nt, Artificial Sequence
  Description of Artificial Sequence: Synthetic oligonucleotide
cguucguuuucagucaagu

SEQ ID NO: 426316 - RNA, 19 nt, Artificial Sequence
  Description of Artificial Sequence: Synthetic oligonucleotide
gccaacgauuagaaaggau

SEQ ID NO: 426317 - RNA, 19 nt, Artificial Sequence
  Description of Artificial Sequence: Synthetic oligonucleotide
gcauggguagggugggguu

SEQ ID NO: 426318 - RNA, 19 nt, Artificial Sequence
  Description of Artificial Sequence: Synthetic oligonucleotide
ggcagcguuugaagaugaa

SEQ ID NO: 426319 - RNA, 19 nt, Artificial Sequence
  Description of Artificial Sequence: Synthetic oligonucleotide
cccaaccccaguguguggu

SEQ ID NO: 426320 - RNA, 19 nt, Artificial Sequence
  Description of Artificial Sequence: Synthetic oligonucleotide
ccaucuugccaaagagauu

SEQ ID NO: 426321 - RNA, 19 nt, Artificial Sequence
  Description of Artificial Sequence: Synthetic oligonucleotide
gugcuugaucuggccgccu

SEQ ID NO: 426322 - RNA, 19 nt, Artificial Sequence
  Description of Artificial Sequence: Synthetic oligonucleotide
ccgaacaccagggguuucu

SEQ ID NO: 426323 - RNA, 19 nt, Artificial Sequence
  Description of Artificial Sequence: Synthetic oligonucleotide
ccugcgugacacgguggca

SEQ ID NO: 426324 - RNA, 19 nt, Artificial Sequence
  Description of Artificial Sequence: Synthetic oligonucleotide
ggaggacggacaagacuuu

SEQ ID NO: 426325 - RNA, 19 nt, Artificial Sequence
  Description of Artificial Sequence: Synthetic oligonucleotide
gcggcccacaaagcgacau

SEQ ID NO: 426326 - RNA, 19 nt, Artificial Sequence
  Description of Artificial Sequence: Synthetic oligonucleotide
cacgggccagcccgacacu

SEQ ID NO: 426327 - RNA, 19 nt, Artificial Sequence
  Description of Artificial Sequence: Synthetic oligonucleotide
cgugucguacuuggcucga

SEQ ID NO: 426328 - RNA, 19 nt, Artificial Sequence
  Description of Artificial Sequence: Synthetic oligonucleotide
gcgagccccaccaggcggu

SEQ ID NO: 426329 - RNA, 19 nt, Artificial Sequence
  Description of Artificial Sequence: Synthetic oligonucleotide
ggcggcccacaaagcgaca

SEQ ID NO: 426330 - RNA, 19 nt, Artificial Sequence
  Description of Artificial Sequence: Synthetic oligonucleotide
gcgugacacgguggcaccu

SEQ ID NO: 426331 - RNA, 19 nt, Artificial Sequence
  Description of Artificial Sequence: Synthetic oligonucleotide
gcccgacacuguccaggua

SEQ ID NO: 426332 - RNA, 19 nt, Artificial Sequence
  Description of Artificial Sequence: Synthetic oligonucleotide
cgaagucuuggggcagcgu

SEQ ID NO: 426333 - RNA, 19 nt, Artificial Sequence
  Description of Artificial Sequence: Synthetic oligonucleotide
auaacuucuaaauauacac

SEQ ID NO: 426334 - RNA, 19 nt, Artificial Sequence
  Description of Artificial Sequence: Synthetic oligonucleotide
aacuucuaaauauacacac

SEQ ID NO: 426335 - RNA, 19 nt, Artificial Sequence
  Description of Artificial Sequence: Synthetic oligonucleotide
auaguaucgaucuuaaagc

SEQ ID NO: 426336 - RNA, 19 nt, Artificial Sequence
  Description of Artificial Sequence: Synthetic oligonucleotide
ucuaaaucagucuugauag

SEQ ID NO: 426337 - RNA, 19 nt, Artificial Sequence
  Description of Artificial Sequence: Synthetic oligonucleotide
uuuaaaaccauucaugaca

SEQ ID NO: 426338 - RNA, 19 nt, Artificial Sequence
  Description of Artificial Sequence: Synthetic oligonucleotide
uguagaucaagcuauaucc

SEQ ID NO: 426339 - RNA, 19 nt, Artificial Sequence
  Description of Artificial Sequence: Synthetic oligonucleotide
uccguuacagacuagaagg

SEQ ID NO: 426340 - RNA, 19 nt, Artificial Sequence
  Description of Artificial Sequence: Synthetic oligonucleotide
ugaggcauaaguuucaggg

SEQ ID NO: 426341 - RNA, 19 nt, Artificial Sequence
  Description of Artificial Sequence: Synthetic oligonucleotide
agcaagauggcuuagagag

SEQ ID NO: 426342 - RNA, 19 nt, Artificial Sequence
  Description of Artificial Sequence: Synthetic oligonucleotide
aacuggucuauccaaaugg

SEQ ID NO: 426343 - RNA, 19 nt, Artificial Sequence
  Description of Artificial Sequence: Synthetic oligonucleotide
acagauuucagcgucaugc

SEQ ID NO: 426344 - RNA, 19 nt, Artificial Sequence
  Description of Artificial Sequence: Synthetic oligonucleotide
cauaguaucgaucuuaaag

SEQ ID NO: 426345 - RNA, 19 nt, Artificial Sequence
  Description of Artificial Sequence: Synthetic oligonucleotide
uccguuacagauuucagcg

SEQ ID NO: 426346 - RNA, 19 nt, Artificial Sequence
  Description of Artificial Sequence: Synthetic oligonucleotide
ucucaaaugggauuuaugc

SEQ ID NO: 426347 - RNA, 19 nt, Artificial Sequence
  Description of Artificial Sequence: Synthetic oligonucleotide
aguaaugcuaauuuaacca

SEQ ID NO: 426348 - RNA, 19 nt, Artificial Sequence
  Description of Artificial Sequence: Synthetic oligonucleotide
aaagaugcacauuauuaag

SEQ ID NO: 426349 - RNA, 19 nt, Artificial Sequence
  Description of Artificial Sequence: Synthetic oligonucleotide
aggaguuugagucuuacgg

SEQ ID NO: 426350 - RNA, 19 nt, Artificial Sequence
  Description of Artificial Sequence: Synthetic oligonucleotide
uuaaaaccauucaugacag

SEQ ID NO: 426351 - RNA, 19 nt, Artificial Sequence
  Description of Artificial Sequence: Synthetic oligonucleotide
auaguauacacacaggcug

SEQ ID NO: 426352 - RNA, 19 nt, Artificial Sequence
  Description of Artificial Sequence: Synthetic oligonucleotide
uuaaguaaugcuaauuuaa

SEQ ID NO: 426353 - RNA, 19 nt, Artificial Sequence
  Description of Artificial Sequence: Synthetic oligonucleotide
uucuaauaccguuacaucc

SEQ ID NO: 426354 - RNA, 19 nt, Artificial Sequence
  Description of Artificial Sequence: Synthetic oligonucleotide
uucuuagccauaauuuugg

SEQ ID NO: 426355 - RNA, 19 nt, Artificial Sequence
  Description of Artificial Sequence: Synthetic oligonucleotide
ugaaacuaaagacuucuug

SEQ ID NO: 426356 - RNA, 19 nt, Artificial Sequence
  Description of Artificial Sequence: Synthetic oligonucleotide
aaauaugucaacuggugau

SEQ ID NO: 426357 - RNA, 19 nt, Artificial Sequence
  Description of Artificial Sequence: Synthetic oligonucleotide
ucuaauaccguuacauccc

SEQ ID NO: 426358 - RNA, 19 nt, Artificial Sequence
  Description of Artificial Sequence: Synthetic oligonucleotide
aucuagacgaacuucauca

SEQ ID NO: 426359 - RNA, 19 nt, Artificial Sequence
  Description of Artificial Sequence: Synthetic oligonucleotide
uacaaucccuucuuuaugg

SEQ ID NO: 426360 - RNA, 19 nt, Artificial Sequence
  Description of Artificial Sequence: Synthetic oligonucleotide
uuaguauagacauaguaua

SEQ ID NO: 426361 - RNA, 19 nt, Artificial Sequence
  Description of Artificial Sequence: Synthetic oligonucleotide
uccaaguagaucuuuucgg

SEQ ID NO: 426362 - RNA, 19 nt, Artificial Sequence
  Description of Artificial Sequence: Synthetic oligonucleotide
ucggacauaaacaggauga

SEQ ID NO: 426363 - RNA, 19 nt, Artificial Sequence
  Description of Artificial Sequence: Synthetic oligonucleotide
aauguguaguauucucugg

SEQ ID NO: 426364 - RNA, 19 nt, Artificial Sequence
  Description of Artificial Sequence: Synthetic oligonucleotide
ugcagggauaauaauaaug

SEQ ID NO: 426365 - RNA, 19 nt, Artificial Sequence
  Description of Artificial Sequence: Synthetic oligonucleotide
uacauaguuggucuucacg

SEQ ID NO: 426366 - RNA, 19 nt, Artificial Sequence
  Description of Artificial Sequence: Synthetic oligonucleotide
gguacugugacacuaauug

SEQ ID NO: 426367 - RNA, 19 nt, Artificial Sequence
  Description of Artificial Sequence: Synthetic oligonucleotide
acauuuauaaccuguauuu

SEQ ID NO: 426368 - RNA, 19 nt, Artificial Sequence
  Description of Artificial Sequence: Synthetic oligonucleotide
aaaagcgucuaucaaaaua

SEQ ID NO: 426369 - RNA, 19 nt, Artificial Sequence
  Description of Artificial Sequence: Synthetic oligonucleotide
aauaggcugcuucguacgc

SEQ ID NO: 426370 - RNA, 19 nt, Artificial Sequence
  Description of Artificial Sequence: Synthetic oligonucleotide
ugcuaauuuaaccaauaga

SEQ ID NO: 426371 - RNA, 19 nt, Artificial Sequence
  Description of Artificial Sequence: Synthetic oligonucleotide
auaaccuguauuuauuucu

SEQ ID NO: 426372 - RNA, 19 nt, Artificial Sequence
  Description of Artificial Sequence: Synthetic oligonucleotide
ucucuccuuaucaagacgc

SEQ ID NO: 426373 - RNA, 19 nt, Artificial Sequence
  Description of Artificial Sequence: Synthetic oligonucleotide
acagcuacaacccgauccc

SEQ ID NO: 426374 - RNA, 19 nt, Artificial Sequence
  Description of Artificial Sequence: Synthetic oligonucleotide
gagucuuacgggcagaugc

SEQ ID NO: 426375 - RNA, 19 nt, Artificial Sequence
  Description of Artificial Sequence: Synthetic oligonucleotide
uacacuuuaaucuuuguuu

SEQ ID NO: 426376 - RNA, 19 nt, Artificial Sequence
  Description of Artificial Sequence: Synthetic oligonucleotide
uggucuacuacucuauaag

SEQ ID NO: 426377 - RNA, 19 nt, Artificial Sequence
  Description of Artificial Sequence: Synthetic oligonucleotide
caaauggcgcuuaugauag

SEQ ID NO: 426378 - RNA, 19 nt, Artificial Sequence
  Description of Artificial Sequence: Synthetic oligonucleotide
gagauauccaaguagaucu

SEQ ID NO: 426379 - RNA, 19 nt, Artificial Sequence
  Description of Artificial Sequence: Synthetic oligonucleotide
aaaauagaauccaaugugu

SEQ ID NO: 426380 - RNA, 19 nt, Artificial Sequence
  Description of Artificial Sequence: Synthetic oligonucleotide
aauaugucaacuggugauc

SEQ ID NO: 426381 - RNA, 19 nt, Artificial Sequence
  Description of Artificial Sequence: Synthetic oligonucleotide
uagacgaacuucaucauac

SEQ ID NO: 426382 - RNA, 19 nt, Artificial Sequence
  Description of Artificial Sequence: Synthetic oligonucleotide
augggauuuaugcuuuacc

SEQ ID NO: 426383 - RNA, 19 nt, Artificial Sequence
  Description of Artificial Sequence: Synthetic oligonucleotide
aguucuagagucuuaaaau

SEQ ID NO: 426384 - RNA, 19 nt, Artificial Sequence
  Description of Artificial Sequence: Synthetic oligonucleotide
ugggauuuaugcuuuacca

SEQ ID NO: 426385 - RNA, 19 nt, Artificial Sequence
  Description of Artificial Sequence: Synthetic oligonucleotide
ucaaaugggauuuaugcuu

SEQ ID NO: 426386 - RNA, 19 nt, Artificial Sequence
  Description of Artificial Sequence: Synthetic oligonucleotide
cauugagauauccaaguag

SEQ ID NO: 426387 - RNA, 19 nt, Artificial Sequence
  Description of Artificial Sequence: Synthetic oligonucleotide
gauuuaauaguuacuuccc

SEQ ID NO: 426388 - RNA, 19 nt, Artificial Sequence
  Description of Artificial Sequence: Synthetic oligonucleotide
uaagcaugguuauuaaaga

SEQ ID NO: 426389 - RNA, 19 nt, Artificial Sequence
  Description of Artificial Sequence: Synthetic oligonucleotide
acacuaauugcugugcccc

SEQ ID NO: 426390 - RNA, 19 nt, Artificial Sequence
  Description of Artificial Sequence: Synthetic oligonucleotide
aacuggucuagguacaggu

SEQ ID NO: 426391 - RNA, 19 nt, Artificial Sequence
  Description of Artificial Sequence: Synthetic oligonucleotide
uaugcuuuaccauguaccu

SEQ ID NO: 426392 - RNA, 19 nt, Artificial Sequence
  Description of Artificial Sequence: Synthetic oligonucleotide
ugcuucguacgcaaugugg

SEQ ID NO: 426393 - RNA, 19 nt, Artificial Sequence
  Description of Artificial Sequence: Synthetic oligonucleotide
uaguaucgaucuuaaagcc

SEQ ID NO: 426394 - RNA, 19 nt, Artificial Sequence
  Description of Artificial Sequence: Synthetic oligonucleotide
gaauaggcugcuucguacg

SEQ ID NO: 426395 - RNA, 19 nt, Artificial Sequence
  Description of Artificial Sequence: Synthetic oligonucleotide
uuuauaaccuguauuuauu

SEQ ID NO: 426396 - RNA, 19 nt, Artificial Sequence
  Description of Artificial Sequence: Synthetic oligonucleotide
gaugcacauuauuaaguag

SEQ ID NO: 426397 - RNA, 19 nt, Artificial Sequence
  Description of Artificial Sequence: Synthetic oligonucleotide
ucuuuucuuagccauaauu

SEQ ID NO: 426398 - RNA, 19 nt, Artificial Sequence
  Description of Artificial Sequence: Synthetic oligonucleotide
cuuuauggccuuccaaucg

SEQ ID NO: 426399 - RNA, 19 nt, Artificial Sequence
  Description of Artificial Sequence: Synthetic oligonucleotide
aaucagucuugauaguaga

SEQ ID NO: 426400 - RNA, 19 nt, Artificial Sequence
  Description of Artificial Sequence: Synthetic oligonucleotide
aaaguuugcuuguauggau

SEQ ID NO: 426401 - RNA, 19 nt, Artificial Sequence
  Description of Artificial Sequence: Synthetic oligonucleotide
uaucuaugcucgcugaugu

SEQ ID NO: 426402 - RNA, 19 nt, Artificial Sequence
  Description of Artificial Sequence: Synthetic oligonucleotide
auaguuggucuucacguuc

SEQ ID NO: 426403 - RNA, 19 nt, Artificial Sequence
  Description of Artificial Sequence: Synthetic oligonucleotide
uaauaauggguguucguga

SEQ ID NO: 426404 - RNA, 19 nt, Artificial Sequence
  Description of Artificial Sequence: Synthetic oligonucleotide
aaaucagucuugauaguag

SEQ ID NO: 426405 - RNA, 19 nt, Artificial Sequence
  Description of Artificial Sequence: Synthetic oligonucleotide
gaguuugagucuuacgggc

SEQ ID NO: 426406 - RNA, 19 nt, Artificial Sequence
  Description of Artificial Sequence: Synthetic oligonucleotide
uaguauagacauaguauac

SEQ ID NO: 426407 - RNA, 19 nt, Artificial Sequence
  Description of Artificial Sequence: Synthetic oligonucleotide
aaacuggucuauccaaaug

SEQ ID NO: 426408 - RNA, 19 nt, Artificial Sequence
  Description of Artificial Sequence: Synthetic oligonucleotide
ucgaucuuaaagccuuccg

SEQ ID NO: 426409 - RNA, 19 nt, Artificial Sequence
  Description of Artificial Sequence: Synthetic oligonucleotide
cuauaagguacugugacac

SEQ ID NO: 426410 - RNA, 19 nt, Artificial Sequence
  Description of Artificial Sequence: Synthetic oligonucleotide
uuuauggccuuccaaucga

SEQ ID NO: 426411 - RNA, 19 nt, Artificial Sequence
  Description of Artificial Sequence: Synthetic oligonucleotide
agauggaaggcuuuaauuu

SEQ ID NO: 426412 - RNA, 19 nt, Artificial Sequence
  Description of Artificial Sequence: Synthetic oligonucleotide
auaugucaacuggugaucc

SEQ ID NO: 426413 - RNA, 19 nt, Artificial Sequence
  Description of Artificial Sequence: Synthetic oligonucleotide
cucuauaagguacugugac

SEQ ID NO: 426414 - RNA, 19 nt, Artificial Sequence
  Description of Artificial Sequence: Synthetic oligonucleotide
uguacaaucccuucuuuau

SEQ ID NO: 426415 - RNA, 19 nt, Artificial Sequence
  Description of Artificial Sequence: Synthetic oligonucleotide
uuacagauugaagaauugc

SEQ ID NO: 426416 - RNA, 19 nt, Artificial Sequence
  Description of Artificial Sequence: Synthetic oligonucleotide
uguagaagaucuuuugcau

SEQ ID NO: 426417 - RNA, 19 nt, Artificial Sequence
  Description of Artificial Sequence: Synthetic oligonucleotide
auagaauccaauguguagu

SEQ ID NO: 426418 - RNA, 19 nt, Artificial Sequence
  Description of Artificial Sequence: Synthetic oligonucleotide
uauccaauguuucccaaaa

SEQ ID NO: 426419 - RNA, 19 nt, Artificial Sequence
  Description of Artificial Sequence: Synthetic oligonucleotide
agccuaauaacuucuaaau

SEQ ID NO: 426420 - RNA, 19 nt, Artificial Sequence
  Description of Artificial Sequence: Synthetic oligonucleotide
uguaccuauccaauguuuc

SEQ ID NO: 426421 - RNA, 19 nt, Artificial Sequence
  Description of Artificial Sequence: Synthetic oligonucleotide
ugugacacuaauugcugug

SEQ ID NO: 426422 - RNA, 19 nt, Artificial Sequence
  Description of Artificial Sequence: Synthetic oligonucleotide
gaggaaucaaaagauucag

SEQ ID NO: 426423 - RNA, 19 nt, Artificial Sequence
  Description of Artificial Sequence: Synthetic oligonucleotide
aagcaugguuauuaaagaa

SEQ ID NO: 426424 - RNA, 19 nt, Artificial Sequence
  Description of Artificial Sequence: Synthetic oligonucleotide
uuccguuacagauuucagc

SEQ ID NO: 426425 - RNA, 19 nt, Artificial Sequence
  Description of Artificial Sequence: Synthetic oligonucleotide
agaccuaaucugcucaguc

SEQ ID NO: 426426 - RNA, 19 nt, Artificial Sequence
  Description of Artificial Sequence: Synthetic oligonucleotide
cugacaauaucucugguca

SEQ ID NO: 426427 - RNA, 19 nt, Artificial Sequence
  Description of Artificial Sequence: Synthetic oligonucleotide
aauaccguuacaucccauu

SEQ ID NO: 426428 - RNA, 19 nt, Artificial Sequence
  Description of Artificial Sequence: Synthetic oligonucleotide
uuaagggcaguuaugucau

SEQ ID NO: 426429 - RNA, 19 nt, Artificial Sequence
  Description of Artificial Sequence: Synthetic oligonucleotide
cuacuacucuauaagguac

SEQ ID NO: 426430 - RNA, 19 nt, Artificial Sequence
  Description of Artificial Sequence: Synthetic oligonucleotide
ucuauaagguacugugaca

SEQ ID NO: 426431 - RNA, 19 nt, Artificial Sequence
  Description of Artificial Sequence: Synthetic oligonucleotide
uauuaguguuucauuuucu

SEQ ID NO: 426432 - RNA, 19 nt, Artificial Sequence
  Description of Artificial Sequence: Synthetic oligonucleotide
uuagagagccuaauaacuu

SEQ ID NO: 426433 - RNA, 19 nt, Artificial Sequence
  Description of Artificial Sequence: Synthetic oligonucleotide
accuaaucugcucagucug

SEQ ID NO: 426434 - RNA, 19 nt, Artificial Sequence
  Description of Artificial Sequence: Synthetic oligonucleotide
ugaugcuuccccauugaga

SEQ ID NO: 426435 - RNA, 19 nt, Artificial Sequence
  Description of Artificial Sequence: Synthetic oligonucleotide
uauaaccuguauuuauuuc

SEQ ID NO: 426436 - RNA, 19 nt, Artificial Sequence
  Description of Artificial Sequence: Synthetic oligonucleotide
uaguauacacacaggcuga

SEQ ID NO: 426437 - RNA, 19 nt, Artificial Sequence
  Description of Artificial Sequence: Synthetic oligonucleotide
aguggaaacacaucccagu

SEQ ID NO: 426438 - RNA, 19 nt, Artificial Sequence
  Description of Artificial Sequence: Synthetic oligonucleotide
ggaaucaaaagauucagaa

SEQ ID NO: 426439 - RNA, 19 nt, Artificial Sequence
  Description of Artificial Sequence: Synthetic oligonucleotide
uuacacuuuaaucuuuguu

SEQ ID NO: 426440 - RNA, 19 nt, Artificial Sequence
  Description of Artificial Sequence: Synthetic oligonucleotide
agcaugguuauuaaagaag

SEQ ID NO: 426441 - RNA, 19 nt, Artificial Sequence
  Description of Artificial Sequence: Synthetic oligonucleotide
agggauaauaauaaugggu

SEQ ID NO: 426442 - RNA, 19 nt, Artificial Sequence
  Description of Artificial Sequence: Synthetic oligonucleotide
uugaccacgaucuccuucu

SEQ ID NO: 426443 - RNA, 19 nt, Artificial Sequence
  Description of Artificial Sequence: Synthetic oligonucleotide
gaaucauagagcaaugaaa

SEQ ID NO: 426444 - RNA, 19 nt, Artificial Sequence
  Description of Artificial Sequence: Synthetic oligonucleotide
uuauaaccuguauuuauuu

SEQ ID NO: 426445 - RNA, 19 nt, Artificial Sequence
  Description of Artificial Sequence: Synthetic oligonucleotide
ugcacauuauuaaguagaa

SEQ ID NO: 426446 - RNA, 19 nt, Artificial Sequence
  Description of Artificial Sequence: Synthetic oligonucleotide
ucuaugcucgcugauguug

SEQ ID NO: 426447 - RNA, 19 nt, Artificial Sequence
  Description of Artificial Sequence: Synthetic oligonucleotide
aguauagacauaguauaca

SEQ ID NO: 426448 - RNA, 19 nt, Artificial Sequence
  Description of Artificial Sequence: Synthetic oligonucleotide
uuguuuaagggcaguuaug

SEQ ID NO: 426449 - RNA, 19 nt, Artificial Sequence
  Description of Artificial Sequence: Synthetic oligonucleotide
agcuggaauaggcugcuuc

SEQ ID NO: 426450 - RNA, 19 nt, Artificial Sequence
  Description of Artificial Sequence: Synthetic oligonucleotide
caauucgugguuucuuugc

SEQ ID NO: 426451 - RNA, 19 nt, Artificial Sequence
  Description of Artificial Sequence: Synthetic oligonucleotide
ucaauucgugguuucuuug

SEQ ID NO: 426452 - RNA, 19 nt, Artificial Sequence
  Description of Artificial Sequence: Synthetic oligonucleotide
uccuuaucaagacgcacac

SEQ ID NO: 426453 - RNA, 19 nt, Artificial Sequence
  Description of Artificial Sequence: Synthetic oligonucleotide
aauggcgcuuaugauagcu

SEQ ID NO: 426454 - RNA, 19 nt, Artificial Sequence
  Description of Artificial Sequence: Synthetic oligonucleotide
ucaacuggugauccaucag

SEQ ID NO: 426455 - RNA, 19 nt, Artificial Sequence
  Description of Artificial Sequence: Synthetic oligonucleotide
uguauuaguguuucauuuu

SEQ ID NO: 426456 - RNA, 19 nt, Artificial Sequence
  Description of Artificial Sequence: Synthetic oligonucleotide
accgcugaagaccuauuuc

SEQ ID NO: 426457 - RNA, 19 nt, Artificial Sequence
  Description of Artificial Sequence: Synthetic oligonucleotide
gacuagaaggcuaauauua

SEQ ID NO: 426458 - RNA, 19 nt, Artificial Sequence
  Description of Artificial Sequence: Synthetic oligonucleotide
ugagauauccaaguagauc

SEQ ID NO: 426459 - RNA, 19 nt, Artificial Sequence
  Description of Artificial Sequence: Synthetic oligonucleotide
ggaguuugagucuuacggg

SEQ ID NO: 426460 - RNA, 19 nt, Artificial Sequence
  Description of Artificial Sequence: Synthetic oligonucleotide
gaugcuuccccauugagau

SEQ ID NO: 426461 - RNA, 19 nt, Artificial Sequence
  Description of Artificial Sequence: Synthetic oligonucleotide
cuggucuauccaaauggcg

SEQ ID NO: 426462 - RNA, 19 nt, Artificial Sequence
  Description of Artificial Sequence: Synthetic oligonucleotide
ugaauucauaaagcuuggg

SEQ ID NO: 426463 - RNA, 19 nt, Artificial Sequence
  Description of Artificial Sequence: Synthetic oligonucleotide
acuggucuauccaaauggc

SEQ ID NO: 426464 - RNA, 19 nt, Artificial Sequence
  Description of Artificial Sequence: Synthetic oligonucleotide
agcgucaugccaugguacg

SEQ ID NO: 426465 - RNA, 19 nt, Artificial Sequence
  Description of Artificial Sequence: Synthetic oligonucleotide
ccccaaacuacauaguugg

SEQ ID NO: 426466 - RNA, 19 nt, Artificial Sequence
  Description of Artificial Sequence: Synthetic oligonucleotide
uccaauguguaguauucuc

SEQ ID NO: 426467 - RNA, 19 nt, Artificial Sequence
  Description of Artificial Sequence: Synthetic oligonucleotide
guaccuauccaauguuucc

SEQ ID NO: 426468 - RNA, 19 nt, Artificial Sequence
  Description of Artificial Sequence: Synthetic oligonucleotide
guaaugcuaauuuaaccaa

SEQ ID NO: 426469 - RNA, 19 nt, Artificial Sequence
  Description of Artificial Sequence: Synthetic oligonucleotide
cagcugauuuaauaguuac

SEQ ID NO: 426470 - RNA, 19 nt, Artificial Sequence
  Description of Artificial Sequence: Synthetic oligonucleotide
uauaucacuuuaaguuuaa

SEQ ID NO: 426471 - RNA, 19 nt, Artificial Sequence
  Description of Artificial Sequence: Synthetic oligonucleotide
uacuacucuauaagguacu

SEQ ID NO: 426472 - RNA, 19 nt, Artificial Sequence
  Description of Artificial Sequence: Synthetic oligonucleotide
cugcugacaauaucucugg

SEQ ID NO: 426473 - RNA, 19 nt, Artificial Sequence
  Description of Artificial Sequence: Synthetic oligonucleotide
aaauggcgcuuaugauagc

SEQ ID NO: 426474 - RNA, 19 nt, Artificial Sequence
  Description of Artificial Sequence: Synthetic oligonucleotide
aaguuugcuuguauggaug

SEQ ID NO: 426475 - RNA, 19 nt, Artificial Sequence
  Description of Artificial Sequence: Synthetic oligonucleotide
gaagaccuauuuccagggg

SEQ ID NO: 426476 - RNA, 19 nt, Artificial Sequence
  Description of Artificial Sequence: Synthetic oligonucleotide
gauccaucagguagaagcc

SEQ ID NO: 426477 - RNA, 19 nt, Artificial Sequence
  Description of Artificial Sequence: Synthetic oligonucleotide
ucagucuugauaguagauc

SEQ ID NO: 426478 - RNA, 19 nt, Artificial Sequence
  Description of Artificial Sequence: Synthetic oligonucleotide
uacaacccgaucccagucc

SEQ ID NO: 426479 - RNA, 19 nt, Artificial Sequence
  Description of Artificial Sequence: Synthetic oligonucleotide
uagaucaagcuauauccau

SEQ ID NO: 426480 - RNA, 19 nt, Artificial Sequence
  Description of Artificial Sequence: Synthetic oligonucleotide
uccccauugagauauccaa

SEQ ID NO: 426481 - RNA, 19 nt, Artificial Sequence
  Description of Artificial Sequence: Synthetic oligonucleotide
aacugaaacuaaagacuuc

SEQ ID NO: 426482 - RNA, 19 nt, Artificial Sequence
  Description of Artificial Sequence: Synthetic oligonucleotide
aaauagaauccaaugugua

SEQ ID NO: 426483 - RNA, 19 nt, Artificial Sequence
  Description of Artificial Sequence: Synthetic oligonucleotide
uaccuauccaauguuuccc

SEQ ID NO: 426484 - RNA, 19 nt, Artificial Sequence
  Description of Artificial Sequence: Synthetic oligonucleotide
ugagauggaaggcuuuaau

SEQ ID NO: 426485 - RNA, 19 nt, Artificial Sequence
  Description of Artificial Sequence: Synthetic oligonucleotide
uucagacaaagaccuaauc

SEQ ID NO: 426486 - RNA, 19 nt, Artificial Sequence
  Description of Artificial Sequence: Synthetic oligonucleotide
aucgaucuuaaagccuucc

SEQ ID NO: 426487 - RNA, 19 nt, Artificial Sequence
  Description of Artificial Sequence: Synthetic oligonucleotide
ucuuacgggcagaugcacc

SEQ ID NO: 426488 - RNA, 19 nt, Artificial Sequence
  Description of Artificial Sequence: Synthetic oligonucleotide
cuguagaucaagcuauauc

SEQ ID NO: 426489 - RNA, 19 nt, Artificial Sequence
  Description of Artificial Sequence: Synthetic oligonucleotide
uucgugauccuuucuucug

SEQ ID NO: 426490 - RNA, 19 nt, Artificial Sequence
  Description of Artificial Sequence: Synthetic oligonucleotide
cuuagagagccuaauaacu

SEQ ID NO: 426491 - RNA, 19 nt, Artificial Sequence
  Description of Artificial Sequence: Synthetic oligonucleotide
aaacagcuacaacccgauc

SEQ ID NO: 426492 - RNA, 19 nt, Artificial Sequence
  Description of Artificial Sequence: Synthetic oligonucleotide
uaugauagcugaguucuaa

SEQ ID NO: 426493 - RNA, 19 nt, Artificial Sequence
  Description of Artificial Sequence: Synthetic oligonucleotide
gagccuaauaacuucuaaa

SEQ ID NO: 426494 - RNA, 19 nt, Artificial Sequence
  Description of Artificial Sequence: Synthetic oligonucleotide
cagauuucagcgucaugcc

SEQ ID NO: 426495 - RNA, 19 nt, Artificial Sequence
  Description of Artificial Sequence: Synthetic oligonucleotide
aaacuggucuagguacagg

SEQ ID NO: 426496 - RNA, 19 nt, Artificial Sequence
  Description of Artificial Sequence: Synthetic oligonucleotide
ucgugauccuuucuucuga

SEQ ID NO: 426497 - RNA, 19 nt, Artificial Sequence
  Description of Artificial Sequence: Synthetic oligonucleotide
caugccaugguacgugccc

SEQ ID NO: 426498 - RNA, 19 nt, Artificial Sequence
  Description of Artificial Sequence: Synthetic oligonucleotide
uguucgugauccuuucuuc

SEQ ID NO: 426499 - RNA, 19 nt, Artificial Sequence
  Description of Artificial Sequence: Synthetic oligonucleotide
acauaaacaggaugagaaa

SEQ ID NO: 426500 - RNA, 19 nt, Artificial Sequence
  Description of Artificial Sequence: Synthetic oligonucleotide
gaucuagacgaacuucauc

SEQ ID NO: 426501 - RNA, 19 nt, Artificial Sequence
  Description of Artificial Sequence: Synthetic oligonucleotide
aaacaugaguuaguauaga

SEQ ID NO: 426502 - RNA, 19 nt, Artificial Sequence
  Description of Artificial Sequence: Synthetic oligonucleotide
gaguggaccgcugaagacc

SEQ ID NO: 426503 - RNA, 19 nt, Artificial Sequence
  Description of Artificial Sequence: Synthetic oligonucleotide
aaaacagcuacaacccgau

SEQ ID NO: 426504 - RNA, 19 nt, Artificial Sequence
  Description of Artificial Sequence: Synthetic oligonucleotide
uauggccuuccaaucgagc

SEQ ID NO: 426505 - RNA, 19 nt, Artificial Sequence
  Description of Artificial Sequence: Synthetic oligonucleotide
aguauacacacaggcugac

SEQ ID NO: 426506 - RNA, 19 nt, Artificial Sequence
  Description of Artificial Sequence: Synthetic oligonucleotide
uggcgcuuaugauagcuga

SEQ ID NO: 426507 - RNA, 19 nt, Artificial Sequence
  Description of Artificial Sequence: Synthetic oligonucleotide
uuucccgugcucuguaaga

SEQ ID NO: 426508 - RNA, 19 nt, Artificial Sequence
  Description of Artificial Sequence: Synthetic oligonucleotide
gucggacauaaacaggaug

SEQ ID NO: 426509 - RNA, 19 nt, Artificial Sequence
  Description of Artificial Sequence: Synthetic oligonucleotide
acauuauuaaguagaaaua

SEQ ID NO: 426510 - RNA, 19 nt, Artificial Sequence
  Description of Artificial Sequence: Synthetic oligonucleotide
uuugcaaguucuugaugaa

SEQ ID NO: 426511 - RNA, 19 nt, Artificial Sequence
  Description of Artificial Sequence: Synthetic oligonucleotide
uaccauguaccuauccaau

SEQ ID NO: 426512 - RNA, 19 nt, Artificial Sequence
  Description of Artificial Sequence: Synthetic oligonucleotide
cauaucuguuguaggcagc

SEQ ID NO: 426513 - RNA, 19 nt, Artificial Sequence
  Description of Artificial Sequence: Synthetic oligonucleotide
uccuuugaacugccaagca

SEQ ID NO: 426514 - RNA, 19 nt, Artificial Sequence
  Description of Artificial Sequence: Synthetic oligonucleotide
cuuccguuacagauuucag

SEQ ID NO: 426515 - RNA, 19 nt, Artificial Sequence
  Description of Artificial Sequence: Synthetic oligonucleotide
guacgugcccauaguaucg

SEQ ID NO: 426516 - RNA, 19 nt, Artificial Sequence
  Description of Artificial Sequence: Synthetic oligonucleotide
gaugcaccuuccguuacag

SEQ ID NO: 426517 - RNA, 19 nt, Artificial Sequence
  Description of Artificial Sequence: Synthetic oligonucleotide
guagaucuuuucuuagcca

SEQ ID NO: 426518 - RNA, 19 nt, Artificial Sequence
  Description of Artificial Sequence: Synthetic oligonucleotide
gcuuagagagccuaauaac

SEQ ID NO: 426519 - RNA, 19 nt, Artificial Sequence
  Description of Artificial Sequence: Synthetic oligonucleotide
ugguacgugcccauaguau

SEQ ID NO: 426520 - RNA, 19 nt, Artificial Sequence
  Description of Artificial Sequence: Synthetic oligonucleotide
aaggaaucauagagcaaug

SEQ ID NO: 426521 - RNA, 19 nt, Artificial Sequence
  Description of Artificial Sequence: Synthetic oligonucleotide
cacgucggacauaaacagg

SEQ ID NO: 426522 - RNA, 19 nt, Artificial Sequence
  Description of Artificial Sequence: Synthetic oligonucleotide
uucagcgucaugccauggu

SEQ ID NO: 426523 - RNA, 19 nt, Artificial Sequence
  Description of Artificial Sequence: Synthetic oligonucleotide
gaaacuggucuagguacag

SEQ ID NO: 426524 - RNA, 19 nt, Artificial Sequence
  Description of Artificial Sequence: Synthetic oligonucleotide
uaugucaacuggugaucca

SEQ ID NO: 426525 - RNA, 19 nt, Artificial Sequence
  Description of Artificial Sequence: Synthetic oligonucleotide
cuugaaaaggcugaauuua

SEQ ID NO: 426526 - RNA, 19 nt, Artificial Sequence
  Description of Artificial Sequence: Synthetic oligonucleotide
ucauccucaauucgugguu

SEQ ID NO: 426527 - RNA, 19 nt, Artificial Sequence
  Description of Artificial Sequence: Synthetic oligonucleotide
gacaauaucucuggucaca

SEQ ID NO: 426528 - RNA, 19 nt, Artificial Sequence
  Description of Artificial Sequence: Synthetic oligonucleotide
ucagcgucaugccauggua

SEQ ID NO: 426529 - RNA, 19 nt, Artificial Sequence
  Description of Artificial Sequence: Synthetic oligonucleotide
uaagauaguuguucuuguu

SEQ ID NO: 426530 - RNA, 19 nt, Artificial Sequence
  Description of Artificial Sequence: Synthetic oligonucleotide
uccuaucuaugcucgcuga

SEQ ID NO: 426531 - RNA, 19 nt, Artificial Sequence
  Description of Artificial Sequence: Synthetic oligonucleotide
acgucggacauaaacagga

SEQ ID NO: 426532 - RNA, 19 nt, Artificial Sequence
  Description of Artificial Sequence: Synthetic oligonucleotide
aguaucgaucuuaaagccu

SEQ ID NO: 426533 - RNA, 19 nt, Artificial Sequence
  Description of Artificial Sequence: Synthetic oligonucleotide
ugacaauaucucuggucac

SEQ ID NO: 426534 - RNA, 19 nt, Artificial Sequence
  Description of Artificial Sequence: Synthetic oligonucleotide
agagccuaauaacuucuaa

SEQ ID NO: 426535 - RNA, 19 nt, Artificial Sequence
  Description of Artificial Sequence: Synthetic oligonucleotide
uacuugagauggaaggcuu

SEQ ID NO: 426536 - RNA, 19 nt, Artificial Sequence
  Description of Artificial Sequence: Synthetic oligonucleotide
ucuagacgaacuucaucau

SEQ ID NO: 426537 - RNA, 19 nt, Artificial Sequence
  Description of Artificial Sequence: Synthetic oligonucleotide
uuuucggucaggucuucua

SEQ ID NO: 426538 - RNA, 19 nt, Artificial Sequence
  Description of Artificial Sequence: Synthetic oligonucleotide
accuauccaauguuuccca

SEQ ID NO: 426539 - RNA, 19 nt, Artificial Sequence
  Description of Artificial Sequence: Synthetic oligonucleotide
cauaaguuucaggggcugg

SEQ ID NO: 426540 - RNA, 19 nt, Artificial Sequence
  Description of Artificial Sequence: Synthetic oligonucleotide
gaggcaaugccccuuugaa

SEQ ID NO: 426541 - RNA, 19 nt, Artificial Sequence
  Description of Artificial Sequence: Synthetic oligonucleotide
ccugcugacaauaucucug

SEQ ID NO: 426542 - RNA, 19 nt, Artificial Sequence
  Description of Artificial Sequence: Synthetic oligonucleotide
gcacgucggacauaaacag

SEQ ID NO: 426543 - RNA, 19 nt, Artificial Sequence
  Description of Artificial Sequence: Synthetic oligonucleotide
uggaauaggcugcuucgua

SEQ ID NO: 426544 - RNA, 19 nt, Artificial Sequence
  Description of Artificial Sequence: Synthetic oligonucleotide
cauaguauacacacaggcu

SEQ ID NO: 426545 - RNA, 19 nt, Artificial Sequence
  Description of Artificial Sequence: Synthetic oligonucleotide
auaccguuacaucccauuu

SEQ ID NO: 426546 - RNA, 19 nt, Artificial Sequence
  Description of Artificial Sequence: Synthetic oligonucleotide
auaaguuucaggggcuggu

SEQ ID NO: 426547 - RNA, 19 nt, Artificial Sequence
  Description of Artificial Sequence: Synthetic oligonucleotide
ggaauaggcugcuucguac

SEQ ID NO: 426548 - RNA, 19 nt, Artificial Sequence
  Description of Artificial Sequence: Synthetic oligonucleotide
ccgcugaagaccuauuucc

SEQ ID NO: 426549 - RNA, 19 nt, Artificial Sequence
  Description of Artificial Sequence: Synthetic oligonucleotide
cuagaaggcuaauauuaaa

SEQ ID NO: 426550 - RNA, 19 nt, Artificial Sequence
  Description of Artificial Sequence: Synthetic oligonucleotide
gugacacuaauugcugugc

SEQ ID NO: 426551 - RNA, 19 nt, Artificial Sequence
  Description of Artificial Sequence: Synthetic oligonucleotide
agagagccuaauaacuucu

SEQ ID NO: 426552 - RNA, 19 nt, Artificial Sequence
  Description of Artificial Sequence: Synthetic oligonucleotide
acaacccgaucccaguccu

SEQ ID NO: 426553 - RNA, 19 nt, Artificial Sequence
  Description of Artificial Sequence: Synthetic oligonucleotide
uaccguuacaucccauuuu

SEQ ID NO: 426554 - RNA, 19 nt, Artificial Sequence
  Description of Artificial Sequence: Synthetic oligonucleotide
gguacgugcccauaguauc

SEQ ID NO: 426555 - RNA, 19 nt, Artificial Sequence
  Description of Artificial Sequence: Synthetic oligonucleotide
uauccaaauggcgcuuaug

SEQ ID NO: 426556 - RNA, 19 nt, Artificial Sequence
  Description of Artificial Sequence: Synthetic oligonucleotide
cuugaccacgaucuccuuc

SEQ ID NO: 426557 - RNA, 19 nt, Artificial Sequence
  Description of Artificial Sequence: Synthetic oligonucleotide
caaucgagcugccaaucuc

SEQ ID NO: 426558 - RNA, 19 nt, Artificial Sequence
  Description of Artificial Sequence: Synthetic oligonucleotide
guuuaagggcaguuauguc

SEQ ID NO: 426559 - RNA, 19 nt, Artificial Sequence
  Description of Artificial Sequence: Synthetic oligonucleotide
uacgcaaugugggauccac

SEQ ID NO: 426560 - RNA, 19 nt, Artificial Sequence
  Description of Artificial Sequence: Synthetic oligonucleotide
guagaucaagcuauaucca

SEQ ID NO: 426561 - RNA, 19 nt, Artificial Sequence
  Description of Artificial Sequence: Synthetic oligonucleotide
acuagaaggcuaauauuaa

SEQ ID NO: 426562 - RNA, 19 nt, Artificial Sequence
  Description of Artificial Sequence: Synthetic oligonucleotide
guagcugcagggauaauaa

SEQ ID NO: 426563 - RNA, 19 nt, Artificial Sequence
  Description of Artificial Sequence: Synthetic oligonucleotide
cccgaagaucacuucaucc

SEQ ID NO: 426564 - RNA, 19 nt, Artificial Sequence
  Description of Artificial Sequence: Synthetic oligonucleotide
aggaaucauagagcaauga

SEQ ID NO: 426565 - RNA, 19 nt, Artificial Sequence
  Description of Artificial Sequence: Synthetic oligonucleotide
cuccuaucuaugcucgcug

SEQ ID NO: 426566 - RNA, 19 nt, Artificial Sequence
  Description of Artificial Sequence: Synthetic oligonucleotide
gugcccauaguaucgaucu

SEQ ID NO: 426567 - RNA, 19 nt, Artificial Sequence
  Description of Artificial Sequence: Synthetic oligonucleotide
aucucaaaugggauuuaug

SEQ ID NO: 426568 - RNA, 19 nt, Artificial Sequence
  Description of Artificial Sequence: Synthetic oligonucleotide
uucguacgcaaugugggau

SEQ ID NO: 426569 - RNA, 19 nt, Artificial Sequence
  Description of Artificial Sequence: Synthetic oligonucleotide
uaggcugcuucguacgcaa

SEQ ID NO: 426570 - RNA, 19 nt, Artificial Sequence
  Description of Artificial Sequence: Synthetic oligonucleotide
guaagauaguuguucuugu

SEQ ID NO: 426571 - RNA, 19 nt, Artificial Sequence
  Description of Artificial Sequence: Synthetic oligonucleotide
aagaccuaaucugcucagu

SEQ ID NO: 426572 - RNA, 19 nt, Artificial Sequence
  Description of Artificial Sequence: Synthetic oligonucleotide
ucuucacguucuugggcca

SEQ ID NO: 426573 - RNA, 19 nt, Artificial Sequence
  Description of Artificial Sequence: Synthetic oligonucleotide
caauuuccguuacagacua

SEQ ID NO: 426574 - RNA, 19 nt, Artificial Sequence
  Description of Artificial Sequence: Synthetic oligonucleotide
ucguacgcaaugugggauc

SEQ ID NO: 426575 - RNA, 19 nt, Artificial Sequence
  Description of Artificial Sequence: Synthetic oligonucleotide
guuacagacuagaaggcua

SEQ ID NO: 426576 - RNA, 19 nt, Artificial Sequence
  Description of Artificial Sequence: Synthetic oligonucleotide
ucuguagaucaagcuauau

SEQ ID NO: 426577 - RNA, 19 nt, Artificial Sequence
  Description of Artificial Sequence: Synthetic oligonucleotide
cuugggucucagucuguag

SEQ ID NO: 426578 - RNA, 19 nt, Artificial Sequence
  Description of Artificial Sequence: Synthetic oligonucleotide
cagacuagaaggcuaauau

SEQ ID NO: 426579 - RNA, 19 nt, Artificial Sequence
  Description of Artificial Sequence: Synthetic oligonucleotide
gcugacaauaucucugguc

SEQ ID NO: 426580 - RNA, 19 nt, Artificial Sequence
  Description of Artificial Sequence: Synthetic oligonucleotide
cuaauaccguuacauccca

SEQ ID NO: 426581 - RNA, 19 nt, Artificial Sequence
  Description of Artificial Sequence: Synthetic oligonucleotide
ugcugacaauaucucuggu

SEQ ID NO: 426582 - RNA, 19 nt, Artificial Sequence
  Description of Artificial Sequence: Synthetic oligonucleotide
uaucgaucuuaaagccuuc

SEQ ID NO: 426583 - RNA, 19 nt, Artificial Sequence
  Description of Artificial Sequence: Synthetic oligonucleotide
cuaugcucgcugauguuga

SEQ ID NO: 426584 - RNA, 19 nt, Artificial Sequence
  Description of Artificial Sequence: Synthetic oligonucleotide
gaaguucuagagucuuaaa

SEQ ID NO: 426585 - RNA, 19 nt, Artificial Sequence
  Description of Artificial Sequence: Synthetic oligonucleotide
aggaaucaaaagauucaga

SEQ ID NO: 426586 - RNA, 19 nt, Artificial Sequence
  Description of Artificial Sequence: Synthetic oligonucleotide
uggucacaucaacuucagc

SEQ ID NO: 426587 - RNA, 19 nt, Artificial Sequence
  Description of Artificial Sequence: Synthetic oligonucleotide
agaugcaccuuccguuaca

SEQ ID NO: 426588 - RNA, 19 nt, Artificial Sequence
  Description of Artificial Sequence: Synthetic oligonucleotide
acuccccgaagaucacuuc

SEQ ID NO: 426589 - RNA, 19 nt, Artificial Sequence
  Description of Artificial Sequence: Synthetic oligonucleotide
cagcgucaugccaugguac

SEQ ID NO: 426590 - RNA, 19 nt, Artificial Sequence
  Description of Artificial Sequence: Synthetic oligonucleotide
cagucuguacaaucccuuc

SEQ ID NO: 426591 - RNA, 19 nt, Artificial Sequence
  Description of Artificial Sequence: Synthetic oligonucleotide
gaccuaaucugcucagucu

SEQ ID NO: 426592 - RNA, 19 nt, Artificial Sequence
  Description of Artificial Sequence: Synthetic oligonucleotide
cccgugcucuguaagauag

SEQ ID NO: 426593 - RNA, 19 nt, Artificial Sequence
  Description of Artificial Sequence: Synthetic oligonucleotide
augguacgugcccauagua

SEQ ID NO: 426594 - RNA, 19 nt, Artificial Sequence
  Description of Artificial Sequence: Synthetic oligonucleotide
agcugcagggauaauaaua

SEQ ID NO: 426595 - RNA, 19 nt, Artificial Sequence
  Description of Artificial Sequence: Synthetic oligonucleotide
gacuugaguggaccgcuga

SEQ ID NO: 426596 - RNA, 19 nt, Artificial Sequence
  Description of Artificial Sequence: Synthetic oligonucleotide
aguuugagucuuacgggca

SEQ ID NO: 426597 - RNA, 19 nt, Artificial Sequence
  Description of Artificial Sequence: Synthetic oligonucleotide
gagcaggccgcuguuccgg

SEQ ID NO: 426598 - RNA, 19 nt, Artificial Sequence
  Description of Artificial Sequence: Synthetic oligonucleotide
cuauccaauguuucccaaa

SEQ ID NO: 426599 - RNA, 19 nt, Artificial Sequence
  Description of Artificial Sequence: Synthetic oligonucleotide
aguggaccgcugaagaccu

SEQ ID NO: 426600 - RNA, 19 nt, Artificial Sequence
  Description of Artificial Sequence: Synthetic oligonucleotide
uaauaccguuacaucccau

SEQ ID NO: 426601 - RNA, 19 nt, Artificial Sequence
  Description of Artificial Sequence: Synthetic oligonucleotide
cuggucuacuacucuauaa

SEQ ID NO: 426602 - RNA, 19 nt, Artificial Sequence
  Description of Artificial Sequence: Synthetic oligonucleotide
aauuuccguuacagacuag

SEQ ID NO: 426603 - RNA, 19 nt, Artificial Sequence
  Description of Artificial Sequence: Synthetic oligonucleotide
agcuacaacccgaucccag

SEQ ID NO: 426604 - RNA, 19 nt, Artificial Sequence
  Description of Artificial Sequence: Synthetic oligonucleotide
cugccaaucucuccuuauc

SEQ ID NO: 426605 - RNA, 19 nt, Artificial Sequence
  Description of Artificial Sequence: Synthetic oligonucleotide
uccaaucgagcugccaauc

SEQ ID NO: 426606 - RNA, 19 nt, Artificial Sequence
  Description of Artificial Sequence: Synthetic oligonucleotide
cuuacgggcagaugcaccu

SEQ ID NO: 426607 - RNA, 19 nt, Artificial Sequence
  Description of Artificial Sequence: Synthetic oligonucleotide
acagacuagaaggcuaaua

SEQ ID NO: 426608 - RNA, 19 nt, Artificial Sequence
  Description of Artificial Sequence: Synthetic oligonucleotide
cuucguacgcaauguggga

SEQ ID NO: 426609 - RNA, 19 nt, Artificial Sequence
  Description of Artificial Sequence: Synthetic oligonucleotide
gcugcagggauaauaauaa

SEQ ID NO: 426610 - RNA, 19 nt, Artificial Sequence
  Description of Artificial Sequence: Synthetic oligonucleotide
uccucaauucgugguuucu

SEQ ID NO: 426611 - RNA, 19 nt, Artificial Sequence
  Description of Artificial Sequence: Synthetic oligonucleotide
auccaauguguaguauucu

SEQ ID NO: 426612 - RNA, 19 nt, Artificial Sequence
  Description of Artificial Sequence: Synthetic oligonucleotide
aacuccccgaagaucacuu

SEQ ID NO: 426613 - RNA, 19 nt, Artificial Sequence
  Description of Artificial Sequence: Synthetic oligonucleotide
uacgugcccauaguaucga

SEQ ID NO: 426614 - RNA, 19 nt, Artificial Sequence
  Description of Artificial Sequence: Synthetic oligonucleotide
guagaagaucuuuugcauu

SEQ ID NO: 426615 - RNA, 19 nt, Artificial Sequence
  Description of Artificial Sequence: Synthetic oligonucleotide
cuagacgaacuucaucaua

SEQ ID NO: 426616 - RNA, 19 nt, Artificial Sequence
  Description of Artificial Sequence: Synthetic oligonucleotide
ccguuacagacuagaaggc

SEQ ID NO: 426617 - RNA, 19 nt, Artificial Sequence
  Description of Artificial Sequence: Synthetic oligonucleotide
gcauuaagcaugguuauua

SEQ ID NO: 426618 - RNA, 19 nt, Artificial Sequence
  Description of Artificial Sequence: Synthetic oligonucleotide
uucccgugcucuguaagau

SEQ ID NO: 426619 - RNA, 19 nt, Artificial Sequence
  Description of Artificial Sequence: Synthetic oligonucleotide
ccaaauggcgcuuaugaua

SEQ ID NO: 426620 - RNA, 19 nt, Artificial Sequence
  Description of Artificial Sequence: Synthetic oligonucleotide
agaauccaauguguaguau

SEQ ID NO: 426621 - RNA, 19 nt, Artificial Sequence
  Description of Artificial Sequence: Synthetic oligonucleotide
ugcauuaagcaugguuauu

SEQ ID NO: 426622 - RNA, 19 nt, Artificial Sequence
  Description of Artificial Sequence: Synthetic oligonucleotide
guaucgaucuuaaagccuu

SEQ ID NO: 426623 - RNA, 19 nt, Artificial Sequence
  Description of Artificial Sequence: Synthetic oligonucleotide
auaggcugcuucguacgca

SEQ ID NO: 426624 - RNA, 19 nt, Artificial Sequence
  Description of Artificial Sequence: Synthetic oligonucleotide
ggcaguuaugucaucaucu

SEQ ID NO: 426625 - RNA, 19 nt, Artificial Sequence
  Description of Artificial Sequence: Synthetic oligonucleotide
uggaccgcugaagaccuau

SEQ ID NO: 426626 - RNA, 19 nt, Artificial Sequence
  Description of Artificial Sequence: Synthetic oligonucleotide
aucuuuucuuagccauaau

SEQ ID NO: 426627 - RNA, 19 nt, Artificial Sequence
  Description of Artificial Sequence: Synthetic oligonucleotide
ccccauugagauauccaag

SEQ ID NO: 426628 - RNA, 19 nt, Artificial Sequence
  Description of Artificial Sequence: Synthetic oligonucleotide
ggcgcuccuaucuaugcuc

SEQ ID NO: 426629 - RNA, 19 nt, Artificial Sequence
  Description of Artificial Sequence: Synthetic oligonucleotide
cucguugacaaccuuguuu

SEQ ID NO: 426630 - RNA, 19 nt, Artificial Sequence
  Description of Artificial Sequence: Synthetic oligonucleotide
caguuaugucaucaucuaa

SEQ ID NO: 426631 - RNA, 19 nt, Artificial Sequence
  Description of Artificial Sequence: Synthetic oligonucleotide
gguuauuaaagaaguggua

SEQ ID NO: 426632 - RNA, 19 nt, Artificial Sequence
  Description of Artificial Sequence: Synthetic oligonucleotide
cagaugcaccuuccguuac

SEQ ID NO: 426633 - RNA, 19 nt, Artificial Sequence
  Description of Artificial Sequence: Synthetic oligonucleotide
aagcgucuaucaaaauaua

SEQ ID NO: 426634 - RNA, 19 nt, Artificial Sequence
  Description of Artificial Sequence: Synthetic oligonucleotide
gauggcuuagagagccuaa

SEQ ID NO: 426635 - RNA, 19 nt, Artificial Sequence
  Description of Artificial Sequence: Synthetic oligonucleotide
auguaccuauccaauguuu

SEQ ID NO: 426636 - RNA, 19 nt, Artificial Sequence
  Description of Artificial Sequence: Synthetic oligonucleotide
uaugcucgcugauguugau

SEQ ID NO: 426637 - RNA, 19 nt, Artificial Sequence
  Description of Artificial Sequence: Synthetic oligonucleotide
caaaugggauuuaugcuuu

SEQ ID NO: 426638 - RNA, 19 nt, Artificial Sequence
  Description of Artificial Sequence: Synthetic oligonucleotide
cagccuauuacacuuuaau

SEQ ID NO: 426639 - RNA, 19 nt, Artificial Sequence
  Description of Artificial Sequence: Synthetic oligonucleotide
ccaugguacgugcccauag

SEQ ID NO: 426640 - RNA, 19 nt, Artificial Sequence
  Description of Artificial Sequence: Synthetic oligonucleotide
ggucuauccaaauggcgcu

SEQ ID NO: 426641 - RNA, 19 nt, Artificial Sequence
  Description of Artificial Sequence: Synthetic oligonucleotide
cuaaaucagucuugauagu

SEQ ID NO: 426642 - RNA, 19 nt, Artificial Sequence
  Description of Artificial Sequence: Synthetic oligonucleotide
aagauggcuuagagagccu

SEQ ID NO: 426643 - RNA, 19 nt, Artificial Sequence
  Description of Artificial Sequence: Synthetic oligonucleotide
gcaguuaugucaucaucua

SEQ ID NO: 426644 - RNA, 19 nt, Artificial Sequence
  Description of Artificial Sequence: Synthetic oligonucleotide
ucccgugcucuguaagaua

SEQ ID NO: 426645 - RNA, 19 nt, Artificial Sequence
  Description of Artificial Sequence: Synthetic oligonucleotide
ccgcacgucggacauaaac

SEQ ID NO: 426646 - RNA, 19 nt, Artificial Sequence
  Description of Artificial Sequence: Synthetic oligonucleotide
aucuaugcucgcugauguu

SEQ ID NO: 426647 - RNA, 19 nt, Artificial Sequence
  Description of Artificial Sequence: Synthetic oligonucleotide
gucuuacgggcagaugcac

SEQ ID NO: 426648 - RNA, 19 nt, Artificial Sequence
  Description of Artificial Sequence: Synthetic oligonucleotide
acccgaucccaguccugag

SEQ ID NO: 426649 - RNA, 19 nt, Artificial Sequence
  Description of Artificial Sequence: Synthetic oligonucleotide
ggucuagguacagguuggg

SEQ ID NO: 426650 - RNA, 19 nt, Artificial Sequence
  Description of Artificial Sequence: Synthetic oligonucleotide
agccgcacgucggacauaa

SEQ ID NO: 426651 - RNA, 19 nt, Artificial Sequence
  Description of Artificial Sequence: Synthetic oligonucleotide
ggggcgcuccuaucuaugc

SEQ ID NO: 426652 - RNA, 19 nt, Artificial Sequence
  Description of Artificial Sequence: Synthetic oligonucleotide
guguucgugauccuuucuu

SEQ ID NO: 426653 - RNA, 19 nt, Artificial Sequence
  Description of Artificial Sequence: Synthetic oligonucleotide
ccuuccguuacagauuuca

SEQ ID NO: 426654 - RNA, 19 nt, Artificial Sequence
  Description of Artificial Sequence: Synthetic oligonucleotide
acauuuggaucuagacgaa

SEQ ID NO: 426655 - RNA, 19 nt, Artificial Sequence
  Description of Artificial Sequence: Synthetic oligonucleotide
cucaauucgugguuucuuu

SEQ ID NO: 426656 - RNA, 19 nt, Artificial Sequence
  Description of Artificial Sequence: Synthetic oligonucleotide
augcaccuuccguuacaga

SEQ ID NO: 426657 - RNA, 19 nt, Artificial Sequence
  Description of Artificial Sequence: Synthetic oligonucleotide
uacagacuagaaggcuaau

SEQ ID NO: 426658 - RNA, 19 nt, Artificial Sequence
  Description of Artificial Sequence: Synthetic oligonucleotide
uguuccggggcacgcccuu

SEQ ID NO: 426659 - RNA, 19 nt, Artificial Sequence
  Description of Artificial Sequence: Synthetic oligonucleotide
augcuuuaccauguaccua

SEQ ID NO: 426660 - RNA, 19 nt, Artificial Sequence
  Description of Artificial Sequence: Synthetic oligonucleotide
gcaagauggcuuagagagc

SEQ ID NO: 426661 - RNA, 19 nt, Artificial Sequence
  Description of Artificial Sequence: Synthetic oligonucleotide
caucccaguuagaaauaua

SEQ ID NO: 426662 - RNA, 19 nt, Artificial Sequence
  Description of Artificial Sequence: Synthetic oligonucleotide
gcgcuccuaucuaugcucg

SEQ ID NO: 426663 - RNA, 19 nt, Artificial Sequence
  Description of Artificial Sequence: Synthetic oligonucleotide
cccgaucccaguccugagg

SEQ ID NO: 426664 - RNA, 19 nt, Artificial Sequence
  Description of Artificial Sequence: Synthetic oligonucleotide
ccaauguguaguauucucu

SEQ ID NO: 426665 - RNA, 19 nt, Artificial Sequence
  Description of Artificial Sequence: Synthetic oligonucleotide
gagagccuaauaacuucua

SEQ ID NO: 426666 - RNA, 19 nt, Artificial Sequence
  Description of Artificial Sequence: Synthetic oligonucleotide
cgcacgucggacauaaaca

SEQ ID NO: 426667 - RNA, 19 nt, Artificial Sequence
  Description of Artificial Sequence: Synthetic oligonucleotide
cauguaccuauccaauguu

SEQ ID NO: 426668 - RNA, 19 nt, Artificial Sequence
  Description of Artificial Sequence: Synthetic oligonucleotide
cauaguuggucuucacguu

SEQ ID NO: 426669 - RNA, 19 nt, Artificial Sequence
  Description of Artificial Sequence: Synthetic oligonucleotide
gaccgcugaagaccuauuu

SEQ ID NO: 426670 - RNA, 19 nt, Artificial Sequence
  Description of Artificial Sequence: Synthetic oligonucleotide
gcagaugcaccuuccguua

SEQ ID NO: 426671 - RNA, 19 nt, Artificial Sequence
  Description of Artificial Sequence: Synthetic oligonucleotide
cacagccuauuacacuuua

SEQ ID NO: 426672 - RNA, 19 nt, Artificial Sequence
  Description of Artificial Sequence: Synthetic oligonucleotide
caugguacgugcccauagu

SEQ ID NO: 426673 - RNA, 19 nt, Artificial Sequence
  Description of Artificial Sequence: Synthetic oligonucleotide
gggcuguauuuggagcagg

SEQ ID NO: 426674 - RNA, 19 nt, Artificial Sequence
  Description of Artificial Sequence: Synthetic oligonucleotide
agacugcucuguggccuuc

SEQ ID NO: 426675 - RNA, 19 nt, Artificial Sequence
  Description of Artificial Sequence: Synthetic oligonucleotide
ugaccacgaucuccuucuu

SEQ ID NO: 426676 - RNA, 19 nt, Artificial Sequence
  Description of Artificial Sequence: Synthetic oligonucleotide
acgugcccauaguaucgau

SEQ ID NO: 426677 - RNA, 19 nt, Artificial Sequence
  Description of Artificial Sequence: Synthetic oligonucleotide
gcuacaacccgaucccagu

SEQ ID NO: 426678 - RNA, 19 nt, Artificial Sequence
  Description of Artificial Sequence: Synthetic oligonucleotide
cuguagccgcacgucggac

SEQ ID NO: 426679 - RNA, 19 nt, Artificial Sequence
  Description of Artificial Sequence: Synthetic oligonucleotide
acgcaaugugggauccaca

SEQ ID NO: 426680 - RNA, 19 nt, Artificial Sequence
  Description of Artificial Sequence: Synthetic oligonucleotide
cuguaagauaguuguucuu

SEQ ID NO: 426681 - RNA, 19 nt, Artificial Sequence
  Description of Artificial Sequence: Synthetic oligonucleotide
agcauccacaaaacuccuu

SEQ ID NO: 426682 - RNA, 19 nt, Artificial Sequence
  Description of Artificial Sequence: Synthetic oligonucleotide
gccaggagaacuccccgaa

SEQ ID NO: 426683 - RNA, 19 nt, Artificial Sequence
  Description of Artificial Sequence: Synthetic oligonucleotide
ccccuugaccacgaucucc

SEQ ID NO: 426684 - RNA, 19 nt, Artificial Sequence
  Description of Artificial Sequence: Synthetic oligonucleotide
cggacauaaacaggaugag

SEQ ID NO: 426685 - RNA, 19 nt, Artificial Sequence
  Description of Artificial Sequence: Synthetic oligonucleotide
cgugcccauaguaucgauc

SEQ ID NO: 426686 - RNA, 19 nt, Artificial Sequence
  Description of Artificial Sequence: Synthetic oligonucleotide
ggccaggagaacuccccga

SEQ ID NO: 426687 - RNA, 19 nt, Artificial Sequence
  Description of Artificial Sequence: Synthetic oligonucleotide
ccauugagauauccaagua

SEQ ID NO: 426688 - RNA, 19 nt, Artificial Sequence
  Description of Artificial Sequence: Synthetic oligonucleotide
accuuccguuacagauuuc

SEQ ID NO: 426689 - RNA, 19 nt, Artificial Sequence
  Description of Artificial Sequence: Synthetic oligonucleotide
cugcagggauaauaauaau

SEQ ID NO: 426690 - RNA, 19 nt, Artificial Sequence
  Description of Artificial Sequence: Synthetic oligonucleotide
ggcauaaguuucaggggcu

SEQ ID NO: 426691 - RNA, 19 nt, Artificial Sequence
  Description of Artificial Sequence: Synthetic oligonucleotide
gcuggucuacuacucuaua

SEQ ID NO: 426692 - RNA, 19 nt, Artificial Sequence
  Description of Artificial Sequence: Synthetic oligonucleotide
guacgcaaugugggaucca

SEQ ID NO: 426693 - RNA, 19 nt, Artificial Sequence
  Description of Artificial Sequence: Synthetic oligonucleotide
ccuauccaauguuucccaa

SEQ ID NO: 426694 - RNA, 19 nt, Artificial Sequence
  Description of Artificial Sequence: Synthetic oligonucleotide
ccccgaagaucacuucauc

SEQ ID NO: 426695 - RNA, 19 nt, Artificial Sequence
  Description of Artificial Sequence: Synthetic oligonucleotide
cagcuacaacccgauccca

SEQ ID NO: 426696 - RNA, 19 nt, Artificial Sequence
  Description of Artificial Sequence: Synthetic oligonucleotide
gcgcuuaugauagcugagu

SEQ ID NO: 426697 - RNA, 19 nt, Artificial Sequence
  Description of Artificial Sequence: Synthetic oligonucleotide
gccgcuguuccggggcacg

SEQ ID NO: 426698 - RNA, 19 nt, Artificial Sequence
  Description of Artificial Sequence: Synthetic oligonucleotide
cauccucaauucgugguuu

SEQ ID NO: 426699 - RNA, 19 nt, Artificial Sequence
  Description of Artificial Sequence: Synthetic oligonucleotide
gcuccuaucuaugcucgcu

SEQ ID NO: 426700 - RNA, 19 nt, Artificial Sequence
  Description of Artificial Sequence: Synthetic oligonucleotide
cuuuucggucaggucuucu

SEQ ID NO: 426701 - RNA, 19 nt, Artificial Sequence
  Description of Artificial Sequence: Synthetic oligonucleotide
ccaaucgagcugccaaucu

SEQ ID NO: 426702 - RNA, 19 nt, Artificial Sequence
  Description of Artificial Sequence: Synthetic oligonucleotide
ccuuaucaagacgcacaca

SEQ ID NO: 426703 - RNA, 19 nt, Artificial Sequence
  Description of Artificial Sequence: Synthetic oligonucleotide
ugguagcugcagggauaau

SEQ ID NO: 426704 - RNA, 19 nt, Artificial Sequence
  Description of Artificial Sequence: Synthetic oligonucleotide
gggcgcuccuaucuaugcu

SEQ ID NO: 426705 - RNA, 19 nt, Artificial Sequence
  Description of Artificial Sequence: Synthetic oligonucleotide
cccugcugacaauaucucu

SEQ ID NO: 426706 - RNA, 19 nt, Artificial Sequence
  Description of Artificial Sequence: Synthetic oligonucleotide
ccguuacagauuucagcgu

SEQ ID NO: 426707 - RNA, 19 nt, Artificial Sequence
  Description of Artificial Sequence: Synthetic oligonucleotide
ccggggcacgcccuucuuc

SEQ ID NO: 426708 - RNA, 19 nt, Artificial Sequence
  Description of Artificial Sequence: Synthetic oligonucleotide
cguuacagacuagaaggcu

SEQ ID NO: 426709 - RNA, 19 nt, Artificial Sequence
  Description of Artificial Sequence: Synthetic oligonucleotide
uagccgcacgucggacaua

SEQ ID NO: 426710 - RNA, 19 nt, Artificial Sequence
  Description of Artificial Sequence: Synthetic oligonucleotide
ggcuucagacaaagaccua

SEQ ID NO: 426711 - RNA, 19 nt, Artificial Sequence
  Description of Artificial Sequence: Synthetic oligonucleotide
ccuuuguuuaagggcaguu

SEQ ID NO: 426712 - RNA, 19 nt, Artificial Sequence
  Description of Artificial Sequence: Synthetic oligonucleotide
gccuuccaaucgagcugcc

SEQ ID NO: 426713 - RNA, 19 nt, Artificial Sequence
  Description of Artificial Sequence: Synthetic oligonucleotide
cgugcucuguaagauaguu

SEQ ID NO: 426714 - RNA, 19 nt, Artificial Sequence
  Description of Artificial Sequence: Synthetic oligonucleotide
ccucaauucgugguuucuu

SEQ ID NO: 426715 - RNA, 19 nt, Artificial Sequence
  Description of Artificial Sequence: Synthetic oligonucleotide
cggggcacgcccuucuucu

SEQ ID NO: 426716 - RNA, 19 nt, Artificial Sequence
  Description of Artificial Sequence: Synthetic oligonucleotide
guggaccgcugaagaccua

SEQ ID NO: 426717 - RNA, 19 nt, Artificial Sequence
  Description of Artificial Sequence: Synthetic oligonucleotide
cgucggacauaaacaggau

SEQ ID NO: 426718 - RNA, 19 nt, Artificial Sequence
  Description of Artificial Sequence: Synthetic oligonucleotide
ccgugcucuguaagauagu

SEQ ID NO: 426719 - RNA, 19 nt, Artificial Sequence
  Description of Artificial Sequence: Synthetic oligonucleotide
ggaccgcugaagaccuauu

SEQ ID NO: 426720 - RNA, 19 nt, Artificial Sequence
  Description of Artificial Sequence: Synthetic oligonucleotide
gccgcacgucggacauaaa

SEQ ID NO: 426721 - RNA, 19 nt, Artificial Sequence
  Description of Artificial Sequence: Synthetic oligonucleotide
aagcauuaaguccaagugc

SEQ ID NO: 426722 - RNA, 19 nt, Artificial Sequence
  Description of Artificial Sequence: Synthetic oligonucleotide
aacgacauaaaauagucca

SEQ ID NO: 426723 - RNA, 19 nt, Artificial Sequence
  Description of Artificial Sequence: Synthetic oligonucleotide
aaaggauucaccugguagg

SEQ ID NO: 426724 - RNA, 19 nt, Artificial Sequence
  Description of Artificial Sequence: Synthetic oligonucleotide
aguagauacaaacuguggg

SEQ ID NO: 426725 - RNA, 19 nt, Artificial Sequence
  Description of Artificial Sequence: Synthetic oligonucleotide
aaauagaagggccugggag

SEQ ID NO: 426726 - RNA, 19 nt, Artificial Sequence
  Description of Artificial Sequence: Synthetic oligonucleotide
uucaaguagauacaaacug

SEQ ID NO: 426727 - RNA, 19 nt, Artificial Sequence
  Description of Artificial Sequence: Synthetic oligonucleotide
uggguguucgccuagaggg

SEQ ID NO: 426728 - RNA, 19 nt, Artificial Sequence
  Description of Artificial Sequence: Synthetic oligonucleotide
uguucaaguagauacaaac

SEQ ID NO: 426729 - RNA, 19 nt, Artificial Sequence
  Description of Artificial Sequence: Synthetic oligonucleotide
uuuaacacuccccuggagc

SEQ ID NO: 426730 - RNA, 19 nt, Artificial Sequence
  Description of Artificial Sequence: Synthetic oligonucleotide
gucaaugcaagccuggacg

SEQ ID NO: 426731 - RNA, 19 nt, Artificial Sequence
  Description of Artificial Sequence: Synthetic oligonucleotide
agcauuaaguccaagugcc

SEQ ID NO: 426732 - RNA, 19 nt, Artificial Sequence
  Description of Artificial Sequence: Synthetic oligonucleotide
cuaguagagggcaaaaccc

SEQ ID NO: 426733 - RNA, 19 nt, Artificial Sequence
  Description of Artificial Sequence: Synthetic oligonucleotide
aaugugaaaggagagcuug

SEQ ID NO: 426734 - RNA, 19 nt, Artificial Sequence
  Description of Artificial Sequence: Synthetic oligonucleotide
aaugcaagccuggacggcc

SEQ ID NO: 426735 - RNA, 19 nt, Artificial Sequence
  Description of Artificial Sequence: Synthetic oligonucleotide
uuaaacucauugcuuggag

SEQ ID NO: 426736 - RNA, 19 nt, Artificial Sequence
  Description of Artificial Sequence: Synthetic oligonucleotide
aagcggaggacauagguga

SEQ ID NO: 426737 - RNA, 19 nt, Artificial Sequence
  Description of Artificial Sequence: Synthetic oligonucleotide
acuacuguagcaaugcagg

SEQ ID NO: 426738 - RNA, 19 nt, Artificial Sequence
  Description of Artificial Sequence: Synthetic oligonucleotide
agagacuggggcuacagag

SEQ ID NO: 426739 - RNA, 19 nt, Artificial Sequence
  Description of Artificial Sequence: Synthetic oligonucleotide
aaaaggucugcaccguaag

SEQ ID NO: 426740 - RNA, 19 nt, Artificial Sequence
  Description of Artificial Sequence: Synthetic oligonucleotide
uguugagaaggcauggcug

SEQ ID NO: 426741 - RNA, 19 nt, Artificial Sequence
  Description of Artificial Sequence: Synthetic oligonucleotide
uguguuuccaaggaccggg

SEQ ID NO: 426742 - RNA, 19 nt, Artificial Sequence
  Description of Artificial Sequence: Synthetic oligonucleotide
aaggcauuaggccccaucu

SEQ ID NO: 426743 - RNA, 19 nt, Artificial Sequence
  Description of Artificial Sequence: Synthetic oligonucleotide
uuuaaggcccuagaauugg

SEQ ID NO: 426744 - RNA, 19 nt, Artificial Sequence
  Description of Artificial Sequence: Synthetic oligonucleotide
ucuaaacuucccgugagag

SEQ ID NO: 426745 - RNA, 19 nt, Artificial Sequence
  Description of Artificial Sequence: Synthetic oligonucleotide
  modified_base (7)..(7): a, c, u, g, unknown or other
  modified_base (10)..(10): a, c, u, g, unknown or other
caaggcncanacgggaucg

SEQ ID NO: 426746 - RNA, 19 nt, Artificial Sequence
  Description of Artificial Sequence: Synthetic oligonucleotide
ugauuucguuuccagaaug

SEQ ID NO: 426747 - RNA, 19 nt, Artificial Sequence
  Description of Artificial Sequence: Synthetic oligonucleotide
uccauuaagucugagugug

SEQ ID NO: 426748 - RNA, 19 nt, Artificial Sequence
  Description of Artificial Sequence: Synthetic oligonucleotide
caaguagauacaaacugug

SEQ ID NO: 426749 - RNA, 19 nt, Artificial Sequence
  Description of Artificial Sequence: Synthetic oligonucleotide
uuaacacuccccuggagca

SEQ ID NO: 426750 - RNA, 19 nt, Artificial Sequence
  Description of Artificial Sequence: Synthetic oligonucleotide
gauaaccuggaguucgaag

SEQ ID NO: 426751 - RNA, 19 nt, Artificial Sequence
  Description of Artificial Sequence: Synthetic oligonucleotide
ugagaugaccucaccgccg

SEQ ID NO: 426752 - RNA, 19 nt, Artificial Sequence
  Description of Artificial Sequence: Synthetic oligonucleotide
auuccauaucccuucuuuc

SEQ ID NO: 426753 - RNA, 19 nt, Artificial Sequence
  Description of Artificial Sequence: Synthetic oligonucleotide
auuaggccccaucuuuugc

SEQ ID NO: 426754 - RNA, 19 nt, Artificial Sequence
  Description of Artificial Sequence: Synthetic oligonucleotide
  modified_base (12)..(12): a, c, u, g, unknown or other
  modified_base (15)..(15): a, c, u, g, unknown or other
gccaucaaggcncanacgg

SEQ ID NO: 426755 - RNA, 19 nt, Artificial Sequence
  Description of Artificial Sequence: Synthetic oligonucleotide
ccagauaccgaucugaccc

SEQ ID NO: 426756 - RNA, 19 nt, Artificial Sequence
  Description of Artificial Sequence: Synthetic oligonucleotide
agagauagagacuggggcu

SEQ ID NO: 426757 - RNA, 19 nt, Artificial Sequence
  Description of Artificial Sequence: Synthetic oligonucleotide
ugauaagcacagucaaugc

SEQ ID NO: 426758 - RNA, 19 nt, Artificial Sequence
  Description of Artificial Sequence: Synthetic oligonucleotide
ucagucuaaacuucccgug

SEQ ID NO: 426759 - RNA, 19 nt, Artificial Sequence
  Description of Artificial Sequence: Synthetic oligonucleotide
auaaauagaagggccuggg

SEQ ID NO: 426760 - RNA, 19 nt, Artificial Sequence
  Description of Artificial Sequence: Synthetic oligonucleotide
caaacagauugucacuccg

SEQ ID NO: 426761 - RNA, 19 nt, Artificial Sequence
  Description of Artificial Sequence: Synthetic oligonucleotide
auugcuuggagguguguag

SEQ ID NO: 426762 - RNA, 19 nt, Artificial Sequence
  Description of Artificial Sequence: Synthetic oligonucleotide
aacagauugucacuccgaa

SEQ ID NO: 426763 - RNA, 19 nt, Artificial Sequence
  Description of Artificial Sequence: Synthetic oligonucleotide
ugcauauaccucucugucc

SEQ ID NO: 426764 - RNA, 19 nt, Artificial Sequence
  Description of Artificial Sequence: Synthetic oligonucleotide
cacgagggaagcaagggcc

SEQ ID NO: 426765 - RNA, 19 nt, Artificial Sequence
  Description of Artificial Sequence: Synthetic oligonucleotide
agagccuacgcacagcuga

SEQ ID NO: 426766 - RNA, 19 nt, Artificial Sequence
  Description of Artificial Sequence: Synthetic oligonucleotide
agucguuggaucuucuucu

SEQ ID NO: 426767 - RNA, 19 nt, Artificial Sequence
  Description of Artificial Sequence: Synthetic oligonucleotide
uuggguguucgccuagagg

SEQ ID NO: 426768 - RNA, 19 nt, Artificial Sequence
  Description of Artificial Sequence: Synthetic oligonucleotide
cuaaacuucccgugagagg

SEQ ID NO: 426769 - RNA, 19 nt, Artificial Sequence
  Description of Artificial Sequence: Synthetic oligonucleotide
ugagggguaagugagucug

SEQ ID NO: 426770 - RNA, 19 nt, Artificial Sequence
  Description of Artificial Sequence: Synthetic oligonucleotide
cuuuccaugcccagugugc

SEQ ID NO: 426771 - RNA, 19 nt, Artificial Sequence
  Description of Artificial Sequence: Synthetic oligonucleotide
ucaggaagucguuggaucu

SEQ ID NO: 426772 - RNA, 19 nt, Artificial Sequence
  Description of Artificial Sequence: Synthetic oligonucleotide
gcuaguagagggcaaaacc

SEQ ID NO: 426773 - RNA, 19 nt, Artificial Sequence
  Description of Artificial Sequence: Synthetic oligonucleotide
uaaauagaagggccuggga

SEQ ID NO: 426774 - RNA, 19 nt, Artificial Sequence
  Description of Artificial Sequence: Synthetic oligonucleotide
uaaaaggucugcaccguaa

SEQ ID NO: 426775 - RNA, 19 nt, Artificial Sequence
  Description of Artificial Sequence: Synthetic oligonucleotide
aucgaucucguguuuccgg

SEQ ID NO: 426776 - RNA, 19 nt, Artificial Sequence
  Description of Artificial Sequence: Synthetic oligonucleotide
cauuccaccauucuucuca

SEQ ID NO: 426777 - RNA, 19 nt, Artificial Sequence
  Description of Artificial Sequence: Synthetic oligonucleotide
acaaacgacauaaaauagu

SEQ ID NO: 426778 - RNA, 19 nt, Artificial Sequence
  Description of Artificial Sequence: Synthetic oligonucleotide
uaaggaucuuggguguucg

SEQ ID NO: 426779 - RNA, 19 nt, Artificial Sequence
  Description of Artificial Sequence: Synthetic oligonucleotide
ugguauccgguucaggggu

SEQ ID NO: 426780 - RNA, 19 nt, Artificial Sequence
  Description of Artificial Sequence: Synthetic oligonucleotide
aaaggucugcaccguaagu

SEQ ID NO: 426781 - RNA, 19 nt, Artificial Sequence
  Description of Artificial Sequence: Synthetic oligonucleotide
aguguguuuccaaggaccg

SEQ ID NO: 426782 - RNA, 19 nt, Artificial Sequence
  Description of Artificial Sequence: Synthetic oligonucleotide
gaucucguguuuccggaag

SEQ ID NO: 426783 - RNA, 19 nt, Artificial Sequence
  Description of Artificial Sequence: Synthetic oligonucleotide
ggugggauggggaauaagg

SEQ ID NO: 426784 - RNA, 19 nt, Artificial Sequence
  Description of Artificial Sequence: Synthetic oligonucleotide
ugcaccguaaguucagagu

SEQ ID NO: 426785 - RNA, 19 nt, Artificial Sequence
  Description of Artificial Sequence: Synthetic oligonucleotide
aauuucaugcugaucuuaa

SEQ ID NO: 426786 - RNA, 19 nt, Artificial Sequence
  Description of Artificial Sequence: Synthetic oligonucleotide
gagucaacuagucuccaga

SEQ ID NO: 426787 - RNA, 19 nt, Artificial Sequence
  Description of Artificial Sequence: Synthetic oligonucleotide
uagaauuggccucuuccuc

SEQ ID NO: 426788 - RNA, 19 nt, Artificial Sequence
  Description of Artificial Sequence: Synthetic oligonucleotide
gugcugacaagguuggcag

SEQ ID NO: 426789 - RNA, 19 nt, Artificial Sequence
  Description of Artificial Sequence: Synthetic oligonucleotide
aaaaugucuggugcaagaa

SEQ ID NO: 426790 - RNA, 19 nt, Artificial Sequence
  Description of Artificial Sequence: Synthetic oligonucleotide
gaguuuggggaucuguuga

SEQ ID NO: 426791 - RNA, 19 nt, Artificial Sequence
  Description of Artificial Sequence: Synthetic oligonucleotide
ugguagguaccugucgugg

SEQ ID NO: 426792 - RNA, 19 nt, Artificial Sequence
  Description of Artificial Sequence: Synthetic oligonucleotide
cugguauccgguucagggg

SEQ ID NO: 426793 - RNA, 19 nt, Artificial Sequence
  Description of Artificial Sequence: Synthetic oligonucleotide
aguuuggggaucuguugag

SEQ ID NO: 426794 - RNA, 19 nt, Artificial Sequence
  Description of Artificial Sequence: Synthetic oligonucleotide
uuaaggcccuagaauuggc

SEQ ID NO: 426795 - RNA, 19 nt, Artificial Sequence
  Description of Artificial Sequence: Synthetic oligonucleotide
ccaccguccaugaagaagg

SEQ ID NO: 426796 - RNA, 19 nt, Artificial Sequence
  Description of Artificial Sequence: Synthetic oligonucleotide
uuggggaucuguugagaag

SEQ ID NO: 426797 - RNA, 19 nt, Artificial Sequence
  Description of Artificial Sequence: Synthetic oligonucleotide
ugacuguacucuguggcag

SEQ ID NO: 426798 - RNA, 19 nt, Artificial Sequence
  Description of Artificial Sequence: Synthetic oligonucleotide
acuagaccaagcccaggag

SEQ ID NO: 426799 - RNA, 19 nt, Artificial Sequence
  Description of Artificial Sequence: Synthetic oligonucleotide
aacuagucuccagaaguca

SEQ ID NO: 426800 - RNA, 19 nt, Artificial Sequence
  Description of Artificial Sequence: Synthetic oligonucleotide
augaccucaccgccguggc

SEQ ID NO: 426801 - RNA, 19 nt, Artificial Sequence
  Description of Artificial Sequence: Synthetic oligonucleotide
cuacgcacagcugaggcag

SEQ ID NO: 426802 - RNA, 19 nt, Artificial Sequence
  Description of Artificial Sequence: Synthetic oligonucleotide
cuacagaggugccugggag

SEQ ID NO: 426803 - RNA, 19 nt, Artificial Sequence
  Description of Artificial Sequence: Synthetic oligonucleotide
uccagauaccgaucugacc

SEQ ID NO: 426804 - RNA, 19 nt, Artificial Sequence
  Description of Artificial Sequence: Synthetic oligonucleotide
cuuacugccaggcuuggga

SEQ ID NO: 426805 - RNA, 19 nt, Artificial Sequence
  Description of Artificial Sequence: Synthetic oligonucleotide
aaggucugcaccguaaguu

SEQ ID NO: 426806 - RNA, 19 nt, Artificial Sequence
  Description of Artificial Sequence: Synthetic oligonucleotide
gaagcggaggacauaggug

SEQ ID NO: 426807 - RNA, 19 nt, Artificial Sequence
  Description of Artificial Sequence: Synthetic oligonucleotide
gucacugcgcagcaggagc

SEQ ID NO: 426808 - RNA, 19 nt, Artificial Sequence
  Description of Artificial Sequence: Synthetic oligonucleotide
aucccggccacucaggcga

SEQ ID NO: 426809 - RNA, 19 nt, Artificial Sequence
  Description of Artificial Sequence: Synthetic oligonucleotide
gaggagucaacuagucucc

SEQ ID NO: 426810 - RNA, 19 nt, Artificial Sequence
  Description of Artificial Sequence: Synthetic oligonucleotide
  modified_base (8)..(8): a, c, u, g, unknown or other
  modified_base (11)..(11): a, c, u, g, unknown or other
ucaaggcncanacgggauc

SEQ ID NO: 426811 - RNA, 19 nt, Artificial Sequence
  Description of Artificial Sequence: Synthetic oligonucleotide
cuggugauaagcacaguca

SEQ ID NO: 426812 - RNA, 19 nt, Artificial Sequence
  Description of Artificial Sequence: Synthetic oligonucleotide
uucccggacaaacugcauc

SEQ ID NO: 426813 - RNA, 19 nt, Artificial Sequence
  Description of Artificial Sequence: Synthetic oligonucleotide
gucaacuagucuccagaag

SEQ ID NO: 426814 - RNA, 19 nt, Artificial Sequence
  Description of Artificial Sequence: Synthetic oligonucleotide
uaaaagggcugguugccaa

SEQ ID NO: 426815 - RNA, 19 nt, Artificial Sequence
  Description of Artificial Sequence: Synthetic oligonucleotide
agcuaguagagggcaaaac

SEQ ID NO: 426816 - RNA, 19 nt, Artificial Sequence
  Description of Artificial Sequence: Synthetic oligonucleotide
ggauucaccugguagguac

SEQ ID NO: 426817 - RNA, 19 nt, Artificial Sequence
  Description of Artificial Sequence: Synthetic oligonucleotide
auaaggaucuuggguguuc

SEQ ID NO: 426818 - RNA, 19 nt, Artificial Sequence
  Description of Artificial Sequence: Synthetic oligonucleotide
aaaccccuccagccuagag

SEQ ID NO: 426819 - RNA, 19 nt, Artificial Sequence
  Description of Artificial Sequence: Synthetic oligonucleotide
gacaguuuucuggugauaa

SEQ ID NO: 426820 - RNA, 19 nt, Artificial Sequence
  Description of Artificial Sequence: Synthetic oligonucleotide
ucgaucucguguuuccgga

SEQ ID NO: 426821 - RNA, 19 nt, Artificial Sequence
  Description of Artificial Sequence: Synthetic oligonucleotide
aaacagauugucacuccga

SEQ ID NO: 426822 - RNA, 19 nt, Artificial Sequence
  Description of Artificial Sequence: Synthetic oligonucleotide
uccuuuuaacacuccccug

SEQ ID NO: 426823 - RNA, 19 nt, Artificial Sequence
  Description of Artificial Sequence: Synthetic oligonucleotide
agggccgauaaccuggagu

SEQ ID NO: 426824 - RNA, 19 nt, Artificial Sequence
  Description of Artificial Sequence: Synthetic oligonucleotide
cugguguaggaagagggag

SEQ ID NO: 426825 - RNA, 19 nt, Artificial Sequence
  Description of Artificial Sequence: Synthetic oligonucleotide
agucaacuagucuccagaa

SEQ ID NO: 426826 - RNA, 19 nt, Artificial Sequence
  Description of Artificial Sequence: Synthetic oligonucleotide
ugcagcauuccaccauucu

SEQ ID NO: 426827 - RNA, 19 nt, Artificial Sequence
  Description of Artificial Sequence: Synthetic oligonucleotide
agauugucacuccgaaggu

SEQ ID NO: 426828 - RNA, 19 nt, Artificial Sequence
  Description of Artificial Sequence: Synthetic oligonucleotide
gugcauauaccucucuguc

SEQ ID NO: 426829 - RNA, 19 nt, Artificial Sequence
  Description of Artificial Sequence: Synthetic oligonucleotide
gggaagaacagcaccagcc

SEQ ID NO: 426830 - RNA, 19 nt, Artificial Sequence
  Description of Artificial Sequence: Synthetic oligonucleotide
gcauauaccucucugucca

SEQ ID NO: 426831 - RNA, 19 nt, Artificial Sequence
  Description of Artificial Sequence: Synthetic oligonucleotide
gucacuccgaagguugugg

SEQ ID NO: 426832 - RNA, 19 nt, Artificial Sequence
  Description of Artificial Sequence: Synthetic oligonucleotide
uccaagugccagaagcaau

SEQ ID NO: 426833 - RNA, 19 nt, Artificial Sequence
  Description of Artificial Sequence: Synthetic oligonucleotide
gguugggaaaacuccauca

SEQ ID NO: 426834 - RNA, 19 nt, Artificial Sequence
  Description of Artificial Sequence: Synthetic oligonucleotide
uccaauuggcuggauuuca

SEQ ID NO: 426835 - RNA, 19 nt, Artificial Sequence
  Description of Artificial Sequence: Synthetic oligonucleotide
ugcugacaagguuggcagg

SEQ ID NO: 426836 - RNA, 19 nt, Artificial Sequence
  Description of Artificial Sequence: Synthetic oligonucleotide
uggcccaaaauggucagga

SEQ ID NO: 426837 - RNA, 19 nt, Artificial Sequence
  Description of Artificial Sequence: Synthetic oligonucleotide
gaauaaggaucuugggugu

SEQ ID NO: 426838 - RNA, 19 nt, Artificial Sequence
  Description of Artificial Sequence: Synthetic oligonucleotide
augauuucguuuccagaau

SEQ ID NO: 426839 - RNA, 19 nt, Artificial Sequence
  Description of Artificial Sequence: Synthetic oligonucleotide
accguaaguucagaguuug

SEQ ID NO: 426840 - RNA, 19 nt, Artificial Sequence
  Description of Artificial Sequence: Synthetic oligonucleotide
gaucccggccacucaggcg

SEQ ID NO: 426841 - RNA, 19 nt, Artificial Sequence
  Description of Artificial Sequence: Synthetic oligonucleotide
ucucguguuuccggaagag

SEQ ID NO: 426842 - RNA, 19 nt, Artificial Sequence
  Description of Artificial Sequence: Synthetic oligonucleotide
cauuaggccccaucuuuug

SEQ ID NO: 426843 - RNA, 19 nt, Artificial Sequence
  Description of Artificial Sequence: Synthetic oligonucleotide
aagugccagaagcaauaaa

SEQ ID NO: 426844 - RNA, 19 nt, Artificial Sequence
  Description of Artificial Sequence: Synthetic oligonucleotide
acccuggggaaugauuucg

SEQ ID NO: 426845 - RNA, 19 nt, Artificial Sequence
  Description of Artificial Sequence: Synthetic oligonucleotide
gacauaaaauaguccagau

SEQ ID NO: 426846 - RNA, 19 nt, Artificial Sequence
  Description of Artificial Sequence: Synthetic oligonucleotide
gauaccgaucugacccugg

SEQ ID NO: 426847 - RNA, 19 nt, Artificial Sequence
  Description of Artificial Sequence: Synthetic oligonucleotide
gacacuagaccaagcccag

SEQ ID NO: 426848 - RNA, 19 nt, Artificial Sequence
  Description of Artificial Sequence: Synthetic oligonucleotide
uccaaggacaaaggauuca

SEQ ID NO: 426849 - RNA, 19 nt, Artificial Sequence
  Description of Artificial Sequence: Synthetic oligonucleotide
  modified_base (6)..(6): a, c, u, g, unknown or other
  modified_base (9)..(9): a, c, u, g, unknown or other
aaggcncanacgggaucgg

SEQ ID NO: 426850 - RNA, 19 nt, Artificial Sequence
  Description of Artificial Sequence: Synthetic oligonucleotide
aggaagucguuggaucuuc

SEQ ID NO: 426851 - RNA, 19 nt, Artificial Sequence
  Description of Artificial Sequence: Synthetic oligonucleotide
caaggugcucagucuaaac

SEQ ID NO: 426852 - RNA, 19 nt, Artificial Sequence
  Description of Artificial Sequence: Synthetic oligonucleotide
agauagagacuggggcuac

SEQ ID NO: 426853 - RNA, 19 nt, Artificial Sequence
  Description of Artificial Sequence: Synthetic oligonucleotide
gccgauaaccuggaguucg

SEQ ID NO: 426854 - RNA, 19 nt, Artificial Sequence
  Description of Artificial Sequence: Synthetic oligonucleotide
caaugggaggccacacgag

SEQ ID NO: 426855 - RNA, 19 nt, Artificial Sequence
  Description of Artificial Sequence: Synthetic oligonucleotide
caccugucaguccaacuac

SEQ ID NO: 426856 - RNA, 19 nt, Artificial Sequence
  Description of Artificial Sequence: Synthetic oligonucleotide
agugugcauauaccucucu

SEQ ID NO: 426857 - RNA, 19 nt, Artificial Sequence
  Description of Artificial Sequence: Synthetic oligonucleotide
gaauggcuccuguucagaa

SEQ ID NO: 426858 - RNA, 19 nt, Artificial Sequence
  Description of Artificial Sequence: Synthetic oligonucleotide
cugcaccguaaguucagag

SEQ ID NO: 426859 - RNA, 19 nt, Artificial Sequence
  Description of Artificial Sequence: Synthetic oligonucleotide
uguccaucccacagagaaa

SEQ ID NO: 426860 - RNA, 19 nt, Artificial Sequence
  Description of Artificial Sequence: Synthetic oligonucleotide
gugacuguacucuguggca

SEQ ID NO: 426861 - RNA, 19 nt, Artificial Sequence
  Description of Artificial Sequence: Synthetic oligonucleotide
gggcaaaaccccuccagcc

SEQ ID NO: 426862 - RNA, 19 nt, Artificial Sequence
  Description of Artificial Sequence: Synthetic oligonucleotide
cacuagaccaagcccagga

SEQ ID NO: 426863 - RNA, 19 nt, Artificial Sequence
  Description of Artificial Sequence: Synthetic oligonucleotide
aauaaggaucuuggguguu

SEQ ID NO: 426864 - RNA, 19 nt, Artificial Sequence
  Description of Artificial Sequence: Synthetic oligonucleotide
  modified_base (4)..(4): a, c, u, g, unknown or other
  modified_base (7)..(7): a, c, u, g, unknown or other
ggcncanacgggaucgggc

SEQ ID NO: 426865 - RNA, 19 nt, Artificial Sequence
  Description of Artificial Sequence: Synthetic oligonucleotide
ggccauggacacuagacca

SEQ ID NO: 426866 - RNA, 19 nt, Artificial Sequence
  Description of Artificial Sequence: Synthetic oligonucleotide
ggacacuagaccaagccca

SEQ ID NO: 426867 - RNA, 19 nt, Artificial Sequence
  Description of Artificial Sequence: Synthetic oligonucleotide
aaguccgagguuuccucuu

SEQ ID NO: 426868 - RNA, 19 nt, Artificial Sequence
  Description of Artificial Sequence: Synthetic oligonucleotide
ugucacugcgcagcaggag

SEQ ID NO: 426869 - RNA, 19 nt, Artificial Sequence
  Description of Artificial Sequence: Synthetic oligonucleotide
gaguccauuaagucugagu

SEQ ID NO: 426870 - RNA, 19 nt, Artificial Sequence
  Description of Artificial Sequence: Synthetic oligonucleotide
ucuuacugccaggcuuggg

SEQ ID NO: 426871 - RNA, 19 nt, Artificial Sequence
  Description of Artificial Sequence: Synthetic oligonucleotide
caucgaucucguguuuccg

SEQ ID NO: 426872 - RNA, 19 nt, Artificial Sequence
  Description of Artificial Sequence: Synthetic oligonucleotide
  modified_base (2)..(2): a, c, u, g, unknown or other
  modified_base (5)..(5): a, c, u, g, unknown or other
cncanacgggaucgggcac

SEQ ID NO: 426873 - RNA, 19 nt, Artificial Sequence
  Description of Artificial Sequence: Synthetic oligonucleotide
  modified_base (5)..(5): a, c, u, g, unknown or other
  modified_base (8)..(8): a, c, u, g, unknown or other
aggcncanacgggaucggg

SEQ ID NO: 426874 - RNA, 19 nt, Artificial Sequence
  Description of Artificial Sequence: Synthetic oligonucleotide
ugacaagguuggcaggcuu

SEQ ID NO: 426875 - RNA, 19 nt, Artificial Sequence
  Description of Artificial Sequence: Synthetic oligonucleotide
uggcuagccuugaaauaaa

SEQ ID NO: 426876 - RNA, 19 nt, Artificial Sequence
  Description of Artificial Sequence: Synthetic oligonucleotide
cagucuaaacuucccguga

SEQ ID NO: 426877 - RNA, 19 nt, Artificial Sequence
  Description of Artificial Sequence: Synthetic oligonucleotide
  modified_base (3)..(3): a, c, u, g, unknown or other
  modified_base (6)..(6): a, c, u, g, unknown or other
gcncanacgggaucgggca

SEQ ID NO: 426878 - RNA, 19 nt, Artificial Sequence
  Description of Artificial Sequence: Synthetic oligonucleotide
cucagucuaaacuucccgu

SEQ ID NO: 426879 - RNA, 19 nt, Artificial Sequence
  Description of Artificial Sequence: Synthetic oligonucleotide
ucguuggaucuucuucuua

SEQ ID NO: 426880 - RNA, 19 nt, Artificial Sequence
  Description of Artificial Sequence: Synthetic oligonucleotide
gugggauggggaauaagga

SEQ ID NO: 426881 - RNA, 19 nt, Artificial Sequence
  Description of Artificial Sequence: Synthetic oligonucleotide
ccugucguggcugugacug

SEQ ID NO: 426882 - RNA, 19 nt, Artificial Sequence
  Description of Artificial Sequence: Synthetic oligonucleotide
gaucgggcaccugucaguc

SEQ ID NO: 426883 - RNA, 19 nt, Artificial Sequence
  Description of Artificial Sequence: Synthetic oligonucleotide
ggagucaacuagucuccag

SEQ ID NO: 426884 - RNA, 19 nt, Artificial Sequence
  Description of Artificial Sequence: Synthetic oligonucleotide
ggccauacuucucuggaga

SEQ ID NO: 426885 - RNA, 19 nt, Artificial Sequence
  Description of Artificial Sequence: Synthetic oligonucleotide
ccaaacagauugucacucc

SEQ ID NO: 426886 - RNA, 19 nt, Artificial Sequence
  Description of Artificial Sequence: Synthetic oligonucleotide
agcccuagggcaguguccu

SEQ ID NO: 426887 - RNA, 19 nt, Artificial Sequence
  Description of Artificial Sequence: Synthetic oligonucleotide
uccgaagguuguggcagag

SEQ ID NO: 426888 - RNA, 19 nt, Artificial Sequence
  Description of Artificial Sequence: Synthetic oligonucleotide
gggaacagugcugguaucc

SEQ ID NO: 426889 - RNA, 19 nt, Artificial Sequence
  Description of Artificial Sequence: Synthetic oligonucleotide
gcugacaagguuggcaggc

SEQ ID NO: 426890 - RNA, 19 nt, Artificial Sequence
  Description of Artificial Sequence: Synthetic oligonucleotide
gguaagugagucuguguaa

SEQ ID NO: 426891 - RNA, 19 nt, Artificial Sequence
  Description of Artificial Sequence: Synthetic oligonucleotide
ugcugguauccgguucagg

SEQ ID NO: 426892 - RNA, 19 nt, Artificial Sequence
  Description of Artificial Sequence: Synthetic oligonucleotide
agagcccuacagaggugcc

SEQ ID NO: 426893 - RNA, 19 nt, Artificial Sequence
  Description of Artificial Sequence: Synthetic oligonucleotide
cuuggcuagccuugaaaua

SEQ ID NO: 426894 - RNA, 19 nt, Artificial Sequence
  Description of Artificial Sequence: Synthetic oligonucleotide
agcaacaagaaaagaucuu

SEQ ID NO: 426895 - RNA, 19 nt, Artificial Sequence
  Description of Artificial Sequence: Synthetic oligonucleotide
gagccuacgcacagcugag

SEQ ID NO: 426896 - RNA, 19 nt, Artificial Sequence
  Description of Artificial Sequence: Synthetic oligonucleotide
ucugcaccguaaguucaga

SEQ ID NO: 426897 - RNA, 19 nt, Artificial Sequence
  Description of Artificial Sequence: Synthetic oligonucleotide
uuccggggagaagaauggc

SEQ ID NO: 426898 - RNA, 19 nt, Artificial Sequence
  Description of Artificial Sequence: Synthetic oligonucleotide
ugaccucaccgccguggcc

SEQ ID NO: 426899 - RNA, 19 nt, Artificial Sequence
  Description of Artificial Sequence: Synthetic oligonucleotide
gacggccugcugcaacacc

SEQ ID NO: 426900 - RNA, 19 nt, Artificial Sequence
  Description of Artificial Sequence: Synthetic oligonucleotide
ccaucgaucucguguuucc

SEQ ID NO: 426901 - RNA, 19 nt, Artificial Sequence
  Description of Artificial Sequence: Synthetic oligonucleotide
caaugcaagccuggacggc

SEQ ID NO: 426902 - RNA, 19 nt, Artificial Sequence
  Description of Artificial Sequence: Synthetic oligonucleotide
ccaauuggcuggauuucag

SEQ ID NO: 426903 - RNA, 19 nt, Artificial Sequence
  Description of Artificial Sequence: Synthetic oligonucleotide
gacccuggggaaugauuuc

SEQ ID NO: 426904 - RNA, 19 nt, Artificial Sequence
  Description of Artificial Sequence: Synthetic oligonucleotide
ccggucaaugugaaaggag

SEQ ID NO: 426905 - RNA, 19 nt, Artificial Sequence
  Description of Artificial Sequence: Synthetic oligonucleotide
gccuacgcacagcugaggc

SEQ ID NO: 426906 - RNA, 19 nt, Artificial Sequence
  Description of Artificial Sequence: Synthetic oligonucleotide
  modified_base (9)..(9): a, c, u, g, unknown or other
  modified_base (12)..(12): a, c, u, g, unknown or other
aucaaggcncanacgggau

SEQ ID NO: 426907 - RNA, 19 nt, Artificial Sequence
  Description of Artificial Sequence: Synthetic oligonucleotide
acacuagaccaagcccagg

SEQ ID NO: 426908 - RNA, 19 nt, Artificial Sequence
  Description of Artificial Sequence: Synthetic oligonucleotide
agauaccgaucugacccug

SEQ ID NO: 426909 - RNA, 19 nt, Artificial Sequence
  Description of Artificial Sequence: Synthetic oligonucleotide
guagcuaguagagggcaaa

SEQ ID NO: 426910 - RNA, 19 nt, Artificial Sequence
  Description of Artificial Sequence: Synthetic oligonucleotide
aaccuggaguucgaagguu

SEQ ID NO: 426911 - RNA, 19 nt, Artificial Sequence
  Description of Artificial Sequence: Synthetic oligonucleotide
uagcuaguagagggcaaaa

SEQ ID NO: 426912 - RNA, 19 nt, Artificial Sequence
  Description of Artificial Sequence: Synthetic oligonucleotide
gggaucgggcaccugucag

SEQ ID NO: 426913 - RNA, 19 nt, Artificial Sequence
  Description of Artificial Sequence: Synthetic oligonucleotide
ggggccauggacacuagac

SEQ ID NO: 426914 - RNA, 19 nt, Artificial Sequence
  Description of Artificial Sequence: Synthetic oligonucleotide
ccacacgagggaagcaagg

SEQ ID NO: 426915 - RNA, 19 nt, Artificial Sequence
  Description of Artificial Sequence: Synthetic oligonucleotide
gcgaggagcaucucggcuc

SEQ ID NO: 426916 - RNA, 19 nt, Artificial Sequence
  Description of Artificial Sequence: Synthetic oligonucleotide
ccugucaguccaacuacug

SEQ ID NO: 426917 - RNA, 19 nt, Artificial Sequence
  Description of Artificial Sequence: Synthetic oligonucleotide
aacuucccgugagaggcuu

SEQ ID NO: 426918 - RNA, 19 nt, Artificial Sequence
  Description of Artificial Sequence: Synthetic oligonucleotide
gggccauacuucucuggag

SEQ ID NO: 426919 - RNA, 19 nt, Artificial Sequence
  Description of Artificial Sequence: Synthetic oligonucleotide
aggcauuaggccccaucuu

SEQ ID NO: 426920 - RNA, 19 nt, Artificial Sequence
  Description of Artificial Sequence: Synthetic oligonucleotide
uucucuggagaggcccucu

SEQ ID NO: 426921 - RNA, 19 nt, Artificial Sequence
  Description of Artificial Sequence: Synthetic oligonucleotide
aaaaccccuccagccuaga

SEQ ID NO: 426922 - RNA, 19 nt, Artificial Sequence
  Description of Artificial Sequence: Synthetic oligonucleotide
cuggacggccugcugcaac

SEQ ID NO: 426923 - RNA, 19 nt, Artificial Sequence
  Description of Artificial Sequence: Synthetic oligonucleotide
aguccgagguuuccucuua

SEQ ID NO: 426924 - RNA, 19 nt, Artificial Sequence
  Description of Artificial Sequence: Synthetic oligonucleotide
guauccgguucaggggugc

SEQ ID NO: 426925 - RNA, 19 nt, Artificial Sequence
  Description of Artificial Sequence: Synthetic oligonucleotide
gccguggccuuguuugagg

SEQ ID NO: 426926 - RNA, 19 nt, Artificial Sequence
  Description of Artificial Sequence: Synthetic oligonucleotide
cucuuacugccaggcuugg

SEQ ID NO: 426927 - RNA, 19 nt, Artificial Sequence
  Description of Artificial Sequence: Synthetic oligonucleotide
gguuguggcagaguuucuc

SEQ ID NO: 426928 - RNA, 19 nt, Artificial Sequence
  Description of Artificial Sequence: Synthetic oligonucleotide
gccuuuuaaggcccuagaa

SEQ ID NO: 426929 - RNA, 19 nt, Artificial Sequence
  Description of Artificial Sequence: Synthetic oligonucleotide
gauagagacuggggcuaca

SEQ ID NO: 426930 - RNA, 19 nt, Artificial Sequence
  Description of Artificial Sequence: Synthetic oligonucleotide
cuggcccaaaauggucagg

SEQ ID NO: 426931 - RNA, 19 nt, Artificial Sequence
  Description of Artificial Sequence: Synthetic oligonucleotide
uacgcacagcugaggcagu

SEQ ID NO: 426932 - RNA, 19 nt, Artificial Sequence
  Description of Artificial Sequence: Synthetic oligonucleotide
accugucaguccaacuacu

SEQ ID NO: 426933 - RNA, 19 nt, Artificial Sequence
  Description of Artificial Sequence: Synthetic oligonucleotide
cggucaaugugaaaggaga

SEQ ID NO: 426934 - RNA, 19 nt, Artificial Sequence
  Description of Artificial Sequence: Synthetic oligonucleotide
ccagccuagagguccuccc

SEQ ID NO: 426935 - RNA, 19 nt, Artificial Sequence
  Description of Artificial Sequence: Synthetic oligonucleotide
gguaaggggccuggguucc

SEQ ID NO: 426936 - RNA, 19 nt, Artificial Sequence
  Description of Artificial Sequence: Synthetic oligonucleotide
acgggaucgggcaccuguc

SEQ ID NO: 426937 - RNA, 19 nt, Artificial Sequence
  Description of Artificial Sequence: Synthetic oligonucleotide
aggugggauggggaauaag

SEQ ID NO: 426938 - RNA, 19 nt, Artificial Sequence
  Description of Artificial Sequence: Synthetic oligonucleotide
gaccucaccgccguggccu

SEQ ID NO: 426939 - RNA, 19 nt, Artificial Sequence
  Description of Artificial Sequence: Synthetic oligonucleotide
guaccugucguggcuguga

SEQ ID NO: 426940 - RNA, 19 nt, Artificial Sequence
  Description of Artificial Sequence: Synthetic oligonucleotide
gacuguacucuguggcagu

SEQ ID NO: 426941 - RNA, 19 nt, Artificial Sequence
  Description of Artificial Sequence: Synthetic oligonucleotide
ggaucuuggguguucgccu

SEQ ID NO: 426942 - RNA, 19 nt, Artificial Sequence
  Description of Artificial Sequence: Synthetic oligonucleotide
ccgugagaggcuuggcuag

SEQ ID NO: 426943 - RNA, 19 nt, Artificial Sequence
  Description of Artificial Sequence: Synthetic oligonucleotide
cauugcuuggaggugugua

SEQ ID NO: 426944 - RNA, 19 nt, Artificial Sequence
  Description of Artificial Sequence: Synthetic oligonucleotide
cugcaaggugcucagucua

SEQ ID NO: 426945 - RNA, 19 nt, Artificial Sequence
  Description of Artificial Sequence: Synthetic oligonucleotide
ggguguucgccuagagggg

SEQ ID NO: 426946 - RNA, 19 nt, Artificial Sequence
  Description of Artificial Sequence: Synthetic oligonucleotide
cagagccuacgcacagcug

SEQ ID NO: 426947 - RNA, 19 nt, Artificial Sequence
  Description of Artificial Sequence: Synthetic oligonucleotide
gaagguagcaguggugguu

SEQ ID NO: 426948 - RNA, 19 nt, Artificial Sequence
  Description of Artificial Sequence: Synthetic oligonucleotide
gcaacaagaaaagaucuuu

SEQ ID NO: 426949 - RNA, 19 nt, Artificial Sequence
  Description of Artificial Sequence: Synthetic oligonucleotide
cugucaguccaacuacugu

SEQ ID NO: 426950 - RNA, 19 nt, Artificial Sequence
  Description of Artificial Sequence: Synthetic oligonucleotide
aggagucaacuagucucca

SEQ ID NO: 426951 - RNA, 19 nt, Artificial Sequence
  Description of Artificial Sequence: Synthetic oligonucleotide
cuacuguagcaaugcaggu

SEQ ID NO: 426952 - RNA, 19 nt, Artificial Sequence
  Description of Artificial Sequence: Synthetic oligonucleotide
gcaccguaaguucagaguu

SEQ ID NO: 426953 - RNA, 19 nt, Artificial Sequence
  Description of Artificial Sequence: Synthetic oligonucleotide
guccgagcugaggaucugc

SEQ ID NO: 426954 - RNA, 19 nt, Artificial Sequence
  Description of Artificial Sequence: Synthetic oligonucleotide
caaggaccgggccaggcua

SEQ ID NO: 426955 - RNA, 19 nt, Artificial Sequence
  Description of Artificial Sequence: Synthetic oligonucleotide
uauccgguucaggggugcu

SEQ ID NO: 426956 - RNA, 19 nt, Artificial Sequence
  Description of Artificial Sequence: Synthetic oligonucleotide
ccguaaguucagaguuugg

SEQ ID NO: 426957 - RNA, 19 nt, Artificial Sequence
  Description of Artificial Sequence: Synthetic oligonucleotide
cauuaagucugaguguguu

SEQ ID NO: 426958 - RNA, 19 nt, Artificial Sequence
  Description of Artificial Sequence: Synthetic oligonucleotide
gggccgauaaccuggaguu

SEQ ID NO: 426959 - RNA, 19 nt, Artificial Sequence
  Description of Artificial Sequence: Synthetic oligonucleotide
gccuuguuugaggaagcug

SEQ ID NO: 426960 - RNA, 19 nt, Artificial Sequence
  Description of Artificial Sequence: Synthetic oligonucleotide
accugucguggcugugacu

SEQ ID NO: 426961 - RNA, 19 nt, Artificial Sequence
  Description of Artificial Sequence: Synthetic oligonucleotide
gcaaaaccccuccagccua

SEQ ID NO: 426962 - RNA, 19 nt, Artificial Sequence
  Description of Artificial Sequence: Synthetic oligonucleotide
aaggaccgggccaggcuau

SEQ ID NO: 426963 - RNA, 19 nt, Artificial Sequence
  Description of Artificial Sequence: Synthetic oligonucleotide
ugccaucgaucucguguuu

SEQ ID NO: 426964 - RNA, 19 nt, Artificial Sequence
  Description of Artificial Sequence: Synthetic oligonucleotide
ggaccccucuucuuuggga

SEQ ID NO: 426965 - RNA, 19 nt, Artificial Sequence
  Description of Artificial Sequence: Synthetic oligonucleotide
uucccgugagaggcuuggc

SEQ ID NO: 426966 - RNA, 19 nt, Artificial Sequence
  Description of Artificial Sequence: Synthetic oligonucleotide
  modified_base (2)..(2): a, c, u, g, unknown or other
anacgggaucgggcaccug

SEQ ID NO: 426967 - RNA, 19 nt, Artificial Sequence
  Description of Artificial Sequence: Synthetic oligonucleotide
gccacacgagggaagcaag

SEQ ID NO: 426968 - RNA, 19 nt, Artificial Sequence
  Description of Artificial Sequence: Synthetic oligonucleotide
gcuucccggacaaacugca

SEQ ID NO: 426969 - RNA, 19 nt, Artificial Sequence
  Description of Artificial Sequence: Synthetic oligonucleotide
cagauaccgaucugacccu

SEQ ID NO: 426970 - RNA, 19 nt, Artificial Sequence
  Description of Artificial Sequence: Synthetic oligonucleotide
augcaagccuggacggccu

SEQ ID NO: 426971 - RNA, 19 nt, Artificial Sequence
  Description of Artificial Sequence: Synthetic oligonucleotide
gggaagcaagggccgauaa

SEQ ID NO: 426972 - RNA, 19 nt, Artificial Sequence
  Description of Artificial Sequence: Synthetic oligonucleotide
gugcugguauccgguucag

SEQ ID NO: 426973 - RNA, 19 nt, Artificial Sequence
  Description of Artificial Sequence: Synthetic oligonucleotide
gguauccgguucaggggug

SEQ ID NO: 426974 - RNA, 19 nt, Artificial Sequence
  Description of Artificial Sequence: Synthetic oligonucleotide
aaacuccaucagagauaga

SEQ ID NO: 426975 - RNA, 19 nt, Artificial Sequence
  Description of Artificial Sequence: Synthetic oligonucleotide
caccguccaugaagaagga

SEQ ID NO: 426976 - RNA, 19 nt, Artificial Sequence
  Description of Artificial Sequence: Synthetic oligonucleotide
ccuacgcacagcugaggca

SEQ ID NO: 426977 - RNA, 19 nt, Artificial Sequence
  Description of Artificial Sequence: Synthetic oligonucleotide
acuucccgugagaggcuug

SEQ ID NO: 426978 - RNA, 19 nt, Artificial Sequence
  Description of Artificial Sequence: Synthetic oligonucleotide
cugacuugcuuaggaggaa

SEQ ID NO: 426979 - RNA, 19 nt, Artificial Sequence
  Description of Artificial Sequence: Synthetic oligonucleotide
gccaucgaucucguguuuc

SEQ ID NO: 426980 - RNA, 19 nt, Artificial Sequence
  Description of Artificial Sequence: Synthetic oligonucleotide
agcggaggacauaggugau

SEQ ID NO: 426981 - RNA, 19 nt, Artificial Sequence
  Description of Artificial Sequence: Synthetic oligonucleotide
cucagcaaaguccgagguu

SEQ ID NO: 426982 - RNA, 19 nt, Artificial Sequence
  Description of Artificial Sequence: Synthetic oligonucleotide
ggaucgggcaccugucagu

SEQ ID NO: 426983 - RNA, 19 nt, Artificial Sequence
  Description of Artificial Sequence: Synthetic oligonucleotide
gcggaggacauaggugaug

SEQ ID NO: 426984 - RNA, 19 nt, Artificial Sequence
  Description of Artificial Sequence: Synthetic oligonucleotide
gggguaagugagucugugu

SEQ ID NO: 426985 - RNA, 19 nt, Artificial Sequence
  Description of Artificial Sequence: Synthetic oligonucleotide
gucguuggaucuucuucuu

SEQ ID NO: 426986 - RNA, 19 nt, Artificial Sequence
  Description of Artificial Sequence: Synthetic oligonucleotide
ggccacacgagggaagcaa

SEQ ID NO: 426987 - RNA, 19 nt, Artificial Sequence
  Description of Artificial Sequence: Synthetic oligonucleotide
gaggugggauggggaauaa

SEQ ID NO: 426988 - RNA, 19 nt, Artificial Sequence
  Description of Artificial Sequence: Synthetic oligonucleotide
ccucaccuuuccaugccca

SEQ ID NO: 426989 - RNA, 19 nt, Artificial Sequence
  Description of Artificial Sequence: Synthetic oligonucleotide
cccgugagaggcuuggcua

SEQ ID NO: 426990 - RNA, 19 nt, Artificial Sequence
  Description of Artificial Sequence: Synthetic oligonucleotide
ggcccaaaauggucaggaa

SEQ ID NO: 426991 - RNA, 19 nt, Artificial Sequence
  Description of Artificial Sequence: Synthetic oligonucleotide
ggcgaggagcaucucggcu

SEQ ID NO: 426992 - RNA, 19 nt, Artificial Sequence
  Description of Artificial Sequence: Synthetic oligonucleotide
caccguaaguucagaguuu

SEQ ID NO: 426993 - RNA, 19 nt, Artificial Sequence
  Description of Artificial Sequence: Synthetic oligonucleotide
gccauggacacuagaccaa

SEQ ID NO: 426994 - RNA, 19 nt, Artificial Sequence
  Description of Artificial Sequence: Synthetic oligonucleotide
cauauaccucucuguccau

SEQ ID NO: 426995 - RNA, 19 nt, Artificial Sequence
  Description of Artificial Sequence: Synthetic oligonucleotide
gcaaggugcucagucuaaa

SEQ ID NO: 426996 - RNA, 19 nt, Artificial Sequence
  Description of Artificial Sequence: Synthetic oligonucleotide
cguuggaucuucuucuuau

SEQ ID NO: 426997 - RNA, 19 nt, Artificial Sequence
  Description of Artificial Sequence: Synthetic oligonucleotide
ccguggccuuguuugagga

SEQ ID NO: 426998 - RNA, 19 nt, Artificial Sequence
  Description of Artificial Sequence: Synthetic oligonucleotide
ccgauaaccuggaguucga

SEQ ID NO: 426999 - RNA, 19 nt, Artificial Sequence
  Description of Artificial Sequence: Synthetic oligonucleotide
guaaggggccuggguucca

SEQ ID NO: 427000 - RNA, 19 nt, Artificial Sequence
  Description of Artificial Sequence: Synthetic oligonucleotide
cucaggcgaggagcaucuc

SEQ ID NO: 427001 - RNA, 19 nt, Artificial Sequence
  Description of Artificial Sequence: Synthetic oligonucleotide
ggccgauaaccuggaguuc

SEQ ID NO: 427002 - RNA, 19 nt, Artificial Sequence
  Description of Artificial Sequence: Synthetic oligonucleotide
ccgaucugacccuggggaa

SEQ ID NO: 427003 - RNA, 19 nt, Artificial Sequence
  Description of Artificial Sequence: Synthetic oligonucleotide
ccauuaagucugagugugu

SEQ ID NO: 427004 - RNA, 19 nt, Artificial Sequence
  Description of Artificial Sequence: Synthetic oligonucleotide
gcauuaggccccaucuuuu

SEQ ID NO: 427005 - RNA, 19 nt, Artificial Sequence
  Description of Artificial Sequence: Synthetic oligonucleotide
ggaagucguuggaucuucu

SEQ ID NO: 427006 - RNA, 19 nt, Artificial Sequence
  Description of Artificial Sequence: Synthetic oligonucleotide
ccaaggaccgggccaggcu

SEQ ID NO: 427007 - RNA, 19 nt, Artificial Sequence
  Description of Artificial Sequence: Synthetic oligonucleotide
cgaucucguguuuccggaa

SEQ ID NO: 427008 - RNA, 19 nt, Artificial Sequence
  Description of Artificial Sequence: Synthetic oligonucleotide
cguggccuuguuugaggaa

SEQ ID NO: 427009 - RNA, 19 nt, Artificial Sequence
  Description of Artificial Sequence: Synthetic oligonucleotide
cgggaucgggcaccuguca

SEQ ID NO: 427010 - RNA, 19 nt, Artificial Sequence
  Description of Artificial Sequence: Synthetic oligonucleotide
ccgccguggccuuguuuga

SEQ ID NO: 427011 - RNA, 19 nt, Artificial Sequence
  Description of Artificial Sequence: Synthetic oligonucleotide
ccccuccagccuagagguc

SEQ ID NO: 427012 - RNA, 19 nt, Artificial Sequence
  Description of Artificial Sequence: Synthetic oligonucleotide
cgauaaccuggaguucgaa

SEQ ID NO: 427013 - RNA, 19 nt, Artificial Sequence
  Description of Artificial Sequence: Synthetic oligonucleotide
ccgagcugaggaucugcuu

SEQ ID NO: 427014 - RNA, 19 nt, Artificial Sequence
  Description of Artificial Sequence: Synthetic oligonucleotide
ccguggccuaaaggcauua

SEQ ID NO: 427015 - RNA, 19 nt, Artificial Sequence
  Description of Artificial Sequence: Synthetic oligonucleotide
cccguggccuaaaggcauu

SEQ ID NO: 427016 - RNA, 19 nt, Artificial Sequence
  Description of Artificial Sequence: Synthetic oligonucleotide
ccgguucaggggugcuggu

SEQ ID NO: 427017 - RNA, 19 nt, Artificial Sequence
  Description of Artificial Sequence: Synthetic oligonucleotide
  modified_base (1)..(1): a, c, u, g, unknown or other
nacgggaucgggcaccugu

SEQ ID NO: 427018 - RNA, 19 nt, Artificial Sequence
  Description of Artificial Sequence: Synthetic oligonucleotide
  modified_base (1)..(1): a, c, u, g, unknown or other
  modified_base (4)..(4): a, c, u, g, unknown or other
ncanacgggaucgggcacc

SEQ ID NO: 427019 - RNA, 19 nt, Artificial Sequence
  Description of Artificial Sequence: Synthetic oligonucleotide
aaaaguaugaauuacagca

SEQ ID NO: 427020 - RNA, 19 nt, Artificial Sequence
  Description of Artificial Sequence: Synthetic oligonucleotide
aaauuuucuaccucaccac

SEQ ID NO: 427021 - RNA, 19 nt, Artificial Sequence
  Description of Artificial Sequence: Synthetic oligonucleotide
ucuauaaagauucuggcau

SEQ ID NO: 427022 - RNA, 19 nt, Artificial Sequence
  Description of Artificial Sequence: Synthetic oligonucleotide
agaacuauguuuuaggaga

SEQ ID NO: 427023 - RNA, 19 nt, Artificial Sequence
  Description of Artificial Sequence: Synthetic oligonucleotide
ugagugguaacauacauga

SEQ ID NO: 427024 - RNA, 19 nt, Artificial Sequence
  Description of Artificial Sequence: Synthetic oligonucleotide
augccaacgacacaaauac

SEQ ID NO: 427025 - RNA, 19 nt, Artificial Sequence
  Description of Artificial Sequence: Synthetic oligonucleotide
acauauacaggucucugcc

SEQ ID NO: 427026 - RNA, 19 nt, Artificial Sequence
  Description of Artificial Sequence: Synthetic oligonucleotide
auagagguucauuagguac

SEQ ID NO: 427027 - RNA, 19 nt, Artificial Sequence
  Description of Artificial Sequence: Synthetic oligonucleotide
uaugaaacgggcauaaaac

SEQ ID NO: 427028 - RNA, 19 nt, Artificial Sequence
  Description of Artificial Sequence: Synthetic oligonucleotide
uacaugaggacauagguca

SEQ ID NO: 427029 - RNA, 19 nt, Artificial Sequence
  Description of Artificial Sequence: Synthetic oligonucleotide
uuuugaaaauucaggagcc

SEQ ID NO: 427030 - RNA, 19 nt, Artificial Sequence
  Description of Artificial Sequence: Synthetic oligonucleotide
uuuauuaacacuagcuuaa

SEQ ID NO: 427031 - RNA, 19 nt, Artificial Sequence
  Description of Artificial Sequence: Synthetic oligonucleotide
agcauaucuuuccauaccc

SEQ ID NO: 427032 - RNA, 19 nt, Artificial Sequence
  Description of Artificial Sequence: Synthetic oligonucleotide
aaacuuauauccccaaucu

SEQ ID NO: 427033 - RNA, 19 nt, Artificial Sequence
  Description of Artificial Sequence: Synthetic oligonucleotide
guuuugugaacucagagug

SEQ ID NO: 427034 - RNA, 19 nt, Artificial Sequence
  Description of Artificial Sequence: Synthetic oligonucleotide
uuuccauacguucaauccg

SEQ ID NO: 427035 - RNA, 19 nt, Artificial Sequence
  Description of Artificial Sequence: Synthetic oligonucleotide
aacaacaacaaucuguuuu

SEQ ID NO: 427036 - RNA, 19 nt, Artificial Sequence
  Description of Artificial Sequence: Synthetic oligonucleotide
aaugguaucaaaaguauga

SEQ ID NO: 427037 - RNA, 19 nt, Artificial Sequence
  Description of Artificial Sequence: Synthetic oligonucleotide
aagcauaucuuuccauacc

SEQ ID NO: 427038 - RNA, 19 nt, Artificial Sequence
  Description of Artificial Sequence: Synthetic oligonucleotide
aauaagaacuauguuuuag

SEQ ID NO: 427039 - RNA, 19 nt, Artificial Sequence
  Description of Artificial Sequence: Synthetic oligonucleotide
uaugaauuacagcacagac

SEQ ID NO: 427040 - RNA, 19 nt, Artificial Sequence
  Description of Artificial Sequence: Synthetic oligonucleotide
aaugcaucuguucagcacu

SEQ ID NO: 427041 - RNA, 19 nt, Artificial Sequence
  Description of Artificial Sequence: Synthetic oligonucleotide
guaauggucguccaaaugc

SEQ ID NO: 427042 - RNA, 19 nt, Artificial Sequence
  Description of Artificial Sequence: Synthetic oligonucleotide
aagauguagacauuugcca

SEQ ID NO: 427043 - RNA, 19 nt, Artificial Sequence
  Description of Artificial Sequence: Synthetic oligonucleotide
uuggcuaauaggaugaaac

SEQ ID NO: 427044 - RNA, 19 nt, Artificial Sequence
  Description of Artificial Sequence: Synthetic oligonucleotide
aacccuaaaggacaagcuc

SEQ ID NO: 427045 - RNA, 19 nt, Artificial Sequence
  Description of Artificial Sequence: Synthetic oligonucleotide
ucaauucacguuuacaaac

SEQ ID NO: 427046 - RNA, 19 nt, Artificial Sequence
  Description of Artificial Sequence: Synthetic oligonucleotide
uccaaaugcuacaacaggc

SEQ ID NO: 427047 - RNA, 19 nt, Artificial Sequence
  Description of Artificial Sequence: Synthetic oligonucleotide
gauagugggaaccaagaug

SEQ ID NO: 427048 - RNA, 19 nt, Artificial Sequence
  Description of Artificial Sequence: Synthetic oligonucleotide
uacaacuaucugaagacag

SEQ ID NO: 427049 - RNA, 19 nt, Artificial Sequence
  Description of Artificial Sequence: Synthetic oligonucleotide
aguguuguaucccauguag

SEQ ID NO: 427050 - RNA, 19 nt, Artificial Sequence
  Description of Artificial Sequence: Synthetic oligonucleotide
agaauucacaauuagccca

SEQ ID NO: 427051 - RNA, 19 nt, Artificial Sequence
  Description of Artificial Sequence: Synthetic oligonucleotide
uguuuuaggagaacugcag

SEQ ID NO: 427052 - RNA, 19 nt, Artificial Sequence
  Description of Artificial Sequence: Synthetic oligonucleotide
aaaguaugaauuacagcac

SEQ ID NO: 427053 - RNA, 19 nt, Artificial Sequence
  Description of Artificial Sequence: Synthetic oligonucleotide
uuuacaauugaacucuuua

SEQ ID NO: 427054 - RNA, 19 nt, Artificial Sequence
  Description of Artificial Sequence: Synthetic oligonucleotide
cuuuccauacguucaaucc

SEQ ID NO: 427055 - RNA, 19 nt, Artificial Sequence
  Description of Artificial Sequence: Synthetic oligonucleotide
uuucugauaaggaaccaca

SEQ ID NO: 427056 - RNA, 19 nt, Artificial Sequence
  Description of Artificial Sequence: Synthetic oligonucleotide
aacgaauagagguucauua

SEQ ID NO: 427057 - RNA, 19 nt, Artificial Sequence
  Description of Artificial Sequence: Synthetic oligonucleotide
aacgauaugaaacgggcau

SEQ ID NO: 427058 - RNA, 19 nt, Artificial Sequence
  Description of Artificial Sequence: Synthetic oligonucleotide
aaguaugaauuacagcaca

SEQ ID NO: 427059 - RNA, 19 nt, Artificial Sequence
  Description of Artificial Sequence: Synthetic oligonucleotide
aauucacguuuacaaacag

SEQ ID NO: 427060 - RNA, 19 nt, Artificial Sequence
  Description of Artificial Sequence: Synthetic oligonucleotide
guuguaaacuuauaucccc

SEQ ID NO: 427061 - RNA, 19 nt, Artificial Sequence
  Description of Artificial Sequence: Synthetic oligonucleotide
uuaacacuagcuuaaacuu

SEQ ID NO: 427062 - RNA, 19 nt, Artificial Sequence
  Description of Artificial Sequence: Synthetic oligonucleotide
ucacaauuagcccaaugca

SEQ ID NO: 427063 - RNA, 19 nt, Artificial Sequence
  Description of Artificial Sequence: Synthetic oligonucleotide
auaggucacauauacaggu

SEQ ID NO: 427064 - RNA, 19 nt, Artificial Sequence
  Description of Artificial Sequence: Synthetic oligonucleotide
cuaguuguaaacuuauauc

SEQ ID NO: 427065 - RNA, 19 nt, Artificial Sequence
  Description of Artificial Sequence: Synthetic oligonucleotide
acaacgauaugaaacgggc

SEQ ID NO: 427066 - RNA, 19 nt, Artificial Sequence
  Description of Artificial Sequence: Synthetic oligonucleotide
ugcuacaacaggcaagaag

SEQ ID NO: 427067 - RNA, 19 nt, Artificial Sequence
  Description of Artificial Sequence: Synthetic oligonucleotide
acuaguuguaaacuuauau

SEQ ID NO: 427068 - RNA, 19 nt, Artificial Sequence
  Description of Artificial Sequence: Synthetic oligonucleotide
ucuugcuacagucuccucc

SEQ ID NO: 427069 - RNA, 19 nt, Artificial Sequence
  Description of Artificial Sequence: Synthetic oligonucleotide
uucgaugagguccaauugc

SEQ ID NO: 427070 - RNA, 19 nt, Artificial Sequence
  Description of Artificial Sequence: Synthetic oligonucleotide
  modified_base (8)..(8): a, c, u, g, unknown or other
ucaucuancuccuaguuuu

SEQ ID NO: 427071 - RNA, 19 nt, Artificial Sequence
  Description of Artificial Sequence: Synthetic oligonucleotide
aaugggagagugcuuagga

SEQ ID NO: 427072 - RNA, 19 nt, Artificial Sequence
  Description of Artificial Sequence: Synthetic oligonucleotide
uguuuugugaacucagagu

SEQ ID NO: 427073 - RNA, 19 nt, Artificial Sequence
  Description of Artificial Sequence: Synthetic oligonucleotide
acagcuacuuccuacacgu

SEQ ID NO: 427074 - RNA, 19 nt, Artificial Sequence
  Description of Artificial Sequence: Synthetic oligonucleotide
acuaaggaauacuugagaa

SEQ ID NO: 427075 - RNA, 19 nt, Artificial Sequence
  Description of Artificial Sequence: Synthetic oligonucleotide
ucuuuaaugggagagugcu

SEQ ID NO: 427076 - RNA, 19 nt, Artificial Sequence
  Description of Artificial Sequence: Synthetic oligonucleotide
acacaacuaaaaugaaggg

SEQ ID NO: 427077 - RNA, 19 nt, Artificial Sequence
  Description of Artificial Sequence: Synthetic oligonucleotide
aaggcauuaccagugagug

SEQ ID NO: 427078 - RNA, 19 nt, Artificial Sequence
  Description of Artificial Sequence: Synthetic oligonucleotide
cuagcuuaaacuuuguuaa

SEQ ID NO: 427079 - RNA, 19 nt, Artificial Sequence
  Description of Artificial Sequence: Synthetic oligonucleotide
aacgacacaaauacauuuc

SEQ ID NO: 427080 - RNA, 19 nt, Artificial Sequence
  Description of Artificial Sequence: Synthetic oligonucleotide
uuaacgguuuccuacaaua

SEQ ID NO: 427081 - RNA, 19 nt, Artificial Sequence
  Description of Artificial Sequence: Synthetic oligonucleotide
ucugugguggaaagguacg

SEQ ID NO: 427082 - RNA, 19 nt, Artificial Sequence
  Description of Artificial Sequence: Synthetic oligonucleotide
aacacuagcuuaaacuuug

SEQ ID NO: 427083 - RNA, 19 nt, Artificial Sequence
  Description of Artificial Sequence: Synthetic oligonucleotide
cauacguucaauccgagca

SEQ ID NO: 427084 - RNA, 19 nt, Artificial Sequence
  Description of Artificial Sequence: Synthetic oligonucleotide
uguauuuccaaaugggguu

SEQ ID NO: 427085 - RNA, 19 nt, Artificial Sequence
  Description of Artificial Sequence: Synthetic oligonucleotide
auaagauauuuacaagaca

SEQ ID NO: 427086 - RNA, 19 nt, Artificial Sequence
  Description of Artificial Sequence: Synthetic oligonucleotide
augagguaaccucaggcuc

SEQ ID NO: 427087 - RNA, 19 nt, Artificial Sequence
  Description of Artificial Sequence: Synthetic oligonucleotide
cacguuuacaaacaguuuc

SEQ ID NO: 427088 - RNA, 19 nt, Artificial Sequence
  Description of Artificial Sequence: Synthetic oligonucleotide
aucuauaaagauucuggca

SEQ ID NO: 427089 - RNA, 19 nt, Artificial Sequence
  Description of Artificial Sequence: Synthetic oligonucleotide
caaauuuucuaccucacca

SEQ ID NO: 427090 - RNA, 19 nt, Artificial Sequence
  Description of Artificial Sequence: Synthetic oligonucleotide
aacgguuuccuacaauagu

SEQ ID NO: 427091 - RNA, 19 nt, Artificial Sequence
  Description of Artificial Sequence: Synthetic oligonucleotide
gucgcuguaaaauucuuug

SEQ ID NO: 427092 - RNA, 19 nt, Artificial Sequence
  Description of Artificial Sequence: Synthetic oligonucleotide
uagagguucauuagguaca

SEQ ID NO: 427093 - RNA, 19 nt, Artificial Sequence
  Description of Artificial Sequence: Synthetic oligonucleotide
uggaucuccaaccugcaac

SEQ ID NO: 427094 - RNA, 19 nt, Artificial Sequence
  Description of Artificial Sequence: Synthetic oligonucleotide
ucguccaaaugcuacaaca

SEQ ID NO: 427095 - RNA, 19 nt, Artificial Sequence
  Description of Artificial Sequence: Synthetic oligonucleotide
aauuagcccaaugcaagag

SEQ ID NO: 427096 - RNA, 19 nt, Artificial Sequence
  Description of Artificial Sequence: Synthetic oligonucleotide
auuagguacaacuguuuca

SEQ ID NO: 427097 - RNA, 19 nt, Artificial Sequence
  Description of Artificial Sequence: Synthetic oligonucleotide
uguagucgcuguaaaauuc

SEQ ID NO: 427098 - RNA, 19 nt, Artificial Sequence
  Description of Artificial Sequence: Synthetic oligonucleotide
auuaccagugagugguaac

SEQ ID NO: 427099 - RNA, 19 nt, Artificial Sequence
  Description of Artificial Sequence: Synthetic oligonucleotide
gaugguacauguauaaauc

SEQ ID NO: 427100 - RNA, 19 nt, Artificial Sequence
  Description of Artificial Sequence: Synthetic oligonucleotide
acuuauauccccaaucucu

SEQ ID NO: 427101 - RNA, 19 nt, Artificial Sequence
  Description of Artificial Sequence: Synthetic oligonucleotide
uguucagcacuguaacuag

SEQ ID NO: 427102 - RNA, 19 nt, Artificial Sequence
  Description of Artificial Sequence: Synthetic oligonucleotide
acgaauagagguucauuag

SEQ ID NO: 427103 - RNA, 19 nt, Artificial Sequence
  Description of Artificial Sequence: Synthetic oligonucleotide
uauaaagauucuggcaugc

SEQ ID NO: 427104 - RNA, 19 nt, Artificial Sequence
  Description of Artificial Sequence: Synthetic oligonucleotide
uuagguacaacuguuucaa

SEQ ID NO: 427105 - RNA, 19 nt, Artificial Sequence
  Description of Artificial Sequence: Synthetic oligonucleotide
gacaacgauaugaaacggg

SEQ ID NO: 427106 - RNA, 19 nt, Artificial Sequence
  Description of Artificial Sequence: Synthetic oligonucleotide
cauaucuuuccauacccac

SEQ ID NO: 427107 - RNA, 19 nt, Artificial Sequence
  Description of Artificial Sequence: Synthetic oligonucleotide
uggcuaauaggaugaaacc

SEQ ID NO: 427108 - RNA, 19 nt, Artificial Sequence
  Description of Artificial Sequence: Synthetic oligonucleotide
ucguuaucccucuuuacca

SEQ ID NO: 427109 - RNA, 19 nt, Artificial Sequence
  Description of Artificial Sequence: Synthetic oligonucleotide
uuuaaugggagagugcuua

SEQ ID NO: 427110 - RNA, 19 nt, Artificial Sequence
  Description of Artificial Sequence: Synthetic oligonucleotide
cuauguuuuaggagaacug

SEQ ID NO: 427111 - RNA, 19 nt, Artificial Sequence
  Description of Artificial Sequence: Synthetic oligonucleotide
agugccaauaacucuccag

SEQ ID NO: 427112 - RNA, 19 nt, Artificial Sequence
  Description of Artificial Sequence: Synthetic oligonucleotide
uuccauacguucaauccga

SEQ ID NO: 427113 - RNA, 19 nt, Artificial Sequence
  Description of Artificial Sequence: Synthetic oligonucleotide
uuugcaugccuucuuuaga

SEQ ID NO: 427114 - RNA, 19 nt, Artificial Sequence
  Description of Artificial Sequence: Synthetic oligonucleotide
auucccguaaugguaacgg

SEQ ID NO: 427115 - RNA, 19 nt, Artificial Sequence
  Description of Artificial Sequence: Synthetic oligonucleotide
ucccauguagggaacagac

SEQ ID NO: 427116 - RNA, 19 nt, Artificial Sequence
  Description of Artificial Sequence: Synthetic oligonucleotide
ugagguaaccucaggcuca

SEQ ID NO: 427117 - RNA, 19 nt, Artificial Sequence
  Description of Artificial Sequence: Synthetic oligonucleotide
aauccgagcaaggagcgug

SEQ ID NO: 427118 - RNA, 19 nt, Artificial Sequence
  Description of Artificial Sequence: Synthetic oligonucleotide
ucuccaaccugcaacggcu

SEQ ID NO: 427119 - RNA, 19 nt, Artificial Sequence
  Description of Artificial Sequence: Synthetic oligonucleotide
ugggagagugcuuaggagu

SEQ ID NO: 427120 - RNA, 19 nt, Artificial Sequence
  Description of Artificial Sequence: Synthetic oligonucleotide
uaauggucguccaaaugcu

SEQ ID NO: 427121 - RNA, 19 nt, Artificial Sequence
  Description of Artificial Sequence: Synthetic oligonucleotide
augguacauguauaaaucu

SEQ ID NO: 427122 - RNA, 19 nt, Artificial Sequence
  Description of Artificial Sequence: Synthetic oligonucleotide
agggcguaggcucuuuggc

SEQ ID NO: 427123 - RNA, 19 nt, Artificial Sequence
  Description of Artificial Sequence: Synthetic oligonucleotide
auccacugaagaccggggc

SEQ ID NO: 427124 - RNA, 19 nt, Artificial Sequence
  Description of Artificial Sequence: Synthetic oligonucleotide
caacuaucugaagacaggg

SEQ ID NO: 427125 - RNA, 19 nt, Artificial Sequence
  Description of Artificial Sequence: Synthetic oligonucleotide
ucgaugagguccaauugca

SEQ ID NO: 427126 - RNA, 19 nt, Artificial Sequence
  Description of Artificial Sequence: Synthetic oligonucleotide
ugacaaugcaucuguucag

SEQ ID NO: 427127 - RNA, 19 nt, Artificial Sequence
  Description of Artificial Sequence: Synthetic oligonucleotide
uauccacugaagaccgggg

SEQ ID NO: 427128 - RNA, 19 nt, Artificial Sequence
  Description of Artificial Sequence: Synthetic oligonucleotide
cuaaaggacaagcucaaga

SEQ ID NO: 427129 - RNA, 19 nt, Artificial Sequence
  Description of Artificial Sequence: Synthetic oligonucleotide
cacauauacaggucucugc

SEQ ID NO: 427130 - RNA, 19 nt, Artificial Sequence
  Description of Artificial Sequence: Synthetic oligonucleotide
aacggcaugcuacaacuau

SEQ ID NO: 427131 - RNA, 19 nt, Artificial Sequence
  Description of Artificial Sequence: Synthetic oligonucleotide
aguggagagucuugguggg

SEQ ID NO: 427132 - RNA, 19 nt, Artificial Sequence
  Description of Artificial Sequence: Synthetic oligonucleotide
auaaagauucuggcaugcc

SEQ ID NO: 427133 - RNA, 19 nt, Artificial Sequence
  Description of Artificial Sequence: Synthetic oligonucleotide
cuauaaagauucuggcaug

SEQ ID NO: 427134 - RNA, 19 nt, Artificial Sequence
  Description of Artificial Sequence: Synthetic oligonucleotide
aaagauucuggcaugccau

SEQ ID NO: 427135 - RNA, 19 nt, Artificial Sequence
  Description of Artificial Sequence: Synthetic oligonucleotide
uuacuaacgaauagagguu

SEQ ID NO: 427136 - RNA, 19 nt, Artificial Sequence
  Description of Artificial Sequence: Synthetic oligonucleotide
acaauaguuuauuuacaau

SEQ ID NO: 427137 - RNA, 19 nt, Artificial Sequence
  Description of Artificial Sequence: Synthetic oligonucleotide
aacgggcauaaaacaaagc

SEQ ID NO: 427138 - RNA, 19 nt, Artificial Sequence
  Description of Artificial Sequence: Synthetic oligonucleotide
auacaugaggacauagguc

SEQ ID NO: 427139 - RNA, 19 nt, Artificial Sequence
  Description of Artificial Sequence: Synthetic oligonucleotide
ucuaaacccuaaaggacaa

SEQ ID NO: 427140 - RNA, 19 nt, Artificial Sequence
  Description of Artificial Sequence: Synthetic oligonucleotide
cuaucugaagacaggguuc

SEQ ID NO: 427141 - RNA, 19 nt, Artificial Sequence
  Description of Artificial Sequence: Synthetic oligonucleotide
aacucagagugaagaaaac

SEQ ID NO: 427142 - RNA, 19 nt, Artificial Sequence
  Description of Artificial Sequence: Synthetic oligonucleotide
uguaaacuuauauccccaa

SEQ ID NO: 427143 - RNA, 19 nt, Artificial Sequence
  Description of Artificial Sequence: Synthetic oligonucleotide
agugagugguaacauacau

SEQ ID NO: 427144 - RNA, 19 nt, Artificial Sequence
  Description of Artificial Sequence: Synthetic oligonucleotide
cauuagguacaacuguuuc

SEQ ID NO: 427145 - RNA, 19 nt, Artificial Sequence
  Description of Artificial Sequence: Synthetic oligonucleotide
agaggauucccguaauggu

SEQ ID NO: 427146 - RNA, 19 nt, Artificial Sequence
  Description of Artificial Sequence: Synthetic oligonucleotide
auauacaggucucugccau

SEQ ID NO: 427147 - RNA, 19 nt, Artificial Sequence
  Description of Artificial Sequence: Synthetic oligonucleotide
ugggguauccacugaagac

SEQ ID NO: 427148 - RNA, 19 nt, Artificial Sequence
  Description of Artificial Sequence: Synthetic oligonucleotide
uuaccagugagugguaaca

SEQ ID NO: 427149 - RNA, 19 nt, Artificial Sequence
  Description of Artificial Sequence: Synthetic oligonucleotide
acaacuaucugaagacagg

SEQ ID NO: 427150 - RNA, 19 nt, Artificial Sequence
  Description of Artificial Sequence: Synthetic oligonucleotide
cuucgcucauccaaccagg

SEQ ID NO: 427151 - RNA, 19 nt, Artificial Sequence
  Description of Artificial Sequence: Synthetic oligonucleotide
uuuacacaucagaaauggu

SEQ ID NO: 427152 - RNA, 19 nt, Artificial Sequence
  Description of Artificial Sequence: Synthetic oligonucleotide
cuacaacaggcaagaaggg

SEQ ID NO: 427153 - RNA, 19 nt, Artificial Sequence
  Description of Artificial Sequence: Synthetic oligonucleotide
uacacguccggugaggugu

SEQ ID NO: 427154 - RNA, 19 nt, Artificial Sequence
  Description of Artificial Sequence: Synthetic oligonucleotide
agcagaaggaucuguuuga

SEQ ID NO: 427155 - RNA, 19 nt, Artificial Sequence
  Description of Artificial Sequence: Synthetic oligonucleotide
uccacugaagaccggggcu

SEQ ID NO: 427156 - RNA, 19 nt, Artificial Sequence
  Description of Artificial Sequence: Synthetic oligonucleotide
acuuccuacacguccggug

SEQ ID NO: 427157 - RNA, 19 nt, Artificial Sequence
  Description of Artificial Sequence: Synthetic oligonucleotide
guauccacugaagaccggg

SEQ ID NO: 427158 - RNA, 19 nt, Artificial Sequence
  Description of Artificial Sequence: Synthetic oligonucleotide
gguauggaaaggcauuacc

SEQ ID NO: 427159 - RNA, 19 nt, Artificial Sequence
  Description of Artificial Sequence: Synthetic oligonucleotide
uucugauaaggaaccacau

SEQ ID NO: 427160 - RNA, 19 nt, Artificial Sequence
  Description of Artificial Sequence: Synthetic oligonucleotide
ugguaucaaaaguaugaau

SEQ ID NO: 427161 - RNA, 19 nt, Artificial Sequence
  Description of Artificial Sequence: Synthetic oligonucleotide
uuuccuacaauaguuuauu

SEQ ID NO: 427162 - RNA, 19 nt, Artificial Sequence
  Description of Artificial Sequence: Synthetic oligonucleotide
uaucugaagacaggguucu

SEQ ID NO: 427163 - RNA, 19 nt, Artificial Sequence
  Description of Artificial Sequence: Synthetic oligonucleotide
uaacacuagcuuaaacuuu

SEQ ID NO: 427164 - RNA, 19 nt, Artificial Sequence
  Description of Artificial Sequence: Synthetic oligonucleotide
aaacccuaaaggacaagcu

SEQ ID NO: 427165 - RNA, 19 nt, Artificial Sequence
  Description of Artificial Sequence: Synthetic oligonucleotide
uuugguaauggucguccaa

SEQ ID NO: 427166 - RNA, 19 nt, Artificial Sequence
  Description of Artificial Sequence: Synthetic oligonucleotide
auaggaugaaaccccacua

SEQ ID NO: 427167 - RNA, 19 nt, Artificial Sequence
  Description of Artificial Sequence: Synthetic oligonucleotide
guuucauagcccugaaaca

SEQ ID NO: 427168 - RNA, 19 nt, Artificial Sequence
  Description of Artificial Sequence: Synthetic oligonucleotide
auaucccaucuuuuccuuc

SEQ ID NO: 427169 - RNA, 19 nt, Artificial Sequence
  Description of Artificial Sequence: Synthetic oligonucleotide
aagguacggcaaaucuucc

SEQ ID NO: 427170 - RNA, 19 nt, Artificial Sequence
  Description of Artificial Sequence: Synthetic oligonucleotide
uaaugggagagugcuuagg

SEQ ID NO: 427171 - RNA, 19 nt, Artificial Sequence
  Description of Artificial Sequence: Synthetic oligonucleotide
aggagcgugucucucucgg

SEQ ID NO: 427172 - RNA, 19 nt, Artificial Sequence
  Description of Artificial Sequence: Synthetic oligonucleotide
ucucacuugagaagguuuu

SEQ ID NO: 427173 - RNA, 19 nt, Artificial Sequence
  Description of Artificial Sequence: Synthetic oligonucleotide
uccguccacaugagaaagg

SEQ ID NO: 427174 - RNA, 19 nt, Artificial Sequence
  Description of Artificial Sequence: Synthetic oligonucleotide
gugccaauaacucuccaga

SEQ ID NO: 427175 - RNA, 19 nt, Artificial Sequence
  Description of Artificial Sequence: Synthetic oligonucleotide
uuuaacgguuuccuacaau

SEQ ID NO: 427176 - RNA, 19 nt, Artificial Sequence
  Description of Artificial Sequence: Synthetic oligonucleotide
uacuaacgaauagagguuc

SEQ ID NO: 427177 - RNA, 19 nt, Artificial Sequence
  Description of Artificial Sequence: Synthetic oligonucleotide
augggagagugcuuaggag

SEQ ID NO: 427178 - RNA, 19 nt, Artificial Sequence
  Description of Artificial Sequence: Synthetic oligonucleotide
uuuuaacgguuuccuacaa

SEQ ID NO: 427179 - RNA, 19 nt, Artificial Sequence
  Description of Artificial Sequence: Synthetic oligonucleotide
guucgaugagguccaauug

SEQ ID NO: 427180 - RNA, 19 nt, Artificial Sequence
  Description of Artificial Sequence: Synthetic oligonucleotide
ucauuagguacaacuguuu

SEQ ID NO: 427181 - RNA, 19 nt, Artificial Sequence
  Description of Artificial Sequence: Synthetic oligonucleotide
agacaacgauaugaaacgg

SEQ ID NO: 427182 - RNA, 19 nt, Artificial Sequence
  Description of Artificial Sequence: Synthetic oligonucleotide
ugcuguucgaugaggucca

SEQ ID NO: 427183 - RNA, 19 nt, Artificial Sequence
  Description of Artificial Sequence: Synthetic oligonucleotide
agacauuugccagccaaag

SEQ ID NO: 427184 - RNA, 19 nt, Artificial Sequence
  Description of Artificial Sequence: Synthetic oligonucleotide
gauucccguaaugguaacg

SEQ ID NO: 427185 - RNA, 19 nt, Artificial Sequence
  Description of Artificial Sequence: Synthetic oligonucleotide
uaauaggaugaaaccccac

SEQ ID NO: 427186 - RNA, 19 nt, Artificial Sequence
  Description of Artificial Sequence: Synthetic oligonucleotide
aaacaaagcugagguggag

SEQ ID NO: 427187 - RNA, 19 nt, Artificial Sequence
  Description of Artificial Sequence: Synthetic oligonucleotide
aaggagcgugucucucucg

SEQ ID NO: 427188 - RNA, 19 nt, Artificial Sequence
  Description of Artificial Sequence: Synthetic oligonucleotide
uggaacggcaugcuacaac

SEQ ID NO: 427189 - RNA, 19 nt, Artificial Sequence
  Description of Artificial Sequence: Synthetic oligonucleotide
cauguagggaacagacaac

SEQ ID NO: 427190 - RNA, 19 nt, Artificial Sequence
  Description of Artificial Sequence: Synthetic oligonucleotide
cacaauuagcccaaugcaa

SEQ ID NO: 427191 - RNA, 19 nt, Artificial Sequence
  Description of Artificial Sequence: Synthetic oligonucleotide
accaccaaaguuuggcuaa

SEQ ID NO: 427192 - RNA, 19 nt, Artificial Sequence
  Description of Artificial Sequence: Synthetic oligonucleotide
ugugguggaaagguacggc

SEQ ID NO: 427193 - RNA, 19 nt, Artificial Sequence
  Description of Artificial Sequence: Synthetic oligonucleotide
uccgccuuuccauacguuc

SEQ ID NO: 427194 - RNA, 19 nt, Artificial Sequence
  Description of Artificial Sequence: Synthetic oligonucleotide
ucgcuguaaaauucuuugu

SEQ ID NO: 427195 - RNA, 19 nt, Artificial Sequence
  Description of Artificial Sequence: Synthetic oligonucleotide
agguuuucuccuuggggug

SEQ ID NO: 427196 - RNA, 19 nt, Artificial Sequence
  Description of Artificial Sequence: Synthetic oligonucleotide
gaugucucacaaagcuccg

SEQ ID NO: 427197 - RNA, 19 nt, Artificial Sequence
  Description of Artificial Sequence: Synthetic oligonucleotide
ccagugagugguaacauac

SEQ ID NO: 427198 - RNA, 19 nt, Artificial Sequence
  Description of Artificial Sequence: Synthetic oligonucleotide
gaauagagguucauuaggu

SEQ ID NO: 427199 - RNA, 19 nt, Artificial Sequence
  Description of Artificial Sequence: Synthetic oligonucleotide
uuacaagacagccgacuuu

SEQ ID NO: 427200 - RNA, 19 nt, Artificial Sequence
  Description of Artificial Sequence: Synthetic oligonucleotide
uccauacguucaauccgag

SEQ ID NO: 427201 - RNA, 19 nt, Artificial Sequence
  Description of Artificial Sequence: Synthetic oligonucleotide
ugguggaaagguacggcaa

SEQ ID NO: 427202 - RNA, 19 nt, Artificial Sequence
  Description of Artificial Sequence: Synthetic oligonucleotide
uccucaauucacguuuaca

SEQ ID NO: 427203 - RNA, 19 nt, Artificial Sequence
  Description of Artificial Sequence: Synthetic oligonucleotide
aggcauuaccagugagugg

SEQ ID NO: 427204 - RNA, 19 nt, Artificial Sequence
  Description of Artificial Sequence: Synthetic oligonucleotide
ugaagaccggggcuuuucu

SEQ ID NO: 427205 - RNA, 19 nt, Artificial Sequence
  Description of Artificial Sequence: Synthetic oligonucleotide
aaccccacuaaggaauacu

SEQ ID NO: 427206 - RNA, 19 nt, Artificial Sequence
  Description of Artificial Sequence: Synthetic oligonucleotide
aacuaucugaagacagggu

SEQ ID NO: 427207 - RNA, 19 nt, Artificial Sequence
  Description of Artificial Sequence: Synthetic oligonucleotide
ugccaauaacucuccagaa

SEQ ID NO: 427208 - RNA, 19 nt, Artificial Sequence
  Description of Artificial Sequence: Synthetic oligonucleotide
auacguucaauccgagcaa

SEQ ID NO: 427209 - RNA, 19 nt, Artificial Sequence
  Description of Artificial Sequence: Synthetic oligonucleotide
ucucguuaucccucuuuac

SEQ ID NO: 427210 - RNA, 19 nt, Artificial Sequence
  Description of Artificial Sequence: Synthetic oligonucleotide
agaccggggcuuuucuggg

SEQ ID NO: 427211 - RNA, 19 nt, Artificial Sequence
  Description of Artificial Sequence: Synthetic oligonucleotide
gaucuguuugaggcaggcg

SEQ ID NO: 427212 - RNA, 19 nt, Artificial Sequence
  Description of Artificial Sequence: Synthetic oligonucleotide
gauuccugaauuccuuucu

SEQ ID NO: 427213 - RNA, 19 nt, Artificial Sequence
  Description of Artificial Sequence: Synthetic oligonucleotide
cgaauagagguucauuagg

SEQ ID NO: 427214 - RNA, 19 nt, Artificial Sequence
  Description of Artificial Sequence: Synthetic oligonucleotide
ugagcuguagucgcuguaa

SEQ ID NO: 427215 - RNA, 19 nt, Artificial Sequence
  Description of Artificial Sequence: Synthetic oligonucleotide
gggguauccacugaagacc

SEQ ID NO: 427216 - RNA, 19 nt, Artificial Sequence
  Description of Artificial Sequence: Synthetic oligonucleotide
uagguacaacuguuucaag

SEQ ID NO: 427217 - RNA, 19 nt, Artificial Sequence
  Description of Artificial Sequence: Synthetic oligonucleotide
aaagcuccggcuggcgcuc

SEQ ID NO: 427218 - RNA, 19 nt, Artificial Sequence
  Description of Artificial Sequence: Synthetic oligonucleotide
acggcaaaucuuccaucuc

SEQ ID NO: 427219 - RNA, 19 nt, Artificial Sequence
  Description of Artificial Sequence: Synthetic oligonucleotide
guaacuaguuguaaacuua

SEQ ID NO: 427220 - RNA, 19 nt, Artificial Sequence
  Description of Artificial Sequence: Synthetic oligonucleotide
gguaauggucguccaaaug

SEQ ID NO: 427221 - RNA, 19 nt, Artificial Sequence
  Description of Artificial Sequence: Synthetic oligonucleotide
uuuggcuaauaggaugaaa

SEQ ID NO: 427222 - RNA, 19 nt, Artificial Sequence
  Description of Artificial Sequence: Synthetic oligonucleotide
caaccaggguagcucaaag

SEQ ID NO: 427223 - RNA, 19 nt, Artificial Sequence
  Description of Artificial Sequence: Synthetic oligonucleotide
gugguggaaagguacggca

SEQ ID NO: 427224 - RNA, 19 nt, Artificial Sequence
  Description of Artificial Sequence: Synthetic oligonucleotide
cagggcguaggcucuuugg

SEQ ID NO: 427225 - RNA, 19 nt, Artificial Sequence
  Description of Artificial Sequence: Synthetic oligonucleotide
gauaaggaaccacaugguu

SEQ ID NO: 427226 - RNA, 19 nt, Artificial Sequence
  Description of Artificial Sequence: Synthetic oligonucleotide
cuuggaacggcaugcuaca

SEQ ID NO: 427227 - RNA, 19 nt, Artificial Sequence
  Description of Artificial Sequence: Synthetic oligonucleotide
uuccuacacguccggugag

SEQ ID NO: 427228 - RNA, 19 nt, Artificial Sequence
  Description of Artificial Sequence: Synthetic oligonucleotide
aggauagugggaaccaaga

SEQ ID NO: 427229 - RNA, 19 nt, Artificial Sequence
  Description of Artificial Sequence: Synthetic oligonucleotide
uccuacacguccggugagg

SEQ ID NO: 427230 - RNA, 19 nt, Artificial Sequence
  Description of Artificial Sequence: Synthetic oligonucleotide
ccugauccucugaauaucc

SEQ ID NO: 427231 - RNA, 19 nt, Artificial Sequence
  Description of Artificial Sequence: Synthetic oligonucleotide
ggguauccacugaagaccg

SEQ ID NO: 427232 - RNA, 19 nt, Artificial Sequence
  Description of Artificial Sequence: Synthetic oligonucleotide
agguacggcaaaucuucca

SEQ ID NO: 427233 - RNA, 19 nt, Artificial Sequence
  Description of Artificial Sequence: Synthetic oligonucleotide
auucacguuuacaaacagu

SEQ ID NO: 427234 - RNA, 19 nt, Artificial Sequence
  Description of Artificial Sequence: Synthetic oligonucleotide
cacuguaacuaguuguaaa

SEQ ID NO: 427235 - RNA, 19 nt, Artificial Sequence
  Description of Artificial Sequence: Synthetic oligonucleotide
gugggguauccacugaaga

SEQ ID NO: 427236 - RNA, 19 nt, Artificial Sequence
  Description of Artificial Sequence: Synthetic oligonucleotide
cuacuuccuacacguccgg

SEQ ID NO: 427237 - RNA, 19 nt, Artificial Sequence
  Description of Artificial Sequence: Synthetic oligonucleotide
acuccguccacaugagaaa

SEQ ID NO: 427238 - RNA, 19 nt, Artificial Sequence
  Description of Artificial Sequence: Synthetic oligonucleotide
acggcuucgcucauccaac

SEQ ID NO: 427239 - RNA, 19 nt, Artificial Sequence
  Description of Artificial Sequence: Synthetic oligonucleotide
acgguuuccuacaauaguu

SEQ ID NO: 427240 - RNA, 19 nt, Artificial Sequence
  Description of Artificial Sequence: Synthetic oligonucleotide
uuauauccccaaucucuuu

SEQ ID NO: 427241 - RNA, 19 nt, Artificial Sequence
  Description of Artificial Sequence: Synthetic oligonucleotide
acggcaugcuacaacuauc

SEQ ID NO: 427242 - RNA, 19 nt, Artificial Sequence
  Description of Artificial Sequence: Synthetic oligonucleotide
uaacgaauagagguucauu

SEQ ID NO: 427243 - RNA, 19 nt, Artificial Sequence
  Description of Artificial Sequence: Synthetic oligonucleotide
uucccguaaugguaacggu

SEQ ID NO: 427244 - RNA, 19 nt, Artificial Sequence
  Description of Artificial Sequence: Synthetic oligonucleotide
cuccguccacaugagaaag

SEQ ID NO: 427245 - RNA, 19 nt, Artificial Sequence
  Description of Artificial Sequence: Synthetic oligonucleotide
acacaaggacaucuauaaa

SEQ ID NO: 427246 - RNA, 19 nt, Artificial Sequence
  Description of Artificial Sequence: Synthetic oligonucleotide
ucgcucauccaaccagggu

SEQ ID NO: 427247 - RNA, 19 nt, Artificial Sequence
  Description of Artificial Sequence: Synthetic oligonucleotide
gacauaggucacauauaca

SEQ ID NO: 427248 - RNA, 19 nt, Artificial Sequence
  Description of Artificial Sequence: Synthetic oligonucleotide
gcaacggcuucgcucaucc

SEQ ID NO: 427249 - RNA, 19 nt, Artificial Sequence
  Description of Artificial Sequence: Synthetic oligonucleotide
aggauucccguaaugguaa

SEQ ID NO: 427250 - RNA, 19 nt, Artificial Sequence
  Description of Artificial Sequence: Synthetic oligonucleotide
caggguagcucaaaguucu

SEQ ID NO: 427251 - RNA, 19 nt, Artificial Sequence
  Description of Artificial Sequence: Synthetic oligonucleotide
agcccaaugcaagagguuu

SEQ ID NO: 427252 - RNA, 19 nt, Artificial Sequence
  Description of Artificial Sequence: Synthetic oligonucleotide
agcaaggagcgugucucuc

SEQ ID NO: 427253 - RNA, 19 nt, Artificial Sequence
  Description of Artificial Sequence: Synthetic oligonucleotide
gagguaaccucaggcucag

SEQ ID NO: 427254 - RNA, 19 nt, Artificial Sequence
  Description of Artificial Sequence: Synthetic oligonucleotide
acuaacgaauagagguuca

SEQ ID NO: 427255 - RNA, 19 nt, Artificial Sequence
  Description of Artificial Sequence: Synthetic oligonucleotide
ggcauuaccagugaguggu

SEQ ID NO: 427256 - RNA, 19 nt, Artificial Sequence
  Description of Artificial Sequence: Synthetic oligonucleotide
agcgugucucucucggacu

SEQ ID NO: 427257 - RNA, 19 nt, Artificial Sequence
  Description of Artificial Sequence: Synthetic oligonucleotide
gagagacaagcaauuucuc

SEQ ID NO: 427258 - RNA, 19 nt, Artificial Sequence
  Description of Artificial Sequence: Synthetic oligonucleotide
cuguucagcacuguaacua

SEQ ID NO: 427259 - RNA, 19 nt, Artificial Sequence
  Description of Artificial Sequence: Synthetic oligonucleotide
agcacuguaacuaguugua

SEQ ID NO: 427260 - RNA, 19 nt, Artificial Sequence
  Description of Artificial Sequence: Synthetic oligonucleotide
ggcgcugggucccuuuugg

SEQ ID NO: 427261 - RNA, 19 nt, Artificial Sequence
  Description of Artificial Sequence: Synthetic oligonucleotide
guacggcaaaucuuccauc

SEQ ID NO: 427262 - RNA, 19 nt, Artificial Sequence
  Description of Artificial Sequence: Synthetic oligonucleotide
cgggcauaaaacaaagcug

SEQ ID NO: 427263 - RNA, 19 nt, Artificial Sequence
  Description of Artificial Sequence: Synthetic oligonucleotide
aacuaguuguaaacuuaua

SEQ ID NO: 427264 - RNA, 19 nt, Artificial Sequence
  Description of Artificial Sequence: Synthetic oligonucleotide
ggaacggcaugcuacaacu

SEQ ID NO: 427265 - RNA, 19 nt, Artificial Sequence
  Description of Artificial Sequence: Synthetic oligonucleotide
uagucgcuguaaaauucuu

SEQ ID NO: 427266 - RNA, 19 nt, Artificial Sequence
  Description of Artificial Sequence: Synthetic oligonucleotide
accagugagugguaacaua

SEQ ID NO: 427267 - RNA, 19 nt, Artificial Sequence
  Description of Artificial Sequence: Synthetic oligonucleotide
augccauccccaaaugaca

SEQ ID NO: 427268 - RNA, 19 nt, Artificial Sequence
  Description of Artificial Sequence: Synthetic oligonucleotide
cuacaacuaucugaagaca

SEQ ID NO: 427269 - RNA, 19 nt, Artificial Sequence
  Description of Artificial Sequence: Synthetic oligonucleotide
cuaaacccuaaaggacaag

SEQ ID NO: 427270 - RNA, 19 nt, Artificial Sequence
  Description of Artificial Sequence: Synthetic oligonucleotide
uccaaccugcaacggcuuc

SEQ ID NO: 427271 - RNA, 19 nt, Artificial Sequence
  Description of Artificial Sequence: Synthetic oligonucleotide
aauggucguccaaaugcua

SEQ ID NO: 427272 - RNA, 19 nt, Artificial Sequence
  Description of Artificial Sequence: Synthetic oligonucleotide
guggcggugggcgcgagag

SEQ ID NO: 427273 - RNA, 19 nt, Artificial Sequence
  Description of Artificial Sequence: Synthetic oligonucleotide
cagcacuguaacuaguugu

SEQ ID NO: 427274 - RNA, 19 nt, Artificial Sequence
  Description of Artificial Sequence: Synthetic oligonucleotide
gucguccaaaugcuacaac

SEQ ID NO: 427275 - RNA, 19 nt, Artificial Sequence
  Description of Artificial Sequence: Synthetic oligonucleotide
caaccugcaacggcuucgc

SEQ ID NO: 427276 - RNA, 19 nt, Artificial Sequence
  Description of Artificial Sequence: Synthetic oligonucleotide
ccugcaacggcuucgcuca

SEQ ID NO: 427277 - RNA, 19 nt, Artificial Sequence
  Description of Artificial Sequence: Synthetic oligonucleotide
gggcguaggcucuuuggcc

SEQ ID NO: 427278 - RNA, 19 nt, Artificial Sequence
  Description of Artificial Sequence: Synthetic oligonucleotide
cuacacguccggugaggug

SEQ ID NO: 427279 - RNA, 19 nt, Artificial Sequence
  Description of Artificial Sequence: Synthetic oligonucleotide
gagccugggaugucucaca

SEQ ID NO: 427280 - RNA, 19 nt, Artificial Sequence
  Description of Artificial Sequence: Synthetic oligonucleotide
uagcccaaugcaagagguu

SEQ ID NO: 427281 - RNA, 19 nt, Artificial Sequence
  Description of Artificial Sequence: Synthetic oligonucleotide
cccguaaugguaacgguga

SEQ ID NO: 427282 - RNA, 19 nt, Artificial Sequence
  Description of Artificial Sequence: Synthetic oligonucleotide
guagucgcuguaaaauucu

SEQ ID NO: 427283 - RNA, 19 nt, Artificial Sequence
  Description of Artificial Sequence: Synthetic oligonucleotide
ccaggguagcucaaaguuc

SEQ ID NO: 427284 - RNA, 19 nt, Artificial Sequence
  Description of Artificial Sequence: Synthetic oligonucleotide
acgauaugaaacgggcaua

SEQ ID NO: 427285 - RNA, 19 nt, Artificial Sequence
  Description of Artificial Sequence: Synthetic oligonucleotide
ggaucuguuugaggcaggc

SEQ ID NO: 427286 - RNA, 19 nt, Artificial Sequence
  Description of Artificial Sequence: Synthetic oligonucleotide
gagcuguagucgcuguaaa

SEQ ID NO: 427287 - RNA, 19 nt, Artificial Sequence
  Description of Artificial Sequence: Synthetic oligonucleotide
cccaaugcaagagguuucg

SEQ ID NO: 427288 - RNA, 19 nt, Artificial Sequence
  Description of Artificial Sequence: Synthetic oligonucleotide
ggcucagauuccugaauuc

SEQ ID NO: 427289 - RNA, 19 nt, Artificial Sequence
  Description of Artificial Sequence: Synthetic oligonucleotide
ccauacguucaauccgagc

SEQ ID NO: 427290 - RNA, 19 nt, Artificial Sequence
  Description of Artificial Sequence: Synthetic oligonucleotide
ugaggacauaggucacaua

SEQ ID NO: 427291 - RNA, 19 nt, Artificial Sequence
  Description of Artificial Sequence: Synthetic oligonucleotide
gguggaaagguacggcaaa

SEQ ID NO: 427292 - RNA, 19 nt, Artificial Sequence
  Description of Artificial Sequence: Synthetic oligonucleotide
aaaguucuguggaguuaau

SEQ ID NO: 427293 - RNA, 19 nt, Artificial Sequence
  Description of Artificial Sequence: Synthetic oligonucleotide
gguaaccucaggcucagau

SEQ ID NO: 427294 - RNA, 19 nt, Artificial Sequence
  Description of Artificial Sequence: Synthetic oligonucleotide
agucgcuguaaaauucuuu

SEQ ID NO: 427295 - RNA, 19 nt, Artificial Sequence
  Description of Artificial Sequence: Synthetic oligonucleotide
uggcggugggcgcgagagg

SEQ ID NO: 427296 - RNA, 19 nt, Artificial Sequence
  Description of Artificial Sequence: Synthetic oligonucleotide
cguuaucccucuuuaccag

SEQ ID NO: 427297 - RNA, 19 nt, Artificial Sequence
  Description of Artificial Sequence: Synthetic oligonucleotide
uacuuccuacacguccggu

SEQ ID NO: 427298 - RNA, 19 nt, Artificial Sequence
  Description of Artificial Sequence: Synthetic oligonucleotide
gguacggcaaaucuuccau

SEQ ID NO: 427299 - RNA, 19 nt, Artificial Sequence
  Description of Artificial Sequence: Synthetic oligonucleotide
acaagcucaagagcucauu

SEQ ID NO: 427300 - RNA, 19 nt, Artificial Sequence
  Description of Artificial Sequence: Synthetic oligonucleotide
caaugcaagagguuucguu

SEQ ID NO: 427301 - RNA, 19 nt, Artificial Sequence
  Description of Artificial Sequence: Synthetic oligonucleotide
ccaaccugcaacggcuucg

SEQ ID NO: 427302 - RNA, 19 nt, Artificial Sequence
  Description of Artificial Sequence: Synthetic oligonucleotide
cugaagaccggggcuuuuc

SEQ ID NO: 427303 - RNA, 19 nt, Artificial Sequence
  Description of Artificial Sequence: Synthetic oligonucleotide
ugcaucuguucagcacugu

SEQ ID NO: 427304 - RNA, 19 nt, Artificial Sequence
  Description of Artificial Sequence: Synthetic oligonucleotide
gccaacgacacaaauacau

SEQ ID NO: 427305 - RNA, 19 nt, Artificial Sequence
  Description of Artificial Sequence: Synthetic oligonucleotide
guaucccauguagggaaca

SEQ ID NO: 427306 - RNA, 19 nt, Artificial Sequence
  Description of Artificial Sequence: Synthetic oligonucleotide
ggucacauauacaggucuc

SEQ ID NO: 427307 - RNA, 19 nt, Artificial Sequence
  Description of Artificial Sequence: Synthetic oligonucleotide
guaaccucaggcucagauu

SEQ ID NO: 427308 - RNA, 19 nt, Artificial Sequence
  Description of Artificial Sequence: Synthetic oligonucleotide
guaggcucuuuggccgccg

SEQ ID NO: 427309 - RNA, 19 nt, Artificial Sequence
  Description of Artificial Sequence: Synthetic oligonucleotide
uuggaacggcaugcuacaa

SEQ ID NO: 427310 - RNA, 19 nt, Artificial Sequence
  Description of Artificial Sequence: Synthetic oligonucleotide
caaagcuccggcuggcgcu

SEQ ID NO: 427311 - RNA, 19 nt, Artificial Sequence
  Description of Artificial Sequence: Synthetic oligonucleotide
gcccugaaacagcuugugc

SEQ ID NO: 427312 - RNA, 19 nt, Artificial Sequence
  Description of Artificial Sequence: Synthetic oligonucleotide
gugacacaaggacaucuau

SEQ ID NO: 427313 - RNA, 19 nt, Artificial Sequence
  Description of Artificial Sequence: Synthetic oligonucleotide
gggugagucaucaaaacuu

SEQ ID NO: 427314 - RNA, 19 nt, Artificial Sequence
  Description of Artificial Sequence: Synthetic oligonucleotide
ggggugagucaucaaaacu

SEQ ID NO: 427315 - RNA, 19 nt, Artificial Sequence
  Description of Artificial Sequence: Synthetic oligonucleotide
cuguagucgcuguaaaauu

SEQ ID NO: 427316 - RNA, 19 nt, Artificial Sequence
  Description of Artificial Sequence: Synthetic oligonucleotide
  modified_base (9)..(9): a, c, u, g, unknown or other
cucaucuancuccuaguuu

SEQ ID NO: 427317 - RNA, 19 nt, Artificial Sequence
  Description of Artificial Sequence: Synthetic oligonucleotide
gcuguagucgcuguaaaau

SEQ ID NO: 427318 - RNA, 19 nt, Artificial Sequence
  Description of Artificial Sequence: Synthetic oligonucleotide
cauuaccagugagugguaa

SEQ ID NO: 427319 - RNA, 19 nt, Artificial Sequence
  Description of Artificial Sequence: Synthetic oligonucleotide
acguccggugagguguuug

SEQ ID NO: 427320 - RNA, 19 nt, Artificial Sequence
  Description of Artificial Sequence: Synthetic oligonucleotide
caucuagguucucuugcua

SEQ ID NO: 427321 - RNA, 19 nt, Artificial Sequence
  Description of Artificial Sequence: Synthetic oligonucleotide
gcacagacaacgauaugaa

SEQ ID NO: 427322 - RNA, 19 nt, Artificial Sequence
  Description of Artificial Sequence: Synthetic oligonucleotide
ggauucccguaaugguaac

SEQ ID NO: 427323 - RNA, 19 nt, Artificial Sequence
  Description of Artificial Sequence: Synthetic oligonucleotide
caguuucauagcccugaaa

SEQ ID NO: 427324 - RNA, 19 nt, Artificial Sequence
  Description of Artificial Sequence: Synthetic oligonucleotide
ugggguuucuuggcuccuc

SEQ ID NO: 427325 - RNA, 19 nt, Artificial Sequence
  Description of Artificial Sequence: Synthetic oligonucleotide
cuguggaguuaauuuuggu

SEQ ID NO: 427326 - RNA, 19 nt, Artificial Sequence
  Description of Artificial Sequence: Synthetic oligonucleotide
caguguuguaucccaugua

SEQ ID NO: 427327 - RNA, 19 nt, Artificial Sequence
  Description of Artificial Sequence: Synthetic oligonucleotide
ugcaacggcuucgcucauc

SEQ ID NO: 427328 - RNA, 19 nt, Artificial Sequence
  Description of Artificial Sequence: Synthetic oligonucleotide
cuaccucaccaccaaaguu

SEQ ID NO: 427329 - RNA, 19 nt, Artificial Sequence
  Description of Artificial Sequence: Synthetic oligonucleotide
auccgagcaaggagcgugu

SEQ ID NO: 427330 - RNA, 19 nt, Artificial Sequence
  Description of Artificial Sequence: Synthetic oligonucleotide
gcacagcuacuuccuacac

SEQ ID NO: 427331 - RNA, 19 nt, Artificial Sequence
  Description of Artificial Sequence: Synthetic oligonucleotide
ggauagugggaaccaagau

SEQ ID NO: 427332 - RNA, 19 nt, Artificial Sequence
  Description of Artificial Sequence: Synthetic oligonucleotide
cagcuacuuccuacacguc

SEQ ID NO: 427333 - RNA, 19 nt, Artificial Sequence
  Description of Artificial Sequence: Synthetic oligonucleotide
cguaaugguaacggugaug

SEQ ID NO: 427334 - RNA, 19 nt, Artificial Sequence
  Description of Artificial Sequence: Synthetic oligonucleotide
gaacggcaugcuacaacua

SEQ ID NO: 427335 - RNA, 19 nt, Artificial Sequence
  Description of Artificial Sequence: Synthetic oligonucleotide
aguggcggugggcgcgaga

SEQ ID NO: 427336 - RNA, 19 nt, Artificial Sequence
  Description of Artificial Sequence: Synthetic oligonucleotide
cuaacgaauagagguucau

SEQ ID NO: 427337 - RNA, 19 nt, Artificial Sequence
  Description of Artificial Sequence: Synthetic oligonucleotide
ggucccuuuuggggagugg

SEQ ID NO: 427338 - RNA, 19 nt, Artificial Sequence
  Description of Artificial Sequence: Synthetic oligonucleotide
ccgccuuuccauacguuca

SEQ ID NO: 427339 - RNA, 19 nt, Artificial Sequence
  Description of Artificial Sequence: Synthetic oligonucleotide
ggucguccaaaugcuacaa

SEQ ID NO: 427340 - RNA, 19 nt, Artificial Sequence
  Description of Artificial Sequence: Synthetic oligonucleotide
cguccggugagguguuugc

SEQ ID NO: 427341 - RNA, 19 nt, Artificial Sequence
  Description of Artificial Sequence: Synthetic oligonucleotide
cauccgccuuuccauacgu

SEQ ID NO: 427342 - RNA, 19 nt, Artificial Sequence
  Description of Artificial Sequence: Synthetic oligonucleotide
cugcauccgccuuuccaua

SEQ ID NO: 427343 - RNA, 19 nt, Artificial Sequence
  Description of Artificial Sequence: Synthetic oligonucleotide
cccugauccucugaauauc

SEQ ID NO: 427344 - RNA, 19 nt, Artificial Sequence
  Description of Artificial Sequence: Synthetic oligonucleotide
guggaaagguacggcaaau

SEQ ID NO: 427345 - RNA, 19 nt, Artificial Sequence
  Description of Artificial Sequence: Synthetic oligonucleotide
ggcgcuccaguuuaauuuu

SEQ ID NO: 427346 - RNA, 19 nt, Artificial Sequence
  Description of Artificial Sequence: Synthetic oligonucleotide
ccgagagggcucuuccuca

SEQ ID NO: 427347 - RNA, 19 nt, Artificial Sequence
  Description of Artificial Sequence: Synthetic oligonucleotide
ccagccaaaggaagcauau

SEQ ID NO: 427348 - RNA, 19 nt, Artificial Sequence
  Description of Artificial Sequence: Synthetic oligonucleotide
ggcgcgagagguggcggcc

SEQ ID NO: 427349 - RNA, 19 nt, Artificial Sequence
  Description of Artificial Sequence: Synthetic oligonucleotide
cuggcgcuccaguuuaauu

SEQ ID NO: 427350 - RNA, 19 nt, Artificial Sequence
  Description of Artificial Sequence: Synthetic oligonucleotide
ccaacgacacaaauacauu

SEQ ID NO: 427351 - RNA, 19 nt, Artificial Sequence
  Description of Artificial Sequence: Synthetic oligonucleotide
caccaaaguuuggcuaaua

SEQ ID NO: 427352 - RNA, 19 nt, Artificial Sequence
  Description of Artificial Sequence: Synthetic oligonucleotide
ggcggugggcgcgagaggu

SEQ ID NO: 427353 - RNA, 19 nt, Artificial Sequence
  Description of Artificial Sequence: Synthetic oligonucleotide
gagccgccccacccuuguc

SEQ ID NO: 427354 - RNA, 19 nt, Artificial Sequence
  Description of Artificial Sequence: Synthetic oligonucleotide
cggcuucgcucauccaacc

SEQ ID NO: 427355 - RNA, 19 nt, Artificial Sequence
  Description of Artificial Sequence: Synthetic oligonucleotide
ccagggcguaggcucuuug

SEQ ID NO: 427356 - RNA, 19 nt, Artificial Sequence
  Description of Artificial Sequence: Synthetic oligonucleotide
cggugggcgcgagaggugg

SEQ ID NO: 427357 - RNA, 19 nt, Artificial Sequence
  Description of Artificial Sequence: Synthetic oligonucleotide
auccgccuuuccauacguu

SEQ ID NO: 427358 - RNA, 19 nt, Artificial Sequence
  Description of Artificial Sequence: Synthetic oligonucleotide
guccggugagguguuugcu

SEQ ID NO: 427359 - RNA, 19 nt, Artificial Sequence
  Description of Artificial Sequence: Synthetic oligonucleotide
agguaaccucaggcucaga

SEQ ID NO: 427360 - RNA, 19 nt, Artificial Sequence
  Description of Artificial Sequence: Synthetic oligonucleotide
acacguccggugagguguu

SEQ ID NO: 427361 - RNA, 19 nt, Artificial Sequence
  Description of Artificial Sequence: Synthetic oligonucleotide
cuccaaccugcaacggcuu

SEQ ID NO: 427362 - RNA, 19 nt, Artificial Sequence
  Description of Artificial Sequence: Synthetic oligonucleotide
gcuccucaauucacguuua

SEQ ID NO: 427363 - RNA, 19 nt, Artificial Sequence
  Description of Artificial Sequence: Synthetic oligonucleotide
guccgaggcgguggcagcu

SEQ ID NO: 427364 - RNA, 19 nt, Artificial Sequence
  Description of Artificial Sequence: Synthetic oligonucleotide
caauccgagcaaggagcgu

SEQ ID NO: 427365 - RNA, 19 nt, Artificial Sequence
  Description of Artificial Sequence: Synthetic oligonucleotide
ccaaccaggguagcucaaa

SEQ ID NO: 427366 - RNA, 19 nt, Artificial Sequence
  Description of Artificial Sequence: Synthetic oligonucleotide
ggugagguguuugcuucuu

SEQ ID NO: 427367 - RNA, 19 nt, Artificial Sequence
  Description of Artificial Sequence: Synthetic oligonucleotide
ccuacacguccggugaggu

SEQ ID NO: 427368 - RNA, 19 nt, Artificial Sequence
  Description of Artificial Sequence: Synthetic oligonucleotide
ccgccccacccuugucccc

SEQ ID NO: 427369 - RNA, 19 nt, Artificial Sequence
  Description of Artificial Sequence: Synthetic oligonucleotide
ccguaaugguaacggugau

SEQ ID NO: 427370 - RNA, 19 nt, Artificial Sequence
  Description of Artificial Sequence: Synthetic oligonucleotide
gcuguucgaugagguccaa

SEQ ID NO: 427371 - RNA, 19 nt, Artificial Sequence
  Description of Artificial Sequence: Synthetic oligonucleotide
ccggcuggcgcuccaguuu

SEQ ID NO: 427372 - RNA, 19 nt, Artificial Sequence
  Description of Artificial Sequence: Synthetic oligonucleotide
cggugagguguuugcuucu

SEQ ID NO: 427373 - RNA, 19 nt, Artificial Sequence
  Description of Artificial Sequence: Synthetic oligonucleotide
ccaccaaaguuuggcuaau

SEQ ID NO: 427374 - RNA, 19 nt, Artificial Sequence
  Description of Artificial Sequence: Synthetic oligonucleotide
ggcggcccgggcagaggua

SEQ ID NO: 427375 - RNA, 19 nt, Artificial Sequence
  Description of Artificial Sequence: Synthetic oligonucleotide
cacguccggugagguguuu

SEQ ID NO: 427376 - RNA, 19 nt, Artificial Sequence
  Description of Artificial Sequence: Synthetic oligonucleotide
cgccggguccgaggcggug

SEQ ID NO: 427377 - RNA, 19 nt, Artificial Sequence
  Description of Artificial Sequence: Synthetic oligonucleotide
ccggggcuuuucugggguu

SEQ ID NO: 427378 - RNA, 19 nt, Artificial Sequence
  Description of Artificial Sequence: Synthetic oligonucleotide
aaaauaaucgacccgaugg

SEQ ID NO: 427379 - RNA, 19 nt, Artificial Sequence
  Description of Artificial Sequence: Synthetic oligonucleotide
aaaacauacccuuacaugg

SEQ ID NO: 427380 - RNA, 19 nt, Artificial Sequence
  Description of Artificial Sequence: Synthetic oligonucleotide
aaauuaaaaguguugcugc

SEQ ID NO: 427381 - RNA, 19 nt, Artificial Sequence
  Description of Artificial Sequence: Synthetic oligonucleotide
aacauuaaggcguacaaac

SEQ ID NO: 427382 - RNA, 19 nt, Artificial Sequence
  Description of Artificial Sequence: Synthetic oligonucleotide
ugaagcaauaaaauaaucg

SEQ ID NO: 427383 - RNA, 19 nt, Artificial Sequence
  Description of Artificial Sequence: Synthetic oligonucleotide
aauaguaccaauguucuac

SEQ ID NO: 427384 - RNA, 19 nt, Artificial Sequence
  Description of Artificial Sequence: Synthetic oligonucleotide
uacauuaugaugaucaccc

SEQ ID NO: 427385 - RNA, 19 nt, Artificial Sequence
  Description of Artificial Sequence: Synthetic oligonucleotide
uguagcuaaauuaaaagug

SEQ ID NO: 427386 - RNA, 19 nt, Artificial Sequence
  Description of Artificial Sequence: Synthetic oligonucleotide
auaaaccucauuuccaucc

SEQ ID NO: 427387 - RNA, 19 nt, Artificial Sequence
  Description of Artificial Sequence: Synthetic oligonucleotide
uguuaugacaaggagaugg

SEQ ID NO: 427388 - RNA, 19 nt, Artificial Sequence
  Description of Artificial Sequence: Synthetic oligonucleotide
aaauaagucaaaaugaaca

SEQ ID NO: 427389 - RNA, 19 nt, Artificial Sequence
  Description of Artificial Sequence: Synthetic oligonucleotide
aaauaaucgacccgauggc

SEQ ID NO: 427390 - RNA, 19 nt, Artificial Sequence
  Description of Artificial Sequence: Synthetic oligonucleotide
auaaguaacaauuaaaaua

SEQ ID NO: 427391 - RNA, 19 nt, Artificial Sequence
  Description of Artificial Sequence: Synthetic oligonucleotide
aauaaaauaaucgacccga

SEQ ID NO: 427392 - RNA, 19 nt, Artificial Sequence
  Description of Artificial Sequence: Synthetic oligonucleotide
uggauaaaguuauuaaugg

SEQ ID NO: 427393 - RNA, 19 nt, Artificial Sequence
  Description of Artificial Sequence: Synthetic oligonucleotide
uauuacugcaauaacaaga

SEQ ID NO: 427394 - RNA, 19 nt, Artificial Sequence
  Description of Artificial Sequence: Synthetic oligonucleotide
uuuaaugugaacuggguca

SEQ ID NO: 427395 - RNA, 19 nt, Artificial Sequence
  Description of Artificial Sequence: Synthetic oligonucleotide
aaggcguacaaacagcuac

SEQ ID NO: 427396 - RNA, 19 nt, Artificial Sequence
  Description of Artificial Sequence: Synthetic oligonucleotide
aaugaguuuaaguauuuca

SEQ ID NO: 427397 - RNA, 19 nt, Artificial Sequence
  Description of Artificial Sequence: Synthetic oligonucleotide
uugaugacuaucaaaacug

SEQ ID NO: 427398 - RNA, 19 nt, Artificial Sequence
  Description of Artificial Sequence: Synthetic oligonucleotide
ucuacaaaacaaaaggcug

SEQ ID NO: 427399 - RNA, 19 nt, Artificial Sequence
  Description of Artificial Sequence: Synthetic oligonucleotide
ugacuaucaaaacugaggc

SEQ ID NO: 427400 - RNA, 19 nt, Artificial Sequence
  Description of Artificial Sequence: Synthetic oligonucleotide
uauugguggacuuuguugg

SEQ ID NO: 427401 - RNA, 19 nt, Artificial Sequence
  Description of Artificial Sequence: Synthetic oligonucleotide
auauauggaauguuggcac

SEQ ID NO: 427402 - RNA, 19 nt, Artificial Sequence
  Description of Artificial Sequence: Synthetic oligonucleotide
acacauaaaccucauuucc

SEQ ID NO: 427403 - RNA, 19 nt, Artificial Sequence
  Description of Artificial Sequence: Synthetic oligonucleotide
agcaaauuuucuuugacag

SEQ ID NO: 427404 - RNA, 19 nt, Artificial Sequence
  Description of Artificial Sequence: Synthetic oligonucleotide
agcaauaaaauaaucgacc

SEQ ID NO: 427405 - RNA, 19 nt, Artificial Sequence
  Description of Artificial Sequence: Synthetic oligonucleotide
aaugcuacaaaugucacgu

SEQ ID NO: 427406 - RNA, 19 nt, Artificial Sequence
  Description of Artificial Sequence: Synthetic oligonucleotide
uuuauguuaugacaaggag

SEQ ID NO: 427407 - RNA, 19 nt, Artificial Sequence
  Description of Artificial Sequence: Synthetic oligonucleotide
uuugaugacuaucaaaacu

SEQ ID NO: 427408 - RNA, 19 nt, Artificial Sequence
  Description of Artificial Sequence: Synthetic oligonucleotide
aauuagucagauuauaauu

SEQ ID NO: 427409 - RNA, 19 nt, Artificial Sequence
  Description of Artificial Sequence: Synthetic oligonucleotide
uguaaauaaagcuuccucu

SEQ ID NO: 427410 - RNA, 19 nt, Artificial Sequence
  Description of Artificial Sequence: Synthetic oligonucleotide
ucuaccaagaacaaugagu

SEQ ID NO: 427411 - RNA, 19 nt, Artificial Sequence
  Description of Artificial Sequence: Synthetic oligonucleotide
aauagcaaggagaagaaug

SEQ ID NO: 427412 - RNA, 19 nt, Artificial Sequence
  Description of Artificial Sequence: Synthetic oligonucleotide
ugaugaucacccaacauag

SEQ ID NO: 427413 - RNA, 19 nt, Artificial Sequence
  Description of Artificial Sequence: Synthetic oligonucleotide
uuuagaacagcaaauuuuc

SEQ ID NO: 427414 - RNA, 19 nt, Artificial Sequence
  Description of Artificial Sequence: Synthetic oligonucleotide
uaaguguugagaaaugucu

SEQ ID NO: 427415 - RNA, 19 nt, Artificial Sequence
  Description of Artificial Sequence: Synthetic oligonucleotide
guuauuaauggcuuuagac

SEQ ID NO: 427416 - RNA, 19 nt, Artificial Sequence
  Description of Artificial Sequence: Synthetic oligonucleotide
uacagaauacauuuuaugu

SEQ ID NO: 427417 - RNA, 19 nt, Artificial Sequence
  Description of Artificial Sequence: Synthetic oligonucleotide
aauaagucaaaaugaacau

SEQ ID NO: 427418 - RNA, 19 nt, Artificial Sequence
  Description of Artificial Sequence: Synthetic oligonucleotide
cauagauccacacauaaac

SEQ ID NO: 427419 - RNA, 19 nt, Artificial Sequence
  Description of Artificial Sequence: Synthetic oligonucleotide
uuguaaauuauguacagaa

SEQ ID NO: 427420 - RNA, 19 nt, Artificial Sequence
  Description of Artificial Sequence: Synthetic oligonucleotide
uauucaguccccaaauuag

SEQ ID NO: 427421 - RNA, 19 nt, Artificial Sequence
  Description of Artificial Sequence: Synthetic oligonucleotide
uuuaucauacuucauuuuc

SEQ ID NO: 427422 - RNA, 19 nt, Artificial Sequence
  Description of Artificial Sequence: Synthetic oligonucleotide
agaucaaauguucuguggg

SEQ ID NO: 427423 - RNA, 19 nt, Artificial Sequence
  Description of Artificial Sequence: Synthetic oligonucleotide
aaauuagucagauuauaau

SEQ ID NO: 427424 - RNA, 19 nt, Artificial Sequence
  Description of Artificial Sequence: Synthetic oligonucleotide
aauuaucagauggauaaag

SEQ ID NO: 427425 - RNA, 19 nt, Artificial Sequence
  Description of Artificial Sequence: Synthetic oligonucleotide
aaaugucuaaauaauaagu

SEQ ID NO: 427426 - RNA, 19 nt, Artificial Sequence
  Description of Artificial Sequence: Synthetic oligonucleotide
acaagaauuaaucccauga

SEQ ID NO: 427427 - RNA, 19 nt, Artificial Sequence
  Description of Artificial Sequence: Synthetic oligonucleotide
ugcaaaauggcuauauacu

SEQ ID NO: 427428 - RNA, 19 nt, Artificial Sequence
  Description of Artificial Sequence: Synthetic oligonucleotide
uugaaucgaagauacuugg

SEQ ID NO: 427429 - RNA, 19 nt, Artificial Sequence
  Description of Artificial Sequence: Synthetic oligonucleotide
uuaagucugcuuuuggucc

SEQ ID NO: 427430 - RNA, 19 nt, Artificial Sequence
  Description of Artificial Sequence: Synthetic oligonucleotide
ugagguaauauacaccuac

SEQ ID NO: 427431 - RNA, 19 nt, Artificial Sequence
  Description of Artificial Sequence: Synthetic oligonucleotide
guaauugaaugucaaauac

SEQ ID NO: 427432 - RNA, 19 nt, Artificial Sequence
  Description of Artificial Sequence: Synthetic oligonucleotide
auaucuaccaagaacaaug

SEQ ID NO: 427433 - RNA, 19 nt, Artificial Sequence
  Description of Artificial Sequence: Synthetic oligonucleotide
uuagugauuuccauuaguc

SEQ ID NO: 427434 - RNA, 19 nt, Artificial Sequence
  Description of Artificial Sequence: Synthetic oligonucleotide
uuguuggacaguugaaucg

SEQ ID NO: 427435 - RNA, 19 nt, Artificial Sequence
  Description of Artificial Sequence: Synthetic oligonucleotide
aaucuaaaugucacggugg

SEQ ID NO: 427436 - RNA, 19 nt, Artificial Sequence
  Description of Artificial Sequence: Synthetic oligonucleotide
ucauuaaaauauauggaau

SEQ ID NO: 427437 - RNA, 19 nt, Artificial Sequence
  Description of Artificial Sequence: Synthetic oligonucleotide
auagcaaggagaagaaugc

SEQ ID NO: 427438 - RNA, 19 nt, Artificial Sequence
  Description of Artificial Sequence: Synthetic oligonucleotide
auggauuaaagaaugcuac

SEQ ID NO: 427439 - RNA, 19 nt, Artificial Sequence
  Description of Artificial Sequence: Synthetic oligonucleotide
acuaucaaaacugaggccu

SEQ ID NO: 427440 - RNA, 19 nt, Artificial Sequence
  Description of Artificial Sequence: Synthetic oligonucleotide
ugugccaauaguaccaaug

SEQ ID NO: 427441 - RNA, 19 nt, Artificial Sequence
  Description of Artificial Sequence: Synthetic oligonucleotide
acaguugaaucgaagauac

SEQ ID NO: 427442 - RNA, 19 nt, Artificial Sequence
  Description of Artificial Sequence: Synthetic oligonucleotide
ucuuuagugauuuccauua

SEQ ID NO: 427443 - RNA, 19 nt, Artificial Sequence
  Description of Artificial Sequence: Synthetic oligonucleotide
aaucauucccauuuccacu

SEQ ID NO: 427444 - RNA, 19 nt, Artificial Sequence
  Description of Artificial Sequence: Synthetic oligonucleotide
aaagaaugcuacaaauguc

SEQ ID NO: 427445 - RNA, 19 nt, Artificial Sequence
  Description of Artificial Sequence: Synthetic oligonucleotide
uuuacucauuaaaauauau

SEQ ID NO: 427446 - RNA, 19 nt, Artificial Sequence
  Description of Artificial Sequence: Synthetic oligonucleotide
uacuuuuagggcucgauga

SEQ ID NO: 427447 - RNA, 19 nt, Artificial Sequence
  Description of Artificial Sequence: Synthetic oligonucleotide
uuuguauucauguguguac

SEQ ID NO: 427448 - RNA, 19 nt, Artificial Sequence
  Description of Artificial Sequence: Synthetic oligonucleotide
auuuuauguuaugacaagg

SEQ ID NO: 427449 - RNA, 19 nt, Artificial Sequence
  Description of Artificial Sequence: Synthetic oligonucleotide
agucaaaaugaacauuaag

SEQ ID NO: 427450 - RNA, 19 nt, Artificial Sequence
  Description of Artificial Sequence: Synthetic oligonucleotide
uuuuaaugugaacuggguc

SEQ ID NO: 427451 - RNA, 19 nt, Artificial Sequence
  Description of Artificial Sequence: Synthetic oligonucleotide
aauccaagaggcaauccac

SEQ ID NO: 427452 - RNA, 19 nt, Artificial Sequence
  Description of Artificial Sequence: Synthetic oligonucleotide
aauuaaucccaugacaaau

SEQ ID NO: 427453 - RNA, 19 nt, Artificial Sequence
  Description of Artificial Sequence: Synthetic oligonucleotide
augacuaucaaaacugagg

SEQ ID NO: 427454 - RNA, 19 nt, Artificial Sequence
  Description of Artificial Sequence: Synthetic oligonucleotide
aaugugaacugggucauag

SEQ ID NO: 427455 - RNA, 19 nt, Artificial Sequence
  Description of Artificial Sequence: Synthetic oligonucleotide
cauuaaggcguacaaacag

SEQ ID NO: 427456 - RNA, 19 nt, Artificial Sequence
  Description of Artificial Sequence: Synthetic oligonucleotide
uuuaagucugcuuuugguc

SEQ ID NO: 427457 - RNA, 19 nt, Artificial Sequence
  Description of Artificial Sequence: Synthetic oligonucleotide
uccuaaguuggaaaaggag

SEQ ID NO: 427458 - RNA, 19 nt, Artificial Sequence
  Description of Artificial Sequence: Synthetic oligonucleotide
agcauaucuaccaagaaca

SEQ ID NO: 427459 - RNA, 19 nt, Artificial Sequence
  Description of Artificial Sequence: Synthetic oligonucleotide
acaaauuuaaguguugaga

SEQ ID NO: 427460 - RNA, 19 nt, Artificial Sequence
  Description of Artificial Sequence: Synthetic oligonucleotide
auaacaagaauuaauccca

SEQ ID NO: 427461 - RNA, 19 nt, Artificial Sequence
  Description of Artificial Sequence: Synthetic oligonucleotide
ggucugauaacauaguccc

SEQ ID NO: 427462 - RNA, 19 nt, Artificial Sequence
  Description of Artificial Sequence: Synthetic oligonucleotide
aaugucuaaauaauaagua

SEQ ID NO: 427463 - RNA, 19 nt, Artificial Sequence
  Description of Artificial Sequence: Synthetic oligonucleotide
uagauccacacauaaaccu

SEQ ID NO: 427464 - RNA, 19 nt, Artificial Sequence
  Description of Artificial Sequence: Synthetic oligonucleotide
uguaauugaaugucaaaua

SEQ ID NO: 427465 - RNA, 19 nt, Artificial Sequence
  Description of Artificial Sequence: Synthetic oligonucleotide
ugucacguguacauuauga

SEQ ID NO: 427466 - RNA, 19 nt, Artificial Sequence
  Description of Artificial Sequence: Synthetic oligonucleotide
uuaaggcguacaaacagcu

SEQ ID NO: 427467 - RNA, 19 nt, Artificial Sequence
  Description of Artificial Sequence: Synthetic oligonucleotide
uaaaauaaucgacccgaug

SEQ ID NO: 427468 - RNA, 19 nt, Artificial Sequence
  Description of Artificial Sequence: Synthetic oligonucleotide
uugaucaucauguggcuca

SEQ ID NO: 427469 - RNA, 19 nt, Artificial Sequence
  Description of Artificial Sequence: Synthetic oligonucleotide
ugaacauuaaggcguacaa

SEQ ID NO: 427470 - RNA, 19 nt, Artificial Sequence
  Description of Artificial Sequence: Synthetic oligonucleotide
uuaaguguugagaaauguc

SEQ ID NO: 427471 - RNA, 19 nt, Artificial Sequence
  Description of Artificial Sequence: Synthetic oligonucleotide
uccuuuguauucaugugug

SEQ ID NO: 427472 - RNA, 19 nt, Artificial Sequence
  Description of Artificial Sequence: Synthetic oligonucleotide
aaacagcuacuuuaugucu

SEQ ID NO: 427473 - RNA, 19 nt, Artificial Sequence
  Description of Artificial Sequence: Synthetic oligonucleotide
auuaaggcguacaaacagc

SEQ ID NO: 427474 - RNA, 19 nt, Artificial Sequence
  Description of Artificial Sequence: Synthetic oligonucleotide
uuacuuuuagggcucgaug

SEQ ID NO: 427475 - RNA, 19 nt, Artificial Sequence
  Description of Artificial Sequence: Synthetic oligonucleotide
uuauucaguccccaaauua

SEQ ID NO: 427476 - RNA, 19 nt, Artificial Sequence
  Description of Artificial Sequence: Synthetic oligonucleotide
uguacagaggccugaagga

SEQ ID NO: 427477 - RNA, 19 nt, Artificial Sequence
  Description of Artificial Sequence: Synthetic oligonucleotide
aaucccaugacaaauguuu

SEQ ID NO: 427478 - RNA, 19 nt, Artificial Sequence
  Description of Artificial Sequence: Synthetic oligonucleotide
uagacugugccaauaguac

SEQ ID NO: 427479 - RNA, 19 nt, Artificial Sequence
  Description of Artificial Sequence: Synthetic oligonucleotide
cacguguacauuaugauga

SEQ ID NO: 427480 - RNA, 19 nt, Artificial Sequence
  Description of Artificial Sequence: Synthetic oligonucleotide
uuuugaauccaagaggcaa

SEQ ID NO: 427481 - RNA, 19 nt, Artificial Sequence
  Description of Artificial Sequence: Synthetic oligonucleotide
ucccugguuguaaauaaag

SEQ ID NO: 427482 - RNA, 19 nt, Artificial Sequence
  Description of Artificial Sequence: Synthetic oligonucleotide
ucuaaauguaaagauuuaa

SEQ ID NO: 427483 - RNA, 19 nt, Artificial Sequence
  Description of Artificial Sequence: Synthetic oligonucleotide
uggacaguugaaucgaaga

SEQ ID NO: 427484 - RNA, 19 nt, Artificial Sequence
  Description of Artificial Sequence: Synthetic oligonucleotide
augucuaaauaauaaguaa

SEQ ID NO: 427485 - RNA, 19 nt, Artificial Sequence
  Description of Artificial Sequence: Synthetic oligonucleotide
gcuaaauuaaaaguguugc

SEQ ID NO: 427486 - RNA, 19 nt, Artificial Sequence
  Description of Artificial Sequence: Synthetic oligonucleotide
ucacguguacauuaugaug

SEQ ID NO: 427487 - RNA, 19 nt, Artificial Sequence
  Description of Artificial Sequence: Synthetic oligonucleotide
uacaccuacucucauuucu

SEQ ID NO: 427488 - RNA, 19 nt, Artificial Sequence
  Description of Artificial Sequence: Synthetic oligonucleotide
gaauguuggcacaaaacug

SEQ ID NO: 427489 - RNA, 19 nt, Artificial Sequence
  Description of Artificial Sequence: Synthetic oligonucleotide
aauggauuaaagaaugcua

SEQ ID NO: 427490 - RNA, 19 nt, Artificial Sequence
  Description of Artificial Sequence: Synthetic oligonucleotide
aacaagaauuaaucccaug

SEQ ID NO: 427491 - RNA, 19 nt, Artificial Sequence
  Description of Artificial Sequence: Synthetic oligonucleotide
aaucgaagauacuuggcua

SEQ ID NO: 427492 - RNA, 19 nt, Artificial Sequence
  Description of Artificial Sequence: Synthetic oligonucleotide
agauggauaaaguuauuaa

SEQ ID NO: 427493 - RNA, 19 nt, Artificial Sequence
  Description of Artificial Sequence: Synthetic oligonucleotide
cauuuuauguuaugacaag

SEQ ID NO: 427494 - RNA, 19 nt, Artificial Sequence
  Description of Artificial Sequence: Synthetic oligonucleotide
augaugaucacccaacaua

SEQ ID NO: 427495 - RNA, 19 nt, Artificial Sequence
  Description of Artificial Sequence: Synthetic oligonucleotide
uuuaaguguugagaaaugu

SEQ ID NO: 427496 - RNA, 19 nt, Artificial Sequence
  Description of Artificial Sequence: Synthetic oligonucleotide
uguacaauucaguuuggau

SEQ ID NO: 427497 - RNA, 19 nt, Artificial Sequence
  Description of Artificial Sequence: Synthetic oligonucleotide
ugaaucgaagauacuuggc

SEQ ID NO: 427498 - RNA, 19 nt, Artificial Sequence
  Description of Artificial Sequence: Synthetic oligonucleotide
aaggagaauuuguagcuaa

SEQ ID NO: 427499 - RNA, 19 nt, Artificial Sequence
  Description of Artificial Sequence: Synthetic oligonucleotide
caagaauuaaucccaugac

SEQ ID NO: 427500 - RNA, 19 nt, Artificial Sequence
  Description of Artificial Sequence: Synthetic oligonucleotide
ugcuacaguuucuuuagug

SEQ ID NO: 427501 - RNA, 19 nt, Artificial Sequence
  Description of Artificial Sequence: Synthetic oligonucleotide
uugggaucggucaucuucc

SEQ ID NO: 427502 - RNA, 19 nt, Artificial Sequence
  Description of Artificial Sequence: Synthetic oligonucleotide
uuuugaugguucaccaacu

SEQ ID NO: 427503 - RNA, 19 nt, Artificial Sequence
  Description of Artificial Sequence: Synthetic oligonucleotide
gucgaugaagcccacauca

SEQ ID NO: 427504 - RNA, 19 nt, Artificial Sequence
  Description of Artificial Sequence: Synthetic oligonucleotide
acuguaaaauuaucagaug

SEQ ID NO: 427505 - RNA, 19 nt, Artificial Sequence
  Description of Artificial Sequence: Synthetic oligonucleotide
uguuccaugauuuccugau

SEQ ID NO: 427506 - RNA, 19 nt, Artificial Sequence
  Description of Artificial Sequence: Synthetic oligonucleotide
guaccaauguucuacaaaa

SEQ ID NO: 427507 - RNA, 19 nt, Artificial Sequence
  Description of Artificial Sequence: Synthetic oligonucleotide
uuugaauccaagaggcaau

SEQ ID NO: 427508 - RNA, 19 nt, Artificial Sequence
  Description of Artificial Sequence: Synthetic oligonucleotide
ugaugacuaucaaaacuga

SEQ ID NO: 427509 - RNA, 19 nt, Artificial Sequence
  Description of Artificial Sequence: Synthetic oligonucleotide
agcuacuuuaugucuguuc

SEQ ID NO: 427510 - RNA, 19 nt, Artificial Sequence
  Description of Artificial Sequence: Synthetic oligonucleotide
gacuuuguuggacaguuga

SEQ ID NO: 427511 - RNA, 19 nt, Artificial Sequence
  Description of Artificial Sequence: Synthetic oligonucleotide
acuuacuguaaaauuauca

SEQ ID NO: 427512 - RNA, 19 nt, Artificial Sequence
  Description of Artificial Sequence: Synthetic oligonucleotide
augaucacccaacauagaa

SEQ ID NO: 427513 - RNA, 19 nt, Artificial Sequence
  Description of Artificial Sequence: Synthetic oligonucleotide
auguuuuaaugugaacugg

SEQ ID NO: 427514 - RNA, 19 nt, Artificial Sequence
  Description of Artificial Sequence: Synthetic oligonucleotide
gaauacauuuuauguuaug

SEQ ID NO: 427515 - RNA, 19 nt, Artificial Sequence
  Description of Artificial Sequence: Synthetic oligonucleotide
cuuuagacugugccaauag

SEQ ID NO: 427516 - RNA, 19 nt, Artificial Sequence
  Description of Artificial Sequence: Synthetic oligonucleotide
cacccaacauagaaaaccc

SEQ ID NO: 427517 - RNA, 19 nt, Artificial Sequence
  Description of Artificial Sequence: Synthetic oligonucleotide
cuauuacugcaauaacaag

SEQ ID NO: 427518 - RNA, 19 nt, Artificial Sequence
  Description of Artificial Sequence: Synthetic oligonucleotide
cugcguuccgccauguugg

SEQ ID NO: 427519 - RNA, 19 nt, Artificial Sequence
  Description of Artificial Sequence: Synthetic oligonucleotide
guugaaucgaagauacuug

SEQ ID NO: 427520 - RNA, 19 nt, Artificial Sequence
  Description of Artificial Sequence: Synthetic oligonucleotide
uagugauuuccauuagucu

SEQ ID NO: 427521 - RNA, 19 nt, Artificial Sequence
  Description of Artificial Sequence: Synthetic oligonucleotide
gaugacuaucaaaacugag

SEQ ID NO: 427522 - RNA, 19 nt, Artificial Sequence
  Description of Artificial Sequence: Synthetic oligonucleotide
gacuaucaaaacugaggcc

SEQ ID NO: 427523 - RNA, 19 nt, Artificial Sequence
  Description of Artificial Sequence: Synthetic oligonucleotide
uuaugacaaggagaugggg

SEQ ID NO: 427524 - RNA, 19 nt, Artificial Sequence
  Description of Artificial Sequence: Synthetic oligonucleotide
acuuauucaguccccaaau

SEQ ID NO: 427525 - RNA, 19 nt, Artificial Sequence
  Description of Artificial Sequence: Synthetic oligonucleotide
uuacuagcugguuuguuuc

SEQ ID NO: 427526 - RNA, 19 nt, Artificial Sequence
  Description of Artificial Sequence: Synthetic oligonucleotide
guauugaauguacaauuca

SEQ ID NO: 427527 - RNA, 19 nt, Artificial Sequence
  Description of Artificial Sequence: Synthetic oligonucleotide
aguugaaucgaagauacuu

SEQ ID NO: 427528 - RNA, 19 nt, Artificial Sequence
  Description of Artificial Sequence: Synthetic oligonucleotide
cugagugucgcucuccacc

SEQ ID NO: 427529 - RNA, 19 nt, Artificial Sequence
  Description of Artificial Sequence: Synthetic oligonucleotide
ugaucacccaacauagaaa

SEQ ID NO: 427530 - RNA, 19 nt, Artificial Sequence
  Description of Artificial Sequence: Synthetic oligonucleotide
ucacaaucagugcucuuca

SEQ ID NO: 427531 - RNA, 19 nt, Artificial Sequence
  Description of Artificial Sequence: Synthetic oligonucleotide
uaaaaguguugcugcacug

SEQ ID NO: 427532 - RNA, 19 nt, Artificial Sequence
  Description of Artificial Sequence: Synthetic oligonucleotide
aaacccaaccugcugcacu

SEQ ID NO: 427533 - RNA, 19 nt, Artificial Sequence
  Description of Artificial Sequence: Synthetic oligonucleotide
uguacauuaugaugaucac

SEQ ID NO: 427534 - RNA, 19 nt, Artificial Sequence
  Description of Artificial Sequence: Synthetic oligonucleotide
ggauaaaguuauuaauggc

SEQ ID NO: 427535 - RNA, 19 nt, Artificial Sequence
  Description of Artificial Sequence: Synthetic oligonucleotide
ucauguguguacagaggcc

SEQ ID NO: 427536 - RNA, 19 nt, Artificial Sequence
  Description of Artificial Sequence: Synthetic oligonucleotide
uuccuaaguuggaaaagga

SEQ ID NO: 427537 - RNA, 19 nt, Artificial Sequence
  Description of Artificial Sequence: Synthetic oligonucleotide
uuagucagauuauaauuuu

SEQ ID NO: 427538 - RNA, 19 nt, Artificial Sequence
  Description of Artificial Sequence: Synthetic oligonucleotide
auuacugcaauaacaagaa

SEQ ID NO: 427539 - RNA, 19 nt, Artificial Sequence
  Description of Artificial Sequence: Synthetic oligonucleotide
ugguauuuuagaacagcaa

SEQ ID NO: 427540 - RNA, 19 nt, Artificial Sequence
  Description of Artificial Sequence: Synthetic oligonucleotide
acauaaaccucauuuccau

SEQ ID NO: 427541 - RNA, 19 nt, Artificial Sequence
  Description of Artificial Sequence: Synthetic oligonucleotide
uuggacaguugaaucgaag

SEQ ID NO: 427542 - RNA, 19 nt, Artificial Sequence
  Description of Artificial Sequence: Synthetic oligonucleotide
auuagucagauuauaauuu

SEQ ID NO: 427543 - RNA, 19 nt, Artificial Sequence
  Description of Artificial Sequence: Synthetic oligonucleotide
acagcgagcaauagcaagg

SEQ ID NO: 427544 - RNA, 19 nt, Artificial Sequence
  Description of Artificial Sequence: Synthetic oligonucleotide
uggcuauauacuuaugcau

SEQ ID NO: 427545 - RNA, 19 nt, Artificial Sequence
  Description of Artificial Sequence: Synthetic oligonucleotide
aaguuggaaaaggagaauu

SEQ ID NO: 427546 - RNA, 19 nt, Artificial Sequence
  Description of Artificial Sequence: Synthetic oligonucleotide
aguaccaauguucuacaaa

SEQ ID NO: 427547 - RNA, 19 nt, Artificial Sequence
  Description of Artificial Sequence: Synthetic oligonucleotide
ugagccgucuguuccauga

SEQ ID NO: 427548 - RNA, 19 nt, Artificial Sequence
  Description of Artificial Sequence: Synthetic oligonucleotide
cugacuguaauugaauguc

SEQ ID NO: 427549 - RNA, 19 nt, Artificial Sequence
  Description of Artificial Sequence: Synthetic oligonucleotide
agccauacaacuauuaaaa

SEQ ID NO: 427550 - RNA, 19 nt, Artificial Sequence
  Description of Artificial Sequence: Synthetic oligonucleotide
agaaugcuggcuacaaaac

SEQ ID NO: 427551 - RNA, 19 nt, Artificial Sequence
  Description of Artificial Sequence: Synthetic oligonucleotide
guuaucagccagaugauga

SEQ ID NO: 427552 - RNA, 19 nt, Artificial Sequence
  Description of Artificial Sequence: Synthetic oligonucleotide
auguucuacaaaacaaaag

SEQ ID NO: 427553 - RNA, 19 nt, Artificial Sequence
  Description of Artificial Sequence: Synthetic oligonucleotide
ucauagauccacacauaaa

SEQ ID NO: 427554 - RNA, 19 nt, Artificial Sequence
  Description of Artificial Sequence: Synthetic oligonucleotide
ucucuguauugaauguaca

SEQ ID NO: 427555 - RNA, 19 nt, Artificial Sequence
  Description of Artificial Sequence: Synthetic oligonucleotide
aucauauugguggacuuug

SEQ ID NO: 427556 - RNA, 19 nt, Artificial Sequence
  Description of Artificial Sequence: Synthetic oligonucleotide
uccaagaggcaauccacug

SEQ ID NO: 427557 - RNA, 19 nt, Artificial Sequence
  Description of Artificial Sequence: Synthetic oligonucleotide
aucuaaaugucacggugga

SEQ ID NO: 427558 - RNA, 19 nt, Artificial Sequence
  Description of Artificial Sequence: Synthetic oligonucleotide
cacugagguaauauacacc

SEQ ID NO: 427559 - RNA, 19 nt, Artificial Sequence
  Description of Artificial Sequence: Synthetic oligonucleotide
auaguaccaauguucuaca

SEQ ID NO: 427560 - RNA, 19 nt, Artificial Sequence
  Description of Artificial Sequence: Synthetic oligonucleotide
auugaauguacaauucagu

SEQ ID NO: 427561 - RNA, 19 nt, Artificial Sequence
  Description of Artificial Sequence: Synthetic oligonucleotide
uguuggacaguugaaucga

SEQ ID NO: 427562 - RNA, 19 nt, Artificial Sequence
  Description of Artificial Sequence: Synthetic oligonucleotide
aguguugagaaaugucuaa

SEQ ID NO: 427563 - RNA, 19 nt, Artificial Sequence
  Description of Artificial Sequence: Synthetic oligonucleotide
caguccccaaauuagucag

SEQ ID NO: 427564 - RNA, 19 nt, Artificial Sequence
  Description of Artificial Sequence: Synthetic oligonucleotide
uucaguccccaaauuaguc

SEQ ID NO: 427565 - RNA, 19 nt, Artificial Sequence
  Description of Artificial Sequence: Synthetic oligonucleotide
uaaaugucacgguggacaa

SEQ ID NO: 427566 - RNA, 19 nt, Artificial Sequence
  Description of Artificial Sequence: Synthetic oligonucleotide
cccauuuugaauccaagag

SEQ ID NO: 427567 - RNA, 19 nt, Artificial Sequence
  Description of Artificial Sequence: Synthetic oligonucleotide
ucuugugucgccugcguuc

SEQ ID NO: 427568 - RNA, 19 nt, Artificial Sequence
  Description of Artificial Sequence: Synthetic oligonucleotide
ucgaugaagcccacaucag

SEQ ID NO: 427569 - RNA, 19 nt, Artificial Sequence
  Description of Artificial Sequence: Synthetic oligonucleotide
uggccuuugcccauuuuga

SEQ ID NO: 427570 - RNA, 19 nt, Artificial Sequence
  Description of Artificial Sequence: Synthetic oligonucleotide
cuacaaaugucacguguac

SEQ ID NO: 427571 - RNA, 19 nt, Artificial Sequence
  Description of Artificial Sequence: Synthetic oligonucleotide
aaugaacauuaaggcguac

SEQ ID NO: 427572 - RNA, 19 nt, Artificial Sequence
  Description of Artificial Sequence: Synthetic oligonucleotide
ugcccuuaaucuaaauguc

SEQ ID NO: 427573 - RNA, 19 nt, Artificial Sequence
  Description of Artificial Sequence: Synthetic oligonucleotide
uagcuaaauuaaaaguguu

SEQ ID NO: 427574 - RNA, 19 nt, Artificial Sequence
  Description of Artificial Sequence: Synthetic oligonucleotide
gaauuaaucccaugacaaa

SEQ ID NO: 427575 - RNA, 19 nt, Artificial Sequence
  Description of Artificial Sequence: Synthetic oligonucleotide
ucaaauguucuguggguua

SEQ ID NO: 427576 - RNA, 19 nt, Artificial Sequence
  Description of Artificial Sequence: Synthetic oligonucleotide
ugcuuuugguccuuuguau

SEQ ID NO: 427577 - RNA, 19 nt, Artificial Sequence
  Description of Artificial Sequence: Synthetic oligonucleotide
aaacauacccuuacauggu

SEQ ID NO: 427578 - RNA, 19 nt, Artificial Sequence
  Description of Artificial Sequence: Synthetic oligonucleotide
uacuuuaugucuguucuua

SEQ ID NO: 427579 - RNA, 19 nt, Artificial Sequence
  Description of Artificial Sequence: Synthetic oligonucleotide
ugcccauuuugaauccaag

SEQ ID NO: 427580 - RNA, 19 nt, Artificial Sequence
  Description of Artificial Sequence: Synthetic oligonucleotide
uaacaagaauuaaucccau

SEQ ID NO: 427581 - RNA, 19 nt, Artificial Sequence
  Description of Artificial Sequence: Synthetic oligonucleotide
uaguccccauuucuaaaug

SEQ ID NO: 427582 - RNA, 19 nt, Artificial Sequence
  Description of Artificial Sequence: Synthetic oligonucleotide
uacuuacuguaaaauuauc

SEQ ID NO: 427583 - RNA, 19 nt, Artificial Sequence
  Description of Artificial Sequence: Synthetic oligonucleotide
cuuuagugauuuccauuag

SEQ ID NO: 427584 - RNA, 19 nt, Artificial Sequence
  Description of Artificial Sequence: Synthetic oligonucleotide
agucgaugaagcccacauc

SEQ ID NO: 427585 - RNA, 19 nt, Artificial Sequence
  Description of Artificial Sequence: Synthetic oligonucleotide
acaaauguuuuaaugugaa

SEQ ID NO: 427586 - RNA, 19 nt, Artificial Sequence
  Description of Artificial Sequence: Synthetic oligonucleotide
ugagugucgcucuccaccu

SEQ ID NO: 427587 - RNA, 19 nt, Artificial Sequence
  Description of Artificial Sequence: Synthetic oligonucleotide
gcugcacuuauucaguccc

SEQ ID NO: 427588 - RNA, 19 nt, Artificial Sequence
  Description of Artificial Sequence: Synthetic oligonucleotide
ugcugcacuuauucagucc

SEQ ID NO: 427589 - RNA, 19 nt, Artificial Sequence
  Description of Artificial Sequence: Synthetic oligonucleotide
uuaaugugaacugggucau

SEQ ID NO: 427590 - RNA, 19 nt, Artificial Sequence
  Description of Artificial Sequence: Synthetic oligonucleotide
ggaauguuggcacaaaacu

SEQ ID NO: 427591 - RNA, 19 nt, Artificial Sequence
  Description of Artificial Sequence: Synthetic oligonucleotide
gaucggucaucuucccucc

SEQ ID NO: 427592 - RNA, 19 nt, Artificial Sequence
  Description of Artificial Sequence: Synthetic oligonucleotide
auguuggccgcuccgcccg

SEQ ID NO: 427593 - RNA, 19 nt, Artificial Sequence
  Description of Artificial Sequence: Synthetic oligonucleotide
cuaccaagaacaaugaguu

SEQ ID NO: 427594 - RNA, 19 nt, Artificial Sequence
  Description of Artificial Sequence: Synthetic oligonucleotide
cauuagucuaacaguaaaa

SEQ ID NO: 427595 - RNA, 19 nt, Artificial Sequence
  Description of Artificial Sequence: Synthetic oligonucleotide
ucauauugguggacuuugu

SEQ ID NO: 427596 - RNA, 19 nt, Artificial Sequence
  Description of Artificial Sequence: Synthetic oligonucleotide
aucauguggcucaaguuug

SEQ ID NO: 427597 - RNA, 19 nt, Artificial Sequence
  Description of Artificial Sequence: Synthetic oligonucleotide
uacuagcugguuuguuucc

SEQ ID NO: 427598 - RNA, 19 nt, Artificial Sequence
  Description of Artificial Sequence: Synthetic oligonucleotide
cccauuucuaaauguaaag

SEQ ID NO: 427599 - RNA, 19 nt, Artificial Sequence
  Description of Artificial Sequence: Synthetic oligonucleotide
ccuuaaucuaaaugucacg

SEQ ID NO: 427600 - RNA, 19 nt, Artificial Sequence
  Description of Artificial Sequence: Synthetic oligonucleotide
augaacauuaaggcguaca

SEQ ID NO: 427601 - RNA, 19 nt, Artificial Sequence
  Description of Artificial Sequence: Synthetic oligonucleotide
aagccuguugcaguauuca

SEQ ID NO: 427602 - RNA, 19 nt, Artificial Sequence
  Description of Artificial Sequence: Synthetic oligonucleotide
acagcuacuuuaugucugu

SEQ ID NO: 427603 - RNA, 19 nt, Artificial Sequence
  Description of Artificial Sequence: Synthetic oligonucleotide
ucauuacuuuuagggcucg

SEQ ID NO: 427604 - RNA, 19 nt, Artificial Sequence
  Description of Artificial Sequence: Synthetic oligonucleotide
cacuacuguguugggaucg

SEQ ID NO: 427605 - RNA, 19 nt, Artificial Sequence
  Description of Artificial Sequence: Synthetic oligonucleotide
cauaaaccucauuuccauc

SEQ ID NO: 427606 - RNA, 19 nt, Artificial Sequence
  Description of Artificial Sequence: Synthetic oligonucleotide
guagcuaaauuaaaagugu

SEQ ID NO: 427607 - RNA, 19 nt, Artificial Sequence
  Description of Artificial Sequence: Synthetic oligonucleotide
auacaccuacucucauuuc

SEQ ID NO: 427608 - RNA, 19 nt, Artificial Sequence
  Description of Artificial Sequence: Synthetic oligonucleotide
uacuguguugggaucgguc

SEQ ID NO: 427609 - RNA, 19 nt, Artificial Sequence
  Description of Artificial Sequence: Synthetic oligonucleotide
acuuuuagggcucgaugaa

SEQ ID NO: 427610 - RNA, 19 nt, Artificial Sequence
  Description of Artificial Sequence: Synthetic oligonucleotide
uggcuuuagacugugccaa

SEQ ID NO: 427611 - RNA, 19 nt, Artificial Sequence
  Description of Artificial Sequence: Synthetic oligonucleotide
aacauaguccccauuucua

SEQ ID NO: 427612 - RNA, 19 nt, Artificial Sequence
  Description of Artificial Sequence: Synthetic oligonucleotide
uggacuuuguuggacaguu

SEQ ID NO: 427613 - RNA, 19 nt, Artificial Sequence
  Description of Artificial Sequence: Synthetic oligonucleotide
gacaguugaaucgaagaua

SEQ ID NO: 427614 - RNA, 19 nt, Artificial Sequence
  Description of Artificial Sequence: Synthetic oligonucleotide
auucaguuuggauuuccua

SEQ ID NO: 427615 - RNA, 19 nt, Artificial Sequence
  Description of Artificial Sequence: Synthetic oligonucleotide
aaaggagaauuuguagcua

SEQ ID NO: 427616 - RNA, 19 nt, Artificial Sequence
  Description of Artificial Sequence: Synthetic oligonucleotide
uuuccacuacuguguuggg

SEQ ID NO: 427617 - RNA, 19 nt, Artificial Sequence
  Description of Artificial Sequence: Synthetic oligonucleotide
aaguguugagaaaugucua

SEQ ID NO: 427618 - RNA, 19 nt, Artificial Sequence
  Description of Artificial Sequence: Synthetic oligonucleotide
uggauuuccuaaguuggaa

SEQ ID NO: 427619 - RNA, 19 nt, Artificial Sequence
  Description of Artificial Sequence: Synthetic oligonucleotide
aacccaaccugcugcacuu

SEQ ID NO: 427620 - RNA, 19 nt, Artificial Sequence
  Description of Artificial Sequence: Synthetic oligonucleotide
aguggugccuuccuccagu

SEQ ID NO: 427621 - RNA, 19 nt, Artificial Sequence
  Description of Artificial Sequence: Synthetic oligonucleotide
auauacaccuacucucauu

SEQ ID NO: 427622 - RNA, 19 nt, Artificial Sequence
  Description of Artificial Sequence: Synthetic oligonucleotide
aaaugaacauuaaggcgua

SEQ ID NO: 427623 - RNA, 19 nt, Artificial Sequence
  Description of Artificial Sequence: Synthetic oligonucleotide
aaaaugcuuuugaucccug

SEQ ID NO: 427624 - RNA, 19 nt, Artificial Sequence
  Description of Artificial Sequence: Synthetic oligonucleotide
auggaauguuggcacaaaa

SEQ ID NO: 427625 - RNA, 19 nt, Artificial Sequence
  Description of Artificial Sequence: Synthetic oligonucleotide
aaccucauuuccauccaga

SEQ ID NO: 427626 - RNA, 19 nt, Artificial Sequence
  Description of Artificial Sequence: Synthetic oligonucleotide
ugcacuuauucagucccca

SEQ ID NO: 427627 - RNA, 19 nt, Artificial Sequence
  Description of Artificial Sequence: Synthetic oligonucleotide
gaucccugcuaacucaaaa

SEQ ID NO: 427628 - RNA, 19 nt, Artificial Sequence
  Description of Artificial Sequence: Synthetic oligonucleotide
caccuacucucauuucugc

SEQ ID NO: 427629 - RNA, 19 nt, Artificial Sequence
  Description of Artificial Sequence: Synthetic oligonucleotide
cauguuggccgcuccgccc

SEQ ID NO: 427630 - RNA, 19 nt, Artificial Sequence
  Description of Artificial Sequence: Synthetic oligonucleotide
gaaguggugccuuccucca

SEQ ID NO: 427631 - RNA, 19 nt, Artificial Sequence
  Description of Artificial Sequence: Synthetic oligonucleotide
gaucucucgucuuucuuua

SEQ ID NO: 427632 - RNA, 19 nt, Artificial Sequence
  Description of Artificial Sequence: Synthetic oligonucleotide
guaaaauuaucagauggau

SEQ ID NO: 427633 - RNA, 19 nt, Artificial Sequence
  Description of Artificial Sequence: Synthetic oligonucleotide
aucagccagaugaugagga

SEQ ID NO: 427634 - RNA, 19 nt, Artificial Sequence
  Description of Artificial Sequence: Synthetic oligonucleotide
ccuacuuacuguaaaauua

SEQ ID NO: 427635 - RNA, 19 nt, Artificial Sequence
  Description of Artificial Sequence: Synthetic oligonucleotide
cuugugucgccugcguucc

SEQ ID NO: 427636 - RNA, 19 nt, Artificial Sequence
  Description of Artificial Sequence: Synthetic oligonucleotide
agaaauuuucugguauaau

SEQ ID NO: 427637 - RNA, 19 nt, Artificial Sequence
  Description of Artificial Sequence: Synthetic oligonucleotide
uaaguuggaaaaggagaau

SEQ ID NO: 427638 - RNA, 19 nt, Artificial Sequence
  Description of Artificial Sequence: Synthetic oligonucleotide
cuagcugguuuguuuccac

SEQ ID NO: 427639 - RNA, 19 nt, Artificial Sequence
  Description of Artificial Sequence: Synthetic oligonucleotide
ggaucggucaucuucccuc

SEQ ID NO: 427640 - RNA, 19 nt, Artificial Sequence
  Description of Artificial Sequence: Synthetic oligonucleotide
ccaacauagaaaacccaac

SEQ ID NO: 427641 - RNA, 19 nt, Artificial Sequence
  Description of Artificial Sequence: Synthetic oligonucleotide
guauucauguguguacaga

SEQ ID NO: 427642 - RNA, 19 nt, Artificial Sequence
  Description of Artificial Sequence: Synthetic oligonucleotide
gaacauuaaggcguacaaa

SEQ ID NO: 427643 - RNA, 19 nt, Artificial Sequence
  Description of Artificial Sequence: Synthetic oligonucleotide
agaauacauuuuauguuau

SEQ ID NO: 427644 - RNA, 19 nt, Artificial Sequence
  Description of Artificial Sequence: Synthetic oligonucleotide
ucgaagauacuuggcuaca

SEQ ID NO: 427645 - RNA, 19 nt, Artificial Sequence
  Description of Artificial Sequence: Synthetic oligonucleotide
gacuguaauugaaugucaa

SEQ ID NO: 427646 - RNA, 19 nt, Artificial Sequence
  Description of Artificial Sequence: Synthetic oligonucleotide
gcugcuauuacugcaauaa

SEQ ID NO: 427647 - RNA, 19 nt, Artificial Sequence
  Description of Artificial Sequence: Synthetic oligonucleotide
uaaggcguacaaacagcua

SEQ ID NO: 427648 - RNA, 19 nt, Artificial Sequence
  Description of Artificial Sequence: Synthetic oligonucleotide
aaaaugcccuuaaucuaaa

SEQ ID NO: 427649 - RNA, 19 nt, Artificial Sequence
  Description of Artificial Sequence: Synthetic oligonucleotide
guccuuuguauucaugugu

SEQ ID NO: 427650 - RNA, 19 nt, Artificial Sequence
  Description of Artificial Sequence: Synthetic oligonucleotide
augucacguguacauuaug

SEQ ID NO: 427651 - RNA, 19 nt, Artificial Sequence
  Description of Artificial Sequence: Synthetic oligonucleotide
ucuaaaugucacgguggac

SEQ ID NO: 427652 - RNA, 19 nt, Artificial Sequence
  Description of Artificial Sequence: Synthetic oligonucleotide
gaagaaugcuggcuacaaa

SEQ ID NO: 427653 - RNA, 19 nt, Artificial Sequence
  Description of Artificial Sequence: Synthetic oligonucleotide
ugauaacauaguccccauu

SEQ ID NO: 427654 - RNA, 19 nt, Artificial Sequence
  Description of Artificial Sequence: Synthetic oligonucleotide
cccugguuguaaauaaagc

SEQ ID NO: 427655 - RNA, 19 nt, Artificial Sequence
  Description of Artificial Sequence: Synthetic oligonucleotide
ggcuacaaaacagccugcg

SEQ ID NO: 427656 - RNA, 19 nt, Artificial Sequence
  Description of Artificial Sequence: Synthetic oligonucleotide
agcgagcaauagcaaggag

SEQ ID NO: 427657 - RNA, 19 nt, Artificial Sequence
  Description of Artificial Sequence: Synthetic oligonucleotide
uagcaaggagaagaaugcu

SEQ ID NO: 427658 - RNA, 19 nt, Artificial Sequence
  Description of Artificial Sequence: Synthetic oligonucleotide
uaguaccaauguucuacaa

SEQ ID NO: 427659 - RNA, 19 nt, Artificial Sequence
  Description of Artificial Sequence: Synthetic oligonucleotide
ccccaaauuagucagauua

SEQ ID NO: 427660 - RNA, 19 nt, Artificial Sequence
  Description of Artificial Sequence: Synthetic oligonucleotide
ggauccgcuucuugugucg

SEQ ID NO: 427661 - RNA, 19 nt, Artificial Sequence
  Description of Artificial Sequence: Synthetic oligonucleotide
cuucccuccugucacuguc

SEQ ID NO: 427662 - RNA, 19 nt, Artificial Sequence
  Description of Artificial Sequence: Synthetic oligonucleotide
cuuuaugucuguucuuacu

SEQ ID NO: 427663 - RNA, 19 nt, Artificial Sequence
  Description of Artificial Sequence: Synthetic oligonucleotide
ucagauggauaaaguuauu

SEQ ID NO: 427664 - RNA, 19 nt, Artificial Sequence
  Description of Artificial Sequence: Synthetic oligonucleotide
gacccgauggcccaucaua

SEQ ID NO: 427665 - RNA, 19 nt, Artificial Sequence
  Description of Artificial Sequence: Synthetic oligonucleotide
uuccacuacuguguuggga

SEQ ID NO: 427666 - RNA, 19 nt, Artificial Sequence
  Description of Artificial Sequence: Synthetic oligonucleotide
cguuccgccauguuggccg

SEQ ID NO: 427667 - RNA, 19 nt, Artificial Sequence
  Description of Artificial Sequence: Synthetic oligonucleotide
acaccuacucucauuucug

SEQ ID NO: 427668 - RNA, 19 nt, Artificial Sequence
  Description of Artificial Sequence: Synthetic oligonucleotide
aggccuacuuacuguaaaa

SEQ ID NO: 427669 - RNA, 19 nt, Artificial Sequence
  Description of Artificial Sequence: Synthetic oligonucleotide
ugucgcucuccaccugagc

SEQ ID NO: 427670 - RNA, 19 nt, Artificial Sequence
  Description of Artificial Sequence: Synthetic oligonucleotide
auaaaauaaucgacccgau

SEQ ID NO: 427671 - RNA, 19 nt, Artificial Sequence
  Description of Artificial Sequence: Synthetic oligonucleotide
cucgucuuucuuuaagucu

SEQ ID NO: 427672 - RNA, 19 nt, Artificial Sequence
  Description of Artificial Sequence: Synthetic oligonucleotide
uccgaucucucgucuuucu

SEQ ID NO: 427673 - RNA, 19 nt, Artificial Sequence
  Description of Artificial Sequence: Synthetic oligonucleotide
caaaacugaggccuacuua

SEQ ID NO: 427674 - RNA, 19 nt, Artificial Sequence
  Description of Artificial Sequence: Synthetic oligonucleotide
gagucgaugaagcccacau

SEQ ID NO: 427675 - RNA, 19 nt, Artificial Sequence
  Description of Artificial Sequence: Synthetic oligonucleotide
gguuacugaaacucucuaa

SEQ ID NO: 427676 - RNA, 19 nt, Artificial Sequence
  Description of Artificial Sequence: Synthetic oligonucleotide
gguggacaauguuucuuug

SEQ ID NO: 427677 - RNA, 19 nt, Artificial Sequence
  Description of Artificial Sequence: Synthetic oligonucleotide
uguguugggaucggucauc

SEQ ID NO: 427678 - RNA, 19 nt, Artificial Sequence
  Description of Artificial Sequence: Synthetic oligonucleotide
gcagauuuaggcauuucuc

SEQ ID NO: 427679 - RNA, 19 nt, Artificial Sequence
  Description of Artificial Sequence: Synthetic oligonucleotide
caucauguggcucaaguuu

SEQ ID NO: 427680 - RNA, 19 nt, Artificial Sequence
  Description of Artificial Sequence: Synthetic oligonucleotide
cauaguccccauuucuaaa

SEQ ID NO: 427681 - RNA, 19 nt, Artificial Sequence
  Description of Artificial Sequence: Synthetic oligonucleotide
uccucacaaucagugcucu

SEQ ID NO: 427682 - RNA, 19 nt, Artificial Sequence
  Description of Artificial Sequence: Synthetic oligonucleotide
acguguacauuaugaugau

SEQ ID NO: 427683 - RNA, 19 nt, Artificial Sequence
  Description of Artificial Sequence: Synthetic oligonucleotide
ggagaugaccaccuuucuc

SEQ ID NO: 427684 - RNA, 19 nt, Artificial Sequence
  Description of Artificial Sequence: Synthetic oligonucleotide
cagauggauaaaguuauua

SEQ ID NO: 427685 - RNA, 19 nt, Artificial Sequence
  Description of Artificial Sequence: Synthetic oligonucleotide
auccaagaggcaauccacu

SEQ ID NO: 427686 - RNA, 19 nt, Artificial Sequence
  Description of Artificial Sequence: Synthetic oligonucleotide
gauccgcuucuugugucgc

SEQ ID NO: 427687 - RNA, 19 nt, Artificial Sequence
  Description of Artificial Sequence: Synthetic oligonucleotide
ccgauggcccaucauauug

SEQ ID NO: 427688 - RNA, 19 nt, Artificial Sequence
  Description of Artificial Sequence: Synthetic oligonucleotide
gggucauagauccacacau

SEQ ID NO: 427689 - RNA, 19 nt, Artificial Sequence
  Description of Artificial Sequence: Synthetic oligonucleotide
gaugaucacccaacauaga

SEQ ID NO: 427690 - RNA, 19 nt, Artificial Sequence
  Description of Artificial Sequence: Synthetic oligonucleotide
cugcugcacuuauucaguc

SEQ ID NO: 427691 - RNA, 19 nt, Artificial Sequence
  Description of Artificial Sequence: Synthetic oligonucleotide
ggcuauauacuuaugcaua

SEQ ID NO: 427692 - RNA, 19 nt, Artificial Sequence
  Description of Artificial Sequence: Synthetic oligonucleotide
cuuuugaucccugcuaacu

SEQ ID NO: 427693 - RNA, 19 nt, Artificial Sequence
  Description of Artificial Sequence: Synthetic oligonucleotide
ccugcguuccgccauguug

SEQ ID NO: 427694 - RNA, 19 nt, Artificial Sequence
  Description of Artificial Sequence: Synthetic oligonucleotide
gucacguguacauuaugau

SEQ ID NO: 427695 - RNA, 19 nt, Artificial Sequence
  Description of Artificial Sequence: Synthetic oligonucleotide
gauggcccaucauauuggu

SEQ ID NO: 427696 - RNA, 19 nt, Artificial Sequence
  Description of Artificial Sequence: Synthetic oligonucleotide
gcccauuuugaauccaaga

SEQ ID NO: 427697 - RNA, 19 nt, Artificial Sequence
  Description of Artificial Sequence: Synthetic oligonucleotide
gcaaaauggcuauauacuu

SEQ ID NO: 427698 - RNA, 19 nt, Artificial Sequence
  Description of Artificial Sequence: Synthetic oligonucleotide
acaaaacagccugcgccca

SEQ ID NO: 427699 - RNA, 19 nt, Artificial Sequence
  Description of Artificial Sequence: Synthetic oligonucleotide
uguuacuagcugguuuguu

SEQ ID NO: 427700 - RNA, 19 nt, Artificial Sequence
  Description of Artificial Sequence: Synthetic oligonucleotide
uguuggccgcuccgcccgg

SEQ ID NO: 427701 - RNA, 19 nt, Artificial Sequence
  Description of Artificial Sequence: Synthetic oligonucleotide
ugcguuccgccauguuggc

SEQ ID NO: 427702 - RNA, 19 nt, Artificial Sequence
  Description of Artificial Sequence: Synthetic oligonucleotide
uugugucgccugcguuccg

SEQ ID NO: 427703 - RNA, 19 nt, Artificial Sequence
  Description of Artificial Sequence: Synthetic oligonucleotide
cuuuuagggcucgaugaaa

SEQ ID NO: 427704 - RNA, 19 nt, Artificial Sequence
  Description of Artificial Sequence: Synthetic oligonucleotide
ucgacccgauggcccauca

SEQ ID NO: 427705 - RNA, 19 nt, Artificial Sequence
  Description of Artificial Sequence: Synthetic oligonucleotide
ucuuucccacuuucagauu

SEQ ID NO: 427706 - RNA, 19 nt, Artificial Sequence
  Description of Artificial Sequence: Synthetic oligonucleotide
cgagcaauagcaaggagaa

SEQ ID NO: 427707 - RNA, 19 nt, Artificial Sequence
  Description of Artificial Sequence: Synthetic oligonucleotide
auguuaugacaaggagaug

SEQ ID NO: 427708 - RNA, 19 nt, Artificial Sequence
  Description of Artificial Sequence: Synthetic oligonucleotide
acugggucauagauccaca

SEQ ID NO: 427709 - RNA, 19 nt, Artificial Sequence
  Description of Artificial Sequence: Synthetic oligonucleotide
guccucacaaucagugcuc

SEQ ID NO: 427710 - RNA, 19 nt, Artificial Sequence
  Description of Artificial Sequence: Synthetic oligonucleotide
ggugccuuccuccaguuau

SEQ ID NO: 427711 - RNA, 19 nt, Artificial Sequence
  Description of Artificial Sequence: Synthetic oligonucleotide
agacucccugguuguaaau

SEQ ID NO: 427712 - RNA, 19 nt, Artificial Sequence
  Description of Artificial Sequence: Synthetic oligonucleotide
ugucgccugcguuccgcca

SEQ ID NO: 427713 - RNA, 19 nt, Artificial Sequence
  Description of Artificial Sequence: Synthetic oligonucleotide
ggacaguugaaucgaagau

SEQ ID NO: 427714 - RNA, 19 nt, Artificial Sequence
  Description of Artificial Sequence: Synthetic oligonucleotide
uuccgaucucucgucuuuc

SEQ ID NO: 427715 - RNA, 19 nt, Artificial Sequence
  Description of Artificial Sequence: Synthetic oligonucleotide
auguguguacagaggccug

SEQ ID NO: 427716 - RNA, 19 nt, Artificial Sequence
  Description of Artificial Sequence: Synthetic oligonucleotide
agccgucuguuccaugauu

SEQ ID NO: 427717 - RNA, 19 nt, Artificial Sequence
  Description of Artificial Sequence: Synthetic oligonucleotide
ucgccugcguuccgccaug

SEQ ID NO: 427718 - RNA, 19 nt, Artificial Sequence
  Description of Artificial Sequence: Synthetic oligonucleotide
acgguggacaauguuucuu

SEQ ID NO: 427719 - RNA, 19 nt, Artificial Sequence
  Description of Artificial Sequence: Synthetic oligonucleotide
caauaguaccaauguucua

SEQ ID NO: 427720 - RNA, 19 nt, Artificial Sequence
  Description of Artificial Sequence: Synthetic oligonucleotide
acauacccuuacaugguuu

SEQ ID NO: 427721 - RNA, 19 nt, Artificial Sequence
  Description of Artificial Sequence: Synthetic oligonucleotide
gcccuuaaucuaaauguca

SEQ ID NO: 427722 - RNA, 19 nt, Artificial Sequence
  Description of Artificial Sequence: Synthetic oligonucleotide
guuccgccauguuggccgc

SEQ ID NO: 427723 - RNA, 19 nt, Artificial Sequence
  Description of Artificial Sequence: Synthetic oligonucleotide
gcaauagcaaggagaagaa

SEQ ID NO: 427724 - RNA, 19 nt, Artificial Sequence
  Description of Artificial Sequence: Synthetic oligonucleotide
agccugcgcccacacugag

SEQ ID NO: 427725 - RNA, 19 nt, Artificial Sequence
  Description of Artificial Sequence: Synthetic oligonucleotide
aggcugacuguaauugaau

SEQ ID NO: 427726 - RNA, 19 nt, Artificial Sequence
  Description of Artificial Sequence: Synthetic oligonucleotide
cauacccuuacaugguuuu

SEQ ID NO: 427727 - RNA, 19 nt, Artificial Sequence
  Description of Artificial Sequence: Synthetic oligonucleotide
gcuacaaaugucacgugua

SEQ ID NO: 427728 - RNA, 19 nt, Artificial Sequence
  Description of Artificial Sequence: Synthetic oligonucleotide
gugucgccugcguuccgcc

SEQ ID NO: 427729 - RNA, 19 nt, Artificial Sequence
  Description of Artificial Sequence: Synthetic oligonucleotide
cucccugguuguaaauaaa

SEQ ID NO: 427730 - RNA, 19 nt, Artificial Sequence
  Description of Artificial Sequence: Synthetic oligonucleotide
cauaucuaccaagaacaau

SEQ ID NO: 427731 - RNA, 19 nt, Artificial Sequence
  Description of Artificial Sequence: Synthetic oligonucleotide
uaaugugaacugggucaua

SEQ ID NO: 427732 - RNA, 19 nt, Artificial Sequence
  Description of Artificial Sequence: Synthetic oligonucleotide
cagcgagcaauagcaagga

SEQ ID NO: 427733 - RNA, 19 nt, Artificial Sequence
  Description of Artificial Sequence: Synthetic oligonucleotide
gccuucuggucugauaaca

SEQ ID NO: 427734 - RNA, 19 nt, Artificial Sequence
  Description of Artificial Sequence: Synthetic oligonucleotide
aucgacccgauggcccauc

SEQ ID NO: 427735 - RNA, 19 nt, Artificial Sequence
  Description of Artificial Sequence: Synthetic oligonucleotide
ccauguuggccgcuccgcc

SEQ ID NO: 427736 - RNA, 19 nt, Artificial Sequence
  Description of Artificial Sequence: Synthetic oligonucleotide
uggugccuuccuccaguua

SEQ ID NO: 427737 - RNA, 19 nt, Artificial Sequence
  Description of Artificial Sequence: Synthetic oligonucleotide
aaucgacccgauggcccau

SEQ ID NO: 427738 - RNA, 19 nt, Artificial Sequence
  Description of Artificial Sequence: Synthetic oligonucleotide
ggcaagaaccagaaguggu

SEQ ID NO: 427739 - RNA, 19 nt, Artificial Sequence
  Description of Artificial Sequence: Synthetic oligonucleotide
guuggacaguugaaucgaa

SEQ ID NO: 427740 - RNA, 19 nt, Artificial Sequence
  Description of Artificial Sequence: Synthetic oligonucleotide
uguugggaucggucaucuu

SEQ ID NO: 427741 - RNA, 19 nt, Artificial Sequence
  Description of Artificial Sequence: Synthetic oligonucleotide
cugauaacauaguccccau

SEQ ID NO: 427742 - RNA, 19 nt, Artificial Sequence
  Description of Artificial Sequence: Synthetic oligonucleotide
cugagccgucuguuccaug

SEQ ID NO: 427743 - RNA, 19 nt, Artificial Sequence
  Description of Artificial Sequence: Synthetic oligonucleotide
gccuacuuacuguaaaauu

SEQ ID NO: 427744 - RNA, 19 nt, Artificial Sequence
  Description of Artificial Sequence: Synthetic oligonucleotide
cauuacuuuuagggcucga

SEQ ID NO: 427745 - RNA, 19 nt, Artificial Sequence
  Description of Artificial Sequence: Synthetic oligonucleotide
gcauaucuaccaagaacaa

SEQ ID NO: 427746 - RNA, 19 nt, Artificial Sequence
  Description of Artificial Sequence: Synthetic oligonucleotide
cagccugcgcccacacuga

SEQ ID NO: 427747 - RNA, 19 nt, Artificial Sequence
  Description of Artificial Sequence: Synthetic oligonucleotide
gugccuuccuccaguuauc

SEQ ID NO: 427748 - RNA, 19 nt, Artificial Sequence
  Description of Artificial Sequence: Synthetic oligonucleotide
ccacuacuguguugggauc

SEQ ID NO: 427749 - RNA, 19 nt, Artificial Sequence
  Description of Artificial Sequence: Synthetic oligonucleotide
ggucauagauccacacaua

SEQ ID NO: 427750 - RNA, 19 nt, Artificial Sequence
  Description of Artificial Sequence: Synthetic oligonucleotide
caucauauugguggacuuu

SEQ ID NO: 427751 - RNA, 19 nt, Artificial Sequence
  Description of Artificial Sequence: Synthetic oligonucleotide
uuggccgcuccgcccgguu

SEQ ID NO: 427752 - RNA, 19 nt, Artificial Sequence
  Description of Artificial Sequence: Synthetic oligonucleotide
caguugaaucgaagauacu

SEQ ID NO: 427753 - RNA, 19 nt, Artificial Sequence
  Description of Artificial Sequence: Synthetic oligonucleotide
ccaccugagccgucuguuc

SEQ ID NO: 427754 - RNA, 19 nt, Artificial Sequence
  Description of Artificial Sequence: Synthetic oligonucleotide
ccaacuuccuggauccgcu

SEQ ID NO: 427755 - RNA, 19 nt, Artificial Sequence
  Description of Artificial Sequence: Synthetic oligonucleotide
gagccgucuguuccaugau

SEQ ID NO: 427756 - RNA, 19 nt, Artificial Sequence
  Description of Artificial Sequence: Synthetic oligonucleotide
cgcuucuugugucgccugc

SEQ ID NO: 427757 - RNA, 19 nt, Artificial Sequence
  Description of Artificial Sequence: Synthetic oligonucleotide
ggagucgaugaagcccaca

SEQ ID NO: 427758 - RNA, 19 nt, Artificial Sequence
  Description of Artificial Sequence: Synthetic oligonucleotide
cgccauguuggccgcuccg

SEQ ID NO: 427759 - RNA, 19 nt, Artificial Sequence
  Description of Artificial Sequence: Synthetic oligonucleotide
gggaucggucaucuucccu

SEQ ID NO: 427760 - RNA, 19 nt, Artificial Sequence
  Description of Artificial Sequence: Synthetic oligonucleotide
uuccgccauguuggccgcu

SEQ ID NO: 427761 - RNA, 19 nt, Artificial Sequence
  Description of Artificial Sequence: Synthetic oligonucleotide
ccuucuggucugauaacau

SEQ ID NO: 427762 - RNA, 19 nt, Artificial Sequence
  Description of Artificial Sequence: Synthetic oligonucleotide
ccgcuucuugugucgccug

SEQ ID NO: 427763 - RNA, 19 nt, Artificial Sequence
  Description of Artificial Sequence: Synthetic oligonucleotide
gcguuccgccauguuggcc

SEQ ID NO: 427764 - RNA, 19 nt, Artificial Sequence
  Description of Artificial Sequence: Synthetic oligonucleotide
gcguacaaacagcuacuuu

SEQ ID NO: 427765 - RNA, 19 nt, Artificial Sequence
  Description of Artificial Sequence: Synthetic oligonucleotide
ccaucauauugguggacuu

SEQ ID NO: 427766 - RNA, 19 nt, Artificial Sequence
  Description of Artificial Sequence: Synthetic oligonucleotide
cagcuacuuuaugucuguu

SEQ ID NO: 427767 - RNA, 19 nt, Artificial Sequence
  Description of Artificial Sequence: Synthetic oligonucleotide
cccaaccugcugcacuuau

SEQ ID NO: 427768 - RNA, 19 nt, Artificial Sequence
  Description of Artificial Sequence: Synthetic oligonucleotide
ccgaucucucgucuuucuu

SEQ ID NO: 427769 - RNA, 19 nt, Artificial Sequence
  Description of Artificial Sequence: Synthetic oligonucleotide
cccgauggcccaucauauu

SEQ ID NO: 427770 - RNA, 19 nt, Artificial Sequence
  Description of Artificial Sequence: Synthetic oligonucleotide
gccugcguuccgccauguu

SEQ ID NO: 427771 - RNA, 19 nt, Artificial Sequence
  Description of Artificial Sequence: Synthetic oligonucleotide
cgacccgauggcccaucau

SEQ ID NO: 427772 - RNA, 19 nt, Artificial Sequence
  Description of Artificial Sequence: Synthetic oligonucleotide
cgccugcguuccgccaugu

SEQ ID NO: 427773 - RNA, 19 nt, Artificial Sequence
  Description of Artificial Sequence: Synthetic oligonucleotide
aaaauaaucaccaucaagc

SEQ ID NO: 427774 - RNA, 19 nt, Artificial Sequence
  Description of Artificial Sequence: Synthetic oligonucleotide
uuuaguaccaaacugauga

SEQ ID NO: 427775 - RNA, 19 nt, Artificial Sequence
  Description of Artificial Sequence: Synthetic oligonucleotide
uuauguuuaauucuuaugc

SEQ ID NO: 427776 - RNA, 19 nt, Artificial Sequence
  Description of Artificial Sequence: Synthetic oligonucleotide
ugucuuuugguauugaucg

SEQ ID NO: 427777 - RNA, 19 nt, Artificial Sequence
  Description of Artificial Sequence: Synthetic oligonucleotide
aaacucaaagcauuaggcc

SEQ ID NO: 427778 - RNA, 19 nt, Artificial Sequence
  Description of Artificial Sequence: Synthetic oligonucleotide
aaauuuaugagguggggag

SEQ ID NO: 427779 - RNA, 19 nt, Artificial Sequence
  Description of Artificial Sequence: Synthetic oligonucleotide
aauguuuaguaccaaacug

SEQ ID NO: 427780 - RNA, 19 nt, Artificial Sequence
  Description of Artificial Sequence: Synthetic oligonucleotide
ugucccagaaauuugaggg

SEQ ID NO: 427781 - RNA, 19 nt, Artificial Sequence
  Description of Artificial Sequence: Synthetic oligonucleotide
aaaauuaucuguugcaaca

SEQ ID NO: 427782 - RNA, 19 nt, Artificial Sequence
  Description of Artificial Sequence: Synthetic oligonucleotide
ugauauaucuauaagguaa

SEQ ID NO: 427783 - RNA, 19 nt, Artificial Sequence
  Description of Artificial Sequence: Synthetic oligonucleotide
auaagguaagcuucuaugc

SEQ ID NO: 427784 - RNA, 19 nt, Artificial Sequence
  Description of Artificial Sequence: Synthetic oligonucleotide
aauuaagagucccugcagg

SEQ ID NO: 427785 - RNA, 19 nt, Artificial Sequence
  Description of Artificial Sequence: Synthetic oligonucleotide
ucuauuguaaaguuguucu

SEQ ID NO: 427786 - RNA, 19 nt, Artificial Sequence
  Description of Artificial Sequence: Synthetic oligonucleotide
uuaaaguuuugucucaacc

SEQ ID NO: 427787 - RNA, 19 nt, Artificial Sequence
  Description of Artificial Sequence: Synthetic oligonucleotide
auaaacaauauaugucagc

SEQ ID NO: 427788 - RNA, 19 nt, Artificial Sequence
  Description of Artificial Sequence: Synthetic oligonucleotide
aacaauauaugucagcaaa

SEQ ID NO: 427789 - RNA, 19 nt, Artificial Sequence
  Description of Artificial Sequence: Synthetic oligonucleotide
agaaacacguauuuucagc

SEQ ID NO: 427790 - RNA, 19 nt, Artificial Sequence
  Description of Artificial Sequence: Synthetic oligonucleotide
aauagugauauaucuauaa

SEQ ID NO: 427791 - RNA, 19 nt, Artificial Sequence
  Description of Artificial Sequence: Synthetic oligonucleotide
uauuguacagacuauguac

SEQ ID NO: 427792 - RNA, 19 nt, Artificial Sequence
  Description of Artificial Sequence: Synthetic oligonucleotide
uuuagugcuacacuuguug

SEQ ID NO: 427793 - RNA, 19 nt, Artificial Sequence
  Description of Artificial Sequence: Synthetic oligonucleotide
  modified_base (12)..(12): a, c, u, g, unknown or other
uccauaucagcnuaaaaug

SEQ ID NO: 427794 - RNA, 19 nt, Artificial Sequence
  Description of Artificial Sequence: Synthetic oligonucleotide
uacgauaugguccaagaug

SEQ ID NO: 427795 - RNA, 19 nt, Artificial Sequence
  Description of Artificial Sequence: Synthetic oligonucleotide
aacacguauuuucagcagg

SEQ ID NO: 427796 - RNA, 19 nt, Artificial Sequence
  Description of Artificial Sequence: Synthetic oligonucleotide
uaaacaauauaugucagca

SEQ ID NO: 427797 - RNA, 19 nt, Artificial Sequence
  Description of Artificial Sequence: Synthetic oligonucleotide
aaaauguucuggucucccc

SEQ ID NO: 427798 - RNA, 19 nt, Artificial Sequence
  Description of Artificial Sequence: Synthetic oligonucleotide
aguguaacuaaccuuaacu

SEQ ID NO: 427799 - RNA, 19 nt, Artificial Sequence
  Description of Artificial Sequence: Synthetic oligonucleotide
uguagaaccuuugugagag

SEQ ID NO: 427800 - RNA, 19 nt, Artificial Sequence
  Description of Artificial Sequence: Synthetic oligonucleotide
acuauguacauucuagaag

SEQ ID NO: 427801 - RNA, 19 nt, Artificial Sequence
  Description of Artificial Sequence: Synthetic oligonucleotide
uuuuccguuguauuuauug

SEQ ID NO: 427802 - RNA, 19 nt, Artificial Sequence
  Description of Artificial Sequence: Synthetic oligonucleotide
aaauaaucaccaucaagcu

SEQ ID NO: 427803 - RNA, 19 nt, Artificial Sequence
  Description of Artificial Sequence: Synthetic oligonucleotide
auuauguggugugugaugc

SEQ ID NO: 427804 - RNA, 19 nt, Artificial Sequence
  Description of Artificial Sequence: Synthetic oligonucleotide
uuaacagagaaacacguau

SEQ ID NO: 427805 - RNA, 19 nt, Artificial Sequence
  Description of Artificial Sequence: Synthetic oligonucleotide
ugagaugcuaccagcauag

SEQ ID NO: 427806 - RNA, 19 nt, Artificial Sequence
  Description of Artificial Sequence: Synthetic oligonucleotide
uguugcaacaucuagcuuc

SEQ ID NO: 427807 - RNA, 19 nt, Artificial Sequence
  Description of Artificial Sequence: Synthetic oligonucleotide
cuuugugagagucugaaac

SEQ ID NO: 427808 - RNA, 19 nt, Artificial Sequence
  Description of Artificial Sequence: Synthetic oligonucleotide
ucaacccucaguuugaacu

SEQ ID NO: 427809 - RNA, 19 nt, Artificial Sequence
  Description of Artificial Sequence: Synthetic oligonucleotide
uauguuuaauucuuaugcc

SEQ ID NO: 427810 - RNA, 19 nt, Artificial Sequence
  Description of Artificial Sequence: Synthetic oligonucleotide
  modified_base (6)..(6): a, c, u, g, unknown or other
ucagcnuaaaauguucugg

SEQ ID NO: 427811 - RNA, 19 nt, Artificial Sequence
  Description of Artificial Sequence: Synthetic oligonucleotide
auaaccaauuccuguaacg

SEQ ID NO: 427812 - RNA, 19 nt, Artificial Sequence
  Description of Artificial Sequence: Synthetic oligonucleotide
agaucauaaacugacgaac

SEQ ID NO: 427813 - RNA, 19 nt, Artificial Sequence
  Description of Artificial Sequence: Synthetic oligonucleotide
ucaguuugaacugugagga

SEQ ID NO: 427814 - RNA, 19 nt, Artificial Sequence
  Description of Artificial Sequence: Synthetic oligonucleotide
uauaaauuguuuguggugu

SEQ ID NO: 427815 - RNA, 19 nt, Artificial Sequence
  Description of Artificial Sequence: Synthetic oligonucleotide
uguaucuauuguaaaguug

SEQ ID NO: 427816 - RNA, 19 nt, Artificial Sequence
  Description of Artificial Sequence: Synthetic oligonucleotide
aauuaucuguugcaacauc

SEQ ID NO: 427817 - RNA, 19 nt, Artificial Sequence
  Description of Artificial Sequence: Synthetic oligonucleotide
uucaguucgguccagccag

SEQ ID NO: 427818 - RNA, 19 nt, Artificial Sequence
  Description of Artificial Sequence: Synthetic oligonucleotide
aagacaaacuaagaauagg

SEQ ID NO: 427819 - RNA, 19 nt, Artificial Sequence
  Description of Artificial Sequence: Synthetic oligonucleotide
cucaaaauguuccacguag

SEQ ID NO: 427820 - RNA, 19 nt, Artificial Sequence
  Description of Artificial Sequence: Synthetic oligonucleotide
aguagaagaauggaguacg

SEQ ID NO: 427821 - RNA, 19 nt, Artificial Sequence
  Description of Artificial Sequence: Synthetic oligonucleotide
uaaauguuuagaguggccc

SEQ ID NO: 427822 - RNA, 19 nt, Artificial Sequence
  Description of Artificial Sequence: Synthetic oligonucleotide
uauaucuuuaaucuuucau

SEQ ID NO: 427823 - RNA, 19 nt, Artificial Sequence
  Description of Artificial Sequence: Synthetic oligonucleotide
auuauguuuaauucuuaug

SEQ ID NO: 427824 - RNA, 19 nt, Artificial Sequence
  Description of Artificial Sequence: Synthetic oligonucleotide
uaucuauaagguaagcuuc

SEQ ID NO: 427825 - RNA, 19 nt, Artificial Sequence
  Description of Artificial Sequence: Synthetic oligonucleotide
aacuuuauccuucugcgau

SEQ ID NO: 427826 - RNA, 19 nt, Artificial Sequence
  Description of Artificial Sequence: Synthetic oligonucleotide
aagcuucuaugacuuaugg

SEQ ID NO: 427827 - RNA, 19 nt, Artificial Sequence
  Description of Artificial Sequence: Synthetic oligonucleotide
uauugaucguuguaaacug

SEQ ID NO: 427828 - RNA, 19 nt, Artificial Sequence
  Description of Artificial Sequence: Synthetic oligonucleotide
agcuauuccacucacguca

SEQ ID NO: 427829 - RNA, 19 nt, Artificial Sequence
  Description of Artificial Sequence: Synthetic oligonucleotide
auaucuauaagguaagcuu

SEQ ID NO: 427830 - RNA, 19 nt, Artificial Sequence
  Description of Artificial Sequence: Synthetic oligonucleotide
uuaaaguuaugauuggaau

SEQ ID NO: 427831 - RNA, 19 nt, Artificial Sequence
  Description of Artificial Sequence: Synthetic oligonucleotide
uuuguaucuauuguaaagu

SEQ ID NO: 427832 - RNA, 19 nt, Artificial Sequence
  Description of Artificial Sequence: Synthetic oligonucleotide
aaucacucucauuugagau

SEQ ID NO: 427833 - RNA, 19 nt, Artificial Sequence
  Description of Artificial Sequence: Synthetic oligonucleotide
acuagcccgaagcauauac

SEQ ID NO: 427834 - RNA, 19 nt, Artificial Sequence
  Description of Artificial Sequence: Synthetic oligonucleotide
ucagcuauuccacucacgu

SEQ ID NO: 427835 - RNA, 19 nt, Artificial Sequence
  Description of Artificial Sequence: Synthetic oligonucleotide
ugaggauugaucuucaguu

SEQ ID NO: 427836 - RNA, 19 nt, Artificial Sequence
  Description of Artificial Sequence: Synthetic oligonucleotide
uuucucacuagacugugug

SEQ ID NO: 427837 - RNA, 19 nt, Artificial Sequence
  Description of Artificial Sequence: Synthetic oligonucleotide
uauagaaggccagucaucc

SEQ ID NO: 427838 - RNA, 19 nt, Artificial Sequence
  Description of Artificial Sequence: Synthetic oligonucleotide
uuaauaaccaauuccugua

SEQ ID NO: 427839 - RNA, 19 nt, Artificial Sequence
  Description of Artificial Sequence: Synthetic oligonucleotide
cucaguuugaacugugagg

SEQ ID NO: 427840 - RNA, 19 nt, Artificial Sequence
  Description of Artificial Sequence: Synthetic oligonucleotide
ugucucaacccucaguuug

SEQ ID NO: 427841 - RNA, 19 nt, Artificial Sequence
  Description of Artificial Sequence: Synthetic oligonucleotide
caugucaguauguuaacag

SEQ ID NO: 427842 - RNA, 19 nt, Artificial Sequence
  Description of Artificial Sequence: Synthetic oligonucleotide
ugguauuugaaauguauuc

SEQ ID NO: 427843 - RNA, 19 nt, Artificial Sequence
  Description of Artificial Sequence: Synthetic oligonucleotide
cuagcuuccagucauuuug

SEQ ID NO: 427844 - RNA, 19 nt, Artificial Sequence
  Description of Artificial Sequence: Synthetic oligonucleotide
aacucaaaauguuccacgu

SEQ ID NO: 427845 - RNA, 19 nt, Artificial Sequence
  Description of Artificial Sequence: Synthetic oligonucleotide
auggaguacgauauggucc

SEQ ID NO: 427846 - RNA, 19 nt, Artificial Sequence
  Description of Artificial Sequence: Synthetic oligonucleotide
auaucuuuaaucuuucaua

SEQ ID NO: 427847 - RNA, 19 nt, Artificial Sequence
  Description of Artificial Sequence: Synthetic oligonucleotide
uguccaacgauccuuuuac

SEQ ID NO: 427848 - RNA, 19 nt, Artificial Sequence
  Description of Artificial Sequence: Synthetic oligonucleotide
cagacuagaagacaagccc

SEQ ID NO: 427849 - RNA, 19 nt, Artificial Sequence
  Description of Artificial Sequence: Synthetic oligonucleotide
aaaucguccugguucuuuc

SEQ ID NO: 427850 - RNA, 19 nt, Artificial Sequence
  Description of Artificial Sequence: Synthetic oligonucleotide
aaaauuuaugaggugggga

SEQ ID NO: 427851 - RNA, 19 nt, Artificial Sequence
  Description of Artificial Sequence: Synthetic oligonucleotide
uuaauucuuaugccaaacu

SEQ ID NO: 427852 - RNA, 19 nt, Artificial Sequence
  Description of Artificial Sequence: Synthetic oligonucleotide
gauaaaucacucucauuug

SEQ ID NO: 427853 - RNA, 19 nt, Artificial Sequence
  Description of Artificial Sequence: Synthetic oligonucleotide
ucaguauguuaacagagaa

SEQ ID NO: 427854 - RNA, 19 nt, Artificial Sequence
  Description of Artificial Sequence: Synthetic oligonucleotide
cagacuauguacauucuag

SEQ ID NO: 427855 - RNA, 19 nt, Artificial Sequence
  Description of Artificial Sequence: Synthetic oligonucleotide
acgucaacaguacaugagg

SEQ ID NO: 427856 - RNA, 19 nt, Artificial Sequence
  Description of Artificial Sequence: Synthetic oligonucleotide
acaaaucauacuugaauca

SEQ ID NO: 427857 - RNA, 19 nt, Artificial Sequence
  Description of Artificial Sequence: Synthetic oligonucleotide
aguggaaucuaacauuaug

SEQ ID NO: 427858 - RNA, 19 nt, Artificial Sequence
  Description of Artificial Sequence: Synthetic oligonucleotide
ugaacuuccaugcaaugau

SEQ ID NO: 427859 - RNA, 19 nt, Artificial Sequence
  Description of Artificial Sequence: Synthetic oligonucleotide
auagucuuugcaacuagcc

SEQ ID NO: 427860 - RNA, 19 nt, Artificial Sequence
  Description of Artificial Sequence: Synthetic oligonucleotide
gaaacacguauuuucagca

SEQ ID NO: 427861 - RNA, 19 nt, Artificial Sequence
  Description of Artificial Sequence: Synthetic oligonucleotide
auuaugucccauuacagua

SEQ ID NO: 427862 - RNA, 19 nt, Artificial Sequence
  Description of Artificial Sequence: Synthetic oligonucleotide
uuuauggacacacccuuac

SEQ ID NO: 427863 - RNA, 19 nt, Artificial Sequence
  Description of Artificial Sequence: Synthetic oligonucleotide
uuugugagagucugaaaca

SEQ ID NO: 427864 - RNA, 19 nt, Artificial Sequence
  Description of Artificial Sequence: Synthetic oligonucleotide
uaugguccaagauguaucc

SEQ ID NO: 427865 - RNA, 19 nt, Artificial Sequence
  Description of Artificial Sequence: Synthetic oligonucleotide
  modified_base (4)..(4): a, c, u, g, unknown or other
agcnuaaaauguucugguc

SEQ ID NO: 427866 - RNA, 19 nt, Artificial Sequence
  Description of Artificial Sequence: Synthetic oligonucleotide
uguauaaacauggguaaga

SEQ ID NO: 427867 - RNA, 19 nt, Artificial Sequence
  Description of Artificial Sequence: Synthetic oligonucleotide
  modified_base (2)..(2): a, c, u, g, unknown or other
cnuaaaauguucuggucuc

SEQ ID NO: 427868 - RNA, 19 nt, Artificial Sequence
  Description of Artificial Sequence: Synthetic oligonucleotide
ugugguguucauuauuaug

SEQ ID NO: 427869 - RNA, 19 nt, Artificial Sequence
  Description of Artificial Sequence: Synthetic oligonucleotide
uccacguagggaauaaaca

SEQ ID NO: 427870 - RNA, 19 nt, Artificial Sequence
  Description of Artificial Sequence: Synthetic oligonucleotide
uauaccaucuauuccaauu

SEQ ID NO: 427871 - RNA, 19 nt, Artificial Sequence
  Description of Artificial Sequence: Synthetic oligonucleotide
uccuuuuacacucucccgu

SEQ ID NO: 427872 - RNA, 19 nt, Artificial Sequence
  Description of Artificial Sequence: Synthetic oligonucleotide
gcuucuaugacuuauggga

SEQ ID NO: 427873 - RNA, 19 nt, Artificial Sequence
  Description of Artificial Sequence: Synthetic oligonucleotide
uagucuuugcaacuagccc

SEQ ID NO: 427874 - RNA, 19 nt, Artificial Sequence
  Description of Artificial Sequence: Synthetic oligonucleotide
ucugcgaugauuucaacuu

SEQ ID NO: 427875 - RNA, 19 nt, Artificial Sequence
  Description of Artificial Sequence: Synthetic oligonucleotide
aaccaauuccuguaacgug

SEQ ID NO: 427876 - RNA, 19 nt, Artificial Sequence
  Description of Artificial Sequence: Synthetic oligonucleotide
ucugacgaagacagcauug

SEQ ID NO: 427877 - RNA, 19 nt, Artificial Sequence
  Description of Artificial Sequence: Synthetic oligonucleotide
ugcaaugaucagcacacug

SEQ ID NO: 427878 - RNA, 19 nt, Artificial Sequence
  Description of Artificial Sequence: Synthetic oligonucleotide
uccuaacucugucaugccg

SEQ ID NO: 427879 - RNA, 19 nt, Artificial Sequence
  Description of Artificial Sequence: Synthetic oligonucleotide
uuugagggcgugcaaauuc

SEQ ID NO: 427880 - RNA, 19 nt, Artificial Sequence
  Description of Artificial Sequence: Synthetic oligonucleotide
uccguuguauuuauuguac

SEQ ID NO: 427881 - RNA, 19 nt, Artificial Sequence
  Description of Artificial Sequence: Synthetic oligonucleotide
uuuaugcaagaauggaaac

SEQ ID NO: 427882 - RNA, 19 nt, Artificial Sequence
  Description of Artificial Sequence: Synthetic oligonucleotide
agaugcuaccagcauaguc

SEQ ID NO: 427883 - RNA, 19 nt, Artificial Sequence
  Description of Artificial Sequence: Synthetic oligonucleotide
ucuuuggguauuugggucc

SEQ ID NO: 427884 - RNA, 19 nt, Artificial Sequence
  Description of Artificial Sequence: Synthetic oligonucleotide
accaucaagcuucuaugac

SEQ ID NO: 427885 - RNA, 19 nt, Artificial Sequence
  Description of Artificial Sequence: Synthetic oligonucleotide
  modified_base (7)..(7): a, c, u, g, unknown or other
aucagcnuaaaauguucug

SEQ ID NO: 427886 - RNA, 19 nt, Artificial Sequence
  Description of Artificial Sequence: Synthetic oligonucleotide
cauccuaacucugucaugc

SEQ ID NO: 427887 - RNA, 19 nt, Artificial Sequence
  Description of Artificial Sequence: Synthetic oligonucleotide
agaagaauggaguacgaua

SEQ ID NO: 427888 - RNA, 19 nt, Artificial Sequence
  Description of Artificial Sequence: Synthetic oligonucleotide
uggaguacgauauggucca

SEQ ID NO: 427889 - RNA, 19 nt, Artificial Sequence
  Description of Artificial Sequence: Synthetic oligonucleotide
  modified_base (8)..(8): a, c, u, g, unknown or other
uaucagcnuaaaauguucu

SEQ ID NO: 427890 - RNA, 19 nt, Artificial Sequence
  Description of Artificial Sequence: Synthetic oligonucleotide
aacucugucccuauagaag

SEQ ID NO: 427891 - RNA, 19 nt, Artificial Sequence
  Description of Artificial Sequence: Synthetic oligonucleotide
  modified_base (9)..(9): a, c, u, g, unknown or other
auaucagcnuaaaauguuc

SEQ ID NO: 427892 - RNA, 19 nt, Artificial Sequence
  Description of Artificial Sequence: Synthetic oligonucleotide
gacgaagacagcauugugc

SEQ ID NO: 427893 - RNA, 19 nt, Artificial Sequence
  Description of Artificial Sequence: Synthetic oligonucleotide
accaauuccuguaacgugg

SEQ ID NO: 427894 - RNA, 19 nt, Artificial Sequence
  Description of Artificial Sequence: Synthetic oligonucleotide
ucuagaagguuccuuuagu

SEQ ID NO: 427895 - RNA, 19 nt, Artificial Sequence
  Description of Artificial Sequence: Synthetic oligonucleotide
aucuauuguaaaguuguuc

SEQ ID NO: 427896 - RNA, 19 nt, Artificial Sequence
  Description of Artificial Sequence: Synthetic oligonucleotide
aaauuguuugugguguuca

SEQ ID NO: 427897 - RNA, 19 nt, Artificial Sequence
  Description of Artificial Sequence: Synthetic oligonucleotide
auccgguccacucagauaa

SEQ ID NO: 427898 - RNA, 19 nt, Artificial Sequence
  Description of Artificial Sequence: Synthetic oligonucleotide
ugcuguauaccaucuauuc

SEQ ID NO: 427899 - RNA, 19 nt, Artificial Sequence
  Description of Artificial Sequence: Synthetic oligonucleotide
gagaaacacguauuuucag

SEQ ID NO: 427900 - RNA, 19 nt, Artificial Sequence
  Description of Artificial Sequence: Synthetic oligonucleotide
uugaucguuguaaacuggu

SEQ ID NO: 427901 - RNA, 19 nt, Artificial Sequence
  Description of Artificial Sequence: Synthetic oligonucleotide
ucccagaaauuugagggcg

SEQ ID NO: 427902 - RNA, 19 nt, Artificial Sequence
  Description of Artificial Sequence: Synthetic oligonucleotide
auguauuccuaaauuaaag

SEQ ID NO: 427903 - RNA, 19 nt, Artificial Sequence
  Description of Artificial Sequence: Synthetic oligonucleotide
agcuucuaugacuuauggg

SEQ ID NO: 427904 - RNA, 19 nt, Artificial Sequence
  Description of Artificial Sequence: Synthetic oligonucleotide
aaacaauauaugucagcaa

SEQ ID NO: 427905 - RNA, 19 nt, Artificial Sequence
  Description of Artificial Sequence: Synthetic oligonucleotide
uacacucucccguauauaa

SEQ ID NO: 427906 - RNA, 19 nt, Artificial Sequence
  Description of Artificial Sequence: Synthetic oligonucleotide
auaauugaaguucuucaua

SEQ ID NO: 427907 - RNA, 19 nt, Artificial Sequence
  Description of Artificial Sequence: Synthetic oligonucleotide
uuaguuuucuaugcuguca

SEQ ID NO: 427908 - RNA, 19 nt, Artificial Sequence
  Description of Artificial Sequence: Synthetic oligonucleotide
uccaacgauccuuuuacac

SEQ ID NO: 427909 - RNA, 19 nt, Artificial Sequence
  Description of Artificial Sequence: Synthetic oligonucleotide
cuagaagacaagcccaaac

SEQ ID NO: 427910 - RNA, 19 nt, Artificial Sequence
  Description of Artificial Sequence: Synthetic oligonucleotide
uugguauugaucguuguaa

SEQ ID NO: 427911 - RNA, 19 nt, Artificial Sequence
  Description of Artificial Sequence: Synthetic oligonucleotide
uaaccaauuccuguaacgu

SEQ ID NO: 427912 - RNA, 19 nt, Artificial Sequence
  Description of Artificial Sequence: Synthetic oligonucleotide
uucugcgaugauuucaacu

SEQ ID NO: 427913 - RNA, 19 nt, Artificial Sequence
  Description of Artificial Sequence: Synthetic oligonucleotide
uggaauagugauauaucua

SEQ ID NO: 427914 - RNA, 19 nt, Artificial Sequence
  Description of Artificial Sequence: Synthetic oligonucleotide
ucucccguauauaaaguuc

SEQ ID NO: 427915 - RNA, 19 nt, Artificial Sequence
  Description of Artificial Sequence: Synthetic oligonucleotide
cauagucuuugcaacuagc

SEQ ID NO: 427916 - RNA, 19 nt, Artificial Sequence
  Description of Artificial Sequence: Synthetic oligonucleotide
aaauugacugugcuauuuu

SEQ ID NO: 427917 - RNA, 19 nt, Artificial Sequence
  Description of Artificial Sequence: Synthetic oligonucleotide
gaucguuguaaacugguaa

SEQ ID NO: 427918 - RNA, 19 nt, Artificial Sequence
  Description of Artificial Sequence: Synthetic oligonucleotide
uuuugucucaacccucagu

SEQ ID NO: 427919 - RNA, 19 nt, Artificial Sequence
  Description of Artificial Sequence: Synthetic oligonucleotide
caacgauccuuuuacacuc

SEQ ID NO: 427920 - RNA, 19 nt, Artificial Sequence
  Description of Artificial Sequence: Synthetic oligonucleotide
uaacauuaugucccauuac

SEQ ID NO: 427921 - RNA, 19 nt, Artificial Sequence
  Description of Artificial Sequence: Synthetic oligonucleotide
uugagggcgugcaaauucc

SEQ ID NO: 427922 - RNA, 19 nt, Artificial Sequence
  Description of Artificial Sequence: Synthetic oligonucleotide
caugagguuugcaggaaag

SEQ ID NO: 427923 - RNA, 19 nt, Artificial Sequence
  Description of Artificial Sequence: Synthetic oligonucleotide
guuaugauuggaauaguga

SEQ ID NO: 427924 - RNA, 19 nt, Artificial Sequence
  Description of Artificial Sequence: Synthetic oligonucleotide
ugcgaugauuucaacuugu

SEQ ID NO: 427925 - RNA, 19 nt, Artificial Sequence
  Description of Artificial Sequence: Synthetic oligonucleotide
ucuaugacuuaugggaaga

SEQ ID NO: 427926 - RNA, 19 nt, Artificial Sequence
  Description of Artificial Sequence: Synthetic oligonucleotide
auguuuaguaccaaacuga

SEQ ID NO: 427927 - RNA, 19 nt, Artificial Sequence
  Description of Artificial Sequence: Synthetic oligonucleotide
agacuauguacauucuaga

SEQ ID NO: 427928 - RNA, 19 nt, Artificial Sequence
  Description of Artificial Sequence: Synthetic oligonucleotide
acgauaugguccaagaugu

SEQ ID NO: 427929 - RNA, 19 nt, Artificial Sequence
  Description of Artificial Sequence: Synthetic oligonucleotide
aagacaacucacugcaguu

SEQ ID NO: 427930 - RNA, 19 nt, Artificial Sequence
  Description of Artificial Sequence: Synthetic oligonucleotide
aucguuguaaacugguaaa

SEQ ID NO: 427931 - RNA, 19 nt, Artificial Sequence
  Description of Artificial Sequence: Synthetic oligonucleotide
agcuaaugggccuucauuu

SEQ ID NO: 427932 - RNA, 19 nt, Artificial Sequence
  Description of Artificial Sequence: Synthetic oligonucleotide
agaaguuuuauaaauuguu

SEQ ID NO: 427933 - RNA, 19 nt, Artificial Sequence
  Description of Artificial Sequence: Synthetic oligonucleotide
ucuaacauuaugucccauu

SEQ ID NO: 427934 - RNA, 19 nt, Artificial Sequence
  Description of Artificial Sequence: Synthetic oligonucleotide
aaguuuugucucaacccuc

SEQ ID NO: 427935 - RNA, 19 nt, Artificial Sequence
  Description of Artificial Sequence: Synthetic oligonucleotide
uuaugucccauuacaguau

SEQ ID NO: 427936 - RNA, 19 nt, Artificial Sequence
  Description of Artificial Sequence: Synthetic oligonucleotide
uuugcaggaaaguuagauu

SEQ ID NO: 427937 - RNA, 19 nt, Artificial Sequence
  Description of Artificial Sequence: Synthetic oligonucleotide
gacuauguacauucuagaa

SEQ ID NO: 427938 - RNA, 19 nt, Artificial Sequence
  Description of Artificial Sequence: Synthetic oligonucleotide
uuuucuaugcugucacauc

SEQ ID NO: 427939 - RNA, 19 nt, Artificial Sequence
  Description of Artificial Sequence: Synthetic oligonucleotide
aggaucgagggccagguca

SEQ ID NO: 427940 - RNA, 19 nt, Artificial Sequence
  Description of Artificial Sequence: Synthetic oligonucleotide
ugugagagucugaaacaca

SEQ ID NO: 427941 - RNA, 19 nt, Artificial Sequence
  Description of Artificial Sequence: Synthetic oligonucleotide
acgagaguggaaucuaaca

SEQ ID NO: 427942 - RNA, 19 nt, Artificial Sequence
  Description of Artificial Sequence: Synthetic oligonucleotide
cauguguugguuauuuuga

SEQ ID NO: 427943 - RNA, 19 nt, Artificial Sequence
  Description of Artificial Sequence: Synthetic oligonucleotide
gacuuaugggaagacaaac

SEQ ID NO: 427944 - RNA, 19 nt, Artificial Sequence
  Description of Artificial Sequence: Synthetic oligonucleotide
ugcuuuaugcaagaaugga

SEQ ID NO: 427945 - RNA, 19 nt, Artificial Sequence
  Description of Artificial Sequence: Synthetic oligonucleotide
uuuaguuuucuaugcuguc

SEQ ID NO: 427946 - RNA, 19 nt, Artificial Sequence
  Description of Artificial Sequence: Synthetic oligonucleotide
aguuaugauuggaauagug

SEQ ID NO: 427947 - RNA, 19 nt, Artificial Sequence
  Description of Artificial Sequence: Synthetic oligonucleotide
aaaacauauuucagguagu

SEQ ID NO: 427948 - RNA, 19 nt, Artificial Sequence
  Description of Artificial Sequence: Synthetic oligonucleotide
caccaguagaagaauggag

SEQ ID NO: 427949 - RNA, 19 nt, Artificial Sequence
  Description of Artificial Sequence: Synthetic oligonucleotide
aauuccuguaacguggaua

SEQ ID NO: 427950 - RNA, 19 nt, Artificial Sequence
  Description of Artificial Sequence: Synthetic oligonucleotide
uuugagaugcuaccagcau

SEQ ID NO: 427951 - RNA, 19 nt, Artificial Sequence
  Description of Artificial Sequence: Synthetic oligonucleotide
aauugaaguucuucauauu

SEQ ID NO: 427952 - RNA, 19 nt, Artificial Sequence
  Description of Artificial Sequence: Synthetic oligonucleotide
uguauaccaucuauuccaa

SEQ ID NO: 427953 - RNA, 19 nt, Artificial Sequence
  Description of Artificial Sequence: Synthetic oligonucleotide
uuccaaaucaugugacuaa

SEQ ID NO: 427954 - RNA, 19 nt, Artificial Sequence
  Description of Artificial Sequence: Synthetic oligonucleotide
cugcccugaacuuccaugc

SEQ ID NO: 427955 - RNA, 19 nt, Artificial Sequence
  Description of Artificial Sequence: Synthetic oligonucleotide
uaacagagaaacacguauu

SEQ ID NO: 427956 - RNA, 19 nt, Artificial Sequence
  Description of Artificial Sequence: Synthetic oligonucleotide
auaccaucuauuccaauuu

SEQ ID NO: 427957 - RNA, 19 nt, Artificial Sequence
  Description of Artificial Sequence: Synthetic oligonucleotide
aagcuaaugggccuucauu

SEQ ID NO: 427958 - RNA, 19 nt, Artificial Sequence
  Description of Artificial Sequence: Synthetic oligonucleotide
ggacacaugaagcaaacuc

SEQ ID NO: 427959 - RNA, 19 nt, Artificial Sequence
  Description of Artificial Sequence: Synthetic oligonucleotide
uuguaucuauuguaaaguu

SEQ ID NO: 427960 - RNA, 19 nt, Artificial Sequence
  Description of Artificial Sequence: Synthetic oligonucleotide
cugacgaacuuuauccuuc

SEQ ID NO: 427961 - RNA, 19 nt, Artificial Sequence
  Description of Artificial Sequence: Synthetic oligonucleotide
aauuguuugugguguucau

SEQ ID NO: 427962 - RNA, 19 nt, Artificial Sequence
  Description of Artificial Sequence: Synthetic oligonucleotide
ugaagucuaacagaagauu

SEQ ID NO: 427963 - RNA, 19 nt, Artificial Sequence
  Description of Artificial Sequence: Synthetic oligonucleotide
uuaguaccaaacugaugac

SEQ ID NO: 427964 - RNA, 19 nt, Artificial Sequence
  Description of Artificial Sequence: Synthetic oligonucleotide
uuauggacacacccuuaca

SEQ ID NO: 427965 - RNA, 19 nt, Artificial Sequence
  Description of Artificial Sequence: Synthetic oligonucleotide
ccuaucuuuggguauuugg

SEQ ID NO: 427966 - RNA, 19 nt, Artificial Sequence
  Description of Artificial Sequence: Synthetic oligonucleotide
gguccacucagauaaauca

SEQ ID NO: 427967 - RNA, 19 nt, Artificial Sequence
  Description of Artificial Sequence: Synthetic oligonucleotide
ugacuuaugggaagacaaa

SEQ ID NO: 427968 - RNA, 19 nt, Artificial Sequence
  Description of Artificial Sequence: Synthetic oligonucleotide
cuuaugggaagacaaacua

SEQ ID NO: 427969 - RNA, 19 nt, Artificial Sequence
  Description of Artificial Sequence: Synthetic oligonucleotide
aguaccaaacugaugacaa

SEQ ID NO: 427970 - RNA, 19 nt, Artificial Sequence
  Description of Artificial Sequence: Synthetic oligonucleotide
auugaucguuguaaacugg

SEQ ID NO: 427971 - RNA, 19 nt, Artificial Sequence
  Description of Artificial Sequence: Synthetic oligonucleotide
augacuuaugggaagacaa

SEQ ID NO: 427972 - RNA, 19 nt, Artificial Sequence
  Description of Artificial Sequence: Synthetic oligonucleotide
ccucgaaauauuuauggac

SEQ ID NO: 427973 - RNA, 19 nt, Artificial Sequence
  Description of Artificial Sequence: Synthetic oligonucleotide
acuagacugugugaagauc

SEQ ID NO: 427974 - RNA, 19 nt, Artificial Sequence
  Description of Artificial Sequence: Synthetic oligonucleotide
ugguauugaucguuguaaa

SEQ ID NO: 427975 - RNA, 19 nt, Artificial Sequence
  Description of Artificial Sequence: Synthetic oligonucleotide
aucugcaaucauugaacug

SEQ ID NO: 427976 - RNA, 19 nt, Artificial Sequence
  Description of Artificial Sequence: Synthetic oligonucleotide
gaggauugaucuucaguuc

SEQ ID NO: 427977 - RNA, 19 nt, Artificial Sequence
  Description of Artificial Sequence: Synthetic oligonucleotide
caagcuucuaugacuuaug

SEQ ID NO: 427978 - RNA, 19 nt, Artificial Sequence
  Description of Artificial Sequence: Synthetic oligonucleotide
uucuaugcugucacauccu

SEQ ID NO: 427979 - RNA, 19 nt, Artificial Sequence
  Description of Artificial Sequence: Synthetic oligonucleotide
uuaugagguggggagagaa

SEQ ID NO: 427980 - RNA, 19 nt, Artificial Sequence
  Description of Artificial Sequence: Synthetic oligonucleotide
guacaugagguuugcagga

SEQ ID NO: 427981 - RNA, 19 nt, Artificial Sequence
  Description of Artificial Sequence: Synthetic oligonucleotide
guauugaucguuguaaacu

SEQ ID NO: 427982 - RNA, 19 nt, Artificial Sequence
  Description of Artificial Sequence: Synthetic oligonucleotide
aucaaucuuaaaacaauau

SEQ ID NO: 427983 - RNA, 19 nt, Artificial Sequence
  Description of Artificial Sequence: Synthetic oligonucleotide
caugccguccaugaacucc

SEQ ID NO: 427984 - RNA, 19 nt, Artificial Sequence
  Description of Artificial Sequence: Synthetic oligonucleotide
ugcaaucauugaacugaag

SEQ ID NO: 427985 - RNA, 19 nt, Artificial Sequence
  Description of Artificial Sequence: Synthetic oligonucleotide
cuuaugccaaacuguuuuc

SEQ ID NO: 427986 - RNA, 19 nt, Artificial Sequence
  Description of Artificial Sequence: Synthetic oligonucleotide
acuuaugggaagacaaacu

SEQ ID NO: 427987 - RNA, 19 nt, Artificial Sequence
  Description of Artificial Sequence: Synthetic oligonucleotide
aucauaaacugacgaacuu

SEQ ID NO: 427988 - RNA, 19 nt, Artificial Sequence
  Description of Artificial Sequence: Synthetic oligonucleotide
aaucguccugguucuuucu

SEQ ID NO: 427989 - RNA, 19 nt, Artificial Sequence
  Description of Artificial Sequence: Synthetic oligonucleotide
acagacuguuuuguagaac

SEQ ID NO: 427990 - RNA, 19 nt, Artificial Sequence
  Description of Artificial Sequence: Synthetic oligonucleotide
uagaaccuuugugagaguc

SEQ ID NO: 427991 - RNA, 19 nt, Artificial Sequence
  Description of Artificial Sequence: Synthetic oligonucleotide
gcuguauaccaucuauucc

SEQ ID NO: 427992 - RNA, 19 nt, Artificial Sequence
  Description of Artificial Sequence: Synthetic oligonucleotide
ucuuuugguauugaucguu

SEQ ID NO: 427993 - RNA, 19 nt, Artificial Sequence
  Description of Artificial Sequence: Synthetic oligonucleotide
cauggguaagacaaccaca

SEQ ID NO: 427994 - RNA, 19 nt, Artificial Sequence
  Description of Artificial Sequence: Synthetic oligonucleotide
uagcuuccagucauuuuga

SEQ ID NO: 427995 - RNA, 19 nt, Artificial Sequence
  Description of Artificial Sequence: Synthetic oligonucleotide
ucccguauauaaaguucug

SEQ ID NO: 427996 - RNA, 19 nt, Artificial Sequence
  Description of Artificial Sequence: Synthetic oligonucleotide
gaacuuuauccuucugcga

SEQ ID NO: 427997 - RNA, 19 nt, Artificial Sequence
  Description of Artificial Sequence: Synthetic oligonucleotide
ccaacaucuaaguucauca

SEQ ID NO: 427998 - RNA, 19 nt, Artificial Sequence
  Description of Artificial Sequence: Synthetic oligonucleotide
agggcgugcaaauuccaca

SEQ ID NO: 427999 - RNA, 19 nt, Artificial Sequence
  Description of Artificial Sequence: Synthetic oligonucleotide
ugaucguuguaaacuggua

SEQ ID NO: 428000 - RNA, 19 nt, Artificial Sequence
  Description of Artificial Sequence: Synthetic oligonucleotide
aguuugaacugugaggauu

SEQ ID NO: 428001 - RNA, 19 nt, Artificial Sequence
  Description of Artificial Sequence: Synthetic oligonucleotide
aucuuucauaauugaaguu

SEQ ID NO: 428002 - RNA, 19 nt, Artificial Sequence
  Description of Artificial Sequence: Synthetic oligonucleotide
auucuuaugccaaacuguu

SEQ ID NO: 428003 - RNA, 19 nt, Artificial Sequence
  Description of Artificial Sequence: Synthetic oligonucleotide
gguauugaucguuguaaac

SEQ ID NO: 428004 - RNA, 19 nt, Artificial Sequence
  Description of Artificial Sequence: Synthetic oligonucleotide
  modified_base (10)..(10): a, c, u, g, unknown or other
cauaucagcnuaaaauguu

SEQ ID NO: 428005 - RNA, 19 nt, Artificial Sequence
  Description of Artificial Sequence: Synthetic oligonucleotide
uaggccacaaaugaauauu

SEQ ID NO: 428006 - RNA, 19 nt, Artificial Sequence
  Description of Artificial Sequence: Synthetic oligonucleotide
acagacuauguacauucua

SEQ ID NO: 428007 - RNA, 19 nt, Artificial Sequence
  Description of Artificial Sequence: Synthetic oligonucleotide
aacuaagaauagguccaca

SEQ ID NO: 428008 - RNA, 19 nt, Artificial Sequence
  Description of Artificial Sequence: Synthetic oligonucleotide
acgauccuuuuacacucuc

SEQ ID NO: 428009 - RNA, 19 nt, Artificial Sequence
  Description of Artificial Sequence: Synthetic oligonucleotide
gaucauaaacugacgaacu

SEQ ID NO: 428010 - RNA, 19 nt, Artificial Sequence
  Description of Artificial Sequence: Synthetic oligonucleotide
ucguuguaaacugguaaaa

SEQ ID NO: 428011 - RNA, 19 nt, Artificial Sequence
  Description of Artificial Sequence: Synthetic oligonucleotide
  modified_base (3)..(3): a, c, u, g, unknown or other
gcnuaaaauguucuggucu

SEQ ID NO: 428012 - RNA, 19 nt, Artificial Sequence
  Description of Artificial Sequence: Synthetic oligonucleotide
gcgugcaaauuccacaaag

SEQ ID NO: 428013 - RNA, 19 nt, Artificial Sequence
  Description of Artificial Sequence: Synthetic oligonucleotide
cuuaaaucguccugguucu

SEQ ID NO: 428014 - RNA, 19 nt, Artificial Sequence
  Description of Artificial Sequence: Synthetic oligonucleotide
uaccagcauagucuuugca

SEQ ID NO: 428015 - RNA, 19 nt, Artificial Sequence
  Description of Artificial Sequence: Synthetic oligonucleotide
acacccuuacacaugucag

SEQ ID NO: 428016 - RNA, 19 nt, Artificial Sequence
  Description of Artificial Sequence: Synthetic oligonucleotide
cuaaugggccuucauuuga

SEQ ID NO: 428017 - RNA, 19 nt, Artificial Sequence
  Description of Artificial Sequence: Synthetic oligonucleotide
gugauauaucuauaaggua

SEQ ID NO: 428018 - RNA, 19 nt, Artificial Sequence
  Description of Artificial Sequence: Synthetic oligonucleotide
uuauguggugugugaugca

SEQ ID NO: 428019 - RNA, 19 nt, Artificial Sequence
  Description of Artificial Sequence: Synthetic oligonucleotide
aguuuugucucaacccuca

SEQ ID NO: 428020 - RNA, 19 nt, Artificial Sequence
  Description of Artificial Sequence: Synthetic oligonucleotide
cucugucccuauagaaggc

SEQ ID NO: 428021 - RNA, 19 nt, Artificial Sequence
  Description of Artificial Sequence: Synthetic oligonucleotide
caaaucauacuugaaucaa

SEQ ID NO: 428022 - RNA, 19 nt, Artificial Sequence
  Description of Artificial Sequence: Synthetic oligonucleotide
guuuaguaccaaacugaug

SEQ ID NO: 428023 - RNA, 19 nt, Artificial Sequence
  Description of Artificial Sequence: Synthetic oligonucleotide
uguacagacuauguacauu

SEQ ID NO: 428024 - RNA, 19 nt, Artificial Sequence
  Description of Artificial Sequence: Synthetic oligonucleotide
gaguacgauaugguccaag

SEQ ID NO: 428025 - RNA, 19 nt, Artificial Sequence
  Description of Artificial Sequence: Synthetic oligonucleotide
gguagucaccaaguuaucc

SEQ ID NO: 428026 - RNA, 19 nt, Artificial Sequence
  Description of Artificial Sequence: Synthetic oligonucleotide
acauccuaacucugucaug

SEQ ID NO: 428027 - RNA, 19 nt, Artificial Sequence
  Description of Artificial Sequence: Synthetic oligonucleotide
cauuaugucccauuacagu

SEQ ID NO: 428028 - RNA, 19 nt, Artificial Sequence
  Description of Artificial Sequence: Synthetic oligonucleotide
uggguaagacaaccacaga

SEQ ID NO: 428029 - RNA, 19 nt, Artificial Sequence
  Description of Artificial Sequence: Synthetic oligonucleotide
cauuaggccacaaaugaau

SEQ ID NO: 428030 - RNA, 19 nt, Artificial Sequence
  Description of Artificial Sequence: Synthetic oligonucleotide
uuacacaugucaguauguu

SEQ ID NO: 428031 - RNA, 19 nt, Artificial Sequence
  Description of Artificial Sequence: Synthetic oligonucleotide
cuaccagcauagucuuugc

SEQ ID NO: 428032 - RNA, 19 nt, Artificial Sequence
  Description of Artificial Sequence: Synthetic oligonucleotide
ugagggcgugcaaauucca

SEQ ID NO: 428033 - RNA, 19 nt, Artificial Sequence
  Description of Artificial Sequence: Synthetic oligonucleotide
uagaagaauggaguacgau

SEQ ID NO: 428034 - RNA, 19 nt, Artificial Sequence
  Description of Artificial Sequence: Synthetic oligonucleotide
uucuuaugccaaacuguuu

SEQ ID NO: 428035 - RNA, 19 nt, Artificial Sequence
  Description of Artificial Sequence: Synthetic oligonucleotide
guaacuaaccuuaacuuuu

SEQ ID NO: 428036 - RNA, 19 nt, Artificial Sequence
  Description of Artificial Sequence: Synthetic oligonucleotide
guuuugucucaacccucag

SEQ ID NO: 428037 - RNA, 19 nt, Artificial Sequence
  Description of Artificial Sequence: Synthetic oligonucleotide
caguguaacuaaccuuaac

SEQ ID NO: 428038 - RNA, 19 nt, Artificial Sequence
  Description of Artificial Sequence: Synthetic oligonucleotide
acucaaaauguuccacgua

SEQ ID NO: 428039 - RNA, 19 nt, Artificial Sequence
  Description of Artificial Sequence: Synthetic oligonucleotide
cugcgaugauuucaacuug

SEQ ID NO: 428040 - RNA, 19 nt, Artificial Sequence
  Description of Artificial Sequence: Synthetic oligonucleotide
cagaaauuugagggcgugc

SEQ ID NO: 428041 - RNA, 19 nt, Artificial Sequence
  Description of Artificial Sequence: Synthetic oligonucleotide
gacgagaguggaaucuaac

SEQ ID NO: 428042 - RNA, 19 nt, Artificial Sequence
  Description of Artificial Sequence: Synthetic oligonucleotide
uagaguggcccagacuaga

SEQ ID NO: 428043 - RNA, 19 nt, Artificial Sequence
  Description of Artificial Sequence: Synthetic oligonucleotide
ugcaacuagcccgaagcau

SEQ ID NO: 428044 - RNA, 19 nt, Artificial Sequence
  Description of Artificial Sequence: Synthetic oligonucleotide
auagaaggccagucaucca

SEQ ID NO: 428045 - RNA, 19 nt, Artificial Sequence
  Description of Artificial Sequence: Synthetic oligonucleotide
gcuaaugggccuucauuug

SEQ ID NO: 428046 - RNA, 19 nt, Artificial Sequence
  Description of Artificial Sequence: Synthetic oligonucleotide
gauaugguccaagauguau

SEQ ID NO: 428047 - RNA, 19 nt, Artificial Sequence
  Description of Artificial Sequence: Synthetic oligonucleotide
ggaccuggacacaugaagc

SEQ ID NO: 428048 - RNA, 19 nt, Artificial Sequence
  Description of Artificial Sequence: Synthetic oligonucleotide
uugugguguucauuauuau

SEQ ID NO: 428049 - RNA, 19 nt, Artificial Sequence
  Description of Artificial Sequence: Synthetic oligonucleotide
gccaaacuguuuucugacg

SEQ ID NO: 428050 - RNA, 19 nt, Artificial Sequence
  Description of Artificial Sequence: Synthetic oligonucleotide
caucagcuauuccacucac

SEQ ID NO: 428051 - RNA, 19 nt, Artificial Sequence
  Description of Artificial Sequence: Synthetic oligonucleotide
caguauguuaacagagaaa

SEQ ID NO: 428052 - RNA, 19 nt, Artificial Sequence
  Description of Artificial Sequence: Synthetic oligonucleotide
augcagacgagaguggaau

SEQ ID NO: 428053 - RNA, 19 nt, Artificial Sequence
  Description of Artificial Sequence: Synthetic oligonucleotide
ccguauauaaaguucugga

SEQ ID NO: 428054 - RNA, 19 nt, Artificial Sequence
  Description of Artificial Sequence: Synthetic oligonucleotide
aucagcuauuccacucacg

SEQ ID NO: 428055 - RNA, 19 nt, Artificial Sequence
  Description of Artificial Sequence: Synthetic oligonucleotide
aacccucaguuugaacugu

SEQ ID NO: 428056 - RNA, 19 nt, Artificial Sequence
  Description of Artificial Sequence: Synthetic oligonucleotide
ucuauaagguaagcuucua

SEQ ID NO: 428057 - RNA, 19 nt, Artificial Sequence
  Description of Artificial Sequence: Synthetic oligonucleotide
cugaacuuccaugcaauga

SEQ ID NO: 428058 - RNA, 19 nt, Artificial Sequence
  Description of Artificial Sequence: Synthetic oligonucleotide
cuauuguaaaguuguucua

SEQ ID NO: 428059 - RNA, 19 nt, Artificial Sequence
  Description of Artificial Sequence: Synthetic oligonucleotide
  modified_base (5)..(5): a, c, u, g, unknown or other
cagcnuaaaauguucuggu

SEQ ID NO: 428060 - RNA, 19 nt, Artificial Sequence
  Description of Artificial Sequence: Synthetic oligonucleotide
gaauagugauauaucuaua

SEQ ID NO: 428061 - RNA, 19 nt, Artificial Sequence
  Description of Artificial Sequence: Synthetic oligonucleotide
uuuaugagguggggagaga

SEQ ID NO: 428062 - RNA, 19 nt, Artificial Sequence
  Description of Artificial Sequence: Synthetic oligonucleotide
cucccguauauaaaguucu

SEQ ID NO: 428063 - RNA, 19 nt, Artificial Sequence
  Description of Artificial Sequence: Synthetic oligonucleotide
uuugugccccaaagaggac

SEQ ID NO: 428064 - RNA, 19 nt, Artificial Sequence
  Description of Artificial Sequence: Synthetic oligonucleotide
uccuguccaacgauccuuu

SEQ ID NO: 428065 - RNA, 19 nt, Artificial Sequence
  Description of Artificial Sequence: Synthetic oligonucleotide
ucaguucgguccagccagc

SEQ ID NO: 428066 - RNA, 19 nt, Artificial Sequence
  Description of Artificial Sequence: Synthetic oligonucleotide
ugcccugaacuuccaugca

SEQ ID NO: 428067 - RNA, 19 nt, Artificial Sequence
  Description of Artificial Sequence: Synthetic oligonucleotide
guuugcaggaaaguuagau

SEQ ID NO: 428068 - RNA, 19 nt, Artificial Sequence
  Description of Artificial Sequence: Synthetic oligonucleotide
gcauugugcuuuaugcaag

SEQ ID NO: 428069 - RNA, 19 nt, Artificial Sequence
  Description of Artificial Sequence: Synthetic oligonucleotide
gaaauugacugugcuauuu

SEQ ID NO: 428070 - RNA, 19 nt, Artificial Sequence
  Description of Artificial Sequence: Synthetic oligonucleotide
cccguauauaaaguucugg

SEQ ID NO: 428071 - RNA, 19 nt, Artificial Sequence
  Description of Artificial Sequence: Synthetic oligonucleotide
aacgauccuuuuacacucu

SEQ ID NO: 428072 - RNA, 19 nt, Artificial Sequence
  Description of Artificial Sequence: Synthetic oligonucleotide
uggacacaugaagcaaacu

SEQ ID NO: 428073 - RNA, 19 nt, Artificial Sequence
  Description of Artificial Sequence: Synthetic oligonucleotide
uuccuguccaacgauccuu

SEQ ID NO: 428074 - RNA, 19 nt, Artificial Sequence
  Description of Artificial Sequence: Synthetic oligonucleotide
gacaacucacugcaguuuu

SEQ ID NO: 428075 - RNA, 19 nt, Artificial Sequence
  Description of Artificial Sequence: Synthetic oligonucleotide
cucaacccucaguuugaac

SEQ ID NO: 428076 - RNA, 19 nt, Artificial Sequence
  Description of Artificial Sequence: Synthetic oligonucleotide
caucuugaggaucuuugua

SEQ ID NO: 428077 - RNA, 19 nt, Artificial Sequence
  Description of Artificial Sequence: Synthetic oligonucleotide
agacaagcccaaaccacca

SEQ ID NO: 428078 - RNA, 19 nt, Artificial Sequence
  Description of Artificial Sequence: Synthetic oligonucleotide
agacuguuuuguagaaccu

SEQ ID NO: 428079 - RNA, 19 nt, Artificial Sequence
  Description of Artificial Sequence: Synthetic oligonucleotide
uccuaucuuuggguauuug

SEQ ID NO: 428080 - RNA, 19 nt, Artificial Sequence
  Description of Artificial Sequence: Synthetic oligonucleotide
cgaagcauauacuuaagaa

SEQ ID NO: 428081 - RNA, 19 nt, Artificial Sequence
  Description of Artificial Sequence: Synthetic oligonucleotide
guagaagaauggaguacga

SEQ ID NO: 428082 - RNA, 19 nt, Artificial Sequence
  Description of Artificial Sequence: Synthetic oligonucleotide
cugaagucuaacagaagau

SEQ ID NO: 428083 - RNA, 19 nt, Artificial Sequence
  Description of Artificial Sequence: Synthetic oligonucleotide
uccaugcaaugaucagcac

SEQ ID NO: 428084 - RNA, 19 nt, Artificial Sequence
  Description of Artificial Sequence: Synthetic oligonucleotide
uugucucaacccucaguuu

SEQ ID NO: 428085 - RNA, 19 nt, Artificial Sequence
  Description of Artificial Sequence: Synthetic oligonucleotide
gcuuuaugcaagaauggaa

SEQ ID NO: 428086 - RNA, 19 nt, Artificial Sequence
  Description of Artificial Sequence: Synthetic oligonucleotide
uuuauccuucugcgaugau

SEQ ID NO: 428087 - RNA, 19 nt, Artificial Sequence
  Description of Artificial Sequence: Synthetic oligonucleotide
auagguccacagguauaag

SEQ ID NO: 428088 - RNA, 19 nt, Artificial Sequence
  Description of Artificial Sequence: Synthetic oligonucleotide
agguaagcuucuaugcaau

SEQ ID NO: 428089 - RNA, 19 nt, Artificial Sequence
  Description of Artificial Sequence: Synthetic oligonucleotide
agagaagcuaaugggccuu

SEQ ID NO: 428090 - RNA, 19 nt, Artificial Sequence
  Description of Artificial Sequence: Synthetic oligonucleotide
ccacguagggaauaaacaa

SEQ ID NO: 428091 - RNA, 19 nt, Artificial Sequence
  Description of Artificial Sequence: Synthetic oligonucleotide
gaauagguccacagguaua

SEQ ID NO: 428092 - RNA, 19 nt, Artificial Sequence
  Description of Artificial Sequence: Synthetic oligonucleotide
ugauuggaauagugauaua

SEQ ID NO: 428093 - RNA, 19 nt, Artificial Sequence
  Description of Artificial Sequence: Synthetic oligonucleotide
gagggcgugcaaauuccac

SEQ ID NO: 428094 - RNA, 19 nt, Artificial Sequence
  Description of Artificial Sequence: Synthetic oligonucleotide
agacaacucacugcaguuu

SEQ ID NO: 428095 - RNA, 19 nt, Artificial Sequence
  Description of Artificial Sequence: Synthetic oligonucleotide
aucgagggccaggucauca

SEQ ID NO: 428096 - RNA, 19 nt, Artificial Sequence
  Description of Artificial Sequence: Synthetic oligonucleotide
acucucccguauauaaagu

SEQ ID NO: 428097 - RNA, 19 nt, Artificial Sequence
  Description of Artificial Sequence: Synthetic oligonucleotide
gauccgguccacucagaua

SEQ ID NO: 428098 - RNA, 19 nt, Artificial Sequence
  Description of Artificial Sequence: Synthetic oligonucleotide
ccaauuaugugguguguga

SEQ ID NO: 428099 - RNA, 19 nt, Artificial Sequence
  Description of Artificial Sequence: Synthetic oligonucleotide
gaugcagacgagaguggaa

SEQ ID NO: 428100 - RNA, 19 nt, Artificial Sequence
  Description of Artificial Sequence: Synthetic oligonucleotide
gaagguuccuuuagugcua

SEQ ID NO: 428101 - RNA, 19 nt, Artificial Sequence
  Description of Artificial Sequence: Synthetic oligonucleotide
gauugaucuucaguucggu

SEQ ID NO: 428102 - RNA, 19 nt, Artificial Sequence
  Description of Artificial Sequence: Synthetic oligonucleotide
auuuauggacacacccuua

SEQ ID NO: 428103 - RNA, 19 nt, Artificial Sequence
  Description of Artificial Sequence: Synthetic oligonucleotide
gcccgaagcauauacuuaa

SEQ ID NO: 428104 - RNA, 19 nt, Artificial Sequence
  Description of Artificial Sequence: Synthetic oligonucleotide
acuagaagacaagcccaaa

SEQ ID NO: 428105 - RNA, 19 nt, Artificial Sequence
  Description of Artificial Sequence: Synthetic oligonucleotide
accuggacacaugaagcaa

SEQ ID NO: 428106 - RNA, 19 nt, Artificial Sequence
  Description of Artificial Sequence: Synthetic oligonucleotide
cugugaggauugaucuuca

SEQ ID NO: 428107 - RNA, 19 nt, Artificial Sequence
  Description of Artificial Sequence: Synthetic oligonucleotide
ucucaacccucaguuugaa

SEQ ID NO: 428108 - RNA, 19 nt, Artificial Sequence
  Description of Artificial Sequence: Synthetic oligonucleotide
cacacugaugcuggcagga

SEQ ID NO: 428109 - RNA, 19 nt, Artificial Sequence
  Description of Artificial Sequence: Synthetic oligonucleotide
ccagauccgguccacucag

SEQ ID NO: 428110 - RNA, 19 nt, Artificial Sequence
  Description of Artificial Sequence: Synthetic oligonucleotide
cacauccuaacucugucau

SEQ ID NO: 428111 - RNA, 19 nt, Artificial Sequence
  Description of Artificial Sequence: Synthetic oligonucleotide
caucuauuccaauuuuauu

SEQ ID NO: 428112 - RNA, 19 nt, Artificial Sequence
  Description of Artificial Sequence: Synthetic oligonucleotide
  modified_base (11)..(11): a, c, u, g, unknown or other
ccauaucagcnuaaaaugu

SEQ ID NO: 428113 - RNA, 19 nt, Artificial Sequence
  Description of Artificial Sequence: Synthetic oligonucleotide
agaagcuaaugggccuuca

SEQ ID NO: 428114 - RNA, 19 nt, Artificial Sequence
  Description of Artificial Sequence: Synthetic oligonucleotide
gucaacaguacaugagguu

SEQ ID NO: 428115 - RNA, 19 nt, Artificial Sequence
  Description of Artificial Sequence: Synthetic oligonucleotide
guccaacgauccuuuuaca

SEQ ID NO: 428116 - RNA, 19 nt, Artificial Sequence
  Description of Artificial Sequence: Synthetic oligonucleotide
gagaagcuaaugggccuuc

SEQ ID NO: 428117 - RNA, 19 nt, Artificial Sequence
  Description of Artificial Sequence: Synthetic oligonucleotide
guacgauaugguccaagau

SEQ ID NO: 428118 - RNA, 19 nt, Artificial Sequence
  Description of Artificial Sequence: Synthetic oligonucleotide
ucaugccguccaugaacuc

SEQ ID NO: 428119 - RNA, 19 nt, Artificial Sequence
  Description of Artificial Sequence: Synthetic oligonucleotide
gggcgugcaaauuccacaa

SEQ ID NO: 428120 - RNA, 19 nt, Artificial Sequence
  Description of Artificial Sequence: Synthetic oligonucleotide
cuguccaacgauccuuuua

SEQ ID NO: 428121 - RNA, 19 nt, Artificial Sequence
  Description of Artificial Sequence: Synthetic oligonucleotide
gucaugccguccaugaacu

SEQ ID NO: 428122 - RNA, 19 nt, Artificial Sequence
  Description of Artificial Sequence: Synthetic oligonucleotide
auguggugugugaugcaga

SEQ ID NO: 428123 - RNA, 19 nt, Artificial Sequence
  Description of Artificial Sequence: Synthetic oligonucleotide
cuagcccgaagcauauacu

SEQ ID NO: 428124 - RNA, 19 nt, Artificial Sequence
  Description of Artificial Sequence: Synthetic oligonucleotide
ccaacgauccuuuuacacu

SEQ ID NO: 428125 - RNA, 19 nt, Artificial Sequence
  Description of Artificial Sequence: Synthetic oligonucleotide
ccacucacgucaacaguac

SEQ ID NO: 428126 - RNA, 19 nt, Artificial Sequence
  Description of Artificial Sequence: Synthetic oligonucleotide
gcaacuagcccgaagcaua

SEQ ID NO: 428127 - RNA, 19 nt, Artificial Sequence
  Description of Artificial Sequence: Synthetic oligonucleotide
agacgagaguggaaucuaa

SEQ ID NO: 428128 - RNA, 19 nt, Artificial Sequence
  Description of Artificial Sequence: Synthetic oligonucleotide
cccgaagcauauacuuaag

SEQ ID NO: 428129 - RNA, 19 nt, Artificial Sequence
  Description of Artificial Sequence: Synthetic oligonucleotide
acacucucccguauauaaa

SEQ ID NO: 428130 - RNA, 19 nt, Artificial Sequence
  Description of Artificial Sequence: Synthetic oligonucleotide
cacccuuacacaugucagu

SEQ ID NO: 428131 - RNA, 19 nt, Artificial Sequence
  Description of Artificial Sequence: Synthetic oligonucleotide
uuaaaucguccugguucuu

SEQ ID NO: 428132 - RNA, 19 nt, Artificial Sequence
  Description of Artificial Sequence: Synthetic oligonucleotide
agaguggcccagacuagaa

SEQ ID NO: 428133 - RNA, 19 nt, Artificial Sequence
  Description of Artificial Sequence: Synthetic oligonucleotide
ccgaagcauauacuuaaga

SEQ ID NO: 428134 - RNA, 19 nt, Artificial Sequence
  Description of Artificial Sequence: Synthetic oligonucleotide
uccgguccacucagauaaa

SEQ ID NO: 428135 - RNA, 19 nt, Artificial Sequence
  Description of Artificial Sequence: Synthetic oligonucleotide
ggacacacccuuacacaug

SEQ ID NO: 428136 - RNA, 19 nt, Artificial Sequence
  Description of Artificial Sequence: Synthetic oligonucleotide
cucucccguauauaaaguu

SEQ ID NO: 428137 - RNA, 19 nt, Artificial Sequence
  Description of Artificial Sequence: Synthetic oligonucleotide
agcccgaagcauauacuua

SEQ ID NO: 428138 - RNA, 19 nt, Artificial Sequence
  Description of Artificial Sequence: Synthetic oligonucleotide
ccagaaauuugagggcgug

SEQ ID NO: 428139 - RNA, 19 nt, Artificial Sequence
  Description of Artificial Sequence: Synthetic oligonucleotide
ccuauagaaggccagucau

SEQ ID NO: 428140 - RNA, 19 nt, Artificial Sequence
  Description of Artificial Sequence: Synthetic oligonucleotide
caaagaggaccuggacaca

SEQ ID NO: 428141 - RNA, 19 nt, Artificial Sequence
  Description of Artificial Sequence: Synthetic oligonucleotide
guuccuaucuuuggguauu

SEQ ID NO: 428142 - RNA, 19 nt, Artificial Sequence
  Description of Artificial Sequence: Synthetic oligonucleotide
uuccuguaacguggauaaa

SEQ ID NO: 428143 - RNA, 19 nt, Artificial Sequence
  Description of Artificial Sequence: Synthetic oligonucleotide
cagauaaaucacucucauu

SEQ ID NO: 428144 - RNA, 19 nt, Artificial Sequence
  Description of Artificial Sequence: Synthetic oligonucleotide
gcauuaggccacaaaugaa

SEQ ID NO: 428145 - RNA, 19 nt, Artificial Sequence
  Description of Artificial Sequence: Synthetic oligonucleotide
cuuuuacacucucccguau

SEQ ID NO: 428146 - RNA, 19 nt, Artificial Sequence
  Description of Artificial Sequence: Synthetic oligonucleotide
caacuagcccgaagcauau

SEQ ID NO: 428147 - RNA, 19 nt, Artificial Sequence
  Description of Artificial Sequence: Synthetic oligonucleotide
gcccugaacuuccaugcaa

SEQ ID NO: 428148 - RNA, 19 nt, Artificial Sequence
  Description of Artificial Sequence: Synthetic oligonucleotide
cagacgagaguggaaucua

SEQ ID NO: 428149 - RNA, 19 nt, Artificial Sequence
  Description of Artificial Sequence: Synthetic oligonucleotide
cuuccuguccaacgauccu

SEQ ID NO: 428150 - RNA, 19 nt, Artificial Sequence
  Description of Artificial Sequence: Synthetic oligonucleotide
ggccacaaaugaauauuaa

SEQ ID NO: 428151 - RNA, 19 nt, Artificial Sequence
  Description of Artificial Sequence: Synthetic oligonucleotide
ccuuuuacacucucccgua

SEQ ID NO: 428152 - RNA, 19 nt, Artificial Sequence
  Description of Artificial Sequence: Synthetic oligonucleotide
gcccagacuagaagacaag

SEQ ID NO: 428153 - RNA, 19 nt, Artificial Sequence
  Description of Artificial Sequence: Synthetic oligonucleotide
caggaucgagggccagguc

SEQ ID NO: 428154 - RNA, 19 nt, Artificial Sequence
  Description of Artificial Sequence: Synthetic oligonucleotide
cgguccacucagauaaauc

SEQ ID NO: 428155 - RNA, 19 nt, Artificial Sequence
  Description of Artificial Sequence: Synthetic oligonucleotide
uuuggguauuuggguccuu

SEQ ID NO: 428156 - RNA, 19 nt, Artificial Sequence
  Description of Artificial Sequence: Synthetic oligonucleotide
cuuuggguauuuggguccu

SEQ ID NO: 428157 - RNA, 19 nt, Artificial Sequence
  Description of Artificial Sequence: Synthetic oligonucleotide
gaucgagggccaggucauc

SEQ ID NO: 428158 - RNA, 19 nt, Artificial Sequence
  Description of Artificial Sequence: Synthetic oligonucleotide
guagaaccuuugugagagu

SEQ ID NO: 428159 - RNA, 19 nt, Artificial Sequence
  Description of Artificial Sequence: Synthetic oligonucleotide
cagauccgguccacucaga

SEQ ID NO: 428160 - RNA, 19 nt, Artificial Sequence
  Description of Artificial Sequence: Synthetic oligonucleotide
gguaagcuucuaugcaauu

SEQ ID NO: 428161 - RNA, 19 nt, Artificial Sequence
  Description of Artificial Sequence: Synthetic oligonucleotide
ggcgugcaaauuccacaaa

SEQ ID NO: 428162 - RNA, 19 nt, Artificial Sequence
  Description of Artificial Sequence: Synthetic oligonucleotide
cccugaacuuccaugcaau

SEQ ID NO: 428163 - RNA, 19 nt, Artificial Sequence
  Description of Artificial Sequence: Synthetic oligonucleotide
ggaucgagggccaggucau

SEQ ID NO: 428164 - RNA, 19 nt, Artificial Sequence
  Description of Artificial Sequence: Synthetic oligonucleotide
ggaguacgauaugguccaa

SEQ ID NO: 428165 - RNA, 19 nt, Artificial Sequence
  Description of Artificial Sequence: Synthetic oligonucleotide
ccgguccacucagauaaau

SEQ ID NO: 428166 - RNA, 19 nt, Artificial Sequence
  Description of Artificial Sequence: Synthetic oligonucleotide
uauaauacauuaaacccag

SEQ ID NO: 428167 - RNA, 19 nt, Artificial Sequence
  Description of Artificial Sequence: Synthetic oligonucleotide
uaauacauuaaacccagag

SEQ ID NO: 428168 - RNA, 19 nt, Artificial Sequence
  Description of Artificial Sequence: Synthetic oligonucleotide
aauacauuaaacccagaga

SEQ ID NO: 428169 - RNA, 19 nt, Artificial Sequence
  Description of Artificial Sequence: Synthetic oligonucleotide
auacauuaaacccagagau

SEQ ID NO: 428170 - RNA, 19 nt, Artificial Sequence
  Description of Artificial Sequence: Synthetic oligonucleotide
uguaacuucuccaaggaga

SEQ ID NO: 428171 - RNA, 19 nt, Artificial Sequence
  Description of Artificial Sequence: Synthetic oligonucleotide
uuaaacccagagaugaggg

SEQ ID NO: 428172 - RNA, 19 nt, Artificial Sequence
  Description of Artificial Sequence: Synthetic oligonucleotide
aguuuuagccgucuuuucc

SEQ ID NO: 428173 - RNA, 19 nt, Artificial Sequence
  Description of Artificial Sequence: Synthetic oligonucleotide
uuaguugggcgaaagagcc

SEQ ID NO: 428174 - RNA, 19 nt, Artificial Sequence
  Description of Artificial Sequence: Synthetic oligonucleotide
ucuucaaugccacuccacg

SEQ ID NO: 428175 - RNA, 19 nt, Artificial Sequence
  Description of Artificial Sequence: Synthetic oligonucleotide
uggggauugaguuuuagcc

SEQ ID NO: 428176 - RNA, 19 nt, Artificial Sequence
  Description of Artificial Sequence: Synthetic oligonucleotide
aaucaccagaucugaaugg

SEQ ID NO: 428177 - RNA, 19 nt, Artificial Sequence
  Description of Artificial Sequence: Synthetic oligonucleotide
aagaucucggcccacuccg

SEQ ID NO: 428178 - RNA, 19 nt, Artificial Sequence
  Description of Artificial Sequence: Synthetic oligonucleotide
aaauuguggucucccagcg

SEQ ID NO: 428179 - RNA, 19 nt, Artificial Sequence
  Description of Artificial Sequence: Synthetic oligonucleotide
agaaauaguccugauacgg

SEQ ID NO: 428180 - RNA, 19 nt, Artificial Sequence
  Description of Artificial Sequence: Synthetic oligonucleotide
agacccagaaugcaguagc

SEQ ID NO: 428181 - RNA, 19 nt, Artificial Sequence
  Description of Artificial Sequence: Synthetic oligonucleotide
ucucgugcaccccaaaagg

SEQ ID NO: 428182 - RNA, 19 nt, Artificial Sequence
  Description of Artificial Sequence: Synthetic oligonucleotide
cacgccuugacccacaggg

SEQ ID NO: 428183 - RNA, 19 nt, Artificial Sequence
  Description of Artificial Sequence: Synthetic oligonucleotide
ugcguuguuuguauguggg

SEQ ID NO: 428184 - RNA, 19 nt, Artificial Sequence
  Description of Artificial Sequence: Synthetic oligonucleotide
gaugguaauuccuugaugu

SEQ ID NO: 428185 - RNA, 19 nt, Artificial Sequence
  Description of Artificial Sequence: Synthetic oligonucleotide
acauuaaacccagagauga

SEQ ID NO: 428186 - RNA, 19 nt, Artificial Sequence
  Description of Artificial Sequence: Synthetic oligonucleotide
aagaugaguuacucguguc

SEQ ID NO: 428187 - RNA, 19 nt, Artificial Sequence
  Description of Artificial Sequence: Synthetic oligonucleotide
aguuaguugggcgaaagag

SEQ ID NO: 428188 - RNA, 19 nt, Artificial Sequence
  Description of Artificial Sequence: Synthetic oligonucleotide
agaguugaugaggagacgg

SEQ ID NO: 428189 - RNA, 19 nt, Artificial Sequence
  Description of Artificial Sequence: Synthetic oligonucleotide
guaugugggacucagcaug

SEQ ID NO: 428190 - RNA, 19 nt, Artificial Sequence
  Description of Artificial Sequence: Synthetic oligonucleotide
caaucaggaguccucaggg

SEQ ID NO: 428191 - RNA, 19 nt, Artificial Sequence
  Description of Artificial Sequence: Synthetic oligonucleotide
aauggcgagucugagaaga

SEQ ID NO: 428192 - RNA, 19 nt, Artificial Sequence
  Description of Artificial Sequence: Synthetic oligonucleotide
gagacggccagagaggucg

SEQ ID NO: 428193 - RNA, 19 nt, Artificial Sequence
  Description of Artificial Sequence: Synthetic oligonucleotide
aacaauuuccggaaguccu

SEQ ID NO: 428194 - RNA, 19 nt, Artificial Sequence
  Description of Artificial Sequence: Synthetic oligonucleotide
auggggauaguguagguca

SEQ ID NO: 428195 - RNA, 19 nt, Artificial Sequence
  Description of Artificial Sequence: Synthetic oligonucleotide
aaugcaguagcggugggca

SEQ ID NO: 428196 - RNA, 19 nt, Artificial Sequence
  Description of Artificial Sequence: Synthetic oligonucleotide
cuucuuguaucuguggucc

SEQ ID NO: 428197 - RNA, 19 nt, Artificial Sequence
  Description of Artificial Sequence: Synthetic oligonucleotide
uuuucaaucaggaguccuc

SEQ ID NO: 428198 - RNA, 19 nt, Artificial Sequence
  Description of Artificial Sequence: Synthetic oligonucleotide
gacuucacgaggcuccacg

SEQ ID NO: 428199 - RNA, 19 nt, Artificial Sequence
  Description of Artificial Sequence: Synthetic oligonucleotide
gaugguggaaauaaucuuc

SEQ ID NO: 428200 - RNA, 19 nt, Artificial Sequence
  Description of Artificial Sequence: Synthetic oligonucleotide
guagaggcggcccuggagg

SEQ ID NO: 428201 - RNA, 19 nt, Artificial Sequence
  Description of Artificial Sequence: Synthetic oligonucleotide
aauuguggucucccagcgg

SEQ ID NO: 428202 - RNA, 19 nt, Artificial Sequence
  Description of Artificial Sequence: Synthetic oligonucleotide
uuauugagguuguuauccc

SEQ ID NO: 428203 - RNA, 19 nt, Artificial Sequence
  Description of Artificial Sequence: Synthetic oligonucleotide
cugagugucuagaggaggg

SEQ ID NO: 428204 - RNA, 19 nt, Artificial Sequence
  Description of Artificial Sequence: Synthetic oligonucleotide
gagaagcgagagcugaggg

SEQ ID NO: 428205 - RNA, 19 nt, Artificial Sequence
  Description of Artificial Sequence: Synthetic oligonucleotide
auuguggucucccagcgga

SEQ ID NO: 428206 - RNA, 19 nt, Artificial Sequence
  Description of Artificial Sequence: Synthetic oligonucleotide
uauugagguuguuaucccc

SEQ ID NO: 428207 - RNA, 19 nt, Artificial Sequence
  Description of Artificial Sequence: Synthetic oligonucleotide
ucaccagaucugaauggcg

SEQ ID NO: 428208 - RNA, 19 nt, Artificial Sequence
  Description of Artificial Sequence: Synthetic oligonucleotide
ucaccgagugcaaucacca

SEQ ID NO: 428209 - RNA, 19 nt, Artificial Sequence
  Description of Artificial Sequence: Synthetic oligonucleotide
uaacggaucucugaggaca

SEQ ID NO: 428210 - RNA, 19 nt, Artificial Sequence
  Description of Artificial Sequence: Synthetic oligonucleotide
agugucuagaggagggucc

SEQ ID NO: 428211 - RNA, 19 nt, Artificial Sequence
  Description of Artificial Sequence: Synthetic oligonucleotide
uggacucgcacacacagau

SEQ ID NO: 428212 - RNA, 19 nt, Artificial Sequence
  Description of Artificial Sequence: Synthetic oligonucleotide
gaaccugagguguguaugc

SEQ ID NO: 428213 - RNA, 19 nt, Artificial Sequence
  Description of Artificial Sequence: Synthetic oligonucleotide
ucgugaggagcuaucagac

SEQ ID NO: 428214 - RNA, 19 nt, Artificial Sequence
  Description of Artificial Sequence: Synthetic oligonucleotide
ugucgaacauggaugcggc

SEQ ID NO: 428215 - RNA, 19 nt, Artificial Sequence
  Description of Artificial Sequence: Synthetic oligonucleotide
agagcaucugcuguagacg

SEQ ID NO: 428216 - RNA, 19 nt, Artificial Sequence
  Description of Artificial Sequence: Synthetic oligonucleotide
uggugucgaacauggaugc

SEQ ID NO: 428217 - RNA, 19 nt, Artificial Sequence
  Description of Artificial Sequence: Synthetic oligonucleotide
gaugaguuacucgugucug

SEQ ID NO: 428218 - RNA, 19 nt, Artificial Sequence
  Description of Artificial Sequence: Synthetic oligonucleotide
uaugugggacucagcaugc

SEQ ID NO: 428219 - RNA, 19 nt, Artificial Sequence
  Description of Artificial Sequence: Synthetic oligonucleotide
guuaguugggcgaaagagc

SEQ ID NO: 428220 - RNA, 19 nt, Artificial Sequence
  Description of Artificial Sequence: Synthetic oligonucleotide
ugagaagcgagagcugagg

SEQ ID NO: 428221 - RNA, 19 nt, Artificial Sequence
  Description of Artificial Sequence: Synthetic oligonucleotide
gucugugcggcucuuggcg

SEQ ID NO: 428222 - RNA, 19 nt, Artificial Sequence
  Description of Artificial Sequence: Synthetic oligonucleotide
uaaguuaguugggcgaaag

SEQ ID NO: 428223 - RNA, 19 nt, Artificial Sequence
  Description of Artificial Sequence: Synthetic oligonucleotide
cucgagagcccagagacgg

SEQ ID NO: 428224 - RNA, 19 nt, Artificial Sequence
  Description of Artificial Sequence: Synthetic oligonucleotide
agagaggucgggaaguagg

SEQ ID NO: 428225 - RNA, 19 nt, Artificial Sequence
  Description of Artificial Sequence: Synthetic oligonucleotide
ggggauugaguuuuagccg

SEQ ID NO: 428226 - RNA, 19 nt, Artificial Sequence
  Description of Artificial Sequence: Synthetic oligonucleotide
ucgugcaccccaaaaggug

SEQ ID NO: 428227 - RNA, 19 nt, Artificial Sequence
  Description of Artificial Sequence: Synthetic oligonucleotide
agagcgaugaggacgauga

SEQ ID NO: 428228 - RNA, 19 nt, Artificial Sequence
  Description of Artificial Sequence: Synthetic oligonucleotide
gaugucaccgagugcaauc

SEQ ID NO: 428229 - RNA, 19 nt, Artificial Sequence
  Description of Artificial Sequence: Synthetic oligonucleotide
aaguuaguugggcgaaaga

SEQ ID NO: 428230 - RNA, 19 nt, Artificial Sequence
  Description of Artificial Sequence: Synthetic oligonucleotide
cuauggacgguucugagaa

SEQ ID NO: 428231 - RNA, 19 nt, Artificial Sequence
  Description of Artificial Sequence: Synthetic oligonucleotide
acuucacgaggcuccacgg

SEQ ID NO: 428232 - RNA, 19 nt, Artificial Sequence
  Description of Artificial Sequence: Synthetic oligonucleotide
uggacgguucugagaagcg

SEQ ID NO: 428233 - RNA, 19 nt, Artificial Sequence
  Description of Artificial Sequence: Synthetic oligonucleotide
uuagccgucuuuuccuucu

SEQ ID NO: 428234 - RNA, 19 nt, Artificial Sequence
  Description of Artificial Sequence: Synthetic oligonucleotide
aauggcguuggggauugag

SEQ ID NO: 428235 - RNA, 19 nt, Artificial Sequence
  Description of Artificial Sequence: Synthetic oligonucleotide
gugucgaacauggaugcgg

SEQ ID NO: 428236 - RNA, 19 nt, Artificial Sequence
  Description of Artificial Sequence: Synthetic oligonucleotide
ugugggacucagcaugcug

SEQ ID NO: 428237 - RNA, 19 nt, Artificial Sequence
  Description of Artificial Sequence: Synthetic oligonucleotide
ugguaauuccuugauguaa

SEQ ID NO: 428238 - RNA, 19 nt, Artificial Sequence
  Description of Artificial Sequence: Synthetic oligonucleotide
caauccgcgaccauccuuc

SEQ ID NO: 428239 - RNA, 19 nt, Artificial Sequence
  Description of Artificial Sequence: Synthetic oligonucleotide
ccagagacgguaaaagagg

SEQ ID NO: 428240 - RNA, 19 nt, Artificial Sequence
  Description of Artificial Sequence: Synthetic oligonucleotide
ugaucuauggacgguucug

SEQ ID NO: 428241 - RNA, 19 nt, Artificial Sequence
  Description of Artificial Sequence: Synthetic oligonucleotide
gucucgugcaccccaaaag

SEQ ID NO: 428242 - RNA, 19 nt, Artificial Sequence
  Description of Artificial Sequence: Synthetic oligonucleotide
gacgguucugagaagcgag

SEQ ID NO: 428243 - RNA, 19 nt, Artificial Sequence
  Description of Artificial Sequence: Synthetic oligonucleotide
cauuaaacccagagaugag

SEQ ID NO: 428244 - RNA, 19 nt, Artificial Sequence
  Description of Artificial Sequence: Synthetic oligonucleotide
ucggggagcuugcugaaca

SEQ ID NO: 428245 - RNA, 19 nt, Artificial Sequence
  Description of Artificial Sequence: Synthetic oligonucleotide
uucuuacuguugcggauga

SEQ ID NO: 428246 - RNA, 19 nt, Artificial Sequence
  Description of Artificial Sequence: Synthetic oligonucleotide
agacgguaaaagaggaggg

SEQ ID NO: 428247 - RNA, 19 nt, Artificial Sequence
  Description of Artificial Sequence: Synthetic oligonucleotide
ggaaauuguggucucccag

SEQ ID NO: 428248 - RNA, 19 nt, Artificial Sequence
  Description of Artificial Sequence: Synthetic oligonucleotide
ggugaugucaccgagugca

SEQ ID NO: 428249 - RNA, 19 nt, Artificial Sequence
  Description of Artificial Sequence: Synthetic oligonucleotide
ucucgagagcccagagacg

SEQ ID NO: 428250 - RNA, 19 nt, Artificial Sequence
  Description of Artificial Sequence: Synthetic oligonucleotide
agguguguaugcuggcccg

SEQ ID NO: 428251 - RNA, 19 nt, Artificial Sequence
  Description of Artificial Sequence: Synthetic oligonucleotide
ggaauggcgagucugagaa

SEQ ID NO: 428252 - RNA, 19 nt, Artificial Sequence
  Description of Artificial Sequence: Synthetic oligonucleotide
uaggucaggacucuacguu

SEQ ID NO: 428253 - RNA, 19 nt, Artificial Sequence
  Description of Artificial Sequence: Synthetic oligonucleotide
uccugauacgggaugcccu

SEQ ID NO: 428254 - RNA, 19 nt, Artificial Sequence
  Description of Artificial Sequence: Synthetic oligonucleotide
acucgugucugucaauagu

SEQ ID NO: 428255 - RNA, 19 nt, Artificial Sequence
  Description of Artificial Sequence: Synthetic oligonucleotide
uuuccgucuccgcaggccu

SEQ ID NO: 428256 - RNA, 19 nt, Artificial Sequence
  Description of Artificial Sequence: Synthetic oligonucleotide
gguaacggaucucugagga

SEQ ID NO: 428257 - RNA, 19 nt, Artificial Sequence
  Description of Artificial Sequence: Synthetic oligonucleotide
aguugggcgaaagagccug

SEQ ID NO: 428258 - RNA, 19 nt, Artificial Sequence
  Description of Artificial Sequence: Synthetic oligonucleotide
agcgagagcugagggaacc

SEQ ID NO: 428259 - RNA, 19 nt, Artificial Sequence
  Description of Artificial Sequence: Synthetic oligonucleotide
auacgggaugcccugggug

SEQ ID NO: 428260 - RNA, 19 nt, Artificial Sequence
  Description of Artificial Sequence: Synthetic oligonucleotide
guuguuauccccaaauaua

SEQ ID NO: 428261 - RNA, 19 nt, Artificial Sequence
  Description of Artificial Sequence: Synthetic oligonucleotide
uccacggaugcucgaagga

SEQ ID NO: 428262 - RNA, 19 nt, Artificial Sequence
  Description of Artificial Sequence: Synthetic oligonucleotide
agaagcgagagcugaggga

SEQ ID NO: 428263 - RNA, 19 nt, Artificial Sequence
  Description of Artificial Sequence: Synthetic oligonucleotide
aucuauggacgguucugag

SEQ ID NO: 428264 - RNA, 19 nt, Artificial Sequence
  Description of Artificial Sequence: Synthetic oligonucleotide
agcugggcaaaauaaguua

SEQ ID NO: 428265 - RNA, 19 nt, Artificial Sequence
  Description of Artificial Sequence: Synthetic oligonucleotide
uguaugugggacucagcau

SEQ ID NO: 428266 - RNA, 19 nt, Artificial Sequence
  Description of Artificial Sequence: Synthetic oligonucleotide
cugagagcaauccgcgacc

SEQ ID NO: 428267 - RNA, 19 nt, Artificial Sequence
  Description of Artificial Sequence: Synthetic oligonucleotide
cacagaucuaaagugcuuc

SEQ ID NO: 428268 - RNA, 19 nt, Artificial Sequence
  Description of Artificial Sequence: Synthetic oligonucleotide
uuggcggggccacugggag

SEQ ID NO: 428269 - RNA, 19 nt, Artificial Sequence
  Description of Artificial Sequence: Synthetic oligonucleotide
ugcggaugaaguuccggcu

SEQ ID NO: 428270 - RNA, 19 nt, Artificial Sequence
  Description of Artificial Sequence: Synthetic oligonucleotide
aauuuccggaaguccucgu

SEQ ID NO: 428271 - RNA, 19 nt, Artificial Sequence
  Description of Artificial Sequence: Synthetic oligonucleotide
ggcaguguagaaauagucc

SEQ ID NO: 428272 - RNA, 19 nt, Artificial Sequence
  Description of Artificial Sequence: Synthetic oligonucleotide
uggaaauuguggucuccca

SEQ ID NO: 428273 - RNA, 19 nt, Artificial Sequence
  Description of Artificial Sequence: Synthetic oligonucleotide
uacucgugucugucaauag

SEQ ID NO: 428274 - RNA, 19 nt, Artificial Sequence
  Description of Artificial Sequence: Synthetic oligonucleotide
caauuuccggaaguccucg

SEQ ID NO: 428275 - RNA, 19 nt, Artificial Sequence
  Description of Artificial Sequence: Synthetic oligonucleotide
acaauuuccggaaguccuc

SEQ ID NO: 428276 - RNA, 19 nt, Artificial Sequence
  Description of Artificial Sequence: Synthetic oligonucleotide
aggaguaauccacgaugag

SEQ ID NO: 428277 - RNA, 19 nt, Artificial Sequence
  Description of Artificial Sequence: Synthetic oligonucleotide
aauaguccugauacgggau

SEQ ID NO: 428278 - RNA, 19 nt, Artificial Sequence
  Description of Artificial Sequence: Synthetic oligonucleotide
uguugcggaugaaguuccg

SEQ ID NO: 428279 - RNA, 19 nt, Artificial Sequence
  Description of Artificial Sequence: Synthetic oligonucleotide
cucgugaggagcuaucaga

SEQ ID NO: 428280 - RNA, 19 nt, Artificial Sequence
  Description of Artificial Sequence: Synthetic oligonucleotide
cuucuuacuguugcggaug

SEQ ID NO: 428281 - RNA, 19 nt, Artificial Sequence
  Description of Artificial Sequence: Synthetic oligonucleotide
auugagguuguuaucccca

SEQ ID NO: 428282 - RNA, 19 nt, Artificial Sequence
  Description of Artificial Sequence: Synthetic oligonucleotide
gaagccgggccuuguuccg

SEQ ID NO: 428283 - RNA, 19 nt, Artificial Sequence
  Description of Artificial Sequence: Synthetic oligonucleotide
gauggaaauuguggucucc

SEQ ID NO: 428284 - RNA, 19 nt, Artificial Sequence
  Description of Artificial Sequence: Synthetic oligonucleotide
gaggaggaucucccgcugg

SEQ ID NO: 428285 - RNA, 19 nt, Artificial Sequence
  Description of Artificial Sequence: Synthetic oligonucleotide
ugucggcuccuccuugucc

SEQ ID NO: 428286 - RNA, 19 nt, Artificial Sequence
  Description of Artificial Sequence: Synthetic oligonucleotide
acccguucucgugaggagc

SEQ ID NO: 428287 - RNA, 19 nt, Artificial Sequence
  Description of Artificial Sequence: Synthetic oligonucleotide
aaggauccgccuccacuug

SEQ ID NO: 428288 - RNA, 19 nt, Artificial Sequence
  Description of Artificial Sequence: Synthetic oligonucleotide
gaugcucgaaggauccgcc

SEQ ID NO: 428289 - RNA, 19 nt, Artificial Sequence
  Description of Artificial Sequence: Synthetic oligonucleotide
ucgugucugucaauaguuc

SEQ ID NO: 428290 - RNA, 19 nt, Artificial Sequence
  Description of Artificial Sequence: Synthetic oligonucleotide
agguaugggccguucucuc

SEQ ID NO: 428291 - RNA, 19 nt, Artificial Sequence
  Description of Artificial Sequence: Synthetic oligonucleotide
gguaauuccuugauguaac

SEQ ID NO: 428292 - RNA, 19 nt, Artificial Sequence
  Description of Artificial Sequence: Synthetic oligonucleotide
cacgaguucuucucaauga

SEQ ID NO: 428293 - RNA, 19 nt, Artificial Sequence
  Description of Artificial Sequence: Synthetic oligonucleotide
ugcuuucgguaacggaucu

SEQ ID NO: 428294 - RNA, 19 nt, Artificial Sequence
  Description of Artificial Sequence: Synthetic oligonucleotide
uucggggugacccggccac

SEQ ID NO: 428295 - RNA, 19 nt, Artificial Sequence
  Description of Artificial Sequence: Synthetic oligonucleotide
uccgaagagauggggagcu

SEQ ID NO: 428296 - RNA, 19 nt, Artificial Sequence
  Description of Artificial Sequence: Synthetic oligonucleotide
gagggcgcaggaguaaucc

SEQ ID NO: 428297 - RNA, 19 nt, Artificial Sequence
  Description of Artificial Sequence: Synthetic oligonucleotide
uuacucgugucugucaaua

SEQ ID NO: 428298 - RNA, 19 nt, Artificial Sequence
  Description of Artificial Sequence: Synthetic oligonucleotide
cuaucagaccccuucucca

SEQ ID NO: 428299 - RNA, 19 nt, Artificial Sequence
  Description of Artificial Sequence: Synthetic oligonucleotide
guugcguuguuuguaugug

SEQ ID NO: 428300 - RNA, 19 nt, Artificial Sequence
  Description of Artificial Sequence: Synthetic oligonucleotide
gacucuacguugguggcac

SEQ ID NO: 428301 - RNA, 19 nt, Artificial Sequence
  Description of Artificial Sequence: Synthetic oligonucleotide
ucaggggccguuuccgucu

SEQ ID NO: 428302 - RNA, 19 nt, Artificial Sequence
  Description of Artificial Sequence: Synthetic oligonucleotide
ugcucgaaggauccgccuc

SEQ ID NO: 428303 - RNA, 19 nt, Artificial Sequence
  Description of Artificial Sequence: Synthetic oligonucleotide
augguggaaauaaucuuca

SEQ ID NO: 428304 - RNA, 19 nt, Artificial Sequence
  Description of Artificial Sequence: Synthetic oligonucleotide
cuacguugguggcacuugc

SEQ ID NO: 428305 - RNA, 19 nt, Artificial Sequence
  Description of Artificial Sequence: Synthetic oligonucleotide
uccgggaugguaauuccuu

SEQ ID NO: 428306 - RNA, 19 nt, Artificial Sequence
  Description of Artificial Sequence: Synthetic oligonucleotide
ugaguuacucgugucuguc

SEQ ID NO: 428307 - RNA, 19 nt, Artificial Sequence
  Description of Artificial Sequence: Synthetic oligonucleotide
guuuuagccgucuuuuccu

SEQ ID NO: 428308 - RNA, 19 nt, Artificial Sequence
  Description of Artificial Sequence: Synthetic oligonucleotide
aucuaaagugcuucuugua

SEQ ID NO: 428309 - RNA, 19 nt, Artificial Sequence
  Description of Artificial Sequence: Synthetic oligonucleotide
aguagggcggccaggucac

SEQ ID NO: 428310 - RNA, 19 nt, Artificial Sequence
  Description of Artificial Sequence: Synthetic oligonucleotide
uauggacgguucugagaag

SEQ ID NO: 428311 - RNA, 19 nt, Artificial Sequence
  Description of Artificial Sequence: Synthetic oligonucleotide
agaaugcaguagcgguggg

SEQ ID NO: 428312 - RNA, 19 nt, Artificial Sequence
  Description of Artificial Sequence: Synthetic oligonucleotide
uucucgugaggagcuauca

SEQ ID NO: 428313 - RNA, 19 nt, Artificial Sequence
  Description of Artificial Sequence: Synthetic oligonucleotide
gaaugcaguagcggugggc

SEQ ID NO: 428314 - RNA, 19 nt, Artificial Sequence
  Description of Artificial Sequence: Synthetic oligonucleotide
aggaauggcgagucugaga

SEQ ID NO: 428315 - RNA, 19 nt, Artificial Sequence
  Description of Artificial Sequence: Synthetic oligonucleotide
agcgucugggucuccacca

SEQ ID NO: 428316 - RNA, 19 nt, Artificial Sequence
  Description of Artificial Sequence: Synthetic oligonucleotide
ugcaaucaccagaucugaa

SEQ ID NO: 428317 - RNA, 19 nt, Artificial Sequence
  Description of Artificial Sequence: Synthetic oligonucleotide
cugcuuucgguaacggauc

SEQ ID NO: 428318 - RNA, 19 nt, Artificial Sequence
  Description of Artificial Sequence: Synthetic oligonucleotide
gaauggcgagucugagaag

SEQ ID NO: 428319 - RNA, 19 nt, Artificial Sequence
  Description of Artificial Sequence: Synthetic oligonucleotide
uccacggcugcuuucggua

SEQ ID NO: 428320 - RNA, 19 nt, Artificial Sequence
  Description of Artificial Sequence: Synthetic oligonucleotide
guugcuguagaaacauauc

SEQ ID NO: 428321 - RNA, 19 nt, Artificial Sequence
  Description of Artificial Sequence: Synthetic oligonucleotide
gguaugggccguucucucg

SEQ ID NO: 428322 - RNA, 19 nt, Artificial Sequence
  Description of Artificial Sequence: Synthetic oligonucleotide
ugggcgaaagagccugcca

SEQ ID NO: 428323 - RNA, 19 nt, Artificial Sequence
  Description of Artificial Sequence: Synthetic oligonucleotide
uuccgaagagauggggagc

SEQ ID NO: 428324 - RNA, 19 nt, Artificial Sequence
  Description of Artificial Sequence: Synthetic oligonucleotide
uacguugguggcacuugcu

SEQ ID NO: 428325 - RNA, 19 nt, Artificial Sequence
  Description of Artificial Sequence: Synthetic oligonucleotide
gugucuagaggaggguccg

SEQ ID NO: 428326 - RNA, 19 nt, Artificial Sequence
  Description of Artificial Sequence: Synthetic oligonucleotide
guuuccgaagagaugggga

SEQ ID NO: 428327 - RNA, 19 nt, Artificial Sequence
  Description of Artificial Sequence: Synthetic oligonucleotide
ggaugguaauuccuugaug

SEQ ID NO: 428328 - RNA, 19 nt, Artificial Sequence
  Description of Artificial Sequence: Synthetic oligonucleotide
ugagagcaauccgcgacca

SEQ ID NO: 428329 - RNA, 19 nt, Artificial Sequence
  Description of Artificial Sequence: Synthetic oligonucleotide
guuguuuguaugugggacu

SEQ ID NO: 428330 - RNA, 19 nt, Artificial Sequence
  Description of Artificial Sequence: Synthetic oligonucleotide
agguuguuauccccaaaua

SEQ ID NO: 428331 - RNA, 19 nt, Artificial Sequence
  Description of Artificial Sequence: Synthetic oligonucleotide
ggacacacgaagccgggcc

SEQ ID NO: 428332 - RNA, 19 nt, Artificial Sequence
  Description of Artificial Sequence: Synthetic oligonucleotide
uguguaugcuggcccgggu

SEQ ID NO: 428333 - RNA, 19 nt, Artificial Sequence
  Description of Artificial Sequence: Synthetic oligonucleotide
ucagucgccccgaggggug

SEQ ID NO: 428334 - RNA, 19 nt, Artificial Sequence
  Description of Artificial Sequence: Synthetic oligonucleotide
gaguuacucgugucuguca

SEQ ID NO: 428335 - RNA, 19 nt, Artificial Sequence
  Description of Artificial Sequence: Synthetic oligonucleotide
gucaccgagugcaaucacc

SEQ ID NO: 428336 - RNA, 19 nt, Artificial Sequence
  Description of Artificial Sequence: Synthetic oligonucleotide
agagacgguaaaagaggag

SEQ ID NO: 428337 - RNA, 19 nt, Artificial Sequence
  Description of Artificial Sequence: Synthetic oligonucleotide
gucgaacauggaugcggcg

SEQ ID NO: 428338 - RNA, 19 nt, Artificial Sequence
  Description of Artificial Sequence: Synthetic oligonucleotide
guagcggugggcaguguag

SEQ ID NO: 428339 - RNA, 19 nt, Artificial Sequence
  Description of Artificial Sequence: Synthetic oligonucleotide
gaggaauggcgagucugag

SEQ ID NO: 428340 - RNA, 19 nt, Artificial Sequence
  Description of Artificial Sequence: Synthetic oligonucleotide
guaacggaucucugaggac

SEQ ID NO: 428341 - RNA, 19 nt, Artificial Sequence
  Description of Artificial Sequence: Synthetic oligonucleotide
cacaccacccguucucgug

SEQ ID NO: 428342 - RNA, 19 nt, Artificial Sequence
  Description of Artificial Sequence: Synthetic oligonucleotide
cacguggaagacagaguug

SEQ ID NO: 428343 - RNA, 19 nt, Artificial Sequence
  Description of Artificial Sequence: Synthetic oligonucleotide
ugguggaaauaaucuucaa

SEQ ID NO: 428344 - RNA, 19 nt, Artificial Sequence
  Description of Artificial Sequence: Synthetic oligonucleotide
gaaggauccgccuccacuu

SEQ ID NO: 428345 - RNA, 19 nt, Artificial Sequence
  Description of Artificial Sequence: Synthetic oligonucleotide
guaugggccguucucucga

SEQ ID NO: 428346 - RNA, 19 nt, Artificial Sequence
  Description of Artificial Sequence: Synthetic oligonucleotide
ugucaccgagugcaaucac

SEQ ID NO: 428347 - RNA, 19 nt, Artificial Sequence
  Description of Artificial Sequence: Synthetic oligonucleotide
aggaggaucucccgcugga

SEQ ID NO: 428348 - RNA, 19 nt, Artificial Sequence
  Description of Artificial Sequence: Synthetic oligonucleotide
augucaccgagugcaauca

SEQ ID NO: 428349 - RNA, 19 nt, Artificial Sequence
  Description of Artificial Sequence: Synthetic oligonucleotide
aagcgagagcugagggaac

SEQ ID NO: 428350 - RNA, 19 nt, Artificial Sequence
  Description of Artificial Sequence: Synthetic oligonucleotide
gagagcgaugaggacgaug

SEQ ID NO: 428351 - RNA, 19 nt, Artificial Sequence
  Description of Artificial Sequence: Synthetic oligonucleotide
gcuguagacgcucggcacc

SEQ ID NO: 428352 - RNA, 19 nt, Artificial Sequence
  Description of Artificial Sequence: Synthetic oligonucleotide
ucguugcguuguuuguaug

SEQ ID NO: 428353 - RNA, 19 nt, Artificial Sequence
  Description of Artificial Sequence: Synthetic oligonucleotide
uuccgcguguccuucuguc

SEQ ID NO: 428354 - RNA, 19 nt, Artificial Sequence
  Description of Artificial Sequence: Synthetic oligonucleotide
aggucgggaaguagggcgg

SEQ ID NO: 428355 - RNA, 19 nt, Artificial Sequence
  Description of Artificial Sequence: Synthetic oligonucleotide
ggcccugaucuauggacgg

SEQ ID NO: 428356 - RNA, 19 nt, Artificial Sequence
  Description of Artificial Sequence: Synthetic oligonucleotide
aguagcggugggcagugua

SEQ ID NO: 428357 - RNA, 19 nt, Artificial Sequence
  Description of Artificial Sequence: Synthetic oligonucleotide
ugucuagaggaggguccgg

SEQ ID NO: 428358 - RNA, 19 nt, Artificial Sequence
  Description of Artificial Sequence: Synthetic oligonucleotide
uccacgaguucuucucaau

SEQ ID NO: 428359 - RNA, 19 nt, Artificial Sequence
  Description of Artificial Sequence: Synthetic oligonucleotide
acgaugaggcgcucugccu

SEQ ID NO: 428360 - RNA, 19 nt, Artificial Sequence
  Description of Artificial Sequence: Synthetic oligonucleotide
cugugcggcucuuggcggg

SEQ ID NO: 428361 - RNA, 19 nt, Artificial Sequence
  Description of Artificial Sequence: Synthetic oligonucleotide
cuggcucgggagagguucg

SEQ ID NO: 428362 - RNA, 19 nt, Artificial Sequence
  Description of Artificial Sequence: Synthetic oligonucleotide
ucaaagguaugggccguuc

SEQ ID NO: 428363 - RNA, 19 nt, Artificial Sequence
  Description of Artificial Sequence: Synthetic oligonucleotide
gcucgggagagguucgggg

SEQ ID NO: 428364 - RNA, 19 nt, Artificial Sequence
  Description of Artificial Sequence: Synthetic oligonucleotide
ugaugagaaccagggcgcu

SEQ ID NO: 428365 - RNA, 19 nt, Artificial Sequence
  Description of Artificial Sequence: Synthetic oligonucleotide
uugggcgaaagagccugcc

SEQ ID NO: 428366 - RNA, 19 nt, Artificial Sequence
  Description of Artificial Sequence: Synthetic oligonucleotide
ccagaaugcaguagcggug

SEQ ID NO: 428367 - RNA, 19 nt, Artificial Sequence
  Description of Artificial Sequence: Synthetic oligonucleotide
cagaguugaugaggagacg

SEQ ID NO: 428368 - RNA, 19 nt, Artificial Sequence
  Description of Artificial Sequence: Synthetic oligonucleotide
gagagcugagggaaccuga

SEQ ID NO: 428369 - RNA, 19 nt, Artificial Sequence
  Description of Artificial Sequence: Synthetic oligonucleotide
gguggaaauaaucuucaau

SEQ ID NO: 428370 - RNA, 19 nt, Artificial Sequence
  Description of Artificial Sequence: Synthetic oligonucleotide
gggauugaguuuuagccgu

SEQ ID NO: 428371 - RNA, 19 nt, Artificial Sequence
  Description of Artificial Sequence: Synthetic oligonucleotide
cugucaauaguuccucucu

SEQ ID NO: 428372 - RNA, 19 nt, Artificial Sequence
  Description of Artificial Sequence: Synthetic oligonucleotide
cagacccagaaugcaguag

SEQ ID NO: 428373 - RNA, 19 nt, Artificial Sequence
  Description of Artificial Sequence: Synthetic oligonucleotide
aggggaugugggcccaucu

SEQ ID NO: 428374 - RNA, 19 nt, Artificial Sequence
  Description of Artificial Sequence: Synthetic oligonucleotide
gcggcguucacaccgugcc

SEQ ID NO: 428375 - RNA, 19 nt, Artificial Sequence
  Description of Artificial Sequence: Synthetic oligonucleotide
ugugcggcucuuggcgggg

SEQ ID NO: 428376 - RNA, 19 nt, Artificial Sequence
  Description of Artificial Sequence: Synthetic oligonucleotide
acgccuugacccacagggc

SEQ ID NO: 428377 - RNA, 19 nt, Artificial Sequence
  Description of Artificial Sequence: Synthetic oligonucleotide
gcugauggggauaguguag

SEQ ID NO: 428378 - RNA, 19 nt, Artificial Sequence
  Description of Artificial Sequence: Synthetic oligonucleotide
guguguaugcuggcccggg

SEQ ID NO: 428379 - RNA, 19 nt, Artificial Sequence
  Description of Artificial Sequence: Synthetic oligonucleotide
aggauccgccuccacuugu

SEQ ID NO: 428380 - RNA, 19 nt, Artificial Sequence
  Description of Artificial Sequence: Synthetic oligonucleotide
cagcgucugggucuccacc

SEQ ID NO: 428381 - RNA, 19 nt, Artificial Sequence
  Description of Artificial Sequence: Synthetic oligonucleotide
ucgggaaguagggcggcca

SEQ ID NO: 428382 - RNA, 19 nt, Artificial Sequence
  Description of Artificial Sequence: Synthetic oligonucleotide
agguguggugucgaacaug

SEQ ID NO: 428383 - RNA, 19 nt, Artificial Sequence
  Description of Artificial Sequence: Synthetic oligonucleotide
ggccguucucucgagagcc

SEQ ID NO: 428384 - RNA, 19 nt, Artificial Sequence
  Description of Artificial Sequence: Synthetic oligonucleotide
augcucgaaggauccgccu

SEQ ID NO: 428385 - RNA, 19 nt, Artificial Sequence
  Description of Artificial Sequence: Synthetic oligonucleotide
ggcguucacaccgugccag

SEQ ID NO: 428386 - RNA, 19 nt, Artificial Sequence
  Description of Artificial Sequence: Synthetic oligonucleotide
gcucgaaggauccgccucc

SEQ ID NO: 428387 - RNA, 19 nt, Artificial Sequence
  Description of Artificial Sequence: Synthetic oligonucleotide
gaacauggaugcggcgccc

SEQ ID NO: 428388 - RNA, 19 nt, Artificial Sequence
  Description of Artificial Sequence: Synthetic oligonucleotide
caccgagugcaaucaccag

SEQ ID NO: 428389 - RNA, 19 nt, Artificial Sequence
  Description of Artificial Sequence: Synthetic oligonucleotide
ggcgcaggaguaauccacg

SEQ ID NO: 428390 - RNA, 19 nt, Artificial Sequence
  Description of Artificial Sequence: Synthetic oligonucleotide
ccauuuggcuuuucaauca

SEQ ID NO: 428391 - RNA, 19 nt, Artificial Sequence
  Description of Artificial Sequence: Synthetic oligonucleotide
cgugcaccccaaaaggugc

SEQ ID NO: 428392 - RNA, 19 nt, Artificial Sequence
  Description of Artificial Sequence: Synthetic oligonucleotide
auaaguuaguugggcgaaa

SEQ ID NO: 428393 - RNA, 19 nt, Artificial Sequence
  Description of Artificial Sequence: Synthetic oligonucleotide
auaauacauuaaacccaga

SEQ ID NO: 428394 - RNA, 19 nt, Artificial Sequence
  Description of Artificial Sequence: Synthetic oligonucleotide
ugaugucaccgagugcaau

SEQ ID NO: 428395 - RNA, 19 nt, Artificial Sequence
  Description of Artificial Sequence: Synthetic oligonucleotide
uggcggggccacugggagg

SEQ ID NO: 428396 - RNA, 19 nt, Artificial Sequence
  Description of Artificial Sequence: Synthetic oligonucleotide
agggcgcaggaguaaucca

SEQ ID NO: 428397 - RNA, 19 nt, Artificial Sequence
  Description of Artificial Sequence: Synthetic oligonucleotide
caccagaucugaauggcgu

SEQ ID NO: 428398 - RNA, 19 nt, Artificial Sequence
  Description of Artificial Sequence: Synthetic oligonucleotide
agugagguguggugucgaa

SEQ ID NO: 428399 - RNA, 19 nt, Artificial Sequence
  Description of Artificial Sequence: Synthetic oligonucleotide
ggccugagagcaauccgcg

SEQ ID NO: 428400 - RNA, 19 nt, Artificial Sequence
  Description of Artificial Sequence: Synthetic oligonucleotide
ggcgggaaccucccggcgg

SEQ ID NO: 428401 - RNA, 19 nt, Artificial Sequence
  Description of Artificial Sequence: Synthetic oligonucleotide
cuccgcaggccugagagca

SEQ ID NO: 428402 - RNA, 19 nt, Artificial Sequence
  Description of Artificial Sequence: Synthetic oligonucleotide
cacccguucucgugaggag

SEQ ID NO: 428403 - RNA, 19 nt, Artificial Sequence
  Description of Artificial Sequence: Synthetic oligonucleotide
ccacgaguucuucucaaug

SEQ ID NO: 428404 - RNA, 19 nt, Artificial Sequence
  Description of Artificial Sequence: Synthetic oligonucleotide
cgaaagagccugccaaagg

SEQ ID NO: 428405 - RNA, 19 nt, Artificial Sequence
  Description of Artificial Sequence: Synthetic oligonucleotide
ucgaaggauccgccuccac

SEQ ID NO: 428406 - RNA, 19 nt, Artificial Sequence
  Description of Artificial Sequence: Synthetic oligonucleotide
ucgagagcccagagacggu

SEQ ID NO: 428407 - RNA, 19 nt, Artificial Sequence
  Description of Artificial Sequence: Synthetic oligonucleotide
ggucagucgccccgagggg

SEQ ID NO: 428408 - RNA, 19 nt, Artificial Sequence
  Description of Artificial Sequence: Synthetic oligonucleotide
gcgaaagagccugccaaag

SEQ ID NO: 428409 - RNA, 19 nt, Artificial Sequence
  Description of Artificial Sequence: Synthetic oligonucleotide
agacuucacgaggcuccac

SEQ ID NO: 428410 - RNA, 19 nt, Artificial Sequence
  Description of Artificial Sequence: Synthetic oligonucleotide
aggguuccgcguguccuuc

SEQ ID NO: 428411 - RNA, 19 nt, Artificial Sequence
  Description of Artificial Sequence: Synthetic oligonucleotide
guggucucccagcggaaga

SEQ ID NO: 428412 - RNA, 19 nt, Artificial Sequence
  Description of Artificial Sequence: Synthetic oligonucleotide
gacacacgaagccgggccu

SEQ ID NO: 428413 - RNA, 19 nt, Artificial Sequence
  Description of Artificial Sequence: Synthetic oligonucleotide
auggcgagucugagaagag

SEQ ID NO: 428414 - RNA, 19 nt, Artificial Sequence
  Description of Artificial Sequence: Synthetic oligonucleotide
gggauaguguaggucagga

SEQ ID NO: 428415 - RNA, 19 nt, Artificial Sequence
  Description of Artificial Sequence: Synthetic oligonucleotide
gugagguguggugucgaac

SEQ ID NO: 428416 - RNA, 19 nt, Artificial Sequence
  Description of Artificial Sequence: Synthetic oligonucleotide
gggcgaaagagccugccaa

SEQ ID NO: 428417 - RNA, 19 nt, Artificial Sequence
  Description of Artificial Sequence: Synthetic oligonucleotide
cuuggcggggccacuggga

SEQ ID NO: 428418 - RNA, 19 nt, Artificial Sequence
  Description of Artificial Sequence: Synthetic oligonucleotide
gacccggccacgccuugac

SEQ ID NO: 428419 - RNA, 19 nt, Artificial Sequence
  Description of Artificial Sequence: Synthetic oligonucleotide
ggagagguagaggcggccc

SEQ ID NO: 428420 - RNA, 19 nt, Artificial Sequence
  Description of Artificial Sequence: Synthetic oligonucleotide
gguguguaugcuggcccgg

SEQ ID NO: 428421 - RNA, 19 nt, Artificial Sequence
  Description of Artificial Sequence: Synthetic oligonucleotide
ggugucgaacauggaugcg

SEQ ID NO: 428422 - RNA, 19 nt, Artificial Sequence
  Description of Artificial Sequence: Synthetic oligonucleotide
cgcucuuggggccuagugg

SEQ ID NO: 428423 - RNA, 19 nt, Artificial Sequence
  Description of Artificial Sequence: Synthetic oligonucleotide
cacggcugcuuucgguaac

SEQ ID NO: 428424 - RNA, 19 nt, Artificial Sequence
  Description of Artificial Sequence: Synthetic oligonucleotide
gagacuucacgaggcucca

SEQ ID NO: 428425 - RNA, 19 nt, Artificial Sequence
  Description of Artificial Sequence: Synthetic oligonucleotide
cucgugcaccccaaaaggu

SEQ ID NO: 428426 - RNA, 19 nt, Artificial Sequence
  Description of Artificial Sequence: Synthetic oligonucleotide
agguucggggugacccggc

SEQ ID NO: 428427 - RNA, 19 nt, Artificial Sequence
  Description of Artificial Sequence: Synthetic oligonucleotide
uggcucgggagagguucgg

SEQ ID NO: 428428 - RNA, 19 nt, Artificial Sequence
  Description of Artificial Sequence: Synthetic oligonucleotide
aggggccguuuccgucucc

SEQ ID NO: 428429 - RNA, 19 nt, Artificial Sequence
  Description of Artificial Sequence: Synthetic oligonucleotide
caccacccguucucgugag

SEQ ID NO: 428430 - RNA, 19 nt, Artificial Sequence
  Description of Artificial Sequence: Synthetic oligonucleotide
auccgccuccacuugugua

SEQ ID NO: 428431 - RNA, 19 nt, Artificial Sequence
  Description of Artificial Sequence: Synthetic oligonucleotide
acgguucugagaagcgaga

SEQ ID NO: 428432 - RNA, 19 nt, Artificial Sequence
  Description of Artificial Sequence: Synthetic oligonucleotide
cacgccggaacagcgucug

SEQ ID NO: 428433 - RNA, 19 nt, Artificial Sequence
  Description of Artificial Sequence: Synthetic oligonucleotide
gugcaccccaaaaggugcc

SEQ ID NO: 428434 - RNA, 19 nt, Artificial Sequence
  Description of Artificial Sequence: Synthetic oligonucleotide
gcugcuuucgguaacggau

SEQ ID NO: 428435 - RNA, 19 nt, Artificial Sequence
  Description of Artificial Sequence: Synthetic oligonucleotide
gggccuaguggguugcuga

SEQ ID NO: 428436 - RNA, 19 nt, Artificial Sequence
  Description of Artificial Sequence: Synthetic oligonucleotide
gagugagguguggugucga

SEQ ID NO: 428437 - RNA, 19 nt, Artificial Sequence
  Description of Artificial Sequence: Synthetic oligonucleotide
augggccguucucucgaga

SEQ ID NO: 428438 - RNA, 19 nt, Artificial Sequence
  Description of Artificial Sequence: Synthetic oligonucleotide
guucggggugacccggcca

SEQ ID NO: 428439 - RNA, 19 nt, Artificial Sequence
  Description of Artificial Sequence: Synthetic oligonucleotide
gcucaguacuuggagguuc

SEQ ID NO: 428440 - RNA, 19 nt, Artificial Sequence
  Description of Artificial Sequence: Synthetic oligonucleotide
guugggcgaaagagccugc

SEQ ID NO: 428441 - RNA, 19 nt, Artificial Sequence
  Description of Artificial Sequence: Synthetic oligonucleotide
uggcugucggcuccuccuu

SEQ ID NO: 428442 - RNA, 19 nt, Artificial Sequence
  Description of Artificial Sequence: Synthetic oligonucleotide
cucguugcguuguuuguau

SEQ ID NO: 428443 - RNA, 19 nt, Artificial Sequence
  Description of Artificial Sequence: Synthetic oligonucleotide
caaagguaugggccguucu

SEQ ID NO: 428444 - RNA, 19 nt, Artificial Sequence
  Description of Artificial Sequence: Synthetic oligonucleotide
gggcgcaggaguaauccac

SEQ ID NO: 428445 - RNA, 19 nt, Artificial Sequence
  Description of Artificial Sequence: Synthetic oligonucleotide
ccgaggggugaugucaccg

SEQ ID NO: 428446 - RNA, 19 nt, Artificial Sequence
  Description of Artificial Sequence: Synthetic oligonucleotide
cgugaggagcuaucagacc

SEQ ID NO: 428447 - RNA, 19 nt, Artificial Sequence
  Description of Artificial Sequence: Synthetic oligonucleotide
cucgggagagguucggggu

SEQ ID NO: 428448 - RNA, 19 nt, Artificial Sequence
  Description of Artificial Sequence: Synthetic oligonucleotide
agcuccacggaugcucgaa

SEQ ID NO: 428449 - RNA, 19 nt, Artificial Sequence
  Description of Artificial Sequence: Synthetic oligonucleotide
cguuuccgaagagaugggg

SEQ ID NO: 428450 - RNA, 19 nt, Artificial Sequence
  Description of Artificial Sequence: Synthetic oligonucleotide
aguguaggucaggacucua

SEQ ID NO: 428451 - RNA, 19 nt, Artificial Sequence
  Description of Artificial Sequence: Synthetic oligonucleotide
gguucggggugacccggcc

SEQ ID NO: 428452 - RNA, 19 nt, Artificial Sequence
  Description of Artificial Sequence: Synthetic oligonucleotide
ucgccccgaggggugaugu

SEQ ID NO: 428453 - RNA, 19 nt, Artificial Sequence
  Description of Artificial Sequence: Synthetic oligonucleotide
cgguaacggaucucugagg

SEQ ID NO: 428454 - RNA, 19 nt, Artificial Sequence
  Description of Artificial Sequence: Synthetic oligonucleotide
gauccgccuccacuugugu

SEQ ID NO: 428455 - RNA, 19 nt, Artificial Sequence
  Description of Artificial Sequence: Synthetic oligonucleotide
ggcugcuuucgguaacgga

SEQ ID NO: 428456 - RNA, 19 nt, Artificial Sequence
  Description of Artificial Sequence: Synthetic oligonucleotide
cacacgaagccgggccuug

SEQ ID NO: 428457 - RNA, 19 nt, Artificial Sequence
  Description of Artificial Sequence: Synthetic oligonucleotide
aaccucccggcggcguuca

SEQ ID NO: 428458 - RNA, 19 nt, Artificial Sequence
  Description of Artificial Sequence: Synthetic oligonucleotide
ggaggguccgggaugguaa

SEQ ID NO: 428459 - RNA, 19 nt, Artificial Sequence
  Description of Artificial Sequence: Synthetic oligonucleotide
ccguuuccgaagagauggg

SEQ ID NO: 428460 - RNA, 19 nt, Artificial Sequence
  Description of Artificial Sequence: Synthetic oligonucleotide
gcguuguuuguauguggga

SEQ ID NO: 428461 - RNA, 19 nt, Artificial Sequence
  Description of Artificial Sequence: Synthetic oligonucleotide
ccuggaggaauggcgaguc

SEQ ID NO: 428462 - RNA, 19 nt, Artificial Sequence
  Description of Artificial Sequence: Synthetic oligonucleotide
ugggcccaucugguggggc

SEQ ID NO: 428463 - RNA, 19 nt, Artificial Sequence
  Description of Artificial Sequence: Synthetic oligonucleotide
cugcagccguuuccgaaga

SEQ ID NO: 428464 - RNA, 19 nt, Artificial Sequence
  Description of Artificial Sequence: Synthetic oligonucleotide
ggaacagcgucugggucuc

SEQ ID NO: 428465 - RNA, 19 nt, Artificial Sequence
  Description of Artificial Sequence: Synthetic oligonucleotide
cccagaaugcaguagcggu

SEQ ID NO: 428466 - RNA, 19 nt, Artificial Sequence
  Description of Artificial Sequence: Synthetic oligonucleotide
cugucggcuccuccuuguc

SEQ ID NO: 428467 - RNA, 19 nt, Artificial Sequence
  Description of Artificial Sequence: Synthetic oligonucleotide
augugggacucagcaugcu

SEQ ID NO: 428468 - RNA, 19 nt, Artificial Sequence
  Description of Artificial Sequence: Synthetic oligonucleotide
gggaugguaauuccuugau

SEQ ID NO: 428469 - RNA, 19 nt, Artificial Sequence
  Description of Artificial Sequence: Synthetic oligonucleotide
ggacgguucugagaagcga

SEQ ID NO: 428470 - RNA, 19 nt, Artificial Sequence
  Description of Artificial Sequence: Synthetic oligonucleotide
gaaccucccggcggcguuc

SEQ ID NO: 428471 - RNA, 19 nt, Artificial Sequence
  Description of Artificial Sequence: Synthetic oligonucleotide
ugacccggccacgccuuga

SEQ ID NO: 428472 - RNA, 19 nt, Artificial Sequence
  Description of Artificial Sequence: Synthetic oligonucleotide
guuacucgugucugucaau

SEQ ID NO: 428473 - RNA, 19 nt, Artificial Sequence
  Description of Artificial Sequence: Synthetic oligonucleotide
gucgggaaguagggcggcc

SEQ ID NO: 428474 - RNA, 19 nt, Artificial Sequence
  Description of Artificial Sequence: Synthetic oligonucleotide
gcgcucuuggggccuagug

SEQ ID NO: 428475 - RNA, 19 nt, Artificial Sequence
  Description of Artificial Sequence: Synthetic oligonucleotide
gcagccguuuccgaagaga

SEQ ID NO: 428476 - RNA, 19 nt, Artificial Sequence
  Description of Artificial Sequence: Synthetic oligonucleotide
agacggccagagaggucgg

SEQ ID NO: 428477 - RNA, 19 nt, Artificial Sequence
  Description of Artificial Sequence: Synthetic oligonucleotide
guaugcuggcccgggugca

SEQ ID NO: 428478 - RNA, 19 nt, Artificial Sequence
  Description of Artificial Sequence: Synthetic oligonucleotide
gggguccgggucugggugc

SEQ ID NO: 428479 - RNA, 19 nt, Artificial Sequence
  Description of Artificial Sequence: Synthetic oligonucleotide
ggcugucggcuccuccuug

SEQ ID NO: 428480 - RNA, 19 nt, Artificial Sequence
  Description of Artificial Sequence: Synthetic oligonucleotide
gagggaaccugaggugugu

SEQ ID NO: 428481 - RNA, 19 nt, Artificial Sequence
  Description of Artificial Sequence: Synthetic oligonucleotide
gcggucagucgccccgagg

SEQ ID NO: 428482 - RNA, 19 nt, Artificial Sequence
  Description of Artificial Sequence: Synthetic oligonucleotide
ggauugaguuuuagccguc

SEQ ID NO: 428483 - RNA, 19 nt, Artificial Sequence
  Description of Artificial Sequence: Synthetic oligonucleotide
acacacccgcccgccuggg

SEQ ID NO: 428484 - RNA, 19 nt, Artificial Sequence
  Description of Artificial Sequence: Synthetic oligonucleotide
gagcuccacggaugcucga

SEQ ID NO: 428485 - RNA, 19 nt, Artificial Sequence
  Description of Artificial Sequence: Synthetic oligonucleotide
gcguucacaccgugccagc

SEQ ID NO: 428486 - RNA, 19 nt, Artificial Sequence
  Description of Artificial Sequence: Synthetic oligonucleotide
ccacuccguagcugucugg

SEQ ID NO: 428487 - RNA, 19 nt, Artificial Sequence
  Description of Artificial Sequence: Synthetic oligonucleotide
gucagucgccccgaggggu

SEQ ID NO: 428488 - RNA, 19 nt, Artificial Sequence
  Description of Artificial Sequence: Synthetic oligonucleotide
ggggccacgccggaacagc

SEQ ID NO: 428489 - RNA, 19 nt, Artificial Sequence
  Description of Artificial Sequence: Synthetic oligonucleotide
gugacccggccacgccuug

SEQ ID NO: 428490 - RNA, 19 nt, Artificial Sequence
  Description of Artificial Sequence: Synthetic oligonucleotide
gccaggguuccgcgugucc

SEQ ID NO: 428491 - RNA, 19 nt, Artificial Sequence
  Description of Artificial Sequence: Synthetic oligonucleotide
cucgaaggauccgccucca

SEQ ID NO: 428492 - RNA, 19 nt, Artificial Sequence
  Description of Artificial Sequence: Synthetic oligonucleotide
gaggguccgggaugguaau

SEQ ID NO: 428493 - RNA, 19 nt, Artificial Sequence
  Description of Artificial Sequence: Synthetic oligonucleotide
gcgcaggaguaauccacga

SEQ ID NO: 428494 - RNA, 19 nt, Artificial Sequence
  Description of Artificial Sequence: Synthetic oligonucleotide
ccgagugcaaucaccagau

SEQ ID NO: 428495 - RNA, 19 nt, Artificial Sequence
  Description of Artificial Sequence: Synthetic oligonucleotide
gggacucagcaugcuguac

SEQ ID NO: 428496 - RNA, 19 nt, Artificial Sequence
  Description of Artificial Sequence: Synthetic oligonucleotide
ggcggcguucacaccgugc

SEQ ID NO: 428497 - RNA, 19 nt, Artificial Sequence
  Description of Artificial Sequence: Synthetic oligonucleotide
ucccggcggcguucacacc

SEQ ID NO: 428498 - RNA, 19 nt, Artificial Sequence
  Description of Artificial Sequence: Synthetic oligonucleotide
accucccggcggcguucac

SEQ ID NO: 428499 - RNA, 19 nt, Artificial Sequence
  Description of Artificial Sequence: Synthetic oligonucleotide
ggagcuugcugaacaauuu

SEQ ID NO: 428500 - RNA, 19 nt, Artificial Sequence
  Description of Artificial Sequence: Synthetic oligonucleotide
ccccgaggggugaugucac

SEQ ID NO: 428501 - RNA, 19 nt, Artificial Sequence
  Description of Artificial Sequence: Synthetic oligonucleotide
gagagcaauccgcgaccau

SEQ ID NO: 428502 - RNA, 19 nt, Artificial Sequence
  Description of Artificial Sequence: Synthetic oligonucleotide
guccgggaugguaauuccu

SEQ ID NO: 428503 - RNA, 19 nt, Artificial Sequence
  Description of Artificial Sequence: Synthetic oligonucleotide
ccacccguucucgugagga

SEQ ID NO: 428504 - RNA, 19 nt, Artificial Sequence
  Description of Artificial Sequence: Synthetic oligonucleotide
ccgcguguccuucugucca

SEQ ID NO: 428505 - RNA, 19 nt, Artificial Sequence
  Description of Artificial Sequence: Synthetic oligonucleotide
cuccacggcugcuuucggu

SEQ ID NO: 428506 - RNA, 19 nt, Artificial Sequence
  Description of Artificial Sequence: Synthetic oligonucleotide
ugagagcgaugaggacgau

SEQ ID NO: 428507 - RNA, 19 nt, Artificial Sequence
  Description of Artificial Sequence: Synthetic oligonucleotide
caggggaugugggcccauc

SEQ ID NO: 428508 - RNA, 19 nt, Artificial Sequence
  Description of Artificial Sequence: Synthetic oligonucleotide
agcgcucuuggggccuagu

SEQ ID NO: 428509 - RNA, 19 nt, Artificial Sequence
  Description of Artificial Sequence: Synthetic oligonucleotide
cguugcguuguuuguaugu

SEQ ID NO: 428510 - RNA, 19 nt, Artificial Sequence
  Description of Artificial Sequence: Synthetic oligonucleotide
agggucucgugcaccccaa

SEQ ID NO: 428511 - RNA, 19 nt, Artificial Sequence
  Description of Artificial Sequence: Synthetic oligonucleotide
ccacgccuugacccacagg

SEQ ID NO: 428512 - RNA, 19 nt, Artificial Sequence
  Description of Artificial Sequence: Synthetic oligonucleotide
gccggaacagcgucugggu

SEQ ID NO: 428513 - RNA, 19 nt, Artificial Sequence
  Description of Artificial Sequence: Synthetic oligonucleotide
cccgaggggugaugucacc

SEQ ID NO: 428514 - RNA, 19 nt, Artificial Sequence
  Description of Artificial Sequence: Synthetic oligonucleotide
ggagggcgcaggaguaauc

SEQ ID NO: 428515 - RNA, 19 nt, Artificial Sequence
  Description of Artificial Sequence: Synthetic oligonucleotide
aggguccgggaugguaauu

SEQ ID NO: 428516 - RNA, 19 nt, Artificial Sequence
  Description of Artificial Sequence: Synthetic oligonucleotide
gucgccccgaggggugaug

SEQ ID NO: 428517 - RNA, 19 nt, Artificial Sequence
  Description of Artificial Sequence: Synthetic oligonucleotide
caggcacaccacccguucu

SEQ ID NO: 428518 - RNA, 19 nt, Artificial Sequence
  Description of Artificial Sequence: Synthetic oligonucleotide
guagggcggccaggucacc

SEQ ID NO: 428519 - RNA, 19 nt, Artificial Sequence
  Description of Artificial Sequence: Synthetic oligonucleotide
gccguucucucgagagccc

SEQ ID NO: 428520 - RNA, 19 nt, Artificial Sequence
  Description of Artificial Sequence: Synthetic oligonucleotide
ggcguuggggauugaguuu

SEQ ID NO: 428521 - RNA, 19 nt, Artificial Sequence
  Description of Artificial Sequence: Synthetic oligonucleotide
gaagcgcucuuggggccua

SEQ ID NO: 428522 - RNA, 19 nt, Artificial Sequence
  Description of Artificial Sequence: Synthetic oligonucleotide
gcggugggcaguguagaaa

SEQ ID NO: 428523 - RNA, 19 nt, Artificial Sequence
  Description of Artificial Sequence: Synthetic oligonucleotide
gcguuggggauugaguuuu

SEQ ID NO: 428524 - RNA, 19 nt, Artificial Sequence
  Description of Artificial Sequence: Synthetic oligonucleotide
gugcccgguucuggcucag

SEQ ID NO: 428525 - RNA, 19 nt, Artificial Sequence
  Description of Artificial Sequence: Synthetic oligonucleotide
cucuacguugguggcacuu

SEQ ID NO: 428526 - RNA, 19 nt, Artificial Sequence
  Description of Artificial Sequence: Synthetic oligonucleotide
cgaaggauccgccuccacu

SEQ ID NO: 428527 - RNA, 19 nt, Artificial Sequence
  Description of Artificial Sequence: Synthetic oligonucleotide
cccguucucgugaggagcu

SEQ ID NO: 428528 - RNA, 19 nt, Artificial Sequence
  Description of Artificial Sequence: Synthetic oligonucleotide
ggagacggccagagagguc

SEQ ID NO: 428529 - RNA, 19 nt, Artificial Sequence
  Description of Artificial Sequence: Synthetic oligonucleotide
ccuuggcgaguucccgcuc

SEQ ID NO: 428530 - RNA, 19 nt, Artificial Sequence
  Description of Artificial Sequence: Synthetic oligonucleotide
ccggccacgccuugaccca

SEQ ID NO: 428531 - RNA, 19 nt, Artificial Sequence
  Description of Artificial Sequence: Synthetic oligonucleotide
cgagugcaaucaccagauc

SEQ ID NO: 428532 - RNA, 19 nt, Artificial Sequence
  Description of Artificial Sequence: Synthetic oligonucleotide
ccgaagagauggggagcug

SEQ ID NO: 428533 - RNA, 19 nt, Artificial Sequence
  Description of Artificial Sequence: Synthetic oligonucleotide
gggucucgugcaccccaaa

SEQ ID NO: 428534 - RNA, 19 nt, Artificial Sequence
  Description of Artificial Sequence: Synthetic oligonucleotide
cucaaagguaugggccguu

SEQ ID NO: 428535 - RNA, 19 nt, Artificial Sequence
  Description of Artificial Sequence: Synthetic oligonucleotide
cgccuugacccacagggcu

SEQ ID NO: 428536 - RNA, 19 nt, Artificial Sequence
  Description of Artificial Sequence: Synthetic oligonucleotide
cccgcuggagggcgcagga

SEQ ID NO: 428537 - RNA, 19 nt, Artificial Sequence
  Description of Artificial Sequence: Synthetic oligonucleotide
ggggagcuugcugaacaau

SEQ ID NO: 428538 - RNA, 19 nt, Artificial Sequence
  Description of Artificial Sequence: Synthetic oligonucleotide
gcacaccacccguucucgu

SEQ ID NO: 428539 - RNA, 19 nt, Artificial Sequence
  Description of Artificial Sequence: Synthetic oligonucleotide
cguucacaccgugccagca

SEQ ID NO: 428540 - RNA, 19 nt, Artificial Sequence
  Description of Artificial Sequence: Synthetic oligonucleotide
cgcaggccugagagcaauc

SEQ ID NO: 428541 - RNA, 19 nt, Artificial Sequence
  Description of Artificial Sequence: Synthetic oligonucleotide
ccacggaugcucgaaggau

SEQ ID NO: 428542 - RNA, 19 nt, Artificial Sequence
  Description of Artificial Sequence: Synthetic oligonucleotide
cgagagcccagagacggua

SEQ ID NO: 428543 - RNA, 19 nt, Artificial Sequence
  Description of Artificial Sequence: Synthetic oligonucleotide
ggguuccgcguguccuucu

SEQ ID NO: 428544 - RNA, 19 nt, Artificial Sequence
  Description of Artificial Sequence: Synthetic oligonucleotide
ccucccggcggcguucaca

SEQ ID NO: 428545 - RNA, 19 nt, Artificial Sequence
  Description of Artificial Sequence: Synthetic oligonucleotide
ggccacgccuugacccaca

SEQ ID NO: 428546 - RNA, 19 nt, Artificial Sequence
  Description of Artificial Sequence: Synthetic oligonucleotide
cgggaugcccugggugagc

SEQ ID NO: 428547 - RNA, 19 nt, Artificial Sequence
  Description of Artificial Sequence: Synthetic oligonucleotide
ggugacccggccacgccuu

SEQ ID NO: 428548 - RNA, 19 nt, Artificial Sequence
  Description of Artificial Sequence: Synthetic oligonucleotide
cggggagcuugcugaacaa

SEQ ID NO: 428549 - RNA, 19 nt, Artificial Sequence
  Description of Artificial Sequence: Synthetic oligonucleotide
gggaaccucccggcggcgu

SEQ ID NO: 428550 - RNA, 19 nt, Artificial Sequence
  Description of Artificial Sequence: Synthetic oligonucleotide
cccaggucugugcggcucu

SEQ ID NO: 428551 - RNA, 19 nt, Artificial Sequence
  Description of Artificial Sequence: Synthetic oligonucleotide
cgggaaccucccggcggcg

SEQ ID NO: 428552 - RNA, 19 nt, Artificial Sequence
  Description of Artificial Sequence: Synthetic oligonucleotide
cggcguucacaccgugcca

SEQ ID NO: 428553 - RNA, 19 nt, Artificial Sequence
  Description of Artificial Sequence: Synthetic oligonucleotide
ccgucuccgcaggccugag

SEQ ID NO: 428554 - RNA, 19 nt, Artificial Sequence
  Description of Artificial Sequence: Synthetic oligonucleotide
cggggcccugaucuaugga

SEQ ID NO: 428555 - RNA, 19 nt, Artificial Sequence
  Description of Artificial Sequence: Synthetic oligonucleotide
cugccucggggagcuugcu

SEQ ID NO: 428556 - RNA, 19 nt, Artificial Sequence
  Description of Artificial Sequence: Synthetic oligonucleotide
cgucuccgcaggccugaga

SEQ ID NO: 428557 - RNA, 19 nt, Artificial Sequence
  Description of Artificial Sequence: Synthetic oligonucleotide
cguucucgugaggagcuau

SEQ ID NO: 428558 - RNA, 19 nt, Artificial Sequence
  Description of Artificial Sequence: Synthetic oligonucleotide
caguagcggugggcagugu

SEQ ID NO: 428559 - RNA, 19 nt, Artificial Sequence
  Description of Artificial Sequence: Synthetic oligonucleotide
cggccacgccuugacccac

SEQ ID NO: 428560 - RNA, 19 nt, Artificial Sequence
  Description of Artificial Sequence: Synthetic oligonucleotide
cggcggcguucacaccgug

SEQ ID NO: 428561 - RNA, 19 nt, Artificial Sequence
  Description of Artificial Sequence: Synthetic oligonucleotide
ccgccuccacuuguguacu

SEQ ID NO: 428562 - RNA, 19 nt, Artificial Sequence
  Description of Artificial Sequence: Synthetic oligonucleotide
ccggcggcguucacaccgu

SEQ ID NO: 428563 - RNA, 19 nt, Artificial Sequence
  Description of Artificial Sequence: Synthetic oligonucleotide
ccguucucgugaggagcua

SEQ ID NO: 428564 - RNA, 19 nt, Artificial Sequence
  Description of Artificial Sequence: Synthetic oligonucleotide
ccgcaggccugagagcaau

SEQ ID NO: 428565 - RNA, 19 nt, Artificial Sequence
  Description of Artificial Sequence: Synthetic oligonucleotide
cgcguguccuucuguccau

SEQ ID NO: 428566 - RNA, 19 nt, Artificial Sequence
  Description of Artificial Sequence: Synthetic oligonucleotide
uggaauaacaguuugcacg

SEQ ID NO: 428567 - RNA, 19 nt, Artificial Sequence
  Description of Artificial Sequence: Synthetic oligonucleotide
auaauagaugcacagacac

SEQ ID NO: 428568 - RNA, 19 nt, Artificial Sequence
  Description of Artificial Sequence: Synthetic oligonucleotide
uguauguggaacaauaagc

SEQ ID NO: 428569 - RNA, 19 nt, Artificial Sequence
  Description of Artificial Sequence: Synthetic oligonucleotide
ucuaaauuuuccaugcucc

SEQ ID NO: 428570 - RNA, 19 nt, Artificial Sequence
  Description of Artificial Sequence: Synthetic oligonucleotide
uuuaugaugauaucaggag

SEQ ID NO: 428571 - RNA, 19 nt, Artificial Sequence
  Description of Artificial Sequence: Synthetic oligonucleotide
ucauagaaacuucagauac

SEQ ID NO: 428572 - RNA, 19 nt, Artificial Sequence
  Description of Artificial Sequence: Synthetic oligonucleotide
gaauagguccccuagcucg

SEQ ID NO: 428573 - RNA, 19 nt, Artificial Sequence
  Description of Artificial Sequence: Synthetic oligonucleotide
uauucuacuaccccacugg

SEQ ID NO: 428574 - RNA, 19 nt, Artificial Sequence
  Description of Artificial Sequence: Synthetic oligonucleotide
ucgagaaugaauuuuguca

SEQ ID NO: 428575 - RNA, 19 nt, Artificial Sequence
  Description of Artificial Sequence: Synthetic oligonucleotide
cuuuccacgaucaauaaac

SEQ ID NO: 428576 - RNA, 19 nt, Artificial Sequence
  Description of Artificial Sequence: Synthetic oligonucleotide
uccaauagaacuaaacacu

SEQ ID NO: 428577 - RNA, 19 nt, Artificial Sequence
  Description of Artificial Sequence: Synthetic oligonucleotide
auaagcuacuucuuucucc

SEQ ID NO: 428578 - RNA, 19 nt, Artificial Sequence
  Description of Artificial Sequence: Synthetic oligonucleotide
ucugaugccucaaacaacc

SEQ ID NO: 428579 - RNA, 19 nt, Artificial Sequence
  Description of Artificial Sequence: Synthetic oligonucleotide
agaaguggucuacagauac

SEQ ID NO: 428580 - RNA, 19 nt, Artificial Sequence
  Description of Artificial Sequence: Synthetic oligonucleotide
cuaaagaguauuuuagccc

SEQ ID NO: 428581 - RNA, 19 nt, Artificial Sequence
  Description of Artificial Sequence: Synthetic oligonucleotide
aaucaagugaccaauuguc

SEQ ID NO: 428582 - RNA, 19 nt, Artificial Sequence
  Description of Artificial Sequence: Synthetic oligonucleotide
aucuguauagauccgaauc

SEQ ID NO: 428583 - RNA, 19 nt, Artificial Sequence
  Description of Artificial Sequence: Synthetic oligonucleotide
uaaggaucugaauaggucc

SEQ ID NO: 428584 - RNA, 19 nt, Artificial Sequence
  Description of Artificial Sequence: Synthetic oligonucleotide
aauuuaaacgacgaaggug

SEQ ID NO: 428585 - RNA, 19 nt, Artificial Sequence
  Description of Artificial Sequence: Synthetic oligonucleotide
accaucacgagaucuaccc

SEQ ID NO: 428586 - RNA, 19 nt, Artificial Sequence
  Description of Artificial Sequence: Synthetic oligonucleotide
agaauuuaaacgacgaagg

SEQ ID NO: 428587 - RNA, 19 nt, Artificial Sequence
  Description of Artificial Sequence: Synthetic oligonucleotide
uccuacugaaauauaagcc

SEQ ID NO: 428588 - RNA, 19 nt, Artificial Sequence
  Description of Artificial Sequence: Synthetic oligonucleotide
uccauuguagaguaccucg

SEQ ID NO: 428589 - RNA, 19 nt, Artificial Sequence
  Description of Artificial Sequence: Synthetic oligonucleotide
aaacacucaucauucgagg

SEQ ID NO: 428590 - RNA, 19 nt, Artificial Sequence
  Description of Artificial Sequence: Synthetic oligonucleotide
uugucuauacugaauacca

SEQ ID NO: 428591 - RNA, 19 nt, Artificial Sequence
  Description of Artificial Sequence: Synthetic oligonucleotide
gauuauagcccguauauga

SEQ ID NO: 428592 - RNA, 19 nt, Artificial Sequence
  Description of Artificial Sequence: Synthetic oligonucleotide
aguauuuuagcccaucaga

SEQ ID NO: 428593 - RNA, 19 nt, Artificial Sequence
  Description of Artificial Sequence: Synthetic oligonucleotide
uguaccgucgauuagugcu

SEQ ID NO: 428594 - RNA, 19 nt, Artificial Sequence
  Description of Artificial Sequence: Synthetic oligonucleotide
auagauccgaaucucccgc

SEQ ID NO: 428595 - RNA, 19 nt, Artificial Sequence
  Description of Artificial Sequence: Synthetic oligonucleotide
uauaaacucccauagccug

SEQ ID NO: 428596 - RNA, 19 nt, Artificial Sequence
  Description of Artificial Sequence: Synthetic oligonucleotide
ucuguauagauccgaaucu

SEQ ID NO: 428597 - RNA, 19 nt, Artificial Sequence
  Description of Artificial Sequence: Synthetic oligonucleotide
aaucuguggaauucuaaca

SEQ ID NO: 428598 - RNA, 19 nt, Artificial Sequence
  Description of Artificial Sequence: Synthetic oligonucleotide
auuuaaacgacgaagguga

SEQ ID NO: 428599 - RNA, 19 nt, Artificial Sequence
  Description of Artificial Sequence: Synthetic oligonucleotide
gauucaugauaacagaguc

SEQ ID NO: 428600 - RNA, 19 nt, Artificial Sequence
  Description of Artificial Sequence: Synthetic oligonucleotide
uauagauccgaaucucccg

SEQ ID NO: 428601 - RNA, 19 nt, Artificial Sequence
  Description of Artificial Sequence: Synthetic oligonucleotide
auuuuagcccaucagauau

SEQ ID NO: 428602 - RNA, 19 nt, Artificial Sequence
  Description of Artificial Sequence: Synthetic oligonucleotide
aauaccacaagugcccuuc

SEQ ID NO: 428603 - RNA, 19 nt, Artificial Sequence
  Description of Artificial Sequence: Synthetic oligonucleotide
aaguggucuacagauacgg

SEQ ID NO: 428604 - RNA, 19 nt, Artificial Sequence
  Description of Artificial Sequence: Synthetic oligonucleotide
auguggaacaauaagcuac

SEQ ID NO: 428605 - RNA, 19 nt, Artificial Sequence
  Description of Artificial Sequence: Synthetic oligonucleotide
uugaggguuaccauaaccu

SEQ ID NO: 428606 - RNA, 19 nt, Artificial Sequence
  Description of Artificial Sequence: Synthetic oligonucleotide
caccaagaaucauugaugg

SEQ ID NO: 428607 - RNA, 19 nt, Artificial Sequence
  Description of Artificial Sequence: Synthetic oligonucleotide
uuguucgggaucuuugugg

SEQ ID NO: 428608 - RNA, 19 nt, Artificial Sequence
  Description of Artificial Sequence: Synthetic oligonucleotide
ugaacgauucaugauaaca

SEQ ID NO: 428609 - RNA, 19 nt, Artificial Sequence
  Description of Artificial Sequence: Synthetic oligonucleotide
uguaugaccgguagaaaac

SEQ ID NO: 428610 - RNA, 19 nt, Artificial Sequence
  Description of Artificial Sequence: Synthetic oligonucleotide
aguagaugcaaaugucagg

SEQ ID NO: 428611 - RNA, 19 nt, Artificial Sequence
  Description of Artificial Sequence: Synthetic oligonucleotide
uauuuacagugucuugccg

SEQ ID NO: 428612 - RNA, 19 nt, Artificial Sequence
  Description of Artificial Sequence: Synthetic oligonucleotide
agcgucauuaaauggagug

SEQ ID NO: 428613 - RNA, 19 nt, Artificial Sequence
  Description of Artificial Sequence: Synthetic oligonucleotide
caccauaugcuucaaacgc

SEQ ID NO: 428614 - RNA, 19 nt, Artificial Sequence
  Description of Artificial Sequence: Synthetic oligonucleotide
uuaaggaucugaauagguc

SEQ ID NO: 428615 - RNA, 19 nt, Artificial Sequence
  Description of Artificial Sequence: Synthetic oligonucleotide
uggggauuuaugaugauau

SEQ ID NO: 428616 - RNA, 19 nt, Artificial Sequence
  Description of Artificial Sequence: Synthetic oligonucleotide
acagauacggccugcaucu

SEQ ID NO: 428617 - RNA, 19 nt, Artificial Sequence
  Description of Artificial Sequence: Synthetic oligonucleotide
uauuaaggaucugaauagg

SEQ ID NO: 428618 - RNA, 19 nt, Artificial Sequence
  Description of Artificial Sequence: Synthetic oligonucleotide
ugauauaaacucccauagc

SEQ ID NO: 428619 - RNA, 19 nt, Artificial Sequence
  Description of Artificial Sequence: Synthetic oligonucleotide
ugaccgguagaaaacagac

SEQ ID NO: 428620 - RNA, 19 nt, Artificial Sequence
  Description of Artificial Sequence: Synthetic oligonucleotide
ucauauguaugaguucugg

SEQ ID NO: 428621 - RNA, 19 nt, Artificial Sequence
  Description of Artificial Sequence: Synthetic oligonucleotide
ugucauucgagaagggaug

SEQ ID NO: 428622 - RNA, 19 nt, Artificial Sequence
  Description of Artificial Sequence: Synthetic oligonucleotide
ucacaaguccuacagcaug

SEQ ID NO: 428623 - RNA, 19 nt, Artificial Sequence
  Description of Artificial Sequence: Synthetic oligonucleotide
aagguugggauccuacuga

SEQ ID NO: 428624 - RNA, 19 nt, Artificial Sequence
  Description of Artificial Sequence: Synthetic oligonucleotide
cugaggguaguagagaacg

SEQ ID NO: 428625 - RNA, 19 nt, Artificial Sequence
  Description of Artificial Sequence: Synthetic oligonucleotide
agauacuccauagaccgcg

SEQ ID NO: 428626 - RNA, 19 nt, Artificial Sequence
  Description of Artificial Sequence: Synthetic oligonucleotide
cauccgaacaugaaaguug

SEQ ID NO: 428627 - RNA, 19 nt, Artificial Sequence
  Description of Artificial Sequence: Synthetic oligonucleotide
uauaugaagcaaucgcgac

SEQ ID NO: 428628 - RNA, 19 nt, Artificial Sequence
  Description of Artificial Sequence: Synthetic oligonucleotide
uuguaugaccgguagaaaa

SEQ ID NO: 428629 - RNA, 19 nt, Artificial Sequence
  Description of Artificial Sequence: Synthetic oligonucleotide
gacgucguaauuuccuuag

SEQ ID NO: 428630 - RNA, 19 nt, Artificial Sequence
  Description of Artificial Sequence: Synthetic oligonucleotide
uguggaauucuaacagagc

SEQ ID NO: 428631 - RNA, 19 nt, Artificial Sequence
  Description of Artificial Sequence: Synthetic oligonucleotide
aucaaggcuaaauucuuca

SEQ ID NO: 428632 - RNA, 19 nt, Artificial Sequence
  Description of Artificial Sequence: Synthetic oligonucleotide
uacuccauagaccgcguag

SEQ ID NO: 428633 - RNA, 19 nt, Artificial Sequence
  Description of Artificial Sequence: Synthetic oligonucleotide
ugacagcgucauuaaaugg

SEQ ID NO: 428634 - RNA, 19 nt, Artificial Sequence
  Description of Artificial Sequence: Synthetic oligonucleotide
caugggcugucuauuaagg

SEQ ID NO: 428635 - RNA, 19 nt, Artificial Sequence
  Description of Artificial Sequence: Synthetic oligonucleotide
agcaauugccauuauucca

SEQ ID NO: 428636 - RNA, 19 nt, Artificial Sequence
  Description of Artificial Sequence: Synthetic oligonucleotide
uaugaccgguagaaaacag

SEQ ID NO: 428637 - RNA, 19 nt, Artificial Sequence
  Description of Artificial Sequence: Synthetic oligonucleotide
caagaaucauugaugggug

SEQ ID NO: 428638 - RNA, 19 nt, Artificial Sequence
  Description of Artificial Sequence: Synthetic oligonucleotide
ugaggguuaccauaaccug

SEQ ID NO: 428639 - RNA, 19 nt, Artificial Sequence
  Description of Artificial Sequence: Synthetic oligonucleotide
ucgauuagugcucuccaac

SEQ ID NO: 428640 - RNA, 19 nt, Artificial Sequence
  Description of Artificial Sequence: Synthetic oligonucleotide
aagcgcagauacuccauag

SEQ ID NO: 428641 - RNA, 19 nt, Artificial Sequence
  Description of Artificial Sequence: Synthetic oligonucleotide
uggaacaauaagcuacuuc

SEQ ID NO: 428642 - RNA, 19 nt, Artificial Sequence
  Description of Artificial Sequence: Synthetic oligonucleotide
cagacaccaagaaucauug

SEQ ID NO: 428643 - RNA, 19 nt, Artificial Sequence
  Description of Artificial Sequence: Synthetic oligonucleotide
gaguagaugcaaaugucag

SEQ ID NO: 428644 - RNA, 19 nt, Artificial Sequence
  Description of Artificial Sequence: Synthetic oligonucleotide
ucugauaucucugaucaua

SEQ ID NO: 428645 - RNA, 19 nt, Artificial Sequence
  Description of Artificial Sequence: Synthetic oligonucleotide
uggaauucuaacagagcgu

SEQ ID NO: 428646 - RNA, 19 nt, Artificial Sequence
  Description of Artificial Sequence: Synthetic oligonucleotide
ggaacaauaagcuacuucu

SEQ ID NO: 428647 - RNA, 19 nt, Artificial Sequence
  Description of Artificial Sequence: Synthetic oligonucleotide
cauucgaggugcaauacuc

SEQ ID NO: 428648 - RNA, 19 nt, Artificial Sequence
  Description of Artificial Sequence: Synthetic oligonucleotide
ggauuuaugaugauaucag

SEQ ID NO: 428649 - RNA, 19 nt, Artificial Sequence
  Description of Artificial Sequence: Synthetic oligonucleotide
ucgaccagugaauccauug

SEQ ID NO: 428650 - RNA, 19 nt, Artificial Sequence
  Description of Artificial Sequence: Synthetic oligonucleotide
aagaguauuuuagcccauc

SEQ ID NO: 428651 - RNA, 19 nt, Artificial Sequence
  Description of Artificial Sequence: Synthetic oligonucleotide
uucaacuggucaauguguc

SEQ ID NO: 428652 - RNA, 19 nt, Artificial Sequence
  Description of Artificial Sequence: Synthetic oligonucleotide
uuuaaacgacgaaggugag

SEQ ID NO: 428653 - RNA, 19 nt, Artificial Sequence
  Description of Artificial Sequence: Synthetic oligonucleotide
ucuugucuauacugaauac

SEQ ID NO: 428654 - RNA, 19 nt, Artificial Sequence
  Description of Artificial Sequence: Synthetic oligonucleotide
aucgcgacaauugaguuga

SEQ ID NO: 428655 - RNA, 19 nt, Artificial Sequence
  Description of Artificial Sequence: Synthetic oligonucleotide
aagcaaucgcgacaauuga

SEQ ID NO: 428656 - RNA, 19 nt, Artificial Sequence
  Description of Artificial Sequence: Synthetic oligonucleotide
uagaugcaaaugucaggcg

SEQ ID NO: 428657 - RNA, 19 nt, Artificial Sequence
  Description of Artificial Sequence: Synthetic oligonucleotide
ugacaucauccccugacac

SEQ ID NO: 428658 - RNA, 19 nt, Artificial Sequence
  Description of Artificial Sequence: Synthetic oligonucleotide
augauccguguuuuaauug

SEQ ID NO: 428659 - RNA, 19 nt, Artificial Sequence
  Description of Artificial Sequence: Synthetic oligonucleotide
uguaaaucaucuggaguca

SEQ ID NO: 428660 - RNA, 19 nt, Artificial Sequence
  Description of Artificial Sequence: Synthetic oligonucleotide
agaguauuuuagcccauca

SEQ ID NO: 428661 - RNA, 19 nt, Artificial Sequence
  Description of Artificial Sequence: Synthetic oligonucleotide
aaggugacugucuugccua

SEQ ID NO: 428662 - RNA, 19 nt, Artificial Sequence
  Description of Artificial Sequence: Synthetic oligonucleotide
uaugauccguguuuuaauu

SEQ ID NO: 428663 - RNA, 19 nt, Artificial Sequence
  Description of Artificial Sequence: Synthetic oligonucleotide
cguauaugaagcaaucgcg

SEQ ID NO: 428664 - RNA, 19 nt, Artificial Sequence
  Description of Artificial Sequence: Synthetic oligonucleotide
auacugaauaccacaagug

SEQ ID NO: 428665 - RNA, 19 nt, Artificial Sequence
  Description of Artificial Sequence: Synthetic oligonucleotide
auccgaacaugaaaguugg

SEQ ID NO: 428666 - RNA, 19 nt, Artificial Sequence
  Description of Artificial Sequence: Synthetic oligonucleotide
acgagaucuacccuccaug

SEQ ID NO: 428667 - RNA, 19 nt, Artificial Sequence
  Description of Artificial Sequence: Synthetic oligonucleotide
aacaguuugcacgcauaag

SEQ ID NO: 428668 - RNA, 19 nt, Artificial Sequence
  Description of Artificial Sequence: Synthetic oligonucleotide
auugacagcgucauuaaau

SEQ ID NO: 428669 - RNA, 19 nt, Artificial Sequence
  Description of Artificial Sequence: Synthetic oligonucleotide
ugacacacgaaccccugga

SEQ ID NO: 428670 - RNA, 19 nt, Artificial Sequence
  Description of Artificial Sequence: Synthetic oligonucleotide
ugggcaaucugacaaucuc

SEQ ID NO: 428671 - RNA, 19 nt, Artificial Sequence
  Description of Artificial Sequence: Synthetic oligonucleotide
guauagauccgaaucuccc

SEQ ID NO: 428672 - RNA, 19 nt, Artificial Sequence
  Description of Artificial Sequence: Synthetic oligonucleotide
uauguggaacaauaagcua

SEQ ID NO: 428673 - RNA, 19 nt, Artificial Sequence
  Description of Artificial Sequence: Synthetic oligonucleotide
guuuuguuucggcagcccc

SEQ ID NO: 428674 - RNA, 19 nt, Artificial Sequence
  Description of Artificial Sequence: Synthetic oligonucleotide
uucgagaagggauggcaug

SEQ ID NO: 428675 - RNA, 19 nt, Artificial Sequence
  Description of Artificial Sequence: Synthetic oligonucleotide
auagaacuaaacacucauc

SEQ ID NO: 428676 - RNA, 19 nt, Artificial Sequence
  Description of Artificial Sequence: Synthetic oligonucleotide
acuuauauccuuccugguu

SEQ ID NO: 428677 - RNA, 19 nt, Artificial Sequence
  Description of Artificial Sequence: Synthetic oligonucleotide
uaguaaguggggccaauaa

SEQ ID NO: 428678 - RNA, 19 nt, Artificial Sequence
  Description of Artificial Sequence: Synthetic oligonucleotide
gcgacaauugaguugauuc

SEQ ID NO: 428679 - RNA, 19 nt, Artificial Sequence
  Description of Artificial Sequence: Synthetic oligonucleotide
guaaucagauaagagauua

SEQ ID NO: 428680 - RNA, 19 nt, Artificial Sequence
  Description of Artificial Sequence: Synthetic oligonucleotide
ugauuauagcccguauaug

SEQ ID NO: 428681 - RNA, 19 nt, Artificial Sequence
  Description of Artificial Sequence: Synthetic oligonucleotide
ggaguuaugccuucacaag

SEQ ID NO: 428682 - RNA, 19 nt, Artificial Sequence
  Description of Artificial Sequence: Synthetic oligonucleotide
aguuguucgggaucuuugu

SEQ ID NO: 428683 - RNA, 19 nt, Artificial Sequence
  Description of Artificial Sequence: Synthetic oligonucleotide
cagcuugccgucucuaccg

SEQ ID NO: 428684 - RNA, 19 nt, Artificial Sequence
  Description of Artificial Sequence: Synthetic oligonucleotide
auaugauccguguuuuaau

SEQ ID NO: 428685 - RNA, 19 nt, Artificial Sequence
  Description of Artificial Sequence: Synthetic oligonucleotide
uuaugccuucacaaguaaa

SEQ ID NO: 428686 - RNA, 19 nt, Artificial Sequence
  Description of Artificial Sequence: Synthetic oligonucleotide
agcguauuaugcaacuguc

SEQ ID NO: 428687 - RNA, 19 nt, Artificial Sequence
  Description of Artificial Sequence: Synthetic oligonucleotide
ucgaggugcaauacucaug

SEQ ID NO: 428688 - RNA, 19 nt, Artificial Sequence
  Description of Artificial Sequence: Synthetic oligonucleotide
cucgagaaugaauuuuguc

SEQ ID NO: 428689 - RNA, 19 nt, Artificial Sequence
  Description of Artificial Sequence: Synthetic oligonucleotide
cuaaacacucaucauucga

SEQ ID NO: 428690 - RNA, 19 nt, Artificial Sequence
  Description of Artificial Sequence: Synthetic oligonucleotide
uagaguaccucguuuccuc

SEQ ID NO: 428691 - RNA, 19 nt, Artificial Sequence
  Description of Artificial Sequence: Synthetic oligonucleotide
guaaguggggccaauaaaa

SEQ ID NO: 428692 - RNA, 19 nt, Artificial Sequence
  Description of Artificial Sequence: Synthetic oligonucleotide
ugucuugccuaugaugaca

SEQ ID NO: 428693 - RNA, 19 nt, Artificial Sequence
  Description of Artificial Sequence: Synthetic oligonucleotide
gaaguggucuacagauacg

SEQ ID NO: 428694 - RNA, 19 nt, Artificial Sequence
  Description of Artificial Sequence: Synthetic oligonucleotide
ugucggcuagcaaauuugu

SEQ ID NO: 428695 - RNA, 19 nt, Artificial Sequence
  Description of Artificial Sequence: Synthetic oligonucleotide
guauguguuucuaggagac

SEQ ID NO: 428696 - RNA, 19 nt, Artificial Sequence
  Description of Artificial Sequence: Synthetic oligonucleotide
gccguaaucagauaagaga

SEQ ID NO: 428697 - RNA, 19 nt, Artificial Sequence
  Description of Artificial Sequence: Synthetic oligonucleotide
aauccauuguagaguaccu

SEQ ID NO: 428698 - RNA, 19 nt, Artificial Sequence
  Description of Artificial Sequence: Synthetic oligonucleotide
guauaugaagcaaucgcga

SEQ ID NO: 428699 - RNA, 19 nt, Artificial Sequence
  Description of Artificial Sequence: Synthetic oligonucleotide
agagcguacccuuauuuua

SEQ ID NO: 428700 - RNA, 19 nt, Artificial Sequence
  Description of Artificial Sequence: Synthetic oligonucleotide
ccuacugaaauauaagcca

SEQ ID NO: 428701 - RNA, 19 nt, Artificial Sequence
  Description of Artificial Sequence: Synthetic oligonucleotide
cuuuguaugaccgguagaa

SEQ ID NO: 428702 - RNA, 19 nt, Artificial Sequence
  Description of Artificial Sequence: Synthetic oligonucleotide
ucucucuugguguaccguc

SEQ ID NO: 428703 - RNA, 19 nt, Artificial Sequence
  Description of Artificial Sequence: Synthetic oligonucleotide
ggcauggggauuuaugaug

SEQ ID NO: 428704 - RNA, 19 nt, Artificial Sequence
  Description of Artificial Sequence: Synthetic oligonucleotide
aauugccauuauuccacaa

SEQ ID NO: 428705 - RNA, 19 nt, Artificial Sequence
  Description of Artificial Sequence: Synthetic oligonucleotide
agaacgugggccaagguau

SEQ ID NO: 428706 - RNA, 19 nt, Artificial Sequence
  Description of Artificial Sequence: Synthetic oligonucleotide
ccguauaugaagcaaucgc

SEQ ID NO: 428707 - RNA, 19 nt, Artificial Sequence
  Description of Artificial Sequence: Synthetic oligonucleotide
ucuugauuauagcccguau

SEQ ID NO: 428708 - RNA, 19 nt, Artificial Sequence
  Description of Artificial Sequence: Synthetic oligonucleotide
uuucacccuuguuagcaga

SEQ ID NO: 428709 - RNA, 19 nt, Artificial Sequence
  Description of Artificial Sequence: Synthetic oligonucleotide
uaugcuucaaacgcuggua

SEQ ID NO: 428710 - RNA, 19 nt, Artificial Sequence
  Description of Artificial Sequence: Synthetic oligonucleotide
uccccacagcguauuaugc

SEQ ID NO: 428711 - RNA, 19 nt, Artificial Sequence
  Description of Artificial Sequence: Synthetic oligonucleotide
uguuucggcagccccugca

SEQ ID NO: 428712 - RNA, 19 nt, Artificial Sequence
  Description of Artificial Sequence: Synthetic oligonucleotide
caucugacgucguaauuuc

SEQ ID NO: 428713 - RNA, 19 nt, Artificial Sequence
  Description of Artificial Sequence: Synthetic oligonucleotide
uuucugaggguaguagaga

SEQ ID NO: 428714 - RNA, 19 nt, Artificial Sequence
  Description of Artificial Sequence: Synthetic oligonucleotide
uuuguuucggcagccccug

SEQ ID NO: 428715 - RNA, 19 nt, Artificial Sequence
  Description of Artificial Sequence: Synthetic oligonucleotide
acagcgucauuaaauggag

SEQ ID NO: 428716 - RNA, 19 nt, Artificial Sequence
  Description of Artificial Sequence: Synthetic oligonucleotide
gggauuuaugaugauauca

SEQ ID NO: 428717 - RNA, 19 nt, Artificial Sequence
  Description of Artificial Sequence: Synthetic oligonucleotide
uuaaacgacgaaggugaga

SEQ ID NO: 428718 - RNA, 19 nt, Artificial Sequence
  Description of Artificial Sequence: Synthetic oligonucleotide
ugguguaccgucgauuagu

SEQ ID NO: 428719 - RNA, 19 nt, Artificial Sequence
  Description of Artificial Sequence: Synthetic oligonucleotide
gauccguguuuuaauugcc

SEQ ID NO: 428720 - RNA, 19 nt, Artificial Sequence
  Description of Artificial Sequence: Synthetic oligonucleotide
ugguguuagcaauugccau

SEQ ID NO: 428721 - RNA, 19 nt, Artificial Sequence
  Description of Artificial Sequence: Synthetic oligonucleotide
agugaccaauugucauucg

SEQ ID NO: 428722 - RNA, 19 nt, Artificial Sequence
  Description of Artificial Sequence: Synthetic oligonucleotide
ucgauccacagcugaacga

SEQ ID NO: 428723 - RNA, 19 nt, Artificial Sequence
  Description of Artificial Sequence: Synthetic oligonucleotide
cauagaaacuucagauaca

SEQ ID NO: 428724 - RNA, 19 nt, Artificial Sequence
  Description of Artificial Sequence: Synthetic oligonucleotide
cauugaugggugaaucuca

SEQ ID NO: 428725 - RNA, 19 nt, Artificial Sequence
  Description of Artificial Sequence: Synthetic oligonucleotide
aggaucugaauaggucccc

SEQ ID NO: 428726 - RNA, 19 nt, Artificial Sequence
  Description of Artificial Sequence: Synthetic oligonucleotide
uaaagcgcagauacuccau

SEQ ID NO: 428727 - RNA, 19 nt, Artificial Sequence
  Description of Artificial Sequence: Synthetic oligonucleotide
uugguguaccgucgauuag

SEQ ID NO: 428728 - RNA, 19 nt, Artificial Sequence
  Description of Artificial Sequence: Synthetic oligonucleotide
aguaccucguuuccucuga

SEQ ID NO: 428729 - RNA, 19 nt, Artificial Sequence
  Description of Artificial Sequence: Synthetic oligonucleotide
guagccguaaucagauaag

SEQ ID NO: 428730 - RNA, 19 nt, Artificial Sequence
  Description of Artificial Sequence: Synthetic oligonucleotide
agucaucgcaagcaucacu

SEQ ID NO: 428731 - RNA, 19 nt, Artificial Sequence
  Description of Artificial Sequence: Synthetic oligonucleotide
cauccccugacacacgaac

SEQ ID NO: 428732 - RNA, 19 nt, Artificial Sequence
  Description of Artificial Sequence: Synthetic oligonucleotide
gaguuaugccuucacaagu

SEQ ID NO: 428733 - RNA, 19 nt, Artificial Sequence
  Description of Artificial Sequence: Synthetic oligonucleotide
cauucaaucaagugaccaa

SEQ ID NO: 428734 - RNA, 19 nt, Artificial Sequence
  Description of Artificial Sequence: Synthetic oligonucleotide
ugauagggaucugaugccu

SEQ ID NO: 428735 - RNA, 19 nt, Artificial Sequence
  Description of Artificial Sequence: Synthetic oligonucleotide
uagccguaaucagauaaga

SEQ ID NO: 428736 - RNA, 19 nt, Artificial Sequence
  Description of Artificial Sequence: Synthetic oligonucleotide
uacagugucuugccgugaa

SEQ ID NO: 428737 - RNA, 19 nt, Artificial Sequence
  Description of Artificial Sequence: Synthetic oligonucleotide
auagcccguauaugaagca

SEQ ID NO: 428738 - RNA, 19 nt, Artificial Sequence
  Description of Artificial Sequence: Synthetic oligonucleotide
acagagcguacccuuauuu

SEQ ID NO: 428739 - RNA, 19 nt, Artificial Sequence
  Description of Artificial Sequence: Synthetic oligonucleotide
auccauuguagaguaccuc

SEQ ID NO: 428740 - RNA, 19 nt, Artificial Sequence
  Description of Artificial Sequence: Synthetic oligonucleotide
uccccuagcucgagaauga

SEQ ID NO: 428741 - RNA, 19 nt, Artificial Sequence
  Description of Artificial Sequence: Synthetic oligonucleotide
auacaaugauguccaucug

SEQ ID NO: 428742 - RNA, 19 nt, Artificial Sequence
  Description of Artificial Sequence: Synthetic oligonucleotide
gguagccguaaucagauaa

SEQ ID NO: 428743 - RNA, 19 nt, Artificial Sequence
  Description of Artificial Sequence: Synthetic oligonucleotide
agcaaucgcgacaauugag

SEQ ID NO: 428744 - RNA, 19 nt, Artificial Sequence
  Description of Artificial Sequence: Synthetic oligonucleotide
uaaacucccauagccugcu

SEQ ID NO: 428745 - RNA, 19 nt, Artificial Sequence
  Description of Artificial Sequence: Synthetic oligonucleotide
agaccgcguagucacaagu

SEQ ID NO: 428746 - RNA, 19 nt, Artificial Sequence
  Description of Artificial Sequence: Synthetic oligonucleotide
cuugguguaccgucgauua

SEQ ID NO: 428747 - RNA, 19 nt, Artificial Sequence
  Description of Artificial Sequence: Synthetic oligonucleotide
cuugauuauagcccguaua

SEQ ID NO: 428748 - RNA, 19 nt, Artificial Sequence
  Description of Artificial Sequence: Synthetic oligonucleotide
gagcguacccuuauuuuac

SEQ ID NO: 428749 - RNA, 19 nt, Artificial Sequence
  Description of Artificial Sequence: Synthetic oligonucleotide
auuauagcccguauaugaa

SEQ ID NO: 428750 - RNA, 19 nt, Artificial Sequence
  Description of Artificial Sequence: Synthetic oligonucleotide
ccauagaccgcguagucac

SEQ ID NO: 428751 - RNA, 19 nt, Artificial Sequence
  Description of Artificial Sequence: Synthetic oligonucleotide
cuguauagauccgaaucuc

SEQ ID NO: 428752 - RNA, 19 nt, Artificial Sequence
  Description of Artificial Sequence: Synthetic oligonucleotide
uuuguaugaccgguagaaa

SEQ ID NO: 428753 - RNA, 19 nt, Artificial Sequence
  Description of Artificial Sequence: Synthetic oligonucleotide
gucguaauuuccuuagagu

SEQ ID NO: 428754 - RNA, 19 nt, Artificial Sequence
  Description of Artificial Sequence: Synthetic oligonucleotide
uuugcacgcauaaggcauu

SEQ ID NO: 428755 - RNA, 19 nt, Artificial Sequence
  Description of Artificial Sequence: Synthetic oligonucleotide
gugaccaauugucauucga

SEQ ID NO: 428756 - RNA, 19 nt, Artificial Sequence
  Description of Artificial Sequence: Synthetic oligonucleotide
augucggcuagcaaauuug

SEQ ID NO: 428757 - RNA, 19 nt, Artificial Sequence
  Description of Artificial Sequence: Synthetic oligonucleotide
agggugucaauguauucua

SEQ ID NO: 428758 - RNA, 19 nt, Artificial Sequence
  Description of Artificial Sequence: Synthetic oligonucleotide
agcgcagauacuccauaga

SEQ ID NO: 428759 - RNA, 19 nt, Artificial Sequence
  Description of Artificial Sequence: Synthetic oligonucleotide
agauacggccugcaucugu

SEQ ID NO: 428760 - RNA, 19 nt, Artificial Sequence
  Description of Artificial Sequence: Synthetic oligonucleotide
aucugacgucguaauuucc

SEQ ID NO: 428761 - RNA, 19 nt, Artificial Sequence
  Description of Artificial Sequence: Synthetic oligonucleotide
uucgggaucuuuguggauu

SEQ ID NO: 428762 - RNA, 19 nt, Artificial Sequence
  Description of Artificial Sequence: Synthetic oligonucleotide
aucgcugcaggagaaauuu

SEQ ID NO: 428763 - RNA, 19 nt, Artificial Sequence
  Description of Artificial Sequence: Synthetic oligonucleotide
uucggcagccccugcauuc

SEQ ID NO: 428764 - RNA, 19 nt, Artificial Sequence
  Description of Artificial Sequence: Synthetic oligonucleotide
cugacacacgaaccccugg

SEQ ID NO: 428765 - RNA, 19 nt, Artificial Sequence
  Description of Artificial Sequence: Synthetic oligonucleotide
augguagccguaaucagau

SEQ ID NO: 428766 - RNA, 19 nt, Artificial Sequence
  Description of Artificial Sequence: Synthetic oligonucleotide
gaccgguagaaaacagacc

SEQ ID NO: 428767 - RNA, 19 nt, Artificial Sequence
  Description of Artificial Sequence: Synthetic oligonucleotide
ugacgucguaauuuccuua

SEQ ID NO: 428768 - RNA, 19 nt, Artificial Sequence
  Description of Artificial Sequence: Synthetic oligonucleotide
aacagagcguacccuuauu

SEQ ID NO: 428769 - RNA, 19 nt, Artificial Sequence
  Description of Artificial Sequence: Synthetic oligonucleotide
uccuuuccacgaucaauaa

SEQ ID NO: 428770 - RNA, 19 nt, Artificial Sequence
  Description of Artificial Sequence: Synthetic oligonucleotide
guaugaccgguagaaaaca

SEQ ID NO: 428771 - RNA, 19 nt, Artificial Sequence
  Description of Artificial Sequence: Synthetic oligonucleotide
uagauccgaaucucccgcu

SEQ ID NO: 428772 - RNA, 19 nt, Artificial Sequence
  Description of Artificial Sequence: Synthetic oligonucleotide
uuucgaccagugaauccau

SEQ ID NO: 428773 - RNA, 19 nt, Artificial Sequence
  Description of Artificial Sequence: Synthetic oligonucleotide
agguaaggugacugucuug

SEQ ID NO: 428774 - RNA, 19 nt, Artificial Sequence
  Description of Artificial Sequence: Synthetic oligonucleotide
gcacgcauaaggcauucgc

SEQ ID NO: 428775 - RNA, 19 nt, Artificial Sequence
  Description of Artificial Sequence: Synthetic oligonucleotide
cauucgagaagggauggca

SEQ ID NO: 428776 - RNA, 19 nt, Artificial Sequence
  Description of Artificial Sequence: Synthetic oligonucleotide
agugucuugccgugaacuu

SEQ ID NO: 428777 - RNA, 19 nt, Artificial Sequence
  Description of Artificial Sequence: Synthetic oligonucleotide
gcgucauuaaauggagugg

SEQ ID NO: 428778 - RNA, 19 nt, Artificial Sequence
  Description of Artificial Sequence: Synthetic oligonucleotide
cugcaucuguauagauccg

SEQ ID NO: 428779 - RNA, 19 nt, Artificial Sequence
  Description of Artificial Sequence: Synthetic oligonucleotide
uagaccgcguagucacaag

SEQ ID NO: 428780 - RNA, 19 nt, Artificial Sequence
  Description of Artificial Sequence: Synthetic oligonucleotide
gaauucuaacagagcguac

SEQ ID NO: 428781 - RNA, 19 nt, Artificial Sequence
  Description of Artificial Sequence: Synthetic oligonucleotide
ucugacaaucucguuccau

SEQ ID NO: 428782 - RNA, 19 nt, Artificial Sequence
  Description of Artificial Sequence: Synthetic oligonucleotide
gaccgcguagucacaagug

SEQ ID NO: 428783 - RNA, 19 nt, Artificial Sequence
  Description of Artificial Sequence: Synthetic oligonucleotide
guuaugccuucacaaguaa

SEQ ID NO: 428784 - RNA, 19 nt, Artificial Sequence
  Description of Artificial Sequence: Synthetic oligonucleotide
aguuaugccuucacaagua

SEQ ID NO: 428785 - RNA, 19 nt, Artificial Sequence
  Description of Artificial Sequence: Synthetic oligonucleotide
caucauucgaggugcaaua

SEQ ID NO: 428786 - RNA, 19 nt, Artificial Sequence
  Description of Artificial Sequence: Synthetic oligonucleotide
agcguacccuuauuuuaca

SEQ ID NO: 428787 - RNA, 19 nt, Artificial Sequence
  Description of Artificial Sequence: Synthetic oligonucleotide
uggagcuaucaagccauca

SEQ ID NO: 428788 - RNA, 19 nt, Artificial Sequence
  Description of Artificial Sequence: Synthetic oligonucleotide
gcgguuuaauaccugggac

SEQ ID NO: 428789 - RNA, 19 nt, Artificial Sequence
  Description of Artificial Sequence: Synthetic oligonucleotide
augaccgguagaaaacaga

SEQ ID NO: 428790 - RNA, 19 nt, Artificial Sequence
  Description of Artificial Sequence: Synthetic oligonucleotide
cuacugaaauauaagccau

SEQ ID NO: 428791 - RNA, 19 nt, Artificial Sequence
  Description of Artificial Sequence: Synthetic oligonucleotide
ccgaacaugaaaguuggug

SEQ ID NO: 428792 - RNA, 19 nt, Artificial Sequence
  Description of Artificial Sequence: Synthetic oligonucleotide
ucuugguguaccgucgauu

SEQ ID NO: 428793 - RNA, 19 nt, Artificial Sequence
  Description of Artificial Sequence: Synthetic oligonucleotide
uagcucgagaaugaauuuu

SEQ ID NO: 428794 - RNA, 19 nt, Artificial Sequence
  Description of Artificial Sequence: Synthetic oligonucleotide
uccaucugacgucguaauu

SEQ ID NO: 428795 - RNA, 19 nt, Artificial Sequence
  Description of Artificial Sequence: Synthetic oligonucleotide
cgagaucuacccuccaugg

SEQ ID NO: 428796 - RNA, 19 nt, Artificial Sequence
  Description of Artificial Sequence: Synthetic oligonucleotide
gaugcaaaugucaggcggu

SEQ ID NO: 428797 - RNA, 19 nt, Artificial Sequence
  Description of Artificial Sequence: Synthetic oligonucleotide
ugcacgcauaaggcauucg

SEQ ID NO: 428798 - RNA, 19 nt, Artificial Sequence
  Description of Artificial Sequence: Synthetic oligonucleotide
uggcuucgccagcuugccg

SEQ ID NO: 428799 - RNA, 19 nt, Artificial Sequence
  Description of Artificial Sequence: Synthetic oligonucleotide
caaucucguuccauuucuc

SEQ ID NO: 428800 - RNA, 19 nt, Artificial Sequence
  Description of Artificial Sequence: Synthetic oligonucleotide
aggcgguuuaauaccuggg

SEQ ID NO: 428801 - RNA, 19 nt, Artificial Sequence
  Description of Artificial Sequence: Synthetic oligonucleotide
gggaucugaugccucaaac

SEQ ID NO: 428802 - RNA, 19 nt, Artificial Sequence
  Description of Artificial Sequence: Synthetic oligonucleotide
cugucuugccuaugaugac

SEQ ID NO: 428803 - RNA, 19 nt, Artificial Sequence
  Description of Artificial Sequence: Synthetic oligonucleotide
gggagaauuuaaacgacga

SEQ ID NO: 428804 - RNA, 19 nt, Artificial Sequence
  Description of Artificial Sequence: Synthetic oligonucleotide
uuggcuucgccagcuugcc

SEQ ID NO: 428805 - RNA, 19 nt, Artificial Sequence
  Description of Artificial Sequence: Synthetic oligonucleotide
cauauguaugaguucuggu

SEQ ID NO: 428806 - RNA, 19 nt, Artificial Sequence
  Description of Artificial Sequence: Synthetic oligonucleotide
cgucauuaaauggaguggc

SEQ ID NO: 428807 - RNA, 19 nt, Artificial Sequence
  Description of Artificial Sequence: Synthetic oligonucleotide
ggcgguuuaauaccuggga

SEQ ID NO: 428808 - RNA, 19 nt, Artificial Sequence
  Description of Artificial Sequence: Synthetic oligonucleotide
cgucguaauuuccuuagag

SEQ ID NO: 428809 - RNA, 19 nt, Artificial Sequence
  Description of Artificial Sequence: Synthetic oligonucleotide
guagagaacgugggccaag

SEQ ID NO: 428810 - RNA, 19 nt, Artificial Sequence
  Description of Artificial Sequence: Synthetic oligonucleotide
ccguguuuuaauugccagc

SEQ ID NO: 428811 - RNA, 19 nt, Artificial Sequence
  Description of Artificial Sequence: Synthetic oligonucleotide
uacggccugcaucuguaua

SEQ ID NO: 428812 - RNA, 19 nt, Artificial Sequence
  Description of Artificial Sequence: Synthetic oligonucleotide
uccgaacaugaaaguuggu

SEQ ID NO: 428813 - RNA, 19 nt, Artificial Sequence
  Description of Artificial Sequence: Synthetic oligonucleotide
uagcccguauaugaagcaa

SEQ ID NO: 428814 - RNA, 19 nt, Artificial Sequence
  Description of Artificial Sequence: Synthetic oligonucleotide
agagaacgugggccaaggu

SEQ ID NO: 428815 - RNA, 19 nt, Artificial Sequence
  Description of Artificial Sequence: Synthetic oligonucleotide
caggaguuaugccuucaca

SEQ ID NO: 428816 - RNA, 19 nt, Artificial Sequence
  Description of Artificial Sequence: Synthetic oligonucleotide
acgucguaauuuccuuaga

SEQ ID NO: 428817 - RNA, 19 nt, Artificial Sequence
  Description of Artificial Sequence: Synthetic oligonucleotide
auggggauuuaugaugaua

SEQ ID NO: 428818 - RNA, 19 nt, Artificial Sequence
  Description of Artificial Sequence: Synthetic oligonucleotide
acgacgaaggugagaaaga

SEQ ID NO: 428819 - RNA, 19 nt, Artificial Sequence
  Description of Artificial Sequence: Synthetic oligonucleotide
cugguaguaaguggggcca

SEQ ID NO: 428820 - RNA, 19 nt, Artificial Sequence
  Description of Artificial Sequence: Synthetic oligonucleotide
ccaugggcugucuauuaag

SEQ ID NO: 428821 - RNA, 19 nt, Artificial Sequence
  Description of Artificial Sequence: Synthetic oligonucleotide
auagaccgcguagucacaa

SEQ ID NO: 428822 - RNA, 19 nt, Artificial Sequence
  Description of Artificial Sequence: Synthetic oligonucleotide
guguaccgucgauuagugc

SEQ ID NO: 428823 - RNA, 19 nt, Artificial Sequence
  Description of Artificial Sequence: Synthetic oligonucleotide
auccguguuuuaauugcca

SEQ ID NO: 428824 - RNA, 19 nt, Artificial Sequence
  Description of Artificial Sequence: Synthetic oligonucleotide
caucagauaugauccgugu

SEQ ID NO: 428825 - RNA, 19 nt, Artificial Sequence
  Description of Artificial Sequence: Synthetic oligonucleotide
cagcguauuaugcaacugu

SEQ ID NO: 428826 - RNA, 19 nt, Artificial Sequence
  Description of Artificial Sequence: Synthetic oligonucleotide
gucuauuaaggaucugaau

SEQ ID NO: 428827 - RNA, 19 nt, Artificial Sequence
  Description of Artificial Sequence: Synthetic oligonucleotide
cuaacagagcguacccuua

SEQ ID NO: 428828 - RNA, 19 nt, Artificial Sequence
  Description of Artificial Sequence: Synthetic oligonucleotide
ccaagaaucauugaugggu

SEQ ID NO: 428829 - RNA, 19 nt, Artificial Sequence
  Description of Artificial Sequence: Synthetic oligonucleotide
cccguauaugaagcaaucg

SEQ ID NO: 428830 - RNA, 19 nt, Artificial Sequence
  Description of Artificial Sequence: Synthetic oligonucleotide
gucgauuagugcucuccaa

SEQ ID NO: 428831 - RNA, 19 nt, Artificial Sequence
  Description of Artificial Sequence: Synthetic oligonucleotide
gcauggggauuuaugauga

SEQ ID NO: 428832 - RNA, 19 nt, Artificial Sequence
  Description of Artificial Sequence: Synthetic oligonucleotide
gguguaccgucgauuagug

SEQ ID NO: 428833 - RNA, 19 nt, Artificial Sequence
  Description of Artificial Sequence: Synthetic oligonucleotide
ucgcugcaggagaaauuuc

SEQ ID NO: 428834 - RNA, 19 nt, Artificial Sequence
  Description of Artificial Sequence: Synthetic oligonucleotide
uuucggcagccccugcauu

SEQ ID NO: 428835 - RNA, 19 nt, Artificial Sequence
  Description of Artificial Sequence: Synthetic oligonucleotide
guaccgucgauuagugcuc

SEQ ID NO: 428836 - RNA, 19 nt, Artificial Sequence
  Description of Artificial Sequence: Synthetic oligonucleotide
ccguaaucagauaagagau

SEQ ID NO: 428837 - RNA, 19 nt, Artificial Sequence
  Description of Artificial Sequence: Synthetic oligonucleotide
guagucacaagugguuucu

SEQ ID NO: 428838 - RNA, 19 nt, Artificial Sequence
  Description of Artificial Sequence: Synthetic oligonucleotide
uucgaccagugaauccauu

SEQ ID NO: 428839 - RNA, 19 nt, Artificial Sequence
  Description of Artificial Sequence: Synthetic oligonucleotide
aucugacaaucucguucca

SEQ ID NO: 428840 - RNA, 19 nt, Artificial Sequence
  Description of Artificial Sequence: Synthetic oligonucleotide
guauccauccgaacaugaa

SEQ ID NO: 428841 - RNA, 19 nt, Artificial Sequence
  Description of Artificial Sequence: Synthetic oligonucleotide
caccauuccccacagcgua

SEQ ID NO: 428842 - RNA, 19 nt, Artificial Sequence
  Description of Artificial Sequence: Synthetic oligonucleotide
cccauagcagacugguaug

SEQ ID NO: 428843 - RNA, 19 nt, Artificial Sequence
  Description of Artificial Sequence: Synthetic oligonucleotide
accgucgauuagugcucuc

SEQ ID NO: 428844 - RNA, 19 nt, Artificial Sequence
  Description of Artificial Sequence: Synthetic oligonucleotide
agcuugccgucucuaccga

SEQ ID NO: 428845 - RNA, 19 nt, Artificial Sequence
  Description of Artificial Sequence: Synthetic oligonucleotide
gcauucauauguaugaguu

SEQ ID NO: 428846 - RNA, 19 nt, Artificial Sequence
  Description of Artificial Sequence: Synthetic oligonucleotide
uggguguauguggaacaau

SEQ ID NO: 428847 - RNA, 19 nt, Artificial Sequence
  Description of Artificial Sequence: Synthetic oligonucleotide
auacuccauagaccgcgua

SEQ ID NO: 428848 - RNA, 19 nt, Artificial Sequence
  Description of Artificial Sequence: Synthetic oligonucleotide
caagugaccaauugucauu

SEQ ID NO: 428849 - RNA, 19 nt, Artificial Sequence
  Description of Artificial Sequence: Synthetic oligonucleotide
gccgugaacuuccaauaga

SEQ ID NO: 428850 - RNA, 19 nt, Artificial Sequence
  Description of Artificial Sequence: Synthetic oligonucleotide
uaccgucgauuagugcucu

SEQ ID NO: 428851 - RNA, 19 nt, Artificial Sequence
  Description of Artificial Sequence: Synthetic oligonucleotide
ucggcagccccugcauuca

SEQ ID NO: 428852 - RNA, 19 nt, Artificial Sequence
  Description of Artificial Sequence: Synthetic oligonucleotide
uugcacgcauaaggcauuc

SEQ ID NO: 428853 - RNA, 19 nt, Artificial Sequence
  Description of Artificial Sequence: Synthetic oligonucleotide
cacguguaggcuucucaaa

SEQ ID NO: 428854 - RNA, 19 nt, Artificial Sequence
  Description of Artificial Sequence: Synthetic oligonucleotide
ggguguauguggaacaaua

SEQ ID NO: 428855 - RNA, 19 nt, Artificial Sequence
  Description of Artificial Sequence: Synthetic oligonucleotide
ccgugaacuuccaauagaa

SEQ ID NO: 428856 - RNA, 19 nt, Artificial Sequence
  Description of Artificial Sequence: Synthetic oligonucleotide
ccuagcucgagaaugaauu

SEQ ID NO: 428857 - RNA, 19 nt, Artificial Sequence
  Description of Artificial Sequence: Synthetic oligonucleotide
ggccaagguauccauccga

SEQ ID NO: 428858 - RNA, 19 nt, Artificial Sequence
  Description of Artificial Sequence: Synthetic oligonucleotide
auagaugcacagacaccaa

SEQ ID NO: 428859 - RNA, 19 nt, Artificial Sequence
  Description of Artificial Sequence: Synthetic oligonucleotide
gucggcuagcaaauuuguc

SEQ ID NO: 428860 - RNA, 19 nt, Artificial Sequence
  Description of Artificial Sequence: Synthetic oligonucleotide
ccucguuuccucugagaug

SEQ ID NO: 428861 - RNA, 19 nt, Artificial Sequence
  Description of Artificial Sequence: Synthetic oligonucleotide
ccgucucuaccgaugggag

SEQ ID NO: 428862 - RNA, 19 nt, Artificial Sequence
  Description of Artificial Sequence: Synthetic oligonucleotide
ugguaguaaguggggccaa

SEQ ID NO: 428863 - RNA, 19 nt, Artificial Sequence
  Description of Artificial Sequence: Synthetic oligonucleotide
cagcucgggcuugaugagc

SEQ ID NO: 428864 - RNA, 19 nt, Artificial Sequence
  Description of Artificial Sequence: Synthetic oligonucleotide
cauagaccgcguagucaca

SEQ ID NO: 428865 - RNA, 19 nt, Artificial Sequence
  Description of Artificial Sequence: Synthetic oligonucleotide
cagaaguggucuacagaua

SEQ ID NO: 428866 - RNA, 19 nt, Artificial Sequence
  Description of Artificial Sequence: Synthetic oligonucleotide
gcaaucgcgacaauugagu

SEQ ID NO: 428867 - RNA, 19 nt, Artificial Sequence
  Description of Artificial Sequence: Synthetic oligonucleotide
ggcaaucugacaaucucgu

SEQ ID NO: 428868 - RNA, 19 nt, Artificial Sequence
  Description of Artificial Sequence: Synthetic oligonucleotide
ccgucgauuagugcucucc

SEQ ID NO: 428869 - RNA, 19 nt, Artificial Sequence
  Description of Artificial Sequence: Synthetic oligonucleotide
caugucggcuagcaaauuu

SEQ ID NO: 428870 - RNA, 19 nt, Artificial Sequence
  Description of Artificial Sequence: Synthetic oligonucleotide
ugguagccguaaucagaua

SEQ ID NO: 428871 - RNA, 19 nt, Artificial Sequence
  Description of Artificial Sequence: Synthetic oligonucleotide
caucuguauagauccgaau

SEQ ID NO: 428872 - RNA, 19 nt, Artificial Sequence
  Description of Artificial Sequence: Synthetic oligonucleotide
cagugucuugccgugaacu

SEQ ID NO: 428873 - RNA, 19 nt, Artificial Sequence
  Description of Artificial Sequence: Synthetic oligonucleotide
gcaacugucuuggcuucgc

SEQ ID NO: 428874 - RNA, 19 nt, Artificial Sequence
  Description of Artificial Sequence: Synthetic oligonucleotide
cuagcucgagaaugaauuu

SEQ ID NO: 428875 - RNA, 19 nt, Artificial Sequence
  Description of Artificial Sequence: Synthetic oligonucleotide
cccacagcguauuaugcaa

SEQ ID NO: 428876 - RNA, 19 nt, Artificial Sequence
  Description of Artificial Sequence: Synthetic oligonucleotide
gauacuccauagaccgcgu

SEQ ID NO: 428877 - RNA, 19 nt, Artificial Sequence
  Description of Artificial Sequence: Synthetic oligonucleotide
cucaaacaaccuuucucuu

SEQ ID NO: 428878 - RNA, 19 nt, Artificial Sequence
  Description of Artificial Sequence: Synthetic oligonucleotide
gccgucucuaccgauggga

SEQ ID NO: 428879 - RNA, 19 nt, Artificial Sequence
  Description of Artificial Sequence: Synthetic oligonucleotide
ccuggcauguuucacgugu

SEQ ID NO: 428880 - RNA, 19 nt, Artificial Sequence
  Description of Artificial Sequence: Synthetic oligonucleotide
cguacccuuauuuuacaaa

SEQ ID NO: 428881 - RNA, 19 nt, Artificial Sequence
  Description of Artificial Sequence: Synthetic oligonucleotide
cccuuguuagcagagaccu

SEQ ID NO: 428882 - RNA, 19 nt, Artificial Sequence
  Description of Artificial Sequence: Synthetic oligonucleotide
cgauucaugauaacagagu

SEQ ID NO: 428883 - RNA, 19 nt, Artificial Sequence
  Description of Artificial Sequence: Synthetic oligonucleotide
gcccguauaugaagcaauc

SEQ ID NO: 428884 - RNA, 19 nt, Artificial Sequence
  Description of Artificial Sequence: Synthetic oligonucleotide
gcguacccuuauuuuacaa

SEQ ID NO: 428885 - RNA, 19 nt, Artificial Sequence
  Description of Artificial Sequence: Synthetic oligonucleotide
accauuccccacagcguau

SEQ ID NO: 428886 - RNA, 19 nt, Artificial Sequence
  Description of Artificial Sequence: Synthetic oligonucleotide
ccccacagcguauuaugca

SEQ ID NO: 428887 - RNA, 19 nt, Artificial Sequence
  Description of Artificial Sequence: Synthetic oligonucleotide
caaucgcugcaggagaaau

SEQ ID NO: 428888 - RNA, 19 nt, Artificial Sequence
  Description of Artificial Sequence: Synthetic oligonucleotide
cugcaccgugggcaaucug

SEQ ID NO: 428889 - RNA, 19 nt, Artificial Sequence
  Description of Artificial Sequence: Synthetic oligonucleotide
cagauacggccugcaucug

SEQ ID NO: 428890 - RNA, 19 nt, Artificial Sequence
  Description of Artificial Sequence: Synthetic oligonucleotide
cguaauuuccuuagaguau

SEQ ID NO: 428891 - RNA, 19 nt, Artificial Sequence
  Description of Artificial Sequence: Synthetic oligonucleotide
cagcgucauuaaauggagu

SEQ ID NO: 428892 - RNA, 19 nt, Artificial Sequence
  Description of Artificial Sequence: Synthetic oligonucleotide
ggcugucuauuaaggaucu

SEQ ID NO: 428893 - RNA, 19 nt, Artificial Sequence
  Description of Artificial Sequence: Synthetic oligonucleotide
cacgagaucuacccuccau

SEQ ID NO: 428894 - RNA, 19 nt, Artificial Sequence
  Description of Artificial Sequence: Synthetic oligonucleotide
gcguauuaugcaacugucu

SEQ ID NO: 428895 - RNA, 19 nt, Artificial Sequence
  Description of Artificial Sequence: Synthetic oligonucleotide
cuacagauacggccugcau

SEQ ID NO: 428896 - RNA, 19 nt, Artificial Sequence
  Description of Artificial Sequence: Synthetic oligonucleotide
acgaaccccuggagcuauc

SEQ ID NO: 428897 - RNA, 19 nt, Artificial Sequence
  Description of Artificial Sequence: Synthetic oligonucleotide
ucgcgacaauugaguugau

SEQ ID NO: 428898 - RNA, 19 nt, Artificial Sequence
  Description of Artificial Sequence: Synthetic oligonucleotide
cgauuagugcucuccaacu

SEQ ID NO: 428899 - RNA, 19 nt, Artificial Sequence
  Description of Artificial Sequence: Synthetic oligonucleotide
gcuucgccagcuugccguc

SEQ ID NO: 428900 - RNA, 19 nt, Artificial Sequence
  Description of Artificial Sequence: Synthetic oligonucleotide
guucgggaucuuuguggau

SEQ ID NO: 428901 - RNA, 19 nt, Artificial Sequence
  Description of Artificial Sequence: Synthetic oligonucleotide
ggaucugaauagguccccu

SEQ ID NO: 428902 - RNA, 19 nt, Artificial Sequence
  Description of Artificial Sequence: Synthetic oligonucleotide
cgugggcaaucugacaauc

SEQ ID NO: 428903 - RNA, 19 nt, Artificial Sequence
  Description of Artificial Sequence: Synthetic oligonucleotide
cauggggauuuaugaugau

SEQ ID NO: 428904 - RNA, 19 nt, Artificial Sequence
  Description of Artificial Sequence: Synthetic oligonucleotide
cucuugguguaccgucgau

SEQ ID NO: 428905 - RNA, 19 nt, Artificial Sequence
  Description of Artificial Sequence: Synthetic oligonucleotide
ccgcguagucacaaguggu

SEQ ID NO: 428906 - RNA, 19 nt, Artificial Sequence
  Description of Artificial Sequence: Synthetic oligonucleotide
cgucucuaccgaugggaga

SEQ ID NO: 428907 - RNA, 19 nt, Artificial Sequence
  Description of Artificial Sequence: Synthetic oligonucleotide
ccauagcagacugguaugu

SEQ ID NO: 428908 - RNA, 19 nt, Artificial Sequence
  Description of Artificial Sequence: Synthetic oligonucleotide
cucuaccgaugggagaauu

SEQ ID NO: 428909 - RNA, 19 nt, Artificial Sequence
  Description of Artificial Sequence: Synthetic oligonucleotide
gguaguaaguggggccaau

SEQ ID NO: 428910 - RNA, 19 nt, Artificial Sequence
  Description of Artificial Sequence: Synthetic oligonucleotide
ccaucacgagaucuacccu

SEQ ID NO: 428911 - RNA, 19 nt, Artificial Sequence
  Description of Artificial Sequence: Synthetic oligonucleotide
cccaucagauaugauccgu

SEQ ID NO: 428912 - RNA, 19 nt, Artificial Sequence
  Description of Artificial Sequence: Synthetic oligonucleotide
gcguagucacaagugguuu

SEQ ID NO: 428913 - RNA, 19 nt, Artificial Sequence
  Description of Artificial Sequence: Synthetic oligonucleotide
gguccccuagcucgagaau

SEQ ID NO: 428914 - RNA, 19 nt, Artificial Sequence
  Description of Artificial Sequence: Synthetic oligonucleotide
cccuagcucgagaaugaau

SEQ ID NO: 428915 - RNA, 19 nt, Artificial Sequence
  Description of Artificial Sequence: Synthetic oligonucleotide
ccaguucccaguggcuaaa

SEQ ID NO: 428916 - RNA, 19 nt, Artificial Sequence
  Description of Artificial Sequence: Synthetic oligonucleotide
cgcguagucacaagugguu

SEQ ID NO: 428917 - RNA, 19 nt, Artificial Sequence
  Description of Artificial Sequence: Synthetic oligonucleotide
ccaaaacguaggccaccau

SEQ ID NO: 428918 - RNA, 19 nt, Artificial Sequence
  Description of Artificial Sequence: Synthetic oligonucleotide
ccccuagcucgagaaugaa

SEQ ID NO: 428919 - RNA, 19 nt, Artificial Sequence
  Description of Artificial Sequence: Synthetic oligonucleotide
cgcgacaauugaguugauu

SEQ ID NO: 428920 - RNA, 19 nt, Artificial Sequence
  Description of Artificial Sequence: Synthetic oligonucleotide
ccaugucggcuagcaaauu

SEQ ID NO: 428921 - RNA, 19 nt, Artificial Sequence
  Description of Artificial Sequence: Synthetic oligonucleotide
aaaacauccagacuaaccc

SEQ ID NO: 428922 - RNA, 19 nt, Artificial Sequence
  Description of Artificial Sequence: Synthetic oligonucleotide
acuauaguugcucaaaucc

SEQ ID NO: 428923 - RNA, 19 nt, Artificial Sequence
  Description of Artificial Sequence: Synthetic oligonucleotide
aagucacauaaauauaucc

SEQ ID NO: 428924 - RNA, 19 nt, Artificial Sequence
  Description of Artificial Sequence: Synthetic oligonucleotide
aauugugugacucccauuc

SEQ ID NO: 428925 - RNA, 19 nt, Artificial Sequence
  Description of Artificial Sequence: Synthetic oligonucleotide
aagcuaaggacuuuagugc

SEQ ID NO: 428926 - RNA, 19 nt, Artificial Sequence
  Description of Artificial Sequence: Synthetic oligonucleotide
ugaucaaggacucauagcc

SEQ ID NO: 428927 - RNA, 19 nt, Artificial Sequence
  Description of Artificial Sequence: Synthetic oligonucleotide
aaaucaaaagucccaauag

SEQ ID NO: 428928 - RNA, 19 nt, Artificial Sequence
  Description of Artificial Sequence: Synthetic oligonucleotide
aguucuacagguaagauac

SEQ ID NO: 428929 - RNA, 19 nt, Artificial Sequence
  Description of Artificial Sequence: Synthetic oligonucleotide
aaucaaaagucccaauagg

SEQ ID NO: 428930 - RNA, 19 nt, Artificial Sequence
  Description of Artificial Sequence: Synthetic oligonucleotide
ucuaaaguuaguaagugac

SEQ ID NO: 428931 - RNA, 19 nt, Artificial Sequence
  Description of Artificial Sequence: Synthetic oligonucleotide
gaagucuaaaguuaguaag

SEQ ID NO: 428932 - RNA, 19 nt, Artificial Sequence
  Description of Artificial Sequence: Synthetic oligonucleotide
uuuaccccaauuaagcagg

SEQ ID NO: 428933 - RNA, 19 nt, Artificial Sequence
  Description of Artificial Sequence: Synthetic oligonucleotide
gaagcuaaggacuuuagug

SEQ ID NO: 428934 - RNA, 19 nt, Artificial Sequence
  Description of Artificial Sequence: Synthetic oligonucleotide
acauauaacauuaugauca

SEQ ID NO: 428935 - RNA, 19 nt, Artificial Sequence
  Description of Artificial Sequence: Synthetic oligonucleotide
aaguuuaccccaauuaagc

SEQ ID NO: 428936 - RNA, 19 nt, Artificial Sequence
  Description of Artificial Sequence: Synthetic oligonucleotide
gaugcuaaggcacagucag

SEQ ID NO: 428937 - RNA, 19 nt, Artificial Sequence
  Description of Artificial Sequence: Synthetic oligonucleotide
aaugggauggcucugcuca

SEQ ID NO: 428938 - RNA, 19 nt, Artificial Sequence
  Description of Artificial Sequence: Synthetic oligonucleotide
aguauuguccaauaguucu

SEQ ID NO: 428939 - RNA, 19 nt, Artificial Sequence
  Description of Artificial Sequence: Synthetic oligonucleotide
uaugaucaaggacucauag

SEQ ID NO: 428940 - RNA, 19 nt, Artificial Sequence
  Description of Artificial Sequence: Synthetic oligonucleotide
gauacuagcucugauaccc

SEQ ID NO: 428941 - RNA, 19 nt, Artificial Sequence
  Description of Artificial Sequence: Synthetic oligonucleotide
uuuagugcaguuccuagcc

SEQ ID NO: 428942 - RNA, 19 nt, Artificial Sequence
  Description of Artificial Sequence: Synthetic oligonucleotide
uauaagauaguucccauua

SEQ ID NO: 428943 - RNA, 19 nt, Artificial Sequence
  Description of Artificial Sequence: Synthetic oligonucleotide
aggauuaccagcuaaagau

SEQ ID NO: 428944 - RNA, 19 nt, Artificial Sequence
  Description of Artificial Sequence: Synthetic oligonucleotide
agggauaaugccuugugac

SEQ ID NO: 428945 - RNA, 19 nt, Artificial Sequence
  Description of Artificial Sequence: Synthetic oligonucleotide
uaaaguuaguaagugaccc

SEQ ID NO: 428946 - RNA, 19 nt, Artificial Sequence
  Description of Artificial Sequence: Synthetic oligonucleotide
auuacauauaacauuauga

SEQ ID NO: 428947 - RNA, 19 nt, Artificial Sequence
  Description of Artificial Sequence: Synthetic oligonucleotide
uuacucuuagcaaaacugc

SEQ ID NO: 428948 - RNA, 19 nt, Artificial Sequence
  Description of Artificial Sequence: Synthetic oligonucleotide
auaacauccccauucacug

SEQ ID NO: 428949 - RNA, 19 nt, Artificial Sequence
  Description of Artificial Sequence: Synthetic oligonucleotide
accccaauuaagcagguac

SEQ ID NO: 428950 - RNA, 19 nt, Artificial Sequence
  Description of Artificial Sequence: Synthetic oligonucleotide
agaacuucgaucucugcuc

SEQ ID NO: 428951 - RNA, 19 nt, Artificial Sequence
  Description of Artificial Sequence: Synthetic oligonucleotide
agaaaugguccuuaauggg

SEQ ID NO: 428952 - RNA, 19 nt, Artificial Sequence
  Description of Artificial Sequence: Synthetic oligonucleotide
uuaugcuugucauagauuu

SEQ ID NO: 428953 - RNA, 19 nt, Artificial Sequence
  Description of Artificial Sequence: Synthetic oligonucleotide
gauuaccagcuaaagaugg

SEQ ID NO: 428954 - RNA, 19 nt, Artificial Sequence
  Description of Artificial Sequence: Synthetic oligonucleotide
auuaggaggaaccuugucu

SEQ ID NO: 428955 - RNA, 19 nt, Artificial Sequence
  Description of Artificial Sequence: Synthetic oligonucleotide
agaaguauuguccaauagu

SEQ ID NO: 428956 - RNA, 19 nt, Artificial Sequence
  Description of Artificial Sequence: Synthetic oligonucleotide
uaagauaguucccauuaca

SEQ ID NO: 428957 - RNA, 19 nt, Artificial Sequence
  Description of Artificial Sequence: Synthetic oligonucleotide
ucgaaagucaccuuguauc

SEQ ID NO: 428958 - RNA, 19 nt, Artificial Sequence
  Description of Artificial Sequence: Synthetic oligonucleotide
uccuacguugcuuuuaugc

SEQ ID NO: 428959 - RNA, 19 nt, Artificial Sequence
  Description of Artificial Sequence: Synthetic oligonucleotide
ugguuaagauaucugagcu

SEQ ID NO: 428960 - RNA, 19 nt, Artificial Sequence
  Description of Artificial Sequence: Synthetic oligonucleotide
auggagaccaccaaggaac

SEQ ID NO: 428961 - RNA, 19 nt, Artificial Sequence
  Description of Artificial Sequence: Synthetic oligonucleotide
uauccaacccaaccgaugc

SEQ ID NO: 428962 - RNA, 19 nt, Artificial Sequence
  Description of Artificial Sequence: Synthetic oligonucleotide
augaucaaggacucauagc

SEQ ID NO: 428963 - RNA, 19 nt, Artificial Sequence
  Description of Artificial Sequence: Synthetic oligonucleotide
gaaguaaagcaugggagcg

SEQ ID NO: 428964 - RNA, 19 nt, Artificial Sequence
  Description of Artificial Sequence: Synthetic oligonucleotide
cuagccaggaaucuguuag

SEQ ID NO: 428965 - RNA, 19 nt, Artificial Sequence
  Description of Artificial Sequence: Synthetic oligonucleotide
caaaacauccagacuaacc

SEQ ID NO: 428966 - RNA, 19 nt, Artificial Sequence
  Description of Artificial Sequence: Synthetic oligonucleotide
ucuacuuggagcugugaag

SEQ ID NO: 428967 - RNA, 19 nt, Artificial Sequence
  Description of Artificial Sequence: Synthetic oligonucleotide
uuacacaccgcuuucuuca

SEQ ID NO: 428968 - RNA, 19 nt, Artificial Sequence
  Description of Artificial Sequence: Synthetic oligonucleotide
aaggauuaccagcuaaaga

SEQ ID NO: 428969 - RNA, 19 nt, Artificial Sequence
  Description of Artificial Sequence: Synthetic oligonucleotide
ucaguugagaaacuauagu

SEQ ID NO: 428970 - RNA, 19 nt, Artificial Sequence
  Description of Artificial Sequence: Synthetic oligonucleotide
agugacuauagcuaugggu

SEQ ID NO: 428971 - RNA, 19 nt, Artificial Sequence
  Description of Artificial Sequence: Synthetic oligonucleotide
auaagauaguucccauuac

SEQ ID NO: 428972 - RNA, 19 nt, Artificial Sequence
  Description of Artificial Sequence: Synthetic oligonucleotide
aaagucaccuuguauccca

SEQ ID NO: 428973 - RNA, 19 nt, Artificial Sequence
  Description of Artificial Sequence: Synthetic oligonucleotide
uugugggaaccucauaucc

SEQ ID NO: 428974 - RNA, 19 nt, Artificial Sequence
  Description of Artificial Sequence: Synthetic oligonucleotide
ugguuacaggggaagaagg

SEQ ID NO: 428975 - RNA, 19 nt, Artificial Sequence
  Description of Artificial Sequence: Synthetic oligonucleotide
uauagcuauggguugguca

SEQ ID NO: 428976 - RNA, 19 nt, Artificial Sequence
  Description of Artificial Sequence: Synthetic oligonucleotide
uauagagcaucugaagucc

SEQ ID NO: 428977 - RNA, 19 nt, Artificial Sequence
  Description of Artificial Sequence: Synthetic oligonucleotide
acagaaguaaagcauggga

SEQ ID NO: 428978 - RNA, 19 nt, Artificial Sequence
  Description of Artificial Sequence: Synthetic oligonucleotide
caaugagccaucuuucuag

SEQ ID NO: 428979 - RNA, 19 nt, Artificial Sequence
  Description of Artificial Sequence: Synthetic oligonucleotide
uacauauaacauuaugauc

SEQ ID NO: 428980 - RNA, 19 nt, Artificial Sequence
  Description of Artificial Sequence: Synthetic oligonucleotide
auagcggaaggccagcuuc

SEQ ID NO: 428981 - RNA, 19 nt, Artificial Sequence
  Description of Artificial Sequence: Synthetic oligonucleotide
aggaaccuugucuuugugc

SEQ ID NO: 428982 - RNA, 19 nt, Artificial Sequence
  Description of Artificial Sequence: Synthetic oligonucleotide
caaguuuaccccaauuaag

SEQ ID NO: 428983 - RNA, 19 nt, Artificial Sequence
  Description of Artificial Sequence: Synthetic oligonucleotide
cuugcuagagcugacuugg

SEQ ID NO: 428984 - RNA, 19 nt, Artificial Sequence
  Description of Artificial Sequence: Synthetic oligonucleotide
guuuaccccaauuaagcag

SEQ ID NO: 428985 - RNA, 19 nt, Artificial Sequence
  Description of Artificial Sequence: Synthetic oligonucleotide
uuuucgauagcggaaggcc

SEQ ID NO: 428986 - RNA, 19 nt, Artificial Sequence
  Description of Artificial Sequence: Synthetic oligonucleotide
ugucauggagacuuuacac

SEQ ID NO: 428987 - RNA, 19 nt, Artificial Sequence
  Description of Artificial Sequence: Synthetic oligonucleotide
uggcaauccaagaagaaau

SEQ ID NO: 428988 - RNA, 19 nt, Artificial Sequence
  Description of Artificial Sequence: Synthetic oligonucleotide
uagaacuucgaucucugcu

SEQ ID NO: 428989 - RNA, 19 nt, Artificial Sequence
  Description of Artificial Sequence: Synthetic oligonucleotide
cauuacauauaacauuaug

SEQ ID NO: 428990 - RNA, 19 nt, Artificial Sequence
  Description of Artificial Sequence: Synthetic oligonucleotide
aagauaucugagcucagaa

SEQ ID NO: 428991 - RNA, 19 nt, Artificial Sequence
  Description of Artificial Sequence: Synthetic oligonucleotide
aaccgcaaacaagaugugc

SEQ ID NO: 428992 - RNA, 19 nt, Artificial Sequence
  Description of Artificial Sequence: Synthetic oligonucleotide
ugaaccguggccaccacug

SEQ ID NO: 428993 - RNA, 19 nt, Artificial Sequence
  Description of Artificial Sequence: Synthetic oligonucleotide
gaugguucuagcuucuuga

SEQ ID NO: 428994 - RNA, 19 nt, Artificial Sequence
  Description of Artificial Sequence: Synthetic oligonucleotide
uucuuucuagacuggauga

SEQ ID NO: 428995 - RNA, 19 nt, Artificial Sequence
  Description of Artificial Sequence: Synthetic oligonucleotide
uucucucacuuuucgauag

SEQ ID NO: 428996 - RNA, 19 nt, Artificial Sequence
  Description of Artificial Sequence: Synthetic oligonucleotide
gauaguucccauuacauau

SEQ ID NO: 428997 - RNA, 19 nt, Artificial Sequence
  Description of Artificial Sequence: Synthetic oligonucleotide
guuuccgucagcaugauca

SEQ ID NO: 428998 - RNA, 19 nt, Artificial Sequence
  Description of Artificial Sequence: Synthetic oligonucleotide
uacucaagaaggccuaagc

SEQ ID NO: 428999 - RNA, 19 nt, Artificial Sequence
  Description of Artificial Sequence: Synthetic oligonucleotide
aguaaagcaugggagcggc

SEQ ID NO: 429000 - RNA, 19 nt, Artificial Sequence
  Description of Artificial Sequence: Synthetic oligonucleotide
ugcuauagagcaucugaag

SEQ ID NO: 429001 - RNA, 19 nt, Artificial Sequence
  Description of Artificial Sequence: Synthetic oligonucleotide
cuuucuaguaccaacagcu

SEQ ID NO: 429002 - RNA, 19 nt, Artificial Sequence
  Description of Artificial Sequence: Synthetic oligonucleotide
auauauccaacccaaccga

SEQ ID NO: 429003 - RNA, 19 nt, Artificial Sequence
  Description of Artificial Sequence: Synthetic oligonucleotide
ucucacuuuucgauagcgg

SEQ ID NO: 429004 - RNA, 19 nt, Artificial Sequence
  Description of Artificial Sequence: Synthetic oligonucleotide
ccaauaguucugaagaugg

SEQ ID NO: 429005 - RNA, 19 nt, Artificial Sequence
  Description of Artificial Sequence: Synthetic oligonucleotide
aguugugucuacaaguguc

SEQ ID NO: 429006 - RNA, 19 nt, Artificial Sequence
  Description of Artificial Sequence: Synthetic oligonucleotide
aaacuauaguugcucaaau

SEQ ID NO: 429007 - RNA, 19 nt, Artificial Sequence
  Description of Artificial Sequence: Synthetic oligonucleotide
ugacuuugguuacagggga

SEQ ID NO: 429008 - RNA, 19 nt, Artificial Sequence
  Description of Artificial Sequence: Synthetic oligonucleotide
aagagcguugcugucacag

SEQ ID NO: 429009 - RNA, 19 nt, Artificial Sequence
  Description of Artificial Sequence: Synthetic oligonucleotide
aacauccccauucacugga

SEQ ID NO: 429010 - RNA, 19 nt, Artificial Sequence
  Description of Artificial Sequence: Synthetic oligonucleotide
uacucuuagcaaaacugca

SEQ ID NO: 429011 - RNA, 19 nt, Artificial Sequence
  Description of Artificial Sequence: Synthetic oligonucleotide
uacguugcuuuuaugcuug

SEQ ID NO: 429012 - RNA, 19 nt, Artificial Sequence
  Description of Artificial Sequence: Synthetic oligonucleotide
ugugugguagugaucagaa

SEQ ID NO: 429013 - RNA, 19 nt, Artificial Sequence
  Description of Artificial Sequence: Synthetic oligonucleotide
aguuuauaagauaguuccc

SEQ ID NO: 429014 - RNA, 19 nt, Artificial Sequence
  Description of Artificial Sequence: Synthetic oligonucleotide
ucuagacaaguuuacccca

SEQ ID NO: 429015 - RNA, 19 nt, Artificial Sequence
  Description of Artificial Sequence: Synthetic oligonucleotide
ugauacagcaaggaccucc

SEQ ID NO: 429016 - RNA, 19 nt, Artificial Sequence
  Description of Artificial Sequence: Synthetic oligonucleotide
uuacaagauggagaugccg

SEQ ID NO: 429017 - RNA, 19 nt, Artificial Sequence
  Description of Artificial Sequence: Synthetic oligonucleotide
aauaggaaccugaauucug

SEQ ID NO: 429018 - RNA, 19 nt, Artificial Sequence
  Description of Artificial Sequence: Synthetic oligonucleotide
uucgauagcggaaggccag

SEQ ID NO: 429019 - RNA, 19 nt, Artificial Sequence
  Description of Artificial Sequence: Synthetic oligonucleotide
cuuuagugcaguuccuagc

SEQ ID NO: 429020 - RNA, 19 nt, Artificial Sequence
  Description of Artificial Sequence: Synthetic oligonucleotide
gacacuccuagaauuagcc

SEQ ID NO: 429021 - RNA, 19 nt, Artificial Sequence
  Description of Artificial Sequence: Synthetic oligonucleotide
gcuuacaagauggagaugc

SEQ ID NO: 429022 - RNA, 19 nt, Artificial Sequence
  Description of Artificial Sequence: Synthetic oligonucleotide
uuucgauagcggaaggcca

SEQ ID NO: 429023 - RNA, 19 nt, Artificial Sequence
  Description of Artificial Sequence: Synthetic oligonucleotide
ugaguuugugugaaccgca

SEQ ID NO: 429024 - RNA, 19 nt, Artificial Sequence
  Description of Artificial Sequence: Synthetic oligonucleotide
auagcuauggguuggucaa

SEQ ID NO: 429025 - RNA, 19 nt, Artificial Sequence
  Description of Artificial Sequence: Synthetic oligonucleotide
uuugugugaaccgcaaaca

SEQ ID NO: 429026 - RNA, 19 nt, Artificial Sequence
  Description of Artificial Sequence: Synthetic oligonucleotide
ucgaucucugcucuuaguc

SEQ ID NO: 429027 - RNA, 19 nt, Artificial Sequence
  Description of Artificial Sequence: Synthetic oligonucleotide
uuagcccacaccacaaaac

SEQ ID NO: 429028 - RNA, 19 nt, Artificial Sequence
  Description of Artificial Sequence: Synthetic oligonucleotide
cagguauccacucucccgg

SEQ ID NO: 429029 - RNA, 19 nt, Artificial Sequence
  Description of Artificial Sequence: Synthetic oligonucleotide
aaugagccaucuuucuagu

SEQ ID NO: 429030 - RNA, 19 nt, Artificial Sequence
  Description of Artificial Sequence: Synthetic oligonucleotide
uccaauaguucugaagaug

SEQ ID NO: 429031 - RNA, 19 nt, Artificial Sequence
  Description of Artificial Sequence: Synthetic oligonucleotide
uaccagcuaaagaugguug

SEQ ID NO: 429032 - RNA, 19 nt, Artificial Sequence
  Description of Artificial Sequence: Synthetic oligonucleotide
ugccgaagucuaaaguuag

SEQ ID NO: 429033 - RNA, 19 nt, Artificial Sequence
  Description of Artificial Sequence: Synthetic oligonucleotide
aaguaaagcaugggagcgg

SEQ ID NO: 429034 - RNA, 19 nt, Artificial Sequence
  Description of Artificial Sequence: Synthetic oligonucleotide
gaaggccuaagcugcaacc

SEQ ID NO: 429035 - RNA, 19 nt, Artificial Sequence
  Description of Artificial Sequence: Synthetic oligonucleotide
ggugcucaaaccuuggacc

SEQ ID NO: 429036 - RNA, 19 nt, Artificial Sequence
  Description of Artificial Sequence: Synthetic oligonucleotide
gcuuuuaugcuugucauag

SEQ ID NO: 429037 - RNA, 19 nt, Artificial Sequence
  Description of Artificial Sequence: Synthetic oligonucleotide
auacccaacuugcagagaa

SEQ ID NO: 429038 - RNA, 19 nt, Artificial Sequence
  Description of Artificial Sequence: Synthetic oligonucleotide
uguguucucgccagcauuc

SEQ ID NO: 429039 - RNA, 19 nt, Artificial Sequence
  Description of Artificial Sequence: Synthetic oligonucleotide
acuaaagagcguugcuguc

SEQ ID NO: 429040 - RNA, 19 nt, Artificial Sequence
  Description of Artificial Sequence: Synthetic oligonucleotide
aauccaacaggagaaggau

SEQ ID NO: 429041 - RNA, 19 nt, Artificial Sequence
  Description of Artificial Sequence: Synthetic oligonucleotide
ucaauugugugacucccau

SEQ ID NO: 429042 - RNA, 19 nt, Artificial Sequence
  Description of Artificial Sequence: Synthetic oligonucleotide
gacuauagcuauggguugg

SEQ ID NO: 429043 - RNA, 19 nt, Artificial Sequence
  Description of Artificial Sequence: Synthetic oligonucleotide
uugucaauugugugacucc

SEQ ID NO: 429044 - RNA, 19 nt, Artificial Sequence
  Description of Artificial Sequence: Synthetic oligonucleotide
ugucaauugugugacuccc

SEQ ID NO: 429045 - RNA, 19 nt, Artificial Sequence
  Description of Artificial Sequence: Synthetic oligonucleotide
ucuuagucucugcagugcu

SEQ ID NO: 429046 - RNA, 19 nt, Artificial Sequence
  Description of Artificial Sequence: Synthetic oligonucleotide
aucaguugagaaacuauag

SEQ ID NO: 429047 - RNA, 19 nt, Artificial Sequence
  Description of Artificial Sequence: Synthetic oligonucleotide
gaagacagaacacucccaa

SEQ ID NO: 429048 - RNA, 19 nt, Artificial Sequence
  Description of Artificial Sequence: Synthetic oligonucleotide
ugaugcuaaggcacaguca

SEQ ID NO: 429049 - RNA, 19 nt, Artificial Sequence
  Description of Artificial Sequence: Synthetic oligonucleotide
ugaggcuuacaagauggag

SEQ ID NO: 429050 - RNA, 19 nt, Artificial Sequence
  Description of Artificial Sequence: Synthetic oligonucleotide
ugacuauagcuauggguug

SEQ ID NO: 429051 - RNA, 19 nt, Artificial Sequence
  Description of Artificial Sequence: Synthetic oligonucleotide
gaucucugcucuuagucuc

SEQ ID NO: 429052 - RNA, 19 nt, Artificial Sequence
  Description of Artificial Sequence: Synthetic oligonucleotide
ugguccuaaagggauaaug

SEQ ID NO: 429053 - RNA, 19 nt, Artificial Sequence
  Description of Artificial Sequence: Synthetic oligonucleotide
uuaagauaucugagcucag

SEQ ID NO: 429054 - RNA, 19 nt, Artificial Sequence
  Description of Artificial Sequence: Synthetic oligonucleotide
agaagcuaaggacuuuagu

SEQ ID NO: 429055 - RNA, 19 nt, Artificial Sequence
  Description of Artificial Sequence: Synthetic oligonucleotide
gagaaacuauaguugcuca

SEQ ID NO: 429056 - RNA, 19 nt, Artificial Sequence
  Description of Artificial Sequence: Synthetic oligonucleotide
agaugugccaagucucuug

SEQ ID NO: 429057 - RNA, 19 nt, Artificial Sequence
  Description of Artificial Sequence: Synthetic oligonucleotide
gagaugccgaagucuaaag

SEQ ID NO: 429058 - RNA, 19 nt, Artificial Sequence
  Description of Artificial Sequence: Synthetic oligonucleotide
gggauacuagcucugauac

SEQ ID NO: 429059 - RNA, 19 nt, Artificial Sequence
  Description of Artificial Sequence: Synthetic oligonucleotide
gucauggagacuuuacaca

SEQ ID NO: 429060 - RNA, 19 nt, Artificial Sequence
  Description of Artificial Sequence: Synthetic oligonucleotide
cuaagcugcaaccugggga

SEQ ID NO: 429061 - RNA, 19 nt, Artificial Sequence
  Description of Artificial Sequence: Synthetic oligonucleotide
uuuccugcuauagagcauc

SEQ ID NO: 429062 - RNA, 19 nt, Artificial Sequence
  Description of Artificial Sequence: Synthetic oligonucleotide
uuuacacaccgcuuucuuc

SEQ ID NO: 429063 - RNA, 19 nt, Artificial Sequence
  Description of Artificial Sequence: Synthetic oligonucleotide
cuugucaauugugugacuc

SEQ ID NO: 429064 - RNA, 19 nt, Artificial Sequence
  Description of Artificial Sequence: Synthetic oligonucleotide
ugugucuacaagugucaca

SEQ ID NO: 429065 - RNA, 19 nt, Artificial Sequence
  Description of Artificial Sequence: Synthetic oligonucleotide
aggacucauagccacaaau

SEQ ID NO: 429066 - RNA, 19 nt, Artificial Sequence
  Description of Artificial Sequence: Synthetic oligonucleotide
uauccccaacucuagacaa

SEQ ID NO: 429067 - RNA, 19 nt, Artificial Sequence
  Description of Artificial Sequence: Synthetic oligonucleotide
uauuguccaauaguucuga

SEQ ID NO: 429068 - RNA, 19 nt, Artificial Sequence
  Description of Artificial Sequence: Synthetic oligonucleotide
cuuacaagauggagaugcc

SEQ ID NO: 429069 - RNA, 19 nt, Artificial Sequence
  Description of Artificial Sequence: Synthetic oligonucleotide
agaggauagcaccaggcaa

SEQ ID NO: 429070 - RNA, 19 nt, Artificial Sequence
  Description of Artificial Sequence: Synthetic oligonucleotide
agcggcaaugggcugcggc

SEQ ID NO: 429071 - RNA, 19 nt, Artificial Sequence
  Description of Artificial Sequence: Synthetic oligonucleotide
cugugguuaagauaucuga

SEQ ID NO: 429072 - RNA, 19 nt, Artificial Sequence
  Description of Artificial Sequence: Synthetic oligonucleotide
guacucuccaagaggauag

SEQ ID NO: 429073 - RNA, 19 nt, Artificial Sequence
  Description of Artificial Sequence: Synthetic oligonucleotide
cuauggguuggucaaggac

SEQ ID NO: 429074 - RNA, 19 nt, Artificial Sequence
  Description of Artificial Sequence: Synthetic oligonucleotide
gauacaggagauguucuca

SEQ ID NO: 429075 - RNA, 19 nt, Artificial Sequence
  Description of Artificial Sequence: Synthetic oligonucleotide
ugcaguaucucuggggaca

SEQ ID NO: 429076 - RNA, 19 nt, Artificial Sequence
  Description of Artificial Sequence: Synthetic oligonucleotide
gaaacuauaguugcucaaa

SEQ ID NO: 429077 - RNA, 19 nt, Artificial Sequence
  Description of Artificial Sequence: Synthetic oligonucleotide
cauauccugucugaguccc

SEQ ID NO: 429078 - RNA, 19 nt, Artificial Sequence
  Description of Artificial Sequence: Synthetic oligonucleotide
uauauccaacccaaccgau

SEQ ID NO: 429079 - RNA, 19 nt, Artificial Sequence
  Description of Artificial Sequence: Synthetic oligonucleotide
uuugugggaaccucauauc

SEQ ID NO: 429080 - RNA, 19 nt, Artificial Sequence
  Description of Artificial Sequence: Synthetic oligonucleotide
cagaaguauuguccaauag

SEQ ID NO: 429081 - RNA, 19 nt, Artificial Sequence
  Description of Artificial Sequence: Synthetic oligonucleotide
gaggauagcaccaggcaac

SEQ ID NO: 429082 - RNA, 19 nt, Artificial Sequence
  Description of Artificial Sequence: Synthetic oligonucleotide
ucagaaguauuguccaaua

SEQ ID NO: 429083 - RNA, 19 nt, Artificial Sequence
  Description of Artificial Sequence: Synthetic oligonucleotide
uugugugacucccauucaa

SEQ ID NO: 429084 - RNA, 19 nt, Artificial Sequence
  Description of Artificial Sequence: Synthetic oligonucleotide
agaugccgaagucuaaagu

SEQ ID NO: 429085 - RNA, 19 nt, Artificial Sequence
  Description of Artificial Sequence: Synthetic oligonucleotide
caaaguugugucuacaagu

SEQ ID NO: 429086 - RNA, 19 nt, Artificial Sequence
  Description of Artificial Sequence: Synthetic oligonucleotide
gugugaaccgcaaacaaga

SEQ ID NO: 429087 - RNA, 19 nt, Artificial Sequence
  Description of Artificial Sequence: Synthetic oligonucleotide
gaauccaacaggagaagga

SEQ ID NO: 429088 - RNA, 19 nt, Artificial Sequence
  Description of Artificial Sequence: Synthetic oligonucleotide
acuccuagaauuagcccac

SEQ ID NO: 429089 - RNA, 19 nt, Artificial Sequence
  Description of Artificial Sequence: Synthetic oligonucleotide
ugacucccauucaaaguug

SEQ ID NO: 429090 - RNA, 19 nt, Artificial Sequence
  Description of Artificial Sequence: Synthetic oligonucleotide
agacacuccuagaauuagc

SEQ ID NO: 429091 - RNA, 19 nt, Artificial Sequence
  Description of Artificial Sequence: Synthetic oligonucleotide
gguccuaaagggauaaugc

SEQ ID NO: 429092 - RNA, 19 nt, Artificial Sequence
  Description of Artificial Sequence: Synthetic oligonucleotide
cugaguuugugugaaccgc

SEQ ID NO: 429093 - RNA, 19 nt, Artificial Sequence
  Description of Artificial Sequence: Synthetic oligonucleotide
cucucacuuuucgauagcg

SEQ ID NO: 429094 - RNA, 19 nt, Artificial Sequence
  Description of Artificial Sequence: Synthetic oligonucleotide
ugggauacuagcucugaua

SEQ ID NO: 429095 - RNA, 19 nt, Artificial Sequence
  Description of Artificial Sequence: Synthetic oligonucleotide
agauaguucccauuacaua

SEQ ID NO: 429096 - RNA, 19 nt, Artificial Sequence
  Description of Artificial Sequence: Synthetic oligonucleotide
cacugaauccaacaggaga

SEQ ID NO: 429097 - RNA, 19 nt, Artificial Sequence
  Description of Artificial Sequence: Synthetic oligonucleotide
uuagugcaguuccuagcca

SEQ ID NO: 429098 - RNA, 19 nt, Artificial Sequence
  Description of Artificial Sequence: Synthetic oligonucleotide
uaaagcaugggagcggcaa

SEQ ID NO: 429099 - RNA, 19 nt, Artificial Sequence
  Description of Artificial Sequence: Synthetic oligonucleotide
aagauggugugcugcacuu

SEQ ID NO: 429100 - RNA, 19 nt, Artificial Sequence
  Description of Artificial Sequence: Synthetic oligonucleotide
agcuauaaugcugccagcu

SEQ ID NO: 429101 - RNA, 19 nt, Artificial Sequence
  Description of Artificial Sequence: Synthetic oligonucleotide
aacauuccugcaacuccac

SEQ ID NO: 429102 - RNA, 19 nt, Artificial Sequence
  Description of Artificial Sequence: Synthetic oligonucleotide
gugaaccgcaaacaagaug

SEQ ID NO: 429103 - RNA, 19 nt, Artificial Sequence
  Description of Artificial Sequence: Synthetic oligonucleotide
cuuuucgauagcggaaggc

SEQ ID NO: 429104 - RNA, 19 nt, Artificial Sequence
  Description of Artificial Sequence: Synthetic oligonucleotide
gaugccgaagucuaaaguu

SEQ ID NO: 429105 - RNA, 19 nt, Artificial Sequence
  Description of Artificial Sequence: Synthetic oligonucleotide
cugauacccaacuugcaga

SEQ ID NO: 429106 - RNA, 19 nt, Artificial Sequence
  Description of Artificial Sequence: Synthetic oligonucleotide
uuacucaagaaggccuaag

SEQ ID NO: 429107 - RNA, 19 nt, Artificial Sequence
  Description of Artificial Sequence: Synthetic oligonucleotide
guuacaggggaagaaggac

SEQ ID NO: 429108 - RNA, 19 nt, Artificial Sequence
  Description of Artificial Sequence: Synthetic oligonucleotide
aacccuugagagcacugaa

SEQ ID NO: 429109 - RNA, 19 nt, Artificial Sequence
  Description of Artificial Sequence: Synthetic oligonucleotide
gaaucuguuagaacuucga

SEQ ID NO: 429110 - RNA, 19 nt, Artificial Sequence
  Description of Artificial Sequence: Synthetic oligonucleotide
uccaagaggauagcaccag

SEQ ID NO: 429111 - RNA, 19 nt, Artificial Sequence
  Description of Artificial Sequence: Synthetic oligonucleotide
gaaagucaccuuguauccc

SEQ ID NO: 429112 - RNA, 19 nt, Artificial Sequence
  Description of Artificial Sequence: Synthetic oligonucleotide
cucgccagcauuccagggc

SEQ ID NO: 429113 - RNA, 19 nt, Artificial Sequence
  Description of Artificial Sequence: Synthetic oligonucleotide
ucucucacuuuucgauagc

SEQ ID NO: 429114 - RNA, 19 nt, Artificial Sequence
  Description of Artificial Sequence: Synthetic oligonucleotide
ccuagaauuagcccacacc

SEQ ID NO: 429115 - RNA, 19 nt, Artificial Sequence
  Description of Artificial Sequence: Synthetic oligonucleotide
caucaguugagaaacuaua

SEQ ID NO: 429116 - RNA, 19 nt, Artificial Sequence
  Description of Artificial Sequence: Synthetic oligonucleotide
aagcagguacccacauugg

SEQ ID NO: 429117 - RNA, 19 nt, Artificial Sequence
  Description of Artificial Sequence: Synthetic oligonucleotide
agcagguacccacauuggu

SEQ ID NO: 429118 - RNA, 19 nt, Artificial Sequence
  Description of Artificial Sequence: Synthetic oligonucleotide
uacccaacuugcagagaag

SEQ ID NO: 429119 - RNA, 19 nt, Artificial Sequence
  Description of Artificial Sequence: Synthetic oligonucleotide
ugugaaccgcaaacaagau

SEQ ID NO: 429120 - RNA, 19 nt, Artificial Sequence
  Description of Artificial Sequence: Synthetic oligonucleotide
gcuagagcugacuugggac

SEQ ID NO: 429121 - RNA, 19 nt, Artificial Sequence
  Description of Artificial Sequence: Synthetic oligonucleotide
uauccacucucccggacau

SEQ ID NO: 429122 - RNA, 19 nt, Artificial Sequence
  Description of Artificial Sequence: Synthetic oligonucleotide
cagguccucaccuacaaaa

SEQ ID NO: 429123 - RNA, 19 nt, Artificial Sequence
  Description of Artificial Sequence: Synthetic oligonucleotide
uccaacccaaccgaugccu

SEQ ID NO: 429124 - RNA, 19 nt, Artificial Sequence
  Description of Artificial Sequence: Synthetic oligonucleotide
ugcggcuuacucuuagcaa

SEQ ID NO: 429125 - RNA, 19 nt, Artificial Sequence
  Description of Artificial Sequence: Synthetic oligonucleotide
gagaagcuaaggacuuuag

SEQ ID NO: 429126 - RNA, 19 nt, Artificial Sequence
  Description of Artificial Sequence: Synthetic oligonucleotide
agauucuacuuggagcugu

SEQ ID NO: 429127 - RNA, 19 nt, Artificial Sequence
  Description of Artificial Sequence: Synthetic oligonucleotide
uuaccagcuaaagaugguu

SEQ ID NO: 429128 - RNA, 19 nt, Artificial Sequence
  Description of Artificial Sequence: Synthetic oligonucleotide
guucucgccagcauuccag

SEQ ID NO: 429129 - RNA, 19 nt, Artificial Sequence
  Description of Artificial Sequence: Synthetic oligonucleotide
auugugugacucccauuca

SEQ ID NO: 429130 - RNA, 19 nt, Artificial Sequence
  Description of Artificial Sequence: Synthetic oligonucleotide
cauauaacauuaugaucaa

SEQ ID NO: 429131 - RNA, 19 nt, Artificial Sequence
  Description of Artificial Sequence: Synthetic oligonucleotide
cuuugugggaaccucauau

SEQ ID NO: 429132 - RNA, 19 nt, Artificial Sequence
  Description of Artificial Sequence: Synthetic oligonucleotide
gauuguguucucgccagca

SEQ ID NO: 429133 - RNA, 19 nt, Artificial Sequence
  Description of Artificial Sequence: Synthetic oligonucleotide
ggcaucuacaaugaaucug

SEQ ID NO: 429134 - RNA, 19 nt, Artificial Sequence
  Description of Artificial Sequence: Synthetic oligonucleotide
uccuuaacugcugcucuca

SEQ ID NO: 429135 - RNA, 19 nt, Artificial Sequence
  Description of Artificial Sequence: Synthetic oligonucleotide
gaacacucccaaaucaaaa

SEQ ID NO: 429136 - RNA, 19 nt, Artificial Sequence
  Description of Artificial Sequence: Synthetic oligonucleotide
acauauccccaacucuaga

SEQ ID NO: 429137 - RNA, 19 nt, Artificial Sequence
  Description of Artificial Sequence: Synthetic oligonucleotide
gugacuauagcuauggguu

SEQ ID NO: 429138 - RNA, 19 nt, Artificial Sequence
  Description of Artificial Sequence: Synthetic oligonucleotide
ggacucauagccacaaaug

SEQ ID NO: 429139 - RNA, 19 nt, Artificial Sequence
  Description of Artificial Sequence: Synthetic oligonucleotide
agucccaauaggaaccuga

SEQ ID NO: 429140 - RNA, 19 nt, Artificial Sequence
  Description of Artificial Sequence: Synthetic oligonucleotide
acaaugaaucugucuggau

SEQ ID NO: 429141 - RNA, 19 nt, Artificial Sequence
  Description of Artificial Sequence: Synthetic oligonucleotide
agagugcaacuguguuccc

SEQ ID NO: 429142 - RNA, 19 nt, Artificial Sequence
  Description of Artificial Sequence: Synthetic oligonucleotide
ugcuuuuaugcuugucaua

SEQ ID NO: 429143 - RNA, 19 nt, Artificial Sequence
  Description of Artificial Sequence: Synthetic oligonucleotide
auauccaacccaaccgaug

SEQ ID NO: 429144 - RNA, 19 nt, Artificial Sequence
  Description of Artificial Sequence: Synthetic oligonucleotide
gguuaagauaucugagcuc

SEQ ID NO: 429145 - RNA, 19 nt, Artificial Sequence
  Description of Artificial Sequence: Synthetic oligonucleotide
cuaaagagcguugcuguca

SEQ ID NO: 429146 - RNA, 19 nt, Artificial Sequence
  Description of Artificial Sequence: Synthetic oligonucleotide
uucgaucucugcucuuagu

SEQ ID NO: 429147 - RNA, 19 nt, Artificial Sequence
  Description of Artificial Sequence: Synthetic oligonucleotide
uacuagcucugauacccaa

SEQ ID NO: 429148 - RNA, 19 nt, Artificial Sequence
  Description of Artificial Sequence: Synthetic oligonucleotide
ccaucuuucuaguaccaac

SEQ ID NO: 429149 - RNA, 19 nt, Artificial Sequence
  Description of Artificial Sequence: Synthetic oligonucleotide
guugugucuacaaguguca

SEQ ID NO: 429150 - RNA, 19 nt, Artificial Sequence
  Description of Artificial Sequence: Synthetic oligonucleotide
caguuccuagccaggaauc

SEQ ID NO: 429151 - RNA, 19 nt, Artificial Sequence
  Description of Artificial Sequence: Synthetic oligonucleotide
cugucauggagacuuuaca

SEQ ID NO: 429152 - RNA, 19 nt, Artificial Sequence
  Description of Artificial Sequence: Synthetic oligonucleotide
uagacaaguuuaccccaau

SEQ ID NO: 429153 - RNA, 19 nt, Artificial Sequence
  Description of Artificial Sequence: Synthetic oligonucleotide
gcuauagagcaucugaagu

SEQ ID NO: 429154 - RNA, 19 nt, Artificial Sequence
  Description of Artificial Sequence: Synthetic oligonucleotide
uuaccccaauuaagcaggu

SEQ ID NO: 429155 - RNA, 19 nt, Artificial Sequence
  Description of Artificial Sequence: Synthetic oligonucleotide
uaaugggauggcucugcuc

SEQ ID NO: 429156 - RNA, 19 nt, Artificial Sequence
  Description of Artificial Sequence: Synthetic oligonucleotide
ggauuaccagcuaaagaug

SEQ ID NO: 429157 - RNA, 19 nt, Artificial Sequence
  Description of Artificial Sequence: Synthetic oligonucleotide
caaggaccuccugaggacc

SEQ ID NO: 429158 - RNA, 19 nt, Artificial Sequence
  Description of Artificial Sequence: Synthetic oligonucleotide
cauuaggaggaaccuuguc

SEQ ID NO: 429159 - RNA, 19 nt, Artificial Sequence
  Description of Artificial Sequence: Synthetic oligonucleotide
aguuugugugaaccgcaaa

SEQ ID NO: 429160 - RNA, 19 nt, Artificial Sequence
  Description of Artificial Sequence: Synthetic oligonucleotide
cuugcuugcuagagcugac

SEQ ID NO: 429161 - RNA, 19 nt, Artificial Sequence
  Description of Artificial Sequence: Synthetic oligonucleotide
guauccacucucccggaca

SEQ ID NO: 429162 - RNA, 19 nt, Artificial Sequence
  Description of Artificial Sequence: Synthetic oligonucleotide
gcucugauacccaacuugc

SEQ ID NO: 429163 - RNA, 19 nt, Artificial Sequence
  Description of Artificial Sequence: Synthetic oligonucleotide
gcaaaacugcaguugguuc

SEQ ID NO: 429164 - RNA, 19 nt, Artificial Sequence
  Description of Artificial Sequence: Synthetic oligonucleotide
cagagagguauuucagaca

SEQ ID NO: 429165 - RNA, 19 nt, Artificial Sequence
  Description of Artificial Sequence: Synthetic oligonucleotide
ugucuacaagugucacaug

SEQ ID NO: 429166 - RNA, 19 nt, Artificial Sequence
  Description of Artificial Sequence: Synthetic oligonucleotide
ccccaauuaagcagguacc

SEQ ID NO: 429167 - RNA, 19 nt, Artificial Sequence
  Description of Artificial Sequence: Synthetic oligonucleotide
auuaccagcuaaagauggu

SEQ ID NO: 429168 - RNA, 19 nt, Artificial Sequence
  Description of Artificial Sequence: Synthetic oligonucleotide
caguucuacagguaagaua

SEQ ID NO: 429169 - RNA, 19 nt, Artificial Sequence
  Description of Artificial Sequence: Synthetic oligonucleotide
aaagagcguugcugucaca

SEQ ID NO: 429170 - RNA, 19 nt, Artificial Sequence
  Description of Artificial Sequence: Synthetic oligonucleotide
ggauacuagcucugauacc

SEQ ID NO: 429171 - RNA, 19 nt, Artificial Sequence
  Description of Artificial Sequence: Synthetic oligonucleotide
agagcguugcugucacaga

SEQ ID NO: 429172 - RNA, 19 nt, Artificial Sequence
  Description of Artificial Sequence: Synthetic oligonucleotide
caucuacaaugaaucuguc

SEQ ID NO: 429173 - RNA, 19 nt, Artificial Sequence
  Description of Artificial Sequence: Synthetic oligonucleotide
ggugcucuugucaauugug

SEQ ID NO: 429174 - RNA, 19 nt, Artificial Sequence
  Description of Artificial Sequence: Synthetic oligonucleotide
ugacccaggcccugauaca

SEQ ID NO: 429175 - RNA, 19 nt, Artificial Sequence
  Description of Artificial Sequence: Synthetic oligonucleotide
ggcaauccaagaagaaaug

SEQ ID NO: 429176 - RNA, 19 nt, Artificial Sequence
  Description of Artificial Sequence: Synthetic oligonucleotide
acuauagcuauggguuggu

SEQ ID NO: 429177 - RNA, 19 nt, Artificial Sequence
  Description of Artificial Sequence: Synthetic oligonucleotide
acccaaccgaugccuuuuc

SEQ ID NO: 429178 - RNA, 19 nt, Artificial Sequence
  Description of Artificial Sequence: Synthetic oligonucleotide
acuaacccuugagagcacu

SEQ ID NO: 429179 - RNA, 19 nt, Artificial Sequence
  Description of Artificial Sequence: Synthetic oligonucleotide
ggccuaagcugcaaccugg

SEQ ID NO: 429180 - RNA, 19 nt, Artificial Sequence
  Description of Artificial Sequence: Synthetic oligonucleotide
cccaauuaagcagguaccc

SEQ ID NO: 429181 - RNA, 19 nt, Artificial Sequence
  Description of Artificial Sequence: Synthetic oligonucleotide
cagucaguuuuacauucga

SEQ ID NO: 429182 - RNA, 19 nt, Artificial Sequence
  Description of Artificial Sequence: Synthetic oligonucleotide
aacccaaccgaugccuuuu

SEQ ID NO: 429183 - RNA, 19 nt, Artificial Sequence
  Description of Artificial Sequence: Synthetic oligonucleotide
uaagugacccaggcccuga

SEQ ID NO: 429184 - RNA, 19 nt, Artificial Sequence
  Description of Artificial Sequence: Synthetic oligonucleotide
auauccugucugagucccc

SEQ ID NO: 429185 - RNA, 19 nt, Artificial Sequence
  Description of Artificial Sequence: Synthetic oligonucleotide
aguaugccuaucagauucu

SEQ ID NO: 429186 - RNA, 19 nt, Artificial Sequence
  Description of Artificial Sequence: Synthetic oligonucleotide
cugcggcuuacucuuagca

SEQ ID NO: 429187 - RNA, 19 nt, Artificial Sequence
  Description of Artificial Sequence: Synthetic oligonucleotide
gaaccgcaaacaagaugug

SEQ ID NO: 429188 - RNA, 19 nt, Artificial Sequence
  Description of Artificial Sequence: Synthetic oligonucleotide
ucgauagcggaaggccagc

SEQ ID NO: 429189 - RNA, 19 nt, Artificial Sequence
  Description of Artificial Sequence: Synthetic oligonucleotide
gcggcuuacucuuagcaaa

SEQ ID NO: 429190 - RNA, 19 nt, Artificial Sequence
  Description of Artificial Sequence: Synthetic oligonucleotide
gauaaugccuugugacuuu

SEQ ID NO: 429191 - RNA, 19 nt, Artificial Sequence
  Description of Artificial Sequence: Synthetic oligonucleotide
augccgaagucuaaaguua

SEQ ID NO: 429192 - RNA, 19 nt, Artificial Sequence
  Description of Artificial Sequence: Synthetic oligonucleotide
uccugcuauagagcaucug

SEQ ID NO: 429193 - RNA, 19 nt, Artificial Sequence
  Description of Artificial Sequence: Synthetic oligonucleotide
auacagcaaggaccuccug

SEQ ID NO: 429194 - RNA, 19 nt, Artificial Sequence
  Description of Artificial Sequence: Synthetic oligonucleotide
auagagcaucugaagucca

SEQ ID NO: 429195 - RNA, 19 nt, Artificial Sequence
  Description of Artificial Sequence: Synthetic oligonucleotide
gugugguagugaucagaac

SEQ ID NO: 429196 - RNA, 19 nt, Artificial Sequence
  Description of Artificial Sequence: Synthetic oligonucleotide
ccacuaaagagcguugcug

SEQ ID NO: 429197 - RNA, 19 nt, Artificial Sequence
  Description of Artificial Sequence: Synthetic oligonucleotide
ccaacuugcagagaagaca

SEQ ID NO: 429198 - RNA, 19 nt, Artificial Sequence
  Description of Artificial Sequence: Synthetic oligonucleotide
cagagggagaguggcaauc

SEQ ID NO: 429199 - RNA, 19 nt, Artificial Sequence
  Description of Artificial Sequence: Synthetic oligonucleotide
agccggugcuauuaaccaa

SEQ ID NO: 429200 - RNA, 19 nt, Artificial Sequence
  Description of Artificial Sequence: Synthetic oligonucleotide
cuguuagaacuucgaucuc

SEQ ID NO: 429201 - RNA, 19 nt, Artificial Sequence
  Description of Artificial Sequence: Synthetic oligonucleotide
uccuagccaggaaucuguu

SEQ ID NO: 429202 - RNA, 19 nt, Artificial Sequence
  Description of Artificial Sequence: Synthetic oligonucleotide
gcccaagcuugccacuugg

SEQ ID NO: 429203 - RNA, 19 nt, Artificial Sequence
  Description of Artificial Sequence: Synthetic oligonucleotide
auucuacuuggagcuguga

SEQ ID NO: 429204 - RNA, 19 nt, Artificial Sequence
  Description of Artificial Sequence: Synthetic oligonucleotide
cuugggauacuagcucuga

SEQ ID NO: 429205 - RNA, 19 nt, Artificial Sequence
  Description of Artificial Sequence: Synthetic oligonucleotide
gaguuugugugaaccgcaa

SEQ ID NO: 429206 - RNA, 19 nt, Artificial Sequence
  Description of Artificial Sequence: Synthetic oligonucleotide
gcucagugugcuaggaggc

SEQ ID NO: 429207 - RNA, 19 nt, Artificial Sequence
  Description of Artificial Sequence: Synthetic oligonucleotide
gggauaaugccuugugacu

SEQ ID NO: 429208 - RNA, 19 nt, Artificial Sequence
  Description of Artificial Sequence: Synthetic oligonucleotide
agguacccacauugguccu

SEQ ID NO: 429209 - RNA, 19 nt, Artificial Sequence
  Description of Artificial Sequence: Synthetic oligonucleotide
cagguaagauacaggagau

SEQ ID NO: 429210 - RNA, 19 nt, Artificial Sequence
  Description of Artificial Sequence: Synthetic oligonucleotide
cuauagcuauggguugguc

SEQ ID NO: 429211 - RNA, 19 nt, Artificial Sequence
  Description of Artificial Sequence: Synthetic oligonucleotide
cauugguccuaaagggaua

SEQ ID NO: 429212 - RNA, 19 nt, Artificial Sequence
  Description of Artificial Sequence: Synthetic oligonucleotide
caauaggaaccugaauucu

SEQ ID NO: 429213 - RNA, 19 nt, Artificial Sequence
  Description of Artificial Sequence: Synthetic oligonucleotide
gucaauugugugacuccca

SEQ ID NO: 429214 - RNA, 19 nt, Artificial Sequence
  Description of Artificial Sequence: Synthetic oligonucleotide
auacuagcucugauaccca

SEQ ID NO: 429215 - RNA, 19 nt, Artificial Sequence
  Description of Artificial Sequence: Synthetic oligonucleotide
cucuguaccagcagccggu

SEQ ID NO: 429216 - RNA, 19 nt, Artificial Sequence
  Description of Artificial Sequence: Synthetic oligonucleotide
cugaggcuuacaagaugga

SEQ ID NO: 429217 - RNA, 19 nt, Artificial Sequence
  Description of Artificial Sequence: Synthetic oligonucleotide
agcguugcugucacagaga

SEQ ID NO: 429218 - RNA, 19 nt, Artificial Sequence
  Description of Artificial Sequence: Synthetic oligonucleotide
gcaguugguucugauugug

SEQ ID NO: 429219 - RNA, 19 nt, Artificial Sequence
  Description of Artificial Sequence: Synthetic oligonucleotide
cuccuacguugcuuuuaug

SEQ ID NO: 429220 - RNA, 19 nt, Artificial Sequence
  Description of Artificial Sequence: Synthetic oligonucleotide
guguucucgccagcauucc

SEQ ID NO: 429221 - RNA, 19 nt, Artificial Sequence
  Description of Artificial Sequence: Synthetic oligonucleotide
gguauccacucucccggac

SEQ ID NO: 429222 - RNA, 19 nt, Artificial Sequence
  Description of Artificial Sequence: Synthetic oligonucleotide
guccaauaguucugaagau

SEQ ID NO: 429223 - RNA, 19 nt, Artificial Sequence
  Description of Artificial Sequence: Synthetic oligonucleotide
cgaagucuaaaguuaguaa

SEQ ID NO: 429224 - RNA, 19 nt, Artificial Sequence
  Description of Artificial Sequence: Synthetic oligonucleotide
cccugugggugcucaaacc

SEQ ID NO: 429225 - RNA, 19 nt, Artificial Sequence
  Description of Artificial Sequence: Synthetic oligonucleotide
agggcccaagcuugccacu

SEQ ID NO: 429226 - RNA, 19 nt, Artificial Sequence
  Description of Artificial Sequence: Synthetic oligonucleotide
gacucccauucaaaguugu

SEQ ID NO: 429227 - RNA, 19 nt, Artificial Sequence
  Description of Artificial Sequence: Synthetic oligonucleotide
ccuuaacugcugcucucag

SEQ ID NO: 429228 - RNA, 19 nt, Artificial Sequence
  Description of Artificial Sequence: Synthetic oligonucleotide
cuuacucaagaaggccuaa

SEQ ID NO: 429229 - RNA, 19 nt, Artificial Sequence
  Description of Artificial Sequence: Synthetic oligonucleotide
ggacagugacuauagcuau

SEQ ID NO: 429230 - RNA, 19 nt, Artificial Sequence
  Description of Artificial Sequence: Synthetic oligonucleotide
auggugugcugcacuuucu

SEQ ID NO: 429231 - RNA, 19 nt, Artificial Sequence
  Description of Artificial Sequence: Synthetic oligonucleotide
ccuacguugcuuuuaugcu

SEQ ID NO: 429232 - RNA, 19 nt, Artificial Sequence
  Description of Artificial Sequence: Synthetic oligonucleotide
gcugcggcuuacucuuagc

SEQ ID NO: 429233 - RNA, 19 nt, Artificial Sequence
  Description of Artificial Sequence: Synthetic oligonucleotide
gauagcggaaggccagcuu

SEQ ID NO: 429234 - RNA, 19 nt, Artificial Sequence
  Description of Artificial Sequence: Synthetic oligonucleotide
cuuuacacaccgcuuucuu

SEQ ID NO: 429235 - RNA, 19 nt, Artificial Sequence
  Description of Artificial Sequence: Synthetic oligonucleotide
gcacugaauccaacaggag

SEQ ID NO: 429236 - RNA, 19 nt, Artificial Sequence
  Description of Artificial Sequence: Synthetic oligonucleotide
gcuauggguuggucaagga

SEQ ID NO: 429237 - RNA, 19 nt, Artificial Sequence
  Description of Artificial Sequence: Synthetic oligonucleotide
uaccccaauuaagcaggua

SEQ ID NO: 429238 - RNA, 19 nt, Artificial Sequence
  Description of Artificial Sequence: Synthetic oligonucleotide
ccaauuaagcagguaccca

SEQ ID NO: 429239 - RNA, 19 nt, Artificial Sequence
  Description of Artificial Sequence: Synthetic oligonucleotide
ccuugcuugcuagagcuga

SEQ ID NO: 429240 - RNA, 19 nt, Artificial Sequence
  Description of Artificial Sequence: Synthetic oligonucleotide
ccgucagcaugaucaggag

SEQ ID NO: 429241 - RNA, 19 nt, Artificial Sequence
  Description of Artificial Sequence: Synthetic oligonucleotide
guaaagcaugggagcggca

SEQ ID NO: 429242 - RNA, 19 nt, Artificial Sequence
  Description of Artificial Sequence: Synthetic oligonucleotide
ccaagccuuugugggaacc

SEQ ID NO: 429243 - RNA, 19 nt, Artificial Sequence
  Description of Artificial Sequence: Synthetic oligonucleotide
cccaaccgaugccuuuucc

SEQ ID NO: 429244 - RNA, 19 nt, Artificial Sequence
  Description of Artificial Sequence: Synthetic oligonucleotide
cccaaaucaaaagucccaa

SEQ ID NO: 429245 - RNA, 19 nt, Artificial Sequence
  Description of Artificial Sequence: Synthetic oligonucleotide
caaaugcccgaagucacau

SEQ ID NO: 429246 - RNA, 19 nt, Artificial Sequence
  Description of Artificial Sequence: Synthetic oligonucleotide
ccgaagucacauaaauaua

SEQ ID NO: 429247 - RNA, 19 nt, Artificial Sequence
  Description of Artificial Sequence: Synthetic oligonucleotide
ccauucaaaguugugucua

SEQ ID NO: 429248 - RNA, 19 nt, Artificial Sequence
  Description of Artificial Sequence: Synthetic oligonucleotide
ccaacaggagaaggauuac

SEQ ID NO: 429249 - RNA, 19 nt, Artificial Sequence
  Description of Artificial Sequence: Synthetic oligonucleotide
ccgaagucuaaaguuagua

SEQ ID NO: 429250 - RNA, 19 nt, Artificial Sequence
  Description of Artificial Sequence: Synthetic oligonucleotide
ccuuaaugggauggcucug

SEQ ID NO: 429251 - RNA, 19 nt, Artificial Sequence
  Description of Artificial Sequence: Synthetic oligonucleotide
ggaccuccugaggaccaag

SEQ ID NO: 429252 - RNA, 19 nt, Artificial Sequence
  Description of Artificial Sequence: Synthetic oligonucleotide
ccaaugagccaucuuucua

SEQ ID NO: 429253 - RNA, 19 nt, Artificial Sequence
  Description of Artificial Sequence: Synthetic oligonucleotide
ggcuuacaagauggagaug

SEQ ID NO: 429254 - RNA, 19 nt, Artificial Sequence
  Description of Artificial Sequence: Synthetic oligonucleotide
ccaaccgaugccuuuuccu

SEQ ID NO: 429255 - RNA, 19 nt, Artificial Sequence
  Description of Artificial Sequence: Synthetic oligonucleotide
gggcuagccuguacucucc

SEQ ID NO: 429256 - RNA, 19 nt, Artificial Sequence
  Description of Artificial Sequence: Synthetic oligonucleotide
ggcuagccuguacucucca

SEQ ID NO: 429257 - RNA, 19 nt, Artificial Sequence
  Description of Artificial Sequence: Synthetic oligonucleotide
gggccacuaaagagcguug

SEQ ID NO: 429258 - RNA, 19 nt, Artificial Sequence
  Description of Artificial Sequence: Synthetic oligonucleotide
gcucaaaccuuggaccucu

SEQ ID NO: 429259 - RNA, 19 nt, Artificial Sequence
  Description of Artificial Sequence: Synthetic oligonucleotide
caauugugugacucccauu

SEQ ID NO: 429260 - RNA, 19 nt, Artificial Sequence
  Description of Artificial Sequence: Synthetic oligonucleotide
uggguuggucaaggaccuc

SEQ ID NO: 429261 - RNA, 19 nt, Artificial Sequence
  Description of Artificial Sequence: Synthetic oligonucleotide
cccaacucuagacaaguuu

SEQ ID NO: 429262 - RNA, 19 nt, Artificial Sequence
  Description of Artificial Sequence: Synthetic oligonucleotide
gcuagccuguacucuccaa

SEQ ID NO: 429263 - RNA, 19 nt, Artificial Sequence
  Description of Artificial Sequence: Synthetic oligonucleotide
ccuccuuaacugcugcucu

SEQ ID NO: 429264 - RNA, 19 nt, Artificial Sequence
  Description of Artificial Sequence: Synthetic oligonucleotide
gagcggcaaugggcugcgg

SEQ ID NO: 429265 - RNA, 19 nt, Artificial Sequence
  Description of Artificial Sequence: Synthetic oligonucleotide
ccaacuuggcaucuacaau

SEQ ID NO: 429266 - RNA, 19 nt, Artificial Sequence
  Description of Artificial Sequence: Synthetic oligonucleotide
ccaagagugcaacuguguu

SEQ ID NO: 429267 - RNA, 19 nt, Artificial Sequence
  Description of Artificial Sequence: Synthetic oligonucleotide
gccggugcuauuaaccaau

SEQ ID NO: 429268 - RNA, 19 nt, Artificial Sequence
  Description of Artificial Sequence: Synthetic oligonucleotide
gcccgaagucacauaaaua

SEQ ID NO: 429269 - RNA, 19 nt, Artificial Sequence
  Description of Artificial Sequence: Synthetic oligonucleotide
ccaaaucaaaagucccaau

SEQ ID NO: 429270 - RNA, 19 nt, Artificial Sequence
  Description of Artificial Sequence: Synthetic oligonucleotide
cgaucucugcucuuagucu

SEQ ID NO: 429271 - RNA, 19 nt, Artificial Sequence
  Description of Artificial Sequence: Synthetic oligonucleotide
gguuggucaaggaccuccu

SEQ ID NO: 429272 - RNA, 19 nt, Artificial Sequence
  Description of Artificial Sequence: Synthetic oligonucleotide
caacccaaccgaugccuuu

SEQ ID NO: 429273 - RNA, 19 nt, Artificial Sequence
  Description of Artificial Sequence: Synthetic oligonucleotide
gguacccacauugguccua

SEQ ID NO: 429274 - RNA, 19 nt, Artificial Sequence
  Description of Artificial Sequence: Synthetic oligonucleotide
cccaagccuuugugggaac

SEQ ID NO: 429275 - RNA, 19 nt, Artificial Sequence
  Description of Artificial Sequence: Synthetic oligonucleotide
gagagguauuucagacauu

SEQ ID NO: 429276 - RNA, 19 nt, Artificial Sequence
  Description of Artificial Sequence: Synthetic oligonucleotide
gcaguucuacagguaagau

SEQ ID NO: 429277 - RNA, 19 nt, Artificial Sequence
  Description of Artificial Sequence: Synthetic oligonucleotide
ccuccuacguugcuuuuau

SEQ ID NO: 429278 - RNA, 19 nt, Artificial Sequence
  Description of Artificial Sequence: Synthetic oligonucleotide
cggcuuacucuuagcaaaa

SEQ ID NO: 429279 - RNA, 19 nt, Artificial Sequence
  Description of Artificial Sequence: Synthetic oligonucleotide
ccggacaucaucagcuguu

SEQ ID NO: 429280 - RNA, 19 nt, Artificial Sequence
  Description of Artificial Sequence: Synthetic oligonucleotide
gccgaagucuaaaguuagu

SEQ ID NO: 429281 - RNA, 19 nt, Artificial Sequence
  Description of Artificial Sequence: Synthetic oligonucleotide
ggggugcuucagagaccag

SEQ ID NO: 429282 - RNA, 19 nt, Artificial Sequence
  Description of Artificial Sequence: Synthetic oligonucleotide
cccggacaucaucagcugu

SEQ ID NO: 429283 - RNA, 19 nt, Artificial Sequence
  Description of Artificial Sequence: Synthetic oligonucleotide
ccaacccaaccgaugccuu

SEQ ID NO: 429284 - RNA, 19 nt, Artificial Sequence
  Description of Artificial Sequence: Synthetic oligonucleotide
caguuuccgucagcaugau

SEQ ID NO: 429285 - RNA, 19 nt, Artificial Sequence
  Description of Artificial Sequence: Synthetic oligonucleotide
cgaugccuuuuccugcuau

SEQ ID NO: 429286 - RNA, 19 nt, Artificial Sequence
  Description of Artificial Sequence: Synthetic oligonucleotide
gggcugcggcuuacucuua

SEQ ID NO: 429287 - RNA, 19 nt, Artificial Sequence
  Description of Artificial Sequence: Synthetic oligonucleotide
uauauauauauauauaugc

SEQ ID NO: 429288 - RNA, 19 nt, Artificial Sequence
  Description of Artificial Sequence: Synthetic oligonucleotide
agaaauaacaaucaagugu

SEQ ID NO: 429289 - RNA, 19 nt, Artificial Sequence
  Description of Artificial Sequence: Synthetic oligonucleotide
uauauauauauauauauau

SEQ ID NO: 429290 - RNA, 19 nt, Artificial Sequence
  Description of Artificial Sequence: Synthetic oligonucleotide
ucuauauauauauauauau

SEQ ID NO: 429291 - RNA, 19 nt, Artificial Sequence
  Description of Artificial Sequence: Synthetic oligonucleotide
ucuauaucuauauauauau

SEQ ID NO: 429292 - RNA, 19 nt, Artificial Sequence
  Description of Artificial Sequence: Synthetic oligonucleotide
uauaucuauauauauauau

SEQ ID NO: 429293 - RNA, 19 nt, Artificial Sequence
  Description of Artificial Sequence: Synthetic oligonucleotide
aaaccggaaacauacaaug

SEQ ID NO: 429294 - RNA, 19 nt, Artificial Sequence
  Description of Artificial Sequence: Synthetic oligonucleotide
uugaucgacaucuucaucc

SEQ ID NO: 429295 - RNA, 19 nt, Artificial Sequence
  Description of Artificial Sequence: Synthetic oligonucleotide
aaguuggagacuuccauuc

SEQ ID NO: 429296 - RNA, 19 nt, Artificial Sequence
  Description of Artificial Sequence: Synthetic oligonucleotide
ucaugauucucacugacug

SEQ ID NO: 429297 - RNA, 19 nt, Artificial Sequence
  Description of Artificial Sequence: Synthetic oligonucleotide
uaucuauauauauauauau

SEQ ID NO: 429298 - RNA, 19 nt, Artificial Sequence
  Description of Artificial Sequence: Synthetic oligonucleotide
aucacagucauacaaucuc

SEQ ID NO: 429299 - RNA, 19 nt, Artificial Sequence
  Description of Artificial Sequence: Synthetic oligonucleotide
auauauaugcuuucccuuc

SEQ ID NO: 429300 - RNA, 19 nt, Artificial Sequence
  Description of Artificial Sequence: Synthetic oligonucleotide
auauauauauaugcuuucc

SEQ ID NO: 429301 - RNA, 19 nt, Artificial Sequence
  Description of Artificial Sequence: Synthetic oligonucleotide
aguaaugaugauucgcuuc

SEQ ID NO: 429302 - RNA, 19 nt, Artificial Sequence
  Description of Artificial Sequence: Synthetic oligonucleotide
uauauauauauauaugcuu

SEQ ID NO: 429303 - RNA, 19 nt, Artificial Sequence
  Description of Artificial Sequence: Synthetic oligonucleotide
uuacgauuguuacauaucu

SEQ ID NO: 429304 - RNA, 19 nt, Artificial Sequence
  Description of Artificial Sequence: Synthetic oligonucleotide
aagagaacggauuuccgug

SEQ ID NO: 429305 - RNA, 19 nt, Artificial Sequence
  Description of Artificial Sequence: Synthetic oligonucleotide
cuuggguuggaccagacac

SEQ ID NO: 429306 - RNA, 19 nt, Artificial Sequence
  Description of Artificial Sequence: Synthetic oligonucleotide
auaacaaucaaguguuccu

SEQ ID NO: 429307 - RNA, 19 nt, Artificial Sequence
  Description of Artificial Sequence: Synthetic oligonucleotide
uagacaacggcuuugguua

SEQ ID NO: 429308 - RNA, 19 nt, Artificial Sequence
  Description of Artificial Sequence: Synthetic oligonucleotide
gaggaagcgacagagaggc

SEQ ID NO: 429309 - RNA, 19 nt, Artificial Sequence
  Description of Artificial Sequence: Synthetic oligonucleotide
gaugauucgcuucucaauc

SEQ ID NO: 429310 - RNA, 19 nt, Artificial Sequence
  Description of Artificial Sequence: Synthetic oligonucleotide
uauauaugcuuucccuucc

SEQ ID NO: 429311 - RNA, 19 nt, Artificial Sequence
  Description of Artificial Sequence: Synthetic oligonucleotide
uucacggacucaaacuggg

SEQ ID NO: 429312 - RNA, 19 nt, Artificial Sequence
  Description of Artificial Sequence: Synthetic oligonucleotide
auauauauauauauauaug

SEQ ID NO: 429313 - RNA, 19 nt, Artificial Sequence
  Description of Artificial Sequence: Synthetic oligonucleotide
aagaauaccgcgucccucu

SEQ ID NO: 429314 - RNA, 19 nt, Artificial Sequence
  Description of Artificial Sequence: Synthetic oligonucleotide
uauauauauauaugcuuuc

SEQ ID NO: 429315 - RNA, 19 nt, Artificial Sequence
  Description of Artificial Sequence: Synthetic oligonucleotide
uuuguaguuuggcaggaga

SEQ ID NO: 429316 - RNA, 19 nt, Artificial Sequence
  Description of Artificial Sequence: Synthetic oligonucleotide
agacccagaaauaacaauc

SEQ ID NO: 429317 - RNA, 19 nt, Artificial Sequence
  Description of Artificial Sequence: Synthetic oligonucleotide
agaugaguagaagucaagg

SEQ ID NO: 429318 - RNA, 19 nt, Artificial Sequence
  Description of Artificial Sequence: Synthetic oligonucleotide
agugacaguaugucacagc

SEQ ID NO: 429319 - RNA, 19 nt, Artificial Sequence
  Description of Artificial Sequence: Synthetic oligonucleotide
ucgucaugaagucuuuucc

SEQ ID NO: 429320 - RNA, 19 nt, Artificial Sequence
  Description of Artificial Sequence: Synthetic oligonucleotide
gagagauuacgauuguuac

SEQ ID NO: 429321 - RNA, 19 nt, Artificial Sequence
  Description of Artificial Sequence: Synthetic oligonucleotide
auauauauauauauaugcu

SEQ ID NO: 429322 - RNA, 19 nt, Artificial Sequence
  Description of Artificial Sequence: Synthetic oligonucleotide
uccccaguaaugaugauuc

SEQ ID NO: 429323 - RNA, 19 nt, Artificial Sequence
  Description of Artificial Sequence: Synthetic oligonucleotide
uuuccugauauauaucuau

SEQ ID NO: 429324 - RNA, 19 nt, Artificial Sequence
  Description of Artificial Sequence: Synthetic oligonucleotide
agacaagaugaguagaagu

SEQ ID NO: 429325 - RNA, 19 nt, Artificial Sequence
  Description of Artificial Sequence: Synthetic oligonucleotide
auaaccgugaaguccaccu

SEQ ID NO: 429326 - RNA, 19 nt, Artificial Sequence
  Description of Artificial Sequence: Synthetic oligonucleotide
auauaugcuuucccuuccc

SEQ ID NO: 429327 - RNA, 19 nt, Artificial Sequence
  Description of Artificial Sequence: Synthetic oligonucleotide
uucaauuggucugcaaagg

SEQ ID NO: 429328 - RNA, 19 nt, Artificial Sequence
  Description of Artificial Sequence: Synthetic oligonucleotide
gaaggccccuucuuaaugg

SEQ ID NO: 429329 - RNA, 19 nt, Artificial Sequence
  Description of Artificial Sequence: Synthetic oligonucleotide
aaugaaggccccuucuuaa

SEQ ID NO: 429330 - RNA, 19 nt, Artificial Sequence
  Description of Artificial Sequence: Synthetic oligonucleotide
uucucacugacugaggcag

SEQ ID NO: 429331 - RNA, 19 nt, Artificial Sequence
  Description of Artificial Sequence: Synthetic oligonucleotide
cuuucacggacucaaacug

SEQ ID NO: 429332 - RNA, 19 nt, Artificial Sequence
  Description of Artificial Sequence: Synthetic oligonucleotide
accaauucaauuggucugc

SEQ ID NO: 429333 - RNA, 19 nt, Artificial Sequence
  Description of Artificial Sequence: Synthetic oligonucleotide
ugguagucgccgauaaccg

SEQ ID NO: 429334 - RNA, 19 nt, Artificial Sequence
  Description of Artificial Sequence: Synthetic oligonucleotide
uccgucaagagaaaccgga

SEQ ID NO: 429335 - RNA, 19 nt, Artificial Sequence
  Description of Artificial Sequence: Synthetic oligonucleotide
aaaauggagacaagaugag

SEQ ID NO: 429336 - RNA, 19 nt, Artificial Sequence
  Description of Artificial Sequence: Synthetic oligonucleotide
gaugcuguaguuuggcuuc

SEQ ID NO: 429337 - RNA, 19 nt, Artificial Sequence
  Description of Artificial Sequence: Synthetic oligonucleotide
auauauauauauaugcuuu

SEQ ID NO: 429338 - RNA, 19 nt, Artificial Sequence
  Description of Artificial Sequence: Synthetic oligonucleotide
agagaacggauuuccgugg

SEQ ID NO: 429339 - RNA, 19 nt, Artificial Sequence
  Description of Artificial Sequence: Synthetic oligonucleotide
ucucucaucagugacagua

SEQ ID NO: 429340 - RNA, 19 nt, Artificial Sequence
  Description of Artificial Sequence: Synthetic oligonucleotide
gacaagaugaguagaaguc

SEQ ID NO: 429341 - RNA, 19 nt, Artificial Sequence
  Description of Artificial Sequence: Synthetic oligonucleotide
uuggguuggaccagacacg

SEQ ID NO: 429342 - RNA, 19 nt, Artificial Sequence
  Description of Artificial Sequence: Synthetic oligonucleotide
aauaccgcgucccucuccu

SEQ ID NO: 429343 - RNA, 19 nt, Artificial Sequence
  Description of Artificial Sequence: Synthetic oligonucleotide
uugagaucccgagagaaca

SEQ ID NO: 429344 - RNA, 19 nt, Artificial Sequence
  Description of Artificial Sequence: Synthetic oligonucleotide
uuaaugguucucuggcuug

SEQ ID NO: 429345 - RNA, 19 nt, Artificial Sequence
  Description of Artificial Sequence: Synthetic oligonucleotide
augauucucacugacugag

SEQ ID NO: 429346 - RNA, 19 nt, Artificial Sequence
  Description of Artificial Sequence: Synthetic oligonucleotide
agucucugcuuucacggac

SEQ ID NO: 429347 - RNA, 19 nt, Artificial Sequence
  Description of Artificial Sequence: Synthetic oligonucleotide
acagagaggcuggagaacg

SEQ ID NO: 429348 - RNA, 19 nt, Artificial Sequence
  Description of Artificial Sequence: Synthetic oligonucleotide
aacggauuuccguggccac

SEQ ID NO: 429349 - RNA, 19 nt, Artificial Sequence
  Description of Artificial Sequence: Synthetic oligonucleotide
auuacgauuguuacauauc

SEQ ID NO: 429350 - RNA, 19 nt, Artificial Sequence
  Description of Artificial Sequence: Synthetic oligonucleotide
cagggccuggucuugaucg

SEQ ID NO: 429351 - RNA, 19 nt, Artificial Sequence
  Description of Artificial Sequence: Synthetic oligonucleotide
uguuacauaucuuccugaa

SEQ ID NO: 429352 - RNA, 19 nt, Artificial Sequence
  Description of Artificial Sequence: Synthetic oligonucleotide
uguugagaggguuuccgca

SEQ ID NO: 429353 - RNA, 19 nt, Artificial Sequence
  Description of Artificial Sequence: Synthetic oligonucleotide
agagauuacgauuguuaca

SEQ ID NO: 429354 - RNA, 19 nt, Artificial Sequence
  Description of Artificial Sequence: Synthetic oligonucleotide
ugguuguccuucaagaaua

SEQ ID NO: 429355 - RNA, 19 nt, Artificial Sequence
  Description of Artificial Sequence: Synthetic oligonucleotide
ucgccgauaaccgugaagu

SEQ ID NO: 429356 - RNA, 19 nt, Artificial Sequence
  Description of Artificial Sequence: Synthetic oligonucleotide
cuauauauauauauauaua

SEQ ID NO: 429357 - RNA, 19 nt, Artificial Sequence
  Description of Artificial Sequence: Synthetic oligonucleotide
guaguuuggcaggagaaag

SEQ ID NO: 429358 - RNA, 19 nt, Artificial Sequence
  Description of Artificial Sequence: Synthetic oligonucleotide
ucuucgaaggcgcugccgu

SEQ ID NO: 429359 - RNA, 19 nt, Artificial Sequence
  Description of Artificial Sequence: Synthetic oligonucleotide
uucacggaggucaggauuc

SEQ ID NO: 429360 - RNA, 19 nt, Artificial Sequence
  Description of Artificial Sequence: Synthetic oligonucleotide
ugaucgacaucuucauccc

SEQ ID NO: 429361 - RNA, 19 nt, Artificial Sequence
  Description of Artificial Sequence: Synthetic oligonucleotide
ugaaggccccuucuuaaug

SEQ ID NO: 429362 - RNA, 19 nt, Artificial Sequence
  Description of Artificial Sequence: Synthetic oligonucleotide
ucagagaacccucccuuca

SEQ ID NO: 429363 - RNA, 19 nt, Artificial Sequence
  Description of Artificial Sequence: Synthetic oligonucleotide
gugguagucgccgauaacc

SEQ ID NO: 429364 - RNA, 19 nt, Artificial Sequence
  Description of Artificial Sequence: Synthetic oligonucleotide
ugauucucacugacugagg

SEQ ID NO: 429365 - RNA, 19 nt, Artificial Sequence
  Description of Artificial Sequence: Synthetic oligonucleotide
guugagaggguuuccgcag

SEQ ID NO: 429366 - RNA, 19 nt, Artificial Sequence
  Description of Artificial Sequence: Synthetic oligonucleotide
auauauauauauauauaua

SEQ ID NO: 429367 - RNA, 19 nt, Artificial Sequence
  Description of Artificial Sequence: Synthetic oligonucleotide
aaauggagacaagaugagu

SEQ ID NO: 429368 - RNA, 19 nt, Artificial Sequence
  Description of Artificial Sequence: Synthetic oligonucleotide
gagcgagagauuacgauug

SEQ ID NO: 429369 - RNA, 19 nt, Artificial Sequence
  Description of Artificial Sequence: Synthetic oligonucleotide
uccuguuacauguaauaua

SEQ ID NO: 429370 - RNA, 19 nt, Artificial Sequence
  Description of Artificial Sequence: Synthetic oligonucleotide
cauccucuuggcuggaggg

SEQ ID NO: 429371 - RNA, 19 nt, Artificial Sequence
  Description of Artificial Sequence: Synthetic oligonucleotide
ucccgagagaacaccaggc

SEQ ID NO: 429372 - RNA, 19 nt, Artificial Sequence
  Description of Artificial Sequence: Synthetic oligonucleotide
ugcuuucacggacucaaac

SEQ ID NO: 429373 - RNA, 19 nt, Artificial Sequence
  Description of Artificial Sequence: Synthetic oligonucleotide
cuuaucacggucgagcuca

SEQ ID NO: 429374 - RNA, 19 nt, Artificial Sequence
  Description of Artificial Sequence: Synthetic oligonucleotide
ugaugauucgcuucucaau

SEQ ID NO: 429375 - RNA, 19 nt, Artificial Sequence
  Description of Artificial Sequence: Synthetic oligonucleotide
cacggacucaaacuggggc

SEQ ID NO: 429376 - RNA, 19 nt, Artificial Sequence
  Description of Artificial Sequence: Synthetic oligonucleotide
uguugucggagaauccaga

SEQ ID NO: 429377 - RNA, 19 nt, Artificial Sequence
  Description of Artificial Sequence: Synthetic oligonucleotide
agagcgagagauuacgauu

SEQ ID NO: 429378 - RNA, 19 nt, Artificial Sequence
  Description of Artificial Sequence: Synthetic oligonucleotide
gauuguuacauaucuuccu

SEQ ID NO: 429379 - RNA, 19 nt, Artificial Sequence
  Description of Artificial Sequence: Synthetic oligonucleotide
uucgggagaagucuucgaa

SEQ ID NO: 429380 - RNA, 19 nt, Artificial Sequence
  Description of Artificial Sequence: Synthetic oligonucleotide
gauuacgauuguuacauau

SEQ ID NO: 429381 - RNA, 19 nt, Artificial Sequence
  Description of Artificial Sequence: Synthetic oligonucleotide
uuagaggaagcgacagaga

SEQ ID NO: 429382 - RNA, 19 nt, Artificial Sequence
  Description of Artificial Sequence: Synthetic oligonucleotide
gagauuacgauuguuacau

SEQ ID NO: 429383 - RNA, 19 nt, Artificial Sequence
  Description of Artificial Sequence: Synthetic oligonucleotide
agucgcucuuaucacgguc

SEQ ID NO: 429384 - RNA, 19 nt, Artificial Sequence
  Description of Artificial Sequence: Synthetic oligonucleotide
aaggacgcgguguuuccug

SEQ ID NO: 429385 - RNA, 19 nt, Artificial Sequence
  Description of Artificial Sequence: Synthetic oligonucleotide
uacuuaccagcacaguuua

SEQ ID NO: 429386 - RNA, 19 nt, Artificial Sequence
  Description of Artificial Sequence: Synthetic oligonucleotide
auaucuauauauauauaua

SEQ ID NO: 429387 - RNA, 19 nt, Artificial Sequence
  Description of Artificial Sequence: Synthetic oligonucleotide
uccgcaguggcgccguagg

SEQ ID NO: 429388 - RNA, 19 nt, Artificial Sequence
  Description of Artificial Sequence: Synthetic oligonucleotide
accuccgucaagagaaacc

SEQ ID NO: 429389 - RNA, 19 nt, Artificial Sequence
  Description of Artificial Sequence: Synthetic oligonucleotide
cucccaaucucgaucccgg

SEQ ID NO: 429390 - RNA, 19 nt, Artificial Sequence
  Description of Artificial Sequence: Synthetic oligonucleotide
gucgcucuuaucacggucg

SEQ ID NO: 429391 - RNA, 19 nt, Artificial Sequence
  Description of Artificial Sequence: Synthetic oligonucleotide
ucggugaaagagaacggau

SEQ ID NO: 429392 - RNA, 19 nt, Artificial Sequence
  Description of Artificial Sequence: Synthetic oligonucleotide
ucacggacucaaacugggg

SEQ ID NO: 429393 - RNA, 19 nt, Artificial Sequence
  Description of Artificial Sequence: Synthetic oligonucleotide
uacaaucuccuaugagcug

SEQ ID NO: 429394 - RNA, 19 nt, Artificial Sequence
  Description of Artificial Sequence: Synthetic oligonucleotide
uacgugaucuuauuuuguu

SEQ ID NO: 429395 - RNA, 19 nt, Artificial Sequence
  Description of Artificial Sequence: Synthetic oligonucleotide
caaugagagucaucugcag

SEQ ID NO: 429396 - RNA, 19 nt, Artificial Sequence
  Description of Artificial Sequence: Synthetic oligonucleotide
gcuacgugaucuuauuuug

SEQ ID NO: 429397 - RNA, 19 nt, Artificial Sequence
  Description of Artificial Sequence: Synthetic oligonucleotide
ucaauccuugucucagaga

SEQ ID NO: 429398 - RNA, 19 nt, Artificial Sequence
  Description of Artificial Sequence: Synthetic oligonucleotide
cugagacagaaaauggaga

SEQ ID NO: 429399 - RNA, 19 nt, Artificial Sequence
  Description of Artificial Sequence: Synthetic oligonucleotide
ugagaucccgagagaacac

SEQ ID NO: 429400 - RNA, 19 nt, Artificial Sequence
  Description of Artificial Sequence: Synthetic oligonucleotide
auucucacugacugaggca

SEQ ID NO: 429401 - RNA, 19 nt, Artificial Sequence
  Description of Artificial Sequence: Synthetic oligonucleotide
aucuauauauauauauaua

SEQ ID NO: 429402 - RNA, 19 nt, Artificial Sequence
  Description of Artificial Sequence: Synthetic oligonucleotide
gucgucaugaagucuuuuc

SEQ ID NO: 429403 - RNA, 19 nt, Artificial Sequence
  Description of Artificial Sequence: Synthetic oligonucleotide
gagcugacgagcacuugcg

SEQ ID NO: 429404 - RNA, 19 nt, Artificial Sequence
  Description of Artificial Sequence: Synthetic oligonucleotide
agacaacggcuuugguuac

SEQ ID NO: 429405 - RNA, 19 nt, Artificial Sequence
  Description of Artificial Sequence: Synthetic oligonucleotide
uggagacaagaugaguaga

SEQ ID NO: 429406 - RNA, 19 nt, Artificial Sequence
  Description of Artificial Sequence: Synthetic oligonucleotide
guagucgccgauaaccgug

SEQ ID NO: 429407 - RNA, 19 nt, Artificial Sequence
  Description of Artificial Sequence: Synthetic oligonucleotide
ccugauauauaucuauauc

SEQ ID NO: 429408 - RNA, 19 nt, Artificial Sequence
  Description of Artificial Sequence: Synthetic oligonucleotide
acgccagcaucucuucacg

SEQ ID NO: 429409 - RNA, 19 nt, Artificial Sequence
  Description of Artificial Sequence: Synthetic oligonucleotide
uccgggcuguccucgaugc

SEQ ID NO: 429410 - RNA, 19 nt, Artificial Sequence
  Description of Artificial Sequence: Synthetic oligonucleotide
uacgauuguuacauaucuu

SEQ ID NO: 429411 - RNA, 19 nt, Artificial Sequence
  Description of Artificial Sequence: Synthetic oligonucleotide
ggagcugacgagcacuugc

SEQ ID NO: 429412 - RNA, 19 nt, Artificial Sequence
  Description of Artificial Sequence: Synthetic oligonucleotide
cacggucgagcucagggag

SEQ ID NO: 429413 - RNA, 19 nt, Artificial Sequence
  Description of Artificial Sequence: Synthetic oligonucleotide
ucacggucgagcucaggga

SEQ ID NO: 429414 - RNA, 19 nt, Artificial Sequence
  Description of Artificial Sequence: Synthetic oligonucleotide
aucggugaaagagaacgga

SEQ ID NO: 429415 - RNA, 19 nt, Artificial Sequence
  Description of Artificial Sequence: Synthetic oligonucleotide
ucuuaucacggucgagcuc

SEQ ID NO: 429416 - RNA, 19 nt, Artificial Sequence
  Description of Artificial Sequence: Synthetic oligonucleotide
uugagaggguuuccgcagu

SEQ ID NO: 429417 - RNA, 19 nt, Artificial Sequence
  Description of Artificial Sequence: Synthetic oligonucleotide
ugacgagcacuugcgcucg

SEQ ID NO: 429418 - RNA, 19 nt, Artificial Sequence
  Description of Artificial Sequence: Synthetic oligonucleotide
caauuggucugcaaaggaa

SEQ ID NO: 429419 - RNA, 19 nt, Artificial Sequence
  Description of Artificial Sequence: Synthetic oligonucleotide
gaagucuucgaaggcgcug

SEQ ID NO: 429420 - RNA, 19 nt, Artificial Sequence
  Description of Artificial Sequence: Synthetic oligonucleotide
ucucaauccuugucucaga

SEQ ID NO: 429421 - RNA, 19 nt, Artificial Sequence
  Description of Artificial Sequence: Synthetic oligonucleotide
uguagacaacggcuuuggu

SEQ ID NO: 429422 - RNA, 19 nt, Artificial Sequence
  Description of Artificial Sequence: Synthetic oligonucleotide
ucccgaugaucggugaaag

SEQ ID NO: 429423 - RNA, 19 nt, Artificial Sequence
  Description of Artificial Sequence: Synthetic oligonucleotide
agagaacccucccuucaca

SEQ ID NO: 429424 - RNA, 19 nt, Artificial Sequence
  Description of Artificial Sequence: Synthetic oligonucleotide
ggaagcgacagagaggcug

SEQ ID NO: 429425 - RNA, 19 nt, Artificial Sequence
  Description of Artificial Sequence: Synthetic oligonucleotide
ccgaugaucggugaaagag

SEQ ID NO: 429426 - RNA, 19 nt, Artificial Sequence
  Description of Artificial Sequence: Synthetic oligonucleotide
cugacggucauagucucug

SEQ ID NO: 429427 - RNA, 19 nt, Artificial Sequence
  Description of Artificial Sequence: Synthetic oligonucleotide
auacuuaccagcacaguuu

SEQ ID NO: 429428 - RNA, 19 nt, Artificial Sequence
  Description of Artificial Sequence: Synthetic oligonucleotide
gucauacaaucuccuauga

SEQ ID NO: 429429 - RNA, 19 nt, Artificial Sequence
  Description of Artificial Sequence: Synthetic oligonucleotide
gcucuuaucacggucgagc

SEQ ID NO: 429430 - RNA, 19 nt, Artificial Sequence
  Description of Artificial Sequence: Synthetic oligonucleotide
ucuuucugauugccagacu

SEQ ID NO: 429431 - RNA, 19 nt, Artificial Sequence
  Description of Artificial Sequence: Synthetic oligonucleotide
uuccuuccuggaaaauagu

SEQ ID NO: 429432 - RNA, 19 nt, Artificial Sequence
  Description of Artificial Sequence: Synthetic oligonucleotide
cuucccggacuugagacug

SEQ ID NO: 429433 - RNA, 19 nt, Artificial Sequence
  Description of Artificial Sequence: Synthetic oligonucleotide
gaauaccgcgucccucucc

SEQ ID NO: 429434 - RNA, 19 nt, Artificial Sequence
  Description of Artificial Sequence: Synthetic oligonucleotide
uuuccguggccaccgucug

SEQ ID NO: 429435 - RNA, 19 nt, Artificial Sequence
  Description of Artificial Sequence: Synthetic oligonucleotide
uuccaaugagagucaucug

SEQ ID NO: 429436 - RNA, 19 nt, Artificial Sequence
  Description of Artificial Sequence: Synthetic oligonucleotide
uuuggcagcccagugucaa

SEQ ID NO: 429437 - RNA, 19 nt, Artificial Sequence
  Description of Artificial Sequence: Synthetic oligonucleotide
gaacggauuuccguggcca

SEQ ID NO: 429438 - RNA, 19 nt, Artificial Sequence
  Description of Artificial Sequence: Synthetic oligonucleotide
gauaaccgugaaguccacc

SEQ ID NO: 429439 - RNA, 19 nt, Artificial Sequence
  Description of Artificial Sequence: Synthetic oligonucleotide
agaauaccgcgucccucuc

SEQ ID NO: 429440 - RNA, 19 nt, Artificial Sequence
  Description of Artificial Sequence: Synthetic oligonucleotide
uaaccgugaaguccaccuc

SEQ ID NO: 429441 - RNA, 19 nt, Artificial Sequence
  Description of Artificial Sequence: Synthetic oligonucleotide
cuauaucuauauauauaua

SEQ ID NO: 429442 - RNA, 19 nt, Artificial Sequence
  Description of Artificial Sequence: Synthetic oligonucleotide
uagucgccgauaaccguga

SEQ ID NO: 429443 - RNA, 19 nt, Artificial Sequence
  Description of Artificial Sequence: Synthetic oligonucleotide
uuucccgaugaucggugaa

SEQ ID NO: 429444 - RNA, 19 nt, Artificial Sequence
  Description of Artificial Sequence: Synthetic oligonucleotide
gggagagcgagagauuacg

SEQ ID NO: 429445 - RNA, 19 nt, Artificial Sequence
  Description of Artificial Sequence: Synthetic oligonucleotide
auuuccguggccaccgucu

SEQ ID NO: 429446 - RNA, 19 nt, Artificial Sequence
  Description of Artificial Sequence: Synthetic oligonucleotide
uacuucccuucccauggcu

SEQ ID NO: 429447 - RNA, 19 nt, Artificial Sequence
  Description of Artificial Sequence: Synthetic oligonucleotide
cuccgucaagagaaaccgg

SEQ ID NO: 429448 - RNA, 19 nt, Artificial Sequence
  Description of Artificial Sequence: Synthetic oligonucleotide
caucagugacaguauguca

SEQ ID NO: 429449 - RNA, 19 nt, Artificial Sequence
  Description of Artificial Sequence: Synthetic oligonucleotide
gguuuggcagcccaguguc

SEQ ID NO: 429450 - RNA, 19 nt, Artificial Sequence
  Description of Artificial Sequence: Synthetic oligonucleotide
ccuccgucaagagaaaccg

SEQ ID NO: 429451 - RNA, 19 nt, Artificial Sequence
  Description of Artificial Sequence: Synthetic oligonucleotide
guugucggagaauccagaa

SEQ ID NO: 429452 - RNA, 19 nt, Artificial Sequence
  Description of Artificial Sequence: Synthetic oligonucleotide
ugcaaggacgcgguguuuc

SEQ ID NO: 429453 - RNA, 19 nt, Artificial Sequence
  Description of Artificial Sequence: Synthetic oligonucleotide
auguugguuguugccauca

SEQ ID NO: 429454 - RNA, 19 nt, Artificial Sequence
  Description of Artificial Sequence: Synthetic oligonucleotide
caugauucucacugacuga

SEQ ID NO: 429455 - RNA, 19 nt, Artificial Sequence
  Description of Artificial Sequence: Synthetic oligonucleotide
ucgcuucucaauccuuguc

SEQ ID NO: 429456 - RNA, 19 nt, Artificial Sequence
  Description of Artificial Sequence: Synthetic oligonucleotide
uaccagcacaguuuauuuu

SEQ ID NO: 429457 - RNA, 19 nt, Artificial Sequence
  Description of Artificial Sequence: Synthetic oligonucleotide
gccgauaaccgugaagucc

SEQ ID NO: 429458 - RNA, 19 nt, Artificial Sequence
  Description of Artificial Sequence: Synthetic oligonucleotide
ugcuggugaggacaucuuu

SEQ ID NO: 429459 - RNA, 19 nt, Artificial Sequence
  Description of Artificial Sequence: Synthetic oligonucleotide
uuaucacggucgagcucag

SEQ ID NO: 429460 - RNA, 19 nt, Artificial Sequence
  Description of Artificial Sequence: Synthetic oligonucleotide
aggacguggugguuugacu

SEQ ID NO: 429461 - RNA, 19 nt, Artificial Sequence
  Description of Artificial Sequence: Synthetic oligonucleotide
uuggcuacgugaucuuauu

SEQ ID NO: 429462 - RNA, 19 nt, Artificial Sequence
  Description of Artificial Sequence: Synthetic oligonucleotide
acggaggucaggauucuug

SEQ ID NO: 429463 - RNA, 19 nt, Artificial Sequence
  Description of Artificial Sequence: Synthetic oligonucleotide
cauacuuaccagcacaguu

SEQ ID NO: 429464 - RNA, 19 nt, Artificial Sequence
  Description of Artificial Sequence: Synthetic oligonucleotide
ucccaccaauucaauuggu

SEQ ID NO: 429465 - RNA, 19 nt, Artificial Sequence
  Description of Artificial Sequence: Synthetic oligonucleotide
acgaggacguggugguuug

SEQ ID NO: 429466 - RNA, 19 nt, Artificial Sequence
  Description of Artificial Sequence: Synthetic oligonucleotide
cagcagugcaaggacgcgg

SEQ ID NO: 429467 - RNA, 19 nt, Artificial Sequence
  Description of Artificial Sequence: Synthetic oligonucleotide
gcaguggcgccguaggugc

SEQ ID NO: 429468 - RNA, 19 nt, Artificial Sequence
  Description of Artificial Sequence: Synthetic oligonucleotide
ucggagaauccagaaugaa

SEQ ID NO: 429469 - RNA, 19 nt, Artificial Sequence
  Description of Artificial Sequence: Synthetic oligonucleotide
acaacggcuuugguuacca

SEQ ID NO: 429470 - RNA, 19 nt, Artificial Sequence
  Description of Artificial Sequence: Synthetic oligonucleotide
uucccgaugaucggugaaa

SEQ ID NO: 429471 - RNA, 19 nt, Artificial Sequence
  Description of Artificial Sequence: Synthetic oligonucleotide
ugccagacugcugacgguc

SEQ ID NO: 429472 - RNA, 19 nt, Artificial Sequence
  Description of Artificial Sequence: Synthetic oligonucleotide
gauuuccguggccaccguc

SEQ ID NO: 429473 - RNA, 19 nt, Artificial Sequence
  Description of Artificial Sequence: Synthetic oligonucleotide
uggcuacgugaucuuauuu

SEQ ID NO: 429474 - RNA, 19 nt, Artificial Sequence
  Description of Artificial Sequence: Synthetic oligonucleotide
caguuugcuguugggcucc

SEQ ID NO: 429475 - RNA, 19 nt, Artificial Sequence
  Description of Artificial Sequence: Synthetic oligonucleotide
ugauugccagacugcugac

SEQ ID NO: 429476 - RNA, 19 nt, Artificial Sequence
  Description of Artificial Sequence: Synthetic oligonucleotide
uucucuugcuuggcuacgu

SEQ ID NO: 429477 - RNA, 19 nt, Artificial Sequence
  Description of Artificial Sequence: Synthetic oligonucleotide
guuaccagcaugucuggau

SEQ ID NO: 429478 - RNA, 19 nt, Artificial Sequence
  Description of Artificial Sequence: Synthetic oligonucleotide
agcgagagauuacgauugu

SEQ ID NO: 429479 - RNA, 19 nt, Artificial Sequence
  Description of Artificial Sequence: Synthetic oligonucleotide
cccaguaaugaugauucgc

SEQ ID NO: 429480 - RNA, 19 nt, Artificial Sequence
  Description of Artificial Sequence: Synthetic oligonucleotide
gagagcgagagauuacgau

SEQ ID NO: 429481 - RNA, 19 nt, Artificial Sequence
  Description of Artificial Sequence: Synthetic oligonucleotide
gugacgagggcagccugcg

SEQ ID NO: 429482 - RNA, 19 nt, Artificial Sequence
  Description of Artificial Sequence: Synthetic oligonucleotide
cauuagaggaagcgacaga

SEQ ID NO: 429483 - RNA, 19 nt, Artificial Sequence
  Description of Artificial Sequence: Synthetic oligonucleotide
acaguaugucacagcuggg

SEQ ID NO: 429484 - RNA, 19 nt, Artificial Sequence
  Description of Artificial Sequence: Synthetic oligonucleotide
gguguugucggagaaucca

SEQ ID NO: 429485 - RNA, 19 nt, Artificial Sequence
  Description of Artificial Sequence: Synthetic oligonucleotide
gacgagggcagccugcgcu

SEQ ID NO: 429486 - RNA, 19 nt, Artificial Sequence
  Description of Artificial Sequence: Synthetic oligonucleotide
cggagaauccagaaugaag

SEQ ID NO: 429487 - RNA, 19 nt, Artificial Sequence
  Description of Artificial Sequence: Synthetic oligonucleotide
acgcgguguuuccugauau

SEQ ID NO: 429488 - RNA, 19 nt, Artificial Sequence
  Description of Artificial Sequence: Synthetic oligonucleotide
gacacgccagcaucucuuc

SEQ ID NO: 429489 - RNA, 19 nt, Artificial Sequence
  Description of Artificial Sequence: Synthetic oligonucleotide
ugucuggaugcuguaguuu

SEQ ID NO: 429490 - RNA, 19 nt, Artificial Sequence
  Description of Artificial Sequence: Synthetic oligonucleotide
uccuccuccuccuccuccu

SEQ ID NO: 429491 - RNA, 19 nt, Artificial Sequence
  Description of Artificial Sequence: Synthetic oligonucleotide
ccgauaaccgugaagucca

SEQ ID NO: 429492 - RNA, 19 nt, Artificial Sequence
  Description of Artificial Sequence: Synthetic oligonucleotide
ccgcuugucaccgucaggc

SEQ ID NO: 429493 - RNA, 19 nt, Artificial Sequence
  Description of Artificial Sequence: Synthetic oligonucleotide
ccaaugagagucaucugca

SEQ ID NO: 429494 - RNA, 19 nt, Artificial Sequence
  Description of Artificial Sequence: Synthetic oligonucleotide
ucaccgucaggcccugcau

SEQ ID NO: 429495 - RNA, 19 nt, Artificial Sequence
  Description of Artificial Sequence: Synthetic oligonucleotide
gacaacggcuuugguuacc

SEQ ID NO: 429496 - RNA, 19 nt, Artificial Sequence
  Description of Artificial Sequence: Synthetic oligonucleotide
gcugccgugguagucgccg

SEQ ID NO: 429497 - RNA, 19 nt, Artificial Sequence
  Description of Artificial Sequence: Synthetic oligonucleotide
aaggcgcugccgugguagu

SEQ ID NO: 429498 - RNA, 19 nt, Artificial Sequence
  Description of Artificial Sequence: Synthetic oligonucleotide
gcuuucacggacucaaacu

SEQ ID NO: 429499 - RNA, 19 nt, Artificial Sequence
  Description of Artificial Sequence: Synthetic oligonucleotide
gucaccgucaggcccugca

SEQ ID NO: 429500 - RNA, 19 nt, Artificial Sequence
  Description of Artificial Sequence: Synthetic oligonucleotide
gucggagaauccagaauga

SEQ ID NO: 429501 - RNA, 19 nt, Artificial Sequence
  Description of Artificial Sequence: Synthetic oligonucleotide
gcgacagagaggcuggaga

SEQ ID NO: 429502 - RNA, 19 nt, Artificial Sequence
  Description of Artificial Sequence: Synthetic oligonucleotide
cuccuccuccuccuccucc

SEQ ID NO: 429503 - RNA, 19 nt, Artificial Sequence
  Description of Artificial Sequence: Synthetic oligonucleotide
agauuacgauuguuacaua

SEQ ID NO: 429504 - RNA, 19 nt, Artificial Sequence
  Description of Artificial Sequence: Synthetic oligonucleotide
acuccuccuccuccuccuc

SEQ ID NO: 429505 - RNA, 19 nt, Artificial Sequence
  Description of Artificial Sequence: Synthetic oligonucleotide
aggacgcgguguuuccuga

SEQ ID NO: 429506 - RNA, 19 nt, Artificial Sequence
  Description of Artificial Sequence: Synthetic oligonucleotide
cucuuaucacggucgagcu

SEQ ID NO: 429507 - RNA, 19 nt, Artificial Sequence
  Description of Artificial Sequence: Synthetic oligonucleotide
uccuccuccuccuccucuc

SEQ ID NO: 429508 - RNA, 19 nt, Artificial Sequence
  Description of Artificial Sequence: Synthetic oligonucleotide
agcgacagagaggcuggag

SEQ ID NO: 429509 - RNA, 19 nt, Artificial Sequence
  Description of Artificial Sequence: Synthetic oligonucleotide
cccgagagaacaccaggcc

SEQ ID NO: 429510 - RNA, 19 nt, Artificial Sequence
  Description of Artificial Sequence: Synthetic oligonucleotide
uggagggccccuugagauc

SEQ ID NO: 429511 - RNA, 19 nt, Artificial Sequence
  Description of Artificial Sequence: Synthetic oligonucleotide
cccaccaauucaauugguc

SEQ ID NO: 429512 - RNA, 19 nt, Artificial Sequence
  Description of Artificial Sequence: Synthetic oligonucleotide
cuuucccgaugaucgguga

SEQ ID NO: 429513 - RNA, 19 nt, Artificial Sequence
  Description of Artificial Sequence: Synthetic oligonucleotide
cuacgugaucuuauuuugu

SEQ ID NO: 429514 - RNA, 19 nt, Artificial Sequence
  Description of Artificial Sequence: Synthetic oligonucleotide
caucuacaaucauuguggu

SEQ ID NO: 429515 - RNA, 19 nt, Artificial Sequence
  Description of Artificial Sequence: Synthetic oligonucleotide
uuccgcaguggcgccguag

SEQ ID NO: 429516 - RNA, 19 nt, Artificial Sequence
  Description of Artificial Sequence: Synthetic oligonucleotide
agcaggccccucgauccgg

SEQ ID NO: 429517 - RNA, 19 nt, Artificial Sequence
  Description of Artificial Sequence: Synthetic oligonucleotide
agacacgccagcaucucuu

SEQ ID NO: 429518 - RNA, 19 nt, Artificial Sequence
  Description of Artificial Sequence: Synthetic oligonucleotide
gucucagagaacccucccu

SEQ ID NO: 429519 - RNA, 19 nt, Artificial Sequence
  Description of Artificial Sequence: Synthetic oligonucleotide
gcaaggacgcgguguuucc

SEQ ID NO: 429520 - RNA, 19 nt, Artificial Sequence
  Description of Artificial Sequence: Synthetic oligonucleotide
agggccuggucuugaucga

SEQ ID NO: 429521 - RNA, 19 nt, Artificial Sequence
  Description of Artificial Sequence: Synthetic oligonucleotide
accgcgucccucuccuggu

SEQ ID NO: 429522 - RNA, 19 nt, Artificial Sequence
  Description of Artificial Sequence: Synthetic oligonucleotide
uucccggacuugagacugu

SEQ ID NO: 429523 - RNA, 19 nt, Artificial Sequence
  Description of Artificial Sequence: Synthetic oligonucleotide
gacgcgguguuuccugaua

SEQ ID NO: 429524 - RNA, 19 nt, Artificial Sequence
  Description of Artificial Sequence: Synthetic oligonucleotide
ggcuacgugaucuuauuuu

SEQ ID NO: 429525 - RNA, 19 nt, Artificial Sequence
  Description of Artificial Sequence: Synthetic oligonucleotide
cgagagauuacgauuguua

SEQ ID NO: 429526 - RNA, 19 nt, Artificial Sequence
  Description of Artificial Sequence: Synthetic oligonucleotide
gcacuugcgcucgauggcc

SEQ ID NO: 429527 - RNA, 19 nt, Artificial Sequence
  Description of Artificial Sequence: Synthetic oligonucleotide
ucgaucccgguggaucagu

SEQ ID NO: 429528 - RNA, 19 nt, Artificial Sequence
  Description of Artificial Sequence: Synthetic oligonucleotide
aggcgggugacgagggcag

SEQ ID NO: 429529 - RNA, 19 nt, Artificial Sequence
  Description of Artificial Sequence: Synthetic oligonucleotide
cccaaucucgaucccggug

SEQ ID NO: 429530 - RNA, 19 nt, Artificial Sequence
  Description of Artificial Sequence: Synthetic oligonucleotide
caccuccgucaagagaaac

SEQ ID NO: 429531 - RNA, 19 nt, Artificial Sequence
  Description of Artificial Sequence: Synthetic oligonucleotide
caaucucgaucccggugga

SEQ ID NO: 429532 - RNA, 19 nt, Artificial Sequence
  Description of Artificial Sequence: Synthetic oligonucleotide
guaguuuggcuuccuugau

SEQ ID NO: 429533 - RNA, 19 nt, Artificial Sequence
  Description of Artificial Sequence: Synthetic oligonucleotide
ggugacgagggcagccugc

SEQ ID NO: 429534 - RNA, 19 nt, Artificial Sequence
  Description of Artificial Sequence: Synthetic oligonucleotide
ccccaguaaugaugauucg

SEQ ID NO: 429535 - RNA, 19 nt, Artificial Sequence
  Description of Artificial Sequence: Synthetic oligonucleotide
gguuuccgcaguggcgccg

SEQ ID NO: 429536 - RNA, 19 nt, Artificial Sequence
  Description of Artificial Sequence: Synthetic oligonucleotide
cgaugaucggugaaagaga

SEQ ID NO: 429537 - RNA, 19 nt, Artificial Sequence
  Description of Artificial Sequence: Synthetic oligonucleotide
auaccgcgucccucuccug

SEQ ID NO: 429538 - RNA, 19 nt, Artificial Sequence
  Description of Artificial Sequence: Synthetic oligonucleotide
agucgucaugaagucuuuu

SEQ ID NO: 429539 - RNA, 19 nt, Artificial Sequence
  Description of Artificial Sequence: Synthetic oligonucleotide
ggagagcgagagauuacga

SEQ ID NO: 429540 - RNA, 19 nt, Artificial Sequence
  Description of Artificial Sequence: Synthetic oligonucleotide
ccugggaucauggcagcug

SEQ ID NO: 429541 - RNA, 19 nt, Artificial Sequence
  Description of Artificial Sequence: Synthetic oligonucleotide
aacccucccuucacaguuu

SEQ ID NO: 429542 - RNA, 19 nt, Artificial Sequence
  Description of Artificial Sequence: Synthetic oligonucleotide
caguaaugaugauucgcuu

SEQ ID NO: 429543 - RNA, 19 nt, Artificial Sequence
  Description of Artificial Sequence: Synthetic oligonucleotide
aggcgcugccgugguaguc

SEQ ID NO: 429544 - RNA, 19 nt, Artificial Sequence
  Description of Artificial Sequence: Synthetic oligonucleotide
gcuuggguuggaccagaca

SEQ ID NO: 429545 - RNA, 19 nt, Artificial Sequence
  Description of Artificial Sequence: Synthetic oligonucleotide
gucucagagucgcucuuau

SEQ ID NO: 429546 - RNA, 19 nt, Artificial Sequence
  Description of Artificial Sequence: Synthetic oligonucleotide
cugugggccugggaucaug

SEQ ID NO: 429547 - RNA, 19 nt, Artificial Sequence
  Description of Artificial Sequence: Synthetic oligonucleotide
gggugacgagggcagccug

SEQ ID NO: 429548 - RNA, 19 nt, Artificial Sequence
  Description of Artificial Sequence: Synthetic oligonucleotide
gagucgcucuuaucacggu

SEQ ID NO: 429549 - RNA, 19 nt, Artificial Sequence
  Description of Artificial Sequence: Synthetic oligonucleotide
acuuaccagcacaguuuau

SEQ ID NO: 429550 - RNA, 19 nt, Artificial Sequence
  Description of Artificial Sequence: Synthetic oligonucleotide
cuaugagcugcaccuccgu

SEQ ID NO: 429551 - RNA, 19 nt, Artificial Sequence
  Description of Artificial Sequence: Synthetic oligonucleotide
ggguuuggcagcccagugu

SEQ ID NO: 429552 - RNA, 19 nt, Artificial Sequence
  Description of Artificial Sequence: Synthetic oligonucleotide
cauccauccuggagugugu

SEQ ID NO: 429553 - RNA, 19 nt, Artificial Sequence
  Description of Artificial Sequence: Synthetic oligonucleotide
gcgccguaggugcugguga

SEQ ID NO: 429554 - RNA, 19 nt, Artificial Sequence
  Description of Artificial Sequence: Synthetic oligonucleotide
guugguguugucggagaau

SEQ ID NO: 429555 - RNA, 19 nt, Artificial Sequence
  Description of Artificial Sequence: Synthetic oligonucleotide
ggcgccguaggugcuggug

SEQ ID NO: 429556 - RNA, 19 nt, Artificial Sequence
  Description of Artificial Sequence: Synthetic oligonucleotide
cagcacaguuuauuuuaau

SEQ ID NO: 429557 - RNA, 19 nt, Artificial Sequence
  Description of Artificial Sequence: Synthetic oligonucleotide
gacgagcacuugcgcucga

SEQ ID NO: 429558 - RNA, 19 nt, Artificial Sequence
  Description of Artificial Sequence: Synthetic oligonucleotide
cacuccuccuccuccuccu

SEQ ID NO: 429559 - RNA, 19 nt, Artificial Sequence
  Description of Artificial Sequence: Synthetic oligonucleotide
gcgguguuuccugauauau

SEQ ID NO: 429560 - RNA, 19 nt, Artificial Sequence
  Description of Artificial Sequence: Synthetic oligonucleotide
ccuccgagcccucccucag

SEQ ID NO: 429561 - RNA, 19 nt, Artificial Sequence
  Description of Artificial Sequence: Synthetic oligonucleotide
ccgugaaguccaccucggc

SEQ ID NO: 429562 - RNA, 19 nt, Artificial Sequence
  Description of Artificial Sequence: Synthetic oligonucleotide
uuuccgcaguggcgccgua

SEQ ID NO: 429563 - RNA, 19 nt, Artificial Sequence
  Description of Artificial Sequence: Synthetic oligonucleotide
cccgcuugucaccgucagg

SEQ ID NO: 429564 - RNA, 19 nt, Artificial Sequence
  Description of Artificial Sequence: Synthetic oligonucleotide
ccgucaagagaaaccggaa

SEQ ID NO: 429565 - RNA, 19 nt, Artificial Sequence
  Description of Artificial Sequence: Synthetic oligonucleotide
gcgggugacgagggcagcc

SEQ ID NO: 429566 - RNA, 19 nt, Artificial Sequence
  Description of Artificial Sequence: Synthetic oligonucleotide
cugccgugguagucgccga

SEQ ID NO: 429567 - RNA, 19 nt, Artificial Sequence
  Description of Artificial Sequence: Synthetic oligonucleotide
ccgagagaacaccaggccu

SEQ ID NO: 429568 - RNA, 19 nt, Artificial Sequence
  Description of Artificial Sequence: Synthetic oligonucleotide
cagacacgccagcaucucu

SEQ ID NO: 429569 - RNA, 19 nt, Artificial Sequence
  Description of Artificial Sequence: Synthetic oligonucleotide
cucuccuccggggaugggu

SEQ ID NO: 429570 - RNA, 19 nt, Artificial Sequence
  Description of Artificial Sequence: Synthetic oligonucleotide
gagggccccuugagauccc

SEQ ID NO: 429571 - RNA, 19 nt, Artificial Sequence
  Description of Artificial Sequence: Synthetic oligonucleotide
gauccgggcuguccucgau

SEQ ID NO: 429572 - RNA, 19 nt, Artificial Sequence
  Description of Artificial Sequence: Synthetic oligonucleotide
guuuccgcaguggcgccgu

SEQ ID NO: 429573 - RNA, 19 nt, Artificial Sequence
  Description of Artificial Sequence: Synthetic oligonucleotide
cccucgauccgggcugucc

SEQ ID NO: 429574 - RNA, 19 nt, Artificial Sequence
  Description of Artificial Sequence: Synthetic oligonucleotide
ggguuggaccagacacgcc

SEQ ID NO: 429575 - RNA, 19 nt, Artificial Sequence
  Description of Artificial Sequence: Synthetic oligonucleotide
cccgaugaucggugaaaga

SEQ ID NO: 429576 - RNA, 19 nt, Artificial Sequence
  Description of Artificial Sequence: Synthetic oligonucleotide
aggaagcgacagagaggcu

SEQ ID NO: 429577 - RNA, 19 nt, Artificial Sequence
  Description of Artificial Sequence: Synthetic oligonucleotide
ccaauucaauuggucugca

SEQ ID NO: 429578 - RNA, 19 nt, Artificial Sequence
  Description of Artificial Sequence: Synthetic oligonucleotide
cggucgagcucagggaggc

SEQ ID NO: 429579 - RNA, 19 nt, Artificial Sequence
  Description of Artificial Sequence: Synthetic oligonucleotide
cgugguagucgccgauaac

SEQ ID NO: 429580 - RNA, 19 nt, Artificial Sequence
  Description of Artificial Sequence: Synthetic oligonucleotide
uggcgccguaggugcuggu

SEQ ID NO: 429581 - RNA, 19 nt, Artificial Sequence
  Description of Artificial Sequence: Synthetic oligonucleotide
cacgaggacguggugguuu

SEQ ID NO: 429582 - RNA, 19 nt, Artificial Sequence
  Description of Artificial Sequence: Synthetic oligonucleotide
cuccuccuccuccuccucu

SEQ ID NO: 429583 - RNA, 19 nt, Artificial Sequence
  Description of Artificial Sequence: Synthetic oligonucleotide
gcgcucacgcucccaaucu

SEQ ID NO: 429584 - RNA, 19 nt, Artificial Sequence
  Description of Artificial Sequence: Synthetic oligonucleotide
caaggacgcgguguuuccu

SEQ ID NO: 429585 - RNA, 19 nt, Artificial Sequence
  Description of Artificial Sequence: Synthetic oligonucleotide
ggcccugcaucaugauucu

SEQ ID NO: 429586 - RNA, 19 nt, Artificial Sequence
  Description of Artificial Sequence: Synthetic oligonucleotide
cgauaaccgugaaguccac

SEQ ID NO: 429587 - RNA, 19 nt, Artificial Sequence
  Description of Artificial Sequence: Synthetic oligonucleotide
ccgucugugggccugggau

SEQ ID NO: 429588 - RNA, 19 nt, Artificial Sequence
  Description of Artificial Sequence: Synthetic oligonucleotide
ccgugguagucgccgauaa

SEQ ID NO: 429589 - RNA, 19 nt, Artificial Sequence
  Description of Artificial Sequence: Synthetic oligonucleotide
cgagagaacaccaggccuu

SEQ ID NO: 429590 - RNA, 19 nt, Artificial Sequence
  Description of Artificial Sequence: Synthetic oligonucleotide
gggagucgucaugaagucu

SEQ ID NO: 429591 - RNA, 19 nt, Artificial Sequence
  Description of Artificial Sequence: Synthetic oligonucleotide
cccuugagaucccgagaga

SEQ ID NO: 429592 - RNA, 19 nt, Artificial Sequence
  Description of Artificial Sequence: Synthetic oligonucleotide
cugucucagagucgcucuu

SEQ ID NO: 429593 - RNA, 19 nt, Artificial Sequence
  Description of Artificial Sequence: Synthetic oligonucleotide
ccgggcuguccucgaugcc

SEQ ID NO: 429594 - RNA, 19 nt, Artificial Sequence
  Description of Artificial Sequence: Synthetic oligonucleotide
cauccccaguaaugaugau

SEQ ID NO: 429595 - RNA, 19 nt, Artificial Sequence
  Description of Artificial Sequence: Synthetic oligonucleotide
ggauuuccguggccaccgu

SEQ ID NO: 429596 - RNA, 19 nt, Artificial Sequence
  Description of Artificial Sequence: Synthetic oligonucleotide
ccuccuccuccuccuccuc

SEQ ID NO: 429597 - RNA, 19 nt, Artificial Sequence
  Description of Artificial Sequence: Synthetic oligonucleotide
cccgucaaccugggugcug

SEQ ID NO: 429598 - RNA, 19 nt, Artificial Sequence
  Description of Artificial Sequence: Synthetic oligonucleotide
ccuccuccuccuccucuca

SEQ ID NO: 429599 - RNA, 19 nt, Artificial Sequence
  Description of Artificial Sequence: Synthetic oligonucleotide
gcugacggucauagucucu

SEQ ID NO: 429600 - RNA, 19 nt, Artificial Sequence
  Description of Artificial Sequence: Synthetic oligonucleotide
gccgugguagucgccgaua

SEQ ID NO: 429601 - RNA, 19 nt, Artificial Sequence
  Description of Artificial Sequence: Synthetic oligonucleotide
gcgagagauuacgauuguu

SEQ ID NO: 429602 - RNA, 19 nt, Artificial Sequence
  Description of Artificial Sequence: Synthetic oligonucleotide
gcgucccucuccugguccu

SEQ ID NO: 429603 - RNA, 19 nt, Artificial Sequence
  Description of Artificial Sequence: Synthetic oligonucleotide
gcaccuccgucaagagaaa

SEQ ID NO: 429604 - RNA, 19 nt, Artificial Sequence
  Description of Artificial Sequence: Synthetic oligonucleotide
gcccugcaucaugauucuc

SEQ ID NO: 429605 - RNA, 19 nt, Artificial Sequence
  Description of Artificial Sequence: Synthetic oligonucleotide
cgucaaccugggugcuguc

SEQ ID NO: 429606 - RNA, 19 nt, Artificial Sequence
  Description of Artificial Sequence: Synthetic oligonucleotide
cgcgguguuuccugauaua

SEQ ID NO: 429607 - RNA, 19 nt, Artificial Sequence
  Description of Artificial Sequence: Synthetic oligonucleotide
ggacucaaacuggggcauu

SEQ ID NO: 429608 - RNA, 19 nt, Artificial Sequence
  Description of Artificial Sequence: Synthetic oligonucleotide
cgauccgggcuguccucga

SEQ ID NO: 429609 - RNA, 19 nt, Artificial Sequence
  Description of Artificial Sequence: Synthetic oligonucleotide
cccgguggaucaguuugcu

SEQ ID NO: 429610 - RNA, 19 nt, Artificial Sequence
  Description of Artificial Sequence: Synthetic oligonucleotide
ccgcaguggcgccguaggu

SEQ ID NO: 429611 - RNA, 19 nt, Artificial Sequence
  Description of Artificial Sequence: Synthetic oligonucleotide
cucggccuccaggcuggau

SEQ ID NO: 429612 - RNA, 19 nt, Artificial Sequence
  Description of Artificial Sequence: Synthetic oligonucleotide
cuccggggaugggucuguu

SEQ ID NO: 429613 - RNA, 19 nt, Artificial Sequence
  Description of Artificial Sequence: Synthetic oligonucleotide
ucuauuugauaaaagaugc

SEQ ID NO: 429614 - RNA, 19 nt, Artificial Sequence
  Description of Artificial Sequence: Synthetic oligonucleotide
aacuaguuucacuugaggg

SEQ ID NO: 429615 - RNA, 19 nt, Artificial Sequence
  Description of Artificial Sequence: Synthetic oligonucleotide
aguaaggaaacucacuggc

SEQ ID NO: 429616 - RNA, 19 nt, Artificial Sequence
  Description of Artificial Sequence: Synthetic oligonucleotide
cuuauugccagcaaugagc

SEQ ID NO: 429617 - RNA, 19 nt, Artificial Sequence
  Description of Artificial Sequence: Synthetic oligonucleotide
uguacugugacuugaagca

SEQ ID NO: 429618 - RNA, 19 nt, Artificial Sequence
  Description of Artificial Sequence: Synthetic oligonucleotide
gagauguucacgcugagag

SEQ ID NO: 429619 - RNA, 19 nt, Artificial Sequence
  Description of Artificial Sequence: Synthetic oligonucleotide
aaagaauaucucgggaucc

SEQ ID NO: 429620 - RNA, 19 nt, Artificial Sequence
  Description of Artificial Sequence: Synthetic oligonucleotide
ucauuaucaaguaagccac

SEQ ID NO: 429621 - RNA, 19 nt, Artificial Sequence
  Description of Artificial Sequence: Synthetic oligonucleotide
auaaaagaugcacaguaag

SEQ ID NO: 429622 - RNA, 19 nt, Artificial Sequence
  Description of Artificial Sequence: Synthetic oligonucleotide
aaggaaaccguugagaaug

SEQ ID NO: 429623 - RNA, 19 nt, Artificial Sequence
  Description of Artificial Sequence: Synthetic oligonucleotide
agagaaacgaagcagccuc

SEQ ID NO: 429624 - RNA, 19 nt, Artificial Sequence
  Description of Artificial Sequence: Synthetic oligonucleotide
acagggacaaccaaggucc

SEQ ID NO: 429625 - RNA, 19 nt, Artificial Sequence
  Description of Artificial Sequence: Synthetic oligonucleotide
aacuguaguguuaacaggg

SEQ ID NO: 429626 - RNA, 19 nt, Artificial Sequence
  Description of Artificial Sequence: Synthetic oligonucleotide
ugagcuuaguaccugcugg

SEQ ID NO: 429627 - RNA, 19 nt, Artificial Sequence
  Description of Artificial Sequence: Synthetic oligonucleotide
aacuagacaaagcagcacu

SEQ ID NO: 429628 - RNA, 19 nt, Artificial Sequence
  Description of Artificial Sequence: Synthetic oligonucleotide
uguaagguagcggagaugc

SEQ ID NO: 429629 - RNA, 19 nt, Artificial Sequence
  Description of Artificial Sequence: Synthetic oligonucleotide
guuacuuugaccacgguag

SEQ ID NO: 429630 - RNA, 19 nt, Artificial Sequence
  Description of Artificial Sequence: Synthetic oligonucleotide
ucaaccgagaugcacgagg

SEQ ID NO: 429631 - RNA, 19 nt, Artificial Sequence
  Description of Artificial Sequence: Synthetic oligonucleotide
agaaugugcaaucucuggg

SEQ ID NO: 429632 - RNA, 19 nt, Artificial Sequence
  Description of Artificial Sequence: Synthetic oligonucleotide
ugagauaccgcuuguacug

SEQ ID NO: 429633 - RNA, 19 nt, Artificial Sequence
  Description of Artificial Sequence: Synthetic oligonucleotide
uauuugauaaaagaugcac

SEQ ID NO: 429634 - RNA, 19 nt, Artificial Sequence
  Description of Artificial Sequence: Synthetic oligonucleotide
cuaucaaccgagaugcacg

SEQ ID NO: 429635 - RNA, 19 nt, Artificial Sequence
  Description of Artificial Sequence: Synthetic oligonucleotide
aaggcagucuuccaugauc

SEQ ID NO: 429636 - RNA, 19 nt, Artificial Sequence
  Description of Artificial Sequence: Synthetic oligonucleotide
cauguuacaaucagguggc

SEQ ID NO: 429637 - RNA, 19 nt, Artificial Sequence
  Description of Artificial Sequence: Synthetic oligonucleotide
ugcacaaugcggauugugg

SEQ ID NO: 429638 - RNA, 19 nt, Artificial Sequence
  Description of Artificial Sequence: Synthetic oligonucleotide
ugaagauacagggacaacc

SEQ ID NO: 429639 - RNA, 19 nt, Artificial Sequence
  Description of Artificial Sequence: Synthetic oligonucleotide
ugguuggcuaaucacagag

SEQ ID NO: 429640 - RNA, 19 nt, Artificial Sequence
  Description of Artificial Sequence: Synthetic oligonucleotide
ugacauguaagguagcgga

SEQ ID NO: 429641 - RNA, 19 nt, Artificial Sequence
  Description of Artificial Sequence: Synthetic oligonucleotide
uggcuaaucacagagacga

SEQ ID NO: 429642 - RNA, 19 nt, Artificial Sequence
  Description of Artificial Sequence: Synthetic oligonucleotide
uuguacugugacuugaagc

SEQ ID NO: 429643 - RNA, 19 nt, Artificial Sequence
  Description of Artificial Sequence: Synthetic oligonucleotide
aauagggcaaggaugagcu

SEQ ID NO: 429644 - RNA, 19 nt, Artificial Sequence
  Description of Artificial Sequence: Synthetic oligonucleotide
aucccuacuacauaaccuc

SEQ ID NO: 429645 - RNA, 19 nt, Artificial Sequence
  Description of Artificial Sequence: Synthetic oligonucleotide
acaagugugaaauggccag

SEQ ID NO: 429646 - RNA, 19 nt, Artificial Sequence
  Description of Artificial Sequence: Synthetic oligonucleotide
uuuaggaggcaucacuccc

SEQ ID NO: 429647 - RNA, 19 nt, Artificial Sequence
  Description of Artificial Sequence: Synthetic oligonucleotide
aagcgaaaagcugaauugg

SEQ ID NO: 429648 - RNA, 19 nt, Artificial Sequence
  Description of Artificial Sequence: Synthetic oligonucleotide
gauguugcgacccagccca

SEQ ID NO: 429649 - RNA, 19 nt, Artificial Sequence
  Description of Artificial Sequence: Synthetic oligonucleotide
cagucuuagacacaguggc

SEQ ID NO: 429650 - RNA, 19 nt, Artificial Sequence
  Description of Artificial Sequence: Synthetic oligonucleotide
uuugcaguugcuguuauac

SEQ ID NO: 429651 - RNA, 19 nt, Artificial Sequence
  Description of Artificial Sequence: Synthetic oligonucleotide
accuuuaguaagugguacc

SEQ ID NO: 429652 - RNA, 19 nt, Artificial Sequence
  Description of Artificial Sequence: Synthetic oligonucleotide
augauguugcgacccagcc

SEQ ID NO: 429653 - RNA, 19 nt, Artificial Sequence
  Description of Artificial Sequence: Synthetic oligonucleotide
ugcacgaggccucuuaaag

SEQ ID NO: 429654 - RNA, 19 nt, Artificial Sequence
  Description of Artificial Sequence: Synthetic oligonucleotide
aaccguugagaauggacag

SEQ ID NO: 429655 - RNA, 19 nt, Artificial Sequence
  Description of Artificial Sequence: Synthetic oligonucleotide
aucaaguaagccaccaacc

SEQ ID NO: 429656 - RNA, 19 nt, Artificial Sequence
  Description of Artificial Sequence: Synthetic oligonucleotide
ccauguuacaaucaggugg

SEQ ID NO: 429657 - RNA, 19 nt, Artificial Sequence
  Description of Artificial Sequence: Synthetic oligonucleotide
caagcgaaaagcugaauug

SEQ ID NO: 429658 - RNA, 19 nt, Artificial Sequence
  Description of Artificial Sequence: Synthetic oligonucleotide
guuuaggggcacuaaagcc

SEQ ID NO: 429659 - RNA, 19 nt, Artificial Sequence
  Description of Artificial Sequence: Synthetic oligonucleotide
aaaccguugagaauggaca

SEQ ID NO: 429660 - RNA, 19 nt, Artificial Sequence
  Description of Artificial Sequence: Synthetic oligonucleotide
ucaagcgaaaagcugaauu

SEQ ID NO: 429661 - RNA, 19 nt, Artificial Sequence
  Description of Artificial Sequence: Synthetic oligonucleotide
guuggcuaaucacagagac

SEQ ID NO: 429662 - RNA, 19 nt, Artificial Sequence
  Description of Artificial Sequence: Synthetic oligonucleotide
acuacauaaccucucauua

SEQ ID NO: 429663 - RNA, 19 nt, Artificial Sequence
  Description of Artificial Sequence: Synthetic oligonucleotide
caaaucaccaagaggauca

SEQ ID NO: 429664 - RNA, 19 nt, Artificial Sequence
  Description of Artificial Sequence: Synthetic oligonucleotide
guaagugguaccaaacuag

SEQ ID NO: 429665 - RNA, 19 nt, Artificial Sequence
  Description of Artificial Sequence: Synthetic oligonucleotide
aauaucucgggauccucca

SEQ ID NO: 429666 - RNA, 19 nt, Artificial Sequence
  Description of Artificial Sequence: Synthetic oligonucleotide
cagaaugaggcuuauucac

SEQ ID NO: 429667 - RNA, 19 nt, Artificial Sequence
  Description of Artificial Sequence: Synthetic oligonucleotide
agugguaccaaacuaguuu

SEQ ID NO: 429668 - RNA, 19 nt, Artificial Sequence
  Description of Artificial Sequence: Synthetic oligonucleotide
ucacuuaguacuuccugcc

SEQ ID NO: 429669 - RNA, 19 nt, Artificial Sequence
  Description of Artificial Sequence: Synthetic oligonucleotide
aauccucacacagaaugag

SEQ ID NO: 429670 - RNA, 19 nt, Artificial Sequence
  Description of Artificial Sequence: Synthetic oligonucleotide
aaguaagccaccaaccugu

SEQ ID NO: 429671 - RNA, 19 nt, Artificial Sequence
  Description of Artificial Sequence: Synthetic oligonucleotide
auccccuacucucuugucc

SEQ ID NO: 429672 - RNA, 19 nt, Artificial Sequence
  Description of Artificial Sequence: Synthetic oligonucleotide
uguuaacagggaccugucg

SEQ ID NO: 429673 - RNA, 19 nt, Artificial Sequence
  Description of Artificial Sequence: Synthetic oligonucleotide
gaaacucacuggcuuauug

SEQ ID NO: 429674 - RNA, 19 nt, Artificial Sequence
  Description of Artificial Sequence: Synthetic oligonucleotide
ugacggacaucaaagaaua

SEQ ID NO: 429675 - RNA, 19 nt, Artificial Sequence
  Description of Artificial Sequence: Synthetic oligonucleotide
ugauccgaguaccaugacc

SEQ ID NO: 429676 - RNA, 19 nt, Artificial Sequence
  Description of Artificial Sequence: Synthetic oligonucleotide
ugggaguugagauaccgcu

SEQ ID NO: 429677 - RNA, 19 nt, Artificial Sequence
  Description of Artificial Sequence: Synthetic oligonucleotide
cucgccaaggacaaugccc

SEQ ID NO: 429678 - RNA, 19 nt, Artificial Sequence
  Description of Artificial Sequence: Synthetic oligonucleotide
cucucauuaucaaguaagc

SEQ ID NO: 429679 - RNA, 19 nt, Artificial Sequence
  Description of Artificial Sequence: Synthetic oligonucleotide
gaauuggaggcuucuguug

SEQ ID NO: 429680 - RNA, 19 nt, Artificial Sequence
  Description of Artificial Sequence: Synthetic oligonucleotide
agugacauguaagguagcg

SEQ ID NO: 429681 - RNA, 19 nt, Artificial Sequence
  Description of Artificial Sequence: Synthetic oligonucleotide
uugagauaccgcuuguacu

SEQ ID NO: 429682 - RNA, 19 nt, Artificial Sequence
  Description of Artificial Sequence: Synthetic oligonucleotide
guugcuguuauacagcaaa

SEQ ID NO: 429683 - RNA, 19 nt, Artificial Sequence
  Description of Artificial Sequence: Synthetic oligonucleotide
uguggacacaacuguagug

SEQ ID NO: 429684 - RNA, 19 nt, Artificial Sequence
  Description of Artificial Sequence: Synthetic oligonucleotide
ucgccaaggacaaugccca

SEQ ID NO: 429685 - RNA, 19 nt, Artificial Sequence
  Description of Artificial Sequence: Synthetic oligonucleotide
cacgcugagagucacuuag

SEQ ID NO: 429686 - RNA, 19 nt, Artificial Sequence
  Description of Artificial Sequence: Synthetic oligonucleotide
cacagucuuagacacagug

SEQ ID NO: 429687 - RNA, 19 nt, Artificial Sequence
  Description of Artificial Sequence: Synthetic oligonucleotide
cuagcauugccaaguagug

SEQ ID NO: 429688 - RNA, 19 nt, Artificial Sequence
  Description of Artificial Sequence: Synthetic oligonucleotide
ucauugguuggcuaaucac

SEQ ID NO: 429689 - RNA, 19 nt, Artificial Sequence
  Description of Artificial Sequence: Synthetic oligonucleotide
gacgaggaaccugugaucc

SEQ ID NO: 429690 - RNA, 19 nt, Artificial Sequence
  Description of Artificial Sequence: Synthetic oligonucleotide
cuaaucacagagacgagga

SEQ ID NO: 429691 - RNA, 19 nt, Artificial Sequence
  Description of Artificial Sequence: Synthetic oligonucleotide
cuuaguaccugcuggcaug

SEQ ID NO: 429692 - RNA, 19 nt, Artificial Sequence
  Description of Artificial Sequence: Synthetic oligonucleotide
caguaaggaaacucacugg

SEQ ID NO: 429693 - RNA, 19 nt, Artificial Sequence
  Description of Artificial Sequence: Synthetic oligonucleotide
aaccgagaugcacgaggcc

SEQ ID NO: 429694 - RNA, 19 nt, Artificial Sequence
  Description of Artificial Sequence: Synthetic oligonucleotide
uuguguugggaguugagau

SEQ ID NO: 429695 - RNA, 19 nt, Artificial Sequence
  Description of Artificial Sequence: Synthetic oligonucleotide
acaaaucaccaagaggauc

SEQ ID NO: 429696 - RNA, 19 nt, Artificial Sequence
  Description of Artificial Sequence: Synthetic oligonucleotide
guugagauaccgcuuguac

SEQ ID NO: 429697 - RNA, 19 nt, Artificial Sequence
  Description of Artificial Sequence: Synthetic oligonucleotide
cucauccugacccaaggag

SEQ ID NO: 429698 - RNA, 19 nt, Artificial Sequence
  Description of Artificial Sequence: Synthetic oligonucleotide
aguguuaacagggaccugu

SEQ ID NO: 429699 - RNA, 19 nt, Artificial Sequence
  Description of Artificial Sequence: Synthetic oligonucleotide
uucuccccacugaauaggg

SEQ ID NO: 429700 - RNA, 19 nt, Artificial Sequence
  Description of Artificial Sequence: Synthetic oligonucleotide
acagcaaauagaaugugca

SEQ ID NO: 429701 - RNA, 19 nt, Artificial Sequence
  Description of Artificial Sequence: Synthetic oligonucleotide
gcaguaaggaaacucacug

SEQ ID NO: 429702 - RNA, 19 nt, Artificial Sequence
  Description of Artificial Sequence: Synthetic oligonucleotide
ugacuugaagcagagcuga

SEQ ID NO: 429703 - RNA, 19 nt, Artificial Sequence
  Description of Artificial Sequence: Synthetic oligonucleotide
ugacccaaggaguaaggga

SEQ ID NO: 429704 - RNA, 19 nt, Artificial Sequence
  Description of Artificial Sequence: Synthetic oligonucleotide
uacugugacuugaagcaga

SEQ ID NO: 429705 - RNA, 19 nt, Artificial Sequence
  Description of Artificial Sequence: Synthetic oligonucleotide
ugauguugcgacccagccc

SEQ ID NO: 429706 - RNA, 19 nt, Artificial Sequence
  Description of Artificial Sequence: Synthetic oligonucleotide
ugaucccuucuaucaaccg

SEQ ID NO: 429707 - RNA, 19 nt, Artificial Sequence
  Description of Artificial Sequence: Synthetic oligonucleotide
uuaggaggcaucacuccca

SEQ ID NO: 429708 - RNA, 19 nt, Artificial Sequence
  Description of Artificial Sequence: Synthetic oligonucleotide
aaagcccggauuucuauuu

SEQ ID NO: 429709 - RNA, 19 nt, Artificial Sequence
  Description of Artificial Sequence: Synthetic oligonucleotide
ucuaucaaccgagaugcac

SEQ ID NO: 429710 - RNA, 19 nt, Artificial Sequence
  Description of Artificial Sequence: Synthetic oligonucleotide
aguuacuuugaccacggua

SEQ ID NO: 429711 - RNA, 19 nt, Artificial Sequence
  Description of Artificial Sequence: Synthetic oligonucleotide
agcccacugagauuggcuc

SEQ ID NO: 429712 - RNA, 19 nt, Artificial Sequence
  Description of Artificial Sequence: Synthetic oligonucleotide
uacuacauaaccucucauu

SEQ ID NO: 429713 - RNA, 19 nt, Artificial Sequence
  Description of Artificial Sequence: Synthetic oligonucleotide
uuaucggggcuucauucug

SEQ ID NO: 429714 - RNA, 19 nt, Artificial Sequence
  Description of Artificial Sequence: Synthetic oligonucleotide
uguggcagcagguuuugcu

SEQ ID NO: 429715 - RNA, 19 nt, Artificial Sequence
  Description of Artificial Sequence: Synthetic oligonucleotide
gucacaacaacaguggaga

SEQ ID NO: 429716 - RNA, 19 nt, Artificial Sequence
  Description of Artificial Sequence: Synthetic oligonucleotide
aaaagcugaauuggaggcu

SEQ ID NO: 429717 - RNA, 19 nt, Artificial Sequence
  Description of Artificial Sequence: Synthetic oligonucleotide
cuuauacugggcaaggaaa

SEQ ID NO: 429718 - RNA, 19 nt, Artificial Sequence
  Description of Artificial Sequence: Synthetic oligonucleotide
aaguuacacaaaauuuucu

SEQ ID NO: 429719 - RNA, 19 nt, Artificial Sequence
  Description of Artificial Sequence: Synthetic oligonucleotide
cagucuuccaugauccgag

SEQ ID NO: 429720 - RNA, 19 nt, Artificial Sequence
  Description of Artificial Sequence: Synthetic oligonucleotide
uggauucgcaccuguguag

SEQ ID NO: 429721 - RNA, 19 nt, Artificial Sequence
  Description of Artificial Sequence: Synthetic oligonucleotide
gaaaccguugagaauggac

SEQ ID NO: 429722 - RNA, 19 nt, Artificial Sequence
  Description of Artificial Sequence: Synthetic oligonucleotide
auaccgcuuguacugugac

SEQ ID NO: 429723 - RNA, 19 nt, Artificial Sequence
  Description of Artificial Sequence: Synthetic oligonucleotide
guucuaggggaucugucag

SEQ ID NO: 429724 - RNA, 19 nt, Artificial Sequence
  Description of Artificial Sequence: Synthetic oligonucleotide
ugcccacaagugaagauac

SEQ ID NO: 429725 - RNA, 19 nt, Artificial Sequence
  Description of Artificial Sequence: Synthetic oligonucleotide
acuugaagcagagcugacg

SEQ ID NO: 429726 - RNA, 19 nt, Artificial Sequence
  Description of Artificial Sequence: Synthetic oligonucleotide
cauugguuggcuaaucaca

SEQ ID NO: 429727 - RNA, 19 nt, Artificial Sequence
  Description of Artificial Sequence: Synthetic oligonucleotide
guugggaguugagauaccg

SEQ ID NO: 429728 - RNA, 19 nt, Artificial Sequence
  Description of Artificial Sequence: Synthetic oligonucleotide
gaauaucucgggauccucc

SEQ ID NO: 429729 - RNA, 19 nt, Artificial Sequence
  Description of Artificial Sequence: Synthetic oligonucleotide
agaaacgaagcagccuccc

SEQ ID NO: 429730 - RNA, 19 nt, Artificial Sequence
  Description of Artificial Sequence: Synthetic oligonucleotide
ugagauuggcuccaagguu

SEQ ID NO: 429731 - RNA, 19 nt, Artificial Sequence
  Description of Artificial Sequence: Synthetic oligonucleotide
uuugaccacgguaguaccu

SEQ ID NO: 429732 - RNA, 19 nt, Artificial Sequence
  Description of Artificial Sequence: Synthetic oligonucleotide
cuuaguacuuccugccaug

SEQ ID NO: 429733 - RNA, 19 nt, Artificial Sequence
  Description of Artificial Sequence: Synthetic oligonucleotide
auuaucaaguaagccacca

SEQ ID NO: 429734 - RNA, 19 nt, Artificial Sequence
  Description of Artificial Sequence: Synthetic oligonucleotide
uaucaaccgagaugcacga

SEQ ID NO: 429735 - RNA, 19 nt, Artificial Sequence
  Description of Artificial Sequence: Synthetic oligonucleotide
aaauccucacacagaauga

SEQ ID NO: 429736 - RNA, 19 nt, Artificial Sequence
  Description of Artificial Sequence: Synthetic oligonucleotide
aacacccuccaccacccug

SEQ ID NO: 429737 - RNA, 19 nt, Artificial Sequence
  Description of Artificial Sequence: Synthetic oligonucleotide
caaaagcggaaguucuccc

SEQ ID NO: 429738 - RNA, 19 nt, Artificial Sequence
  Description of Artificial Sequence: Synthetic oligonucleotide
agcucagagaaacgaagca

SEQ ID NO: 429739 - RNA, 19 nt, Artificial Sequence
  Description of Artificial Sequence: Synthetic oligonucleotide
ugaagcuagcauugccaag

SEQ ID NO: 429740 - RNA, 19 nt, Artificial Sequence
  Description of Artificial Sequence: Synthetic oligonucleotide
ugccaaguagugccuaaug

SEQ ID NO: 429741 - RNA, 19 nt, Artificial Sequence
  Description of Artificial Sequence: Synthetic oligonucleotide
caaccgagaugcacgaggc

SEQ ID NO: 429742 - RNA, 19 nt, Artificial Sequence
  Description of Artificial Sequence: Synthetic oligonucleotide
gaacagucuggauucgcac

SEQ ID NO: 429743 - RNA, 19 nt, Artificial Sequence
  Description of Artificial Sequence: Synthetic oligonucleotide
ucuaggggaucugucagca

SEQ ID NO: 429744 - RNA, 19 nt, Artificial Sequence
  Description of Artificial Sequence: Synthetic oligonucleotide
gagggguuuccaaaagcgg

SEQ ID NO: 429745 - RNA, 19 nt, Artificial Sequence
  Description of Artificial Sequence: Synthetic oligonucleotide
gagcuuaguaccugcuggc

SEQ ID NO: 429746 - RNA, 19 nt, Artificial Sequence
  Description of Artificial Sequence: Synthetic oligonucleotide
uguuacaaucagguggcca

SEQ ID NO: 429747 - RNA, 19 nt, Artificial Sequence
  Description of Artificial Sequence: Synthetic oligonucleotide
ugugauccaaggaaucauu

SEQ ID NO: 429748 - RNA, 19 nt, Artificial Sequence
  Description of Artificial Sequence: Synthetic oligonucleotide
ucccagauugggaugugga

SEQ ID NO: 429749 - RNA, 19 nt, Artificial Sequence
  Description of Artificial Sequence: Synthetic oligonucleotide
acuuaguacuuccugccau

SEQ ID NO: 429750 - RNA, 19 nt, Artificial Sequence
  Description of Artificial Sequence: Synthetic oligonucleotide
uuaggcucucauccugacc

SEQ ID NO: 429751 - RNA, 19 nt, Artificial Sequence
  Description of Artificial Sequence: Synthetic oligonucleotide
cuuccaugauccgaguacc

SEQ ID NO: 429752 - RNA, 19 nt, Artificial Sequence
  Description of Artificial Sequence: Synthetic oligonucleotide
uccccuacucucuugucca

SEQ ID NO: 429753 - RNA, 19 nt, Artificial Sequence
  Description of Artificial Sequence: Synthetic oligonucleotide
gguaacuguggcuugugug

SEQ ID NO: 429754 - RNA, 19 nt, Artificial Sequence
  Description of Artificial Sequence: Synthetic oligonucleotide
cacucuugcccuucauugg

SEQ ID NO: 429755 - RNA, 19 nt, Artificial Sequence
  Description of Artificial Sequence: Synthetic oligonucleotide
aggaguaagggaucgguuu

SEQ ID NO: 429756 - RNA, 19 nt, Artificial Sequence
  Description of Artificial Sequence: Synthetic oligonucleotide
aaagcugaauuggaggcuu

SEQ ID NO: 429757 - RNA, 19 nt, Artificial Sequence
  Description of Artificial Sequence: Synthetic oligonucleotide
cucuggaacuagacaaagc

SEQ ID NO: 429758 - RNA, 19 nt, Artificial Sequence
  Description of Artificial Sequence: Synthetic oligonucleotide
aucccuucuaucaaccgag

SEQ ID NO: 429759 - RNA, 19 nt, Artificial Sequence
  Description of Artificial Sequence: Synthetic oligonucleotide
acaaugcggauuguggcag

SEQ ID NO: 429760 - RNA, 19 nt, Artificial Sequence
  Description of Artificial Sequence: Synthetic oligonucleotide
acgauacuugaccaccuca

SEQ ID NO: 429761 - RNA, 19 nt, Artificial Sequence
  Description of Artificial Sequence: Synthetic oligonucleotide
ugaagcagagcugacgaua

SEQ ID NO: 429762 - RNA, 19 nt, Artificial Sequence
  Description of Artificial Sequence: Synthetic oligonucleotide
uuacuuugaccacgguagu

SEQ ID NO: 429763 - RNA, 19 nt, Artificial Sequence
  Description of Artificial Sequence: Synthetic oligonucleotide
uguguugggaguugagaua

SEQ ID NO: 429764 - RNA, 19 nt, Artificial Sequence
  Description of Artificial Sequence: Synthetic oligonucleotide
cagacccugcacaaugcgg

SEQ ID NO: 429765 - RNA, 19 nt, Artificial Sequence
  Description of Artificial Sequence: Synthetic oligonucleotide
uguuggcuucagaucagga

SEQ ID NO: 429766 - RNA, 19 nt, Artificial Sequence
  Description of Artificial Sequence: Synthetic oligonucleotide
agcggagaugccuuugugu

SEQ ID NO: 429767 - RNA, 19 nt, Artificial Sequence
  Description of Artificial Sequence: Synthetic oligonucleotide
uugaccacgguaguaccug

SEQ ID NO: 429768 - RNA, 19 nt, Artificial Sequence
  Description of Artificial Sequence: Synthetic oligonucleotide
gacauguaagguagcggag

SEQ ID NO: 429769 - RNA, 19 nt, Artificial Sequence
  Description of Artificial Sequence: Synthetic oligonucleotide
cuaguuucacuugagggga

SEQ ID NO: 429770 - RNA, 19 nt, Artificial Sequence
  Description of Artificial Sequence: Synthetic oligonucleotide
gaucaggaguuacuuugac

SEQ ID NO: 429771 - RNA, 19 nt, Artificial Sequence
  Description of Artificial Sequence: Synthetic oligonucleotide
uccaucucggaagagcuuc

SEQ ID NO: 429772 - RNA, 19 nt, Artificial Sequence
  Description of Artificial Sequence: Synthetic oligonucleotide
aaugagcuuaguaccugcu

SEQ ID NO: 429773 - RNA, 19 nt, Artificial Sequence
  Description of Artificial Sequence: Synthetic oligonucleotide
agcugacgauacuugacca

SEQ ID NO: 429774 - RNA, 19 nt, Artificial Sequence
  Description of Artificial Sequence: Synthetic oligonucleotide
gaagcuagcauugccaagu

SEQ ID NO: 429775 - RNA, 19 nt, Artificial Sequence
  Description of Artificial Sequence: Synthetic oligonucleotide
cuggccugcuuuaggaggc

SEQ ID NO: 429776 - RNA, 19 nt, Artificial Sequence
  Description of Artificial Sequence: Synthetic oligonucleotide
ucccuacuacauaaccucu

SEQ ID NO: 429777 - RNA, 19 nt, Artificial Sequence
  Description of Artificial Sequence: Synthetic oligonucleotide
aggaacagucuggauucgc

SEQ ID NO: 429778 - RNA, 19 nt, Artificial Sequence
  Description of Artificial Sequence: Synthetic oligonucleotide
uaaucacagagacgaggaa

SEQ ID NO: 429779 - RNA, 19 nt, Artificial Sequence
  Description of Artificial Sequence: Synthetic oligonucleotide
cuuuguguugggaguugag

SEQ ID NO: 429780 - RNA, 19 nt, Artificial Sequence
  Description of Artificial Sequence: Synthetic oligonucleotide
augaaggaacacuggcuga

SEQ ID NO: 429781 - RNA, 19 nt, Artificial Sequence
  Description of Artificial Sequence: Synthetic oligonucleotide
gguaccacccagaaggcag

SEQ ID NO: 429782 - RNA, 19 nt, Artificial Sequence
  Description of Artificial Sequence: Synthetic oligonucleotide
aguaagggaucgguuuagg

SEQ ID NO: 429783 - RNA, 19 nt, Artificial Sequence
  Description of Artificial Sequence: Synthetic oligonucleotide
acauguaagguagcggaga

SEQ ID NO: 429784 - RNA, 19 nt, Artificial Sequence
  Description of Artificial Sequence: Synthetic oligonucleotide
caaccuguuaagagucuug

SEQ ID NO: 429785 - RNA, 19 nt, Artificial Sequence
  Description of Artificial Sequence: Synthetic oligonucleotide
aggcugacggacaucaaag

SEQ ID NO: 429786 - RNA, 19 nt, Artificial Sequence
  Description of Artificial Sequence: Synthetic oligonucleotide
caagugugagagcagcauc

SEQ ID NO: 429787 - RNA, 19 nt, Artificial Sequence
  Description of Artificial Sequence: Synthetic oligonucleotide
gccaaguagugccuaaugc

SEQ ID NO: 429788 - RNA, 19 nt, Artificial Sequence
  Description of Artificial Sequence: Synthetic oligonucleotide
uucgcaccuguguagccug

SEQ ID NO: 429789 - RNA, 19 nt, Artificial Sequence
  Description of Artificial Sequence: Synthetic oligonucleotide
agaaugaggcuuauucacu

SEQ ID NO: 429790 - RNA, 19 nt, Artificial Sequence
  Description of Artificial Sequence: Synthetic oligonucleotide
ccuucuaucaaccgagaug

SEQ ID NO: 429791 - RNA, 19 nt, Artificial Sequence
  Description of Artificial Sequence: Synthetic oligonucleotide
gauucgcaccuguguagcc

SEQ ID NO: 429792 - RNA, 19 nt, Artificial Sequence
  Description of Artificial Sequence: Synthetic oligonucleotide
uagcauugccaaguagugc

SEQ ID NO: 429793 - RNA, 19 nt, Artificial Sequence
  Description of Artificial Sequence: Synthetic oligonucleotide
gaucugucagcaugugauc

SEQ ID NO: 429794 - RNA, 19 nt, Artificial Sequence
  Description of Artificial Sequence: Synthetic oligonucleotide
caaguagugccuaaugcua

SEQ ID NO: 429795 - RNA, 19 nt, Artificial Sequence
  Description of Artificial Sequence: Synthetic oligonucleotide
acuagacaaagcagcacug

SEQ ID NO: 429796 - RNA, 19 nt, Artificial Sequence
  Description of Artificial Sequence: Synthetic oligonucleotide
gaacuagacaaagcagcac

SEQ ID NO: 429797 - RNA, 19 nt, Artificial Sequence
  Description of Artificial Sequence: Synthetic oligonucleotide
agauguucacgcugagagu

SEQ ID NO: 429798 - RNA, 19 nt, Artificial Sequence
  Description of Artificial Sequence: Synthetic oligonucleotide
auaucucgggauccuccag

SEQ ID NO: 429799 - RNA, 19 nt, Artificial Sequence
  Description of Artificial Sequence: Synthetic oligonucleotide
gagaauggacaguuccgga

SEQ ID NO: 429800 - RNA, 19 nt, Artificial Sequence
  Description of Artificial Sequence: Synthetic oligonucleotide
accgagaugcacgaggccu

SEQ ID NO: 429801 - RNA, 19 nt, Artificial Sequence
  Description of Artificial Sequence: Synthetic oligonucleotide
uccugacccaaggaguaag

SEQ ID NO: 429802 - RNA, 19 nt, Artificial Sequence
  Description of Artificial Sequence: Synthetic oligonucleotide
uuccaugauccgaguacca

SEQ ID NO: 429803 - RNA, 19 nt, Artificial Sequence
  Description of Artificial Sequence: Synthetic oligonucleotide
gaguaagggaucgguuuag

SEQ ID NO: 429804 - RNA, 19 nt, Artificial Sequence
  Description of Artificial Sequence: Synthetic oligonucleotide
agacuaacccugguaccac

SEQ ID NO: 429805 - RNA, 19 nt, Artificial Sequence
  Description of Artificial Sequence: Synthetic oligonucleotide
gugaacaggcucgccaagg

SEQ ID NO: 429806 - RNA, 19 nt, Artificial Sequence
  Description of Artificial Sequence: Synthetic oligonucleotide
guagugccuaaugcuaucc

SEQ ID NO: 429807 - RNA, 19 nt, Artificial Sequence
  Description of Artificial Sequence: Synthetic oligonucleotide
accgcuuguacugugacuu

SEQ ID NO: 429808 - RNA, 19 nt, Artificial Sequence
  Description of Artificial Sequence: Synthetic oligonucleotide
uucccagauugggaugugg

SEQ ID NO: 429809 - RNA, 19 nt, Artificial Sequence
  Description of Artificial Sequence: Synthetic oligonucleotide
acauaaccucucauuauca

SEQ ID NO: 429810 - RNA, 19 nt, Artificial Sequence
  Description of Artificial Sequence: Synthetic oligonucleotide
aaugcggauuguggcagca

SEQ ID NO: 429811 - RNA, 19 nt, Artificial Sequence
  Description of Artificial Sequence: Synthetic oligonucleotide
caagugugaaauggccagg

SEQ ID NO: 429812 - RNA, 19 nt, Artificial Sequence
  Description of Artificial Sequence: Synthetic oligonucleotide
cagcaugugauccaaggaa

SEQ ID NO: 429813 - RNA, 19 nt, Artificial Sequence
  Description of Artificial Sequence: Synthetic oligonucleotide
agggguuuccaaaagcgga

SEQ ID NO: 429814 - RNA, 19 nt, Artificial Sequence
  Description of Artificial Sequence: Synthetic oligonucleotide
uuacaaucagguggccagc

SEQ ID NO: 429815 - RNA, 19 nt, Artificial Sequence
  Description of Artificial Sequence: Synthetic oligonucleotide
accacgguaguaccugcug

SEQ ID NO: 429816 - RNA, 19 nt, Artificial Sequence
  Description of Artificial Sequence: Synthetic oligonucleotide
gcacaaugcggauuguggc

SEQ ID NO: 429817 - RNA, 19 nt, Artificial Sequence
  Description of Artificial Sequence: Synthetic oligonucleotide
aagcugugcccuguuggag

SEQ ID NO: 429818 - RNA, 19 nt, Artificial Sequence
  Description of Artificial Sequence: Synthetic oligonucleotide
cuuucccuucugaucugcc

SEQ ID NO: 429819 - RNA, 19 nt, Artificial Sequence
  Description of Artificial Sequence: Synthetic oligonucleotide
gcacuggaacccuaaaaug

SEQ ID NO: 429820 - RNA, 19 nt, Artificial Sequence
  Description of Artificial Sequence: Synthetic oligonucleotide
uaaagcccggauuucuauu

SEQ ID NO: 429821 - RNA, 19 nt, Artificial Sequence
  Description of Artificial Sequence: Synthetic oligonucleotide
augauccgaguaccaugac

SEQ ID NO: 429822 - RNA, 19 nt, Artificial Sequence
  Description of Artificial Sequence: Synthetic oligonucleotide
uugguuggcuaaucacaga

SEQ ID NO: 429823 - RNA, 19 nt, Artificial Sequence
  Description of Artificial Sequence: Synthetic oligonucleotide
cacaaugcggauuguggca

SEQ ID NO: 429824 - RNA, 19 nt, Artificial Sequence
  Description of Artificial Sequence: Synthetic oligonucleotide
acucaggagguaacugugg

SEQ ID NO: 429825 - RNA, 19 nt, Artificial Sequence
  Description of Artificial Sequence: Synthetic oligonucleotide
guaguguuaacagggaccu

SEQ ID NO: 429826 - RNA, 19 nt, Artificial Sequence
  Description of Artificial Sequence: Synthetic oligonucleotide
aaucagguggccagcucca

SEQ ID NO: 429827 - RNA, 19 nt, Artificial Sequence
  Description of Artificial Sequence: Synthetic oligonucleotide
uagcggagaugccuuugug

SEQ ID NO: 429828 - RNA, 19 nt, Artificial Sequence
  Description of Artificial Sequence: Synthetic oligonucleotide
ucccgaugcugacagccac

SEQ ID NO: 429829 - RNA, 19 nt, Artificial Sequence
  Description of Artificial Sequence: Synthetic oligonucleotide
agauaccgcuuguacugug

SEQ ID NO: 429830 - RNA, 19 nt, Artificial Sequence
  Description of Artificial Sequence: Synthetic oligonucleotide
uuucacuugaggggaucca

SEQ ID NO: 429831 - RNA, 19 nt, Artificial Sequence
  Description of Artificial Sequence: Synthetic oligonucleotide
ggcuuauucacugcuggcc

SEQ ID NO: 429832 - RNA, 19 nt, Artificial Sequence
  Description of Artificial Sequence: Synthetic oligonucleotide
caugugauccaaggaauca

SEQ ID NO: 429833 - RNA, 19 nt, Artificial Sequence
  Description of Artificial Sequence: Synthetic oligonucleotide
gcaucaagcgaaaagcuga

SEQ ID NO: 429834 - RNA, 19 nt, Artificial Sequence
  Description of Artificial Sequence: Synthetic oligonucleotide
uaacuguggcuugugugac

SEQ ID NO: 429835 - RNA, 19 nt, Artificial Sequence
  Description of Artificial Sequence: Synthetic oligonucleotide
uggccuacacaucccuacu

SEQ ID NO: 429836 - RNA, 19 nt, Artificial Sequence
  Description of Artificial Sequence: Synthetic oligonucleotide
ugaccacgguaguaccugc

SEQ ID NO: 429837 - RNA, 19 nt, Artificial Sequence
  Description of Artificial Sequence: Synthetic oligonucleotide
agcaugugauccaaggaau

SEQ ID NO: 429838 - RNA, 19 nt, Artificial Sequence
  Description of Artificial Sequence: Synthetic oligonucleotide
agcgaaaagcugaauugga

SEQ ID NO: 429839 - RNA, 19 nt, Artificial Sequence
  Description of Artificial Sequence: Synthetic oligonucleotide
caggguuaaaguguccauc

SEQ ID NO: 429840 - RNA, 19 nt, Artificial Sequence
  Description of Artificial Sequence: Synthetic oligonucleotide
uucacuugaggggauccau

SEQ ID NO: 429841 - RNA, 19 nt, Artificial Sequence
  Description of Artificial Sequence: Synthetic oligonucleotide
uggcacuuauacugggcaa

SEQ ID NO: 429842 - RNA, 19 nt, Artificial Sequence
  Description of Artificial Sequence: Synthetic oligonucleotide
auguuacaaucagguggcc

SEQ ID NO: 429843 - RNA, 19 nt, Artificial Sequence
  Description of Artificial Sequence: Synthetic oligonucleotide
ggcacuuauacugggcaag

SEQ ID NO: 429844 - RNA, 19 nt, Artificial Sequence
  Description of Artificial Sequence: Synthetic oligonucleotide
cugaagcuagcauugccaa

SEQ ID NO: 429845 - RNA, 19 nt, Artificial Sequence
  Description of Artificial Sequence: Synthetic oligonucleotide
cacaucccuacuacauaac

SEQ ID NO: 429846 - RNA, 19 nt, Artificial Sequence
  Description of Artificial Sequence: Synthetic oligonucleotide
caggaguuacuuugaccac

SEQ ID NO: 429847 - RNA, 19 nt, Artificial Sequence
  Description of Artificial Sequence: Synthetic oligonucleotide
gauugggauguggacacaa

SEQ ID NO: 429848 - RNA, 19 nt, Artificial Sequence
  Description of Artificial Sequence: Synthetic oligonucleotide
ucuaggccacaguugccaa

SEQ ID NO: 429849 - RNA, 19 nt, Artificial Sequence
  Description of Artificial Sequence: Synthetic oligonucleotide
gauaccgcuuguacuguga

SEQ ID NO: 429850 - RNA, 19 nt, Artificial Sequence
  Description of Artificial Sequence: Synthetic oligonucleotide
aggcucgccaaggacaaug

SEQ ID NO: 429851 - RNA, 19 nt, Artificial Sequence
  Description of Artificial Sequence: Synthetic oligonucleotide
uguucacgcugagagucac

SEQ ID NO: 429852 - RNA, 19 nt, Artificial Sequence
  Description of Artificial Sequence: Synthetic oligonucleotide
agcccggauuucuauuuga

SEQ ID NO: 429853 - RNA, 19 nt, Artificial Sequence
  Description of Artificial Sequence: Synthetic oligonucleotide
agguaacuguggcuugugu

SEQ ID NO: 429854 - RNA, 19 nt, Artificial Sequence
  Description of Artificial Sequence: Synthetic oligonucleotide
uugaccaccucaggguuaa

SEQ ID NO: 429855 - RNA, 19 nt, Artificial Sequence
  Description of Artificial Sequence: Synthetic oligonucleotide
uccaugauccgaguaccau

SEQ ID NO: 429856 - RNA, 19 nt, Artificial Sequence
  Description of Artificial Sequence: Synthetic oligonucleotide
aggaaaccguugagaaugg

SEQ ID NO: 429857 - RNA, 19 nt, Artificial Sequence
  Description of Artificial Sequence: Synthetic oligonucleotide
augugauccaaggaaucau

SEQ ID NO: 429858 - RNA, 19 nt, Artificial Sequence
  Description of Artificial Sequence: Synthetic oligonucleotide
gaugcacgaggccucuuaa

SEQ ID NO: 429859 - RNA, 19 nt, Artificial Sequence
  Description of Artificial Sequence: Synthetic oligonucleotide
gcgaaaagcugaauuggag

SEQ ID NO: 429860 - RNA, 19 nt, Artificial Sequence
  Description of Artificial Sequence: Synthetic oligonucleotide
cugagauuggcuccaaggu

SEQ ID NO: 429861 - RNA, 19 nt, Artificial Sequence
  Description of Artificial Sequence: Synthetic oligonucleotide
cacgaggccucuuaaagcu

SEQ ID NO: 429862 - RNA, 19 nt, Artificial Sequence
  Description of Artificial Sequence: Synthetic oligonucleotide
ccuguuaagagucuuguua

SEQ ID NO: 429863 - RNA, 19 nt, Artificial Sequence
  Description of Artificial Sequence: Synthetic oligonucleotide
auucgcaccuguguagccu

SEQ ID NO: 429864 - RNA, 19 nt, Artificial Sequence
  Description of Artificial Sequence: Synthetic oligonucleotide
ccuuaucggggcuucauuc

SEQ ID NO: 429865 - RNA, 19 nt, Artificial Sequence
  Description of Artificial Sequence: Synthetic oligonucleotide
guggacacaacuguagugu

SEQ ID NO: 429866 - RNA, 19 nt, Artificial Sequence
  Description of Artificial Sequence: Synthetic oligonucleotide
caucccuacuacauaaccu

SEQ ID NO: 429867 - RNA, 19 nt, Artificial Sequence
  Description of Artificial Sequence: Synthetic oligonucleotide
cugacggacaucaaagaau

SEQ ID NO: 429868 - RNA, 19 nt, Artificial Sequence
  Description of Artificial Sequence: Synthetic oligonucleotide
ggcaucaagcgaaaagcug

SEQ ID NO: 429869 - RNA, 19 nt, Artificial Sequence
  Description of Artificial Sequence: Synthetic oligonucleotide
aaggaguaagggaucgguu

SEQ ID NO: 429870 - RNA, 19 nt, Artificial Sequence
  Description of Artificial Sequence: Synthetic oligonucleotide
ggacaaugcccacaaguga

SEQ ID NO: 429871 - RNA, 19 nt, Artificial Sequence
  Description of Artificial Sequence: Synthetic oligonucleotide
gagaugggaugcaggaaca

SEQ ID NO: 429872 - RNA, 19 nt, Artificial Sequence
  Description of Artificial Sequence: Synthetic oligonucleotide
ugcuggagauguucacgcu

SEQ ID NO: 429873 - RNA, 19 nt, Artificial Sequence
  Description of Artificial Sequence: Synthetic oligonucleotide
uaccgcuuguacugugacu

SEQ ID NO: 429874 - RNA, 19 nt, Artificial Sequence
  Description of Artificial Sequence: Synthetic oligonucleotide
cuaggccacaguugccaac

SEQ ID NO: 429875 - RNA, 19 nt, Artificial Sequence
  Description of Artificial Sequence: Synthetic oligonucleotide
gcagacuaacccugguacc

SEQ ID NO: 429876 - RNA, 19 nt, Artificial Sequence
  Description of Artificial Sequence: Synthetic oligonucleotide
agaugcacgaggccucuua

SEQ ID NO: 429877 - RNA, 19 nt, Artificial Sequence
  Description of Artificial Sequence: Synthetic oligonucleotide
uggaguguggcugcagaau

SEQ ID NO: 429878 - RNA, 19 nt, Artificial Sequence
  Description of Artificial Sequence: Synthetic oligonucleotide
cagacuaacccugguacca

SEQ ID NO: 429879 - RNA, 19 nt, Artificial Sequence
  Description of Artificial Sequence: Synthetic oligonucleotide
gucuucaggcagacuaacc

SEQ ID NO: 429880 - RNA, 19 nt, Artificial Sequence
  Description of Artificial Sequence: Synthetic oligonucleotide
aaccuuaucggggcuucau

SEQ ID NO: 429881 - RNA, 19 nt, Artificial Sequence
  Description of Artificial Sequence: Synthetic oligonucleotide
gcacgaggccucuuaaagc

SEQ ID NO: 429882 - RNA, 19 nt, Artificial Sequence
  Description of Artificial Sequence: Synthetic oligonucleotide
gguaccaaacuaguuucac

SEQ ID NO: 429883 - RNA, 19 nt, Artificial Sequence
  Description of Artificial Sequence: Synthetic oligonucleotide
uacuuugaccacgguagua

SEQ ID NO: 429884 - RNA, 19 nt, Artificial Sequence
  Description of Artificial Sequence: Synthetic oligonucleotide
cuacacaucccuacuacau

SEQ ID NO: 429885 - RNA, 19 nt, Artificial Sequence
  Description of Artificial Sequence: Synthetic oligonucleotide
gcuguaagcaagugugaga

SEQ ID NO: 429886 - RNA, 19 nt, Artificial Sequence
  Description of Artificial Sequence: Synthetic oligonucleotide
gcacuuauacugggcaagg

SEQ ID NO: 429887 - RNA, 19 nt, Artificial Sequence
  Description of Artificial Sequence: Synthetic oligonucleotide
aacccugguaccacccaga

SEQ ID NO: 429888 - RNA, 19 nt, Artificial Sequence
  Description of Artificial Sequence: Synthetic oligonucleotide
caucaagcgaaaagcugaa

SEQ ID NO: 429889 - RNA, 19 nt, Artificial Sequence
  Description of Artificial Sequence: Synthetic oligonucleotide
agucuuccaugauccgagu

SEQ ID NO: 429890 - RNA, 19 nt, Artificial Sequence
  Description of Artificial Sequence: Synthetic oligonucleotide
cauccugacccaaggagua

SEQ ID NO: 429891 - RNA, 19 nt, Artificial Sequence
  Description of Artificial Sequence: Synthetic oligonucleotide
cuuaucggggcuucauucu

SEQ ID NO: 429892 - RNA, 19 nt, Artificial Sequence
  Description of Artificial Sequence: Synthetic oligonucleotide
cuucaggcagacuaacccu

SEQ ID NO: 429893 - RNA, 19 nt, Artificial Sequence
  Description of Artificial Sequence: Synthetic oligonucleotide
gagguaacuguggcuugug

SEQ ID NO: 429894 - RNA, 19 nt, Artificial Sequence
  Description of Artificial Sequence: Synthetic oligonucleotide
ccagucccgaugcugacag

SEQ ID NO: 429895 - RNA, 19 nt, Artificial Sequence
  Description of Artificial Sequence: Synthetic oligonucleotide
agcuuaguaccugcuggca

SEQ ID NO: 429896 - RNA, 19 nt, Artificial Sequence
  Description of Artificial Sequence: Synthetic oligonucleotide
gccuacacaucccuacuac

SEQ ID NO: 429897 - RNA, 19 nt, Artificial Sequence
  Description of Artificial Sequence: Synthetic oligonucleotide
gaccugucgcacagugggg

SEQ ID NO: 429898 - RNA, 19 nt, Artificial Sequence
  Description of Artificial Sequence: Synthetic oligonucleotide
ggauucgcaccuguguagc

SEQ ID NO: 429899 - RNA, 19 nt, Artificial Sequence
  Description of Artificial Sequence: Synthetic oligonucleotide
cacuuaguacuuccugcca

SEQ ID NO: 429900 - RNA, 19 nt, Artificial Sequence
  Description of Artificial Sequence: Synthetic oligonucleotide
gcuagcauugccaaguagu

SEQ ID NO: 429901 - RNA, 19 nt, Artificial Sequence
  Description of Artificial Sequence: Synthetic oligonucleotide
cuuguuaggcucucauccu

SEQ ID NO: 429902 - RNA, 19 nt, Artificial Sequence
  Description of Artificial Sequence: Synthetic oligonucleotide
aggcagacuaacccuggua

SEQ ID NO: 429903 - RNA, 19 nt, Artificial Sequence
  Description of Artificial Sequence: Synthetic oligonucleotide
accguugagaauggacagu

SEQ ID NO: 429904 - RNA, 19 nt, Artificial Sequence
  Description of Artificial Sequence: Synthetic oligonucleotide
ccaagggucugguuugcag

SEQ ID NO: 429905 - RNA, 19 nt, Artificial Sequence
  Description of Artificial Sequence: Synthetic oligonucleotide
ggcacuaaagcccggauuu

SEQ ID NO: 429906 - RNA, 19 nt, Artificial Sequence
  Description of Artificial Sequence: Synthetic oligonucleotide
cuggaacccuaaaauggaa

SEQ ID NO: 429907 - RNA, 19 nt, Artificial Sequence
  Description of Artificial Sequence: Synthetic oligonucleotide
aggggaucugucagcaugu

SEQ ID NO: 429908 - RNA, 19 nt, Artificial Sequence
  Description of Artificial Sequence: Synthetic oligonucleotide
accuuaucggggcuucauu

SEQ ID NO: 429909 - RNA, 19 nt, Artificial Sequence
  Description of Artificial Sequence: Synthetic oligonucleotide
ccacgguaguaccugcugg

SEQ ID NO: 429910 - RNA, 19 nt, Artificial Sequence
  Description of Artificial Sequence: Synthetic oligonucleotide
acgaggaaccugugauccu

SEQ ID NO: 429911 - RNA, 19 nt, Artificial Sequence
  Description of Artificial Sequence: Synthetic oligonucleotide
cccugcacaaugcggauug

SEQ ID NO: 429912 - RNA, 19 nt, Artificial Sequence
  Description of Artificial Sequence: Synthetic oligonucleotide
cagggacaaccaagguccc

SEQ ID NO: 429913 - RNA, 19 nt, Artificial Sequence
  Description of Artificial Sequence: Synthetic oligonucleotide
aguugagauaccgcuugua

SEQ ID NO: 429914 - RNA, 19 nt, Artificial Sequence
  Description of Artificial Sequence: Synthetic oligonucleotide
augcacgaggccucuuaaa

SEQ ID NO: 429915 - RNA, 19 nt, Artificial Sequence
  Description of Artificial Sequence: Synthetic oligonucleotide
ggaguaagggaucgguuua

SEQ ID NO: 429916 - RNA, 19 nt, Artificial Sequence
  Description of Artificial Sequence: Synthetic oligonucleotide
agcaagugugagagcagca

SEQ ID NO: 429917 - RNA, 19 nt, Artificial Sequence
  Description of Artificial Sequence: Synthetic oligonucleotide
ccuacuacauaaccucuca

SEQ ID NO: 429918 - RNA, 19 nt, Artificial Sequence
  Description of Artificial Sequence: Synthetic oligonucleotide
ggaacagucuggauucgca

SEQ ID NO: 429919 - RNA, 19 nt, Artificial Sequence
  Description of Artificial Sequence: Synthetic oligonucleotide
guaaggaaacucacuggcu

SEQ ID NO: 429920 - RNA, 19 nt, Artificial Sequence
  Description of Artificial Sequence: Synthetic oligonucleotide
aucaaccgagaugcacgag

SEQ ID NO: 429921 - RNA, 19 nt, Artificial Sequence
  Description of Artificial Sequence: Synthetic oligonucleotide
gcaaugagcuuaguaccug

SEQ ID NO: 429922 - RNA, 19 nt, Artificial Sequence
  Description of Artificial Sequence: Synthetic oligonucleotide
cucaugcaggagagcucag

SEQ ID NO: 429923 - RNA, 19 nt, Artificial Sequence
  Description of Artificial Sequence: Synthetic oligonucleotide
caggaacagucuggauucg

SEQ ID NO: 429924 - RNA, 19 nt, Artificial Sequence
  Description of Artificial Sequence: Synthetic oligonucleotide
cccagauugggauguggac

SEQ ID NO: 429925 - RNA, 19 nt, Artificial Sequence
  Description of Artificial Sequence: Synthetic oligonucleotide
ccacagguauucuacacaa

SEQ ID NO: 429926 - RNA, 19 nt, Artificial Sequence
  Description of Artificial Sequence: Synthetic oligonucleotide
cccuguuggagaugggaug

SEQ ID NO: 429927 - RNA, 19 nt, Artificial Sequence
  Description of Artificial Sequence: Synthetic oligonucleotide
cagcacuggaacccuaaaa

SEQ ID NO: 429928 - RNA, 19 nt, Artificial Sequence
  Description of Artificial Sequence: Synthetic oligonucleotide
cuuucucggucacuguugu

SEQ ID NO: 429929 - RNA, 19 nt, Artificial Sequence
  Description of Artificial Sequence: Synthetic oligonucleotide
cuaaagcccggauuucuau

SEQ ID NO: 429930 - RNA, 19 nt, Artificial Sequence
  Description of Artificial Sequence: Synthetic oligonucleotide
acaggcucgccaaggacaa

SEQ ID NO: 429931 - RNA, 19 nt, Artificial Sequence
  Description of Artificial Sequence: Synthetic oligonucleotide
cccaccuuuaguaaguggu

SEQ ID NO: 429932 - RNA, 19 nt, Artificial Sequence
  Description of Artificial Sequence: Synthetic oligonucleotide
auccgaguaccaugaccau

SEQ ID NO: 429933 - RNA, 19 nt, Artificial Sequence
  Description of Artificial Sequence: Synthetic oligonucleotide
uggaaccuuaucggggcuu

SEQ ID NO: 429934 - RNA, 19 nt, Artificial Sequence
  Description of Artificial Sequence: Synthetic oligonucleotide
cauguaagguagcggagau

SEQ ID NO: 429935 - RNA, 19 nt, Artificial Sequence
  Description of Artificial Sequence: Synthetic oligonucleotide
ggcauccaacacucaggag

SEQ ID NO: 429936 - RNA, 19 nt, Artificial Sequence
  Description of Artificial Sequence: Synthetic oligonucleotide
cauccccuacucucuuguc

SEQ ID NO: 429937 - RNA, 19 nt, Artificial Sequence
  Description of Artificial Sequence: Synthetic oligonucleotide
aucaagcgaaaagcugaau

SEQ ID NO: 429938 - RNA, 19 nt, Artificial Sequence
  Description of Artificial Sequence: Synthetic oligonucleotide
guagcggagaugccuuugu

SEQ ID NO: 429939 - RNA, 19 nt, Artificial Sequence
  Description of Artificial Sequence: Synthetic oligonucleotide
ggguuaaaguguccaucuc

SEQ ID NO: 429940 - RNA, 19 nt, Artificial Sequence
  Description of Artificial Sequence: Synthetic oligonucleotide
ucgcaccuguguagccuga

SEQ ID NO: 429941 - RNA, 19 nt, Artificial Sequence
  Description of Artificial Sequence: Synthetic oligonucleotide
cccuacuacauaaccucuc

SEQ ID NO: 429942 - RNA, 19 nt, Artificial Sequence
  Description of Artificial Sequence: Synthetic oligonucleotide
gaucgguuuaggggcacua

SEQ ID NO: 429943 - RNA, 19 nt, Artificial Sequence
  Description of Artificial Sequence: Synthetic oligonucleotide
ccuacucucuuguccaaca

SEQ ID NO: 429944 - RNA, 19 nt, Artificial Sequence
  Description of Artificial Sequence: Synthetic oligonucleotide
accaaccuguuaagagucu

SEQ ID NO: 429945 - RNA, 19 nt, Artificial Sequence
  Description of Artificial Sequence: Synthetic oligonucleotide
gcaugugauccaaggaauc

SEQ ID NO: 429946 - RNA, 19 nt, Artificial Sequence
  Description of Artificial Sequence: Synthetic oligonucleotide
caaggaaaccguugagaau

SEQ ID NO: 429947 - RNA, 19 nt, Artificial Sequence
  Description of Artificial Sequence: Synthetic oligonucleotide
ggucuucaggcagacuaac

SEQ ID NO: 429948 - RNA, 19 nt, Artificial Sequence
  Description of Artificial Sequence: Synthetic oligonucleotide
ccgaguaccaugaccaucu

SEQ ID NO: 429949 - RNA, 19 nt, Artificial Sequence
  Description of Artificial Sequence: Synthetic oligonucleotide
cacuuauacugggcaagga

SEQ ID NO: 429950 - RNA, 19 nt, Artificial Sequence
  Description of Artificial Sequence: Synthetic oligonucleotide
gguagcggagaugccuuug

SEQ ID NO: 429951 - RNA, 19 nt, Artificial Sequence
  Description of Artificial Sequence: Synthetic oligonucleotide
ccuacacaucccuacuaca

SEQ ID NO: 429952 - RNA, 19 nt, Artificial Sequence
  Description of Artificial Sequence: Synthetic oligonucleotide
gguuggcuaaucacagaga

SEQ ID NO: 429953 - RNA, 19 nt, Artificial Sequence
  Description of Artificial Sequence: Synthetic oligonucleotide
agggacaaccaagguccca

SEQ ID NO: 429954 - RNA, 19 nt, Artificial Sequence
  Description of Artificial Sequence: Synthetic oligonucleotide
ggaaccuuaucggggcuuc

SEQ ID NO: 429955 - RNA, 19 nt, Artificial Sequence
  Description of Artificial Sequence: Synthetic oligonucleotide
agauugggauguggacaca

SEQ ID NO: 429956 - RNA, 19 nt, Artificial Sequence
  Description of Artificial Sequence: Synthetic oligonucleotide
caggagguaacuguggcuu

SEQ ID NO: 429957 - RNA, 19 nt, Artificial Sequence
  Description of Artificial Sequence: Synthetic oligonucleotide
gaaccuuaucggggcuuca

SEQ ID NO: 429958 - RNA, 19 nt, Artificial Sequence
  Description of Artificial Sequence: Synthetic oligonucleotide
gacugugaccuuccaugau

SEQ ID NO: 429959 - RNA, 19 nt, Artificial Sequence
  Description of Artificial Sequence: Synthetic oligonucleotide
gagauaccgcuuguacugu

SEQ ID NO: 429960 - RNA, 19 nt, Artificial Sequence
  Description of Artificial Sequence: Synthetic oligonucleotide
caguggagacugcuuugga

SEQ ID NO: 429961 - RNA, 19 nt, Artificial Sequence
  Description of Artificial Sequence: Synthetic oligonucleotide
cacuaaagcccggauuucu

SEQ ID NO: 429962 - RNA, 19 nt, Artificial Sequence
  Description of Artificial Sequence: Synthetic oligonucleotide
ggugcuuguuuaggagaug

SEQ ID NO: 429963 - RNA, 19 nt, Artificial Sequence
  Description of Artificial Sequence: Synthetic oligonucleotide
agggaucgguuuaggggca

SEQ ID NO: 429964 - RNA, 19 nt, Artificial Sequence
  Description of Artificial Sequence: Synthetic oligonucleotide
ggcucgccaaggacaaugc

SEQ ID NO: 429965 - RNA, 19 nt, Artificial Sequence
  Description of Artificial Sequence: Synthetic oligonucleotide
cugucagcaugugauccaa

SEQ ID NO: 429966 - RNA, 19 nt, Artificial Sequence
  Description of Artificial Sequence: Synthetic oligonucleotide
ccaggcuuacuucuccuga

SEQ ID NO: 429967 - RNA, 19 nt, Artificial Sequence
  Description of Artificial Sequence: Synthetic oligonucleotide
ggcuaaucacagagacgag

SEQ ID NO: 429968 - RNA, 19 nt, Artificial Sequence
  Description of Artificial Sequence: Synthetic oligonucleotide
cuacuacauaaccucucau

SEQ ID NO: 429969 - RNA, 19 nt, Artificial Sequence
  Description of Artificial Sequence: Synthetic oligonucleotide
gggguuuccaaaagcggaa

SEQ ID NO: 429970 - RNA, 19 nt, Artificial Sequence
  Description of Artificial Sequence: Synthetic oligonucleotide
agguagcggagaugccuuu

SEQ ID NO: 429971 - RNA, 19 nt, Artificial Sequence
  Description of Artificial Sequence: Synthetic oligonucleotide
acgcugagagucacuuagu

SEQ ID NO: 429972 - RNA, 19 nt, Artificial Sequence
  Description of Artificial Sequence: Synthetic oligonucleotide
ggcccgcucaccaacugac

SEQ ID NO: 429973 - RNA, 19 nt, Artificial Sequence
  Description of Artificial Sequence: Synthetic oligonucleotide
ccgagaugcacgaggccuc

SEQ ID NO: 429974 - RNA, 19 nt, Artificial Sequence
  Description of Artificial Sequence: Synthetic oligonucleotide
cccaggcuuacuucuccug

SEQ ID NO: 429975 - RNA, 19 nt, Artificial Sequence
  Description of Artificial Sequence: Synthetic oligonucleotide
agacacaguggcacuuaua

SEQ ID NO: 429976 - RNA, 19 nt, Artificial Sequence
  Description of Artificial Sequence: Synthetic oligonucleotide
auguugcgacccagcccac

SEQ ID NO: 429977 - RNA, 19 nt, Artificial Sequence
  Description of Artificial Sequence: Synthetic oligonucleotide
gaguuacuuugaccacggu

SEQ ID NO: 429978 - RNA, 19 nt, Artificial Sequence
  Description of Artificial Sequence: Synthetic oligonucleotide
cuuagacacaguggcacuu

SEQ ID NO: 429979 - RNA, 19 nt, Artificial Sequence
  Description of Artificial Sequence: Synthetic oligonucleotide
cauugccaaguagugccua

SEQ ID NO: 429980 - RNA, 19 nt, Artificial Sequence
  Description of Artificial Sequence: Synthetic oligonucleotide
cuguguagccugaccuugu

SEQ ID NO: 429981 - RNA, 19 nt, Artificial Sequence
  Description of Artificial Sequence: Synthetic oligonucleotide
gacccugcacaaugcggau

SEQ ID NO: 429982 - RNA, 19 nt, Artificial Sequence
  Description of Artificial Sequence: Synthetic oligonucleotide
ggccuacacaucccuacua

SEQ ID NO: 429983 - RNA, 19 nt, Artificial Sequence
  Description of Artificial Sequence: Synthetic oligonucleotide
gcauccccuacucucuugu

SEQ ID NO: 429984 - RNA, 19 nt, Artificial Sequence
  Description of Artificial Sequence: Synthetic oligonucleotide
cggauuucuauuugauaaa

SEQ ID NO: 429985 - RNA, 19 nt, Artificial Sequence
  Description of Artificial Sequence: Synthetic oligonucleotide
ggacacaacuguaguguua

SEQ ID NO: 429986 - RNA, 19 nt, Artificial Sequence
  Description of Artificial Sequence: Synthetic oligonucleotide
gaccacgguaguaccugcu

SEQ ID NO: 429987 - RNA, 19 nt, Artificial Sequence
  Description of Artificial Sequence: Synthetic oligonucleotide
ggaaaccguugagaaugga

SEQ ID NO: 429988 - RNA, 19 nt, Artificial Sequence
  Description of Artificial Sequence: Synthetic oligonucleotide
gcacuaaagcccggauuuc

SEQ ID NO: 429989 - RNA, 19 nt, Artificial Sequence
  Description of Artificial Sequence: Synthetic oligonucleotide
ggggaucugucagcaugug

SEQ ID NO: 429990 - RNA, 19 nt, Artificial Sequence
  Description of Artificial Sequence: Synthetic oligonucleotide
gagcuggcaucaagcgaaa

SEQ ID NO: 429991 - RNA, 19 nt, Artificial Sequence
  Description of Artificial Sequence: Synthetic oligonucleotide
ccgcuuguacugugacuug

SEQ ID NO: 429992 - RNA, 19 nt, Artificial Sequence
  Description of Artificial Sequence: Synthetic oligonucleotide
ccaugugaacaggcucgcc

SEQ ID NO: 429993 - RNA, 19 nt, Artificial Sequence
  Description of Artificial Sequence: Synthetic oligonucleotide
gacccagcccacugagauu

SEQ ID NO: 429994 - RNA, 19 nt, Artificial Sequence
  Description of Artificial Sequence: Synthetic oligonucleotide
cccuacucucuuguccaac

SEQ ID NO: 429995 - RNA, 19 nt, Artificial Sequence
  Description of Artificial Sequence: Synthetic oligonucleotide
gggcacuaaagcccggauu

SEQ ID NO: 429996 - RNA, 19 nt, Artificial Sequence
  Description of Artificial Sequence: Synthetic oligonucleotide
gggaucgguuuaggggcac

SEQ ID NO: 429997 - RNA, 19 nt, Artificial Sequence
  Description of Artificial Sequence: Synthetic oligonucleotide
gcucaccaacugacaggcc

SEQ ID NO: 429998 - RNA, 19 nt, Artificial Sequence
  Description of Artificial Sequence: Synthetic oligonucleotide
cuugugugacugugaccuu

SEQ ID NO: 429999 - RNA, 19 nt, Artificial Sequence
  Description of Artificial Sequence: Synthetic oligonucleotide
ggggcacuaaagcccggau

SEQ ID NO: 430000 - RNA, 19 nt, Artificial Sequence
  Description of Artificial Sequence: Synthetic oligonucleotide
gcccuguuggagaugggau

SEQ ID NO: 430001 - RNA, 19 nt, Artificial Sequence
  Description of Artificial Sequence: Synthetic oligonucleotide
ggcaucacucccagacccu

SEQ ID NO: 430002 - RNA, 19 nt, Artificial Sequence
  Description of Artificial Sequence: Synthetic oligonucleotide
ggaucgguuuaggggcacu

SEQ ID NO: 430003 - RNA, 19 nt, Artificial Sequence
  Description of Artificial Sequence: Synthetic oligonucleotide
cacccagagcuggcaucaa

SEQ ID NO: 430004 - RNA, 19 nt, Artificial Sequence
  Description of Artificial Sequence: Synthetic oligonucleotide
ccccuacucucuuguccaa

SEQ ID NO: 430005 - RNA, 19 nt, Artificial Sequence
  Description of Artificial Sequence: Synthetic oligonucleotide
ggccugcuuuaggaggcau

SEQ ID NO: 430006 - RNA, 19 nt, Artificial Sequence
  Description of Artificial Sequence: Synthetic oligonucleotide
aaugcuaucauccagaacu

SEQ ID NO: 430007 - RNA, 19 nt, Artificial Sequence
  Description of Artificial Sequence: Synthetic oligonucleotide
agagaugcgacccaguucc

SEQ ID NO: 430008 - RNA, 19 nt, Artificial Sequence
  Description of Artificial Sequence: Synthetic oligonucleotide
uuauuuaagggaacgacag

SEQ ID NO: 430009 - RNA, 19 nt, Artificial Sequence
  Description of Artificial Sequence: Synthetic oligonucleotide
aauucuagauccaaacugc

SEQ ID NO: 430010 - RNA, 19 nt, Artificial Sequence
  Description of Artificial Sequence: Synthetic oligonucleotide
aauuccaaguucgagaagg

SEQ ID NO: 430011 - RNA, 19 nt, Artificial Sequence
  Description of Artificial Sequence: Synthetic oligonucleotide
uuucuaacuaaacauaaga

SEQ ID NO: 430012 - RNA, 19 nt, Artificial Sequence
  Description of Artificial Sequence: Synthetic oligonucleotide
ucuaacuaaacauaagaca

SEQ ID NO: 430013 - RNA, 19 nt, Artificial Sequence
  Description of Artificial Sequence: Synthetic oligonucleotide
aaguguucaucagagaagc

SEQ ID NO: 430014 - RNA, 19 nt, Artificial Sequence
  Description of Artificial Sequence: Synthetic oligonucleotide
uggacucuagagaagagcg

SEQ ID NO: 430015 - RNA, 19 nt, Artificial Sequence
  Description of Artificial Sequence: Synthetic oligonucleotide
ucuagauccaaacugcaug

SEQ ID NO: 430016 - RNA, 19 nt, Artificial Sequence
  Description of Artificial Sequence: Synthetic oligonucleotide
aaaauuccaaguucgagaa

SEQ ID NO: 430017 - RNA, 19 nt, Artificial Sequence
  Description of Artificial Sequence: Synthetic oligonucleotide
aaccgacuccucuagacgc

SEQ ID NO: 430018 - RNA, 19 nt, Artificial Sequence
  Description of Artificial Sequence: Synthetic oligonucleotide
ugugaaaucagggugacug

SEQ ID NO: 430019 - RNA, 19 nt, Artificial Sequence
  Description of Artificial Sequence: Synthetic oligonucleotide
aaggcuacugaacauaacu

SEQ ID NO: 430020 - RNA, 19 nt, Artificial Sequence
  Description of Artificial Sequence: Synthetic oligonucleotide
uuugcuaccacugauacaa

SEQ ID NO: 430021 - RNA, 19 nt, Artificial Sequence
  Description of Artificial Sequence: Synthetic oligonucleotide
caucuaaaggaauaugacg

SEQ ID NO: 430022 - RNA, 19 nt, Artificial Sequence
  Description of Artificial Sequence: Synthetic oligonucleotide
uugacugcaacacucagga

SEQ ID NO: 430023 - RNA, 19 nt, Artificial Sequence
  Description of Artificial Sequence: Synthetic oligonucleotide
uuagaaacguauuuccaag

SEQ ID NO: 430024 - RNA, 19 nt, Artificial Sequence
  Description of Artificial Sequence: Synthetic oligonucleotide
ucuaagauugcacagcaaa

SEQ ID NO: 430025 - RNA, 19 nt, Artificial Sequence
  Description of Artificial Sequence: Synthetic oligonucleotide
ucuaccuuaguaacacucg

SEQ ID NO: 430026 - RNA, 19 nt, Artificial Sequence
  Description of Artificial Sequence: Synthetic oligonucleotide
cuugguauuguuuucuuag

SEQ ID NO: 430027 - RNA, 19 nt, Artificial Sequence
  Description of Artificial Sequence: Synthetic oligonucleotide
ucaaaacuuccuuugauac

SEQ ID NO: 430028 - RNA, 19 nt, Artificial Sequence
  Description of Artificial Sequence: Synthetic oligonucleotide
uucuaacuaaacauaagac

SEQ ID NO: 430029 - RNA, 19 nt, Artificial Sequence
  Description of Artificial Sequence: Synthetic oligonucleotide
ucuaagguaggauuuggag

SEQ ID NO: 430030 - RNA, 19 nt, Artificial Sequence
  Description of Artificial Sequence: Synthetic oligonucleotide
ugaacuaaguggcauauuc

SEQ ID NO: 430031 - RNA, 19 nt, Artificial Sequence
  Description of Artificial Sequence: Synthetic oligonucleotide
aagggcugaacuaaguggc

SEQ ID NO: 430032 - RNA, 19 nt, Artificial Sequence
  Description of Artificial Sequence: Synthetic oligonucleotide
aacgacagguuuugaaagg

SEQ ID NO: 430033 - RNA, 19 nt, Artificial Sequence
  Description of Artificial Sequence: Synthetic oligonucleotide
uccguuuagucacaaaagc

SEQ ID NO: 430034 - RNA, 19 nt, Artificial Sequence
  Description of Artificial Sequence: Synthetic oligonucleotide
gacgucaauaaacugauga

SEQ ID NO: 430035 - RNA, 19 nt, Artificial Sequence
  Description of Artificial Sequence: Synthetic oligonucleotide
ucuuguaagaucucacagc

SEQ ID NO: 430036 - RNA, 19 nt, Artificial Sequence
  Description of Artificial Sequence: Synthetic oligonucleotide
aauaugacgaucagcaaga

SEQ ID NO: 430037 - RNA, 19 nt, Artificial Sequence
  Description of Artificial Sequence: Synthetic oligonucleotide
cuagauccaaacugcaugg

SEQ ID NO: 430038 - RNA, 19 nt, Artificial Sequence
  Description of Artificial Sequence: Synthetic oligonucleotide
aacauaacuugagugucac

SEQ ID NO: 430039 - RNA, 19 nt, Artificial Sequence
  Description of Artificial Sequence: Synthetic oligonucleotide
uguuauuggggccccgucg

SEQ ID NO: 430040 - RNA, 19 nt, Artificial Sequence
  Description of Artificial Sequence: Synthetic oligonucleotide
uauuuaagggaacgacagg

SEQ ID NO: 430041 - RNA, 19 nt, Artificial Sequence
  Description of Artificial Sequence: Synthetic oligonucleotide
uaccaaaccauaaguaaug

SEQ ID NO: 430042 - RNA, 19 nt, Artificial Sequence
  Description of Artificial Sequence: Synthetic oligonucleotide
uagaaacguauuuccaagg

SEQ ID NO: 430043 - RNA, 19 nt, Artificial Sequence
  Description of Artificial Sequence: Synthetic oligonucleotide
aucuaaaggaauaugacga

SEQ ID NO: 430044 - RNA, 19 nt, Artificial Sequence
  Description of Artificial Sequence: Synthetic oligonucleotide
ugcccagauuauuaaaacg

SEQ ID NO: 430045 - RNA, 19 nt, Artificial Sequence
  Description of Artificial Sequence: Synthetic oligonucleotide
ggaauugagaucaauuugg

SEQ ID NO: 430046 - RNA, 19 nt, Artificial Sequence
  Description of Artificial Sequence: Synthetic oligonucleotide
aaaggaauaugacgaucag

SEQ ID NO: 430047 - RNA, 19 nt, Artificial Sequence
  Description of Artificial Sequence: Synthetic oligonucleotide
agagcgacaaaauaucaga

SEQ ID NO: 430048 - RNA, 19 nt, Artificial Sequence
  Description of Artificial Sequence: Synthetic oligonucleotide
cuacagagcagcaaaugcc

SEQ ID NO: 430049 - RNA, 19 nt, Artificial Sequence
  Description of Artificial Sequence: Synthetic oligonucleotide
gaugcuggaacuucuugcc

SEQ ID NO: 430050 - RNA, 19 nt, Artificial Sequence
  Description of Artificial Sequence: Synthetic oligonucleotide
uaaacauaagacacgucuc

SEQ ID NO: 430051 - RNA, 19 nt, Artificial Sequence
  Description of Artificial Sequence: Synthetic oligonucleotide
ugcucaucggcaccgaucc

SEQ ID NO: 430052 - RNA, 19 nt, Artificial Sequence
  Description of Artificial Sequence: Synthetic oligonucleotide
cuaccacugauacaaacgc

SEQ ID NO: 430053 - RNA, 19 nt, Artificial Sequence
  Description of Artificial Sequence: Synthetic oligonucleotide
ucuuauuuaagggaacgac

SEQ ID NO: 430054 - RNA, 19 nt, Artificial Sequence
  Description of Artificial Sequence: Synthetic oligonucleotide
aacaaacacugauaguuaa

SEQ ID NO: 430055 - RNA, 19 nt, Artificial Sequence
  Description of Artificial Sequence: Synthetic oligonucleotide
auuuaagggaacgacaggu

SEQ ID NO: 430056 - RNA, 19 nt, Artificial Sequence
  Description of Artificial Sequence: Synthetic oligonucleotide
uccucuuucaauucuuuac

SEQ ID NO: 430057 - RNA, 19 nt, Artificial Sequence
  Description of Artificial Sequence: Synthetic oligonucleotide
gaggaagaaacuauugccc

SEQ ID NO: 430058 - RNA, 19 nt, Artificial Sequence
  Description of Artificial Sequence: Synthetic oligonucleotide
agaagagcgacaaaauauc

SEQ ID NO: 430059 - RNA, 19 nt, Artificial Sequence
  Description of Artificial Sequence: Synthetic oligonucleotide
aaacgccaaagcaagcuac

SEQ ID NO: 430060 - RNA, 19 nt, Artificial Sequence
  Description of Artificial Sequence: Synthetic oligonucleotide
guaaaaugagcuucucacc

SEQ ID NO: 430061 - RNA, 19 nt, Artificial Sequence
  Description of Artificial Sequence: Synthetic oligonucleotide
ugaaaucagggugacugcg

SEQ ID NO: 430062 - RNA, 19 nt, Artificial Sequence
  Description of Artificial Sequence: Synthetic oligonucleotide
uguucaucuguaagaaaca

SEQ ID NO: 430063 - RNA, 19 nt, Artificial Sequence
  Description of Artificial Sequence: Synthetic oligonucleotide
aacgcuggcaauucugcug

SEQ ID NO: 430064 - RNA, 19 nt, Artificial Sequence
  Description of Artificial Sequence: Synthetic oligonucleotide
acaguagcaccccaagagg

SEQ ID NO: 430065 - RNA, 19 nt, Artificial Sequence
  Description of Artificial Sequence: Synthetic oligonucleotide
aagacacgucucuugacug

SEQ ID NO: 430066 - RNA, 19 nt, Artificial Sequence
  Description of Artificial Sequence: Synthetic oligonucleotide
uguuaagggccuccgugcg

SEQ ID NO: 430067 - RNA, 19 nt, Artificial Sequence
  Description of Artificial Sequence: Synthetic oligonucleotide
cuuguaagaucucacagca

SEQ ID NO: 430068 - RNA, 19 nt, Artificial Sequence
  Description of Artificial Sequence: Synthetic oligonucleotide
aaccccucguggcaaagac

SEQ ID NO: 430069 - RNA, 19 nt, Artificial Sequence
  Description of Artificial Sequence: Synthetic oligonucleotide
accaauaacucugucauca

SEQ ID NO: 430070 - RNA, 19 nt, Artificial Sequence
  Description of Artificial Sequence: Synthetic oligonucleotide
gaacuaaguggcauauucg

SEQ ID NO: 430071 - RNA, 19 nt, Artificial Sequence
  Description of Artificial Sequence: Synthetic oligonucleotide
cuuauuuaagggaacgaca

SEQ ID NO: 430072 - RNA, 19 nt, Artificial Sequence
  Description of Artificial Sequence: Synthetic oligonucleotide
aucaccaauaacucuguca

SEQ ID NO: 430073 - RNA, 19 nt, Artificial Sequence
  Description of Artificial Sequence: Synthetic oligonucleotide
aauugagaucaauuuggaa

SEQ ID NO: 430074 - RNA, 19 nt, Artificial Sequence
  Description of Artificial Sequence: Synthetic oligonucleotide
aggauugcaauguuugcug

SEQ ID NO: 430075 - RNA, 19 nt, Artificial Sequence
  Description of Artificial Sequence: Synthetic oligonucleotide
gaucucacagcauccuggg

SEQ ID NO: 430076 - RNA, 19 nt, Artificial Sequence
  Description of Artificial Sequence: Synthetic oligonucleotide
uaaguggcauauucgagcu

SEQ ID NO: 430077 - RNA, 19 nt, Artificial Sequence
  Description of Artificial Sequence: Synthetic oligonucleotide
ugucacacaguguuguuac

SEQ ID NO: 430078 - RNA, 19 nt, Artificial Sequence
  Description of Artificial Sequence: Synthetic oligonucleotide
cagucuuccguuuagucac

SEQ ID NO: 430079 - RNA, 19 nt, Artificial Sequence
  Description of Artificial Sequence: Synthetic oligonucleotide
guucgagaaggguugauug

SEQ ID NO: 430080 - RNA, 19 nt, Artificial Sequence
  Description of Artificial Sequence: Synthetic oligonucleotide
gacgggaguaaccagccag

SEQ ID NO: 430081 - RNA, 19 nt, Artificial Sequence
  Description of Artificial Sequence: Synthetic oligonucleotide
acucaggacgucaauaaac

SEQ ID NO: 430082 - RNA, 19 nt, Artificial Sequence
  Description of Artificial Sequence: Synthetic oligonucleotide
auauucgagcucuucuuag

SEQ ID NO: 430083 - RNA, 19 nt, Artificial Sequence
  Description of Artificial Sequence: Synthetic oligonucleotide
agaaacguauuuccaagga

SEQ ID NO: 430084 - RNA, 19 nt, Artificial Sequence
  Description of Artificial Sequence: Synthetic oligonucleotide
gauccaaacugcauggccc

SEQ ID NO: 430085 - RNA, 19 nt, Artificial Sequence
  Description of Artificial Sequence: Synthetic oligonucleotide
cauaaguaauggcuagagg

SEQ ID NO: 430086 - RNA, 19 nt, Artificial Sequence
  Description of Artificial Sequence: Synthetic oligonucleotide
ugcaaggcguaaaaugagc

SEQ ID NO: 430087 - RNA, 19 nt, Artificial Sequence
  Description of Artificial Sequence: Synthetic oligonucleotide
uccucuagacgcaaaccag

SEQ ID NO: 430088 - RNA, 19 nt, Artificial Sequence
  Description of Artificial Sequence: Synthetic oligonucleotide
aagagcgacaaaauaucag

SEQ ID NO: 430089 - RNA, 19 nt, Artificial Sequence
  Description of Artificial Sequence: Synthetic oligonucleotide
uuaaaacgccaaagcaagc

SEQ ID NO: 430090 - RNA, 19 nt, Artificial Sequence
  Description of Artificial Sequence: Synthetic oligonucleotide
caauaaacugaugaacuac

SEQ ID NO: 430091 - RNA, 19 nt, Artificial Sequence
  Description of Artificial Sequence: Synthetic oligonucleotide
accgaucccagugagaauc

SEQ ID NO: 430092 - RNA, 19 nt, Artificial Sequence
  Description of Artificial Sequence: Synthetic oligonucleotide
cuugaauggggaacgccgg

SEQ ID NO: 430093 - RNA, 19 nt, Artificial Sequence
  Description of Artificial Sequence: Synthetic oligonucleotide
gaggcuugauaauauauaa

SEQ ID NO: 430094 - RNA, 19 nt, Artificial Sequence
  Description of Artificial Sequence: Synthetic oligonucleotide
acauaagacacgucucuug

SEQ ID NO: 430095 - RNA, 19 nt, Artificial Sequence
  Description of Artificial Sequence: Synthetic oligonucleotide
cauuugcuaccacugauac

SEQ ID NO: 430096 - RNA, 19 nt, Artificial Sequence
  Description of Artificial Sequence: Synthetic oligonucleotide
ugggucacuaaccaaccga

SEQ ID NO: 430097 - RNA, 19 nt, Artificial Sequence
  Description of Artificial Sequence: Synthetic oligonucleotide
uaugacgaucagcaagagc

SEQ ID NO: 430098 - RNA, 19 nt, Artificial Sequence
  Description of Artificial Sequence: Synthetic oligonucleotide
aacaccucucaaaugaaga

SEQ ID NO: 430099 - RNA, 19 nt, Artificial Sequence
  Description of Artificial Sequence: Synthetic oligonucleotide
uccuuucuaacuaaacaua

SEQ ID NO: 430100 - RNA, 19 nt, Artificial Sequence
  Description of Artificial Sequence: Synthetic oligonucleotide
ugcuuauauacuuuccgau

SEQ ID NO: 430101 - RNA, 19 nt, Artificial Sequence
  Description of Artificial Sequence: Synthetic oligonucleotide
gaugacgggaguaaccagc

SEQ ID NO: 430102 - RNA, 19 nt, Artificial Sequence
  Description of Artificial Sequence: Synthetic oligonucleotide
uuaagggaacgacagguuu

SEQ ID NO: 430103 - RNA, 19 nt, Artificial Sequence
  Description of Artificial Sequence: Synthetic oligonucleotide
agaaacaucgcaagggucu

SEQ ID NO: 430104 - RNA, 19 nt, Artificial Sequence
  Description of Artificial Sequence: Synthetic oligonucleotide
uuaucagaugcuuucucau

SEQ ID NO: 430105 - RNA, 19 nt, Artificial Sequence
  Description of Artificial Sequence: Synthetic oligonucleotide
cauugcaauuuccucauuc

SEQ ID NO: 430106 - RNA, 19 nt, Artificial Sequence
  Description of Artificial Sequence: Synthetic oligonucleotide
gcgacaaaauaucagauuc

SEQ ID NO: 430107 - RNA, 19 nt, Artificial Sequence
  Description of Artificial Sequence: Synthetic oligonucleotide
ucacgacugagguuccugg

SEQ ID NO: 430108 - RNA, 19 nt, Artificial Sequence
  Description of Artificial Sequence: Synthetic oligonucleotide
aaaacgccaaagcaagcua

SEQ ID NO: 430109 - RNA, 19 nt, Artificial Sequence
  Description of Artificial Sequence: Synthetic oligonucleotide
ugugacucggucuggcacc

SEQ ID NO: 430110 - RNA, 19 nt, Artificial Sequence
  Description of Artificial Sequence: Synthetic oligonucleotide
ucuaaaggaauaugacgau

SEQ ID NO: 430111 - RNA, 19 nt, Artificial Sequence
  Description of Artificial Sequence: Synthetic oligonucleotide
ucaucaagacccugggcca

SEQ ID NO: 430112 - RNA, 19 nt, Artificial Sequence
  Description of Artificial Sequence: Synthetic oligonucleotide
cuuaguucaucuaaugucu

SEQ ID NO: 430113 - RNA, 19 nt, Artificial Sequence
  Description of Artificial Sequence: Synthetic oligonucleotide
caaugggcucaucuaaagg

SEQ ID NO: 430114 - RNA, 19 nt, Artificial Sequence
  Description of Artificial Sequence: Synthetic oligonucleotide
aaccaaccgacuccucuag

SEQ ID NO: 430115 - RNA, 19 nt, Artificial Sequence
  Description of Artificial Sequence: Synthetic oligonucleotide
uuuugcaauucuagaucca

SEQ ID NO: 430116 - RNA, 19 nt, Artificial Sequence
  Description of Artificial Sequence: Synthetic oligonucleotide
acugauacaaacgcuggca

SEQ ID NO: 430117 - RNA, 19 nt, Artificial Sequence
  Description of Artificial Sequence: Synthetic oligonucleotide
cauggaaucaacaccucca

SEQ ID NO: 430118 - RNA, 19 nt, Artificial Sequence
  Description of Artificial Sequence: Synthetic oligonucleotide
aacaucgcaagggucucuc

SEQ ID NO: 430119 - RNA, 19 nt, Artificial Sequence
  Description of Artificial Sequence: Synthetic oligonucleotide
cuggaagcgaacacgauga

SEQ ID NO: 430120 - RNA, 19 nt, Artificial Sequence
  Description of Artificial Sequence: Synthetic oligonucleotide
aaauacgcugcuguucugu

SEQ ID NO: 430121 - RNA, 19 nt, Artificial Sequence
  Description of Artificial Sequence: Synthetic oligonucleotide
cuguuaagggccuccgugc

SEQ ID NO: 430122 - RNA, 19 nt, Artificial Sequence
  Description of Artificial Sequence: Synthetic oligonucleotide
caagaggacucuucggaag

SEQ ID NO: 430123 - RNA, 19 nt, Artificial Sequence
  Description of Artificial Sequence: Synthetic oligonucleotide
ucauuugcuaccacugaua

SEQ ID NO: 430124 - RNA, 19 nt, Artificial Sequence
  Description of Artificial Sequence: Synthetic oligonucleotide
uuugcaauucuagauccaa

SEQ ID NO: 430125 - RNA, 19 nt, Artificial Sequence
  Description of Artificial Sequence: Synthetic oligonucleotide
uugcccagauuauuaaaac

SEQ ID NO: 430126 - RNA, 19 nt, Artificial Sequence
  Description of Artificial Sequence: Synthetic oligonucleotide
gucgucuaagauugcacag

SEQ ID NO: 430127 - RNA, 19 nt, Artificial Sequence
  Description of Artificial Sequence: Synthetic oligonucleotide
aaaccauaaguaauggcua

SEQ ID NO: 430128 - RNA, 19 nt, Artificial Sequence
  Description of Artificial Sequence: Synthetic oligonucleotide
aagacccugggccacagua

SEQ ID NO: 430129 - RNA, 19 nt, Artificial Sequence
  Description of Artificial Sequence: Synthetic oligonucleotide
gguuagaaaguucauccac

SEQ ID NO: 430130 - RNA, 19 nt, Artificial Sequence
  Description of Artificial Sequence: Synthetic oligonucleotide
aacaugaccggaaaacaaa

SEQ ID NO: 430131 - RNA, 19 nt, Artificial Sequence
  Description of Artificial Sequence: Synthetic oligonucleotide
ucuagacgcaaaccagaca

SEQ ID NO: 430132 - RNA, 19 nt, Artificial Sequence
  Description of Artificial Sequence: Synthetic oligonucleotide
uucgagaaggguugauuga

SEQ ID NO: 430133 - RNA, 19 nt, Artificial Sequence
  Description of Artificial Sequence: Synthetic oligonucleotide
cagauuauuaaaacgccaa

SEQ ID NO: 430134 - RNA, 19 nt, Artificial Sequence
  Description of Artificial Sequence: Synthetic oligonucleotide
acuccucuagacgcaaacc

SEQ ID NO: 430135 - RNA, 19 nt, Artificial Sequence
  Description of Artificial Sequence: Synthetic oligonucleotide
ugguauuguuuucuuaguu

SEQ ID NO: 430136 - RNA, 19 nt, Artificial Sequence
  Description of Artificial Sequence: Synthetic oligonucleotide
ucaggacgucaauaaacug

SEQ ID NO: 430137 - RNA, 19 nt, Artificial Sequence
  Description of Artificial Sequence: Synthetic oligonucleotide
cuuccguuuagucacaaaa

SEQ ID NO: 430138 - RNA, 19 nt, Artificial Sequence
  Description of Artificial Sequence: Synthetic oligonucleotide
uauucgagcucuucuuagu

SEQ ID NO: 430139 - RNA, 19 nt, Artificial Sequence
  Description of Artificial Sequence: Synthetic oligonucleotide
ugaucaccaauaacucugu

SEQ ID NO: 430140 - RNA, 19 nt, Artificial Sequence
  Description of Artificial Sequence: Synthetic oligonucleotide
uaggauuuggagccuucca

SEQ ID NO: 430141 - RNA, 19 nt, Artificial Sequence
  Description of Artificial Sequence: Synthetic oligonucleotide
aaaauacgcugcuguucug

SEQ ID NO: 430142 - RNA, 19 nt, Artificial Sequence
  Description of Artificial Sequence: Synthetic oligonucleotide
acgucaauaaacugaugaa

SEQ ID NO: 430143 - RNA, 19 nt, Artificial Sequence
  Description of Artificial Sequence: Synthetic oligonucleotide
uuggaaaauuccagaugcu

SEQ ID NO: 430144 - RNA, 19 nt, Artificial Sequence
  Description of Artificial Sequence: Synthetic oligonucleotide
aaacgcuggcaauucugcu

SEQ ID NO: 430145 - RNA, 19 nt, Artificial Sequence
  Description of Artificial Sequence: Synthetic oligonucleotide
ggcuacugaacauaacuug

SEQ ID NO: 430146 - RNA, 19 nt, Artificial Sequence
  Description of Artificial Sequence: Synthetic oligonucleotide
augacgggaguaaccagcc

SEQ ID NO: 430147 - RNA, 19 nt, Artificial Sequence
  Description of Artificial Sequence: Synthetic oligonucleotide
caaccgacuccucuagacg

SEQ ID NO: 430148 - RNA, 19 nt, Artificial Sequence
  Description of Artificial Sequence: Synthetic oligonucleotide
uauugcccagauuauuaaa

SEQ ID NO: 430149 - RNA, 19 nt, Artificial Sequence
  Description of Artificial Sequence: Synthetic oligonucleotide
uggcaauucugcugcagug

SEQ ID NO: 430150 - RNA, 19 nt, Artificial Sequence
  Description of Artificial Sequence: Synthetic oligonucleotide
auacaaacgcuggcaauuc

SEQ ID NO: 430151 - RNA, 19 nt, Artificial Sequence
  Description of Artificial Sequence: Synthetic oligonucleotide
uucuagauccaaacugcau

SEQ ID NO: 430152 - RNA, 19 nt, Artificial Sequence
  Description of Artificial Sequence: Synthetic oligonucleotide
cuucggggcaucuccacgc

SEQ ID NO: 430153 - RNA, 19 nt, Artificial Sequence
  Description of Artificial Sequence: Synthetic oligonucleotide
agguuagaaaguucaucca

SEQ ID NO: 430154 - RNA, 19 nt, Artificial Sequence
  Description of Artificial Sequence: Synthetic oligonucleotide
aucgcaagggucucucuug

SEQ ID NO: 430155 - RNA, 19 nt, Artificial Sequence
  Description of Artificial Sequence: Synthetic oligonucleotide
gucccuaccaaaccauaag

SEQ ID NO: 430156 - RNA, 19 nt, Artificial Sequence
  Description of Artificial Sequence: Synthetic oligonucleotide
aagcaagcuacgccggcca

SEQ ID NO: 430157 - RNA, 19 nt, Artificial Sequence
  Description of Artificial Sequence: Synthetic oligonucleotide
uuacaggguggaaucacau

SEQ ID NO: 430158 - RNA, 19 nt, Artificial Sequence
  Description of Artificial Sequence: Synthetic oligonucleotide
agcaucuuauuuaagggaa

SEQ ID NO: 430159 - RNA, 19 nt, Artificial Sequence
  Description of Artificial Sequence: Synthetic oligonucleotide
aguuccauugcaauuuccu

SEQ ID NO: 430160 - RNA, 19 nt, Artificial Sequence
  Description of Artificial Sequence: Synthetic oligonucleotide
ucgagaaggguugauugac

SEQ ID NO: 430161 - RNA, 19 nt, Artificial Sequence
  Description of Artificial Sequence: Synthetic oligonucleotide
gucaauaaacugaugaacu

SEQ ID NO: 430162 - RNA, 19 nt, Artificial Sequence
  Description of Artificial Sequence: Synthetic oligonucleotide
uuaagggccuccgugcgug

SEQ ID NO: 430163 - RNA, 19 nt, Artificial Sequence
  Description of Artificial Sequence: Synthetic oligonucleotide
ucguaccccacuucggggc

SEQ ID NO: 430164 - RNA, 19 nt, Artificial Sequence
  Description of Artificial Sequence: Synthetic oligonucleotide
gagaagagcgacaaaauau

SEQ ID NO: 430165 - RNA, 19 nt, Artificial Sequence
  Description of Artificial Sequence: Synthetic oligonucleotide
gaaucaacaccuccagaaa

SEQ ID NO: 430166 - RNA, 19 nt, Artificial Sequence
  Description of Artificial Sequence: Synthetic oligonucleotide
agccacauucagaagauca

SEQ ID NO: 430167 - RNA, 19 nt, Artificial Sequence
  Description of Artificial Sequence: Synthetic oligonucleotide
agcgacaaaauaucagauu

SEQ ID NO: 430168 - RNA, 19 nt, Artificial Sequence
  Description of Artificial Sequence: Synthetic oligonucleotide
ccguuuagucacaaaagcc

SEQ ID NO: 430169 - RNA, 19 nt, Artificial Sequence
  Description of Artificial Sequence: Synthetic oligonucleotide
gaagagcgacaaaauauca

SEQ ID NO: 430170 - RNA, 19 nt, Artificial Sequence
  Description of Artificial Sequence: Synthetic oligonucleotide
ucaucggcaccgaucccag

SEQ ID NO: 430171 - RNA, 19 nt, Artificial Sequence
  Description of Artificial Sequence: Synthetic oligonucleotide
uuaguaacacucggcccag

SEQ ID NO: 430172 - RNA, 19 nt, Artificial Sequence
  Description of Artificial Sequence: Synthetic oligonucleotide
aguguuguuacagggugga

SEQ ID NO: 430173 - RNA, 19 nt, Artificial Sequence
  Description of Artificial Sequence: Synthetic oligonucleotide
aauacgcugcuguucuguu

SEQ ID NO: 430174 - RNA, 19 nt, Artificial Sequence
  Description of Artificial Sequence: Synthetic oligonucleotide
aguagcaccccaagaggac

SEQ ID NO: 430175 - RNA, 19 nt, Artificial Sequence
  Description of Artificial Sequence: Synthetic oligonucleotide
auugcccagauuauuaaaa

SEQ ID NO: 430176 - RNA, 19 nt, Artificial Sequence
  Description of Artificial Sequence: Synthetic oligonucleotide
gaucccagugagaaucacc

SEQ ID NO: 430177 - RNA, 19 nt, Artificial Sequence
  Description of Artificial Sequence: Synthetic oligonucleotide
cucucaaaugaagaacaug

SEQ ID NO: 430178 - RNA, 19 nt, Artificial Sequence
  Description of Artificial Sequence: Synthetic oligonucleotide
gaauggggaacgccggaac

SEQ ID NO: 430179 - RNA, 19 nt, Artificial Sequence
  Description of Artificial Sequence: Synthetic oligonucleotide
gacucggucuggcaccucc

SEQ ID NO: 430180 - RNA, 19 nt, Artificial Sequence
  Description of Artificial Sequence: Synthetic oligonucleotide
gugaaaucagggugacugc

SEQ ID NO: 430181 - RNA, 19 nt, Artificial Sequence
  Description of Artificial Sequence: Synthetic oligonucleotide
cuuuccgauucuucuucag

SEQ ID NO: 430182 - RNA, 19 nt, Artificial Sequence
  Description of Artificial Sequence: Synthetic oligonucleotide
uacaaacgcuggcaauucu

SEQ ID NO: 430183 - RNA, 19 nt, Artificial Sequence
  Description of Artificial Sequence: Synthetic oligonucleotide
ucgguugucucuguguuuc

SEQ ID NO: 430184 - RNA, 19 nt, Artificial Sequence
  Description of Artificial Sequence: Synthetic oligonucleotide
cugcuuauauacuuuccga

SEQ ID NO: 430185 - RNA, 19 nt, Artificial Sequence
  Description of Artificial Sequence: Synthetic oligonucleotide
aaguaauggcuagaggcuu

SEQ ID NO: 430186 - RNA, 19 nt, Artificial Sequence
  Description of Artificial Sequence: Synthetic oligonucleotide
gaagaacaugaccggaaaa

SEQ ID NO: 430187 - RNA, 19 nt, Artificial Sequence
  Description of Artificial Sequence: Synthetic oligonucleotide
cccagauuauuaaaacgcc

SEQ ID NO: 430188 - RNA, 19 nt, Artificial Sequence
  Description of Artificial Sequence: Synthetic oligonucleotide
gacgaucagcaagagcugc

SEQ ID NO: 430189 - RNA, 19 nt, Artificial Sequence
  Description of Artificial Sequence: Synthetic oligonucleotide
acgaugacgggaguaacca

SEQ ID NO: 430190 - RNA, 19 nt, Artificial Sequence
  Description of Artificial Sequence: Synthetic oligonucleotide
augcgacccaguuccauug

SEQ ID NO: 430191 - RNA, 19 nt, Artificial Sequence
  Description of Artificial Sequence: Synthetic oligonucleotide
aucuuauuuaagggaacga

SEQ ID NO: 430192 - RNA, 19 nt, Artificial Sequence
  Description of Artificial Sequence: Synthetic oligonucleotide
aacauaagacacgucucuu

SEQ ID NO: 430193 - RNA, 19 nt, Artificial Sequence
  Description of Artificial Sequence: Synthetic oligonucleotide
cucguaccccacuucgggg

SEQ ID NO: 430194 - RNA, 19 nt, Artificial Sequence
  Description of Artificial Sequence: Synthetic oligonucleotide
uaaccaaccgacuccucua

SEQ ID NO: 430195 - RNA, 19 nt, Artificial Sequence
  Description of Artificial Sequence: Synthetic oligonucleotide
ccaaguucgagaaggguug

SEQ ID NO: 430196 - RNA, 19 nt, Artificial Sequence
  Description of Artificial Sequence: Synthetic oligonucleotide
acuauugcccagauuauua

SEQ ID NO: 430197 - RNA, 19 nt, Artificial Sequence
  Description of Artificial Sequence: Synthetic oligonucleotide
cuccucuagacgcaaacca

SEQ ID NO: 430198 - RNA, 19 nt, Artificial Sequence
  Description of Artificial Sequence: Synthetic oligonucleotide
acaaacgcuggcaauucug

SEQ ID NO: 430199 - RNA, 19 nt, Artificial Sequence
  Description of Artificial Sequence: Synthetic oligonucleotide
gcuguuaagggccuccgug

SEQ ID NO: 430200 - RNA, 19 nt, Artificial Sequence
  Description of Artificial Sequence: Synthetic oligonucleotide
cgugcauccgacuuguagg

SEQ ID NO: 430201 - RNA, 19 nt, Artificial Sequence
  Description of Artificial Sequence: Synthetic oligonucleotide
aaauccucuuucaauucuu

SEQ ID NO: 430202 - RNA, 19 nt, Artificial Sequence
  Description of Artificial Sequence: Synthetic oligonucleotide
uugccacuugucugcaagc

SEQ ID NO: 430203 - RNA, 19 nt, Artificial Sequence
  Description of Artificial Sequence: Synthetic oligonucleotide
gaaacguauuuccaaggau

SEQ ID NO: 430204 - RNA, 19 nt, Artificial Sequence
  Description of Artificial Sequence: Synthetic oligonucleotide
ucuucggaagggaucucau

SEQ ID NO: 430205 - RNA, 19 nt, Artificial Sequence
  Description of Artificial Sequence: Synthetic oligonucleotide
ucgcaagggucucucuuga

SEQ ID NO: 430206 - RNA, 19 nt, Artificial Sequence
  Description of Artificial Sequence: Synthetic oligonucleotide
aagccacauucagaagauc

SEQ ID NO: 430207 - RNA, 19 nt, Artificial Sequence
  Description of Artificial Sequence: Synthetic oligonucleotide
ugggcucaucuaaaggaau

SEQ ID NO: 430208 - RNA, 19 nt, Artificial Sequence
  Description of Artificial Sequence: Synthetic oligonucleotide
cuucggaagggaucucaug

SEQ ID NO: 430209 - RNA, 19 nt, Artificial Sequence
  Description of Artificial Sequence: Synthetic oligonucleotide
agauugcacagcaaauccu

SEQ ID NO: 430210 - RNA, 19 nt, Artificial Sequence
  Description of Artificial Sequence: Synthetic oligonucleotide
acgucucuugacugcaaca

SEQ ID NO: 430211 - RNA, 19 nt, Artificial Sequence
  Description of Artificial Sequence: Synthetic oligonucleotide
acgacagguuuugaaaggu

SEQ ID NO: 430212 - RNA, 19 nt, Artificial Sequence
  Description of Artificial Sequence: Synthetic oligonucleotide
ucaucacgacugagguucc

SEQ ID NO: 430213 - RNA, 19 nt, Artificial Sequence
  Description of Artificial Sequence: Synthetic oligonucleotide
cucaggacgucaauaaacu

SEQ ID NO: 430214 - RNA, 19 nt, Artificial Sequence
  Description of Artificial Sequence: Synthetic oligonucleotide
gauacaaacgcuggcaauu

SEQ ID NO: 430215 - RNA, 19 nt, Artificial Sequence
  Description of Artificial Sequence: Synthetic oligonucleotide
ucggaagggaucucaugau

SEQ ID NO: 430216 - RNA, 19 nt, Artificial Sequence
  Description of Artificial Sequence: Synthetic oligonucleotide
guaggauuuggagccuucc

SEQ ID NO: 430217 - RNA, 19 nt, Artificial Sequence
  Description of Artificial Sequence: Synthetic oligonucleotide
ucggcaccgaucccaguga

SEQ ID NO: 430218 - RNA, 19 nt, Artificial Sequence
  Description of Artificial Sequence: Synthetic oligonucleotide
agacuggaagcgaacacga

SEQ ID NO: 430219 - RNA, 19 nt, Artificial Sequence
  Description of Artificial Sequence: Synthetic oligonucleotide
acgaucagcaagagcugcg

SEQ ID NO: 430220 - RNA, 19 nt, Artificial Sequence
  Description of Artificial Sequence: Synthetic oligonucleotide
ccccucguggcaaagacag

SEQ ID NO: 430221 - RNA, 19 nt, Artificial Sequence
  Description of Artificial Sequence: Synthetic oligonucleotide
cugauaguuaacaccagau

SEQ ID NO: 430222 - RNA, 19 nt, Artificial Sequence
  Description of Artificial Sequence: Synthetic oligonucleotide
acacgaugacgggaguaac

SEQ ID NO: 430223 - RNA, 19 nt, Artificial Sequence
  Description of Artificial Sequence: Synthetic oligonucleotide
gcucguaccccacuucggg

SEQ ID NO: 430224 - RNA, 19 nt, Artificial Sequence
  Description of Artificial Sequence: Synthetic oligonucleotide
cuauugcccagauuauuaa

SEQ ID NO: 430225 - RNA, 19 nt, Artificial Sequence
  Description of Artificial Sequence: Synthetic oligonucleotide
cugcgaucaccauggaauc

SEQ ID NO: 430226 - RNA, 19 nt, Artificial Sequence
  Description of Artificial Sequence: Synthetic oligonucleotide
ucggggcaucuccacgccg

SEQ ID NO: 430227 - RNA, 19 nt, Artificial Sequence
  Description of Artificial Sequence: Synthetic oligonucleotide
acgacugagguuccuggaa

SEQ ID NO: 430228 - RNA, 19 nt, Artificial Sequence
  Description of Artificial Sequence: Synthetic oligonucleotide
gcaauucugcugcagugug

SEQ ID NO: 430229 - RNA, 19 nt, Artificial Sequence
  Description of Artificial Sequence: Synthetic oligonucleotide
ugcgacccaguuccauugc

SEQ ID NO: 430230 - RNA, 19 nt, Artificial Sequence
  Description of Artificial Sequence: Synthetic oligonucleotide
ugcauccgacuuguagggg

SEQ ID NO: 430231 - RNA, 19 nt, Artificial Sequence
  Description of Artificial Sequence: Synthetic oligonucleotide
gaaacaucgcaagggucuc

SEQ ID NO: 430232 - RNA, 19 nt, Artificial Sequence
  Description of Artificial Sequence: Synthetic oligonucleotide
uucggggcaucuccacgcc

SEQ ID NO: 430233 - RNA, 19 nt, Artificial Sequence
  Description of Artificial Sequence: Synthetic oligonucleotide
ccauaaguaauggcuagag

SEQ ID NO: 430234 - RNA, 19 nt, Artificial Sequence
  Description of Artificial Sequence: Synthetic oligonucleotide
cauugugauguaaucuucu

SEQ ID NO: 430235 - RNA, 19 nt, Artificial Sequence
  Description of Artificial Sequence: Synthetic oligonucleotide
cugauacaaacgcuggcaa

SEQ ID NO: 430236 - RNA, 19 nt, Artificial Sequence
  Description of Artificial Sequence: Synthetic oligonucleotide
auaugacgaucagcaagag

SEQ ID NO: 430237 - RNA, 19 nt, Artificial Sequence
  Description of Artificial Sequence: Synthetic oligonucleotide
accauaaguaauggcuaga

SEQ ID NO: 430238 - RNA, 19 nt, Artificial Sequence
  Description of Artificial Sequence: Synthetic oligonucleotide
caaugcuaucauccagaac

SEQ ID NO: 430239 - RNA, 19 nt, Artificial Sequence
  Description of Artificial Sequence: Synthetic oligonucleotide
uggaagcgaacacgaugac

SEQ ID NO: 430240 - RNA, 19 nt, Artificial Sequence
  Description of Artificial Sequence: Synthetic oligonucleotide
caguuuugcaauucuagau

SEQ ID NO: 430241 - RNA, 19 nt, Artificial Sequence
  Description of Artificial Sequence: Synthetic oligonucleotide
gaucaccaauaacucuguc

SEQ ID NO: 430242 - RNA, 19 nt, Artificial Sequence
  Description of Artificial Sequence: Synthetic oligonucleotide
ccuuuaguccugcuuuucc

SEQ ID NO: 430243 - RNA, 19 nt, Artificial Sequence
  Description of Artificial Sequence: Synthetic oligonucleotide
aacgccggaacuguuucua

SEQ ID NO: 430244 - RNA, 19 nt, Artificial Sequence
  Description of Artificial Sequence: Synthetic oligonucleotide
ccuaccaaaccauaaguaa

SEQ ID NO: 430245 - RNA, 19 nt, Artificial Sequence
  Description of Artificial Sequence: Synthetic oligonucleotide
ugcuguuaagggccuccgu

SEQ ID NO: 430246 - RNA, 19 nt, Artificial Sequence
  Description of Artificial Sequence: Synthetic oligonucleotide
cauauucgagcucuucuua

SEQ ID NO: 430247 - RNA, 19 nt, Artificial Sequence
  Description of Artificial Sequence: Synthetic oligonucleotide
cuaagauugcacagcaaau

SEQ ID NO: 430248 - RNA, 19 nt, Artificial Sequence
  Description of Artificial Sequence: Synthetic oligonucleotide
ucaugauggguuugccguu

SEQ ID NO: 430249 - RNA, 19 nt, Artificial Sequence
  Description of Artificial Sequence: Synthetic oligonucleotide
ugacugcgucuugacuucg

SEQ ID NO: 430250 - RNA, 19 nt, Artificial Sequence
  Description of Artificial Sequence: Synthetic oligonucleotide
aaacaucgcaagggucucu

SEQ ID NO: 430251 - RNA, 19 nt, Artificial Sequence
  Description of Artificial Sequence: Synthetic oligonucleotide
aucacgacugagguuccug

SEQ ID NO: 430252 - RNA, 19 nt, Artificial Sequence
  Description of Artificial Sequence: Synthetic oligonucleotide
gcgauagucugcucguacc

SEQ ID NO: 430253 - RNA, 19 nt, Artificial Sequence
  Description of Artificial Sequence: Synthetic oligonucleotide
uccacgccgggucgcacgc

SEQ ID NO: 430254 - RNA, 19 nt, Artificial Sequence
  Description of Artificial Sequence: Synthetic oligonucleotide
ucuuccguuuagucacaaa

SEQ ID NO: 430255 - RNA, 19 nt, Artificial Sequence
  Description of Artificial Sequence: Synthetic oligonucleotide
ccagauuauuaaaacgcca

SEQ ID NO: 430256 - RNA, 19 nt, Artificial Sequence
  Description of Artificial Sequence: Synthetic oligonucleotide
aguucgagaaggguugauu

SEQ ID NO: 430257 - RNA, 19 nt, Artificial Sequence
  Description of Artificial Sequence: Synthetic oligonucleotide
uagucugcucguaccccac

SEQ ID NO: 430258 - RNA, 19 nt, Artificial Sequence
  Description of Artificial Sequence: Synthetic oligonucleotide
guuauuggggccccgucgu

SEQ ID NO: 430259 - RNA, 19 nt, Artificial Sequence
  Description of Artificial Sequence: Synthetic oligonucleotide
ugacgggaguaaccagcca

SEQ ID NO: 430260 - RNA, 19 nt, Artificial Sequence
  Description of Artificial Sequence: Synthetic oligonucleotide
cuaaccaaccgacuccucu

SEQ ID NO: 430261 - RNA, 19 nt, Artificial Sequence
  Description of Artificial Sequence: Synthetic oligonucleotide
cgucaauaaacugaugaac

SEQ ID NO: 430262 - RNA, 19 nt, Artificial Sequence
  Description of Artificial Sequence: Synthetic oligonucleotide
gcgugcauccgacuuguag

SEQ ID NO: 430263 - RNA, 19 nt, Artificial Sequence
  Description of Artificial Sequence: Synthetic oligonucleotide
agcgaacacgaugacggga

SEQ ID NO: 430264 - RNA, 19 nt, Artificial Sequence
  Description of Artificial Sequence: Synthetic oligonucleotide
gcgaacacgaugacgggag

SEQ ID NO: 430265 - RNA, 19 nt, Artificial Sequence
  Description of Artificial Sequence: Synthetic oligonucleotide
ccaaccgacuccucuagac

SEQ ID NO: 430266 - RNA, 19 nt, Artificial Sequence
  Description of Artificial Sequence: Synthetic oligonucleotide
gacugcgucuugacuucgg

SEQ ID NO: 430267 - RNA, 19 nt, Artificial Sequence
  Description of Artificial Sequence: Synthetic oligonucleotide
aggcuugauaauauauaaa

SEQ ID NO: 430268 - RNA, 19 nt, Artificial Sequence
  Description of Artificial Sequence: Synthetic oligonucleotide
uggggaacgccggaacugu

SEQ ID NO: 430269 - RNA, 19 nt, Artificial Sequence
  Description of Artificial Sequence: Synthetic oligonucleotide
cuccacgccgggucgcacg

SEQ ID NO: 430270 - RNA, 19 nt, Artificial Sequence
  Description of Artificial Sequence: Synthetic oligonucleotide
uuauuggggccccgucguc

SEQ ID NO: 430271 - RNA, 19 nt, Artificial Sequence
  Description of Artificial Sequence: Synthetic oligonucleotide
cucaucggcaccgauccca

SEQ ID NO: 430272 - RNA, 19 nt, Artificial Sequence
  Description of Artificial Sequence: Synthetic oligonucleotide
ggagagguuuucuaaggua

SEQ ID NO: 430273 - RNA, 19 nt, Artificial Sequence
  Description of Artificial Sequence: Synthetic oligonucleotide
cuagaggcuugauaauaua

SEQ ID NO: 430274 - RNA, 19 nt, Artificial Sequence
  Description of Artificial Sequence: Synthetic oligonucleotide
cguauuuccaaggauauaa

SEQ ID NO: 430275 - RNA, 19 nt, Artificial Sequence
  Description of Artificial Sequence: Synthetic oligonucleotide
gccccgucgucuaagauug

SEQ ID NO: 430276 - RNA, 19 nt, Artificial Sequence
  Description of Artificial Sequence: Synthetic oligonucleotide
ggaacgccggaacuguuuc

SEQ ID NO: 430277 - RNA, 19 nt, Artificial Sequence
  Description of Artificial Sequence: Synthetic oligonucleotide
cuccgugcgugcauccgac

SEQ ID NO: 430278 - RNA, 19 nt, Artificial Sequence
  Description of Artificial Sequence: Synthetic oligonucleotide
gggucacuaaccaaccgac

SEQ ID NO: 430279 - RNA, 19 nt, Artificial Sequence
  Description of Artificial Sequence: Synthetic oligonucleotide
ugacugcaacacucaggac

SEQ ID NO: 430280 - RNA, 19 nt, Artificial Sequence
  Description of Artificial Sequence: Synthetic oligonucleotide
gcaauucuagauccaaacu

SEQ ID NO: 430281 - RNA, 19 nt, Artificial Sequence
  Description of Artificial Sequence: Synthetic oligonucleotide
cuguuauuggggccccguc

SEQ ID NO: 430282 - RNA, 19 nt, Artificial Sequence
  Description of Artificial Sequence: Synthetic oligonucleotide
gcguaaaaugagcuucuca

SEQ ID NO: 430283 - RNA, 19 nt, Artificial Sequence
  Description of Artificial Sequence: Synthetic oligonucleotide
aggcguaaaaugagcuucu

SEQ ID NO: 430284 - RNA, 19 nt, Artificial Sequence
  Description of Artificial Sequence: Synthetic oligonucleotide
cggaacuguuucuacagug

SEQ ID NO: 430285 - RNA, 19 nt, Artificial Sequence
  Description of Artificial Sequence: Synthetic oligonucleotide
gcugcgaucaccauggaau

SEQ ID NO: 430286 - RNA, 19 nt, Artificial Sequence
  Description of Artificial Sequence: Synthetic oligonucleotide
aaguucgagaaggguugau

SEQ ID NO: 430287 - RNA, 19 nt, Artificial Sequence
  Description of Artificial Sequence: Synthetic oligonucleotide
uuccugugacucggucugg

SEQ ID NO: 430288 - RNA, 19 nt, Artificial Sequence
  Description of Artificial Sequence: Synthetic oligonucleotide
gaaaucagggugacugcgu

SEQ ID NO: 430289 - RNA, 19 nt, Artificial Sequence
  Description of Artificial Sequence: Synthetic oligonucleotide
acaucgcaagggucucucu

SEQ ID NO: 430290 - RNA, 19 nt, Artificial Sequence
  Description of Artificial Sequence: Synthetic oligonucleotide
guaauggcuagaggcuuga

SEQ ID NO: 430291 - RNA, 19 nt, Artificial Sequence
  Description of Artificial Sequence: Synthetic oligonucleotide
agucugcucguaccccacu

SEQ ID NO: 430292 - RNA, 19 nt, Artificial Sequence
  Description of Artificial Sequence: Synthetic oligonucleotide
gggaacgacagguuuugaa

SEQ ID NO: 430293 - RNA, 19 nt, Artificial Sequence
  Description of Artificial Sequence: Synthetic oligonucleotide
aagucccuaccaaaccaua

SEQ ID NO: 430294 - RNA, 19 nt, Artificial Sequence
  Description of Artificial Sequence: Synthetic oligonucleotide
cugggcagucaaaacaccu

SEQ ID NO: 430295 - RNA, 19 nt, Artificial Sequence
  Description of Artificial Sequence: Synthetic oligonucleotide
gaacacgaugacgggagua

SEQ ID NO: 430296 - RNA, 19 nt, Artificial Sequence
  Description of Artificial Sequence: Synthetic oligonucleotide
gagcgacaaaauaucagau

SEQ ID NO: 430297 - RNA, 19 nt, Artificial Sequence
  Description of Artificial Sequence: Synthetic oligonucleotide
acuaaccaaccgacuccuc

SEQ ID NO: 430298 - RNA, 19 nt, Artificial Sequence
  Description of Artificial Sequence: Synthetic oligonucleotide
gaugcgacccaguuccauu

SEQ ID NO: 430299 - RNA, 19 nt, Artificial Sequence
  Description of Artificial Sequence: Synthetic oligonucleotide
cgauagucugcucguaccc

SEQ ID NO: 430300 - RNA, 19 nt, Artificial Sequence
  Description of Artificial Sequence: Synthetic oligonucleotide
ugacuucgguugucucugu

SEQ ID NO: 430301 - RNA, 19 nt, Artificial Sequence
  Description of Artificial Sequence: Synthetic oligonucleotide
cucggucuggcaccuccac

SEQ ID NO: 430302 - RNA, 19 nt, Artificial Sequence
  Description of Artificial Sequence: Synthetic oligonucleotide
cacgacugagguuccugga

SEQ ID NO: 430303 - RNA, 19 nt, Artificial Sequence
  Description of Artificial Sequence: Synthetic oligonucleotide
cucuucggaagggaucuca

SEQ ID NO: 430304 - RNA, 19 nt, Artificial Sequence
  Description of Artificial Sequence: Synthetic oligonucleotide
agaagccuacagagcagca

SEQ ID NO: 430305 - RNA, 19 nt, Artificial Sequence
  Description of Artificial Sequence: Synthetic oligonucleotide
ggcgcggcgcgauagucug

SEQ ID NO: 430306 - RNA, 19 nt, Artificial Sequence
  Description of Artificial Sequence: Synthetic oligonucleotide
ccucuagacgcaaaccaga

SEQ ID NO: 430307 - RNA, 19 nt, Artificial Sequence
  Description of Artificial Sequence: Synthetic oligonucleotide
gucucuugacugcaacacu

SEQ ID NO: 430308 - RNA, 19 nt, Artificial Sequence
  Description of Artificial Sequence: Synthetic oligonucleotide
gcagcuguuuauuuucagu

SEQ ID NO: 430309 - RNA, 19 nt, Artificial Sequence
  Description of Artificial Sequence: Synthetic oligonucleotide
cacucaggacgucaauaaa

SEQ ID NO: 430310 - RNA, 19 nt, Artificial Sequence
  Description of Artificial Sequence: Synthetic oligonucleotide
ccgucgucuaagauugcac

SEQ ID NO: 430311 - RNA, 19 nt, Artificial Sequence
  Description of Artificial Sequence: Synthetic oligonucleotide
cuggcaauucugcugcagu

SEQ ID NO: 430312 - RNA, 19 nt, Artificial Sequence
  Description of Artificial Sequence: Synthetic oligonucleotide
caagcuacgccggccaaaa

SEQ ID NO: 430313 - RNA, 19 nt, Artificial Sequence
  Description of Artificial Sequence: Synthetic oligonucleotide
acucuucggaagggaucuc

SEQ ID NO: 430314 - RNA, 19 nt, Artificial Sequence
  Description of Artificial Sequence: Synthetic oligonucleotide
gcccgcuucggcaggaggg

SEQ ID NO: 430315 - RNA, 19 nt, Artificial Sequence
  Description of Artificial Sequence: Synthetic oligonucleotide
gggcagucaaaacaccucu

SEQ ID NO: 430316 - RNA, 19 nt, Artificial Sequence
  Description of Artificial Sequence: Synthetic oligonucleotide
gaucagcaagagcugcgau

SEQ ID NO: 430317 - RNA, 19 nt, Artificial Sequence
  Description of Artificial Sequence: Synthetic oligonucleotide
agcaagcuacgccggccaa

SEQ ID NO: 430318 - RNA, 19 nt, Artificial Sequence
  Description of Artificial Sequence: Synthetic oligonucleotide
uccgugcgugcauccgacu

SEQ ID NO: 430319 - RNA, 19 nt, Artificial Sequence
  Description of Artificial Sequence: Synthetic oligonucleotide
agggcugaacuaaguggca

SEQ ID NO: 430320 - RNA, 19 nt, Artificial Sequence
  Description of Artificial Sequence: Synthetic oligonucleotide
caggucauuagaacauuuu

SEQ ID NO: 430321 - RNA, 19 nt, Artificial Sequence
  Description of Artificial Sequence: Synthetic oligonucleotide
guagcaccccaagaggacu

SEQ ID NO: 430322 - RNA, 19 nt, Artificial Sequence
  Description of Artificial Sequence: Synthetic oligonucleotide
acguauuuccaaggauaua

SEQ ID NO: 430323 - RNA, 19 nt, Artificial Sequence
  Description of Artificial Sequence: Synthetic oligonucleotide
caaguucgagaaggguuga

SEQ ID NO: 430324 - RNA, 19 nt, Artificial Sequence
  Description of Artificial Sequence: Synthetic oligonucleotide
cgucgucuaagauugcaca

SEQ ID NO: 430325 - RNA, 19 nt, Artificial Sequence
  Description of Artificial Sequence: Synthetic oligonucleotide
guuaagggccuccgugcgu

SEQ ID NO: 430326 - RNA, 19 nt, Artificial Sequence
  Description of Artificial Sequence: Synthetic oligonucleotide
accgacuccucuagacgca

SEQ ID NO: 430327 - RNA, 19 nt, Artificial Sequence
  Description of Artificial Sequence: Synthetic oligonucleotide
ggcugaacuaaguggcaua

SEQ ID NO: 430328 - RNA, 19 nt, Artificial Sequence
  Description of Artificial Sequence: Synthetic oligonucleotide
gcaaggcguaaaaugagcu

SEQ ID NO: 430329 - RNA, 19 nt, Artificial Sequence
  Description of Artificial Sequence: Synthetic oligonucleotide
gaacgccggaacuguuucu

SEQ ID NO: 430330 - RNA, 19 nt, Artificial Sequence
  Description of Artificial Sequence: Synthetic oligonucleotide
agccuacagagcagcaaau

SEQ ID NO: 430331 - RNA, 19 nt, Artificial Sequence
  Description of Artificial Sequence: Synthetic oligonucleotide
cccuaccaaaccauaagua

SEQ ID NO: 430332 - RNA, 19 nt, Artificial Sequence
  Description of Artificial Sequence: Synthetic oligonucleotide
gcgaucaccauggaaucaa

SEQ ID NO: 430333 - RNA, 19 nt, Artificial Sequence
  Description of Artificial Sequence: Synthetic oligonucleotide
cacuaaccaaccgacuccu

SEQ ID NO: 430334 - RNA, 19 nt, Artificial Sequence
  Description of Artificial Sequence: Synthetic oligonucleotide
gcauauucgagcucuucuu

SEQ ID NO: 430335 - RNA, 19 nt, Artificial Sequence
  Description of Artificial Sequence: Synthetic oligonucleotide
agucuuccguuuagucaca

SEQ ID NO: 430336 - RNA, 19 nt, Artificial Sequence
  Description of Artificial Sequence: Synthetic oligonucleotide
cggcgcgauagucugcucg

SEQ ID NO: 430337 - RNA, 19 nt, Artificial Sequence
  Description of Artificial Sequence: Synthetic oligonucleotide
gucuaagauugcacagcaa

SEQ ID NO: 430338 - RNA, 19 nt, Artificial Sequence
  Description of Artificial Sequence: Synthetic oligonucleotide
gccacauucagaagaucaa

SEQ ID NO: 430339 - RNA, 19 nt, Artificial Sequence
  Description of Artificial Sequence: Synthetic oligonucleotide
cagggugacugcgucuuga

SEQ ID NO: 430340 - RNA, 19 nt, Artificial Sequence
  Description of Artificial Sequence: Synthetic oligonucleotide
ggacucuagagaagagcga

SEQ ID NO: 430341 - RNA, 19 nt, Artificial Sequence
  Description of Artificial Sequence: Synthetic oligonucleotide
gcaagggucucucuugaau

SEQ ID NO: 430342 - RNA, 19 nt, Artificial Sequence
  Description of Artificial Sequence: Synthetic oligonucleotide
agguaggauuuggagccuu

SEQ ID NO: 430343 - RNA, 19 nt, Artificial Sequence
  Description of Artificial Sequence: Synthetic oligonucleotide
ggcccgcuucggcaggagg

SEQ ID NO: 430344 - RNA, 19 nt, Artificial Sequence
  Description of Artificial Sequence: Synthetic oligonucleotide
accccucguggcaaagaca

SEQ ID NO: 430345 - RNA, 19 nt, Artificial Sequence
  Description of Artificial Sequence: Synthetic oligonucleotide
gggcucaucuaaaggaaua

SEQ ID NO: 430346 - RNA, 19 nt, Artificial Sequence
  Description of Artificial Sequence: Synthetic oligonucleotide
ggacgucaauaaacugaug

SEQ ID NO: 430347 - RNA, 19 nt, Artificial Sequence
  Description of Artificial Sequence: Synthetic oligonucleotide
cgcgauagucugcucguac

SEQ ID NO: 430348 - RNA, 19 nt, Artificial Sequence
  Description of Artificial Sequence: Synthetic oligonucleotide
caucgcaagggucucucuu

SEQ ID NO: 430349 - RNA, 19 nt, Artificial Sequence
  Description of Artificial Sequence: Synthetic oligonucleotide
cgugcgugcauccgacuug

SEQ ID NO: 430350 - RNA, 19 nt, Artificial Sequence
  Description of Artificial Sequence: Synthetic oligonucleotide
gcugaacuaaguggcauau

SEQ ID NO: 430351 - RNA, 19 nt, Artificial Sequence
  Description of Artificial Sequence: Synthetic oligonucleotide
caccggcgcggcgcgauag

SEQ ID NO: 430352 - RNA, 19 nt, Artificial Sequence
  Description of Artificial Sequence: Synthetic oligonucleotide
gagaugcgacccaguucca

SEQ ID NO: 430353 - RNA, 19 nt, Artificial Sequence
  Description of Artificial Sequence: Synthetic oligonucleotide
gcgacccaguuccauugca

SEQ ID NO: 430354 - RNA, 19 nt, Artificial Sequence
  Description of Artificial Sequence: Synthetic oligonucleotide
accggcgcggcgcgauagu

SEQ ID NO: 430355 - RNA, 19 nt, Artificial Sequence
  Description of Artificial Sequence: Synthetic oligonucleotide
ggcgcgauagucugcucgu

SEQ ID NO: 430356 - RNA, 19 nt, Artificial Sequence
  Description of Artificial Sequence: Synthetic oligonucleotide
ggcucaucuaaaggaauau

SEQ ID NO: 430357 - RNA, 19 nt, Artificial Sequence
  Description of Artificial Sequence: Synthetic oligonucleotide
gugcgugcauccgacuugu

SEQ ID NO: 430358 - RNA, 19 nt, Artificial Sequence
  Description of Artificial Sequence: Synthetic oligonucleotide
ugcgugcauccgacuugua

SEQ ID NO: 430359 - RNA, 19 nt, Artificial Sequence
  Description of Artificial Sequence: Synthetic oligonucleotide
caaccccucguggcaaaga

SEQ ID NO: 430360 - RNA, 19 nt, Artificial Sequence
  Description of Artificial Sequence: Synthetic oligonucleotide
gccuccgugcgugcauccg

SEQ ID NO: 430361 - RNA, 19 nt, Artificial Sequence
  Description of Artificial Sequence: Synthetic oligonucleotide
cagaggaauugagaucaau

SEQ ID NO: 430362 - RNA, 19 nt, Artificial Sequence
  Description of Artificial Sequence: Synthetic oligonucleotide
gcucaucggcaccgauccc

SEQ ID NO: 430363 - RNA, 19 nt, Artificial Sequence
  Description of Artificial Sequence: Synthetic oligonucleotide
ggccccgucgucuaagauu

SEQ ID NO: 430364 - RNA, 19 nt, Artificial Sequence
  Description of Artificial Sequence: Synthetic oligonucleotide
cccgcuucggcaggagggc

SEQ ID NO: 430365 - RNA, 19 nt, Artificial Sequence
  Description of Artificial Sequence: Synthetic oligonucleotide
cugcgucuugacuucgguu

SEQ ID NO: 430366 - RNA, 19 nt, Artificial Sequence
  Description of Artificial Sequence: Synthetic oligonucleotide
ccgaucccagugagaauca

SEQ ID NO: 430367 - RNA, 19 nt, Artificial Sequence
  Description of Artificial Sequence: Synthetic oligonucleotide
gugacucggucuggcaccu

SEQ ID NO: 430368 - RNA, 19 nt, Artificial Sequence
  Description of Artificial Sequence: Synthetic oligonucleotide
cccgucgucuaagauugca

SEQ ID NO: 430369 - RNA, 19 nt, Artificial Sequence
  Description of Artificial Sequence: Synthetic oligonucleotide
ggcaccgaucccagugaga

SEQ ID NO: 430370 - RNA, 19 nt, Artificial Sequence
  Description of Artificial Sequence: Synthetic oligonucleotide
ccuccgugcgugcauccga

SEQ ID NO: 430371 - RNA, 19 nt, Artificial Sequence
  Description of Artificial Sequence: Synthetic oligonucleotide
ccaaccccucguggcaaag

SEQ ID NO: 430372 - RNA, 19 nt, Artificial Sequence
  Description of Artificial Sequence: Synthetic oligonucleotide
ugacucggucuggcaccuc

SEQ ID NO: 430373 - RNA, 19 nt, Artificial Sequence
  Description of Artificial Sequence: Synthetic oligonucleotide
ccucucaaaugaagaacau

SEQ ID NO: 430374 - RNA, 19 nt, Artificial Sequence
  Description of Artificial Sequence: Synthetic oligonucleotide
gcuguuauuggggccccgu

SEQ ID NO: 430375 - RNA, 19 nt, Artificial Sequence
  Description of Artificial Sequence: Synthetic oligonucleotide
gggcugaacuaaguggcau

SEQ ID NO: 430376 - RNA, 19 nt, Artificial Sequence
  Description of Artificial Sequence: Synthetic oligonucleotide
cggcaccgaucccagugag

SEQ ID NO: 430377 - RNA, 19 nt, Artificial Sequence
  Description of Artificial Sequence: Synthetic oligonucleotide
cgacccaguuccauugcaa

SEQ ID NO: 430378 - RNA, 19 nt, Artificial Sequence
  Description of Artificial Sequence: Synthetic oligonucleotide
cucggcccagucuuccguu

SEQ ID NO: 430379 - RNA, 19 nt, Artificial Sequence
  Description of Artificial Sequence: Synthetic oligonucleotide
caucacgacugagguuccu

SEQ ID NO: 430380 - RNA, 19 nt, Artificial Sequence
  Description of Artificial Sequence: Synthetic oligonucleotide
caccgaucccagugagaau

SEQ ID NO: 430381 - RNA, 19 nt, Artificial Sequence
  Description of Artificial Sequence: Synthetic oligonucleotide
cguaccccacuucggggca

SEQ ID NO: 430382 - RNA, 19 nt, Artificial Sequence
  Description of Artificial Sequence: Synthetic oligonucleotide
ccccgucgucuaagauugc

SEQ ID NO: 430383 - RNA, 19 nt, Artificial Sequence
  Description of Artificial Sequence: Synthetic oligonucleotide
caucggcaccgaucccagu

SEQ ID NO: 430384 - RNA, 19 nt, Artificial Sequence
  Description of Artificial Sequence: Synthetic oligonucleotide
ccggcgcggcgcgauaguc

SEQ ID NO: 430385 - RNA, 19 nt, Artificial Sequence
  Description of Artificial Sequence: Synthetic oligonucleotide
guaccccacuucggggcau

SEQ ID NO: 430386 - RNA, 19 nt, Artificial Sequence
  Description of Artificial Sequence: Synthetic oligonucleotide
ccgacuccucuagacgcaa

SEQ ID NO: 430387 - RNA, 19 nt, Artificial Sequence
  Description of Artificial Sequence: Synthetic oligonucleotide
gcggcgcgauagucugcuc

SEQ ID NO: 430388 - RNA, 19 nt, Artificial Sequence
  Description of Artificial Sequence: Synthetic oligonucleotide
cgcaagggucucucuugaa

SEQ ID NO: 430389 - RNA, 19 nt, Artificial Sequence
  Description of Artificial Sequence: Synthetic oligonucleotide
ccgugcgugcauccgacuu

SEQ ID NO: 430390 - RNA, 19 nt, Artificial Sequence
  Description of Artificial Sequence: Synthetic oligonucleotide
gcgcggcgcgauagucugc

SEQ ID NO: 430391 - RNA, 19 nt, Artificial Sequence
  Description of Artificial Sequence: Synthetic oligonucleotide
gggccccgucgucuaagau

SEQ ID NO: 430392 - RNA, 19 nt, Artificial Sequence
  Description of Artificial Sequence: Synthetic oligonucleotide
gcgcgauagucugcucgua

SEQ ID NO: 430393 - RNA, 19 nt, Artificial Sequence
  Description of Artificial Sequence: Synthetic oligonucleotide
ccacgccgggucgcacgcc

SEQ ID NO: 430394 - RNA, 19 nt, Artificial Sequence
  Description of Artificial Sequence: Synthetic oligonucleotide
cgaacacgaugacgggagu

SEQ ID NO: 430395 - RNA, 19 nt, Artificial Sequence
  Description of Artificial Sequence: Synthetic oligonucleotide
ggggaacgccggaacuguu

SEQ ID NO: 430396 - RNA, 19 nt, Artificial Sequence
  Description of Artificial Sequence: Synthetic oligonucleotide
cgcggcgcgauagucugcu

SEQ ID NO: 430397 - RNA, 19 nt, Artificial Sequence
  Description of Artificial Sequence: Synthetic oligonucleotide
ccgcuucggcaggagggcu

SEQ ID NO: 430398 - RNA, 19 nt, Artificial Sequence
  Description of Artificial Sequence: Synthetic oligonucleotide
aaagguagugaucuuuagc

SEQ ID NO: 430399 - RNA, 19 nt, Artificial Sequence
  Description of Artificial Sequence: Synthetic oligonucleotide
agcaauguauucuagucgc

SEQ ID NO: 430400 - RNA, 19 nt, Artificial Sequence
  Description of Artificial Sequence: Synthetic oligonucleotide
uuuggauaggacacgagcg

SEQ ID NO: 430401 - RNA, 19 nt, Artificial Sequence
  Description of Artificial Sequence: Synthetic oligonucleotide
aagaaauuagucauccugc

SEQ ID NO: 430402 - RNA, 19 nt, Artificial Sequence
  Description of Artificial Sequence: Synthetic oligonucleotide
gauacaauccaaaaggugc

SEQ ID NO: 430403 - RNA, 19 nt, Artificial Sequence
  Description of Artificial Sequence: Synthetic oligonucleotide
ugaauaaccagcacaauga

SEQ ID NO: 430404 - RNA, 19 nt, Artificial Sequence
  Description of Artificial Sequence: Synthetic oligonucleotide
acaauaauuaaugaagccg

SEQ ID NO: 430405 - RNA, 19 nt, Artificial Sequence
  Description of Artificial Sequence: Synthetic oligonucleotide
aauacauggauacaaucca

SEQ ID NO: 430406 - RNA, 19 nt, Artificial Sequence
  Description of Artificial Sequence: Synthetic oligonucleotide
agcacaauaaaaucuagag

SEQ ID NO: 430407 - RNA, 19 nt, Artificial Sequence
  Description of Artificial Sequence: Synthetic oligonucleotide
aacuagaauacauuggaga

SEQ ID NO: 430408 - RNA, 19 nt, Artificial Sequence
  Description of Artificial Sequence: Synthetic oligonucleotide
agcaguaagagaaaguucc

SEQ ID NO: 430409 - RNA, 19 nt, Artificial Sequence
  Description of Artificial Sequence: Synthetic oligonucleotide
ucuaucacaggcaaggaga

SEQ ID NO: 430410 - RNA, 19 nt, Artificial Sequence
  Description of Artificial Sequence: Synthetic oligonucleotide
ucuaucuagaaacuccugc

SEQ ID NO: 430411 - RNA, 19 nt, Artificial Sequence
  Description of Artificial Sequence: Synthetic oligonucleotide
uaguauuuggauuuccuag

SEQ ID NO: 430412 - RNA, 19 nt, Artificial Sequence
  Description of Artificial Sequence: Synthetic oligonucleotide
  modified_base (4)..(4): a, c, u, g, unknown or other
cuunucacucaguugagcc

SEQ ID NO: 430413 - RNA, 19 nt, Artificial Sequence
  Description of Artificial Sequence: Synthetic oligonucleotide
agaacuagaauacauugga

SEQ ID NO: 430414 - RNA, 19 nt, Artificial Sequence
  Description of Artificial Sequence: Synthetic oligonucleotide
cuuucuaaccaacugcugg

SEQ ID NO: 430415 - RNA, 19 nt, Artificial Sequence
  Description of Artificial Sequence: Synthetic oligonucleotide
caaguuuacacucugcaag

SEQ ID NO: 430416 - RNA, 19 nt, Artificial Sequence
  Description of Artificial Sequence: Synthetic oligonucleotide
aguaaauccauauaucgaa

SEQ ID NO: 430417 - RNA, 19 nt, Artificial Sequence
  Description of Artificial Sequence: Synthetic oligonucleotide
uaugaaauggaguccaaga

SEQ ID NO: 430418 - RNA, 19 nt, Artificial Sequence
  Description of Artificial Sequence: Synthetic oligonucleotide
uagaauacauuggagaccc

SEQ ID NO: 430419 - RNA, 19 nt, Artificial Sequence
  Description of Artificial Sequence: Synthetic oligonucleotide
ugcuguacaacaaccggcg

SEQ ID NO: 430420 - RNA, 19 nt, Artificial Sequence
  Description of Artificial Sequence: Synthetic oligonucleotide
aguuauagggacaugaucu

SEQ ID NO: 430421 - RNA, 19 nt, Artificial Sequence
  Description of Artificial Sequence: Synthetic oligonucleotide
gucaguaauacauggauac

SEQ ID NO: 430422 - RNA, 19 nt, Artificial Sequence
  Description of Artificial Sequence: Synthetic oligonucleotide
accaacauuacucggagug

SEQ ID NO: 430423 - RNA, 19 nt, Artificial Sequence
  Description of Artificial Sequence: Synthetic oligonucleotide
uauaucgaacucuauuuug

SEQ ID NO: 430424 - RNA, 19 nt, Artificial Sequence
  Description of Artificial Sequence: Synthetic oligonucleotide
uucaaucucucuuggaaag

SEQ ID NO: 430425 - RNA, 19 nt, Artificial Sequence
  Description of Artificial Sequence: Synthetic oligonucleotide
uuaucuacuuuuaagucau

SEQ ID NO: 430426 - RNA, 19 nt, Artificial Sequence
  Description of Artificial Sequence: Synthetic oligonucleotide
gaucguaaacuucuaguag

SEQ ID NO: 430427 - RNA, 19 nt, Artificial Sequence
  Description of Artificial Sequence: Synthetic oligonucleotide
cuauacugagcacagacac

SEQ ID NO: 430428 - RNA, 19 nt, Artificial Sequence
  Description of Artificial Sequence: Synthetic oligonucleotide
gacuagauguggcagagug

SEQ ID NO: 430429 - RNA, 19 nt, Artificial Sequence
  Description of Artificial Sequence: Synthetic oligonucleotide
caugcauucgaucugauga

SEQ ID NO: 430430 - RNA, 19 nt, Artificial Sequence
  Description of Artificial Sequence: Synthetic oligonucleotide
uaagagaagcaaucaacgc

SEQ ID NO: 430431 - RNA, 19 nt, Artificial Sequence
  Description of Artificial Sequence: Synthetic oligonucleotide
augcaaacuaaugccaucc

SEQ ID NO: 430432 - RNA, 19 nt, Artificial Sequence
  Description of Artificial Sequence: Synthetic oligonucleotide
aguaaaugcaaauaccauu

SEQ ID NO: 430433 - RNA, 19 nt, Artificial Sequence
  Description of Artificial Sequence: Synthetic oligonucleotide
aucguaaacuucuaguagu

SEQ ID NO: 430434 - RNA, 19 nt, Artificial Sequence
  Description of Artificial Sequence: Synthetic oligonucleotide
gaagcaaucaacgcaccgg

SEQ ID NO: 430435 - RNA, 19 nt, Artificial Sequence
  Description of Artificial Sequence: Synthetic oligonucleotide
aacauaucuugucaguaau

SEQ ID NO: 430436 - RNA, 19 nt, Artificial Sequence
  Description of Artificial Sequence: Synthetic oligonucleotide
gcugcuauugaugaaaugg

SEQ ID NO: 430437 - RNA, 19 nt, Artificial Sequence
  Description of Artificial Sequence: Synthetic oligonucleotide
gagaacuagaauacauugg

SEQ ID NO: 430438 - RNA, 19 nt, Artificial Sequence
  Description of Artificial Sequence: Synthetic oligonucleotide
agcucaauguuacacuguc

SEQ ID NO: 430439 - RNA, 19 nt, Artificial Sequence
  Description of Artificial Sequence: Synthetic oligonucleotide
gaaguuggauccuagcgac

SEQ ID NO: 430440 - RNA, 19 nt, Artificial Sequence
  Description of Artificial Sequence: Synthetic oligonucleotide
acuagauccuuaaagguag

SEQ ID NO: 430441 - RNA, 19 nt, Artificial Sequence
  Description of Artificial Sequence: Synthetic oligonucleotide
ugagcucaauguuacacug

SEQ ID NO: 430442 - RNA, 19 nt, Artificial Sequence
  Description of Artificial Sequence: Synthetic oligonucleotide
gaugggaccaacauuacuc

SEQ ID NO: 430443 - RNA, 19 nt, Artificial Sequence
  Description of Artificial Sequence: Synthetic oligonucleotide
ugaucguaaacuucuagua

SEQ ID NO: 430444 - RNA, 19 nt, Artificial Sequence
  Description of Artificial Sequence: Synthetic oligonucleotide
uguuggaacucuugaauac

SEQ ID NO: 430445 - RNA, 19 nt, Artificial Sequence
  Description of Artificial Sequence: Synthetic oligonucleotide
cuggaguucaaccagauaa

SEQ ID NO: 430446 - RNA, 19 nt, Artificial Sequence
  Description of Artificial Sequence: Synthetic oligonucleotide
caugauucgagaaaaguaa

SEQ ID NO: 430447 - RNA, 19 nt, Artificial Sequence
  Description of Artificial Sequence: Synthetic oligonucleotide
aagcaaucaacgcaccggu

SEQ ID NO: 430448 - RNA, 19 nt, Artificial Sequence
  Description of Artificial Sequence: Synthetic oligonucleotide
acaacaaccggcgagucag

SEQ ID NO: 430449 - RNA, 19 nt, Artificial Sequence
  Description of Artificial Sequence: Synthetic oligonucleotide
uuaaagguagugaucuuua

SEQ ID NO: 430450 - RNA, 19 nt, Artificial Sequence
  Description of Artificial Sequence: Synthetic oligonucleotide
aaggugugaugauuuuauc

SEQ ID NO: 430451 - RNA, 19 nt, Artificial Sequence
  Description of Artificial Sequence: Synthetic oligonucleotide
aucgaacucuauuuugauc

SEQ ID NO: 430452 - RNA, 19 nt, Artificial Sequence
  Description of Artificial Sequence: Synthetic oligonucleotide
gaugagcucaauguuacac

SEQ ID NO: 430453 - RNA, 19 nt, Artificial Sequence
  Description of Artificial Sequence: Synthetic oligonucleotide
aaggcauacauugggguug

SEQ ID NO: 430454 - RNA, 19 nt, Artificial Sequence
  Description of Artificial Sequence: Synthetic oligonucleotide
aauggcucgagcaauguau

SEQ ID NO: 430455 - RNA, 19 nt, Artificial Sequence
  Description of Artificial Sequence: Synthetic oligonucleotide
ugauugcaaguuuacacuc

SEQ ID NO: 430456 - RNA, 19 nt, Artificial Sequence
  Description of Artificial Sequence: Synthetic oligonucleotide
uaaagguagugaucuuuag

SEQ ID NO: 430457 - RNA, 19 nt, Artificial Sequence
  Description of Artificial Sequence: Synthetic oligonucleotide
auaugggaucugaauaacc

SEQ ID NO: 430458 - RNA, 19 nt, Artificial Sequence
  Description of Artificial Sequence: Synthetic oligonucleotide
aaauuuugccaaggaggac

SEQ ID NO: 430459 - RNA, 19 nt, Artificial Sequence
  Description of Artificial Sequence: Synthetic oligonucleotide
gguagugaucuuuagcugc

SEQ ID NO: 430460 - RNA, 19 nt, Artificial Sequence
  Description of Artificial Sequence: Synthetic oligonucleotide
uuaugaaauggaguccaag

SEQ ID NO: 430461 - RNA, 19 nt, Artificial Sequence
  Description of Artificial Sequence: Synthetic oligonucleotide
aaaggugugaugauuuuau

SEQ ID NO: 430462 - RNA, 19 nt, Artificial Sequence
  Description of Artificial Sequence: Synthetic oligonucleotide
ugguaggacuuucuaacca

SEQ ID NO: 430463 - RNA, 19 nt, Artificial Sequence
  Description of Artificial Sequence: Synthetic oligonucleotide
  modified_base (3)..(3): a, c, u, g, unknown or other
uunucacucaguugagccu

SEQ ID NO: 430464 - RNA, 19 nt, Artificial Sequence
  Description of Artificial Sequence: Synthetic oligonucleotide
uugaagcgaaauuucugug

SEQ ID NO: 430465 - RNA, 19 nt, Artificial Sequence
  Description of Artificial Sequence: Synthetic oligonucleotide
uucucaguaguauuuggau

SEQ ID NO: 430466 - RNA, 19 nt, Artificial Sequence
  Description of Artificial Sequence: Synthetic oligonucleotide
aagcucauuugccuuagaa

SEQ ID NO: 430467 - RNA, 19 nt, Artificial Sequence
  Description of Artificial Sequence: Synthetic oligonucleotide
ggguugacaggauaggagg

SEQ ID NO: 430468 - RNA, 19 nt, Artificial Sequence
  Description of Artificial Sequence: Synthetic oligonucleotide
uugccuauacugagcacag

SEQ ID NO: 430469 - RNA, 19 nt, Artificial Sequence
  Description of Artificial Sequence: Synthetic oligonucleotide
cauaauaucuccagaguaa

SEQ ID NO: 430470 - RNA, 19 nt, Artificial Sequence
  Description of Artificial Sequence: Synthetic oligonucleotide
uaccauuguguuuuccuug

SEQ ID NO: 430471 - RNA, 19 nt, Artificial Sequence
  Description of Artificial Sequence: Synthetic oligonucleotide
aaucaacgcaccggugagc

SEQ ID NO: 430472 - RNA, 19 nt, Artificial Sequence
  Description of Artificial Sequence: Synthetic oligonucleotide
acuucuaguagucuaggua

SEQ ID NO: 430473 - RNA, 19 nt, Artificial Sequence
  Description of Artificial Sequence: Synthetic oligonucleotide
agcgcacuugccuauacug

SEQ ID NO: 430474 - RNA, 19 nt, Artificial Sequence
  Description of Artificial Sequence: Synthetic oligonucleotide
uauccugccagaguguaug

SEQ ID NO: 430475 - RNA, 19 nt, Artificial Sequence
  Description of Artificial Sequence: Synthetic oligonucleotide
uguacaacaaccggcgagu

SEQ ID NO: 430476 - RNA, 19 nt, Artificial Sequence
  Description of Artificial Sequence: Synthetic oligonucleotide
gaacuagaauacauuggag

SEQ ID NO: 430477 - RNA, 19 nt, Artificial Sequence
  Description of Artificial Sequence: Synthetic oligonucleotide
accaauaugggaucugaau

SEQ ID NO: 430478 - RNA, 19 nt, Artificial Sequence
  Description of Artificial Sequence: Synthetic oligonucleotide
ugaggaaugauggaguauu

SEQ ID NO: 430479 - RNA, 19 nt, Artificial Sequence
  Description of Artificial Sequence: Synthetic oligonucleotide
ugucaguaauacauggaua

SEQ ID NO: 430480 - RNA, 19 nt, Artificial Sequence
  Description of Artificial Sequence: Synthetic oligonucleotide
uuccccgccauaccuaaag

SEQ ID NO: 430481 - RNA, 19 nt, Artificial Sequence
  Description of Artificial Sequence: Synthetic oligonucleotide
uccuugaguacacaaucuc

SEQ ID NO: 430482 - RNA, 19 nt, Artificial Sequence
  Description of Artificial Sequence: Synthetic oligonucleotide
auauaucgaacucuauuuu

SEQ ID NO: 430483 - RNA, 19 nt, Artificial Sequence
  Description of Artificial Sequence: Synthetic oligonucleotide
auaucuugucaguaauaca

SEQ ID NO: 430484 - RNA, 19 nt, Artificial Sequence
  Description of Artificial Sequence: Synthetic oligonucleotide
cuguacaacaaccggcgag

SEQ ID NO: 430485 - RNA, 19 nt, Artificial Sequence
  Description of Artificial Sequence: Synthetic oligonucleotide
ucguaaacuucuaguaguc

SEQ ID NO: 430486 - RNA, 19 nt, Artificial Sequence
  Description of Artificial Sequence: Synthetic oligonucleotide
caacauuacucggaguggg

SEQ ID NO: 430487 - RNA, 19 nt, Artificial Sequence
  Description of Artificial Sequence: Synthetic oligonucleotide
guaaacuucuaguagucua

SEQ ID NO: 430488 - RNA, 19 nt, Artificial Sequence
  Description of Artificial Sequence: Synthetic oligonucleotide
uaugcaccaauaugggauc

SEQ ID NO: 430489 - RNA, 19 nt, Artificial Sequence
  Description of Artificial Sequence: Synthetic oligonucleotide
auuaaugaagccguuccaa

SEQ ID NO: 430490 - RNA, 19 nt, Artificial Sequence
  Description of Artificial Sequence: Synthetic oligonucleotide
uccagacagagauuuguaa

SEQ ID NO: 430491 - RNA, 19 nt, Artificial Sequence
  Description of Artificial Sequence: Synthetic oligonucleotide
gaauacauuggagacccca

SEQ ID NO: 430492 - RNA, 19 nt, Artificial Sequence
  Description of Artificial Sequence: Synthetic oligonucleotide
ucucaguaguauuuggauu

SEQ ID NO: 430493 - RNA, 19 nt, Artificial Sequence
  Description of Artificial Sequence: Synthetic oligonucleotide
auaucgaacucuauuuuga

SEQ ID NO: 430494 - RNA, 19 nt, Artificial Sequence
  Description of Artificial Sequence: Synthetic oligonucleotide
guaaaggcacuccaauuuc

SEQ ID NO: 430495 - RNA, 19 nt, Artificial Sequence
  Description of Artificial Sequence: Synthetic oligonucleotide
  modified_base (2)..(2): a, c, u, g, unknown or other
unucacucaguugagccuc

SEQ ID NO: 430496 - RNA, 19 nt, Artificial Sequence
  Description of Artificial Sequence: Synthetic oligonucleotide
ugcuuaugaaauggagucc

SEQ ID NO: 430497 - RNA, 19 nt, Artificial Sequence
  Description of Artificial Sequence: Synthetic oligonucleotide
aggauaggaggcugagcac

SEQ ID NO: 430498 - RNA, 19 nt, Artificial Sequence
  Description of Artificial Sequence: Synthetic oligonucleotide
ugaugaaauggcaguggaa

SEQ ID NO: 430499 - RNA, 19 nt, Artificial Sequence
  Description of Artificial Sequence: Synthetic oligonucleotide
ugggaccaacauuacucgg

SEQ ID NO: 430500 - RNA, 19 nt, Artificial Sequence
  Description of Artificial Sequence: Synthetic oligonucleotide
agagcugaucguaaacuuc

SEQ ID NO: 430501 - RNA, 19 nt, Artificial Sequence
  Description of Artificial Sequence: Synthetic oligonucleotide
ggaaggucuuacuugguug

SEQ ID NO: 430502 - RNA, 19 nt, Artificial Sequence
  Description of Artificial Sequence: Synthetic oligonucleotide
agaguguaugcaccaauau

SEQ ID NO: 430503 - RNA, 19 nt, Artificial Sequence
  Description of Artificial Sequence: Synthetic oligonucleotide
uagucuagguaaaggcacu

SEQ ID NO: 430504 - RNA, 19 nt, Artificial Sequence
  Description of Artificial Sequence: Synthetic oligonucleotide
ugcucguguagcccaagca

SEQ ID NO: 430505 - RNA, 19 nt, Artificial Sequence
  Description of Artificial Sequence: Synthetic oligonucleotide
auagaagcgcacuugccua

SEQ ID NO: 430506 - RNA, 19 nt, Artificial Sequence
  Description of Artificial Sequence: Synthetic oligonucleotide
uugucgggaccgcugaaga

SEQ ID NO: 430507 - RNA, 19 nt, Artificial Sequence
  Description of Artificial Sequence: Synthetic oligonucleotide
caaucaacgcaccggugag

SEQ ID NO: 430508 - RNA, 19 nt, Artificial Sequence
  Description of Artificial Sequence: Synthetic oligonucleotide
caguuauagggacaugauc

SEQ ID NO: 430509 - RNA, 19 nt, Artificial Sequence
  Description of Artificial Sequence: Synthetic oligonucleotide
gacucggauaggcaccacc

SEQ ID NO: 430510 - RNA, 19 nt, Artificial Sequence
  Description of Artificial Sequence: Synthetic oligonucleotide
auggacucggauaggcacc

SEQ ID NO: 430511 - RNA, 19 nt, Artificial Sequence
  Description of Artificial Sequence: Synthetic oligonucleotide
aauaauuaaugaagccguu

SEQ ID NO: 430512 - RNA, 19 nt, Artificial Sequence
  Description of Artificial Sequence: Synthetic oligonucleotide
caauguauucuagucgcug

SEQ ID NO: 430513 - RNA, 19 nt, Artificial Sequence
  Description of Artificial Sequence: Synthetic oligonucleotide
aacuaagcuagcaucccaa

SEQ ID NO: 430514 - RNA, 19 nt, Artificial Sequence
  Description of Artificial Sequence: Synthetic oligonucleotide
guauucuagucgcuguuga

SEQ ID NO: 430515 - RNA, 19 nt, Artificial Sequence
  Description of Artificial Sequence: Synthetic oligonucleotide
ugaucacuagauccuuaaa

SEQ ID NO: 430516 - RNA, 19 nt, Artificial Sequence
  Description of Artificial Sequence: Synthetic oligonucleotide
acuugccuauacugagcac

SEQ ID NO: 430517 - RNA, 19 nt, Artificial Sequence
  Description of Artificial Sequence: Synthetic oligonucleotide
caugcuuaugaaauggagu

SEQ ID NO: 430518 - RNA, 19 nt, Artificial Sequence
  Description of Artificial Sequence: Synthetic oligonucleotide
ucggacuagauguggcaga

SEQ ID NO: 430519 - RNA, 19 nt, Artificial Sequence
  Description of Artificial Sequence: Synthetic oligonucleotide
uacuugguugcugauuuuc

SEQ ID NO: 430520 - RNA, 19 nt, Artificial Sequence
  Description of Artificial Sequence: Synthetic oligonucleotide
aagcgcacuugccuauacu

SEQ ID NO: 430521 - RNA, 19 nt, Artificial Sequence
  Description of Artificial Sequence: Synthetic oligonucleotide
caguaagagaaaguuccac

SEQ ID NO: 430522 - RNA, 19 nt, Artificial Sequence
  Description of Artificial Sequence: Synthetic oligonucleotide
  modified_base (7)..(7): a, c, u, g, unknown or other
ccccuunucacucaguuga

SEQ ID NO: 430523 - RNA, 19 nt, Artificial Sequence
  Description of Artificial Sequence: Synthetic oligonucleotide
aucaacgcaccggugagcu

SEQ ID NO: 430524 - RNA, 19 nt, Artificial Sequence
  Description of Artificial Sequence: Synthetic oligonucleotide
uccuccggaaacuggaauu

SEQ ID NO: 430525 - RNA, 19 nt, Artificial Sequence
  Description of Artificial Sequence: Synthetic oligonucleotide
cggcgagucaguuauaggg

SEQ ID NO: 430526 - RNA, 19 nt, Artificial Sequence
  Description of Artificial Sequence: Synthetic oligonucleotide
gacuuucuaaccaacugcu

SEQ ID NO: 430527 - RNA, 19 nt, Artificial Sequence
  Description of Artificial Sequence: Synthetic oligonucleotide
auagggacaugaucuuuau

SEQ ID NO: 430528 - RNA, 19 nt, Artificial Sequence
  Description of Artificial Sequence: Synthetic oligonucleotide
ggccauucggacuagaugu

SEQ ID NO: 430529 - RNA, 19 nt, Artificial Sequence
  Description of Artificial Sequence: Synthetic oligonucleotide
acacgagcggcacuacuga

SEQ ID NO: 430530 - RNA, 19 nt, Artificial Sequence
  Description of Artificial Sequence: Synthetic oligonucleotide
acuaagcuagcaucccaaa

SEQ ID NO: 430531 - RNA, 19 nt, Artificial Sequence
  Description of Artificial Sequence: Synthetic oligonucleotide
uucgaucugaugagcucaa

SEQ ID NO: 430532 - RNA, 19 nt, Artificial Sequence
  Description of Artificial Sequence: Synthetic oligonucleotide
cugcauugcuggauuuccc

SEQ ID NO: 430533 - RNA, 19 nt, Artificial Sequence
  Description of Artificial Sequence: Synthetic oligonucleotide
gcaaucaacgcaccgguga

SEQ ID NO: 430534 - RNA, 19 nt, Artificial Sequence
  Description of Artificial Sequence: Synthetic oligonucleotide
agaauggaucccgugacuu

SEQ ID NO: 430535 - RNA, 19 nt, Artificial Sequence
  Description of Artificial Sequence: Synthetic oligonucleotide
acaauccaaaaggugcagu

SEQ ID NO: 430536 - RNA, 19 nt, Artificial Sequence
  Description of Artificial Sequence: Synthetic oligonucleotide
uuauagggacaugaucuuu

SEQ ID NO: 430537 - RNA, 19 nt, Artificial Sequence
  Description of Artificial Sequence: Synthetic oligonucleotide
caucccaguuuaauguaca

SEQ ID NO: 430538 - RNA, 19 nt, Artificial Sequence
  Description of Artificial Sequence: Synthetic oligonucleotide
accggcgagucaguuauag

SEQ ID NO: 430539 - RNA, 19 nt, Artificial Sequence
  Description of Artificial Sequence: Synthetic oligonucleotide
aaugcucguguagcccaag

SEQ ID NO: 430540 - RNA, 19 nt, Artificial Sequence
  Description of Artificial Sequence: Synthetic oligonucleotide
cuugucgggaccgcugaag

SEQ ID NO: 430541 - RNA, 19 nt, Artificial Sequence
  Description of Artificial Sequence: Synthetic oligonucleotide
gaagcgcacuugccuauac

SEQ ID NO: 430542 - RNA, 19 nt, Artificial Sequence
  Description of Artificial Sequence: Synthetic oligonucleotide
augauucgagaaaaguaaa

SEQ ID NO: 430543 - RNA, 19 nt, Artificial Sequence
  Description of Artificial Sequence: Synthetic oligonucleotide
acucggauaggcaccacca

SEQ ID NO: 430544 - RNA, 19 nt, Artificial Sequence
  Description of Artificial Sequence: Synthetic oligonucleotide
aaggucuuacuugguugcu

SEQ ID NO: 430545 - RNA, 19 nt, Artificial Sequence
  Description of Artificial Sequence: Synthetic oligonucleotide
gauccuagcgacuuccauu

SEQ ID NO: 430546 - RNA, 19 nt, Artificial Sequence
  Description of Artificial Sequence: Synthetic oligonucleotide
gagcugaucguaaacuucu

SEQ ID NO: 430547 - RNA, 19 nt, Artificial Sequence
  Description of Artificial Sequence: Synthetic oligonucleotide
ccuacaaugacaguaaacu

SEQ ID NO: 430548 - RNA, 19 nt, Artificial Sequence
  Description of Artificial Sequence: Synthetic oligonucleotide
uagaagcgcacuugccuau

SEQ ID NO: 430549 - RNA, 19 nt, Artificial Sequence
  Description of Artificial Sequence: Synthetic oligonucleotide
accagcacaaugaaugauu

SEQ ID NO: 430550 - RNA, 19 nt, Artificial Sequence
  Description of Artificial Sequence: Synthetic oligonucleotide
uggauccuagcgacuucca

SEQ ID NO: 430551 - RNA, 19 nt, Artificial Sequence
  Description of Artificial Sequence: Synthetic oligonucleotide
ggucuuacuugguugcuga

SEQ ID NO: 430552 - RNA, 19 nt, Artificial Sequence
  Description of Artificial Sequence: Synthetic oligonucleotide
ccgccauaccuaaagaaug

SEQ ID NO: 430553 - RNA, 19 nt, Artificial Sequence
  Description of Artificial Sequence: Synthetic oligonucleotide
ugcaccaauaugggaucug

SEQ ID NO: 430554 - RNA, 19 nt, Artificial Sequence
  Description of Artificial Sequence: Synthetic oligonucleotide
cucauaauaucuccagagu

SEQ ID NO: 430555 - RNA, 19 nt, Artificial Sequence
  Description of Artificial Sequence: Synthetic oligonucleotide
acuuucuaaccaacugcug

SEQ ID NO: 430556 - RNA, 19 nt, Artificial Sequence
  Description of Artificial Sequence: Synthetic oligonucleotide
uaggacacgagcggcacua

SEQ ID NO: 430557 - RNA, 19 nt, Artificial Sequence
  Description of Artificial Sequence: Synthetic oligonucleotide
auacauggauacaauccaa

SEQ ID NO: 430558 - RNA, 19 nt, Artificial Sequence
  Description of Artificial Sequence: Synthetic oligonucleotide
uggacucggauaggcacca

SEQ ID NO: 430559 - RNA, 19 nt, Artificial Sequence
  Description of Artificial Sequence: Synthetic oligonucleotide
ccaauaugggaucugaaua

SEQ ID NO: 430560 - RNA, 19 nt, Artificial Sequence
  Description of Artificial Sequence: Synthetic oligonucleotide
auccauauaucgaacucua

SEQ ID NO: 430561 - RNA, 19 nt, Artificial Sequence
  Description of Artificial Sequence: Synthetic oligonucleotide
agaauacauuggagacccc

SEQ ID NO: 430562 - RNA, 19 nt, Artificial Sequence
  Description of Artificial Sequence: Synthetic oligonucleotide
aggucuuacuugguugcug

SEQ ID NO: 430563 - RNA, 19 nt, Artificial Sequence
  Description of Artificial Sequence: Synthetic oligonucleotide
uggcuaggauucucaacau

SEQ ID NO: 430564 - RNA, 19 nt, Artificial Sequence
  Description of Artificial Sequence: Synthetic oligonucleotide
cugugcuuccccgccauac

SEQ ID NO: 430565 - RNA, 19 nt, Artificial Sequence
  Description of Artificial Sequence: Synthetic oligonucleotide
ggaucugaauaaccagcac

SEQ ID NO: 430566 - RNA, 19 nt, Artificial Sequence
  Description of Artificial Sequence: Synthetic oligonucleotide
caaacuucuugggaggcaa

SEQ ID NO: 430567 - RNA, 19 nt, Artificial Sequence
  Description of Artificial Sequence: Synthetic oligonucleotide
uggcucgagcaauguauuc

SEQ ID NO: 430568 - RNA, 19 nt, Artificial Sequence
  Description of Artificial Sequence: Synthetic oligonucleotide
gcgagucaguuauagggac

SEQ ID NO: 430569 - RNA, 19 nt, Artificial Sequence
  Description of Artificial Sequence: Synthetic oligonucleotide
ccaacauuacucggagugg

SEQ ID NO: 430570 - RNA, 19 nt, Artificial Sequence
  Description of Artificial Sequence: Synthetic oligonucleotide
acaaccggcgagucaguua

SEQ ID NO: 430571 - RNA, 19 nt, Artificial Sequence
  Description of Artificial Sequence: Synthetic oligonucleotide
cuagucgcuguugaagcga

SEQ ID NO: 430572 - RNA, 19 nt, Artificial Sequence
  Description of Artificial Sequence: Synthetic oligonucleotide
caggagaacuagaauacau

SEQ ID NO: 430573 - RNA, 19 nt, Artificial Sequence
  Description of Artificial Sequence: Synthetic oligonucleotide
aaguuggauccuagcgacu

SEQ ID NO: 430574 - RNA, 19 nt, Artificial Sequence
  Description of Artificial Sequence: Synthetic oligonucleotide
guaaugcacuuguaacugu

SEQ ID NO: 430575 - RNA, 19 nt, Artificial Sequence
  Description of Artificial Sequence: Synthetic oligonucleotide
guuauagggacaugaucuu

SEQ ID NO: 430576 - RNA, 19 nt, Artificial Sequence
  Description of Artificial Sequence: Synthetic oligonucleotide
ccugcauugcuggauuucc

SEQ ID NO: 430577 - RNA, 19 nt, Artificial Sequence
  Description of Artificial Sequence: Synthetic oligonucleotide
gagucaguuauagggacau

SEQ ID NO: 430578 - RNA, 19 nt, Artificial Sequence
  Description of Artificial Sequence: Synthetic oligonucleotide
agaaggggacagauguccu

SEQ ID NO: 430579 - RNA, 19 nt, Artificial Sequence
  Description of Artificial Sequence: Synthetic oligonucleotide
uuacuugguugcugauuuu

SEQ ID NO: 430580 - RNA, 19 nt, Artificial Sequence
  Description of Artificial Sequence: Synthetic oligonucleotide
gcaugcauucgaucugaug

SEQ ID NO: 430581 - RNA, 19 nt, Artificial Sequence
  Description of Artificial Sequence: Synthetic oligonucleotide
aacaaccggcgagucaguu

SEQ ID NO: 430582 - RNA, 19 nt, Artificial Sequence
  Description of Artificial Sequence: Synthetic oligonucleotide
cgccauaccuaaagaaugc

SEQ ID NO: 430583 - RNA, 19 nt, Artificial Sequence
  Description of Artificial Sequence: Synthetic oligonucleotide
gcuagcaucccaaauauuu

SEQ ID NO: 430584 - RNA, 19 nt, Artificial Sequence
  Description of Artificial Sequence: Synthetic oligonucleotide
gcuaggauucucaacauau

SEQ ID NO: 430585 - RNA, 19 nt, Artificial Sequence
  Description of Artificial Sequence: Synthetic oligonucleotide
gggaccaacauuacucgga

SEQ ID NO: 430586 - RNA, 19 nt, Artificial Sequence
  Description of Artificial Sequence: Synthetic oligonucleotide
cgaucugaugagcucaaug

SEQ ID NO: 430587 - RNA, 19 nt, Artificial Sequence
  Description of Artificial Sequence: Synthetic oligonucleotide
  modified_base (5)..(5): a, c, u, g, unknown or other
ccuunucacucaguugagc

SEQ ID NO: 430588 - RNA, 19 nt, Artificial Sequence
  Description of Artificial Sequence: Synthetic oligonucleotide
caaccggcgagucaguuau

SEQ ID NO: 430589 - RNA, 19 nt, Artificial Sequence
  Description of Artificial Sequence: Synthetic oligonucleotide
agcaaucaacgcaccggug

SEQ ID NO: 430590 - RNA, 19 nt, Artificial Sequence
  Description of Artificial Sequence: Synthetic oligonucleotide
guagugaucuuuagcugcu

SEQ ID NO: 430591 - RNA, 19 nt, Artificial Sequence
  Description of Artificial Sequence: Synthetic oligonucleotide
augcaccaauaugggaucu

SEQ ID NO: 430592 - RNA, 19 nt, Artificial Sequence
  Description of Artificial Sequence: Synthetic oligonucleotide
ggcgagucaguuauaggga

SEQ ID NO: 430593 - RNA, 19 nt, Artificial Sequence
  Description of Artificial Sequence: Synthetic oligonucleotide
aggcauacauugggguuga

SEQ ID NO: 430594 - RNA, 19 nt, Artificial Sequence
  Description of Artificial Sequence: Synthetic oligonucleotide
aggacacgagcggcacuac

SEQ ID NO: 430595 - RNA, 19 nt, Artificial Sequence
  Description of Artificial Sequence: Synthetic oligonucleotide
guacaaacuugcugcucua

SEQ ID NO: 430596 - RNA, 19 nt, Artificial Sequence
  Description of Artificial Sequence: Synthetic oligonucleotide
gcgaaauuucugugcugug

SEQ ID NO: 430597 - RNA, 19 nt, Artificial Sequence
  Description of Artificial Sequence: Synthetic oligonucleotide
ugccuauacugagcacaga

SEQ ID NO: 430598 - RNA, 19 nt, Artificial Sequence
  Description of Artificial Sequence: Synthetic oligonucleotide
cgagcggcacuacugaaac

SEQ ID NO: 430599 - RNA, 19 nt, Artificial Sequence
  Description of Artificial Sequence: Synthetic oligonucleotide
ccacaucccaguuuaaugu

SEQ ID NO: 430600 - RNA, 19 nt, Artificial Sequence
  Description of Artificial Sequence: Synthetic oligonucleotide
ucaacgcaccggugagcuc

SEQ ID NO: 430601 - RNA, 19 nt, Artificial Sequence
  Description of Artificial Sequence: Synthetic oligonucleotide
caacgcaccggugagcucu

SEQ ID NO: 430602 - RNA, 19 nt, Artificial Sequence
  Description of Artificial Sequence: Synthetic oligonucleotide
guacaacaaccggcgaguc

SEQ ID NO: 430603 - RNA, 19 nt, Artificial Sequence
  Description of Artificial Sequence: Synthetic oligonucleotide
  modified_base (6)..(6): a, c, u, g, unknown or other
cccuunucacucaguugag

SEQ ID NO: 430604 - RNA, 19 nt, Artificial Sequence
  Description of Artificial Sequence: Synthetic oligonucleotide
acgaggugugccagcauaa

SEQ ID NO: 430605 - RNA, 19 nt, Artificial Sequence
  Description of Artificial Sequence: Synthetic oligonucleotide
acuugucgggaccgcugaa

SEQ ID NO: 430606 - RNA, 19 nt, Artificial Sequence
  Description of Artificial Sequence: Synthetic oligonucleotide
auggcucgagcaauguauu

SEQ ID NO: 430607 - RNA, 19 nt, Artificial Sequence
  Description of Artificial Sequence: Synthetic oligonucleotide
gucgcuguugaagcgaaau

SEQ ID NO: 430608 - RNA, 19 nt, Artificial Sequence
  Description of Artificial Sequence: Synthetic oligonucleotide
gaccaacauuacucggagu

SEQ ID NO: 430609 - RNA, 19 nt, Artificial Sequence
  Description of Artificial Sequence: Synthetic oligonucleotide
gcaguaagagaaaguucca

SEQ ID NO: 430610 - RNA, 19 nt, Artificial Sequence
  Description of Artificial Sequence: Synthetic oligonucleotide
gaaugcucguguagcccaa

SEQ ID NO: 430611 - RNA, 19 nt, Artificial Sequence
  Description of Artificial Sequence: Synthetic oligonucleotide
ccuaaagaaugcucgugua

SEQ ID NO: 430612 - RNA, 19 nt, Artificial Sequence
  Description of Artificial Sequence: Synthetic oligonucleotide
gagcucaauguuacacugu

SEQ ID NO: 430613 - RNA, 19 nt, Artificial Sequence
  Description of Artificial Sequence: Synthetic oligonucleotide
ccauauaucgaacucuauu

SEQ ID NO: 430614 - RNA, 19 nt, Artificial Sequence
  Description of Artificial Sequence: Synthetic oligonucleotide
ccggcgagucaguuauagg

SEQ ID NO: 430615 - RNA, 19 nt, Artificial Sequence
  Description of Artificial Sequence: Synthetic oligonucleotide
gccauucggacuagaugug

SEQ ID NO: 430616 - RNA, 19 nt, Artificial Sequence
  Description of Artificial Sequence: Synthetic oligonucleotide
ggcuaggauucucaacaua

SEQ ID NO: 430617 - RNA, 19 nt, Artificial Sequence
  Description of Artificial Sequence: Synthetic oligonucleotide
agaagcgcacuugccuaua

SEQ ID NO: 430618 - RNA, 19 nt, Artificial Sequence
  Description of Artificial Sequence: Synthetic oligonucleotide
ucacucaguugagccucau

SEQ ID NO: 430619 - RNA, 19 nt, Artificial Sequence
  Description of Artificial Sequence: Synthetic oligonucleotide
cacgagcggcacuacugaa

SEQ ID NO: 430620 - RNA, 19 nt, Artificial Sequence
  Description of Artificial Sequence: Synthetic oligonucleotide
gcauucgaucugaugagcu

SEQ ID NO: 430621 - RNA, 19 nt, Artificial Sequence
  Description of Artificial Sequence: Synthetic oligonucleotide
agcugaucguaaacuucua

SEQ ID NO: 430622 - RNA, 19 nt, Artificial Sequence
  Description of Artificial Sequence: Synthetic oligonucleotide
cggacuagauguggcagag

SEQ ID NO: 430623 - RNA, 19 nt, Artificial Sequence
  Description of Artificial Sequence: Synthetic oligonucleotide
guugagccucaugaaacuu

SEQ ID NO: 430624 - RNA, 19 nt, Artificial Sequence
  Description of Artificial Sequence: Synthetic oligonucleotide
guccuccggaaacuggaau

SEQ ID NO: 430625 - RNA, 19 nt, Artificial Sequence
  Description of Artificial Sequence: Synthetic oligonucleotide
gcgcacuugccuauacuga

SEQ ID NO: 430626 - RNA, 19 nt, Artificial Sequence
  Description of Artificial Sequence: Synthetic oligonucleotide
gagcggcacuacugaaacu

SEQ ID NO: 430627 - RNA, 19 nt, Artificial Sequence
  Description of Artificial Sequence: Synthetic oligonucleotide
caccggugagcucuuuugu

SEQ ID NO: 430628 - RNA, 19 nt, Artificial Sequence
  Description of Artificial Sequence: Synthetic oligonucleotide
gucuuacuugguugcugau

SEQ ID NO: 430629 - RNA, 19 nt, Artificial Sequence
  Description of Artificial Sequence: Synthetic oligonucleotide
cccgccauaccuaaagaau

SEQ ID NO: 430630 - RNA, 19 nt, Artificial Sequence
  Description of Artificial Sequence: Synthetic oligonucleotide
cgagucaguuauagggaca

SEQ ID NO: 430631 - RNA, 19 nt, Artificial Sequence
  Description of Artificial Sequence: Synthetic oligonucleotide
ccccgccauaccuaaagaa

SEQ ID NO: 430632 - RNA, 19 nt, Artificial Sequence
  Description of Artificial Sequence: Synthetic oligonucleotide
aacgcaccggugagcucuu

SEQ ID NO: 430633 - RNA, 19 nt, Artificial Sequence
  Description of Artificial Sequence: Synthetic oligonucleotide
ggauccuagcgacuuccau

SEQ ID NO: 430634 - RNA, 19 nt, Artificial Sequence
  Description of Artificial Sequence: Synthetic oligonucleotide
cuuccccgccauaccuaaa

SEQ ID NO: 430635 - RNA, 19 nt, Artificial Sequence
  Description of Artificial Sequence: Synthetic oligonucleotide
gcggcacuacugaaacuuc

SEQ ID NO: 430636 - RNA, 19 nt, Artificial Sequence
  Description of Artificial Sequence: Synthetic oligonucleotide
ggacacgagcggcacuacu

SEQ ID NO: 430637 - RNA, 19 nt, Artificial Sequence
  Description of Artificial Sequence: Synthetic oligonucleotide
caacaaccggcgagucagu

SEQ ID NO: 430638 - RNA, 19 nt, Artificial Sequence
  Description of Artificial Sequence: Synthetic oligonucleotide
aaccggcgagucaguuaua

SEQ ID NO: 430639 - RNA, 19 nt, Artificial Sequence
  Description of Artificial Sequence: Synthetic oligonucleotide
cugagcaccguggcauggu

SEQ ID NO: 430640 - RNA, 19 nt, Artificial Sequence
  Description of Artificial Sequence: Synthetic oligonucleotide
ggacucggauaggcaccac

SEQ ID NO: 430641 - RNA, 19 nt, Artificial Sequence
  Description of Artificial Sequence: Synthetic oligonucleotide
cgaggugugccagcauaaa

SEQ ID NO: 430642 - RNA, 19 nt, Artificial Sequence
  Description of Artificial Sequence: Synthetic oligonucleotide
agugaaaauaccuaugugc

SEQ ID NO: 430643 - RNA, 19 nt, Artificial Sequence
  Description of Artificial Sequence: Synthetic oligonucleotide
aauaccuaugugcagauuc

SEQ ID NO: 430644 - RNA, 19 nt, Artificial Sequence
  Description of Artificial Sequence: Synthetic oligonucleotide
uuauaucuagcauugaagg

SEQ ID NO: 430645 - RNA, 19 nt, Artificial Sequence
  Description of Artificial Sequence: Synthetic oligonucleotide
acacuaauuuauuuaaugc

SEQ ID NO: 430646 - RNA, 19 nt, Artificial Sequence
  Description of Artificial Sequence: Synthetic oligonucleotide
agagcuauaggucugauca

SEQ ID NO: 430647 - RNA, 19 nt, Artificial Sequence
  Description of Artificial Sequence: Synthetic oligonucleotide
aauaacuuuucagacuccc

SEQ ID NO: 430648 - RNA, 19 nt, Artificial Sequence
  Description of Artificial Sequence: Synthetic oligonucleotide
uugcugauaaaucaaacgc

SEQ ID NO: 430649 - RNA, 19 nt, Artificial Sequence
  Description of Artificial Sequence: Synthetic oligonucleotide
uuuaauuaguacaagcuau

SEQ ID NO: 430650 - RNA, 19 nt, Artificial Sequence
  Description of Artificial Sequence: Synthetic oligonucleotide
aagacggcgauuuucuaac

SEQ ID NO: 430651 - RNA, 19 nt, Artificial Sequence
  Description of Artificial Sequence: Synthetic oligonucleotide
auaaaucaaacgcugcuuc

SEQ ID NO: 430652 - RNA, 19 nt, Artificial Sequence
  Description of Artificial Sequence: Synthetic oligonucleotide
cacuaauuuauuuaaugcc

SEQ ID NO: 430653 - RNA, 19 nt, Artificial Sequence
  Description of Artificial Sequence: Synthetic oligonucleotide
uuuguuauuccuuccaaca

SEQ ID NO: 430654 - RNA, 19 nt, Artificial Sequence
  Description of Artificial Sequence: Synthetic oligonucleotide
cauuauaucgaucuguuuc

SEQ ID NO: 430655 - RNA, 19 nt, Artificial Sequence
  Description of Artificial Sequence: Synthetic oligonucleotide
cuaauaacuuuucagacuc

SEQ ID NO: 430656 - RNA, 19 nt, Artificial Sequence
  Description of Artificial Sequence: Synthetic oligonucleotide
ucuauuuucccaguuagcc

SEQ ID NO: 430657 - RNA, 19 nt, Artificial Sequence
  Description of Artificial Sequence: Synthetic oligonucleotide
uuuuaauuaguacaagcua

SEQ ID NO: 430658 - RNA, 19 nt, Artificial Sequence
  Description of Artificial Sequence: Synthetic oligonucleotide
auaucgaucuguuucauga

SEQ ID NO: 430659 - RNA, 19 nt, Artificial Sequence
  Description of Artificial Sequence: Synthetic oligonucleotide
ugcacgaagauacaaacuc

SEQ ID NO: 430660 - RNA, 19 nt, Artificial Sequence
  Description of Artificial Sequence: Synthetic oligonucleotide
cucaaucucagaccgaucg

SEQ ID NO: 430661 - RNA, 19 nt, Artificial Sequence
  Description of Artificial Sequence: Synthetic oligonucleotide
guagcuaucgaucccagag

SEQ ID NO: 430662 - RNA, 19 nt, Artificial Sequence
  Description of Artificial Sequence: Synthetic oligonucleotide
ucuaauaacuuuucagacu

SEQ ID NO: 430663 - RNA, 19 nt, Artificial Sequence
  Description of Artificial Sequence: Synthetic oligonucleotide
uaacuuuauaacuuaggcu

SEQ ID NO: 430664 - RNA, 19 nt, Artificial Sequence
  Description of Artificial Sequence: Synthetic oligonucleotide
agugauaucucgcuggugu

SEQ ID NO: 430665 - RNA, 19 nt, Artificial Sequence
  Description of Artificial Sequence: Synthetic oligonucleotide
ugaugcaacauuucaaccu

SEQ ID NO: 430666 - RNA, 19 nt, Artificial Sequence
  Description of Artificial Sequence: Synthetic oligonucleotide
uuaaucucgguccuguacu

SEQ ID NO: 430667 - RNA, 19 nt, Artificial Sequence
  Description of Artificial Sequence: Synthetic oligonucleotide
uacuauuggaagaaguccu

SEQ ID NO: 430668 - RNA, 19 nt, Artificial Sequence
  Description of Artificial Sequence: Synthetic oligonucleotide
uauaucuagcauugaaggc

SEQ ID NO: 430669 - RNA, 19 nt, Artificial Sequence
  Description of Artificial Sequence: Synthetic oligonucleotide
auuauaucgaucuguuuca

SEQ ID NO: 430670 - RNA, 19 nt, Artificial Sequence
  Description of Artificial Sequence: Synthetic oligonucleotide
auuacuauuggaagaaguc

SEQ ID NO: 430671 - RNA, 19 nt, Artificial Sequence
  Description of Artificial Sequence: Synthetic oligonucleotide
aggucguugacccugaugu

SEQ ID NO: 430672 - RNA, 19 nt, Artificial Sequence
  Description of Artificial Sequence: Synthetic oligonucleotide
uuacuauuggaagaagucc

SEQ ID NO: 430673 - RNA, 19 nt, Artificial Sequence
  Description of Artificial Sequence: Synthetic oligonucleotide
cauuucaaccucuucgugc

SEQ ID NO: 430674 - RNA, 19 nt, Artificial Sequence
  Description of Artificial Sequence: Synthetic oligonucleotide
cucuaauaacuuuucagac

SEQ ID NO: 430675 - RNA, 19 nt, Artificial Sequence
  Description of Artificial Sequence: Synthetic oligonucleotide
aaaucaaacgcugcuucuc

SEQ ID NO: 430676 - RNA, 19 nt, Artificial Sequence
  Description of Artificial Sequence: Synthetic oligonucleotide
uuauaacuuaggcuucugc

SEQ ID NO: 430677 - RNA, 19 nt, Artificial Sequence
  Description of Artificial Sequence: Synthetic oligonucleotide
acuaauuuauuuaaugccu

SEQ ID NO: 430678 - RNA, 19 nt, Artificial Sequence
  Description of Artificial Sequence: Synthetic oligonucleotide
auaucuagcauugaaggca

SEQ ID NO: 430679 - RNA, 19 nt, Artificial Sequence
  Description of Artificial Sequence: Synthetic oligonucleotide
gguucuaugcuauccaacg

SEQ ID NO: 430680 - RNA, 19 nt, Artificial Sequence
  Description of Artificial Sequence: Synthetic oligonucleotide
uugucgaagacuccgugcc

SEQ ID NO: 430681 - RNA, 19 nt, Artificial Sequence
  Description of Artificial Sequence: Synthetic oligonucleotide
aacuugagugauucuagcu

SEQ ID NO: 430682 - RNA, 19 nt, Artificial Sequence
  Description of Artificial Sequence: Synthetic oligonucleotide
cuaacuugagugauucuag

SEQ ID NO: 430683 - RNA, 19 nt, Artificial Sequence
  Description of Artificial Sequence: Synthetic oligonucleotide
aaucucagaccgaucgucc

SEQ ID NO: 430684 - RNA, 19 nt, Artificial Sequence
  Description of Artificial Sequence: Synthetic oligonucleotide
aagaagauaccuguugcug

SEQ ID NO: 430685 - RNA, 19 nt, Artificial Sequence
  Description of Artificial Sequence: Synthetic oligonucleotide
uguuauuccuuccaacaaa

SEQ ID NO: 430686 - RNA, 19 nt, Artificial Sequence
  Description of Artificial Sequence: Synthetic oligonucleotide
uucucaccaauuacuauug

SEQ ID NO: 430687 - RNA, 19 nt, Artificial Sequence
  Description of Artificial Sequence: Synthetic oligonucleotide
uguuuuguacugcucaguc

SEQ ID NO: 430688 - RNA, 19 nt, Artificial Sequence
  Description of Artificial Sequence: Synthetic oligonucleotide
ucacggauguccaaacaag

SEQ ID NO: 430689 - RNA, 19 nt, Artificial Sequence
  Description of Artificial Sequence: Synthetic oligonucleotide
uauccaacguuuguucucg

SEQ ID NO: 430690 - RNA, 19 nt, Artificial Sequence
  Description of Artificial Sequence: Synthetic oligonucleotide
aaagacggcgauuuucuaa

SEQ ID NO: 430691 - RNA, 19 nt, Artificial Sequence
  Description of Artificial Sequence: Synthetic oligonucleotide
uuaguacaagcuauucaca

SEQ ID NO: 430692 - RNA, 19 nt, Artificial Sequence
  Description of Artificial Sequence: Synthetic oligonucleotide
uuuuguuauuccuuccaac

SEQ ID NO: 430693 - RNA, 19 nt, Artificial Sequence
  Description of Artificial Sequence: Synthetic oligonucleotide
gaugcaacauuucaaccuc

SEQ ID NO: 430694 - RNA, 19 nt, Artificial Sequence
  Description of Artificial Sequence: Synthetic oligonucleotide
ucaaugugugcauccaggc

SEQ ID NO: 430695 - RNA, 19 nt, Artificial Sequence
  Description of Artificial Sequence: Synthetic oligonucleotide
uuccucuauagucucuuag

SEQ ID NO: 430696 - RNA, 19 nt, Artificial Sequence
  Description of Artificial Sequence: Synthetic oligonucleotide
uaugcuauccaacguuugu

SEQ ID NO: 430697 - RNA, 19 nt, Artificial Sequence
  Description of Artificial Sequence: Synthetic oligonucleotide
uaacucccggguuagcugg

SEQ ID NO: 430698 - RNA, 19 nt, Artificial Sequence
  Description of Artificial Sequence: Synthetic oligonucleotide
uagcuaucgaucccagagg

SEQ ID NO: 430699 - RNA, 19 nt, Artificial Sequence
  Description of Artificial Sequence: Synthetic oligonucleotide
ucgaucuguuucaugagcu

SEQ ID NO: 430700 - RNA, 19 nt, Artificial Sequence
  Description of Artificial Sequence: Synthetic oligonucleotide
cauauugguccccaucagg

SEQ ID NO: 430701 - RNA, 19 nt, Artificial Sequence
  Description of Artificial Sequence: Synthetic oligonucleotide
caccaauuacuauuggaag

SEQ ID NO: 430702 - RNA, 19 nt, Artificial Sequence
  Description of Artificial Sequence: Synthetic oligonucleotide
gauguuaaggcgcucuauc

SEQ ID NO: 430703 - RNA, 19 nt, Artificial Sequence
  Description of Artificial Sequence: Synthetic oligonucleotide
agaagauaccuguugcuga

SEQ ID NO: 430704 - RNA, 19 nt, Artificial Sequence
  Description of Artificial Sequence: Synthetic oligonucleotide
ucuaacuugagugauucua

SEQ ID NO: 430705 - RNA, 19 nt, Artificial Sequence
  Description of Artificial Sequence: Synthetic oligonucleotide
aucucgcugguguaacucc

SEQ ID NO: 430706 - RNA, 19 nt, Artificial Sequence
  Description of Artificial Sequence: Synthetic oligonucleotide
uggucaguuccacagacuc

SEQ ID NO: 430707 - RNA, 19 nt, Artificial Sequence
  Description of Artificial Sequence: Synthetic oligonucleotide
uguacucguuguuaugccc

SEQ ID NO: 430708 - RNA, 19 nt, Artificial Sequence
  Description of Artificial Sequence: Synthetic oligonucleotide
aucaaacgcugcuucuccc

SEQ ID NO: 430709 - RNA, 19 nt, Artificial Sequence
  Description of Artificial Sequence: Synthetic oligonucleotide
ucucugacuguuccgcuag

SEQ ID NO: 430710 - RNA, 19 nt, Artificial Sequence
  Description of Artificial Sequence: Synthetic oligonucleotide
agugauucuagcugacuca

SEQ ID NO: 430711 - RNA, 19 nt, Artificial Sequence
  Description of Artificial Sequence: Synthetic oligonucleotide
ucggaauuccucuauuuuc

SEQ ID NO: 430712 - RNA, 19 nt, Artificial Sequence
  Description of Artificial Sequence: Synthetic oligonucleotide
cacauugucgaagacuccg

SEQ ID NO: 430713 - RNA, 19 nt, Artificial Sequence
  Description of Artificial Sequence: Synthetic oligonucleotide
cucuauagucucuuaguug

SEQ ID NO: 430714 - RNA, 19 nt, Artificial Sequence
  Description of Artificial Sequence: Synthetic oligonucleotide
aucucagaccgaucguccc

SEQ ID NO: 430715 - RNA, 19 nt, Artificial Sequence
  Description of Artificial Sequence: Synthetic oligonucleotide
uuguuauuccuuccaacaa

SEQ ID NO: 430716 - RNA, 19 nt, Artificial Sequence
  Description of Artificial Sequence: Synthetic oligonucleotide
ucuucgugcuucaugucca

SEQ ID NO: 430717 - RNA, 19 nt, Artificial Sequence
  Description of Artificial Sequence: Synthetic oligonucleotide
cuucaaacaagccagugaa

SEQ ID NO: 430718 - RNA, 19 nt, Artificial Sequence
  Description of Artificial Sequence: Synthetic oligonucleotide
uguuaaggcgcucuaucuc

SEQ ID NO: 430719 - RNA, 19 nt, Artificial Sequence
  Description of Artificial Sequence: Synthetic oligonucleotide
uucuaugcuauccaacguu

SEQ ID NO: 430720 - RNA, 19 nt, Artificial Sequence
  Description of Artificial Sequence: Synthetic oligonucleotide
uccucuauagucucuuagu

SEQ ID NO: 430721 - RNA, 19 nt, Artificial Sequence
  Description of Artificial Sequence: Synthetic oligonucleotide
auaacuuaggcuucugcuu

SEQ ID NO: 430722 - RNA, 19 nt, Artificial Sequence
  Description of Artificial Sequence: Synthetic oligonucleotide
uccgcuagagccuuccucu

SEQ ID NO: 430723 - RNA, 19 nt, Artificial Sequence
  Description of Artificial Sequence: Synthetic oligonucleotide
cugaugcaacauuucaacc

SEQ ID NO: 430724 - RNA, 19 nt, Artificial Sequence
  Description of Artificial Sequence: Synthetic oligonucleotide
uaucuagcauugaaggcaa

SEQ ID NO: 430725 - RNA, 19 nt, Artificial Sequence
  Description of Artificial Sequence: Synthetic oligonucleotide
uucuuaugagccaccauua

SEQ ID NO: 430726 - RNA, 19 nt, Artificial Sequence
  Description of Artificial Sequence: Synthetic oligonucleotide
aaccugguagcuaucgauc

SEQ ID NO: 430727 - RNA, 19 nt, Artificial Sequence
  Description of Artificial Sequence: Synthetic oligonucleotide
cucuucgugcuucaugucc

SEQ ID NO: 430728 - RNA, 19 nt, Artificial Sequence
  Description of Artificial Sequence: Synthetic oligonucleotide
ucucaccaauuacuauugg

SEQ ID NO: 430729 - RNA, 19 nt, Artificial Sequence
  Description of Artificial Sequence: Synthetic oligonucleotide
uuuacauguugcacucaca

SEQ ID NO: 430730 - RNA, 19 nt, Artificial Sequence
  Description of Artificial Sequence: Synthetic oligonucleotide
uauaucgaucuguuucaug

SEQ ID NO: 430731 - RNA, 19 nt, Artificial Sequence
  Description of Artificial Sequence: Synthetic oligonucleotide
ugugcagauucuuggcugc

SEQ ID NO: 430732 - RNA, 19 nt, Artificial Sequence
  Description of Artificial Sequence: Synthetic oligonucleotide
cucgagaauauggugagac

SEQ ID NO: 430733 - RNA, 19 nt, Artificial Sequence
  Description of Artificial Sequence: Synthetic oligonucleotide
cauaucugaggaagaacac

SEQ ID NO: 430734 - RNA, 19 nt, Artificial Sequence
  Description of Artificial Sequence: Synthetic oligonucleotide
uaauaacuuuucagacucc

SEQ ID NO: 430735 - RNA, 19 nt, Artificial Sequence
  Description of Artificial Sequence: Synthetic oligonucleotide
gacuccgugcccuggagag

SEQ ID NO: 430736 - RNA, 19 nt, Artificial Sequence
  Description of Artificial Sequence: Synthetic oligonucleotide
uuucaguaacuccugcuua

SEQ ID NO: 430737 - RNA, 19 nt, Artificial Sequence
  Description of Artificial Sequence: Synthetic oligonucleotide
ucuaugcuauccaacguuu

SEQ ID NO: 430738 - RNA, 19 nt, Artificial Sequence
  Description of Artificial Sequence: Synthetic oligonucleotide
ucuguuagugaaaucucuu

SEQ ID NO: 430739 - RNA, 19 nt, Artificial Sequence
  Description of Artificial Sequence: Synthetic oligonucleotide
uugaagacuugccuucaac

SEQ ID NO: 430740 - RNA, 19 nt, Artificial Sequence
  Description of Artificial Sequence: Synthetic oligonucleotide
caagcuauucacaguuaag

SEQ ID NO: 430741 - RNA, 19 nt, Artificial Sequence
  Description of Artificial Sequence: Synthetic oligonucleotide
auguuaaggcgcucuaucu

SEQ ID NO: 430742 - RNA, 19 nt, Artificial Sequence
  Description of Artificial Sequence: Synthetic oligonucleotide
acggcgauuuucuaacuug

SEQ ID NO: 430743 - RNA, 19 nt, Artificial Sequence
  Description of Artificial Sequence: Synthetic oligonucleotide
augugcagauucuuggcug

SEQ ID NO: 430744 - RNA, 19 nt, Artificial Sequence
  Description of Artificial Sequence: Synthetic oligonucleotide
caaugugugcauccaggcg

SEQ ID NO: 430745 - RNA, 19 nt, Artificial Sequence
  Description of Artificial Sequence: Synthetic oligonucleotide
agcuaucgaucccagagga

SEQ ID NO: 430746 - RNA, 19 nt, Artificial Sequence
  Description of Artificial Sequence: Synthetic oligonucleotide
uccaaacugccuucaagac

SEQ ID NO: 430747 - RNA, 19 nt, Artificial Sequence
  Description of Artificial Sequence: Synthetic oligonucleotide
gauacaaacucuucuuggu

SEQ ID NO: 430748 - RNA, 19 nt, Artificial Sequence
  Description of Artificial Sequence: Synthetic oligonucleotide
gccucuaauaacuuuucag

SEQ ID NO: 430749 - RNA, 19 nt, Artificial Sequence
  Description of Artificial Sequence: Synthetic oligonucleotide
gacccugauguuaaggcgc

SEQ ID NO: 430750 - RNA, 19 nt, Artificial Sequence
  Description of Artificial Sequence: Synthetic oligonucleotide
uuuauuccaucaugucugu

SEQ ID NO: 430751 - RNA, 19 nt, Artificial Sequence
  Description of Artificial Sequence: Synthetic oligonucleotide
ucgagaauauggugagacc

SEQ ID NO: 430752 - RNA, 19 nt, Artificial Sequence
  Description of Artificial Sequence: Synthetic oligonucleotide
ugcuauccaacguuuguuc

SEQ ID NO: 430753 - RNA, 19 nt, Artificial Sequence
  Description of Artificial Sequence: Synthetic oligonucleotide
ucucgcaagcaucaucuuc

SEQ ID NO: 430754 - RNA, 19 nt, Artificial Sequence
  Description of Artificial Sequence: Synthetic oligonucleotide
aaaucucuuuugcacucau

SEQ ID NO: 430755 - RNA, 19 nt, Artificial Sequence
  Description of Artificial Sequence: Synthetic oligonucleotide
uucaguaacuccugcuuau

SEQ ID NO: 430756 - RNA, 19 nt, Artificial Sequence
  Description of Artificial Sequence: Synthetic oligonucleotide
auagugauaucucgcuggu

SEQ ID NO: 430757 - RNA, 19 nt, Artificial Sequence
  Description of Artificial Sequence: Synthetic oligonucleotide
uggauuaucucugacuguu

SEQ ID NO: 430758 - RNA, 19 nt, Artificial Sequence
  Description of Artificial Sequence: Synthetic oligonucleotide
auaucugaggaagaacacu

SEQ ID NO: 430759 - RNA, 19 nt, Artificial Sequence
  Description of Artificial Sequence: Synthetic oligonucleotide
agaaagacggcgauuuucu

SEQ ID NO: 430760 - RNA, 19 nt, Artificial Sequence
  Description of Artificial Sequence: Synthetic oligonucleotide
uguaacucccggguuagcu

SEQ ID NO: 430761 - RNA, 19 nt, Artificial Sequence
  Description of Artificial Sequence: Synthetic oligonucleotide
gcugaugcaacauuucaac

SEQ ID NO: 430762 - RNA, 19 nt, Artificial Sequence
  Description of Artificial Sequence: Synthetic oligonucleotide
agcauaagaaaaguuggaa

SEQ ID NO: 430763 - RNA, 19 nt, Artificial Sequence
  Description of Artificial Sequence: Synthetic oligonucleotide
caaagugguuuauucucac

SEQ ID NO: 430764 - RNA, 19 nt, Artificial Sequence
  Description of Artificial Sequence: Synthetic oligonucleotide
ucgucccgcagacuuuugg

SEQ ID NO: 430765 - RNA, 19 nt, Artificial Sequence
  Description of Artificial Sequence: Synthetic oligonucleotide
aacucuucuuggucauuca

SEQ ID NO: 430766 - RNA, 19 nt, Artificial Sequence
  Description of Artificial Sequence: Synthetic oligonucleotide
ucuuaugagccaccauuau

SEQ ID NO: 430767 - RNA, 19 nt, Artificial Sequence
  Description of Artificial Sequence: Synthetic oligonucleotide
cuuuugcacucaugcaagc

SEQ ID NO: 430768 - RNA, 19 nt, Artificial Sequence
  Description of Artificial Sequence: Synthetic oligonucleotide
cucuuuugcacucaugcaa

SEQ ID NO: 430769 - RNA, 19 nt, Artificial Sequence
  Description of Artificial Sequence: Synthetic oligonucleotide
agagacuucugucggaauu

SEQ ID NO: 430770 - RNA, 19 nt, Artificial Sequence
  Description of Artificial Sequence: Synthetic oligonucleotide
uuaaggcgcucuaucucca

SEQ ID NO: 430771 - RNA, 19 nt, Artificial Sequence
  Description of Artificial Sequence: Synthetic oligonucleotide
gcugauaaaucaaacgcug

SEQ ID NO: 430772 - RNA, 19 nt, Artificial Sequence
  Description of Artificial Sequence: Synthetic oligonucleotide
caggauagucauauugguc

SEQ ID NO: 430773 - RNA, 19 nt, Artificial Sequence
  Description of Artificial Sequence: Synthetic oligonucleotide
cuauccaacguuuguucuc

SEQ ID NO: 430774 - RNA, 19 nt, Artificial Sequence
  Description of Artificial Sequence: Synthetic oligonucleotide
gugauucuagcugacucag

SEQ ID NO: 430775 - RNA, 19 nt, Artificial Sequence
  Description of Artificial Sequence: Synthetic oligonucleotide
cuguuuccgguugacaagc

SEQ ID NO: 430776 - RNA, 19 nt, Artificial Sequence
  Description of Artificial Sequence: Synthetic oligonucleotide
cucaccaauuacuauugga

SEQ ID NO: 430777 - RNA, 19 nt, Artificial Sequence
  Description of Artificial Sequence: Synthetic oligonucleotide
acaagucuccagggcaugc

SEQ ID NO: 430778 - RNA, 19 nt, Artificial Sequence
  Description of Artificial Sequence: Synthetic oligonucleotide
uccaacugagacagcacau

SEQ ID NO: 430779 - RNA, 19 nt, Artificial Sequence
  Description of Artificial Sequence: Synthetic oligonucleotide
cuguacucguuguuaugcc

SEQ ID NO: 430780 - RNA, 19 nt, Artificial Sequence
  Description of Artificial Sequence: Synthetic oligonucleotide
gagcuauaggucugaucag

SEQ ID NO: 430781 - RNA, 19 nt, Artificial Sequence
  Description of Artificial Sequence: Synthetic oligonucleotide
cuaugcuauccaacguuug

SEQ ID NO: 430782 - RNA, 19 nt, Artificial Sequence
  Description of Artificial Sequence: Synthetic oligonucleotide
cucguuggcacagauggug

SEQ ID NO: 430783 - RNA, 19 nt, Artificial Sequence
  Description of Artificial Sequence: Synthetic oligonucleotide
acgaagauacaaacucuuc

SEQ ID NO: 430784 - RNA, 19 nt, Artificial Sequence
  Description of Artificial Sequence: Synthetic oligonucleotide
cuaucgaucccagaggaga

SEQ ID NO: 430785 - RNA, 19 nt, Artificial Sequence
  Description of Artificial Sequence: Synthetic oligonucleotide
acggauguccaaacaaguc

SEQ ID NO: 430786 - RNA, 19 nt, Artificial Sequence
  Description of Artificial Sequence: Synthetic oligonucleotide
aagagugagcauagcauaa

SEQ ID NO: 430787 - RNA, 19 nt, Artificial Sequence
  Description of Artificial Sequence: Synthetic oligonucleotide
agaccgaucgucccgcaga

SEQ ID NO: 430788 - RNA, 19 nt, Artificial Sequence
  Description of Artificial Sequence: Synthetic oligonucleotide
cucaggguuacacgagggc

SEQ ID NO: 430789 - RNA, 19 nt, Artificial Sequence
  Description of Artificial Sequence: Synthetic oligonucleotide
ccucuaauaacuuuucaga

SEQ ID NO: 430790 - RNA, 19 nt, Artificial Sequence
  Description of Artificial Sequence: Synthetic oligonucleotide
cgagaauauggugagaccg

SEQ ID NO: 430791 - RNA, 19 nt, Artificial Sequence
  Description of Artificial Sequence: Synthetic oligonucleotide
caggguuacacgagggcug

SEQ ID NO: 430792 - RNA, 19 nt, Artificial Sequence
  Description of Artificial Sequence: Synthetic oligonucleotide
gacacgguggagcugucga

SEQ ID NO: 430793 - RNA, 19 nt, Artificial Sequence
  Description of Artificial Sequence: Synthetic oligonucleotide
guuauuccuuccaacaaaa

SEQ ID NO: 430794 - RNA, 19 nt, Artificial Sequence
  Description of Artificial Sequence: Synthetic oligonucleotide
ugucggaauuccucuauuu

SEQ ID NO: 430795 - RNA, 19 nt, Artificial Sequence
  Description of Artificial Sequence: Synthetic oligonucleotide
cugcuucacaggaugucag

SEQ ID NO: 430796 - RNA, 19 nt, Artificial Sequence
  Description of Artificial Sequence: Synthetic oligonucleotide
cuagcauugaaggcaaaga

SEQ ID NO: 430797 - RNA, 19 nt, Artificial Sequence
  Description of Artificial Sequence: Synthetic oligonucleotide
cauugucgaagacuccgug

SEQ ID NO: 430798 - RNA, 19 nt, Artificial Sequence
  Description of Artificial Sequence: Synthetic oligonucleotide
uauugguccccaucagguc

SEQ ID NO: 430799 - RNA, 19 nt, Artificial Sequence
  Description of Artificial Sequence: Synthetic oligonucleotide
gucacggauguccaaacaa

SEQ ID NO: 430800 - RNA, 19 nt, Artificial Sequence
  Description of Artificial Sequence: Synthetic oligonucleotide
uuacacgagggcugugaac

SEQ ID NO: 430801 - RNA, 19 nt, Artificial Sequence
  Description of Artificial Sequence: Synthetic oligonucleotide
ggauagucauauugguccc

SEQ ID NO: 430802 - RNA, 19 nt, Artificial Sequence
  Description of Artificial Sequence: Synthetic oligonucleotide
ugauucuagcugacucaga

SEQ ID NO: 430803 - RNA, 19 nt, Artificial Sequence
  Description of Artificial Sequence: Synthetic oligonucleotide
auagucauauuggucccca

SEQ ID NO: 430804 - RNA, 19 nt, Artificial Sequence
  Description of Artificial Sequence: Synthetic oligonucleotide
uaaucucgguccuguacuc

SEQ ID NO: 430805 - RNA, 19 nt, Artificial Sequence
  Description of Artificial Sequence: Synthetic oligonucleotide
uggguucuaugcuauccaa

SEQ ID NO: 430806 - RNA, 19 nt, Artificial Sequence
  Description of Artificial Sequence: Synthetic oligonucleotide
uucucgaggcgagugguga

SEQ ID NO: 430807 - RNA, 19 nt, Artificial Sequence
  Description of Artificial Sequence: Synthetic oligonucleotide
uguucucgaggcgaguggu

SEQ ID NO: 430808 - RNA, 19 nt, Artificial Sequence
  Description of Artificial Sequence: Synthetic oligonucleotide
caaucucagaccgaucguc

SEQ ID NO: 430809 - RNA, 19 nt, Artificial Sequence
  Description of Artificial Sequence: Synthetic oligonucleotide
uuccgcuagagccuuccuc

SEQ ID NO: 430810 - RNA, 19 nt, Artificial Sequence
  Description of Artificial Sequence: Synthetic oligonucleotide
uccuguacucguuguuaug

SEQ ID NO: 430811 - RNA, 19 nt, Artificial Sequence
  Description of Artificial Sequence: Synthetic oligonucleotide
cugucuacugagugcugag

SEQ ID NO: 430812 - RNA, 19 nt, Artificial Sequence
  Description of Artificial Sequence: Synthetic oligonucleotide
agagccucuaauaacuuuu

SEQ ID NO: 430813 - RNA, 19 nt, Artificial Sequence
  Description of Artificial Sequence: Synthetic oligonucleotide
cacucggauuucuuaugag

SEQ ID NO: 430814 - RNA, 19 nt, Artificial Sequence
  Description of Artificial Sequence: Synthetic oligonucleotide
aaacgcugcuucucccagu

SEQ ID NO: 430815 - RNA, 19 nt, Artificial Sequence
  Description of Artificial Sequence: Synthetic oligonucleotide
agacagcacauugucgaag

SEQ ID NO: 430816 - RNA, 19 nt, Artificial Sequence
  Description of Artificial Sequence: Synthetic oligonucleotide
gugagaccgaagcuccucc

SEQ ID NO: 430817 - RNA, 19 nt, Artificial Sequence
  Description of Artificial Sequence: Synthetic oligonucleotide
ucgaucccagaggagagac

SEQ ID NO: 430818 - RNA, 19 nt, Artificial Sequence
  Description of Artificial Sequence: Synthetic oligonucleotide
ucccgcagacuuuugguau

SEQ ID NO: 430819 - RNA, 19 nt, Artificial Sequence
  Description of Artificial Sequence: Synthetic oligonucleotide
aacaagucuccagggcaug

SEQ ID NO: 430820 - RNA, 19 nt, Artificial Sequence
  Description of Artificial Sequence: Synthetic oligonucleotide
agccucuaauaacuuuuca

SEQ ID NO: 430821 - RNA, 19 nt, Artificial Sequence
  Description of Artificial Sequence: Synthetic oligonucleotide
uguuccgcuagagccuucc

SEQ ID NO: 430822 - RNA, 19 nt, Artificial Sequence
  Description of Artificial Sequence: Synthetic oligonucleotide
ugauaucucgcugguguaa

SEQ ID NO: 430823 - RNA, 19 nt, Artificial Sequence
  Description of Artificial Sequence: Synthetic oligonucleotide
auacuccauggccauuucu

SEQ ID NO: 430824 - RNA, 19 nt, Artificial Sequence
  Description of Artificial Sequence: Synthetic oligonucleotide
uaucucgcugguguaacuc

SEQ ID NO: 430825 - RNA, 19 nt, Artificial Sequence
  Description of Artificial Sequence: Synthetic oligonucleotide
agugagcauagcauaagaa

SEQ ID NO: 430826 - RNA, 19 nt, Artificial Sequence
  Description of Artificial Sequence: Synthetic oligonucleotide
cucgcugguguaacucccg

SEQ ID NO: 430827 - RNA, 19 nt, Artificial Sequence
  Description of Artificial Sequence: Synthetic oligonucleotide
caguuagccucucaaucuc

SEQ ID NO: 430828 - RNA, 19 nt, Artificial Sequence
  Description of Artificial Sequence: Synthetic oligonucleotide
ugcucucgcaagcaucauc

SEQ ID NO: 430829 - RNA, 19 nt, Artificial Sequence
  Description of Artificial Sequence: Synthetic oligonucleotide
cuuaugagccaccauuaua

SEQ ID NO: 430830 - RNA, 19 nt, Artificial Sequence
  Description of Artificial Sequence: Synthetic oligonucleotide
uaaggcgcucuaucuccag

SEQ ID NO: 430831 - RNA, 19 nt, Artificial Sequence
  Description of Artificial Sequence: Synthetic oligonucleotide
cuccgugcccuggagaggg

SEQ ID NO: 430832 - RNA, 19 nt, Artificial Sequence
  Description of Artificial Sequence: Synthetic oligonucleotide
uccuuccaacaaaagccuc

SEQ ID NO: 430833 - RNA, 19 nt, Artificial Sequence
  Description of Artificial Sequence: Synthetic oligonucleotide
gauugaagacuugccuuca

SEQ ID NO: 430834 - RNA, 19 nt, Artificial Sequence
  Description of Artificial Sequence: Synthetic oligonucleotide
uuuuaaucucgguccugua

SEQ ID NO: 430835 - RNA, 19 nt, Artificial Sequence
  Description of Artificial Sequence: Synthetic oligonucleotide
acguuuguucucgaggcga

SEQ ID NO: 430836 - RNA, 19 nt, Artificial Sequence
  Description of Artificial Sequence: Synthetic oligonucleotide
ccuguacucguuguuaugc

SEQ ID NO: 430837 - RNA, 19 nt, Artificial Sequence
  Description of Artificial Sequence: Synthetic oligonucleotide
acagucagacaggauguca

SEQ ID NO: 430838 - RNA, 19 nt, Artificial Sequence
  Description of Artificial Sequence: Synthetic oligonucleotide
cugagauuugguguucauc

SEQ ID NO: 430839 - RNA, 19 nt, Artificial Sequence
  Description of Artificial Sequence: Synthetic oligonucleotide
gcuguuuacauguugcacu

SEQ ID NO: 430840 - RNA, 19 nt, Artificial Sequence
  Description of Artificial Sequence: Synthetic oligonucleotide
agaauauggugagaccgaa

SEQ ID NO: 430841 - RNA, 19 nt, Artificial Sequence
  Description of Artificial Sequence: Synthetic oligonucleotide
auaucucgcugguguaacu

SEQ ID NO: 430842 - RNA, 19 nt, Artificial Sequence
  Description of Artificial Sequence: Synthetic oligonucleotide
gauaaaucaaacgcugcuu

SEQ ID NO: 430843 - RNA, 19 nt, Artificial Sequence
  Description of Artificial Sequence: Synthetic oligonucleotide
uguuuccgguugacaagcu

SEQ ID NO: 430844 - RNA, 19 nt, Artificial Sequence
  Description of Artificial Sequence: Synthetic oligonucleotide
guuaugcccuuccauccuc

SEQ ID NO: 430845 - RNA, 19 nt, Artificial Sequence
  Description of Artificial Sequence: Synthetic oligonucleotide
ugagaccgaagcuccuccu

SEQ ID NO: 430846 - RNA, 19 nt, Artificial Sequence
  Description of Artificial Sequence: Synthetic oligonucleotide
uuauaucgaucuguuucau

SEQ ID NO: 430847 - RNA, 19 nt, Artificial Sequence
  Description of Artificial Sequence: Synthetic oligonucleotide
ugauguuaaggcgcucuau

SEQ ID NO: 430848 - RNA, 19 nt, Artificial Sequence
  Description of Artificial Sequence: Synthetic oligonucleotide
acacgguggagcugucgag

SEQ ID NO: 430849 - RNA, 19 nt, Artificial Sequence
  Description of Artificial Sequence: Synthetic oligonucleotide
uguuuacauguugcacuca

SEQ ID NO: 430850 - RNA, 19 nt, Artificial Sequence
  Description of Artificial Sequence: Synthetic oligonucleotide
cuucaagacgagucaccuc

SEQ ID NO: 430851 - RNA, 19 nt, Artificial Sequence
  Description of Artificial Sequence: Synthetic oligonucleotide
uuauuccaucaugucugug

SEQ ID NO: 430852 - RNA, 19 nt, Artificial Sequence
  Description of Artificial Sequence: Synthetic oligonucleotide
ucccggguuagcugggaga

SEQ ID NO: 430853 - RNA, 19 nt, Artificial Sequence
  Description of Artificial Sequence: Synthetic oligonucleotide
cuauuuucccaguuagccu

SEQ ID NO: 430854 - RNA, 19 nt, Artificial Sequence
  Description of Artificial Sequence: Synthetic oligonucleotide
ucucaaucucagaccgauc

SEQ ID NO: 430855 - RNA, 19 nt, Artificial Sequence
  Description of Artificial Sequence: Synthetic oligonucleotide
cacagaugguguccuuagc

SEQ ID NO: 430856 - RNA, 19 nt, Artificial Sequence
  Description of Artificial Sequence: Synthetic oligonucleotide
augccucaauauaauucuc

SEQ ID NO: 430857 - RNA, 19 nt, Artificial Sequence
  Description of Artificial Sequence: Synthetic oligonucleotide
cagagcuauaggucugauc

SEQ ID NO: 430858 - RNA, 19 nt, Artificial Sequence
  Description of Artificial Sequence: Synthetic oligonucleotide
gagaccgaagcuccuccuc

SEQ ID NO: 430859 - RNA, 19 nt, Artificial Sequence
  Description of Artificial Sequence: Synthetic oligonucleotide
cuucgugcuucauguccag

SEQ ID NO: 430860 - RNA, 19 nt, Artificial Sequence
  Description of Artificial Sequence: Synthetic oligonucleotide
ugccuucaagacgagucac

SEQ ID NO: 430861 - RNA, 19 nt, Artificial Sequence
  Description of Artificial Sequence: Synthetic oligonucleotide
gaccgaucgucccgcagac

SEQ ID NO: 430862 - RNA, 19 nt, Artificial Sequence
  Description of Artificial Sequence: Synthetic oligonucleotide
cuuagcccgcucgagcuug

SEQ ID NO: 430863 - RNA, 19 nt, Artificial Sequence
  Description of Artificial Sequence: Synthetic oligonucleotide
ucgaagacuccgugcccug

SEQ ID NO: 430864 - RNA, 19 nt, Artificial Sequence
  Description of Artificial Sequence: Synthetic oligonucleotide
cuuccaacaaaagccucca

SEQ ID NO: 430865 - RNA, 19 nt, Artificial Sequence
  Description of Artificial Sequence: Synthetic oligonucleotide
cucgguccuguacucguug

SEQ ID NO: 430866 - RNA, 19 nt, Artificial Sequence
  Description of Artificial Sequence: Synthetic oligonucleotide
ucgguccuguacucguugu

SEQ ID NO: 430867 - RNA, 19 nt, Artificial Sequence
  Description of Artificial Sequence: Synthetic oligonucleotide
aacugccuucaagacgagu

SEQ ID NO: 430868 - RNA, 19 nt, Artificial Sequence
  Description of Artificial Sequence: Synthetic oligonucleotide
gagacagcacauugucgaa

SEQ ID NO: 430869 - RNA, 19 nt, Artificial Sequence
  Description of Artificial Sequence: Synthetic oligonucleotide
cccaguuagccucucaauc

SEQ ID NO: 430870 - RNA, 19 nt, Artificial Sequence
  Description of Artificial Sequence: Synthetic oligonucleotide
uccagaaaccugguagcua

SEQ ID NO: 430871 - RNA, 19 nt, Artificial Sequence
  Description of Artificial Sequence: Synthetic oligonucleotide
gagccucuaauaacuuuuc

SEQ ID NO: 430872 - RNA, 19 nt, Artificial Sequence
  Description of Artificial Sequence: Synthetic oligonucleotide
gguguaacucccggguuag

SEQ ID NO: 430873 - RNA, 19 nt, Artificial Sequence
  Description of Artificial Sequence: Synthetic oligonucleotide
ucaccguccucucgcuuuc

SEQ ID NO: 430874 - RNA, 19 nt, Artificial Sequence
  Description of Artificial Sequence: Synthetic oligonucleotide
ggcgcucgagaauauggug

SEQ ID NO: 430875 - RNA, 19 nt, Artificial Sequence
  Description of Artificial Sequence: Synthetic oligonucleotide
aaauaccuaugugcagauu

SEQ ID NO: 430876 - RNA, 19 nt, Artificial Sequence
  Description of Artificial Sequence: Synthetic oligonucleotide
cuucugucggaauuccucu

SEQ ID NO: 430877 - RNA, 19 nt, Artificial Sequence
  Description of Artificial Sequence: Synthetic oligonucleotide
agucucccuaacuccuccu

SEQ ID NO: 430878 - RNA, 19 nt, Artificial Sequence
  Description of Artificial Sequence: Synthetic oligonucleotide
augcuauccaacguuuguu

SEQ ID NO: 430879 - RNA, 19 nt, Artificial Sequence
  Description of Artificial Sequence: Synthetic oligonucleotide
ugcugucuacugagugcug

SEQ ID NO: 430880 - RNA, 19 nt, Artificial Sequence
  Description of Artificial Sequence: Synthetic oligonucleotide
gugcuggauuucugacugg

SEQ ID NO: 430881 - RNA, 19 nt, Artificial Sequence
  Description of Artificial Sequence: Synthetic oligonucleotide
cacgagggcugugaacugc

SEQ ID NO: 430882 - RNA, 19 nt, Artificial Sequence
  Description of Artificial Sequence: Synthetic oligonucleotide
cugccuucaagacgaguca

SEQ ID NO: 430883 - RNA, 19 nt, Artificial Sequence
  Description of Artificial Sequence: Synthetic oligonucleotide
agacggcgauuuucuaacu

SEQ ID NO: 430884 - RNA, 19 nt, Artificial Sequence
  Description of Artificial Sequence: Synthetic oligonucleotide
acuauuggaagaaguccuu

SEQ ID NO: 430885 - RNA, 19 nt, Artificial Sequence
  Description of Artificial Sequence: Synthetic oligonucleotide
acucguuguuaugcccuuc

SEQ ID NO: 430886 - RNA, 19 nt, Artificial Sequence
  Description of Artificial Sequence: Synthetic oligonucleotide
gaaagacggcgauuuucua

SEQ ID NO: 430887 - RNA, 19 nt, Artificial Sequence
  Description of Artificial Sequence: Synthetic oligonucleotide
agacacgguggagcugucg

SEQ ID NO: 430888 - RNA, 19 nt, Artificial Sequence
  Description of Artificial Sequence: Synthetic oligonucleotide
acauugucgaagacuccgu

SEQ ID NO: 430889 - RNA, 19 nt, Artificial Sequence
  Description of Artificial Sequence: Synthetic oligonucleotide
uucgugcuucauguccagc

SEQ ID NO: 430890 - RNA, 19 nt, Artificial Sequence
  Description of Artificial Sequence: Synthetic oligonucleotide
uccgguugacaagcugagc

SEQ ID NO: 430891 - RNA, 19 nt, Artificial Sequence
  Description of Artificial Sequence: Synthetic oligonucleotide
uacucguuguuaugcccuu

SEQ ID NO: 430892 - RNA, 19 nt, Artificial Sequence
  Description of Artificial Sequence: Synthetic oligonucleotide
ucgaggcgaguggugaccu

SEQ ID NO: 430893 - RNA, 19 nt, Artificial Sequence
  Description of Artificial Sequence: Synthetic oligonucleotide
ggcgauuuucuaacuugag

SEQ ID NO: 430894 - RNA, 19 nt, Artificial Sequence
  Description of Artificial Sequence: Synthetic oligonucleotide
cacggauguccaaacaagu

SEQ ID NO: 430895 - RNA, 19 nt, Artificial Sequence
  Description of Artificial Sequence: Synthetic oligonucleotide
gucuguuagugaaaucucu

SEQ ID NO: 430896 - RNA, 19 nt, Artificial Sequence
  Description of Artificial Sequence: Synthetic oligonucleotide
cacgaagauacaaacucuu

SEQ ID NO: 430897 - RNA, 19 nt, Artificial Sequence
  Description of Artificial Sequence: Synthetic oligonucleotide
cuauaggucugaucagccu

SEQ ID NO: 430898 - RNA, 19 nt, Artificial Sequence
  Description of Artificial Sequence: Synthetic oligonucleotide
cagcucguuggcacagaug

SEQ ID NO: 430899 - RNA, 19 nt, Artificial Sequence
  Description of Artificial Sequence: Synthetic oligonucleotide
gccgcucaggguuacacga

SEQ ID NO: 430900 - RNA, 19 nt, Artificial Sequence
  Description of Artificial Sequence: Synthetic oligonucleotide
uggccgcucaggguuacac

SEQ ID NO: 430901 - RNA, 19 nt, Artificial Sequence
  Description of Artificial Sequence: Synthetic oligonucleotide
guacucguuguuaugcccu

SEQ ID NO: 430902 - RNA, 19 nt, Artificial Sequence
  Description of Artificial Sequence: Synthetic oligonucleotide
gcgauuuucuaacuugagu

SEQ ID NO: 430903 - RNA, 19 nt, Artificial Sequence
  Description of Artificial Sequence: Synthetic oligonucleotide
caccauuauaucgaucugu

SEQ ID NO: 430904 - RNA, 19 nt, Artificial Sequence
  Description of Artificial Sequence: Synthetic oligonucleotide
aaacugccuucaagacgag

SEQ ID NO: 430905 - RNA, 19 nt, Artificial Sequence
  Description of Artificial Sequence: Synthetic oligonucleotide
cagaccgaucgucccgcag

SEQ ID NO: 430906 - RNA, 19 nt, Artificial Sequence
  Description of Artificial Sequence: Synthetic oligonucleotide
ccaguaaccucuugcuguc

SEQ ID NO: 430907 - RNA, 19 nt, Artificial Sequence
  Description of Artificial Sequence: Synthetic oligonucleotide
augcaacauuucaaccucu

SEQ ID NO: 430908 - RNA, 19 nt, Artificial Sequence
  Description of Artificial Sequence: Synthetic oligonucleotide
gcugucgagggcuggugug

SEQ ID NO: 430909 - RNA, 19 nt, Artificial Sequence
  Description of Artificial Sequence: Synthetic oligonucleotide
ggccgcucaggguuacacg

SEQ ID NO: 430910 - RNA, 19 nt, Artificial Sequence
  Description of Artificial Sequence: Synthetic oligonucleotide
ucagaccgaucgucccgca

SEQ ID NO: 430911 - RNA, 19 nt, Artificial Sequence
  Description of Artificial Sequence: Synthetic oligonucleotide
uccgugcccuggagagggg

SEQ ID NO: 430912 - RNA, 19 nt, Artificial Sequence
  Description of Artificial Sequence: Synthetic oligonucleotide
aucgaucccagaggagaga

SEQ ID NO: 430913 - RNA, 19 nt, Artificial Sequence
  Description of Artificial Sequence: Synthetic oligonucleotide
gguuacacgagggcuguga

SEQ ID NO: 430914 - RNA, 19 nt, Artificial Sequence
  Description of Artificial Sequence: Synthetic oligonucleotide
agccaccauuauaucgauc

SEQ ID NO: 430915 - RNA, 19 nt, Artificial Sequence
  Description of Artificial Sequence: Synthetic oligonucleotide
gacuguuccgcuagagccu

SEQ ID NO: 430916 - RNA, 19 nt, Artificial Sequence
  Description of Artificial Sequence: Synthetic oligonucleotide
uaugcccuuccauccucuu

SEQ ID NO: 430917 - RNA, 19 nt, Artificial Sequence
  Description of Artificial Sequence: Synthetic oligonucleotide
aggcgcucgagaauauggu

SEQ ID NO: 430918 - RNA, 19 nt, Artificial Sequence
  Description of Artificial Sequence: Synthetic oligonucleotide
ggguucuaugcuauccaac

SEQ ID NO: 430919 - RNA, 19 nt, Artificial Sequence
  Description of Artificial Sequence: Synthetic oligonucleotide
cgcucgagaauauggugag

SEQ ID NO: 430920 - RNA, 19 nt, Artificial Sequence
  Description of Artificial Sequence: Synthetic oligonucleotide
gucccgcagacuuuuggua

SEQ ID NO: 430921 - RNA, 19 nt, Artificial Sequence
  Description of Artificial Sequence: Synthetic oligonucleotide
guucucgaggcgaguggug

SEQ ID NO: 430922 - RNA, 19 nt, Artificial Sequence
  Description of Artificial Sequence: Synthetic oligonucleotide
gacggcgauuuucuaacuu

SEQ ID NO: 430923 - RNA, 19 nt, Artificial Sequence
  Description of Artificial Sequence: Synthetic oligonucleotide
gcgcucgagaauaugguga

SEQ ID NO: 430924 - RNA, 19 nt, Artificial Sequence
  Description of Artificial Sequence: Synthetic oligonucleotide
gcuauccaacguuuguucu

SEQ ID NO: 430925 - RNA, 19 nt, Artificial Sequence
  Description of Artificial Sequence: Synthetic oligonucleotide
ggucacggauguccaaaca

SEQ ID NO: 430926 - RNA, 19 nt, Artificial Sequence
  Description of Artificial Sequence: Synthetic oligonucleotide
gcuaucgaucccagaggag

SEQ ID NO: 430927 - RNA, 19 nt, Artificial Sequence
  Description of Artificial Sequence: Synthetic oligonucleotide
cucucaaucucagaccgau

SEQ ID NO: 430928 - RNA, 19 nt, Artificial Sequence
  Description of Artificial Sequence: Synthetic oligonucleotide
ccaguuagccucucaaucu

SEQ ID NO: 430929 - RNA, 19 nt, Artificial Sequence
  Description of Artificial Sequence: Synthetic oligonucleotide
gguagcuaucgaucccaga

SEQ ID NO: 430930 - RNA, 19 nt, Artificial Sequence
  Description of Artificial Sequence: Synthetic oligonucleotide
cccacucggauuucuuaug

SEQ ID NO: 430931 - RNA, 19 nt, Artificial Sequence
  Description of Artificial Sequence: Synthetic oligonucleotide
cguuuguucucgaggcgag

SEQ ID NO: 430932 - RNA, 19 nt, Artificial Sequence
  Description of Artificial Sequence: Synthetic oligonucleotide
cgaagauacaaacucuucu

SEQ ID NO: 430933 - RNA, 19 nt, Artificial Sequence
  Description of Artificial Sequence: Synthetic oligonucleotide
guccuguacucguuguuau

SEQ ID NO: 430934 - RNA, 19 nt, Artificial Sequence
  Description of Artificial Sequence: Synthetic oligonucleotide
gucgaagacuccgugcccu

SEQ ID NO: 430935 - RNA, 19 nt, Artificial Sequence
  Description of Artificial Sequence: Synthetic oligonucleotide
guacugcucagucuuuauu

SEQ ID NO: 430936 - RNA, 19 nt, Artificial Sequence
  Description of Artificial Sequence: Synthetic oligonucleotide
ccaccauuauaucgaucug

SEQ ID NO: 430937 - RNA, 19 nt, Artificial Sequence
  Description of Artificial Sequence: Synthetic oligonucleotide
gugcuguacugccuuuucu

SEQ ID NO: 430938 - RNA, 19 nt, Artificial Sequence
  Description of Artificial Sequence: Synthetic oligonucleotide
gugcacgaagauacaaacu

SEQ ID NO: 430939 - RNA, 19 nt, Artificial Sequence
  Description of Artificial Sequence: Synthetic oligonucleotide
cggauuucuuaugagccac

SEQ ID NO: 430940 - RNA, 19 nt, Artificial Sequence
  Description of Artificial Sequence: Synthetic oligonucleotide
ggugagaccgaagcuccuc

SEQ ID NO: 430941 - RNA, 19 nt, Artificial Sequence
  Description of Artificial Sequence: Synthetic oligonucleotide
ggagagggguacuuccucu

SEQ ID NO: 430942 - RNA, 19 nt, Artificial Sequence
  Description of Artificial Sequence: Synthetic oligonucleotide
ccacucggauuucuuauga

SEQ ID NO: 430943 - RNA, 19 nt, Artificial Sequence
  Description of Artificial Sequence: Synthetic oligonucleotide
ccugaaggucuguuaguga

SEQ ID NO: 430944 - RNA, 19 nt, Artificial Sequence
  Description of Artificial Sequence: Synthetic oligonucleotide
cugucgagggcugguguga

SEQ ID NO: 430945 - RNA, 19 nt, Artificial Sequence
  Description of Artificial Sequence: Synthetic oligonucleotide
ugguguccuuagcccgcuc

SEQ ID NO: 430946 - RNA, 19 nt, Artificial Sequence
  Description of Artificial Sequence: Synthetic oligonucleotide
guguaacucccggguuagc

SEQ ID NO: 430947 - RNA, 19 nt, Artificial Sequence
  Description of Artificial Sequence: Synthetic oligonucleotide
gcacgaagauacaaacucu

SEQ ID NO: 430948 - RNA, 19 nt, Artificial Sequence
  Description of Artificial Sequence: Synthetic oligonucleotide
gaucgucccgcagacuuuu

SEQ ID NO: 430949 - RNA, 19 nt, Artificial Sequence
  Description of Artificial Sequence: Synthetic oligonucleotide
cagagccucuaauaacuuu

SEQ ID NO: 430950 - RNA, 19 nt, Artificial Sequence
  Description of Artificial Sequence: Synthetic oligonucleotide
ccuccaguaaccucuugcu

SEQ ID NO: 430951 - RNA, 19 nt, Artificial Sequence
  Description of Artificial Sequence: Synthetic oligonucleotide
ccauuaguucuuggcucag

SEQ ID NO: 430952 - RNA, 19 nt, Artificial Sequence
  Description of Artificial Sequence: Synthetic oligonucleotide
ccucaaggaugaaguuuuc

SEQ ID NO: 430953 - RNA, 19 nt, Artificial Sequence
  Description of Artificial Sequence: Synthetic oligonucleotide
cucuugcugucuacugagu

SEQ ID NO: 430954 - RNA, 19 nt, Artificial Sequence
  Description of Artificial Sequence: Synthetic oligonucleotide
gcgugcacgaagauacaaa

SEQ ID NO: 430955 - RNA, 19 nt, Artificial Sequence
  Description of Artificial Sequence: Synthetic oligonucleotide
cggcgauuuucuaacuuga

SEQ ID NO: 430956 - RNA, 19 nt, Artificial Sequence
  Description of Artificial Sequence: Synthetic oligonucleotide
ccucuauagucucuuaguu

SEQ ID NO: 430957 - RNA, 19 nt, Artificial Sequence
  Description of Artificial Sequence: Synthetic oligonucleotide
gcauagcauaagaaaaguu

SEQ ID NO: 430958 - RNA, 19 nt, Artificial Sequence
  Description of Artificial Sequence: Synthetic oligonucleotide
cuguuccgcuagagccuuc

SEQ ID NO: 430959 - RNA, 19 nt, Artificial Sequence
  Description of Artificial Sequence: Synthetic oligonucleotide
aucgucccgcagacuuuug

SEQ ID NO: 430960 - RNA, 19 nt, Artificial Sequence
  Description of Artificial Sequence: Synthetic oligonucleotide
ggcagcgugcacgaagaua

SEQ ID NO: 430961 - RNA, 19 nt, Artificial Sequence
  Description of Artificial Sequence: Synthetic oligonucleotide
accgaucgucccgcagacu

SEQ ID NO: 430962 - RNA, 19 nt, Artificial Sequence
  Description of Artificial Sequence: Synthetic oligonucleotide
cggucacggauguccaaac

SEQ ID NO: 430963 - RNA, 19 nt, Artificial Sequence
  Description of Artificial Sequence: Synthetic oligonucleotide
cccgauuuuguuauuccuu

SEQ ID NO: 430964 - RNA, 19 nt, Artificial Sequence
  Description of Artificial Sequence: Synthetic oligonucleotide
ccuaacuccuccugcaguu

SEQ ID NO: 430965 - RNA, 19 nt, Artificial Sequence
  Description of Artificial Sequence: Synthetic oligonucleotide
gucugcaaagugguuuauu

SEQ ID NO: 430966 - RNA, 19 nt, Artificial Sequence
  Description of Artificial Sequence: Synthetic oligonucleotide
guuccgcuagagccuuccu

SEQ ID NO: 430967 - RNA, 19 nt, Artificial Sequence
  Description of Artificial Sequence: Synthetic oligonucleotide
gcgaguggugaccuguuuu

SEQ ID NO: 430968 - RNA, 19 nt, Artificial Sequence
  Description of Artificial Sequence: Synthetic oligonucleotide
cgaagacuccgugcccugg

SEQ ID NO: 430969 - RNA, 19 nt, Artificial Sequence
  Description of Artificial Sequence: Synthetic oligonucleotide
cugucggaauuccucuauu

SEQ ID NO: 430970 - RNA, 19 nt, Artificial Sequence
  Description of Artificial Sequence: Synthetic oligonucleotide
cagagacuucugucggaau

SEQ ID NO: 430971 - RNA, 19 nt, Artificial Sequence
  Description of Artificial Sequence: Synthetic oligonucleotide
ccucucaaucucagaccga

SEQ ID NO: 430972 - RNA, 19 nt, Artificial Sequence
  Description of Artificial Sequence: Synthetic oligonucleotide
ccccgauuuuguuauuccu

SEQ ID NO: 430973 - RNA, 19 nt, Artificial Sequence
  Description of Artificial Sequence: Synthetic oligonucleotide
gcugagauuugguguucau

SEQ ID NO: 430974 - RNA, 19 nt, Artificial Sequence
  Description of Artificial Sequence: Synthetic oligonucleotide
gcucgagaauauggugaga

SEQ ID NO: 430975 - RNA, 19 nt, Artificial Sequence
  Description of Artificial Sequence: Synthetic oligonucleotide
ccgaucgucccgcagacuu

SEQ ID NO: 430976 - RNA, 19 nt, Artificial Sequence
  Description of Artificial Sequence: Synthetic oligonucleotide
cguuguuaugcccuuccau

SEQ ID NO: 430977 - RNA, 19 nt, Artificial Sequence
  Description of Artificial Sequence: Synthetic oligonucleotide
ggguuacacgagggcugug

SEQ ID NO: 430978 - RNA, 19 nt, Artificial Sequence
  Description of Artificial Sequence: Synthetic oligonucleotide
cucucgcaagcaucaucuu

SEQ ID NO: 430979 - RNA, 19 nt, Artificial Sequence
  Description of Artificial Sequence: Synthetic oligonucleotide
cgucugccccucccacucg

SEQ ID NO: 430980 - RNA, 19 nt, Artificial Sequence
  Description of Artificial Sequence: Synthetic oligonucleotide
ccggucacggauguccaaa

SEQ ID NO: 430981 - RNA, 19 nt, Artificial Sequence
  Description of Artificial Sequence: Synthetic oligonucleotide
caguaaccucuugcugucu

SEQ ID NO: 430982 - RNA, 19 nt, Artificial Sequence
  Description of Artificial Sequence: Synthetic oligonucleotide
gcugggagauuuccaucuu

SEQ ID NO: 430983 - RNA, 19 nt, Artificial Sequence
  Description of Artificial Sequence: Synthetic oligonucleotide
gacgggcagcgugcacgaa

SEQ ID NO: 430984 - RNA, 19 nt, Artificial Sequence
  Description of Artificial Sequence: Synthetic oligonucleotide
guggccgcucaggguuaca

SEQ ID NO: 430985 - RNA, 19 nt, Artificial Sequence
  Description of Artificial Sequence: Synthetic oligonucleotide
cgcagacuuuugguauuuc

SEQ ID NO: 430986 - RNA, 19 nt, Artificial Sequence
  Description of Artificial Sequence: Synthetic oligonucleotide
ggcgaguggugaccuguuu

SEQ ID NO: 430987 - RNA, 19 nt, Artificial Sequence
  Description of Artificial Sequence: Synthetic oligonucleotide
gccucaccguccucucgcu

SEQ ID NO: 430988 - RNA, 19 nt, Artificial Sequence
  Description of Artificial Sequence: Synthetic oligonucleotide
cccggguuagcugggagau

SEQ ID NO: 430989 - RNA, 19 nt, Artificial Sequence
  Description of Artificial Sequence: Synthetic oligonucleotide
cccugauguuaaggcgcuc

SEQ ID NO: 430990 - RNA, 19 nt, Artificial Sequence
  Description of Artificial Sequence: Synthetic oligonucleotide
ccagcucguuggcacagau

SEQ ID NO: 430991 - RNA, 19 nt, Artificial Sequence
  Description of Artificial Sequence: Synthetic oligonucleotide
cccgcagacuuuugguauu

SEQ ID NO: 430992 - RNA, 19 nt, Artificial Sequence
  Description of Artificial Sequence: Synthetic oligonucleotide
gcuucauguccagcugauu

SEQ ID NO: 430993 - RNA, 19 nt, Artificial Sequence
  Description of Artificial Sequence: Synthetic oligonucleotide
cugcucucgcaagcaucau

SEQ ID NO: 430994 - RNA, 19 nt, Artificial Sequence
  Description of Artificial Sequence: Synthetic oligonucleotide
ccgcucgagcuugcugcuc

SEQ ID NO: 430995 - RNA, 19 nt, Artificial Sequence
  Description of Artificial Sequence: Synthetic oligonucleotide
ccuuagcccgcucgagcuu

SEQ ID NO: 430996 - RNA, 19 nt, Artificial Sequence
  Description of Artificial Sequence: Synthetic oligonucleotide
cgaucgucccgcagacuuu

SEQ ID NO: 430997 - RNA, 19 nt, Artificial Sequence
  Description of Artificial Sequence: Synthetic oligonucleotide
ccucaccguccucucgcuu

SEQ ID NO: 430998 - RNA, 19 nt, Artificial Sequence
  Description of Artificial Sequence: Synthetic oligonucleotide
ccggguuagcugggagauu

SEQ ID NO: 430999 - RNA, 19 nt, Artificial Sequence
  Description of Artificial Sequence: Synthetic oligonucleotide
aaaauugccaaauuguucc

SEQ ID NO: 431000 - RNA, 19 nt, Artificial Sequence
  Description of Artificial Sequence: Synthetic oligonucleotide
aaaaccuuaacguacgucc

SEQ ID NO: 431001 - RNA, 19 nt, Artificial Sequence
  Description of Artificial Sequence: Synthetic oligonucleotide
aaacaaaucuuacacagcc

SEQ ID NO: 431002 - RNA, 19 nt, Artificial Sequence
  Description of Artificial Sequence: Synthetic oligonucleotide
auuaguaucauccaggacu

SEQ ID NO: 431003 - RNA, 19 nt, Artificial Sequence
  Description of Artificial Sequence: Synthetic oligonucleotide
aacacuggcacuuuaagag

SEQ ID NO: 431004 - RNA, 19 nt, Artificial Sequence
  Description of Artificial Sequence: Synthetic oligonucleotide
agaacgacuauuuuaaaac

SEQ ID NO: 431005 - RNA, 19 nt, Artificial Sequence
  Description of Artificial Sequence: Synthetic oligonucleotide
aacgcaaauguaaagaacc

SEQ ID NO: 431006 - RNA, 19 nt, Artificial Sequence
  Description of Artificial Sequence: Synthetic oligonucleotide
uuuacuuagaagcauucag

SEQ ID NO: 431007 - RNA, 19 nt, Artificial Sequence
  Description of Artificial Sequence: Synthetic oligonucleotide
aauguaacugccauuacac

SEQ ID NO: 431008 - RNA, 19 nt, Artificial Sequence
  Description of Artificial Sequence: Synthetic oligonucleotide
aacugcagaauguaacugc

SEQ ID NO: 431009 - RNA, 19 nt, Artificial Sequence
  Description of Artificial Sequence: Synthetic oligonucleotide
aaauggauuggacaacugg

SEQ ID NO: 431010 - RNA, 19 nt, Artificial Sequence
  Description of Artificial Sequence: Synthetic oligonucleotide
uuguaucugauuuauaaag

SEQ ID NO: 431011 - RNA, 19 nt, Artificial Sequence
  Description of Artificial Sequence: Synthetic oligonucleotide
aaaggagugaguuguguac

SEQ ID NO: 431012 - RNA, 19 nt, Artificial Sequence
  Description of Artificial Sequence: Synthetic oligonucleotide
acaacugguacuaauaugc

SEQ ID NO: 431013 - RNA, 19 nt, Artificial Sequence
  Description of Artificial Sequence: Synthetic oligonucleotide
uguaucugauuuauaaagg

SEQ ID NO: 431014 - RNA, 19 nt, Artificial Sequence
  Description of Artificial Sequence: Synthetic oligonucleotide
uucaugugacccaaaaugg

SEQ ID NO: 431015 - RNA, 19 nt, Artificial Sequence
  Description of Artificial Sequence: Synthetic oligonucleotide
uauuaguuuauuaguauca

SEQ ID NO: 431016 - RNA, 19 nt, Artificial Sequence
  Description of Artificial Sequence: Synthetic oligonucleotide
uguggcauaauuuuaagaa

SEQ ID NO: 431017 - RNA, 19 nt, Artificial Sequence
  Description of Artificial Sequence: Synthetic oligonucleotide
uuuaagaaaagcuggcuca

SEQ ID NO: 431018 - RNA, 19 nt, Artificial Sequence
  Description of Artificial Sequence: Synthetic oligonucleotide
gauuguucgauucuuauuc

SEQ ID NO: 431019 - RNA, 19 nt, Artificial Sequence
  Description of Artificial Sequence: Synthetic oligonucleotide
aauguuacccaucacaaua

SEQ ID NO: 431020 - RNA, 19 nt, Artificial Sequence
  Description of Artificial Sequence: Synthetic oligonucleotide
cugugcaccaacaagaacc

SEQ ID NO: 431021 - RNA, 19 nt, Artificial Sequence
  Description of Artificial Sequence: Synthetic oligonucleotide
uauguacuaucucuuaucc

SEQ ID NO: 431022 - RNA, 19 nt, Artificial Sequence
  Description of Artificial Sequence: Synthetic oligonucleotide
uguauuuagauagaugggc

SEQ ID NO: 431023 - RNA, 19 nt, Artificial Sequence
  Description of Artificial Sequence: Synthetic oligonucleotide
uucgcuaggaccaauguca

SEQ ID NO: 431024 - RNA, 19 nt, Artificial Sequence
  Description of Artificial Sequence: Synthetic oligonucleotide
uguacuaucucuuauccaa

SEQ ID NO: 431025 - RNA, 19 nt, Artificial Sequence
  Description of Artificial Sequence: Synthetic oligonucleotide
uggaauuucaacuauggau

SEQ ID NO: 431026 - RNA, 19 nt, Artificial Sequence
  Description of Artificial Sequence: Synthetic oligonucleotide
aggguguguagauaaaagc

SEQ ID NO: 431027 - RNA, 19 nt, Artificial Sequence
  Description of Artificial Sequence: Synthetic oligonucleotide
uuauaaagggacaaaucac

SEQ ID NO: 431028 - RNA, 19 nt, Artificial Sequence
  Description of Artificial Sequence: Synthetic oligonucleotide
uuuaauauggcagucuugu

SEQ ID NO: 431029 - RNA, 19 nt, Artificial Sequence
  Description of Artificial Sequence: Synthetic oligonucleotide
aaauugccaaauuguuccc

SEQ ID NO: 431030 - RNA, 19 nt, Artificial Sequence
  Description of Artificial Sequence: Synthetic oligonucleotide
caauuauuuucguauaagc

SEQ ID NO: 431031 - RNA, 19 nt, Artificial Sequence
  Description of Artificial Sequence: Synthetic oligonucleotide
acgauuuuggaauuucaac

SEQ ID NO: 431032 - RNA, 19 nt, Artificial Sequence
  Description of Artificial Sequence: Synthetic oligonucleotide
uuacccaucacaauaugca

SEQ ID NO: 431033 - RNA, 19 nt, Artificial Sequence
  Description of Artificial Sequence: Synthetic oligonucleotide
aagcguguaaaauuacaag

SEQ ID NO: 431034 - RNA, 19 nt, Artificial Sequence
  Description of Artificial Sequence: Synthetic oligonucleotide
aagcagauuaaacaugacu

SEQ ID NO: 431035 - RNA, 19 nt, Artificial Sequence
  Description of Artificial Sequence: Synthetic oligonucleotide
ugagcaauccuguauuuag

SEQ ID NO: 431036 - RNA, 19 nt, Artificial Sequence
  Description of Artificial Sequence: Synthetic oligonucleotide
uucgauucuuauuccaugg

SEQ ID NO: 431037 - RNA, 19 nt, Artificial Sequence
  Description of Artificial Sequence: Synthetic oligonucleotide
aacaaacgcaaauguaaag

SEQ ID NO: 431038 - RNA, 19 nt, Artificial Sequence
  Description of Artificial Sequence: Synthetic oligonucleotide
aguaauggacguuaagaag

SEQ ID NO: 431039 - RNA, 19 nt, Artificial Sequence
  Description of Artificial Sequence: Synthetic oligonucleotide
aacgacuauuuuaaaacac

SEQ ID NO: 431040 - RNA, 19 nt, Artificial Sequence
  Description of Artificial Sequence: Synthetic oligonucleotide
aucugauuuauaaagggac

SEQ ID NO: 431041 - RNA, 19 nt, Artificial Sequence
  Description of Artificial Sequence: Synthetic oligonucleotide
uuacuuagaagcauucaga

SEQ ID NO: 431042 - RNA, 19 nt, Artificial Sequence
  Description of Artificial Sequence: Synthetic oligonucleotide
uaguguguuaacuauacaa

SEQ ID NO: 431043 - RNA, 19 nt, Artificial Sequence
  Description of Artificial Sequence: Synthetic oligonucleotide
gaguuuggguuuuauaaag

SEQ ID NO: 431044 - RNA, 19 nt, Artificial Sequence
  Description of Artificial Sequence: Synthetic oligonucleotide
agcguguaaaauuacaaga

SEQ ID NO: 431045 - RNA, 19 nt, Artificial Sequence
  Description of Artificial Sequence: Synthetic oligonucleotide
ucuaaagacacauucggua

SEQ ID NO: 431046 - RNA, 19 nt, Artificial Sequence
  Description of Artificial Sequence: Synthetic oligonucleotide
auuguucgauucuuauucc

SEQ ID NO: 431047 - RNA, 19 nt, Artificial Sequence
  Description of Artificial Sequence: Synthetic oligonucleotide
uccaugccaauuuacaacc

SEQ ID NO: 431048 - RNA, 19 nt, Artificial Sequence
  Description of Artificial Sequence: Synthetic oligonucleotide
aaccuuaacguacgucccc

SEQ ID NO: 431049 - RNA, 19 nt, Artificial Sequence
  Description of Artificial Sequence: Synthetic oligonucleotide
uuauuaguuuauuaguauc

SEQ ID NO: 431050 - RNA, 19 nt, Artificial Sequence
  Description of Artificial Sequence: Synthetic oligonucleotide
ucuccagcuaacuauacga

SEQ ID NO: 431051 - RNA, 19 nt, Artificial Sequence
  Description of Artificial Sequence: Synthetic oligonucleotide
uaucugauuuauaaaggga

SEQ ID NO: 431052 - RNA, 19 nt, Artificial Sequence
  Description of Artificial Sequence: Synthetic oligonucleotide
aagaacgacuauuuuaaaa

SEQ ID NO: 431053 - RNA, 19 nt, Artificial Sequence
  Description of Artificial Sequence: Synthetic oligonucleotide
ugacuaaugaguuuggguu

SEQ ID NO: 431054 - RNA, 19 nt, Artificial Sequence
  Description of Artificial Sequence: Synthetic oligonucleotide
uuaucauagccuucgcuag

SEQ ID NO: 431055 - RNA, 19 nt, Artificial Sequence
  Description of Artificial Sequence: Synthetic oligonucleotide
uuauuaguaucauccagga

SEQ ID NO: 431056 - RNA, 19 nt, Artificial Sequence
  Description of Artificial Sequence: Synthetic oligonucleotide
acuauacgaaaagaaacac

SEQ ID NO: 431057 - RNA, 19 nt, Artificial Sequence
  Description of Artificial Sequence: Synthetic oligonucleotide
ugguuuauguacuaucucu

SEQ ID NO: 431058 - RNA, 19 nt, Artificial Sequence
  Description of Artificial Sequence: Synthetic oligonucleotide
aauauggcagucuuguauu

SEQ ID NO: 431059 - RNA, 19 nt, Artificial Sequence
  Description of Artificial Sequence: Synthetic oligonucleotide
auacccuuaauuuuauaug

SEQ ID NO: 431060 - RNA, 19 nt, Artificial Sequence
  Description of Artificial Sequence: Synthetic oligonucleotide
aacuauacgaaaagaaaca

SEQ ID NO: 431061 - RNA, 19 nt, Artificial Sequence
  Description of Artificial Sequence: Synthetic oligonucleotide
uacccuuaauuuuauaugu

SEQ ID NO: 431062 - RNA, 19 nt, Artificial Sequence
  Description of Artificial Sequence: Synthetic oligonucleotide
aauuauuaguuuauuagua

SEQ ID NO: 431063 - RNA, 19 nt, Artificial Sequence
  Description of Artificial Sequence: Synthetic oligonucleotide
uuuaagcucacgcuuuucu

SEQ ID NO: 431064 - RNA, 19 nt, Artificial Sequence
  Description of Artificial Sequence: Synthetic oligonucleotide
aaacgcaaauguaaagaac

SEQ ID NO: 431065 - RNA, 19 nt, Artificial Sequence
  Description of Artificial Sequence: Synthetic oligonucleotide
aacuaauuuugugcugugc

SEQ ID NO: 431066 - RNA, 19 nt, Artificial Sequence
  Description of Artificial Sequence: Synthetic oligonucleotide
ggugugauagaauugauca

SEQ ID NO: 431067 - RNA, 19 nt, Artificial Sequence
  Description of Artificial Sequence: Synthetic oligonucleotide
aauuuugugcugugcacca

SEQ ID NO: 431068 - RNA, 19 nt, Artificial Sequence
  Description of Artificial Sequence: Synthetic oligonucleotide
uuaauagggaacugcagaa

SEQ ID NO: 431069 - RNA, 19 nt, Artificial Sequence
  Description of Artificial Sequence: Synthetic oligonucleotide
acaugguuuauguacuauc

SEQ ID NO: 431070 - RNA, 19 nt, Artificial Sequence
  Description of Artificial Sequence: Synthetic oligonucleotide
ggacaaaucacaauguagg

SEQ ID NO: 431071 - RNA, 19 nt, Artificial Sequence
  Description of Artificial Sequence: Synthetic oligonucleotide
ucaauguacugcaauggcu

SEQ ID NO: 431072 - RNA, 19 nt, Artificial Sequence
  Description of Artificial Sequence: Synthetic oligonucleotide
aaaauguuacccaucacaa

SEQ ID NO: 431073 - RNA, 19 nt, Artificial Sequence
  Description of Artificial Sequence: Synthetic oligonucleotide
uguaggaaaauauacccuu

SEQ ID NO: 431074 - RNA, 19 nt, Artificial Sequence
  Description of Artificial Sequence: Synthetic oligonucleotide
ucuauggagcucaauguac

SEQ ID NO: 431075 - RNA, 19 nt, Artificial Sequence
  Description of Artificial Sequence: Synthetic oligonucleotide
caauguacugcaauggcug

SEQ ID NO: 431076 - RNA, 19 nt, Artificial Sequence
  Description of Artificial Sequence: Synthetic oligonucleotide
uacuaauaugcaaaguuua

SEQ ID NO: 431077 - RNA, 19 nt, Artificial Sequence
  Description of Artificial Sequence: Synthetic oligonucleotide
aaaccuuaacguacguccc

SEQ ID NO: 431078 - RNA, 19 nt, Artificial Sequence
  Description of Artificial Sequence: Synthetic oligonucleotide
uacaagaacgacuauuuua

SEQ ID NO: 431079 - RNA, 19 nt, Artificial Sequence
  Description of Artificial Sequence: Synthetic oligonucleotide
uacuaguccuucaaggaca

SEQ ID NO: 431080 - RNA, 19 nt, Artificial Sequence
  Description of Artificial Sequence: Synthetic oligonucleotide
aauggauuggacaacuggu

SEQ ID NO: 431081 - RNA, 19 nt, Artificial Sequence
  Description of Artificial Sequence: Synthetic oligonucleotide
aaccucugcaauuauuagu

SEQ ID NO: 431082 - RNA, 19 nt, Artificial Sequence
  Description of Artificial Sequence: Synthetic oligonucleotide
ggaauuucaacuauggaug

SEQ ID NO: 431083 - RNA, 19 nt, Artificial Sequence
  Description of Artificial Sequence: Synthetic oligonucleotide
aauuacaagaacgacuauu

SEQ ID NO: 431084 - RNA, 19 nt, Artificial Sequence
  Description of Artificial Sequence: Synthetic oligonucleotide
uguucaguauuccuccuca

SEQ ID NO: 431085 - RNA, 19 nt, Artificial Sequence
  Description of Artificial Sequence: Synthetic oligonucleotide
uuaguaucauccaggacuc

SEQ ID NO: 431086 - RNA, 19 nt, Artificial Sequence
  Description of Artificial Sequence: Synthetic oligonucleotide
ugcuaagcagauuaaacau

SEQ ID NO: 431087 - RNA, 19 nt, Artificial Sequence
  Description of Artificial Sequence: Synthetic oligonucleotide
gaagaguccucacguaagg

SEQ ID NO: 431088 - RNA, 19 nt, Artificial Sequence
  Description of Artificial Sequence: Synthetic oligonucleotide
acagucaaguuuccugagc

SEQ ID NO: 431089 - RNA, 19 nt, Artificial Sequence
  Description of Artificial Sequence: Synthetic oligonucleotide
uggacguuaagaagagucc

SEQ ID NO: 431090 - RNA, 19 nt, Artificial Sequence
  Description of Artificial Sequence: Synthetic oligonucleotide
uggaugaaaauguuaccca

SEQ ID NO: 431091 - RNA, 19 nt, Artificial Sequence
  Description of Artificial Sequence: Synthetic oligonucleotide
uucuuuaauagggaacugc

SEQ ID NO: 431092 - RNA, 19 nt, Artificial Sequence
  Description of Artificial Sequence: Synthetic oligonucleotide
aagguuaguggcuauugaa

SEQ ID NO: 431093 - RNA, 19 nt, Artificial Sequence
  Description of Artificial Sequence: Synthetic oligonucleotide
aagaagaguccucacguaa

SEQ ID NO: 431094 - RNA, 19 nt, Artificial Sequence
  Description of Artificial Sequence: Synthetic oligonucleotide
uuuucguauaagcugcauc

SEQ ID NO: 431095 - RNA, 19 nt, Artificial Sequence
  Description of Artificial Sequence: Synthetic oligonucleotide
uauuuacuuagaagcauuc

SEQ ID NO: 431096 - RNA, 19 nt, Artificial Sequence
  Description of Artificial Sequence: Synthetic oligonucleotide
ugcaauaauucaugugacc

SEQ ID NO: 431097 - RNA, 19 nt, Artificial Sequence
  Description of Artificial Sequence: Synthetic oligonucleotide
uauguggcauaauuuuaag

SEQ ID NO: 431098 - RNA, 19 nt, Artificial Sequence
  Description of Artificial Sequence: Synthetic oligonucleotide
gaauguaacugccauuaca

SEQ ID NO: 431099 - RNA, 19 nt, Artificial Sequence
  Description of Artificial Sequence: Synthetic oligonucleotide
gaauugaucacucucaguu

SEQ ID NO: 431100 - RNA, 19 nt, Artificial Sequence
  Description of Artificial Sequence: Synthetic oligonucleotide
acaguaauggacguuaaga

SEQ ID NO: 431101 - RNA, 19 nt, Artificial Sequence
  Description of Artificial Sequence: Synthetic oligonucleotide
auauaacaaacagcacucc

SEQ ID NO: 431102 - RNA, 19 nt, Artificial Sequence
  Description of Artificial Sequence: Synthetic oligonucleotide
uaucauagccuucgcuagg

SEQ ID NO: 431103 - RNA, 19 nt, Artificial Sequence
  Description of Artificial Sequence: Synthetic oligonucleotide
ucggguuuuccuuuuagcu

SEQ ID NO: 431104 - RNA, 19 nt, Artificial Sequence
  Description of Artificial Sequence: Synthetic oligonucleotide
guauucaguuaacagaaca

SEQ ID NO: 431105 - RNA, 19 nt, Artificial Sequence
  Description of Artificial Sequence: Synthetic oligonucleotide
uuauuccauggugugauag

SEQ ID NO: 431106 - RNA, 19 nt, Artificial Sequence
  Description of Artificial Sequence: Synthetic oligonucleotide
uaauucaugugacccaaaa

SEQ ID NO: 431107 - RNA, 19 nt, Artificial Sequence
  Description of Artificial Sequence: Synthetic oligonucleotide
aaaaccucugcaauuauua

SEQ ID NO: 431108 - RNA, 19 nt, Artificial Sequence
  Description of Artificial Sequence: Synthetic oligonucleotide
uuccaugccaauuuacaac

SEQ ID NO: 431109 - RNA, 19 nt, Artificial Sequence
  Description of Artificial Sequence: Synthetic oligonucleotide
augacuaaugaguuugggu

SEQ ID NO: 431110 - RNA, 19 nt, Artificial Sequence
  Description of Artificial Sequence: Synthetic oligonucleotide
aaaaggagugaguugugua

SEQ ID NO: 431111 - RNA, 19 nt, Artificial Sequence
  Description of Artificial Sequence: Synthetic oligonucleotide
aaaauuguauuuacuuaga

SEQ ID NO: 431112 - RNA, 19 nt, Artificial Sequence
  Description of Artificial Sequence: Synthetic oligonucleotide
agauuaaacaugacuaaug

SEQ ID NO: 431113 - RNA, 19 nt, Artificial Sequence
  Description of Artificial Sequence: Synthetic oligonucleotide
uacguccccauauauaacu

SEQ ID NO: 431114 - RNA, 19 nt, Artificial Sequence
  Description of Artificial Sequence: Synthetic oligonucleotide
ugcuuuaaauuuccaugcc

SEQ ID NO: 431115 - RNA, 19 nt, Artificial Sequence
  Description of Artificial Sequence: Synthetic oligonucleotide
acaaaucuuacacagccuu

SEQ ID NO: 431116 - RNA, 19 nt, Artificial Sequence
  Description of Artificial Sequence: Synthetic oligonucleotide
auucuuauuccauggugug

SEQ ID NO: 431117 - RNA, 19 nt, Artificial Sequence
  Description of Artificial Sequence: Synthetic oligonucleotide
gacaacugguacuaauaug

SEQ ID NO: 431118 - RNA, 19 nt, Artificial Sequence
  Description of Artificial Sequence: Synthetic oligonucleotide
aaaagcguguaaaauuaca

SEQ ID NO: 431119 - RNA, 19 nt, Artificial Sequence
  Description of Artificial Sequence: Synthetic oligonucleotide
ucggcaaguuugcacaaag

SEQ ID NO: 431120 - RNA, 19 nt, Artificial Sequence
  Description of Artificial Sequence: Synthetic oligonucleotide
uuucaacuauggaugaaaa

SEQ ID NO: 431121 - RNA, 19 nt, Artificial Sequence
  Description of Artificial Sequence: Synthetic oligonucleotide
uccuguauuuagauagaug

SEQ ID NO: 431122 - RNA, 19 nt, Artificial Sequence
  Description of Artificial Sequence: Synthetic oligonucleotide
cuaauuuugugcugugcac

SEQ ID NO: 431123 - RNA, 19 nt, Artificial Sequence
  Description of Artificial Sequence: Synthetic oligonucleotide
gaacgacuauuuuaaaaca

SEQ ID NO: 431124 - RNA, 19 nt, Artificial Sequence
  Description of Artificial Sequence: Synthetic oligonucleotide
uggauuggacaacugguac

SEQ ID NO: 431125 - RNA, 19 nt, Artificial Sequence
  Description of Artificial Sequence: Synthetic oligonucleotide
aaagcguguaaaauuacaa

SEQ ID NO: 431126 - RNA, 19 nt, Artificial Sequence
  Description of Artificial Sequence: Synthetic oligonucleotide
uuugcacaaagaaugcaua

SEQ ID NO: 431127 - RNA, 19 nt, Artificial Sequence
  Description of Artificial Sequence: Synthetic oligonucleotide
agcagauuaaacaugacua

SEQ ID NO: 431128 - RNA, 19 nt, Artificial Sequence
  Description of Artificial Sequence: Synthetic oligonucleotide
cacguaaggauuagaacac

SEQ ID NO: 431129 - RNA, 19 nt, Artificial Sequence
  Description of Artificial Sequence: Synthetic oligonucleotide
gcaauaauucaugugaccc

SEQ ID NO: 431130 - RNA, 19 nt, Artificial Sequence
  Description of Artificial Sequence: Synthetic oligonucleotide
aacugaucacgauuuugga

SEQ ID NO: 431131 - RNA, 19 nt, Artificial Sequence
  Description of Artificial Sequence: Synthetic oligonucleotide
uuaagagaaugauaaucua

SEQ ID NO: 431132 - RNA, 19 nt, Artificial Sequence
  Description of Artificial Sequence: Synthetic oligonucleotide
ggcuauugaaaauaccacc

SEQ ID NO: 431133 - RNA, 19 nt, Artificial Sequence
  Description of Artificial Sequence: Synthetic oligonucleotide
auagaauugaucacucuca

SEQ ID NO: 431134 - RNA, 19 nt, Artificial Sequence
  Description of Artificial Sequence: Synthetic oligonucleotide
aguuuaauauggcagucuu

SEQ ID NO: 431135 - RNA, 19 nt, Artificial Sequence
  Description of Artificial Sequence: Synthetic oligonucleotide
aaauguuacccaucacaau

SEQ ID NO: 431136 - RNA, 19 nt, Artificial Sequence
  Description of Artificial Sequence: Synthetic oligonucleotide
uguauuuacuuagaagcau

SEQ ID NO: 431137 - RNA, 19 nt, Artificial Sequence
  Description of Artificial Sequence: Synthetic oligonucleotide
gagaaugauaaucuacaaa

SEQ ID NO: 431138 - RNA, 19 nt, Artificial Sequence
  Description of Artificial Sequence: Synthetic oligonucleotide
agauagaugggcaaaggca

SEQ ID NO: 431139 - RNA, 19 nt, Artificial Sequence
  Description of Artificial Sequence: Synthetic oligonucleotide
aagaaaacccaaauggauu

SEQ ID NO: 431140 - RNA, 19 nt, Artificial Sequence
  Description of Artificial Sequence: Synthetic oligonucleotide
aauugaucacucucaguuu

SEQ ID NO: 431141 - RNA, 19 nt, Artificial Sequence
  Description of Artificial Sequence: Synthetic oligonucleotide
cuuaucauagccuucgcua

SEQ ID NO: 431142 - RNA, 19 nt, Artificial Sequence
  Description of Artificial Sequence: Synthetic oligonucleotide
guggcuauugaaaauacca

SEQ ID NO: 431143 - RNA, 19 nt, Artificial Sequence
  Description of Artificial Sequence: Synthetic oligonucleotide
acuaucucuuauccaacug

SEQ ID NO: 431144 - RNA, 19 nt, Artificial Sequence
  Description of Artificial Sequence: Synthetic oligonucleotide
ucuuauuccauggugugau

SEQ ID NO: 431145 - RNA, 19 nt, Artificial Sequence
  Description of Artificial Sequence: Synthetic oligonucleotide
cauagccuucgcuaggacc

SEQ ID NO: 431146 - RNA, 19 nt, Artificial Sequence
  Description of Artificial Sequence: Synthetic oligonucleotide
aaguuuaauauggcagucu

SEQ ID NO: 431147 - RNA, 19 nt, Artificial Sequence
  Description of Artificial Sequence: Synthetic oligonucleotide
aaucuuacacagccuuaca

SEQ ID NO: 431148 - RNA, 19 nt, Artificial Sequence
  Description of Artificial Sequence: Synthetic oligonucleotide
cugguacuaauaugcaaag

SEQ ID NO: 431149 - RNA, 19 nt, Artificial Sequence
  Description of Artificial Sequence: Synthetic oligonucleotide
uguucgauucuuauuccau

SEQ ID NO: 431150 - RNA, 19 nt, Artificial Sequence
  Description of Artificial Sequence: Synthetic oligonucleotide
aaacaaacgcaaauguaaa

SEQ ID NO: 431151 - RNA, 19 nt, Artificial Sequence
  Description of Artificial Sequence: Synthetic oligonucleotide
aaauuuccaugccaauuua

SEQ ID NO: 431152 - RNA, 19 nt, Artificial Sequence
  Description of Artificial Sequence: Synthetic oligonucleotide
cucacguaaggauuagaac

SEQ ID NO: 431153 - RNA, 19 nt, Artificial Sequence
  Description of Artificial Sequence: Synthetic oligonucleotide
ucacgauuuuggaauuuca

SEQ ID NO: 431154 - RNA, 19 nt, Artificial Sequence
  Description of Artificial Sequence: Synthetic oligonucleotide
acccaaauggauuggacaa

SEQ ID NO: 431155 - RNA, 19 nt, Artificial Sequence
  Description of Artificial Sequence: Synthetic oligonucleotide
accuaugaaaaggacaaca

SEQ ID NO: 431156 - RNA, 19 nt, Artificial Sequence
  Description of Artificial Sequence: Synthetic oligonucleotide
cuacuaguccuucaaggac

SEQ ID NO: 431157 - RNA, 19 nt, Artificial Sequence
  Description of Artificial Sequence: Synthetic oligonucleotide
auaugaggacauuuugccu

SEQ ID NO: 431158 - RNA, 19 nt, Artificial Sequence
  Description of Artificial Sequence: Synthetic oligonucleotide
uauuaguaucauccaggac

SEQ ID NO: 431159 - RNA, 19 nt, Artificial Sequence
  Description of Artificial Sequence: Synthetic oligonucleotide
acgcaaauguaaagaaccc

SEQ ID NO: 431160 - RNA, 19 nt, Artificial Sequence
  Description of Artificial Sequence: Synthetic oligonucleotide
cccuuaauuuuauaugugg

SEQ ID NO: 431161 - RNA, 19 nt, Artificial Sequence
  Description of Artificial Sequence: Synthetic oligonucleotide
uguuacccaucacaauaug

SEQ ID NO: 431162 - RNA, 19 nt, Artificial Sequence
  Description of Artificial Sequence: Synthetic oligonucleotide
agaccuaugaaaaggacaa

SEQ ID NO: 431163 - RNA, 19 nt, Artificial Sequence
  Description of Artificial Sequence: Synthetic oligonucleotide
caggguguguagauaaaag

SEQ ID NO: 431164 - RNA, 19 nt, Artificial Sequence
  Description of Artificial Sequence: Synthetic oligonucleotide
uuguucgauucuuauucca

SEQ ID NO: 431165 - RNA, 19 nt, Artificial Sequence
  Description of Artificial Sequence: Synthetic oligonucleotide
cagcguucuuaucauagcc

SEQ ID NO: 431166 - RNA, 19 nt, Artificial Sequence
  Description of Artificial Sequence: Synthetic oligonucleotide
uacacaguaauggacguua

SEQ ID NO: 431167 - RNA, 19 nt, Artificial Sequence
  Description of Artificial Sequence: Synthetic oligonucleotide
uggugugauagaauugauc

SEQ ID NO: 431168 - RNA, 19 nt, Artificial Sequence
  Description of Artificial Sequence: Synthetic oligonucleotide
cugcaauaauucaugugac

SEQ ID NO: 431169 - RNA, 19 nt, Artificial Sequence
  Description of Artificial Sequence: Synthetic oligonucleotide
acugaucacgauuuuggaa

SEQ ID NO: 431170 - RNA, 19 nt, Artificial Sequence
  Description of Artificial Sequence: Synthetic oligonucleotide
caauuauuaguuuauuagu

SEQ ID NO: 431171 - RNA, 19 nt, Artificial Sequence
  Description of Artificial Sequence: Synthetic oligonucleotide
guauaagcugcaucaaaga

SEQ ID NO: 431172 - RNA, 19 nt, Artificial Sequence
  Description of Artificial Sequence: Synthetic oligonucleotide
auguggcauaauuuuaaga

SEQ ID NO: 431173 - RNA, 19 nt, Artificial Sequence
  Description of Artificial Sequence: Synthetic oligonucleotide
guuacccaucacaauaugc

SEQ ID NO: 431174 - RNA, 19 nt, Artificial Sequence
  Description of Artificial Sequence: Synthetic oligonucleotide
uuugugcugugcaccaaca

SEQ ID NO: 431175 - RNA, 19 nt, Artificial Sequence
  Description of Artificial Sequence: Synthetic oligonucleotide
agagaaugauaaucuacaa

SEQ ID NO: 431176 - RNA, 19 nt, Artificial Sequence
  Description of Artificial Sequence: Synthetic oligonucleotide
aucacgauuuuggaauuuc

SEQ ID NO: 431177 - RNA, 19 nt, Artificial Sequence
  Description of Artificial Sequence: Synthetic oligonucleotide
ucguauaagcugcaucaaa

SEQ ID NO: 431178 - RNA, 19 nt, Artificial Sequence
  Description of Artificial Sequence: Synthetic oligonucleotide
auagccuucgcuaggacca

SEQ ID NO: 431179 - RNA, 19 nt, Artificial Sequence
  Description of Artificial Sequence: Synthetic oligonucleotide
aacguacguccccauauau

SEQ ID NO: 431180 - RNA, 19 nt, Artificial Sequence
  Description of Artificial Sequence: Synthetic oligonucleotide
uaguggcuauugaaaauac

SEQ ID NO: 431181 - RNA, 19 nt, Artificial Sequence
  Description of Artificial Sequence: Synthetic oligonucleotide
caauaugcaggguguguag

SEQ ID NO: 431182 - RNA, 19 nt, Artificial Sequence
  Description of Artificial Sequence: Synthetic oligonucleotide
uucaacuauggaugaaaau

SEQ ID NO: 431183 - RNA, 19 nt, Artificial Sequence
  Description of Artificial Sequence: Synthetic oligonucleotide
uucgguaguguguuaacua

SEQ ID NO: 431184 - RNA, 19 nt, Artificial Sequence
  Description of Artificial Sequence: Synthetic oligonucleotide
cuaucucuuauccaacuga

SEQ ID NO: 431185 - RNA, 19 nt, Artificial Sequence
  Description of Artificial Sequence: Synthetic oligonucleotide
aauugccaaauuguucccu

SEQ ID NO: 431186 - RNA, 19 nt, Artificial Sequence
  Description of Artificial Sequence: Synthetic oligonucleotide
cagcuaacuauacgaaaag

SEQ ID NO: 431187 - RNA, 19 nt, Artificial Sequence
  Description of Artificial Sequence: Synthetic oligonucleotide
uaaaaggagugaguugugu

SEQ ID NO: 431188 - RNA, 19 nt, Artificial Sequence
  Description of Artificial Sequence: Synthetic oligonucleotide
caaaagcguguaaaauuac

SEQ ID NO: 431189 - RNA, 19 nt, Artificial Sequence
  Description of Artificial Sequence: Synthetic oligonucleotide
gaugaaaauguuacccauc

SEQ ID NO: 431190 - RNA, 19 nt, Artificial Sequence
  Description of Artificial Sequence: Synthetic oligonucleotide
ucgauucuuauuccauggu

SEQ ID NO: 431191 - RNA, 19 nt, Artificial Sequence
  Description of Artificial Sequence: Synthetic oligonucleotide
aauauacccuuaauuuuau

SEQ ID NO: 431192 - RNA, 19 nt, Artificial Sequence
  Description of Artificial Sequence: Synthetic oligonucleotide
aggacagggcuaucuaaag

SEQ ID NO: 431193 - RNA, 19 nt, Artificial Sequence
  Description of Artificial Sequence: Synthetic oligonucleotide
agaguccucacguaaggau

SEQ ID NO: 431194 - RNA, 19 nt, Artificial Sequence
  Description of Artificial Sequence: Synthetic oligonucleotide
uaacuaauuuugugcugug

SEQ ID NO: 431195 - RNA, 19 nt, Artificial Sequence
  Description of Artificial Sequence: Synthetic oligonucleotide
uccagcuaacuauacgaaa

SEQ ID NO: 431196 - RNA, 19 nt, Artificial Sequence
  Description of Artificial Sequence: Synthetic oligonucleotide
ucgguaguguguuaacuau

SEQ ID NO: 431197 - RNA, 19 nt, Artificial Sequence
  Description of Artificial Sequence: Synthetic oligonucleotide
aaauuacaagaacgacuau

SEQ ID NO: 431198 - RNA, 19 nt, Artificial Sequence
  Description of Artificial Sequence: Synthetic oligonucleotide
gacgacaaagccuccucac

SEQ ID NO: 431199 - RNA, 19 nt, Artificial Sequence
  Description of Artificial Sequence: Synthetic oligonucleotide
agaagcauucagaauguca

SEQ ID NO: 431200 - RNA, 19 nt, Artificial Sequence
  Description of Artificial Sequence: Synthetic oligonucleotide
uguguagauaaaagcuuuu

SEQ ID NO: 431201 - RNA, 19 nt, Artificial Sequence
  Description of Artificial Sequence: Synthetic oligonucleotide
acaaaucacaauguaggaa

SEQ ID NO: 431202 - RNA, 19 nt, Artificial Sequence
  Description of Artificial Sequence: Synthetic oligonucleotide
auaacaaacagcacuccau

SEQ ID NO: 431203 - RNA, 19 nt, Artificial Sequence
  Description of Artificial Sequence: Synthetic oligonucleotide
uuaagaaaagcuggcucaa

SEQ ID NO: 431204 - RNA, 19 nt, Artificial Sequence
  Description of Artificial Sequence: Synthetic oligonucleotide
acgacuauuuuaaaacacu

SEQ ID NO: 431205 - RNA, 19 nt, Artificial Sequence
  Description of Artificial Sequence: Synthetic oligonucleotide
agugaguuguguacagggg

SEQ ID NO: 431206 - RNA, 19 nt, Artificial Sequence
  Description of Artificial Sequence: Synthetic oligonucleotide
caugacuaaugaguuuggg

SEQ ID NO: 431207 - RNA, 19 nt, Artificial Sequence
  Description of Artificial Sequence: Synthetic oligonucleotide
caguaauggacguuaagaa

SEQ ID NO: 431208 - RNA, 19 nt, Artificial Sequence
  Description of Artificial Sequence: Synthetic oligonucleotide
aacaaaucuuacacagccu

SEQ ID NO: 431209 - RNA, 19 nt, Artificial Sequence
  Description of Artificial Sequence: Synthetic oligonucleotide
aucacaauaugcagggugu

SEQ ID NO: 431210 - RNA, 19 nt, Artificial Sequence
  Description of Artificial Sequence: Synthetic oligonucleotide
aggagugaguuguguacag

SEQ ID NO: 431211 - RNA, 19 nt, Artificial Sequence
  Description of Artificial Sequence: Synthetic oligonucleotide
aagcucacgcuuuucuuua

SEQ ID NO: 431212 - RNA, 19 nt, Artificial Sequence
  Description of Artificial Sequence: Synthetic oligonucleotide
auguacuaucucuuaucca

SEQ ID NO: 431213 - RNA, 19 nt, Artificial Sequence
  Description of Artificial Sequence: Synthetic oligonucleotide
acagaacaauuauuuucgu

SEQ ID NO: 431214 - RNA, 19 nt, Artificial Sequence
  Description of Artificial Sequence: Synthetic oligonucleotide
aaaagcuggcucaacuaau

SEQ ID NO: 431215 - RNA, 19 nt, Artificial Sequence
  Description of Artificial Sequence: Synthetic oligonucleotide
aaagacaacugaagaugga

SEQ ID NO: 431216 - RNA, 19 nt, Artificial Sequence
  Description of Artificial Sequence: Synthetic oligonucleotide
cugaucacgauuuuggaau

SEQ ID NO: 431217 - RNA, 19 nt, Artificial Sequence
  Description of Artificial Sequence: Synthetic oligonucleotide
agauuguucgauucuuauu

SEQ ID NO: 431218 - RNA, 19 nt, Artificial Sequence
  Description of Artificial Sequence: Synthetic oligonucleotide
uuauccaacugaucacgau

SEQ ID NO: 431219 - RNA, 19 nt, Artificial Sequence
  Description of Artificial Sequence: Synthetic oligonucleotide
gcuauugaaaauaccacca

SEQ ID NO: 431220 - RNA, 19 nt, Artificial Sequence
  Description of Artificial Sequence: Synthetic oligonucleotide
uccccauauauaacuaauu

SEQ ID NO: 431221 - RNA, 19 nt, Artificial Sequence
  Description of Artificial Sequence: Synthetic oligonucleotide
agcuggcucaacuaauuaa

SEQ ID NO: 431222 - RNA, 19 nt, Artificial Sequence
  Description of Artificial Sequence: Synthetic oligonucleotide
auguaacugccauuacaca

SEQ ID NO: 431223 - RNA, 19 nt, Artificial Sequence
  Description of Artificial Sequence: Synthetic oligonucleotide
cagucaaguuuccugagca

SEQ ID NO: 431224 - RNA, 19 nt, Artificial Sequence
  Description of Artificial Sequence: Synthetic oligonucleotide
gugugauagaauugaucac

SEQ ID NO: 431225 - RNA, 19 nt, Artificial Sequence
  Description of Artificial Sequence: Synthetic oligonucleotide
gguacuaauaugcaaaguu

SEQ ID NO: 431226 - RNA, 19 nt, Artificial Sequence
  Description of Artificial Sequence: Synthetic oligonucleotide
aauccuguauuuagauaga

SEQ ID NO: 431227 - RNA, 19 nt, Artificial Sequence
  Description of Artificial Sequence: Synthetic oligonucleotide
agccuuacauuucaauuuu

SEQ ID NO: 431228 - RNA, 19 nt, Artificial Sequence
  Description of Artificial Sequence: Synthetic oligonucleotide
uucuuauuccaugguguga

SEQ ID NO: 431229 - RNA, 19 nt, Artificial Sequence
  Description of Artificial Sequence: Synthetic oligonucleotide
cagacuguaccaggcaagg

SEQ ID NO: 431230 - RNA, 19 nt, Artificial Sequence
  Description of Artificial Sequence: Synthetic oligonucleotide
ugcugugcaccaacaagaa

SEQ ID NO: 431231 - RNA, 19 nt, Artificial Sequence
  Description of Artificial Sequence: Synthetic oligonucleotide
agcuaacuauacgaaaaga

SEQ ID NO: 431232 - RNA, 19 nt, Artificial Sequence
  Description of Artificial Sequence: Synthetic oligonucleotide
acuccaucacaaaagcgug

SEQ ID NO: 431233 - RNA, 19 nt, Artificial Sequence
  Description of Artificial Sequence: Synthetic oligonucleotide
caaauggauuggacaacug

SEQ ID NO: 431234 - RNA, 19 nt, Artificial Sequence
  Description of Artificial Sequence: Synthetic oligonucleotide
aagaguccucacguaagga

SEQ ID NO: 431235 - RNA, 19 nt, Artificial Sequence
  Description of Artificial Sequence: Synthetic oligonucleotide
guaccaggcaagguuagug

SEQ ID NO: 431236 - RNA, 19 nt, Artificial Sequence
  Description of Artificial Sequence: Synthetic oligonucleotide
auugccaaauuguucccua

SEQ ID NO: 431237 - RNA, 19 nt, Artificial Sequence
  Description of Artificial Sequence: Synthetic oligonucleotide
aguuugcacaaagaaugca

SEQ ID NO: 431238 - RNA, 19 nt, Artificial Sequence
  Description of Artificial Sequence: Synthetic oligonucleotide
agacgacaaagccuccuca

SEQ ID NO: 431239 - RNA, 19 nt, Artificial Sequence
  Description of Artificial Sequence: Synthetic oligonucleotide
cuucgcuaggaccaauguc

SEQ ID NO: 431240 - RNA, 19 nt, Artificial Sequence
  Description of Artificial Sequence: Synthetic oligonucleotide
aggacuagcuuccccuuga

SEQ ID NO: 431241 - RNA, 19 nt, Artificial Sequence
  Description of Artificial Sequence: Synthetic oligonucleotide
acgacaaagccuccucacu

SEQ ID NO: 431242 - RNA, 19 nt, Artificial Sequence
  Description of Artificial Sequence: Synthetic oligonucleotide
aaagcuggcucaacuaauu

SEQ ID NO: 431243 - RNA, 19 nt, Artificial Sequence
  Description of Artificial Sequence: Synthetic oligonucleotide
auuccauggugugauagaa

SEQ ID NO: 431244 - RNA, 19 nt, Artificial Sequence
  Description of Artificial Sequence: Synthetic oligonucleotide
aguaucauccaggacucau

SEQ ID NO: 431245 - RNA, 19 nt, Artificial Sequence
  Description of Artificial Sequence: Synthetic oligonucleotide
uccaucacaaaagcgugua

SEQ ID NO: 431246 - RNA, 19 nt, Artificial Sequence
  Description of Artificial Sequence: Synthetic oligonucleotide
auucgguaguguguuaacu

SEQ ID NO: 431247 - RNA, 19 nt, Artificial Sequence
  Description of Artificial Sequence: Synthetic oligonucleotide
ucacaauaugcagggugug

SEQ ID NO: 431248 - RNA, 19 nt, Artificial Sequence
  Description of Artificial Sequence: Synthetic oligonucleotide
acaugacuaaugaguuugg

SEQ ID NO: 431249 - RNA, 19 nt, Artificial Sequence
  Description of Artificial Sequence: Synthetic oligonucleotide
agcaaaggacuagcuuccc

SEQ ID NO: 431250 - RNA, 19 nt, Artificial Sequence
  Description of Artificial Sequence: Synthetic oligonucleotide
ugaucacucucaguuuugu

SEQ ID NO: 431251 - RNA, 19 nt, Artificial Sequence
  Description of Artificial Sequence: Synthetic oligonucleotide
cuuauccaacugaucacga

SEQ ID NO: 431252 - RNA, 19 nt, Artificial Sequence
  Description of Artificial Sequence: Synthetic oligonucleotide
guaaagaacccaugucaaa

SEQ ID NO: 431253 - RNA, 19 nt, Artificial Sequence
  Description of Artificial Sequence: Synthetic oligonucleotide
aacuauggaugaaaauguu

SEQ ID NO: 431254 - RNA, 19 nt, Artificial Sequence
  Description of Artificial Sequence: Synthetic oligonucleotide
agagugguauucaguuaac

SEQ ID NO: 431255 - RNA, 19 nt, Artificial Sequence
  Description of Artificial Sequence: Synthetic oligonucleotide
uaacguacguccccauaua

SEQ ID NO: 431256 - RNA, 19 nt, Artificial Sequence
  Description of Artificial Sequence: Synthetic oligonucleotide
acaauaugcagggugugua

SEQ ID NO: 431257 - RNA, 19 nt, Artificial Sequence
  Description of Artificial Sequence: Synthetic oligonucleotide
cauucgguaguguguuaac

SEQ ID NO: 431258 - RNA, 19 nt, Artificial Sequence
  Description of Artificial Sequence: Synthetic oligonucleotide
acuaguccuucaaggacag

SEQ ID NO: 431259 - RNA, 19 nt, Artificial Sequence
  Description of Artificial Sequence: Synthetic oligonucleotide
ucgcuaggaccaaugucac

SEQ ID NO: 431260 - RNA, 19 nt, Artificial Sequence
  Description of Artificial Sequence: Synthetic oligonucleotide
guaucauccaggacucaug

SEQ ID NO: 431261 - RNA, 19 nt, Artificial Sequence
  Description of Artificial Sequence: Synthetic oligonucleotide
acgaaaagaaacacugcaa

SEQ ID NO: 431262 - RNA, 19 nt, Artificial Sequence
  Description of Artificial Sequence: Synthetic oligonucleotide
uaagaaaagcuggcucaac

SEQ ID NO: 431263 - RNA, 19 nt, Artificial Sequence
  Description of Artificial Sequence: Synthetic oligonucleotide
cacgauuuuggaauuucaa

SEQ ID NO: 431264 - RNA, 19 nt, Artificial Sequence
  Description of Artificial Sequence: Synthetic oligonucleotide
cuuacacagccuuacauuu

SEQ ID NO: 431265 - RNA, 19 nt, Artificial Sequence
  Description of Artificial Sequence: Synthetic oligonucleotide
uuuucgcugcaucggguuu

SEQ ID NO: 431266 - RNA, 19 nt, Artificial Sequence
  Description of Artificial Sequence: Synthetic oligonucleotide
agguuaguggcuauugaaa

SEQ ID NO: 431267 - RNA, 19 nt, Artificial Sequence
  Description of Artificial Sequence: Synthetic oligonucleotide
ggcgcugucucuauggagc

SEQ ID NO: 431268 - RNA, 19 nt, Artificial Sequence
  Description of Artificial Sequence: Synthetic oligonucleotide
acccuuaauuuuauaugug

SEQ ID NO: 431269 - RNA, 19 nt, Artificial Sequence
  Description of Artificial Sequence: Synthetic oligonucleotide
cuguaccaggcaagguuag

SEQ ID NO: 431270 - RNA, 19 nt, Artificial Sequence
  Description of Artificial Sequence: Synthetic oligonucleotide
acauucgguaguguguuaa

SEQ ID NO: 431271 - RNA, 19 nt, Artificial Sequence
  Description of Artificial Sequence: Synthetic oligonucleotide
caauggcugugagagcggg

SEQ ID NO: 431272 - RNA, 19 nt, Artificial Sequence
  Description of Artificial Sequence: Synthetic oligonucleotide
cguguaaaauuacaagaac

SEQ ID NO: 431273 - RNA, 19 nt, Artificial Sequence
  Description of Artificial Sequence: Synthetic oligonucleotide
uuuuaagcucacgcuuuuc

SEQ ID NO: 431274 - RNA, 19 nt, Artificial Sequence
  Description of Artificial Sequence: Synthetic oligonucleotide
gagugguauucaguuaaca

SEQ ID NO: 431275 - RNA, 19 nt, Artificial Sequence
  Description of Artificial Sequence: Synthetic oligonucleotide
aagacacauucgguagugu

SEQ ID NO: 431276 - RNA, 19 nt, Artificial Sequence
  Description of Artificial Sequence: Synthetic oligonucleotide
uugucacaugguuuaugua

SEQ ID NO: 431277 - RNA, 19 nt, Artificial Sequence
  Description of Artificial Sequence: Synthetic oligonucleotide
gucaacaaaacagcugcaa

SEQ ID NO: 431278 - RNA, 19 nt, Artificial Sequence
  Description of Artificial Sequence: Synthetic oligonucleotide
ggauuagaacacaauuuuc

SEQ ID NO: 431279 - RNA, 19 nt, Artificial Sequence
  Description of Artificial Sequence: Synthetic oligonucleotide
agucgcccagugcccgucc

SEQ ID NO: 431280 - RNA, 19 nt, Artificial Sequence
  Description of Artificial Sequence: Synthetic oligonucleotide
auauggcagucuuguauuu

SEQ ID NO: 431281 - RNA, 19 nt, Artificial Sequence
  Description of Artificial Sequence: Synthetic oligonucleotide
guacuaucucuuauccaac

SEQ ID NO: 431282 - RNA, 19 nt, Artificial Sequence
  Description of Artificial Sequence: Synthetic oligonucleotide
cuauggagcucaauguacu

SEQ ID NO: 431283 - RNA, 19 nt, Artificial Sequence
  Description of Artificial Sequence: Synthetic oligonucleotide
auguuacccaucacaauau

SEQ ID NO: 431284 - RNA, 19 nt, Artificial Sequence
  Description of Artificial Sequence: Synthetic oligonucleotide
acuguaccaggcaagguua

SEQ ID NO: 431285 - RNA, 19 nt, Artificial Sequence
  Description of Artificial Sequence: Synthetic oligonucleotide
acacauucgguaguguguu

SEQ ID NO: 431286 - RNA, 19 nt, Artificial Sequence
  Description of Artificial Sequence: Synthetic oligonucleotide
cccuaaacugcuaagcaga

SEQ ID NO: 431287 - RNA, 19 nt, Artificial Sequence
  Description of Artificial Sequence: Synthetic oligonucleotide
guuaguggcuauugaaaau

SEQ ID NO: 431288 - RNA, 19 nt, Artificial Sequence
  Description of Artificial Sequence: Synthetic oligonucleotide
cacuggcacuuuaagagaa

SEQ ID NO: 431289 - RNA, 19 nt, Artificial Sequence
  Description of Artificial Sequence: Synthetic oligonucleotide
guuugcacaaagaaugcau

SEQ ID NO: 431290 - RNA, 19 nt, Artificial Sequence
  Description of Artificial Sequence: Synthetic oligonucleotide
ccagcuaacuauacgaaaa

SEQ ID NO: 431291 - RNA, 19 nt, Artificial Sequence
  Description of Artificial Sequence: Synthetic oligonucleotide
gccagcguucuuaucauag

SEQ ID NO: 431292 - RNA, 19 nt, Artificial Sequence
  Description of Artificial Sequence: Synthetic oligonucleotide
auauacccuuaauuuuaua

SEQ ID NO: 431293 - RNA, 19 nt, Artificial Sequence
  Description of Artificial Sequence: Synthetic oligonucleotide
accuuaacguacgucccca

SEQ ID NO: 431294 - RNA, 19 nt, Artificial Sequence
  Description of Artificial Sequence: Synthetic oligonucleotide
gacuagcuuccccuugaga

SEQ ID NO: 431295 - RNA, 19 nt, Artificial Sequence
  Description of Artificial Sequence: Synthetic oligonucleotide
guacuaauaugcaaaguuu

SEQ ID NO: 431296 - RNA, 19 nt, Artificial Sequence
  Description of Artificial Sequence: Synthetic oligonucleotide
auccuguauuuagauagau

SEQ ID NO: 431297 - RNA, 19 nt, Artificial Sequence
  Description of Artificial Sequence: Synthetic oligonucleotide
cuggcucaacuaauuaaaa

SEQ ID NO: 431298 - RNA, 19 nt, Artificial Sequence
  Description of Artificial Sequence: Synthetic oligonucleotide
ucgcccagugcccguccgg

SEQ ID NO: 431299 - RNA, 19 nt, Artificial Sequence
  Description of Artificial Sequence: Synthetic oligonucleotide
auggauuggacaacuggua

SEQ ID NO: 431300 - RNA, 19 nt, Artificial Sequence
  Description of Artificial Sequence: Synthetic oligonucleotide
agacacuguacaguuuaaa

SEQ ID NO: 431301 - RNA, 19 nt, Artificial Sequence
  Description of Artificial Sequence: Synthetic oligonucleotide
agggcuaucuaaagacaca

SEQ ID NO: 431302 - RNA, 19 nt, Artificial Sequence
  Description of Artificial Sequence: Synthetic oligonucleotide
auuuucguauaagcugcau

SEQ ID NO: 431303 - RNA, 19 nt, Artificial Sequence
  Description of Artificial Sequence: Synthetic oligonucleotide
gcaagguuaguggcuauug

SEQ ID NO: 431304 - RNA, 19 nt, Artificial Sequence
  Description of Artificial Sequence: Synthetic oligonucleotide
acguaaggauuagaacaca

SEQ ID NO: 431305 - RNA, 19 nt, Artificial Sequence
  Description of Artificial Sequence: Synthetic oligonucleotide
cuccagcuaacuauacgaa

SEQ ID NO: 431306 - RNA, 19 nt, Artificial Sequence
  Description of Artificial Sequence: Synthetic oligonucleotide
cucacgcuuuucuuuaaua

SEQ ID NO: 431307 - RNA, 19 nt, Artificial Sequence
  Description of Artificial Sequence: Synthetic oligonucleotide
gcguguaaaauuacaagaa

SEQ ID NO: 431308 - RNA, 19 nt, Artificial Sequence
  Description of Artificial Sequence: Synthetic oligonucleotide
uuacacaguaauggacguu

SEQ ID NO: 431309 - RNA, 19 nt, Artificial Sequence
  Description of Artificial Sequence: Synthetic oligonucleotide
guaggaaaauauacccuua

SEQ ID NO: 431310 - RNA, 19 nt, Artificial Sequence
  Description of Artificial Sequence: Synthetic oligonucleotide
ggacagggcuaucuaaaga

SEQ ID NO: 431311 - RNA, 19 nt, Artificial Sequence
  Description of Artificial Sequence: Synthetic oligonucleotide
cagccuuacauuucaauuu

SEQ ID NO: 431312 - RNA, 19 nt, Artificial Sequence
  Description of Artificial Sequence: Synthetic oligonucleotide
uuucgcugcaucggguuuu

SEQ ID NO: 431313 - RNA, 19 nt, Artificial Sequence
  Description of Artificial Sequence: Synthetic oligonucleotide
guauuuacuuagaagcauu

SEQ ID NO: 431314 - RNA, 19 nt, Artificial Sequence
  Description of Artificial Sequence: Synthetic oligonucleotide
ccagcguucuuaucauagc

SEQ ID NO: 431315 - RNA, 19 nt, Artificial Sequence
  Description of Artificial Sequence: Synthetic oligonucleotide
ggacucauguucaguauuc

SEQ ID NO: 431316 - RNA, 19 nt, Artificial Sequence
  Description of Artificial Sequence: Synthetic oligonucleotide
ugcccguccggcucgcgcu

SEQ ID NO: 431317 - RNA, 19 nt, Artificial Sequence
  Description of Artificial Sequence: Synthetic oligonucleotide
aaccugcuuuaaauuucca

SEQ ID NO: 431318 - RNA, 19 nt, Artificial Sequence
  Description of Artificial Sequence: Synthetic oligonucleotide
cguacguccccauauauaa

SEQ ID NO: 431319 - RNA, 19 nt, Artificial Sequence
  Description of Artificial Sequence: Synthetic oligonucleotide
gcuggcucaacuaauuaaa

SEQ ID NO: 431320 - RNA, 19 nt, Artificial Sequence
  Description of Artificial Sequence: Synthetic oligonucleotide
gcaaauguaaagaacccau

SEQ ID NO: 431321 - RNA, 19 nt, Artificial Sequence
  Description of Artificial Sequence: Synthetic oligonucleotide
gugagagcgggagccagac

SEQ ID NO: 431322 - RNA, 19 nt, Artificial Sequence
  Description of Artificial Sequence: Synthetic oligonucleotide
cuugccccggcgcugucuc

SEQ ID NO: 431323 - RNA, 19 nt, Artificial Sequence
  Description of Artificial Sequence: Synthetic oligonucleotide
ccucacguaaggauuagaa

SEQ ID NO: 431324 - RNA, 19 nt, Artificial Sequence
  Description of Artificial Sequence: Synthetic oligonucleotide
cuuaacguacguccccaua

SEQ ID NO: 431325 - RNA, 19 nt, Artificial Sequence
  Description of Artificial Sequence: Synthetic oligonucleotide
gagccagacgacaaagccu

SEQ ID NO: 431326 - RNA, 19 nt, Artificial Sequence
  Description of Artificial Sequence: Synthetic oligonucleotide
guacguccccauauauaac

SEQ ID NO: 431327 - RNA, 19 nt, Artificial Sequence
  Description of Artificial Sequence: Synthetic oligonucleotide
gucaaguuuccugagcaau

SEQ ID NO: 431328 - RNA, 19 nt, Artificial Sequence
  Description of Artificial Sequence: Synthetic oligonucleotide
agacuguaccaggcaaggu

SEQ ID NO: 431329 - RNA, 19 nt, Artificial Sequence
  Description of Artificial Sequence: Synthetic oligonucleotide
uaguaucauccaggacuca

SEQ ID NO: 431330 - RNA, 19 nt, Artificial Sequence
  Description of Artificial Sequence: Synthetic oligonucleotide
ggacuagcuuccccuugag

SEQ ID NO: 431331 - RNA, 19 nt, Artificial Sequence
  Description of Artificial Sequence: Synthetic oligonucleotide
gcaauccuguauuuagaua

SEQ ID NO: 431332 - RNA, 19 nt, Artificial Sequence
  Description of Artificial Sequence: Synthetic oligonucleotide
auuuugugcugugcaccaa

SEQ ID NO: 431333 - RNA, 19 nt, Artificial Sequence
  Description of Artificial Sequence: Synthetic oligonucleotide
gaguccucacguaaggauu

SEQ ID NO: 431334 - RNA, 19 nt, Artificial Sequence
  Description of Artificial Sequence: Synthetic oligonucleotide
cuuauuccauggugugaua

SEQ ID NO: 431335 - RNA, 19 nt, Artificial Sequence
  Description of Artificial Sequence: Synthetic oligonucleotide
ggacguuaagaagaguccu

SEQ ID NO: 431336 - RNA, 19 nt, Artificial Sequence
  Description of Artificial Sequence: Synthetic oligonucleotide
acguacguccccauauaua

SEQ ID NO: 431337 - RNA, 19 nt, Artificial Sequence
  Description of Artificial Sequence: Synthetic oligonucleotide
uucgcugcaucggguuuuc

SEQ ID NO: 431338 - RNA, 19 nt, Artificial Sequence
  Description of Artificial Sequence: Synthetic oligonucleotide
cauguucaguauuccuccu

SEQ ID NO: 431339 - RNA, 19 nt, Artificial Sequence
  Description of Artificial Sequence: Synthetic oligonucleotide
cuccaucacaaaagcgugu

SEQ ID NO: 431340 - RNA, 19 nt, Artificial Sequence
  Description of Artificial Sequence: Synthetic oligonucleotide
gguuuauguacuaucucuu

SEQ ID NO: 431341 - RNA, 19 nt, Artificial Sequence
  Description of Artificial Sequence: Synthetic oligonucleotide
aggcaagguuaguggcuau

SEQ ID NO: 431342 - RNA, 19 nt, Artificial Sequence
  Description of Artificial Sequence: Synthetic oligonucleotide
cacaauaugcagggugugu

SEQ ID NO: 431343 - RNA, 19 nt, Artificial Sequence
  Description of Artificial Sequence: Synthetic oligonucleotide
agccagcguucuuaucaua

SEQ ID NO: 431344 - RNA, 19 nt, Artificial Sequence
  Description of Artificial Sequence: Synthetic oligonucleotide
gcaggguguguagauaaaa

SEQ ID NO: 431345 - RNA, 19 nt, Artificial Sequence
  Description of Artificial Sequence: Synthetic oligonucleotide
gaucacgauuuuggaauuu

SEQ ID NO: 431346 - RNA, 19 nt, Artificial Sequence
  Description of Artificial Sequence: Synthetic oligonucleotide
gcguucuuaucauagccuu

SEQ ID NO: 431347 - RNA, 19 nt, Artificial Sequence
  Description of Artificial Sequence: Synthetic oligonucleotide
gggcuaucuaaagacacau

SEQ ID NO: 431348 - RNA, 19 nt, Artificial Sequence
  Description of Artificial Sequence: Synthetic oligonucleotide
uagccuucgcuaggaccaa

SEQ ID NO: 431349 - RNA, 19 nt, Artificial Sequence
  Description of Artificial Sequence: Synthetic oligonucleotide
ccccauauauaacuaauuu

SEQ ID NO: 431350 - RNA, 19 nt, Artificial Sequence
  Description of Artificial Sequence: Synthetic oligonucleotide
gaaugcauaugaggacauu

SEQ ID NO: 431351 - RNA, 19 nt, Artificial Sequence
  Description of Artificial Sequence: Synthetic oligonucleotide
ccaaauggauuggacaacu

SEQ ID NO: 431352 - RNA, 19 nt, Artificial Sequence
  Description of Artificial Sequence: Synthetic oligonucleotide
cacaugguuuauguacuau

SEQ ID NO: 431353 - RNA, 19 nt, Artificial Sequence
  Description of Artificial Sequence: Synthetic oligonucleotide
cacauucgguaguguguua

SEQ ID NO: 431354 - RNA, 19 nt, Artificial Sequence
  Description of Artificial Sequence: Synthetic oligonucleotide
ucgcugcaucggguuuucc

SEQ ID NO: 431355 - RNA, 19 nt, Artificial Sequence
  Description of Artificial Sequence: Synthetic oligonucleotide
uugccccggcgcugucucu

SEQ ID NO: 431356 - RNA, 19 nt, Artificial Sequence
  Description of Artificial Sequence: Synthetic oligonucleotide
cucggcaaguuugcacaaa

SEQ ID NO: 431357 - RNA, 19 nt, Artificial Sequence
  Description of Artificial Sequence: Synthetic oligonucleotide
cagccagcguucuuaucau

SEQ ID NO: 431358 - RNA, 19 nt, Artificial Sequence
  Description of Artificial Sequence: Synthetic oligonucleotide
cugcaucggguuuuccuuu

SEQ ID NO: 431359 - RNA, 19 nt, Artificial Sequence
  Description of Artificial Sequence: Synthetic oligonucleotide
ccggcucgcgcuugccccg

SEQ ID NO: 431360 - RNA, 19 nt, Artificial Sequence
  Description of Artificial Sequence: Synthetic oligonucleotide
ggagcucaauguacugcaa

SEQ ID NO: 431361 - RNA, 19 nt, Artificial Sequence
  Description of Artificial Sequence: Synthetic oligonucleotide
cguccccauauauaacuaa

SEQ ID NO: 431362 - RNA, 19 nt, Artificial Sequence
  Description of Artificial Sequence: Synthetic oligonucleotide
ccaucacaaaagcguguaa

SEQ ID NO: 431363 - RNA, 19 nt, Artificial Sequence
  Description of Artificial Sequence: Synthetic oligonucleotide
agccuucgcuaggaccaau

SEQ ID NO: 431364 - RNA, 19 nt, Artificial Sequence
  Description of Artificial Sequence: Synthetic oligonucleotide
ggacagacuuucagauugu

SEQ ID NO: 431365 - RNA, 19 nt, Artificial Sequence
  Description of Artificial Sequence: Synthetic oligonucleotide
gcgcugucucuauggagcu

SEQ ID NO: 431366 - RNA, 19 nt, Artificial Sequence
  Description of Artificial Sequence: Synthetic oligonucleotide
cagugcccguccggcucgc

SEQ ID NO: 431367 - RNA, 19 nt, Artificial Sequence
  Description of Artificial Sequence: Synthetic oligonucleotide
ggcuaucuaaagacacauu

SEQ ID NO: 431368 - RNA, 19 nt, Artificial Sequence
  Description of Artificial Sequence: Synthetic oligonucleotide
ggcaagguuaguggcuauu

SEQ ID NO: 431369 - RNA, 19 nt, Artificial Sequence
  Description of Artificial Sequence: Synthetic oligonucleotide
ccguccggcucgcgcuugc

SEQ ID NO: 431370 - RNA, 19 nt, Artificial Sequence
  Description of Artificial Sequence: Synthetic oligonucleotide
ccuuaacguacguccccau

SEQ ID NO: 431371 - RNA, 19 nt, Artificial Sequence
  Description of Artificial Sequence: Synthetic oligonucleotide
aaagauucuaccuuaacac

SEQ ID NO: 431372 - RNA, 19 nt, Artificial Sequence
  Description of Artificial Sequence: Synthetic oligonucleotide
aauagaaucucugugaacc

SEQ ID NO: 431373 - RNA, 19 nt, Artificial Sequence
  Description of Artificial Sequence: Synthetic oligonucleotide
aaaacuagagaccacacac

SEQ ID NO: 431374 - RNA, 19 nt, Artificial Sequence
  Description of Artificial Sequence: Synthetic oligonucleotide
acgaacaacaccuugaccc

SEQ ID NO: 431375 - RNA, 19 nt, Artificial Sequence
  Description of Artificial Sequence: Synthetic oligonucleotide
ugugcuuguagaaugaucg

SEQ ID NO: 431376 - RNA, 19 nt, Artificial Sequence
  Description of Artificial Sequence: Synthetic oligonucleotide
cauagaaccauucacagcg

SEQ ID NO: 431377 - RNA, 19 nt, Artificial Sequence
  Description of Artificial Sequence: Synthetic oligonucleotide
uuuucauuaacucuguggc

SEQ ID NO: 431378 - RNA, 19 nt, Artificial Sequence
  Description of Artificial Sequence: Synthetic oligonucleotide
gaugacagcacuuagucgg

SEQ ID NO: 431379 - RNA, 19 nt, Artificial Sequence
  Description of Artificial Sequence: Synthetic oligonucleotide
aguuuugcaaaccacuucc

SEQ ID NO: 431380 - RNA, 19 nt, Artificial Sequence
  Description of Artificial Sequence: Synthetic oligonucleotide
aauuccaacggcuugaaca

SEQ ID NO: 431381 - RNA, 19 nt, Artificial Sequence
  Description of Artificial Sequence: Synthetic oligonucleotide
aauucaaugaaucgaggag

SEQ ID NO: 431382 - RNA, 19 nt, Artificial Sequence
  Description of Artificial Sequence: Synthetic oligonucleotide
uuaucuaaaauccauugca

SEQ ID NO: 431383 - RNA, 19 nt, Artificial Sequence
  Description of Artificial Sequence: Synthetic oligonucleotide
agcauauugaugcaugugc

SEQ ID NO: 431384 - RNA, 19 nt, Artificial Sequence
  Description of Artificial Sequence: Synthetic oligonucleotide
aaaagauucuaccuuaaca

SEQ ID NO: 431385 - RNA, 19 nt, Artificial Sequence
  Description of Artificial Sequence: Synthetic oligonucleotide
uuuaacaucauauaucaaa

SEQ ID NO: 431386 - RNA, 19 nt, Artificial Sequence
  Description of Artificial Sequence: Synthetic oligonucleotide
ucgaaguucaguaacaagc

SEQ ID NO: 431387 - RNA, 19 nt, Artificial Sequence
  Description of Artificial Sequence: Synthetic oligonucleotide
auuagaugucacuuuagcc

SEQ ID NO: 431388 - RNA, 19 nt, Artificial Sequence
  Description of Artificial Sequence: Synthetic oligonucleotide
auuaucuaaaauccauugc

SEQ ID NO: 431389 - RNA, 19 nt, Artificial Sequence
  Description of Artificial Sequence: Synthetic oligonucleotide
agaauaucaaaccacucac

SEQ ID NO: 431390 - RNA, 19 nt, Artificial Sequence
  Description of Artificial Sequence: Synthetic oligonucleotide
auuguguaaccauagcugc

SEQ ID NO: 431391 - RNA, 19 nt, Artificial Sequence
  Description of Artificial Sequence: Synthetic oligonucleotide
uuugcagacaaauucaaug

SEQ ID NO: 431392 - RNA, 19 nt, Artificial Sequence
  Description of Artificial Sequence: Synthetic oligonucleotide
aauaucaaaccacucacga

SEQ ID NO: 431393 - RNA, 19 nt, Artificial Sequence
  Description of Artificial Sequence: Synthetic oligonucleotide
aauauugaccaauugccug

SEQ ID NO: 431394 - RNA, 19 nt, Artificial Sequence
  Description of Artificial Sequence: Synthetic oligonucleotide
uugaauauagguauagugu

SEQ ID NO: 431395 - RNA, 19 nt, Artificial Sequence
  Description of Artificial Sequence: Synthetic oligonucleotide
agaaagucagcucuagacc

SEQ ID NO: 431396 - RNA, 19 nt, Artificial Sequence
  Description of Artificial Sequence: Synthetic oligonucleotide
aaacccauugaauauaggu

SEQ ID NO: 431397 - RNA, 19 nt, Artificial Sequence
  Description of Artificial Sequence: Synthetic oligonucleotide
ugaauauagguauagugug

SEQ ID NO: 431398 - RNA, 19 nt, Artificial Sequence
  Description of Artificial Sequence: Synthetic oligonucleotide
agugauauccguugagucc

SEQ ID NO: 431399 - RNA, 19 nt, Artificial Sequence
  Description of Artificial Sequence: Synthetic oligonucleotide
ugaguguaaauguucauag

SEQ ID NO: 431400 - RNA, 19 nt, Artificial Sequence
  Description of Artificial Sequence: Synthetic oligonucleotide
uaugcaugaaucuugacau

SEQ ID NO: 431401 - RNA, 19 nt, Artificial Sequence
  Description of Artificial Sequence: Synthetic oligonucleotide
aaaucggacagcaaucccc

SEQ ID NO: 431402 - RNA, 19 nt, Artificial Sequence
  Description of Artificial Sequence: Synthetic oligonucleotide
agaaacuuaaagucucuac

SEQ ID NO: 431403 - RNA, 19 nt, Artificial Sequence
  Description of Artificial Sequence: Synthetic oligonucleotide
uagugcauaaucaggauug

SEQ ID NO: 431404 - RNA, 19 nt, Artificial Sequence
  Description of Artificial Sequence: Synthetic oligonucleotide
agugaaaaugaucaaauau

SEQ ID NO: 431405 - RNA, 19 nt, Artificial Sequence
  Description of Artificial Sequence: Synthetic oligonucleotide
agacuaaaugacuucugcc

SEQ ID NO: 431406 - RNA, 19 nt, Artificial Sequence
  Description of Artificial Sequence: Synthetic oligonucleotide
ucuacuuccaauuagcauu

SEQ ID NO: 431407 - RNA, 19 nt, Artificial Sequence
  Description of Artificial Sequence: Synthetic oligonucleotide
aauacccuuuaaaugagac

SEQ ID NO: 431408 - RNA, 19 nt, Artificial Sequence
  Description of Artificial Sequence: Synthetic oligonucleotide
aaauagaaucucugugaac

SEQ ID NO: 431409 - RNA, 19 nt, Artificial Sequence
  Description of Artificial Sequence: Synthetic oligonucleotide
aaauaguucaagugaucag

SEQ ID NO: 431410 - RNA, 19 nt, Artificial Sequence
  Description of Artificial Sequence: Synthetic oligonucleotide
aucaaauauaauuuuggga

SEQ ID NO: 431411 - RNA, 19 nt, Artificial Sequence
  Description of Artificial Sequence: Synthetic oligonucleotide
auuccaacggcuugaacac

SEQ ID NO: 431412 - RNA, 19 nt, Artificial Sequence
  Description of Artificial Sequence: Synthetic oligonucleotide
ucgugugaaguaaauauug

SEQ ID NO: 431413 - RNA, 19 nt, Artificial Sequence
  Description of Artificial Sequence: Synthetic oligonucleotide
uggcuauuaaaacuaacca

SEQ ID NO: 431414 - RNA, 19 nt, Artificial Sequence
  Description of Artificial Sequence: Synthetic oligonucleotide
aaugagacugguucacauc

SEQ ID NO: 431415 - RNA, 19 nt, Artificial Sequence
  Description of Artificial Sequence: Synthetic oligonucleotide
auugccugugauucaaagc

SEQ ID NO: 431416 - RNA, 19 nt, Artificial Sequence
  Description of Artificial Sequence: Synthetic oligonucleotide
uaauauuggcaaaaccacc

SEQ ID NO: 431417 - RNA, 19 nt, Artificial Sequence
  Description of Artificial Sequence: Synthetic oligonucleotide
ugaaucuugacaucaacuc

SEQ ID NO: 431418 - RNA, 19 nt, Artificial Sequence
  Description of Artificial Sequence: Synthetic oligonucleotide
gagaccacacacuauauac

SEQ ID NO: 431419 - RNA, 19 nt, Artificial Sequence
  Description of Artificial Sequence: Synthetic oligonucleotide
ugaaauagaaguggcaccc

SEQ ID NO: 431420 - RNA, 19 nt, Artificial Sequence
  Description of Artificial Sequence: Synthetic oligonucleotide
aauugccugugauucaaag

SEQ ID NO: 431421 - RNA, 19 nt, Artificial Sequence
  Description of Artificial Sequence: Synthetic oligonucleotide
uggaguauauggcacagca

SEQ ID NO: 431422 - RNA, 19 nt, Artificial Sequence
  Description of Artificial Sequence: Synthetic oligonucleotide
cauuguguaaccauagcug

SEQ ID NO: 431423 - RNA, 19 nt, Artificial Sequence
  Description of Artificial Sequence: Synthetic oligonucleotide
aauauuggcaaaaccacca

SEQ ID NO: 431424 - RNA, 19 nt, Artificial Sequence
  Description of Artificial Sequence: Synthetic oligonucleotide
agaaugugcuuguagaaug

SEQ ID NO: 431425 - RNA, 19 nt, Artificial Sequence
  Description of Artificial Sequence: Synthetic oligonucleotide
aaugaaucgaggagaaguc

SEQ ID NO: 431426 - RNA, 19 nt, Artificial Sequence
  Description of Artificial Sequence: Synthetic oligonucleotide
ugugaaguuuugcaaacca

SEQ ID NO: 431427 - RNA, 19 nt, Artificial Sequence
  Description of Artificial Sequence: Synthetic oligonucleotide
uauaaauuagaugucacuu

SEQ ID NO: 431428 - RNA, 19 nt, Artificial Sequence
  Description of Artificial Sequence: Synthetic oligonucleotide
aagauucuaccuuaacaca

SEQ ID NO: 431429 - RNA, 19 nt, Artificial Sequence
  Description of Artificial Sequence: Synthetic oligonucleotide
agagagaugcaaauaauuc

SEQ ID NO: 431430 - RNA, 19 nt, Artificial Sequence
  Description of Artificial Sequence: Synthetic oligonucleotide
aaugguacuuuacaugcaa

SEQ ID NO: 431431 - RNA, 19 nt, Artificial Sequence
  Description of Artificial Sequence: Synthetic oligonucleotide
agucucaacagagaaaguc

SEQ ID NO: 431432 - RNA, 19 nt, Artificial Sequence
  Description of Artificial Sequence: Synthetic oligonucleotide
auuguuaguuaccccaguc

SEQ ID NO: 431433 - RNA, 19 nt, Artificial Sequence
  Description of Artificial Sequence: Synthetic oligonucleotide
aaagugaaaaugaucaaau

SEQ ID NO: 431434 - RNA, 19 nt, Artificial Sequence
  Description of Artificial Sequence: Synthetic oligonucleotide
auacucgucaaacaguugu

SEQ ID NO: 431435 - RNA, 19 nt, Artificial Sequence
  Description of Artificial Sequence: Synthetic oligonucleotide
aaagcuaaucaacaacaaa

SEQ ID NO: 431436 - RNA, 19 nt, Artificial Sequence
  Description of Artificial Sequence: Synthetic oligonucleotide
aacucgcucuucuugagug

SEQ ID NO: 431437 - RNA, 19 nt, Artificial Sequence
  Description of Artificial Sequence: Synthetic oligonucleotide
gggauuucuauucacaaag

SEQ ID NO: 431438 - RNA, 19 nt, Artificial Sequence
  Description of Artificial Sequence: Synthetic oligonucleotide
cauucaucuaaugagugcc

SEQ ID NO: 431439 - RNA, 19 nt, Artificial Sequence
  Description of Artificial Sequence: Synthetic oligonucleotide
uuaacacaguuucagguaa

SEQ ID NO: 431440 - RNA, 19 nt, Artificial Sequence
  Description of Artificial Sequence: Synthetic oligonucleotide
uuuauucccauuguagccc

SEQ ID NO: 431441 - RNA, 19 nt, Artificial Sequence
  Description of Artificial Sequence: Synthetic oligonucleotide
uucauauaguauaagcuuu

SEQ ID NO: 431442 - RNA, 19 nt, Artificial Sequence
  Description of Artificial Sequence: Synthetic oligonucleotide
gagagaugcaaauaauuca

SEQ ID NO: 431443 - RNA, 19 nt, Artificial Sequence
  Description of Artificial Sequence: Synthetic oligonucleotide
auaggaguugcuauugggc

SEQ ID NO: 431444 - RNA, 19 nt, Artificial Sequence
  Description of Artificial Sequence: Synthetic oligonucleotide
uggcaaaaccaccaugcgg

SEQ ID NO: 431445 - RNA, 19 nt, Artificial Sequence
  Description of Artificial Sequence: Synthetic oligonucleotide
aaucgaggagaagucauuc

SEQ ID NO: 431446 - RNA, 19 nt, Artificial Sequence
  Description of Artificial Sequence: Synthetic oligonucleotide
cacagcgaucuuuaaaugg

SEQ ID NO: 431447 - RNA, 19 nt, Artificial Sequence
  Description of Artificial Sequence: Synthetic oligonucleotide
aaugcagugccaccaggag

SEQ ID NO: 431448 - RNA, 19 nt, Artificial Sequence
  Description of Artificial Sequence: Synthetic oligonucleotide
uaucuaaaauccauugcaa

SEQ ID NO: 431449 - RNA, 19 nt, Artificial Sequence
  Description of Artificial Sequence: Synthetic oligonucleotide
ugucauucgaaguucagua

SEQ ID NO: 431450 - RNA, 19 nt, Artificial Sequence
  Description of Artificial Sequence: Synthetic oligonucleotide
aguauaagcuuuaauauau

SEQ ID NO: 431451 - RNA, 19 nt, Artificial Sequence
  Description of Artificial Sequence: Synthetic oligonucleotide
uugagcauauugaugcaug

SEQ ID NO: 431452 - RNA, 19 nt, Artificial Sequence
  Description of Artificial Sequence: Synthetic oligonucleotide
aaaauacccuuuaaaugag

SEQ ID NO: 431453 - RNA, 19 nt, Artificial Sequence
  Description of Artificial Sequence: Synthetic oligonucleotide
uuagccauuguuaguuacc

SEQ ID NO: 431454 - RNA, 19 nt, Artificial Sequence
  Description of Artificial Sequence: Synthetic oligonucleotide
acaagaguacuuccacccc

SEQ ID NO: 431455 - RNA, 19 nt, Artificial Sequence
  Description of Artificial Sequence: Synthetic oligonucleotide
uguaccaugucugaaucug

SEQ ID NO: 431456 - RNA, 19 nt, Artificial Sequence
  Description of Artificial Sequence: Synthetic oligonucleotide
cauaggaguugcuauuggg

SEQ ID NO: 431457 - RNA, 19 nt, Artificial Sequence
  Description of Artificial Sequence: Synthetic oligonucleotide
ugcaaauaauucauauagu

SEQ ID NO: 431458 - RNA, 19 nt, Artificial Sequence
  Description of Artificial Sequence: Synthetic oligonucleotide
uugaucugaggcugaauag

SEQ ID NO: 431459 - RNA, 19 nt, Artificial Sequence
  Description of Artificial Sequence: Synthetic oligonucleotide
gaaacuuaaagucucuacu

SEQ ID NO: 431460 - RNA, 19 nt, Artificial Sequence
  Description of Artificial Sequence: Synthetic oligonucleotide
aaaugagacugguucacau

SEQ ID NO: 431461 - RNA, 19 nt, Artificial Sequence
  Description of Artificial Sequence: Synthetic oligonucleotide
uaaugagugccaaagcaau

SEQ ID NO: 431462 - RNA, 19 nt, Artificial Sequence
  Description of Artificial Sequence: Synthetic oligonucleotide
uaaauguucauagaaccau

SEQ ID NO: 431463 - RNA, 19 nt, Artificial Sequence
  Description of Artificial Sequence: Synthetic oligonucleotide
aguuguaugagggaaggug

SEQ ID NO: 431464 - RNA, 19 nt, Artificial Sequence
  Description of Artificial Sequence: Synthetic oligonucleotide
aauagugcauaaucaggau

SEQ ID NO: 431465 - RNA, 19 nt, Artificial Sequence
  Description of Artificial Sequence: Synthetic oligonucleotide
cuaaccauucaucuaauga

SEQ ID NO: 431466 - RNA, 19 nt, Artificial Sequence
  Description of Artificial Sequence: Synthetic oligonucleotide
aagcacaucuggcguagac

SEQ ID NO: 431467 - RNA, 19 nt, Artificial Sequence
  Description of Artificial Sequence: Synthetic oligonucleotide
auugaucugaggcugaaua

SEQ ID NO: 431468 - RNA, 19 nt, Artificial Sequence
  Description of Artificial Sequence: Synthetic oligonucleotide
agcaauugugaaguuuugc

SEQ ID NO: 431469 - RNA, 19 nt, Artificial Sequence
  Description of Artificial Sequence: Synthetic oligonucleotide
caauagaugcuacaucuug

SEQ ID NO: 431470 - RNA, 19 nt, Artificial Sequence
  Description of Artificial Sequence: Synthetic oligonucleotide
guggcuauuaaaacuaacc

SEQ ID NO: 431471 - RNA, 19 nt, Artificial Sequence
  Description of Artificial Sequence: Synthetic oligonucleotide
uaaaagauuuggaguauau

SEQ ID NO: 431472 - RNA, 19 nt, Artificial Sequence
  Description of Artificial Sequence: Synthetic oligonucleotide
caguauuucuuuacugggg

SEQ ID NO: 431473 - RNA, 19 nt, Artificial Sequence
  Description of Artificial Sequence: Synthetic oligonucleotide
accggaaauaguucaagug

SEQ ID NO: 431474 - RNA, 19 nt, Artificial Sequence
  Description of Artificial Sequence: Synthetic oligonucleotide
aacuagagaccacacacua

SEQ ID NO: 431475 - RNA, 19 nt, Artificial Sequence
  Description of Artificial Sequence: Synthetic oligonucleotide
ugacuaucucauuggacag

SEQ ID NO: 431476 - RNA, 19 nt, Artificial Sequence
  Description of Artificial Sequence: Synthetic oligonucleotide
ugcaugaaucuugacauca

SEQ ID NO: 431477 - RNA, 19 nt, Artificial Sequence
  Description of Artificial Sequence: Synthetic oligonucleotide
agauucuaccuuaacacag

SEQ ID NO: 431478 - RNA, 19 nt, Artificial Sequence
  Description of Artificial Sequence: Synthetic oligonucleotide
uuucauagccacuugugua

SEQ ID NO: 431479 - RNA, 19 nt, Artificial Sequence
  Description of Artificial Sequence: Synthetic oligonucleotide
uauagguauagugugggaa

SEQ ID NO: 431480 - RNA, 19 nt, Artificial Sequence
  Description of Artificial Sequence: Synthetic oligonucleotide
uguggcuuuacacaaucua

SEQ ID NO: 431481 - RNA, 19 nt, Artificial Sequence
  Description of Artificial Sequence: Synthetic oligonucleotide
uuuagccauuguuaguuac

SEQ ID NO: 431482 - RNA, 19 nt, Artificial Sequence
  Description of Artificial Sequence: Synthetic oligonucleotide
uccauucuauacaauaguu

SEQ ID NO: 431483 - RNA, 19 nt, Artificial Sequence
  Description of Artificial Sequence: Synthetic oligonucleotide
agaauaucguuuucauuca

SEQ ID NO: 431484 - RNA, 19 nt, Artificial Sequence
  Description of Artificial Sequence: Synthetic oligonucleotide
uugguaauuuacaggaaua

SEQ ID NO: 431485 - RNA, 19 nt, Artificial Sequence
  Description of Artificial Sequence: Synthetic oligonucleotide
acaguuucagguaagauua

SEQ ID NO: 431486 - RNA, 19 nt, Artificial Sequence
  Description of Artificial Sequence: Synthetic oligonucleotide
augagugccaaagcaauuc

SEQ ID NO: 431487 - RNA, 19 nt, Artificial Sequence
  Description of Artificial Sequence: Synthetic oligonucleotide
ugagugccaaagcaauucc

SEQ ID NO: 431488 - RNA, 19 nt, Artificial Sequence
  Description of Artificial Sequence: Synthetic oligonucleotide
aaccggaaauaguucaagu

SEQ ID NO: 431489 - RNA, 19 nt, Artificial Sequence
  Description of Artificial Sequence: Synthetic oligonucleotide
agucucuacuuccaauuag

SEQ ID NO: 431490 - RNA, 19 nt, Artificial Sequence
  Description of Artificial Sequence: Synthetic oligonucleotide
cauugcaccgaacacauca

SEQ ID NO: 431491 - RNA, 19 nt, Artificial Sequence
  Description of Artificial Sequence: Synthetic oligonucleotide
ucauagaaccauucacagc

SEQ ID NO: 431492 - RNA, 19 nt, Artificial Sequence
  Description of Artificial Sequence: Synthetic oligonucleotide
ucgguuggcugucauagca

SEQ ID NO: 431493 - RNA, 19 nt, Artificial Sequence
  Description of Artificial Sequence: Synthetic oligonucleotide
gaucgugugaaguaaauau

SEQ ID NO: 431494 - RNA, 19 nt, Artificial Sequence
  Description of Artificial Sequence: Synthetic oligonucleotide
ugcuauugggcugaaaagu

SEQ ID NO: 431495 - RNA, 19 nt, Artificial Sequence
  Description of Artificial Sequence: Synthetic oligonucleotide
acaacaccuugacccaugc

SEQ ID NO: 431496 - RNA, 19 nt, Artificial Sequence
  Description of Artificial Sequence: Synthetic oligonucleotide
ugaaucgaggagaagucau

SEQ ID NO: 431497 - RNA, 19 nt, Artificial Sequence
  Description of Artificial Sequence: Synthetic oligonucleotide
aaaccggaaauaguucaag

SEQ ID NO: 431498 - RNA, 19 nt, Artificial Sequence
  Description of Artificial Sequence: Synthetic oligonucleotide
ucauauaguauaagcuuua

SEQ ID NO: 431499 - RNA, 19 nt, Artificial Sequence
  Description of Artificial Sequence: Synthetic oligonucleotide
acuucaucguguuugcaga

SEQ ID NO: 431500 - RNA, 19 nt, Artificial Sequence
  Description of Artificial Sequence: Synthetic oligonucleotide
ucucuacuuccaauuagca

SEQ ID NO: 431501 - RNA, 19 nt, Artificial Sequence
  Description of Artificial Sequence: Synthetic oligonucleotide
auaguucaagugaucaggg

SEQ ID NO: 431502 - RNA, 19 nt, Artificial Sequence
  Description of Artificial Sequence: Synthetic oligonucleotide
uaaucccaagaucugucca

SEQ ID NO: 431503 - RNA, 19 nt, Artificial Sequence
  Description of Artificial Sequence: Synthetic oligonucleotide
uacaugcaauagaacauac

SEQ ID NO: 431504 - RNA, 19 nt, Artificial Sequence
  Description of Artificial Sequence: Synthetic oligonucleotide
auaauucauauaguauaag

SEQ ID NO: 431505 - RNA, 19 nt, Artificial Sequence
  Description of Artificial Sequence: Synthetic oligonucleotide
uucauuaacucuguggcua

SEQ ID NO: 431506 - RNA, 19 nt, Artificial Sequence
  Description of Artificial Sequence: Synthetic oligonucleotide
cacuucaucguguuugcag

SEQ ID NO: 431507 - RNA, 19 nt, Artificial Sequence
  Description of Artificial Sequence: Synthetic oligonucleotide
cagaauaucaaaccacuca

SEQ ID NO: 431508 - RNA, 19 nt, Artificial Sequence
  Description of Artificial Sequence: Synthetic oligonucleotide
auagguauagugugggaaa

SEQ ID NO: 431509 - RNA, 19 nt, Artificial Sequence
  Description of Artificial Sequence: Synthetic oligonucleotide
auugacuaucucauuggac

SEQ ID NO: 431510 - RNA, 19 nt, Artificial Sequence
  Description of Artificial Sequence: Synthetic oligonucleotide
aaccauucaucuaaugagu

SEQ ID NO: 431511 - RNA, 19 nt, Artificial Sequence
  Description of Artificial Sequence: Synthetic oligonucleotide
acaguuguaugagggaagg

SEQ ID NO: 431512 - RNA, 19 nt, Artificial Sequence
  Description of Artificial Sequence: Synthetic oligonucleotide
uccauugcaccgaacacau

SEQ ID NO: 431513 - RNA, 19 nt, Artificial Sequence
  Description of Artificial Sequence: Synthetic oligonucleotide
ugucacuuuagccauuguu

SEQ ID NO: 431514 - RNA, 19 nt, Artificial Sequence
  Description of Artificial Sequence: Synthetic oligonucleotide
ucacgaacaacaccuugac

SEQ ID NO: 431515 - RNA, 19 nt, Artificial Sequence
  Description of Artificial Sequence: Synthetic oligonucleotide
agaaugaucgugugaagua

SEQ ID NO: 431516 - RNA, 19 nt, Artificial Sequence
  Description of Artificial Sequence: Synthetic oligonucleotide
uccacccauaauauuggca

SEQ ID NO: 431517 - RNA, 19 nt, Artificial Sequence
  Description of Artificial Sequence: Synthetic oligonucleotide
uagaagugauauccguuga

SEQ ID NO: 431518 - RNA, 19 nt, Artificial Sequence
  Description of Artificial Sequence: Synthetic oligonucleotide
augauaugcaugaaucuug

SEQ ID NO: 431519 - RNA, 19 nt, Artificial Sequence
  Description of Artificial Sequence: Synthetic oligonucleotide
gaccaauugccugugauuc

SEQ ID NO: 431520 - RNA, 19 nt, Artificial Sequence
  Description of Artificial Sequence: Synthetic oligonucleotide
gaaaucggacagcaauccc

SEQ ID NO: 431521 - RNA, 19 nt, Artificial Sequence
  Description of Artificial Sequence: Synthetic oligonucleotide
agagaugcaaauaauucau

SEQ ID NO: 431522 - RNA, 19 nt, Artificial Sequence
  Description of Artificial Sequence: Synthetic oligonucleotide
gcaaauaauucauauagua

SEQ ID NO: 431523 - RNA, 19 nt, Artificial Sequence
  Description of Artificial Sequence: Synthetic oligonucleotide
uccaacggcuugaacaccu

SEQ ID NO: 431524 - RNA, 19 nt, Artificial Sequence
  Description of Artificial Sequence: Synthetic oligonucleotide
gauugacuaucucauugga

SEQ ID NO: 431525 - RNA, 19 nt, Artificial Sequence
  Description of Artificial Sequence: Synthetic oligonucleotide
agccauuguuaguuacccc

SEQ ID NO: 431526 - RNA, 19 nt, Artificial Sequence
  Description of Artificial Sequence: Synthetic oligonucleotide
uucuauucacaaagcauuu

SEQ ID NO: 431527 - RNA, 19 nt, Artificial Sequence
  Description of Artificial Sequence: Synthetic oligonucleotide
cauauucuggaucaauaga

SEQ ID NO: 431528 - RNA, 19 nt, Artificial Sequence
  Description of Artificial Sequence: Synthetic oligonucleotide
uggccuguguaccaugucu

SEQ ID NO: 431529 - RNA, 19 nt, Artificial Sequence
  Description of Artificial Sequence: Synthetic oligonucleotide
aauagaaguggcacccuga

SEQ ID NO: 431530 - RNA, 19 nt, Artificial Sequence
  Description of Artificial Sequence: Synthetic oligonucleotide
auacccuuuaaaugagacu

SEQ ID NO: 431531 - RNA, 19 nt, Artificial Sequence
  Description of Artificial Sequence: Synthetic oligonucleotide
uagccauuguuaguuaccc

SEQ ID NO: 431532 - RNA, 19 nt, Artificial Sequence
  Description of Artificial Sequence: Synthetic oligonucleotide
ggugaaauagaaguggcac

SEQ ID NO: 431533 - RNA, 19 nt, Artificial Sequence
  Description of Artificial Sequence: Synthetic oligonucleotide
aguuaggugagcccuccug

SEQ ID NO: 431534 - RNA, 19 nt, Artificial Sequence
  Description of Artificial Sequence: Synthetic oligonucleotide
uugaccaauugccugugau

SEQ ID NO: 431535 - RNA, 19 nt, Artificial Sequence
  Description of Artificial Sequence: Synthetic oligonucleotide
agaaucucugugaaccagg

SEQ ID NO: 431536 - RNA, 19 nt, Artificial Sequence
  Description of Artificial Sequence: Synthetic oligonucleotide
cacaguaguuaggugagcc

SEQ ID NO: 431537 - RNA, 19 nt, Artificial Sequence
  Description of Artificial Sequence: Synthetic oligonucleotide
aaacuagagaccacacacu

SEQ ID NO: 431538 - RNA, 19 nt, Artificial Sequence
  Description of Artificial Sequence: Synthetic oligonucleotide
auagaaucucugugaacca

SEQ ID NO: 431539 - RNA, 19 nt, Artificial Sequence
  Description of Artificial Sequence: Synthetic oligonucleotide
aguuaccccagucuaaauu

SEQ ID NO: 431540 - RNA, 19 nt, Artificial Sequence
  Description of Artificial Sequence: Synthetic oligonucleotide
augcaauagaacauaccag

SEQ ID NO: 431541 - RNA, 19 nt, Artificial Sequence
  Description of Artificial Sequence: Synthetic oligonucleotide
uuaguuaccccagucuaaa

SEQ ID NO: 431542 - RNA, 19 nt, Artificial Sequence
  Description of Artificial Sequence: Synthetic oligonucleotide
aucacgccauuguguaacc

SEQ ID NO: 431543 - RNA, 19 nt, Artificial Sequence
  Description of Artificial Sequence: Synthetic oligonucleotide
gaauaucguuuucauucac

SEQ ID NO: 431544 - RNA, 19 nt, Artificial Sequence
  Description of Artificial Sequence: Synthetic oligonucleotide
gggguauucagguaacuug

SEQ ID NO: 431545 - RNA, 19 nt, Artificial Sequence
  Description of Artificial Sequence: Synthetic oligonucleotide
guauagugugggaaaauac

SEQ ID NO: 431546 - RNA, 19 nt, Artificial Sequence
  Description of Artificial Sequence: Synthetic oligonucleotide
auaucaaaccacucacgaa

SEQ ID NO: 431547 - RNA, 19 nt, Artificial Sequence
  Description of Artificial Sequence: Synthetic oligonucleotide
auaccaagaaugugcuugu

SEQ ID NO: 431548 - RNA, 19 nt, Artificial Sequence
  Description of Artificial Sequence: Synthetic oligonucleotide
ugaucaggguugacauagg

SEQ ID NO: 431549 - RNA, 19 nt, Artificial Sequence
  Description of Artificial Sequence: Synthetic oligonucleotide
gacagcacuuagucgguug

SEQ ID NO: 431550 - RNA, 19 nt, Artificial Sequence
  Description of Artificial Sequence: Synthetic oligonucleotide
gcccucauauaauauacag

SEQ ID NO: 431551 - RNA, 19 nt, Artificial Sequence
  Description of Artificial Sequence: Synthetic oligonucleotide
gggucaaauggugaaauag

SEQ ID NO: 431552 - RNA, 19 nt, Artificial Sequence
  Description of Artificial Sequence: Synthetic oligonucleotide
aaucggacagcaauccccu

SEQ ID NO: 431553 - RNA, 19 nt, Artificial Sequence
  Description of Artificial Sequence: Synthetic oligonucleotide
uagacccaggucacuaaug

SEQ ID NO: 431554 - RNA, 19 nt, Artificial Sequence
  Description of Artificial Sequence: Synthetic oligonucleotide
ccugcaagcacaucuggcg

SEQ ID NO: 431555 - RNA, 19 nt, Artificial Sequence
  Description of Artificial Sequence: Synthetic oligonucleotide
auagugugggaaaauacau

SEQ ID NO: 431556 - RNA, 19 nt, Artificial Sequence
  Description of Artificial Sequence: Synthetic oligonucleotide
cuagagaccacacacuaua

SEQ ID NO: 431557 - RNA, 19 nt, Artificial Sequence
  Description of Artificial Sequence: Synthetic oligonucleotide
guagaaugaucgugugaag

SEQ ID NO: 431558 - RNA, 19 nt, Artificial Sequence
  Description of Artificial Sequence: Synthetic oligonucleotide
cuuaacacaguuucaggua

SEQ ID NO: 431559 - RNA, 19 nt, Artificial Sequence
  Description of Artificial Sequence: Synthetic oligonucleotide
agcaaaccggaaauaguuc

SEQ ID NO: 431560 - RNA, 19 nt, Artificial Sequence
  Description of Artificial Sequence: Synthetic oligonucleotide
ugcccucauauaauauaca

SEQ ID NO: 431561 - RNA, 19 nt, Artificial Sequence
  Description of Artificial Sequence: Synthetic oligonucleotide
gaguguaaauguucauaga

SEQ ID NO: 431562 - RNA, 19 nt, Artificial Sequence
  Description of Artificial Sequence: Synthetic oligonucleotide
caagagaagaacucgcucu

SEQ ID NO: 431563 - RNA, 19 nt, Artificial Sequence
  Description of Artificial Sequence: Synthetic oligonucleotide
caucacgccauuguguaac

SEQ ID NO: 431564 - RNA, 19 nt, Artificial Sequence
  Description of Artificial Sequence: Synthetic oligonucleotide
auauagguauaguguggga

SEQ ID NO: 431565 - RNA, 19 nt, Artificial Sequence
  Description of Artificial Sequence: Synthetic oligonucleotide
ugaaucuggcuguccugag

SEQ ID NO: 431566 - RNA, 19 nt, Artificial Sequence
  Description of Artificial Sequence: Synthetic oligonucleotide
ggaugacagcacuuagucg

SEQ ID NO: 431567 - RNA, 19 nt, Artificial Sequence
  Description of Artificial Sequence: Synthetic oligonucleotide
aaugaucgugugaaguaaa

SEQ ID NO: 431568 - RNA, 19 nt, Artificial Sequence
  Description of Artificial Sequence: Synthetic oligonucleotide
caguaacaaacugcaagag

SEQ ID NO: 431569 - RNA, 19 nt, Artificial Sequence
  Description of Artificial Sequence: Synthetic oligonucleotide
aucguguuugcagacaaau

SEQ ID NO: 431570 - RNA, 19 nt, Artificial Sequence
  Description of Artificial Sequence: Synthetic oligonucleotide
uggaugcccucauauaaua

SEQ ID NO: 431571 - RNA, 19 nt, Artificial Sequence
  Description of Artificial Sequence: Synthetic oligonucleotide
caaugaaucgaggagaagu

SEQ ID NO: 431572 - RNA, 19 nt, Artificial Sequence
  Description of Artificial Sequence: Synthetic oligonucleotide
gcauaaucaggauugacua

SEQ ID NO: 431573 - RNA, 19 nt, Artificial Sequence
  Description of Artificial Sequence: Synthetic oligonucleotide
gccauuguuaguuacccca

SEQ ID NO: 431574 - RNA, 19 nt, Artificial Sequence
  Description of Artificial Sequence: Synthetic oligonucleotide
accauucaucuaaugagug

SEQ ID NO: 431575 - RNA, 19 nt, Artificial Sequence
  Description of Artificial Sequence: Synthetic oligonucleotide
ugacuucugccacucugcu

SEQ ID NO: 431576 - RNA, 19 nt, Artificial Sequence
  Description of Artificial Sequence: Synthetic oligonucleotide
cuuccggacucccugcaag

SEQ ID NO: 431577 - RNA, 19 nt, Artificial Sequence
  Description of Artificial Sequence: Synthetic oligonucleotide
auauuggcaaaaccaccau

SEQ ID NO: 431578 - RNA, 19 nt, Artificial Sequence
  Description of Artificial Sequence: Synthetic oligonucleotide
cguguuugcagacaaauuc

SEQ ID NO: 431579 - RNA, 19 nt, Artificial Sequence
  Description of Artificial Sequence: Synthetic oligonucleotide
aaagcagggaaaagacuaa

SEQ ID NO: 431580 - RNA, 19 nt, Artificial Sequence
  Description of Artificial Sequence: Synthetic oligonucleotide
aaugugcuuguagaaugau

SEQ ID NO: 431581 - RNA, 19 nt, Artificial Sequence
  Description of Artificial Sequence: Synthetic oligonucleotide
gaaugaucgugugaaguaa

SEQ ID NO: 431582 - RNA, 19 nt, Artificial Sequence
  Description of Artificial Sequence: Synthetic oligonucleotide
ugaccaauugccugugauu

SEQ ID NO: 431583 - RNA, 19 nt, Artificial Sequence
  Description of Artificial Sequence: Synthetic oligonucleotide
aguauauggcacagcagca

SEQ ID NO: 431584 - RNA, 19 nt, Artificial Sequence
  Description of Artificial Sequence: Synthetic oligonucleotide
augugcuuguagaaugauc

SEQ ID NO: 431585 - RNA, 19 nt, Artificial Sequence
  Description of Artificial Sequence: Synthetic oligonucleotide
gagcauauugaugcaugug

SEQ ID NO: 431586 - RNA, 19 nt, Artificial Sequence
  Description of Artificial Sequence: Synthetic oligonucleotide
uuccacccauaauauuggc

SEQ ID NO: 431587 - RNA, 19 nt, Artificial Sequence
  Description of Artificial Sequence: Synthetic oligonucleotide
cuucaucguguuugcagac

SEQ ID NO: 431588 - RNA, 19 nt, Artificial Sequence
  Description of Artificial Sequence: Synthetic oligonucleotide
acuucuuccauugcaccga

SEQ ID NO: 431589 - RNA, 19 nt, Artificial Sequence
  Description of Artificial Sequence: Synthetic oligonucleotide
uauugaccaauugccugug

SEQ ID NO: 431590 - RNA, 19 nt, Artificial Sequence
  Description of Artificial Sequence: Synthetic oligonucleotide
uucaucuaaugagugccaa

SEQ ID NO: 431591 - RNA, 19 nt, Artificial Sequence
  Description of Artificial Sequence: Synthetic oligonucleotide
aacaacaccuugacccaug

SEQ ID NO: 431592 - RNA, 19 nt, Artificial Sequence
  Description of Artificial Sequence: Synthetic oligonucleotide
uacucgucaaacaguugua

SEQ ID NO: 431593 - RNA, 19 nt, Artificial Sequence
  Description of Artificial Sequence: Synthetic oligonucleotide
uugcaccgaacacaucagu

SEQ ID NO: 431594 - RNA, 19 nt, Artificial Sequence
  Description of Artificial Sequence: Synthetic oligonucleotide
uaccccagucuaaauuuaa

SEQ ID NO: 431595 - RNA, 19 nt, Artificial Sequence
  Description of Artificial Sequence: Synthetic oligonucleotide
ucuagacccaggucacuaa

SEQ ID NO: 431596 - RNA, 19 nt, Artificial Sequence
  Description of Artificial Sequence: Synthetic oligonucleotide
cacgaacaacaccuugacc

SEQ ID NO: 431597 - RNA, 19 nt, Artificial Sequence
  Description of Artificial Sequence: Synthetic oligonucleotide
ugaucgugugaaguaaaua

SEQ ID NO: 431598 - RNA, 19 nt, Artificial Sequence
  Description of Artificial Sequence: Synthetic oligonucleotide
agugccaaagcaauuccaa

SEQ ID NO: 431599 - RNA, 19 nt, Artificial Sequence
  Description of Artificial Sequence: Synthetic oligonucleotide
ucguguuugcagacaaauu

SEQ ID NO: 431600 - RNA, 19 nt, Artificial Sequence
  Description of Artificial Sequence: Synthetic oligonucleotide
agcuaaucccaagaucugu

SEQ ID NO: 431601 - RNA, 19 nt, Artificial Sequence
  Description of Artificial Sequence: Synthetic oligonucleotide
accccagucuaaauuuaac

SEQ ID NO: 431602 - RNA, 19 nt, Artificial Sequence
  Description of Artificial Sequence: Synthetic oligonucleotide
auugcaccgaacacaucag

SEQ ID NO: 431603 - RNA, 19 nt, Artificial Sequence
  Description of Artificial Sequence: Synthetic oligonucleotide
ucugcugacuggguaaaua

SEQ ID NO: 431604 - RNA, 19 nt, Artificial Sequence
  Description of Artificial Sequence: Synthetic oligonucleotide
auucgaaguucaguaacaa

SEQ ID NO: 431605 - RNA, 19 nt, Artificial Sequence
  Description of Artificial Sequence: Synthetic oligonucleotide
gacaagaacagcacaugua

SEQ ID NO: 431606 - RNA, 19 nt, Artificial Sequence
  Description of Artificial Sequence: Synthetic oligonucleotide
acuuagucgguuggcuguc

SEQ ID NO: 431607 - RNA, 19 nt, Artificial Sequence
  Description of Artificial Sequence: Synthetic oligonucleotide
ugcaaaccacuuccaccca

SEQ ID NO: 431608 - RNA, 19 nt, Artificial Sequence
  Description of Artificial Sequence: Synthetic oligonucleotide
agcgaucuuuaaauggcug

SEQ ID NO: 431609 - RNA, 19 nt, Artificial Sequence
  Description of Artificial Sequence: Synthetic oligonucleotide
gucauucgaaguucaguaa

SEQ ID NO: 431610 - RNA, 19 nt, Artificial Sequence
  Description of Artificial Sequence: Synthetic oligonucleotide
guggcuuuacacaaucuaa

SEQ ID NO: 431611 - RNA, 19 nt, Artificial Sequence
  Description of Artificial Sequence: Synthetic oligonucleotide
ggucaaauggugaaauaga

SEQ ID NO: 431612 - RNA, 19 nt, Artificial Sequence
  Description of Artificial Sequence: Synthetic oligonucleotide
cuuucauagccacuugugu

SEQ ID NO: 431613 - RNA, 19 nt, Artificial Sequence
  Description of Artificial Sequence: Synthetic oligonucleotide
uuagucgguuggcugucau

SEQ ID NO: 431614 - RNA, 19 nt, Artificial Sequence
  Description of Artificial Sequence: Synthetic oligonucleotide
ccauugaauauagguauag

SEQ ID NO: 431615 - RNA, 19 nt, Artificial Sequence
  Description of Artificial Sequence: Synthetic oligonucleotide
uuggaguauauggcacagc

SEQ ID NO: 431616 - RNA, 19 nt, Artificial Sequence
  Description of Artificial Sequence: Synthetic oligonucleotide
ugccugugauucaaagcua

SEQ ID NO: 431617 - RNA, 19 nt, Artificial Sequence
  Description of Artificial Sequence: Synthetic oligonucleotide
gugauauccguugaguccu

SEQ ID NO: 431618 - RNA, 19 nt, Artificial Sequence
  Description of Artificial Sequence: Synthetic oligonucleotide
auucaucuaaugagugcca

SEQ ID NO: 431619 - RNA, 19 nt, Artificial Sequence
  Description of Artificial Sequence: Synthetic oligonucleotide
caagaacagcacauguaaa

SEQ ID NO: 431620 - RNA, 19 nt, Artificial Sequence
  Description of Artificial Sequence: Synthetic oligonucleotide
cuccaugaaaucggacagc

SEQ ID NO: 431621 - RNA, 19 nt, Artificial Sequence
  Description of Artificial Sequence: Synthetic oligonucleotide
guuaggugagcccuccugu

SEQ ID NO: 431622 - RNA, 19 nt, Artificial Sequence
  Description of Artificial Sequence: Synthetic oligonucleotide
aucgugugaaguaaauauu

SEQ ID NO: 431623 - RNA, 19 nt, Artificial Sequence
  Description of Artificial Sequence: Synthetic oligonucleotide
agugcauaaucaggauuga

SEQ ID NO: 431624 - RNA, 19 nt, Artificial Sequence
  Description of Artificial Sequence: Synthetic oligonucleotide
gauucuaccuuaacacagu

SEQ ID NO: 431625 - RNA, 19 nt, Artificial Sequence
  Description of Artificial Sequence: Synthetic oligonucleotide
ggguauucagguaacuuga

SEQ ID NO: 431626 - RNA, 19 nt, Artificial Sequence
  Description of Artificial Sequence: Synthetic oligonucleotide
ccauuguuaguuaccccag

SEQ ID NO: 431627 - RNA, 19 nt, Artificial Sequence
  Description of Artificial Sequence: Synthetic oligonucleotide
cauuguagcccauaucgau

SEQ ID NO: 431628 - RNA, 19 nt, Artificial Sequence
  Description of Artificial Sequence: Synthetic oligonucleotide
caaaccggaaauaguucaa

SEQ ID NO: 431629 - RNA, 19 nt, Artificial Sequence
  Description of Artificial Sequence: Synthetic oligonucleotide
acucgucaaacaguuguau

SEQ ID NO: 431630 - RNA, 19 nt, Artificial Sequence
  Description of Artificial Sequence: Synthetic oligonucleotide
ucaucacgccauuguguaa

SEQ ID NO: 431631 - RNA, 19 nt, Artificial Sequence
  Description of Artificial Sequence: Synthetic oligonucleotide
ggucacuaaugucauuauc

SEQ ID NO: 431632 - RNA, 19 nt, Artificial Sequence
  Description of Artificial Sequence: Synthetic oligonucleotide
ugccaguaacaaacugcaa

SEQ ID NO: 431633 - RNA, 19 nt, Artificial Sequence
  Description of Artificial Sequence: Synthetic oligonucleotide
auuuaacaucauauaucaa

SEQ ID NO: 431634 - RNA, 19 nt, Artificial Sequence
  Description of Artificial Sequence: Synthetic oligonucleotide
ugacagucugcaccagcuu

SEQ ID NO: 431635 - RNA, 19 nt, Artificial Sequence
  Description of Artificial Sequence: Synthetic oligonucleotide
cauauaguauaagcuuuaa

SEQ ID NO: 431636 - RNA, 19 nt, Artificial Sequence
  Description of Artificial Sequence: Synthetic oligonucleotide
cagcaaaccggaaauaguu

SEQ ID NO: 431637 - RNA, 19 nt, Artificial Sequence
  Description of Artificial Sequence: Synthetic oligonucleotide
gagaugcaaauaauucaua

SEQ ID NO: 431638 - RNA, 19 nt, Artificial Sequence
  Description of Artificial Sequence: Synthetic oligonucleotide
uaguuaccccagucuaaau

SEQ ID NO: 431639 - RNA, 19 nt, Artificial Sequence
  Description of Artificial Sequence: Synthetic oligonucleotide
gcguagacuccccugugcc

SEQ ID NO: 431640 - RNA, 19 nt, Artificial Sequence
  Description of Artificial Sequence: Synthetic oligonucleotide
caaucucuggcaugccaga

SEQ ID NO: 431641 - RNA, 19 nt, Artificial Sequence
  Description of Artificial Sequence: Synthetic oligonucleotide
caauuccaacggcuugaac

SEQ ID NO: 431642 - RNA, 19 nt, Artificial Sequence
  Description of Artificial Sequence: Synthetic oligonucleotide
ccaaagcaauuccaacggc

SEQ ID NO: 431643 - RNA, 19 nt, Artificial Sequence
  Description of Artificial Sequence: Synthetic oligonucleotide
augaucgugugaaguaaau

SEQ ID NO: 431644 - RNA, 19 nt, Artificial Sequence
  Description of Artificial Sequence: Synthetic oligonucleotide
gaaucuggcuguccugagu

SEQ ID NO: 431645 - RNA, 19 nt, Artificial Sequence
  Description of Artificial Sequence: Synthetic oligonucleotide
guauaagcuuuaauauaua

SEQ ID NO: 431646 - RNA, 19 nt, Artificial Sequence
  Description of Artificial Sequence: Synthetic oligonucleotide
acuagagaccacacacuau

SEQ ID NO: 431647 - RNA, 19 nt, Artificial Sequence
  Description of Artificial Sequence: Synthetic oligonucleotide
uacuccgcuuuguuauuuu

SEQ ID NO: 431648 - RNA, 19 nt, Artificial Sequence
  Description of Artificial Sequence: Synthetic oligonucleotide
ccacucacgaacaacaccu

SEQ ID NO: 431649 - RNA, 19 nt, Artificial Sequence
  Description of Artificial Sequence: Synthetic oligonucleotide
ggucccgaagggucaaaug

SEQ ID NO: 431650 - RNA, 19 nt, Artificial Sequence
  Description of Artificial Sequence: Synthetic oligonucleotide
ucacgccauuguguaacca

SEQ ID NO: 431651 - RNA, 19 nt, Artificial Sequence
  Description of Artificial Sequence: Synthetic oligonucleotide
ccccagucuaaauuuaaca

SEQ ID NO: 431652 - RNA, 19 nt, Artificial Sequence
  Description of Artificial Sequence: Synthetic oligonucleotide
ggcguagacuccccugugc

SEQ ID NO: 431653 - RNA, 19 nt, Artificial Sequence
  Description of Artificial Sequence: Synthetic oligonucleotide
cucuacuuccaauuagcau

SEQ ID NO: 431654 - RNA, 19 nt, Artificial Sequence
  Description of Artificial Sequence: Synthetic oligonucleotide
agguauagugugggaaaau

SEQ ID NO: 431655 - RNA, 19 nt, Artificial Sequence
  Description of Artificial Sequence: Synthetic oligonucleotide
gcuacaucuugguaauuua

SEQ ID NO: 431656 - RNA, 19 nt, Artificial Sequence
  Description of Artificial Sequence: Synthetic oligonucleotide
gaaauagaaguggcacccu

SEQ ID NO: 431657 - RNA, 19 nt, Artificial Sequence
  Description of Artificial Sequence: Synthetic oligonucleotide
ggaguugcuauugggcuga

SEQ ID NO: 431658 - RNA, 19 nt, Artificial Sequence
  Description of Artificial Sequence: Synthetic oligonucleotide
aucggacagcaauccccug

SEQ ID NO: 431659 - RNA, 19 nt, Artificial Sequence
  Description of Artificial Sequence: Synthetic oligonucleotide
ccaagaucuguccagcaaa

SEQ ID NO: 431660 - RNA, 19 nt, Artificial Sequence
  Description of Artificial Sequence: Synthetic oligonucleotide
agcauugaucugaggcuga

SEQ ID NO: 431661 - RNA, 19 nt, Artificial Sequence
  Description of Artificial Sequence: Synthetic oligonucleotide
ugauauccguugaguccuu

SEQ ID NO: 431662 - RNA, 19 nt, Artificial Sequence
  Description of Artificial Sequence: Synthetic oligonucleotide
auacuccgcuuuguuauuu

SEQ ID NO: 431663 - RNA, 19 nt, Artificial Sequence
  Description of Artificial Sequence: Synthetic oligonucleotide
gcgaucuuuaaauggcugu

SEQ ID NO: 431664 - RNA, 19 nt, Artificial Sequence
  Description of Artificial Sequence: Synthetic oligonucleotide
cgugugaaguaaauauuga

SEQ ID NO: 431665 - RNA, 19 nt, Artificial Sequence
  Description of Artificial Sequence: Synthetic oligonucleotide
guaugagggaaggugggau

SEQ ID NO: 431666 - RNA, 19 nt, Artificial Sequence
  Description of Artificial Sequence: Synthetic oligonucleotide
guguaccaugucugaaucu

SEQ ID NO: 431667 - RNA, 19 nt, Artificial Sequence
  Description of Artificial Sequence: Synthetic oligonucleotide
cacuuuagccauuguuagu

SEQ ID NO: 431668 - RNA, 19 nt, Artificial Sequence
  Description of Artificial Sequence: Synthetic oligonucleotide
acacuucaucguguuugca

SEQ ID NO: 431669 - RNA, 19 nt, Artificial Sequence
  Description of Artificial Sequence: Synthetic oligonucleotide
acgccauuguguaaccaua

SEQ ID NO: 431670 - RNA, 19 nt, Artificial Sequence
  Description of Artificial Sequence: Synthetic oligonucleotide
cacgccauuguguaaccau

SEQ ID NO: 431671 - RNA, 19 nt, Artificial Sequence
  Description of Artificial Sequence: Synthetic oligonucleotide
gcucuugucauucgaaguu

SEQ ID NO: 431672 - RNA, 19 nt, Artificial Sequence
  Description of Artificial Sequence: Synthetic oligonucleotide
cacuuguguauucuguauu

SEQ ID NO: 431673 - RNA, 19 nt, Artificial Sequence
  Description of Artificial Sequence: Synthetic oligonucleotide
cuggaugcccucauauaau

SEQ ID NO: 431674 - RNA, 19 nt, Artificial Sequence
  Description of Artificial Sequence: Synthetic oligonucleotide
cagcgaucuuuaaauggcu

SEQ ID NO: 431675 - RNA, 19 nt, Artificial Sequence
  Description of Artificial Sequence: Synthetic oligonucleotide
caauugccugugauucaaa

SEQ ID NO: 431676 - RNA, 19 nt, Artificial Sequence
  Description of Artificial Sequence: Synthetic oligonucleotide
gaaucgaggagaagucauu

SEQ ID NO: 431677 - RNA, 19 nt, Artificial Sequence
  Description of Artificial Sequence: Synthetic oligonucleotide
gcaaaaccaccaugcggga

SEQ ID NO: 431678 - RNA, 19 nt, Artificial Sequence
  Description of Artificial Sequence: Synthetic oligonucleotide
accaugcgggacccuggaa

SEQ ID NO: 431679 - RNA, 19 nt, Artificial Sequence
  Description of Artificial Sequence: Synthetic oligonucleotide
ugacagcacuuagucgguu

SEQ ID NO: 431680 - RNA, 19 nt, Artificial Sequence
  Description of Artificial Sequence: Synthetic oligonucleotide
agcuuggaugacagcacuu

SEQ ID NO: 431681 - RNA, 19 nt, Artificial Sequence
  Description of Artificial Sequence: Synthetic oligonucleotide
gguaaaagauuuggaguau

SEQ ID NO: 431682 - RNA, 19 nt, Artificial Sequence
  Description of Artificial Sequence: Synthetic oligonucleotide
gccugugauucaaagcuaa

SEQ ID NO: 431683 - RNA, 19 nt, Artificial Sequence
  Description of Artificial Sequence: Synthetic oligonucleotide
cuagacccaggucacuaau

SEQ ID NO: 431684 - RNA, 19 nt, Artificial Sequence
  Description of Artificial Sequence: Synthetic oligonucleotide
cugaaugacugggucuucu

SEQ ID NO: 431685 - RNA, 19 nt, Artificial Sequence
  Description of Artificial Sequence: Synthetic oligonucleotide
ccgaagggucaaaugguga

SEQ ID NO: 431686 - RNA, 19 nt, Artificial Sequence
  Description of Artificial Sequence: Synthetic oligonucleotide
cuuagucgguuggcuguca

SEQ ID NO: 431687 - RNA, 19 nt, Artificial Sequence
  Description of Artificial Sequence: Synthetic oligonucleotide
caccaugcgggacccugga

SEQ ID NO: 431688 - RNA, 19 nt, Artificial Sequence
  Description of Artificial Sequence: Synthetic oligonucleotide
aguugcuauugggcugaaa

SEQ ID NO: 431689 - RNA, 19 nt, Artificial Sequence
  Description of Artificial Sequence: Synthetic oligonucleotide
gcuauugggcugaaaaguu

SEQ ID NO: 431690 - RNA, 19 nt, Artificial Sequence
  Description of Artificial Sequence: Synthetic oligonucleotide
aucugcugacuggguaaau

SEQ ID NO: 431691 - RNA, 19 nt, Artificial Sequence
  Description of Artificial Sequence: Synthetic oligonucleotide
ccggacucccugcaagcac

SEQ ID NO: 431692 - RNA, 19 nt, Artificial Sequence
  Description of Artificial Sequence: Synthetic oligonucleotide
cccauugaauauagguaua

SEQ ID NO: 431693 - RNA, 19 nt, Artificial Sequence
  Description of Artificial Sequence: Synthetic oligonucleotide
cauacuccgcuuuguuauu

SEQ ID NO: 431694 - RNA, 19 nt, Artificial Sequence
  Description of Artificial Sequence: Synthetic oligonucleotide
gauauccguugaguccuuu

SEQ ID NO: 431695 - RNA, 19 nt, Artificial Sequence
  Description of Artificial Sequence: Synthetic oligonucleotide
gcaaaccacuuccacccau

SEQ ID NO: 431696 - RNA, 19 nt, Artificial Sequence
  Description of Artificial Sequence: Synthetic oligonucleotide
caagcacaucuggcguaga

SEQ ID NO: 431697 - RNA, 19 nt, Artificial Sequence
  Description of Artificial Sequence: Synthetic oligonucleotide
ccuuuaaaugagacugguu

SEQ ID NO: 431698 - RNA, 19 nt, Artificial Sequence
  Description of Artificial Sequence: Synthetic oligonucleotide
cacucacgaacaacaccuu

SEQ ID NO: 431699 - RNA, 19 nt, Artificial Sequence
  Description of Artificial Sequence: Synthetic oligonucleotide
ccauugcaccgaacacauc

SEQ ID NO: 431700 - RNA, 19 nt, Artificial Sequence
  Description of Artificial Sequence: Synthetic oligonucleotide
gaguugcuauugggcugaa

SEQ ID NO: 431701 - RNA, 19 nt, Artificial Sequence
  Description of Artificial Sequence: Synthetic oligonucleotide
ccugugauucaaagcuaau

SEQ ID NO: 431702 - RNA, 19 nt, Artificial Sequence
  Description of Artificial Sequence: Synthetic oligonucleotide
cauuaacucuguggcuauu

SEQ ID NO: 431703 - RNA, 19 nt, Artificial Sequence
  Description of Artificial Sequence: Synthetic oligonucleotide
cguagacuccccugugccu

SEQ ID NO: 431704 - RNA, 19 nt, Artificial Sequence
  Description of Artificial Sequence: Synthetic oligonucleotide
aaaaguuccagauaggcgg

SEQ ID NO: 431705 - RNA, 19 nt, Artificial Sequence
  Description of Artificial Sequence: Synthetic oligonucleotide
aggaaguugacauagacgg

SEQ ID NO: 431706 - RNA, 19 nt, Artificial Sequence
  Description of Artificial Sequence: Synthetic oligonucleotide
aaaauuaaggauugagggg

SEQ ID NO: 431707 - RNA, 19 nt, Artificial Sequence
  Description of Artificial Sequence: Synthetic oligonucleotide
ucacuagagaaucagagcg

SEQ ID NO: 431708 - RNA, 19 nt, Artificial Sequence
  Description of Artificial Sequence: Synthetic oligonucleotide
aggaguauccccuacaccc

SEQ ID NO: 431709 - RNA, 19 nt, Artificial Sequence
  Description of Artificial Sequence: Synthetic oligonucleotide
ucucauaaaacauucaucu

SEQ ID NO: 431710 - RNA, 19 nt, Artificial Sequence
  Description of Artificial Sequence: Synthetic oligonucleotide
uucucgauggacaaaaggg

SEQ ID NO: 431711 - RNA, 19 nt, Artificial Sequence
  Description of Artificial Sequence: Synthetic oligonucleotide
aacacacacacacaguugg

SEQ ID NO: 431712 - RNA, 19 nt, Artificial Sequence
  Description of Artificial Sequence: Synthetic oligonucleotide
aaccauuauggauauaauc

SEQ ID NO: 431713 - RNA, 19 nt, Artificial Sequence
  Description of Artificial Sequence: Synthetic oligonucleotide
agaaguaagagugaucugc

SEQ ID NO: 431714 - RNA, 19 nt, Artificial Sequence
  Description of Artificial Sequence: Synthetic oligonucleotide
acucuaauaauucucuaac

SEQ ID NO: 431715 - RNA, 19 nt, Artificial Sequence
  Description of Artificial Sequence: Synthetic oligonucleotide
aacucuaaggaacucauga

SEQ ID NO: 431716 - RNA, 19 nt, Artificial Sequence
  Description of Artificial Sequence: Synthetic oligonucleotide
auggauauaaucaaccagc

SEQ ID NO: 431717 - RNA, 19 nt, Artificial Sequence
  Description of Artificial Sequence: Synthetic oligonucleotide
ucuaauaauucucuaacuc

SEQ ID NO: 431718 - RNA, 19 nt, Artificial Sequence
  Description of Artificial Sequence: Synthetic oligonucleotide
uauccaacaagaaaggcga

SEQ ID NO: 431719 - RNA, 19 nt, Artificial Sequence
  Description of Artificial Sequence: Synthetic oligonucleotide
uauggauauaaucaaccag

SEQ ID NO: 431720 - RNA, 19 nt, Artificial Sequence
  Description of Artificial Sequence: Synthetic oligonucleotide
uguaacaacaggaaucgca

SEQ ID NO: 431721 - RNA, 19 nt, Artificial Sequence
  Description of Artificial Sequence: Synthetic oligonucleotide
uauacauauugcaacaagu

SEQ ID NO: 431722 - RNA, 19 nt, Artificial Sequence
  Description of Artificial Sequence: Synthetic oligonucleotide
ucucacuagagaaucagag

SEQ ID NO: 431723 - RNA, 19 nt, Artificial Sequence
  Description of Artificial Sequence: Synthetic oligonucleotide
cuuuggauaacagagcagg

SEQ ID NO: 431724 - RNA, 19 nt, Artificial Sequence
  Description of Artificial Sequence: Synthetic oligonucleotide
aucugagagagccaugagc

SEQ ID NO: 431725 - RNA, 19 nt, Artificial Sequence
  Description of Artificial Sequence: Synthetic oligonucleotide
aauacgggcaacaagggug

SEQ ID NO: 431726 - RNA, 19 nt, Artificial Sequence
  Description of Artificial Sequence: Synthetic oligonucleotide
ugaaguauccaacaagaaa

SEQ ID NO: 431727 - RNA, 19 nt, Artificial Sequence
  Description of Artificial Sequence: Synthetic oligonucleotide
aaguagagcaucacgggcc

SEQ ID NO: 431728 - RNA, 19 nt, Artificial Sequence
  Description of Artificial Sequence: Synthetic oligonucleotide
auagacggaguucugcagc

SEQ ID NO: 431729 - RNA, 19 nt, Artificial Sequence
  Description of Artificial Sequence: Synthetic oligonucleotide
gauugaggggcccaaagcc

SEQ ID NO: 431730 - RNA, 19 nt, Artificial Sequence
  Description of Artificial Sequence: Synthetic oligonucleotide
cuaagggaggcucugagcc

SEQ ID NO: 431731 - RNA, 19 nt, Artificial Sequence
  Description of Artificial Sequence: Synthetic oligonucleotide
aaguucucauaaaacauuc

SEQ ID NO: 431732 - RNA, 19 nt, Artificial Sequence
  Description of Artificial Sequence: Synthetic oligonucleotide
ugggcuacuaggaacgggg

SEQ ID NO: 431733 - RNA, 19 nt, Artificial Sequence
  Description of Artificial Sequence: Synthetic oligonucleotide
accauuauggauauaauca

SEQ ID NO: 431734 - RNA, 19 nt, Artificial Sequence
  Description of Artificial Sequence: Synthetic oligonucleotide
guauccaacaagaaaggcg

SEQ ID NO: 431735 - RNA, 19 nt, Artificial Sequence
  Description of Artificial Sequence: Synthetic oligonucleotide
acgaagauacuccagauaa

SEQ ID NO: 431736 - RNA, 19 nt, Artificial Sequence
  Description of Artificial Sequence: Synthetic oligonucleotide
auagauaccuccucugaag

SEQ ID NO: 431737 - RNA, 19 nt, Artificial Sequence
  Description of Artificial Sequence: Synthetic oligonucleotide
ugguacuccauugagcugg

SEQ ID NO: 431738 - RNA, 19 nt, Artificial Sequence
  Description of Artificial Sequence: Synthetic oligonucleotide
agaaguagagcaucacggg

SEQ ID NO: 431739 - RNA, 19 nt, Artificial Sequence
  Description of Artificial Sequence: Synthetic oligonucleotide
guaguggaggcucuaaggg

SEQ ID NO: 431740 - RNA, 19 nt, Artificial Sequence
  Description of Artificial Sequence: Synthetic oligonucleotide
uacauauugcaacaaguuc

SEQ ID NO: 431741 - RNA, 19 nt, Artificial Sequence
  Description of Artificial Sequence: Synthetic oligonucleotide
uagagaaucagagcggcgg

SEQ ID NO: 431742 - RNA, 19 nt, Artificial Sequence
  Description of Artificial Sequence: Synthetic oligonucleotide
acuagagaaucagagcggc

SEQ ID NO: 431743 - RNA, 19 nt, Artificial Sequence
  Description of Artificial Sequence: Synthetic oligonucleotide
gaaagagcggagcaggggc

SEQ ID NO: 431744 - RNA, 19 nt, Artificial Sequence
  Description of Artificial Sequence: Synthetic oligonucleotide
gaaaccauuauggauauaa

SEQ ID NO: 431745 - RNA, 19 nt, Artificial Sequence
  Description of Artificial Sequence: Synthetic oligonucleotide
ugcugggcuacuaggaacg

SEQ ID NO: 431746 - RNA, 19 nt, Artificial Sequence
  Description of Artificial Sequence: Synthetic oligonucleotide
agacgaaccuucuuggcuc

SEQ ID NO: 431747 - RNA, 19 nt, Artificial Sequence
  Description of Artificial Sequence: Synthetic oligonucleotide
uugcagaacucuaaggaac

SEQ ID NO: 431748 - RNA, 19 nt, Artificial Sequence
  Description of Artificial Sequence: Synthetic oligonucleotide
gaaguagagcaucacgggc

SEQ ID NO: 431749 - RNA, 19 nt, Artificial Sequence
  Description of Artificial Sequence: Synthetic oligonucleotide
gagcaacacacacacacag

SEQ ID NO: 431750 - RNA, 19 nt, Artificial Sequence
  Description of Artificial Sequence: Synthetic oligonucleotide
uaggcuacguuucuuaguc

SEQ ID NO: 431751 - RNA, 19 nt, Artificial Sequence
  Description of Artificial Sequence: Synthetic oligonucleotide
ucccuuuuauacauauugc

SEQ ID NO: 431752 - RNA, 19 nt, Artificial Sequence
  Description of Artificial Sequence: Synthetic oligonucleotide
agcggcggggagcagaucc

SEQ ID NO: 431753 - RNA, 19 nt, Artificial Sequence
  Description of Artificial Sequence: Synthetic oligonucleotide
cuucucgauggacaaaagg

SEQ ID NO: 431754 - RNA, 19 nt, Artificial Sequence
  Description of Artificial Sequence: Synthetic oligonucleotide
agaaaggcgaggugacggc

SEQ ID NO: 431755 - RNA, 19 nt, Artificial Sequence
  Description of Artificial Sequence: Synthetic oligonucleotide
augacaggcaccaggaaac

SEQ ID NO: 431756 - RNA, 19 nt, Artificial Sequence
  Description of Artificial Sequence: Synthetic oligonucleotide
gguguaacaacaggaaucg

SEQ ID NO: 431757 - RNA, 19 nt, Artificial Sequence
  Description of Artificial Sequence: Synthetic oligonucleotide
uccuguggcaccaaucgug

SEQ ID NO: 431758 - RNA, 19 nt, Artificial Sequence
  Description of Artificial Sequence: Synthetic oligonucleotide
gacggcaugggccugggag

SEQ ID NO: 431759 - RNA, 19 nt, Artificial Sequence
  Description of Artificial Sequence: Synthetic oligonucleotide
uauugcaacaaguucucau

SEQ ID NO: 431760 - RNA, 19 nt, Artificial Sequence
  Description of Artificial Sequence: Synthetic oligonucleotide
uggggaugcaguaagcccu

SEQ ID NO: 431761 - RNA, 19 nt, Artificial Sequence
  Description of Artificial Sequence: Synthetic oligonucleotide
cucgaguuuggcaaagagc

SEQ ID NO: 431762 - RNA, 19 nt, Artificial Sequence
  Description of Artificial Sequence: Synthetic oligonucleotide
aguaagagugaucugcgau

SEQ ID NO: 431763 - RNA, 19 nt, Artificial Sequence
  Description of Artificial Sequence: Synthetic oligonucleotide
acucaagcaaugaaggcuc

SEQ ID NO: 431764 - RNA, 19 nt, Artificial Sequence
  Description of Artificial Sequence: Synthetic oligonucleotide
gccaauacgggcaacaagg

SEQ ID NO: 431765 - RNA, 19 nt, Artificial Sequence
  Description of Artificial Sequence: Synthetic oligonucleotide
agagugaucugcgauguag

SEQ ID NO: 431766 - RNA, 19 nt, Artificial Sequence
  Description of Artificial Sequence: Synthetic oligonucleotide
agcagucuacaccacggcg

SEQ ID NO: 431767 - RNA, 19 nt, Artificial Sequence
  Description of Artificial Sequence: Synthetic oligonucleotide
uagauaccuccucugaagu

SEQ ID NO: 431768 - RNA, 19 nt, Artificial Sequence
  Description of Artificial Sequence: Synthetic oligonucleotide
uaacaacaggaaucgcagg

SEQ ID NO: 431769 - RNA, 19 nt, Artificial Sequence
  Description of Artificial Sequence: Synthetic oligonucleotide
aaaaggagcccauguccug

SEQ ID NO: 431770 - RNA, 19 nt, Artificial Sequence
  Description of Artificial Sequence: Synthetic oligonucleotide
ucgauggacaaaagggaca

SEQ ID NO: 431771 - RNA, 19 nt, Artificial Sequence
  Description of Artificial Sequence: Synthetic oligonucleotide
aagauacuccagauaauug

SEQ ID NO: 431772 - RNA, 19 nt, Artificial Sequence
  Description of Artificial Sequence: Synthetic oligonucleotide
auugcagaacucuaaggaa

SEQ ID NO: 431773 - RNA, 19 nt, Artificial Sequence
  Description of Artificial Sequence: Synthetic oligonucleotide
aucgcaggaagguacggag

SEQ ID NO: 431774 - RNA, 19 nt, Artificial Sequence
  Description of Artificial Sequence: Synthetic oligonucleotide
agagguacacucuaauaau

SEQ ID NO: 431775 - RNA, 19 nt, Artificial Sequence
  Description of Artificial Sequence: Synthetic oligonucleotide
agagaaucagagcggcggg

SEQ ID NO: 431776 - RNA, 19 nt, Artificial Sequence
  Description of Artificial Sequence: Synthetic oligonucleotide
auguucucgaguuuggcaa

SEQ ID NO: 431777 - RNA, 19 nt, Artificial Sequence
  Description of Artificial Sequence: Synthetic oligonucleotide
ggaguugcugccaauacgg

SEQ ID NO: 431778 - RNA, 19 nt, Artificial Sequence
  Description of Artificial Sequence: Synthetic oligonucleotide
cuccuauccagucuucccg

SEQ ID NO: 431779 - RNA, 19 nt, Artificial Sequence
  Description of Artificial Sequence: Synthetic oligonucleotide
cucgauggacaaaagggac

SEQ ID NO: 431780 - RNA, 19 nt, Artificial Sequence
  Description of Artificial Sequence: Synthetic oligonucleotide
ugccgguguaacaacagga

SEQ ID NO: 431781 - RNA, 19 nt, Artificial Sequence
  Description of Artificial Sequence: Synthetic oligonucleotide
aguaggcuacguuucuuag

SEQ ID NO: 431782 - RNA, 19 nt, Artificial Sequence
  Description of Artificial Sequence: Synthetic oligonucleotide
gguugaaggaccugugccg

SEQ ID NO: 431783 - RNA, 19 nt, Artificial Sequence
  Description of Artificial Sequence: Synthetic oligonucleotide
caccuuggcguucagaaac

SEQ ID NO: 431784 - RNA, 19 nt, Artificial Sequence
  Description of Artificial Sequence: Synthetic oligonucleotide
uuuauacauauugcaacaa

SEQ ID NO: 431785 - RNA, 19 nt, Artificial Sequence
  Description of Artificial Sequence: Synthetic oligonucleotide
uaggccgucggccagggcu

SEQ ID NO: 431786 - RNA, 19 nt, Artificial Sequence
  Description of Artificial Sequence: Synthetic oligonucleotide
acugugugcaugccgcagg

SEQ ID NO: 431787 - RNA, 19 nt, Artificial Sequence
  Description of Artificial Sequence: Synthetic oligonucleotide
ugccaauacgggcaacaag

SEQ ID NO: 431788 - RNA, 19 nt, Artificial Sequence
  Description of Artificial Sequence: Synthetic oligonucleotide
uuggauaacagagcaggga

SEQ ID NO: 431789 - RNA, 19 nt, Artificial Sequence
  Description of Artificial Sequence: Synthetic oligonucleotide
ggugaucgaggacagagcc

SEQ ID NO: 431790 - RNA, 19 nt, Artificial Sequence
  Description of Artificial Sequence: Synthetic oligonucleotide
agguacacucuaauaauuc

SEQ ID NO: 431791 - RNA, 19 nt, Artificial Sequence
  Description of Artificial Sequence: Synthetic oligonucleotide
ggcuacguuucuuaguccg

SEQ ID NO: 431792 - RNA, 19 nt, Artificial Sequence
  Description of Artificial Sequence: Synthetic oligonucleotide
guuucuuaguccgggagcc

SEQ ID NO: 431793 - RNA, 19 nt, Artificial Sequence
  Description of Artificial Sequence: Synthetic oligonucleotide
uggugaagcucucguaggc

SEQ ID NO: 431794 - RNA, 19 nt, Artificial Sequence
  Description of Artificial Sequence: Synthetic oligonucleotide
aaguaagagugaucugcga

SEQ ID NO: 431795 - RNA, 19 nt, Artificial Sequence
  Description of Artificial Sequence: Synthetic oligonucleotide
uccagauaggcgguacugg

SEQ ID NO: 431796 - RNA, 19 nt, Artificial Sequence
  Description of Artificial Sequence: Synthetic oligonucleotide
cagagguacacucuaauaa

SEQ ID NO: 431797 - RNA, 19 nt, Artificial Sequence
  Description of Artificial Sequence: Synthetic oligonucleotide
ucgaggacagagccgggag

SEQ ID NO: 431798 - RNA, 19 nt, Artificial Sequence
  Description of Artificial Sequence: Synthetic oligonucleotide
aggauugaggggcccaaag

SEQ ID NO: 431799 - RNA, 19 nt, Artificial Sequence
  Description of Artificial Sequence: Synthetic oligonucleotide
ugcacaguagacagcguuc

SEQ ID NO: 431800 - RNA, 19 nt, Artificial Sequence
  Description of Artificial Sequence: Synthetic oligonucleotide
acguuucuuaguccgggag

SEQ ID NO: 431801 - RNA, 19 nt, Artificial Sequence
  Description of Artificial Sequence: Synthetic oligonucleotide
ucaugccgguguaacaaca

SEQ ID NO: 431802 - RNA, 19 nt, Artificial Sequence
  Description of Artificial Sequence: Synthetic oligonucleotide
uaguggaggcucuaaggga

SEQ ID NO: 431803 - RNA, 19 nt, Artificial Sequence
  Description of Artificial Sequence: Synthetic oligonucleotide
uaccuguaugacugcauug

SEQ ID NO: 431804 - RNA, 19 nt, Artificial Sequence
  Description of Artificial Sequence: Synthetic oligonucleotide
cauagacggaguucugcag

SEQ ID NO: 431805 - RNA, 19 nt, Artificial Sequence
  Description of Artificial Sequence: Synthetic oligonucleotide
cuagagaaucagagcggcg

SEQ ID NO: 431806 - RNA, 19 nt, Artificial Sequence
  Description of Artificial Sequence: Synthetic oligonucleotide
cucuaguccugccaugccc

SEQ ID NO: 431807 - RNA, 19 nt, Artificial Sequence
  Description of Artificial Sequence: Synthetic oligonucleotide
cuggaauucggcccaggcc

SEQ ID NO: 431808 - RNA, 19 nt, Artificial Sequence
  Description of Artificial Sequence: Synthetic oligonucleotide
aggcucgugaggaugcucc

SEQ ID NO: 431809 - RNA, 19 nt, Artificial Sequence
  Description of Artificial Sequence: Synthetic oligonucleotide
agauaggcgguacuggcaa

SEQ ID NO: 431810 - RNA, 19 nt, Artificial Sequence
  Description of Artificial Sequence: Synthetic oligonucleotide
augccgguguaacaacagg

SEQ ID NO: 431811 - RNA, 19 nt, Artificial Sequence
  Description of Artificial Sequence: Synthetic oligonucleotide
acucuaaggaacucaugaa

SEQ ID NO: 431812 - RNA, 19 nt, Artificial Sequence
  Description of Artificial Sequence: Synthetic oligonucleotide
cuuggcguucagaaacccc

SEQ ID NO: 431813 - RNA, 19 nt, Artificial Sequence
  Description of Artificial Sequence: Synthetic oligonucleotide
ugcuccgcaggaaaaguuc

SEQ ID NO: 431814 - RNA, 19 nt, Artificial Sequence
  Description of Artificial Sequence: Synthetic oligonucleotide
uagacggaguucugcagca

SEQ ID NO: 431815 - RNA, 19 nt, Artificial Sequence
  Description of Artificial Sequence: Synthetic oligonucleotide
cuacguuucuuaguccggg

SEQ ID NO: 431816 - RNA, 19 nt, Artificial Sequence
  Description of Artificial Sequence: Synthetic oligonucleotide
aggcuacguuucuuagucc

SEQ ID NO: 431817 - RNA, 19 nt, Artificial Sequence
  Description of Artificial Sequence: Synthetic oligonucleotide
agguucggcaggcucggac

SEQ ID NO: 431818 - RNA, 19 nt, Artificial Sequence
  Description of Artificial Sequence: Synthetic oligonucleotide
ucugcgauguagcggccca

SEQ ID NO: 431819 - RNA, 19 nt, Artificial Sequence
  Description of Artificial Sequence: Synthetic oligonucleotide
cucacgaagauacuccaga

SEQ ID NO: 431820 - RNA, 19 nt, Artificial Sequence
  Description of Artificial Sequence: Synthetic oligonucleotide
ugcaacaaguucucauaaa

SEQ ID NO: 431821 - RNA, 19 nt, Artificial Sequence
  Description of Artificial Sequence: Synthetic oligonucleotide
aucauaaggagcagaccag

SEQ ID NO: 431822 - RNA, 19 nt, Artificial Sequence
  Description of Artificial Sequence: Synthetic oligonucleotide
ucacgaagauacuccagau

SEQ ID NO: 431823 - RNA, 19 nt, Artificial Sequence
  Description of Artificial Sequence: Synthetic oligonucleotide
caguuggcugagaaguagc

SEQ ID NO: 431824 - RNA, 19 nt, Artificial Sequence
  Description of Artificial Sequence: Synthetic oligonucleotide
uucggcccaggccacaaga

SEQ ID NO: 431825 - RNA, 19 nt, Artificial Sequence
  Description of Artificial Sequence: Synthetic oligonucleotide
caugccgguguaacaacag

SEQ ID NO: 431826 - RNA, 19 nt, Artificial Sequence
  Description of Artificial Sequence: Synthetic oligonucleotide
gcuacuaggaacggggcgg

SEQ ID NO: 431827 - RNA, 19 nt, Artificial Sequence
  Description of Artificial Sequence: Synthetic oligonucleotide
caaucguggcaccagacga

SEQ ID NO: 431828 - RNA, 19 nt, Artificial Sequence
  Description of Artificial Sequence: Synthetic oligonucleotide
caacacacacacacaguug

SEQ ID NO: 431829 - RNA, 19 nt, Artificial Sequence
  Description of Artificial Sequence: Synthetic oligonucleotide
aaucgcaggaagguacgga

SEQ ID NO: 431830 - RNA, 19 nt, Artificial Sequence
  Description of Artificial Sequence: Synthetic oligonucleotide
aagggcuggcacuccuauc

SEQ ID NO: 431831 - RNA, 19 nt, Artificial Sequence
  Description of Artificial Sequence: Synthetic oligonucleotide
gauaacagagcagggaagu

SEQ ID NO: 431832 - RNA, 19 nt, Artificial Sequence
  Description of Artificial Sequence: Synthetic oligonucleotide
uuaaggauugaggggccca

SEQ ID NO: 431833 - RNA, 19 nt, Artificial Sequence
  Description of Artificial Sequence: Synthetic oligonucleotide
ccgagcaacacacacacac

SEQ ID NO: 431834 - RNA, 19 nt, Artificial Sequence
  Description of Artificial Sequence: Synthetic oligonucleotide
guauccccuacacccacag

SEQ ID NO: 431835 - RNA, 19 nt, Artificial Sequence
  Description of Artificial Sequence: Synthetic oligonucleotide
gagaaguagcaccaggccu

SEQ ID NO: 431836 - RNA, 19 nt, Artificial Sequence
  Description of Artificial Sequence: Synthetic oligonucleotide
cacucuaauaauucucuaa

SEQ ID NO: 431837 - RNA, 19 nt, Artificial Sequence
  Description of Artificial Sequence: Synthetic oligonucleotide
aaaguuccagauaggcggu

SEQ ID NO: 431838 - RNA, 19 nt, Artificial Sequence
  Description of Artificial Sequence: Synthetic oligonucleotide
uuccagauaggcgguacug

SEQ ID NO: 431839 - RNA, 19 nt, Artificial Sequence
  Description of Artificial Sequence: Synthetic oligonucleotide
gaaucagagcggcggggag

SEQ ID NO: 431840 - RNA, 19 nt, Artificial Sequence
  Description of Artificial Sequence: Synthetic oligonucleotide
uacuccagauaauugucuu

SEQ ID NO: 431841 - RNA, 19 nt, Artificial Sequence
  Description of Artificial Sequence: Synthetic oligonucleotide
acgaacuggcccgugccgc

SEQ ID NO: 431842 - RNA, 19 nt, Artificial Sequence
  Description of Artificial Sequence: Synthetic oligonucleotide
acaaggcgagaaaagagga

SEQ ID NO: 431843 - RNA, 19 nt, Artificial Sequence
  Description of Artificial Sequence: Synthetic oligonucleotide
agcagaccagguucggcag

SEQ ID NO: 431844 - RNA, 19 nt, Artificial Sequence
  Description of Artificial Sequence: Synthetic oligonucleotide
gggaguugcugccaauacg

SEQ ID NO: 431845 - RNA, 19 nt, Artificial Sequence
  Description of Artificial Sequence: Synthetic oligonucleotide
auaggcgguacuggcaauc

SEQ ID NO: 431846 - RNA, 19 nt, Artificial Sequence
  Description of Artificial Sequence: Synthetic oligonucleotide
ugcccaaagcucucuaguc

SEQ ID NO: 431847 - RNA, 19 nt, Artificial Sequence
  Description of Artificial Sequence: Synthetic oligonucleotide
gaaucgcaggaagguacgg

SEQ ID NO: 431848 - RNA, 19 nt, Artificial Sequence
  Description of Artificial Sequence: Synthetic oligonucleotide
aaggcgaggugacggcaug

SEQ ID NO: 431849 - RNA, 19 nt, Artificial Sequence
  Description of Artificial Sequence: Synthetic oligonucleotide
aucguggcaccagacgaac

SEQ ID NO: 431850 - RNA, 19 nt, Artificial Sequence
  Description of Artificial Sequence: Synthetic oligonucleotide
ucaagcaaugaaggcuccc

SEQ ID NO: 431851 - RNA, 19 nt, Artificial Sequence
  Description of Artificial Sequence: Synthetic oligonucleotide
gcgagcuucacucacuaac

SEQ ID NO: 431852 - RNA, 19 nt, Artificial Sequence
  Description of Artificial Sequence: Synthetic oligonucleotide
gcguucuugacucgcagag

SEQ ID NO: 431853 - RNA, 19 nt, Artificial Sequence
  Description of Artificial Sequence: Synthetic oligonucleotide
guagacagcguucuugacu

SEQ ID NO: 431854 - RNA, 19 nt, Artificial Sequence
  Description of Artificial Sequence: Synthetic oligonucleotide
uguucucgaguuuggcaaa

SEQ ID NO: 431855 - RNA, 19 nt, Artificial Sequence
  Description of Artificial Sequence: Synthetic oligonucleotide
uacguuucuuaguccggga

SEQ ID NO: 431856 - RNA, 19 nt, Artificial Sequence
  Description of Artificial Sequence: Synthetic oligonucleotide
acacacacacacaguuggc

SEQ ID NO: 431857 - RNA, 19 nt, Artificial Sequence
  Description of Artificial Sequence: Synthetic oligonucleotide
ggacaaggcgagaaaagag

SEQ ID NO: 431858 - RNA, 19 nt, Artificial Sequence
  Description of Artificial Sequence: Synthetic oligonucleotide
ggauugaggggcccaaagc

SEQ ID NO: 431859 - RNA, 19 nt, Artificial Sequence
  Description of Artificial Sequence: Synthetic oligonucleotide
accuuggcguucagaaacc

SEQ ID NO: 431860 - RNA, 19 nt, Artificial Sequence
  Description of Artificial Sequence: Synthetic oligonucleotide
cucaagcaaugaaggcucc

SEQ ID NO: 431861 - RNA, 19 nt, Artificial Sequence
  Description of Artificial Sequence: Synthetic oligonucleotide
agaaguagcaccaggccuu

SEQ ID NO: 431862 - RNA, 19 nt, Artificial Sequence
  Description of Artificial Sequence: Synthetic oligonucleotide
caggaguauccccuacacc

SEQ ID NO: 431863 - RNA, 19 nt, Artificial Sequence
  Description of Artificial Sequence: Synthetic oligonucleotide
auacuccagauaauugucu

SEQ ID NO: 431864 - RNA, 19 nt, Artificial Sequence
  Description of Artificial Sequence: Synthetic oligonucleotide
caagaaaggcgaggugacg

SEQ ID NO: 431865 - RNA, 19 nt, Artificial Sequence
  Description of Artificial Sequence: Synthetic oligonucleotide
aaagagcggagcaggggcu

SEQ ID NO: 431866 - RNA, 19 nt, Artificial Sequence
  Description of Artificial Sequence: Synthetic oligonucleotide
aggcucccgagcaacacac

SEQ ID NO: 431867 - RNA, 19 nt, Artificial Sequence
  Description of Artificial Sequence: Synthetic oligonucleotide
ggugucaaggauggugugg

SEQ ID NO: 431868 - RNA, 19 nt, Artificial Sequence
  Description of Artificial Sequence: Synthetic oligonucleotide
gucuacaccacggcgugcc

SEQ ID NO: 431869 - RNA, 19 nt, Artificial Sequence
  Description of Artificial Sequence: Synthetic oligonucleotide
accacggcgugccucacga

SEQ ID NO: 431870 - RNA, 19 nt, Artificial Sequence
  Description of Artificial Sequence: Synthetic oligonucleotide
cagaaguaagagugaucug

SEQ ID NO: 431871 - RNA, 19 nt, Artificial Sequence
  Description of Artificial Sequence: Synthetic oligonucleotide
auugaggggcccaaagccu

SEQ ID NO: 431872 - RNA, 19 nt, Artificial Sequence
  Description of Artificial Sequence: Synthetic oligonucleotide
uugaaggaccugugccgcc

SEQ ID NO: 431873 - RNA, 19 nt, Artificial Sequence
  Description of Artificial Sequence: Synthetic oligonucleotide
gauaccuccucugaaguau

SEQ ID NO: 431874 - RNA, 19 nt, Artificial Sequence
  Description of Artificial Sequence: Synthetic oligonucleotide
accaaucguggcaccagac

SEQ ID NO: 431875 - RNA, 19 nt, Artificial Sequence
  Description of Artificial Sequence: Synthetic oligonucleotide
gggauagauaccuccucug

SEQ ID NO: 431876 - RNA, 19 nt, Artificial Sequence
  Description of Artificial Sequence: Synthetic oligonucleotide
agaaucagagcggcgggga

SEQ ID NO: 431877 - RNA, 19 nt, Artificial Sequence
  Description of Artificial Sequence: Synthetic oligonucleotide
ccaauacgggcaacaaggg

SEQ ID NO: 431878 - RNA, 19 nt, Artificial Sequence
  Description of Artificial Sequence: Synthetic oligonucleotide
aggcaguaggcuacguuuc

SEQ ID NO: 431879 - RNA, 19 nt, Artificial Sequence
  Description of Artificial Sequence: Synthetic oligonucleotide
aagacguggagcagcucca

SEQ ID NO: 431880 - RNA, 19 nt, Artificial Sequence
  Description of Artificial Sequence: Synthetic oligonucleotide
caugccgcaggaguaacuc

SEQ ID NO: 431881 - RNA, 19 nt, Artificial Sequence
  Description of Artificial Sequence: Synthetic oligonucleotide
ggaaucgcaggaagguacg

SEQ ID NO: 431882 - RNA, 19 nt, Artificial Sequence
  Description of Artificial Sequence: Synthetic oligonucleotide
aaucguggcaccagacgaa

SEQ ID NO: 431883 - RNA, 19 nt, Artificial Sequence
  Description of Artificial Sequence: Synthetic oligonucleotide
ugacucgcagagccucacc

SEQ ID NO: 431884 - RNA, 19 nt, Artificial Sequence
  Description of Artificial Sequence: Synthetic oligonucleotide
ugguuggacugugugcaug

SEQ ID NO: 431885 - RNA, 19 nt, Artificial Sequence
  Description of Artificial Sequence: Synthetic oligonucleotide
ccagauaggcgguacuggc

SEQ ID NO: 431886 - RNA, 19 nt, Artificial Sequence
  Description of Artificial Sequence: Synthetic oligonucleotide
acacucuaauaauucucua

SEQ ID NO: 431887 - RNA, 19 nt, Artificial Sequence
  Description of Artificial Sequence: Synthetic oligonucleotide
ccaaucguggcaccagacg

SEQ ID NO: 431888 - RNA, 19 nt, Artificial Sequence
  Description of Artificial Sequence: Synthetic oligonucleotide
ucaccuuggcguucagaaa

SEQ ID NO: 431889 - RNA, 19 nt, Artificial Sequence
  Description of Artificial Sequence: Synthetic oligonucleotide
uauccccuacacccacagc

SEQ ID NO: 431890 - RNA, 19 nt, Artificial Sequence
  Description of Artificial Sequence: Synthetic oligonucleotide
ggauaacagagcagggaag

SEQ ID NO: 431891 - RNA, 19 nt, Artificial Sequence
  Description of Artificial Sequence: Synthetic oligonucleotide
uucccgagcccuguggcca

SEQ ID NO: 431892 - RNA, 19 nt, Artificial Sequence
  Description of Artificial Sequence: Synthetic oligonucleotide
agauaccuccucugaagua

SEQ ID NO: 431893 - RNA, 19 nt, Artificial Sequence
  Description of Artificial Sequence: Synthetic oligonucleotide
ucgugaggaugcuccgcag

SEQ ID NO: 431894 - RNA, 19 nt, Artificial Sequence
  Description of Artificial Sequence: Synthetic oligonucleotide
ucguggcaccagacgaacc

SEQ ID NO: 431895 - RNA, 19 nt, Artificial Sequence
  Description of Artificial Sequence: Synthetic oligonucleotide
ggaguaacucucccaagga

SEQ ID NO: 431896 - RNA, 19 nt, Artificial Sequence
  Description of Artificial Sequence: Synthetic oligonucleotide
auacgggcaacaagggugu

SEQ ID NO: 431897 - RNA, 19 nt, Artificial Sequence
  Description of Artificial Sequence: Synthetic oligonucleotide
cagagccgggaguugcugc

SEQ ID NO: 431898 - RNA, 19 nt, Artificial Sequence
  Description of Artificial Sequence: Synthetic oligonucleotide
agacagcguucuugacucg

SEQ ID NO: 431899 - RNA, 19 nt, Artificial Sequence
  Description of Artificial Sequence: Synthetic oligonucleotide
gccgcucgccaucauaagg

SEQ ID NO: 431900 - RNA, 19 nt, Artificial Sequence
  Description of Artificial Sequence: Synthetic oligonucleotide
gucaugccgguguaacaac

SEQ ID NO: 431901 - RNA, 19 nt, Artificial Sequence
  Description of Artificial Sequence: Synthetic oligonucleotide
ggugaccaggaguaucccc

SEQ ID NO: 431902 - RNA, 19 nt, Artificial Sequence
  Description of Artificial Sequence: Synthetic oligonucleotide
guucucgaguuuggcaaag

SEQ ID NO: 431903 - RNA, 19 nt, Artificial Sequence
  Description of Artificial Sequence: Synthetic oligonucleotide
guaagcccuggugaucgag

SEQ ID NO: 431904 - RNA, 19 nt, Artificial Sequence
  Description of Artificial Sequence: Synthetic oligonucleotide
cagaaaccccaccccgggg

SEQ ID NO: 431905 - RNA, 19 nt, Artificial Sequence
  Description of Artificial Sequence: Synthetic oligonucleotide
caugcccucagagguacac

SEQ ID NO: 431906 - RNA, 19 nt, Artificial Sequence
  Description of Artificial Sequence: Synthetic oligonucleotide
uccagauaauugucuucua

SEQ ID NO: 431907 - RNA, 19 nt, Artificial Sequence
  Description of Artificial Sequence: Synthetic oligonucleotide
aucagagcggcggggagca

SEQ ID NO: 431908 - RNA, 19 nt, Artificial Sequence
  Description of Artificial Sequence: Synthetic oligonucleotide
uccccuacacccacagcua

SEQ ID NO: 431909 - RNA, 19 nt, Artificial Sequence
  Description of Artificial Sequence: Synthetic oligonucleotide
cacuccuauccagucuucc

SEQ ID NO: 431910 - RNA, 19 nt, Artificial Sequence
  Description of Artificial Sequence: Synthetic oligonucleotide
aaaggcgaggugacggcau

SEQ ID NO: 431911 - RNA, 19 nt, Artificial Sequence
  Description of Artificial Sequence: Synthetic oligonucleotide
gacucgcagagccucaccu

SEQ ID NO: 431912 - RNA, 19 nt, Artificial Sequence
  Description of Artificial Sequence: Synthetic oligonucleotide
cucggacacagcagucuac

SEQ ID NO: 431913 - RNA, 19 nt, Artificial Sequence
  Description of Artificial Sequence: Synthetic oligonucleotide
cuacuaggaacggggcggc

SEQ ID NO: 431914 - RNA, 19 nt, Artificial Sequence
  Description of Artificial Sequence: Synthetic oligonucleotide
gggugagcuaccuguauga

SEQ ID NO: 431915 - RNA, 19 nt, Artificial Sequence
  Description of Artificial Sequence: Synthetic oligonucleotide
ugcgauguagcggcccaca

SEQ ID NO: 431916 - RNA, 19 nt, Artificial Sequence
  Description of Artificial Sequence: Synthetic oligonucleotide
cugguacuccauugagcug

SEQ ID NO: 431917 - RNA, 19 nt, Artificial Sequence
  Description of Artificial Sequence: Synthetic oligonucleotide
uggcccgugccgcaacaga

SEQ ID NO: 431918 - RNA, 19 nt, Artificial Sequence
  Description of Artificial Sequence: Synthetic oligonucleotide
accuaguccaaguccuguu

SEQ ID NO: 431919 - RNA, 19 nt, Artificial Sequence
  Description of Artificial Sequence: Synthetic oligonucleotide
ccuacacccacagcuagcc

SEQ ID NO: 431920 - RNA, 19 nt, Artificial Sequence
  Description of Artificial Sequence: Synthetic oligonucleotide
cuacacccacagcuagccc

SEQ ID NO: 431921 - RNA, 19 nt, Artificial Sequence
  Description of Artificial Sequence: Synthetic oligonucleotide
aagagugaucugcgaugua

SEQ ID NO: 431922 - RNA, 19 nt, Artificial Sequence
  Description of Artificial Sequence: Synthetic oligonucleotide
gugaagcucucguaggccu

SEQ ID NO: 431923 - RNA, 19 nt, Artificial Sequence
  Description of Artificial Sequence: Synthetic oligonucleotide
gagcuaccuguaugacugc

SEQ ID NO: 431924 - RNA, 19 nt, Artificial Sequence
  Description of Artificial Sequence: Synthetic oligonucleotide
agcaacacacacacacagu

SEQ ID NO: 431925 - RNA, 19 nt, Artificial Sequence
  Description of Artificial Sequence: Synthetic oligonucleotide
ggugaagcucucguaggcc

SEQ ID NO: 431926 - RNA, 19 nt, Artificial Sequence
  Description of Artificial Sequence: Synthetic oligonucleotide
gcgugccucacgaagauac

SEQ ID NO: 431927 - RNA, 19 nt, Artificial Sequence
  Description of Artificial Sequence: Synthetic oligonucleotide
ccagugaagggcuggcuug

SEQ ID NO: 431928 - RNA, 19 nt, Artificial Sequence
  Description of Artificial Sequence: Synthetic oligonucleotide
gcuacguuucuuaguccgg

SEQ ID NO: 431929 - RNA, 19 nt, Artificial Sequence
  Description of Artificial Sequence: Synthetic oligonucleotide
cguuucuuaguccgggagc

SEQ ID NO: 431930 - RNA, 19 nt, Artificial Sequence
  Description of Artificial Sequence: Synthetic oligonucleotide
ggaugcuccgcaggaaaag

SEQ ID NO: 431931 - RNA, 19 nt, Artificial Sequence
  Description of Artificial Sequence: Synthetic oligonucleotide
cacucacuaacaucucaaa

SEQ ID NO: 431932 - RNA, 19 nt, Artificial Sequence
  Description of Artificial Sequence: Synthetic oligonucleotide
guaggcuacguuucuuagu

SEQ ID NO: 431933 - RNA, 19 nt, Artificial Sequence
  Description of Artificial Sequence: Synthetic oligonucleotide
aucgaggacagagccggga

SEQ ID NO: 431934 - RNA, 19 nt, Artificial Sequence
  Description of Artificial Sequence: Synthetic oligonucleotide
gguucggcaggcucggaca

SEQ ID NO: 431935 - RNA, 19 nt, Artificial Sequence
  Description of Artificial Sequence: Synthetic oligonucleotide
gaaguagcaccaggccuuc

SEQ ID NO: 431936 - RNA, 19 nt, Artificial Sequence
  Description of Artificial Sequence: Synthetic oligonucleotide
gcucccgagcaacacacac

SEQ ID NO: 431937 - RNA, 19 nt, Artificial Sequence
  Description of Artificial Sequence: Synthetic oligonucleotide
gcaacacacacacacaguu

SEQ ID NO: 431938 - RNA, 19 nt, Artificial Sequence
  Description of Artificial Sequence: Synthetic oligonucleotide
agcucucguaggccuccuc

SEQ ID NO: 431939 - RNA, 19 nt, Artificial Sequence
  Description of Artificial Sequence: Synthetic oligonucleotide
cacgaagauacuccagaua

SEQ ID NO: 431940 - RNA, 19 nt, Artificial Sequence
  Description of Artificial Sequence: Synthetic oligonucleotide
aaggauugaggggcccaaa

SEQ ID NO: 431941 - RNA, 19 nt, Artificial Sequence
  Description of Artificial Sequence: Synthetic oligonucleotide
cccugguacuccauugagc

SEQ ID NO: 431942 - RNA, 19 nt, Artificial Sequence
  Description of Artificial Sequence: Synthetic oligonucleotide
aggagcagaccagguucgg

SEQ ID NO: 431943 - RNA, 19 nt, Artificial Sequence
  Description of Artificial Sequence: Synthetic oligonucleotide
gaugcuccgcaggaaaagu

SEQ ID NO: 431944 - RNA, 19 nt, Artificial Sequence
  Description of Artificial Sequence: Synthetic oligonucleotide
ugggugucaugccggugua

SEQ ID NO: 431945 - RNA, 19 nt, Artificial Sequence
  Description of Artificial Sequence: Synthetic oligonucleotide
gguggagaguccgcagagg

SEQ ID NO: 431946 - RNA, 19 nt, Artificial Sequence
  Description of Artificial Sequence: Synthetic oligonucleotide
aggcgaggugacggcaugg

SEQ ID NO: 431947 - RNA, 19 nt, Artificial Sequence
  Description of Artificial Sequence: Synthetic oligonucleotide
guuggacugugugcaugcc

SEQ ID NO: 431948 - RNA, 19 nt, Artificial Sequence
  Description of Artificial Sequence: Synthetic oligonucleotide
gagguacacucuaauaauu

SEQ ID NO: 431949 - RNA, 19 nt, Artificial Sequence
  Description of Artificial Sequence: Synthetic oligonucleotide
caggcaguaggcuacguuu

SEQ ID NO: 431950 - RNA, 19 nt, Artificial Sequence
  Description of Artificial Sequence: Synthetic oligonucleotide
ugcaugccgcaggaguaac

SEQ ID NO: 431951 - RNA, 19 nt, Artificial Sequence
  Description of Artificial Sequence: Synthetic oligonucleotide
acgggcaacaaggguguca

SEQ ID NO: 431952 - RNA, 19 nt, Artificial Sequence
  Description of Artificial Sequence: Synthetic oligonucleotide
ggcucgugaggaugcuccg

SEQ ID NO: 431953 - RNA, 19 nt, Artificial Sequence
  Description of Artificial Sequence: Synthetic oligonucleotide
cuagcucaccagacuccuc

SEQ ID NO: 431954 - RNA, 19 nt, Artificial Sequence
  Description of Artificial Sequence: Synthetic oligonucleotide
cuaguccugccaugcccuc

SEQ ID NO: 431955 - RNA, 19 nt, Artificial Sequence
  Description of Artificial Sequence: Synthetic oligonucleotide
acagcguucuugacucgca

SEQ ID NO: 431956 - RNA, 19 nt, Artificial Sequence
  Description of Artificial Sequence: Synthetic oligonucleotide
aacuggaguugaagccccu

SEQ ID NO: 431957 - RNA, 19 nt, Artificial Sequence
  Description of Artificial Sequence: Synthetic oligonucleotide
acuggcccgugccgcaaca

SEQ ID NO: 431958 - RNA, 19 nt, Artificial Sequence
  Description of Artificial Sequence: Synthetic oligonucleotide
gcuggcgagcuucacucac

SEQ ID NO: 431959 - RNA, 19 nt, Artificial Sequence
  Description of Artificial Sequence: Synthetic oligonucleotide
ccccaccuaguccaagucc

SEQ ID NO: 431960 - RNA, 19 nt, Artificial Sequence
  Description of Artificial Sequence: Synthetic oligonucleotide
acggcgugccucacgaaga

SEQ ID NO: 431961 - RNA, 19 nt, Artificial Sequence
  Description of Artificial Sequence: Synthetic oligonucleotide
ggcgaggugacggcauggg

SEQ ID NO: 431962 - RNA, 19 nt, Artificial Sequence
  Description of Artificial Sequence: Synthetic oligonucleotide
caaggaugguguggguguc

SEQ ID NO: 431963 - RNA, 19 nt, Artificial Sequence
  Description of Artificial Sequence: Synthetic oligonucleotide
aggccgcucgccaucauaa

SEQ ID NO: 431964 - RNA, 19 nt, Artificial Sequence
  Description of Artificial Sequence: Synthetic oligonucleotide
gagaguccgcagagggcug

SEQ ID NO: 431965 - RNA, 19 nt, Artificial Sequence
  Description of Artificial Sequence: Synthetic oligonucleotide
gaucugcgauguagcggcc

SEQ ID NO: 431966 - RNA, 19 nt, Artificial Sequence
  Description of Artificial Sequence: Synthetic oligonucleotide
cuacaccacggcgugccuc

SEQ ID NO: 431967 - RNA, 19 nt, Artificial Sequence
  Description of Artificial Sequence: Synthetic oligonucleotide
gcuugccacgggcaaugag

SEQ ID NO: 431968 - RNA, 19 nt, Artificial Sequence
  Description of Artificial Sequence: Synthetic oligonucleotide
cgugccgcaacagaggcug

SEQ ID NO: 431969 - RNA, 19 nt, Artificial Sequence
  Description of Artificial Sequence: Synthetic oligonucleotide
ggcaggcucgugaggaugc

SEQ ID NO: 431970 - RNA, 19 nt, Artificial Sequence
  Description of Artificial Sequence: Synthetic oligonucleotide
cccgugccgcaacagaggc

SEQ ID NO: 431971 - RNA, 19 nt, Artificial Sequence
  Description of Artificial Sequence: Synthetic oligonucleotide
caccaaucguggcaccaga

SEQ ID NO: 431972 - RNA, 19 nt, Artificial Sequence
  Description of Artificial Sequence: Synthetic oligonucleotide
caguggggcucccaucuga

SEQ ID NO: 431973 - RNA, 19 nt, Artificial Sequence
  Description of Artificial Sequence: Synthetic oligonucleotide
gcgauguagcggcccacag

SEQ ID NO: 431974 - RNA, 19 nt, Artificial Sequence
  Description of Artificial Sequence: Synthetic oligonucleotide
caccacggcgugccucacg

SEQ ID NO: 431975 - RNA, 19 nt, Artificial Sequence
  Description of Artificial Sequence: Synthetic oligonucleotide
ccuucucgauggacaaaag

SEQ ID NO: 431976 - RNA, 19 nt, Artificial Sequence
  Description of Artificial Sequence: Synthetic oligonucleotide
gggugucaaggauggugug

SEQ ID NO: 431977 - RNA, 19 nt, Artificial Sequence
  Description of Artificial Sequence: Synthetic oligonucleotide
cuaccuguaugacugcauu

SEQ ID NO: 431978 - RNA, 19 nt, Artificial Sequence
  Description of Artificial Sequence: Synthetic oligonucleotide
cacacacacacaguuggcu

SEQ ID NO: 431979 - RNA, 19 nt, Artificial Sequence
  Description of Artificial Sequence: Synthetic oligonucleotide
gcccugguuggacugugug

SEQ ID NO: 431980 - RNA, 19 nt, Artificial Sequence
  Description of Artificial Sequence: Synthetic oligonucleotide
gccgcaacagaggcuggcg

SEQ ID NO: 431981 - RNA, 19 nt, Artificial Sequence
  Description of Artificial Sequence: Synthetic oligonucleotide
aggcucggacacagcaguc

SEQ ID NO: 431982 - RNA, 19 nt, Artificial Sequence
  Description of Artificial Sequence: Synthetic oligonucleotide
ccgcucgccaucauaagga

SEQ ID NO: 431983 - RNA, 19 nt, Artificial Sequence
  Description of Artificial Sequence: Synthetic oligonucleotide
ggaguauccccuacaccca

SEQ ID NO: 431984 - RNA, 19 nt, Artificial Sequence
  Description of Artificial Sequence: Synthetic oligonucleotide
ggcagaaguaagagugauc

SEQ ID NO: 431985 - RNA, 19 nt, Artificial Sequence
  Description of Artificial Sequence: Synthetic oligonucleotide
cccuacacccacagcuagc

SEQ ID NO: 431986 - RNA, 19 nt, Artificial Sequence
  Description of Artificial Sequence: Synthetic oligonucleotide
caacaagggugucaaggau

SEQ ID NO: 431987 - RNA, 19 nt, Artificial Sequence
  Description of Artificial Sequence: Synthetic oligonucleotide
ugacggcaugggccuggga

SEQ ID NO: 431988 - RNA, 19 nt, Artificial Sequence
  Description of Artificial Sequence: Synthetic oligonucleotide
cucccaucugagagagcca

SEQ ID NO: 431989 - RNA, 19 nt, Artificial Sequence
  Description of Artificial Sequence: Synthetic oligonucleotide
augcuccgcaggaaaaguu

SEQ ID NO: 431990 - RNA, 19 nt, Artificial Sequence
  Description of Artificial Sequence: Synthetic oligonucleotide
gugacggcaugggccuggg

SEQ ID NO: 431991 - RNA, 19 nt, Artificial Sequence
  Description of Artificial Sequence: Synthetic oligonucleotide
agccgggaguugcugccaa

SEQ ID NO: 431992 - RNA, 19 nt, Artificial Sequence
  Description of Artificial Sequence: Synthetic oligonucleotide
gauaggcgguacuggcaau

SEQ ID NO: 431993 - RNA, 19 nt, Artificial Sequence
  Description of Artificial Sequence: Synthetic oligonucleotide
gcugggcuacuaggaacgg

SEQ ID NO: 431994 - RNA, 19 nt, Artificial Sequence
  Description of Artificial Sequence: Synthetic oligonucleotide
gccgguguaacaacaggaa

SEQ ID NO: 431995 - RNA, 19 nt, Artificial Sequence
  Description of Artificial Sequence: Synthetic oligonucleotide
guggggcucccaucugaga

SEQ ID NO: 431996 - RNA, 19 nt, Artificial Sequence
  Description of Artificial Sequence: Synthetic oligonucleotide
ccuuggcguucagaaaccc

SEQ ID NO: 431997 - RNA, 19 nt, Artificial Sequence
  Description of Artificial Sequence: Synthetic oligonucleotide
gcuucucacuagagaauca

SEQ ID NO: 431998 - RNA, 19 nt, Artificial Sequence
  Description of Artificial Sequence: Synthetic oligonucleotide
ccagguucggcaggcucgg

SEQ ID NO: 431999 - RNA, 19 nt, Artificial Sequence
  Description of Artificial Sequence: Synthetic oligonucleotide
caggaaucgcaggaaggua

SEQ ID NO: 432000 - RNA, 19 nt, Artificial Sequence
  Description of Artificial Sequence: Synthetic oligonucleotide
ggccgcucgccaucauaag

SEQ ID NO: 432001 - RNA, 19 nt, Artificial Sequence
  Description of Artificial Sequence: Synthetic oligonucleotide
ggaauucggcccaggccac

SEQ ID NO: 432002 - RNA, 19 nt, Artificial Sequence
  Description of Artificial Sequence: Synthetic oligonucleotide
cuggcccgugccgcaacag

SEQ ID NO: 432003 - RNA, 19 nt, Artificial Sequence
  Description of Artificial Sequence: Synthetic oligonucleotide
cugccaauacgggcaacaa

SEQ ID NO: 432004 - RNA, 19 nt, Artificial Sequence
  Description of Artificial Sequence: Synthetic oligonucleotide
agacggaguucugcagcau

SEQ ID NO: 432005 - RNA, 19 nt, Artificial Sequence
  Description of Artificial Sequence: Synthetic oligonucleotide
gcucgugaggaugcuccgc

SEQ ID NO: 432006 - RNA, 19 nt, Artificial Sequence
  Description of Artificial Sequence: Synthetic oligonucleotide
cugcgauguagcggcccac

SEQ ID NO: 432007 - RNA, 19 nt, Artificial Sequence
  Description of Artificial Sequence: Synthetic oligonucleotide
gcucggacacagcagucua

SEQ ID NO: 432008 - RNA, 19 nt, Artificial Sequence
  Description of Artificial Sequence: Synthetic oligonucleotide
ggcaguaggcuacguuucu

SEQ ID NO: 432009 - RNA, 19 nt, Artificial Sequence
  Description of Artificial Sequence: Synthetic oligonucleotide
cgagcaacacacacacaca

SEQ ID NO: 432010 - RNA, 19 nt, Artificial Sequence
  Description of Artificial Sequence: Synthetic oligonucleotide
cgggaguugcugccaauac

SEQ ID NO: 432011 - RNA, 19 nt, Artificial Sequence
  Description of Artificial Sequence: Synthetic oligonucleotide
cuaggccgucggccagggc

SEQ ID NO: 432012 - RNA, 19 nt, Artificial Sequence
  Description of Artificial Sequence: Synthetic oligonucleotide
uacgggcaacaaggguguc

SEQ ID NO: 432013 - RNA, 19 nt, Artificial Sequence
  Description of Artificial Sequence: Synthetic oligonucleotide
ggcggggagcagauccugc

SEQ ID NO: 432014 - RNA, 19 nt, Artificial Sequence
  Description of Artificial Sequence: Synthetic oligonucleotide
caccuaguccaaguccugu

SEQ ID NO: 432015 - RNA, 19 nt, Artificial Sequence
  Description of Artificial Sequence: Synthetic oligonucleotide
ggcuggcgagcuucacuca

SEQ ID NO: 432016 - RNA, 19 nt, Artificial Sequence
  Description of Artificial Sequence: Synthetic oligonucleotide
gcucuaagggaggcucuga

SEQ ID NO: 432017 - RNA, 19 nt, Artificial Sequence
  Description of Artificial Sequence: Synthetic oligonucleotide
gcuggcacuccuauccagu

SEQ ID NO: 432018 - RNA, 19 nt, Artificial Sequence
  Description of Artificial Sequence: Synthetic oligonucleotide
ggcucggacacagcagucu

SEQ ID NO: 432019 - RNA, 19 nt, Artificial Sequence
  Description of Artificial Sequence: Synthetic oligonucleotide
cagcaccgggcagaaguaa

SEQ ID NO: 432020 - RNA, 19 nt, Artificial Sequence
  Description of Artificial Sequence: Synthetic oligonucleotide
ggcgagcuucacucacuaa

SEQ ID NO: 432021 - RNA, 19 nt, Artificial Sequence
  Description of Artificial Sequence: Synthetic oligonucleotide
cguggcaccagacgaaccu

SEQ ID NO: 432022 - RNA, 19 nt, Artificial Sequence
  Description of Artificial Sequence: Synthetic oligonucleotide
ccgguguaacaacaggaau

SEQ ID NO: 432023 - RNA, 19 nt, Artificial Sequence
  Description of Artificial Sequence: Synthetic oligonucleotide
cacaguagacagcguucuu

SEQ ID NO: 432024 - RNA, 19 nt, Artificial Sequence
  Description of Artificial Sequence: Synthetic oligonucleotide
cagucuucccgagcccugu

SEQ ID NO: 432025 - RNA, 19 nt, Artificial Sequence
  Description of Artificial Sequence: Synthetic oligonucleotide
ggaggcucuaagggaggcu

SEQ ID NO: 432026 - RNA, 19 nt, Artificial Sequence
  Description of Artificial Sequence: Synthetic oligonucleotide
gguaggugaccaggaguau

SEQ ID NO: 432027 - RNA, 19 nt, Artificial Sequence
  Description of Artificial Sequence: Synthetic oligonucleotide
cccgauucccuggguuuuc

SEQ ID NO: 432028 - RNA, 19 nt, Artificial Sequence
  Description of Artificial Sequence: Synthetic oligonucleotide
ggcucccgagcaacacaca

SEQ ID NO: 432029 - RNA, 19 nt, Artificial Sequence
  Description of Artificial Sequence: Synthetic oligonucleotide
gggugucaugccgguguaa

SEQ ID NO: 432030 - RNA, 19 nt, Artificial Sequence
  Description of Artificial Sequence: Synthetic oligonucleotide
ccgggaguugcugccaaua

SEQ ID NO: 432031 - RNA, 19 nt, Artificial Sequence
  Description of Artificial Sequence: Synthetic oligonucleotide
gcaguaggcuacguuucuu

SEQ ID NO: 432032 - RNA, 19 nt, Artificial Sequence
  Description of Artificial Sequence: Synthetic oligonucleotide
ggcgugccucacgaagaua

SEQ ID NO: 432033 - RNA, 19 nt, Artificial Sequence
  Description of Artificial Sequence: Synthetic oligonucleotide
cugccgggcccugguugga

SEQ ID NO: 432034 - RNA, 19 nt, Artificial Sequence
  Description of Artificial Sequence: Synthetic oligonucleotide
cagguucggcaggcucgga

SEQ ID NO: 432035 - RNA, 19 nt, Artificial Sequence
  Description of Artificial Sequence: Synthetic oligonucleotide
gccgggcccugguuggacu

SEQ ID NO: 432036 - RNA, 19 nt, Artificial Sequence
  Description of Artificial Sequence: Synthetic oligonucleotide
gcggcggggagcagauccu

SEQ ID NO: 432037 - RNA, 19 nt, Artificial Sequence
  Description of Artificial Sequence: Synthetic oligonucleotide
gccucacgaacuggcccgu

SEQ ID NO: 432038 - RNA, 19 nt, Artificial Sequence
  Description of Artificial Sequence: Synthetic oligonucleotide
ccgugccgcaacagaggcu

SEQ ID NO: 432039 - RNA, 19 nt, Artificial Sequence
  Description of Artificial Sequence: Synthetic oligonucleotide
ccagcuugccacgggcaau

SEQ ID NO: 432040 - RNA, 19 nt, Artificial Sequence
  Description of Artificial Sequence: Synthetic oligonucleotide
cgaaccuucuuggcucccu

SEQ ID NO: 432041 - RNA, 19 nt, Artificial Sequence
  Description of Artificial Sequence: Synthetic oligonucleotide
ccacggcgugccucacgaa

SEQ ID NO: 432042 - RNA, 19 nt, Artificial Sequence
  Description of Artificial Sequence: Synthetic oligonucleotide
ccgucggccagggcuggaa

SEQ ID NO: 432043 - RNA, 19 nt, Artificial Sequence
  Description of Artificial Sequence: Synthetic oligonucleotide
gccgucggccagggcugga

SEQ ID NO: 432044 - RNA, 19 nt, Artificial Sequence
  Description of Artificial Sequence: Synthetic oligonucleotide
ccccgauucccuggguuuu

SEQ ID NO: 432045 - RNA, 19 nt, Artificial Sequence
  Description of Artificial Sequence: Synthetic oligonucleotide
aauucaaagacucagaggc

SEQ ID NO: 432046 - RNA, 19 nt, Artificial Sequence
  Description of Artificial Sequence: Synthetic oligonucleotide
uuaaugugaacuuauaugg

SEQ ID NO: 432047 - RNA, 19 nt, Artificial Sequence
  Description of Artificial Sequence: Synthetic oligonucleotide
agaacaacugaauacauac

SEQ ID NO: 432048 - RNA, 19 nt, Artificial Sequence
  Description of Artificial Sequence: Synthetic oligonucleotide
aauaauucuuuccaccuac

SEQ ID NO: 432049 - RNA, 19 nt, Artificial Sequence
  Description of Artificial Sequence: Synthetic oligonucleotide
aauauagucccaucuagac

SEQ ID NO: 432050 - RNA, 19 nt, Artificial Sequence
  Description of Artificial Sequence: Synthetic oligonucleotide
aaaguaugcaccaauaaac

SEQ ID NO: 432051 - RNA, 19 nt, Artificial Sequence
  Description of Artificial Sequence: Synthetic oligonucleotide
accaauaaacgucaaaggc

SEQ ID NO: 432052 - RNA, 19 nt, Artificial Sequence
  Description of Artificial Sequence: Synthetic oligonucleotide
aauaucuuuaugcagcgug

SEQ ID NO: 432053 - RNA, 19 nt, Artificial Sequence
  Description of Artificial Sequence: Synthetic oligonucleotide
uauagucccaucuagacgc

SEQ ID NO: 432054 - RNA, 19 nt, Artificial Sequence
  Description of Artificial Sequence: Synthetic oligonucleotide
agaguaagaagauaugaac

SEQ ID NO: 432055 - RNA, 19 nt, Artificial Sequence
  Description of Artificial Sequence: Synthetic oligonucleotide
auuaaugugaacuuauaug

SEQ ID NO: 432056 - RNA, 19 nt, Artificial Sequence
  Description of Artificial Sequence: Synthetic oligonucleotide
aaauacaucuuguggguac

SEQ ID NO: 432057 - RNA, 19 nt, Artificial Sequence
  Description of Artificial Sequence: Synthetic oligonucleotide
ugaacuuauauggugaggg

SEQ ID NO: 432058 - RNA, 19 nt, Artificial Sequence
  Description of Artificial Sequence: Synthetic oligonucleotide
gaaaauucaagguagucac

SEQ ID NO: 432059 - RNA, 19 nt, Artificial Sequence
  Description of Artificial Sequence: Synthetic oligonucleotide
aauaagucugagaaaauuc

SEQ ID NO: 432060 - RNA, 19 nt, Artificial Sequence
  Description of Artificial Sequence: Synthetic oligonucleotide
aaugaugucaguaaaacau

SEQ ID NO: 432061 - RNA, 19 nt, Artificial Sequence
  Description of Artificial Sequence: Synthetic oligonucleotide
aguauaggcaauuuugauc

SEQ ID NO: 432062 - RNA, 19 nt, Artificial Sequence
  Description of Artificial Sequence: Synthetic oligonucleotide
aggcauauuauccacaauc

SEQ ID NO: 432063 - RNA, 19 nt, Artificial Sequence
  Description of Artificial Sequence: Synthetic oligonucleotide
auaacaccacguuacaggc

SEQ ID NO: 432064 - RNA, 19 nt, Artificial Sequence
  Description of Artificial Sequence: Synthetic oligonucleotide
uauggcauauauuaagaag

SEQ ID NO: 432065 - RNA, 19 nt, Artificial Sequence
  Description of Artificial Sequence: Synthetic oligonucleotide
uaucauaguauaaccaaag

SEQ ID NO: 432066 - RNA, 19 nt, Artificial Sequence
  Description of Artificial Sequence: Synthetic oligonucleotide
cauauuauccacaauccag

SEQ ID NO: 432067 - RNA, 19 nt, Artificial Sequence
  Description of Artificial Sequence: Synthetic oligonucleotide
uguauaaagaugcagccaa

SEQ ID NO: 432068 - RNA, 19 nt, Artificial Sequence
  Description of Artificial Sequence: Synthetic oligonucleotide
uccaaucacaauacaaacg

SEQ ID NO: 432069 - RNA, 19 nt, Artificial Sequence
  Description of Artificial Sequence: Synthetic oligonucleotide
agaagauaugaacaauuac

SEQ ID NO: 432070 - RNA, 19 nt, Artificial Sequence
  Description of Artificial Sequence: Synthetic oligonucleotide
auucuuuccaccuaccgag

SEQ ID NO: 432071 - RNA, 19 nt, Artificial Sequence
  Description of Artificial Sequence: Synthetic oligonucleotide
gaagauaugaacaauuaca

SEQ ID NO: 432072 - RNA, 19 nt, Artificial Sequence
  Description of Artificial Sequence: Synthetic oligonucleotide
aacgcuuuaguguugaaau

SEQ ID NO: 432073 - RNA, 19 nt, Artificial Sequence
  Description of Artificial Sequence: Synthetic oligonucleotide
ucuaacuggauguucaaug

SEQ ID NO: 432074 - RNA, 19 nt, Artificial Sequence
  Description of Artificial Sequence: Synthetic oligonucleotide
aauccuauuuacaaucaac

SEQ ID NO: 432075 - RNA, 19 nt, Artificial Sequence
  Description of Artificial Sequence: Synthetic oligonucleotide
uugaugaagauuuaguuua

SEQ ID NO: 432076 - RNA, 19 nt, Artificial Sequence
  Description of Artificial Sequence: Synthetic oligonucleotide
uggaggacggaauauaucc

SEQ ID NO: 432077 - RNA, 19 nt, Artificial Sequence
  Description of Artificial Sequence: Synthetic oligonucleotide
uaacagaguaaguauaggc

SEQ ID NO: 432078 - RNA, 19 nt, Artificial Sequence
  Description of Artificial Sequence: Synthetic oligonucleotide
augauaauauauuuugaug

SEQ ID NO: 432079 - RNA, 19 nt, Artificial Sequence
  Description of Artificial Sequence: Synthetic oligonucleotide
cuaguuuccagccaaauuc

SEQ ID NO: 432080 - RNA, 19 nt, Artificial Sequence
  Description of Artificial Sequence: Synthetic oligonucleotide
auaaucauagcuaccauuc

SEQ ID NO: 432081 - RNA, 19 nt, Artificial Sequence
  Description of Artificial Sequence: Synthetic oligonucleotide
aaguacaggauugugcugg

SEQ ID NO: 432082 - RNA, 19 nt, Artificial Sequence
  Description of Artificial Sequence: Synthetic oligonucleotide
aaaguuuauagcuaucaua

SEQ ID NO: 432083 - RNA, 19 nt, Artificial Sequence
  Description of Artificial Sequence: Synthetic oligonucleotide
aaaaugauaaacaccagaa

SEQ ID NO: 432084 - RNA, 19 nt, Artificial Sequence
  Description of Artificial Sequence: Synthetic oligonucleotide
auaugaacaauuacaaccg

SEQ ID NO: 432085 - RNA, 19 nt, Artificial Sequence
  Description of Artificial Sequence: Synthetic oligonucleotide
uaguguauggcauauauua

SEQ ID NO: 432086 - RNA, 19 nt, Artificial Sequence
  Description of Artificial Sequence: Synthetic oligonucleotide
auaaagaugcagccaaagg

SEQ ID NO: 432087 - RNA, 19 nt, Artificial Sequence
  Description of Artificial Sequence: Synthetic oligonucleotide
aaucugauugguucuaacu

SEQ ID NO: 432088 - RNA, 19 nt, Artificial Sequence
  Description of Artificial Sequence: Synthetic oligonucleotide
auccaaucacaauacaaac

SEQ ID NO: 432089 - RNA, 19 nt, Artificial Sequence
  Description of Artificial Sequence: Synthetic oligonucleotide
acuaaucuugcucccaugg

SEQ ID NO: 432090 - RNA, 19 nt, Artificial Sequence
  Description of Artificial Sequence: Synthetic oligonucleotide
aaaaccauuaucauaguau

SEQ ID NO: 432091 - RNA, 19 nt, Artificial Sequence
  Description of Artificial Sequence: Synthetic oligonucleotide
uauuaagauaacaaauuua

SEQ ID NO: 432092 - RNA, 19 nt, Artificial Sequence
  Description of Artificial Sequence: Synthetic oligonucleotide
gaggauuagauucauuaug

SEQ ID NO: 432093 - RNA, 19 nt, Artificial Sequence
  Description of Artificial Sequence: Synthetic oligonucleotide
aaaaucugugucccggauc

SEQ ID NO: 432094 - RNA, 19 nt, Artificial Sequence
  Description of Artificial Sequence: Synthetic oligonucleotide
acuuaauccaaucacaaua

SEQ ID NO: 432095 - RNA, 19 nt, Artificial Sequence
  Description of Artificial Sequence: Synthetic oligonucleotide
accauuaucauaguauaac

SEQ ID NO: 432096 - RNA, 19 nt, Artificial Sequence
  Description of Artificial Sequence: Synthetic oligonucleotide
caauaaacgucaaaggcac

SEQ ID NO: 432097 - RNA, 19 nt, Artificial Sequence
  Description of Artificial Sequence: Synthetic oligonucleotide
uuaaguaugcuguuucuga

SEQ ID NO: 432098 - RNA, 19 nt, Artificial Sequence
  Description of Artificial Sequence: Synthetic oligonucleotide
uguauggcauauauuaaga

SEQ ID NO: 432099 - RNA, 19 nt, Artificial Sequence
  Description of Artificial Sequence: Synthetic oligonucleotide
aaugauaauccuccgcaca

SEQ ID NO: 432100 - RNA, 19 nt, Artificial Sequence
  Description of Artificial Sequence: Synthetic oligonucleotide
aaguaugcaccaauaaacg

SEQ ID NO: 432101 - RNA, 19 nt, Artificial Sequence
  Description of Artificial Sequence: Synthetic oligonucleotide
aguuuaaaaggccgauacc

SEQ ID NO: 432102 - RNA, 19 nt, Artificial Sequence
  Description of Artificial Sequence: Synthetic oligonucleotide
agauaugaacaauuacaac

SEQ ID NO: 432103 - RNA, 19 nt, Artificial Sequence
  Description of Artificial Sequence: Synthetic oligonucleotide
uauuaaugugaacuuauau

SEQ ID NO: 432104 - RNA, 19 nt, Artificial Sequence
  Description of Artificial Sequence: Synthetic oligonucleotide
ugucuguaauguaacagcc

SEQ ID NO: 432105 - RNA, 19 nt, Artificial Sequence
  Description of Artificial Sequence: Synthetic oligonucleotide
uaauccuccgcacauaggu

SEQ ID NO: 432106 - RNA, 19 nt, Artificial Sequence
  Description of Artificial Sequence: Synthetic oligonucleotide
uguagaaucuggcagcaac

SEQ ID NO: 432107 - RNA, 19 nt, Artificial Sequence
  Description of Artificial Sequence: Synthetic oligonucleotide
gauaccaugggaauaauga

SEQ ID NO: 432108 - RNA, 19 nt, Artificial Sequence
  Description of Artificial Sequence: Synthetic oligonucleotide
ucuaaucugccauuagaag

SEQ ID NO: 432109 - RNA, 19 nt, Artificial Sequence
  Description of Artificial Sequence: Synthetic oligonucleotide
uaugguauguuuucgugca

SEQ ID NO: 432110 - RNA, 19 nt, Artificial Sequence
  Description of Artificial Sequence: Synthetic oligonucleotide
auccuagaaagacugacag

SEQ ID NO: 432111 - RNA, 19 nt, Artificial Sequence
  Description of Artificial Sequence: Synthetic oligonucleotide
uaguauaaccaaaguacag

SEQ ID NO: 432112 - RNA, 19 nt, Artificial Sequence
  Description of Artificial Sequence: Synthetic oligonucleotide
auauagucccaucuagacg

SEQ ID NO: 432113 - RNA, 19 nt, Artificial Sequence
  Description of Artificial Sequence: Synthetic oligonucleotide
aaaccauuaucauaguaua

SEQ ID NO: 432114 - RNA, 19 nt, Artificial Sequence
  Description of Artificial Sequence: Synthetic oligonucleotide
aguuucaacaacaugauaa

SEQ ID NO: 432115 - RNA, 19 nt, Artificial Sequence
  Description of Artificial Sequence: Synthetic oligonucleotide
auccccgugaacuaguuuc

SEQ ID NO: 432116 - RNA, 19 nt, Artificial Sequence
  Description of Artificial Sequence: Synthetic oligonucleotide
uaagaagauaugaacaauu

SEQ ID NO: 432117 - RNA, 19 nt, Artificial Sequence
  Description of Artificial Sequence: Synthetic oligonucleotide
uguuuucgugcaaacaagc

SEQ ID NO: 432118 - RNA, 19 nt, Artificial Sequence
  Description of Artificial Sequence: Synthetic oligonucleotide
uuucgugcaaacaagcuua

SEQ ID NO: 432119 - RNA, 19 nt, Artificial Sequence
  Description of Artificial Sequence: Synthetic oligonucleotide
gaacaauuacaaccgauac

SEQ ID NO: 432120 - RNA, 19 nt, Artificial Sequence
  Description of Artificial Sequence: Synthetic oligonucleotide
aagauaugaacaauuacaa

SEQ ID NO: 432121 - RNA, 19 nt, Artificial Sequence
  Description of Artificial Sequence: Synthetic oligonucleotide
acgucaaaggcacagauau

SEQ ID NO: 432122 - RNA, 19 nt, Artificial Sequence
  Description of Artificial Sequence: Synthetic oligonucleotide
gauugguucuaacuggaug

SEQ ID NO: 432123 - RNA, 19 nt, Artificial Sequence
  Description of Artificial Sequence: Synthetic oligonucleotide
uuaucauaguauaaccaaa

SEQ ID NO: 432124 - RNA, 19 nt, Artificial Sequence
  Description of Artificial Sequence: Synthetic oligonucleotide
uuaaaaggccgauaccaug

SEQ ID NO: 432125 - RNA, 19 nt, Artificial Sequence
  Description of Artificial Sequence: Synthetic oligonucleotide
uguaugguauguuuucgug

SEQ ID NO: 432126 - RNA, 19 nt, Artificial Sequence
  Description of Artificial Sequence: Synthetic oligonucleotide
uugaaaaguuuauagcuau

SEQ ID NO: 432127 - RNA, 19 nt, Artificial Sequence
  Description of Artificial Sequence: Synthetic oligonucleotide
uggacuccaaaauauaguc

SEQ ID NO: 432128 - RNA, 19 nt, Artificial Sequence
  Description of Artificial Sequence: Synthetic oligonucleotide
agaaugacuguucaggaau

SEQ ID NO: 432129 - RNA, 19 nt, Artificial Sequence
  Description of Artificial Sequence: Synthetic oligonucleotide
uguggguacaggcgcaugg

SEQ ID NO: 432130 - RNA, 19 nt, Artificial Sequence
  Description of Artificial Sequence: Synthetic oligonucleotide
guguauggcauauauuaag

SEQ ID NO: 432131 - RNA, 19 nt, Artificial Sequence
  Description of Artificial Sequence: Synthetic oligonucleotide
auaaccaaggaguucauua

SEQ ID NO: 432132 - RNA, 19 nt, Artificial Sequence
  Description of Artificial Sequence: Synthetic oligonucleotide
cauggacuccaaaauauag

SEQ ID NO: 432133 - RNA, 19 nt, Artificial Sequence
  Description of Artificial Sequence: Synthetic oligonucleotide
aacaccacguuacaggcau

SEQ ID NO: 432134 - RNA, 19 nt, Artificial Sequence
  Description of Artificial Sequence: Synthetic oligonucleotide
aucuucgacaucauaacac

SEQ ID NO: 432135 - RNA, 19 nt, Artificial Sequence
  Description of Artificial Sequence: Synthetic oligonucleotide
guuuaaaaggccgauacca

SEQ ID NO: 432136 - RNA, 19 nt, Artificial Sequence
  Description of Artificial Sequence: Synthetic oligonucleotide
ugugaacuuauauggugag

SEQ ID NO: 432137 - RNA, 19 nt, Artificial Sequence
  Description of Artificial Sequence: Synthetic oligonucleotide
ugacuguucaggaaucuga

SEQ ID NO: 432138 - RNA, 19 nt, Artificial Sequence
  Description of Artificial Sequence: Synthetic oligonucleotide
gugcguaacauaaucauag

SEQ ID NO: 432139 - RNA, 19 nt, Artificial Sequence
  Description of Artificial Sequence: Synthetic oligonucleotide
aaaaggccgauaccauggg

SEQ ID NO: 432140 - RNA, 19 nt, Artificial Sequence
  Description of Artificial Sequence: Synthetic oligonucleotide
gaggguucaauucucuccc

SEQ ID NO: 432141 - RNA, 19 nt, Artificial Sequence
  Description of Artificial Sequence: Synthetic oligonucleotide
ucugaaggauuacuaggcc

SEQ ID NO: 432142 - RNA, 19 nt, Artificial Sequence
  Description of Artificial Sequence: Synthetic oligonucleotide
aagucuaacuuuuguuugu

SEQ ID NO: 432143 - RNA, 19 nt, Artificial Sequence
  Description of Artificial Sequence: Synthetic oligonucleotide
ucagucaaccuucaccaca

SEQ ID NO: 432144 - RNA, 19 nt, Artificial Sequence
  Description of Artificial Sequence: Synthetic oligonucleotide
uucgacaucauaacaccac

SEQ ID NO: 432145 - RNA, 19 nt, Artificial Sequence
  Description of Artificial Sequence: Synthetic oligonucleotide
ucauuaugcuaaaccacug

SEQ ID NO: 432146 - RNA, 19 nt, Artificial Sequence
  Description of Artificial Sequence: Synthetic oligonucleotide
ugaugugaccaaaugcugu

SEQ ID NO: 432147 - RNA, 19 nt, Artificial Sequence
  Description of Artificial Sequence: Synthetic oligonucleotide
aaguauaggcaauuuugau

SEQ ID NO: 432148 - RNA, 19 nt, Artificial Sequence
  Description of Artificial Sequence: Synthetic oligonucleotide
uaggaaucauccuucaaaa

SEQ ID NO: 432149 - RNA, 19 nt, Artificial Sequence
  Description of Artificial Sequence: Synthetic oligonucleotide
cuucagucaaccuucacca

SEQ ID NO: 432150 - RNA, 19 nt, Artificial Sequence
  Description of Artificial Sequence: Synthetic oligonucleotide
guauaaccaaaguacagga

SEQ ID NO: 432151 - RNA, 19 nt, Artificial Sequence
  Description of Artificial Sequence: Synthetic oligonucleotide
uuuucgugcaaacaagcuu

SEQ ID NO: 432152 - RNA, 19 nt, Artificial Sequence
  Description of Artificial Sequence: Synthetic oligonucleotide
cauacuuaauccaaucaca

SEQ ID NO: 432153 - RNA, 19 nt, Artificial Sequence
  Description of Artificial Sequence: Synthetic oligonucleotide
agcuaucauauuuacaaau

SEQ ID NO: 432154 - RNA, 19 nt, Artificial Sequence
  Description of Artificial Sequence: Synthetic oligonucleotide
aaacgucaaaggcacagau

SEQ ID NO: 432155 - RNA, 19 nt, Artificial Sequence
  Description of Artificial Sequence: Synthetic oligonucleotide
gaggacggaauauaucccc

SEQ ID NO: 432156 - RNA, 19 nt, Artificial Sequence
  Description of Artificial Sequence: Synthetic oligonucleotide
uuuaaaaggccgauaccau

SEQ ID NO: 432157 - RNA, 19 nt, Artificial Sequence
  Description of Artificial Sequence: Synthetic oligonucleotide
guaugguauguuuucgugc

SEQ ID NO: 432158 - RNA, 19 nt, Artificial Sequence
  Description of Artificial Sequence: Synthetic oligonucleotide
cuaaaccacugaauguggg

SEQ ID NO: 432159 - RNA, 19 nt, Artificial Sequence
  Description of Artificial Sequence: Synthetic oligonucleotide
cauguaauacaucugaugu

SEQ ID NO: 432160 - RNA, 19 nt, Artificial Sequence
  Description of Artificial Sequence: Synthetic oligonucleotide
aaauaauucuuuccaccua

SEQ ID NO: 432161 - RNA, 19 nt, Artificial Sequence
  Description of Artificial Sequence: Synthetic oligonucleotide
uuccagauaagaacagaac

SEQ ID NO: 432162 - RNA, 19 nt, Artificial Sequence
  Description of Artificial Sequence: Synthetic oligonucleotide
aaaguacaggauugugcug

SEQ ID NO: 432163 - RNA, 19 nt, Artificial Sequence
  Description of Artificial Sequence: Synthetic oligonucleotide
ggcacagauaugcagaacc

SEQ ID NO: 432164 - RNA, 19 nt, Artificial Sequence
  Description of Artificial Sequence: Synthetic oligonucleotide
ucuauauggguauguuuga

SEQ ID NO: 432165 - RNA, 19 nt, Artificial Sequence
  Description of Artificial Sequence: Synthetic oligonucleotide
aguauuauggccuccucua

SEQ ID NO: 432166 - RNA, 19 nt, Artificial Sequence
  Description of Artificial Sequence: Synthetic oligonucleotide
ugcagcgugcguaacauaa

SEQ ID NO: 432167 - RNA, 19 nt, Artificial Sequence
  Description of Artificial Sequence: Synthetic oligonucleotide
uaucuuuaugcagcgugcg

SEQ ID NO: 432168 - RNA, 19 nt, Artificial Sequence
  Description of Artificial Sequence: Synthetic oligonucleotide
gucaacacagaagaguaag

SEQ ID NO: 432169 - RNA, 19 nt, Artificial Sequence
  Description of Artificial Sequence: Synthetic oligonucleotide
cagcuacuaaucuugcucc

SEQ ID NO: 432170 - RNA, 19 nt, Artificial Sequence
  Description of Artificial Sequence: Synthetic oligonucleotide
uaccgagccuagaaaaucc

SEQ ID NO: 432171 - RNA, 19 nt, Artificial Sequence
  Description of Artificial Sequence: Synthetic oligonucleotide
aguuuagcagcuacuaauc

SEQ ID NO: 432172 - RNA, 19 nt, Artificial Sequence
  Description of Artificial Sequence: Synthetic oligonucleotide
caaucaacuguccagucuc

SEQ ID NO: 432173 - RNA, 19 nt, Artificial Sequence
  Description of Artificial Sequence: Synthetic oligonucleotide
aagaaguaugguugcuuca

SEQ ID NO: 432174 - RNA, 19 nt, Artificial Sequence
  Description of Artificial Sequence: Synthetic oligonucleotide
uuacuaggccaauaagucu

SEQ ID NO: 432175 - RNA, 19 nt, Artificial Sequence
  Description of Artificial Sequence: Synthetic oligonucleotide
aaucugacgaggaaucuga

SEQ ID NO: 432176 - RNA, 19 nt, Artificial Sequence
  Description of Artificial Sequence: Synthetic oligonucleotide
auaagucugagaaaauuca

SEQ ID NO: 432177 - RNA, 19 nt, Artificial Sequence
  Description of Artificial Sequence: Synthetic oligonucleotide
uggcaauaucuuuaugcag

SEQ ID NO: 432178 - RNA, 19 nt, Artificial Sequence
  Description of Artificial Sequence: Synthetic oligonucleotide
guuucgaaaagaaguagug

SEQ ID NO: 432179 - RNA, 19 nt, Artificial Sequence
  Description of Artificial Sequence: Synthetic oligonucleotide
uuacaaucaacuguccagu

SEQ ID NO: 432180 - RNA, 19 nt, Artificial Sequence
  Description of Artificial Sequence: Synthetic oligonucleotide
auuacaaccgauacaagau

SEQ ID NO: 432181 - RNA, 19 nt, Artificial Sequence
  Description of Artificial Sequence: Synthetic oligonucleotide
uuaaaaucugugucccgga

SEQ ID NO: 432182 - RNA, 19 nt, Artificial Sequence
  Description of Artificial Sequence: Synthetic oligonucleotide
ugacgaggaaucugauugg

SEQ ID NO: 432183 - RNA, 19 nt, Artificial Sequence
  Description of Artificial Sequence: Synthetic oligonucleotide
agcuacuaaucuugcuccc

SEQ ID NO: 432184 - RNA, 19 nt, Artificial Sequence
  Description of Artificial Sequence: Synthetic oligonucleotide
auauuauccacaauccagu

SEQ ID NO: 432185 - RNA, 19 nt, Artificial Sequence
  Description of Artificial Sequence: Synthetic oligonucleotide
aggcaaagaagccaauugu

SEQ ID NO: 432186 - RNA, 19 nt, Artificial Sequence
  Description of Artificial Sequence: Synthetic oligonucleotide
uuuagcagcuacuaaucuu

SEQ ID NO: 432187 - RNA, 19 nt, Artificial Sequence
  Description of Artificial Sequence: Synthetic oligonucleotide
uauaaccaaaguacaggau

SEQ ID NO: 432188 - RNA, 19 nt, Artificial Sequence
  Description of Artificial Sequence: Synthetic oligonucleotide
ucuuaaguaugcuguuucu

SEQ ID NO: 432189 - RNA, 19 nt, Artificial Sequence
  Description of Artificial Sequence: Synthetic oligonucleotide
auagguggaaauagcaaag

SEQ ID NO: 432190 - RNA, 19 nt, Artificial Sequence
  Description of Artificial Sequence: Synthetic oligonucleotide
gagacaagaaucccagaca

SEQ ID NO: 432191 - RNA, 19 nt, Artificial Sequence
  Description of Artificial Sequence: Synthetic oligonucleotide
aggauuacuaggccaauaa

SEQ ID NO: 432192 - RNA, 19 nt, Artificial Sequence
  Description of Artificial Sequence: Synthetic oligonucleotide
caugacgauaccaggcaag

SEQ ID NO: 432193 - RNA, 19 nt, Artificial Sequence
  Description of Artificial Sequence: Synthetic oligonucleotide
uuacaggcauauuauccac

SEQ ID NO: 432194 - RNA, 19 nt, Artificial Sequence
  Description of Artificial Sequence: Synthetic oligonucleotide
acaaucaacuguccagucu

SEQ ID NO: 432195 - RNA, 19 nt, Artificial Sequence
  Description of Artificial Sequence: Synthetic oligonucleotide
auaauucuuuccaccuacc

SEQ ID NO: 432196 - RNA, 19 nt, Artificial Sequence
  Description of Artificial Sequence: Synthetic oligonucleotide
ucaacuguccagucucuca

SEQ ID NO: 432197 - RNA, 19 nt, Artificial Sequence
  Description of Artificial Sequence: Synthetic oligonucleotide
guuauaucuggcaauaucu

SEQ ID NO: 432198 - RNA, 19 nt, Artificial Sequence
  Description of Artificial Sequence: Synthetic oligonucleotide
aagccaauuguuccuguaa

SEQ ID NO: 432199 - RNA, 19 nt, Artificial Sequence
  Description of Artificial Sequence: Synthetic oligonucleotide
aagaagauaugaacaauua

SEQ ID NO: 432200 - RNA, 19 nt, Artificial Sequence
  Description of Artificial Sequence: Synthetic oligonucleotide
ucuuuccaccuaccgagcc

SEQ ID NO: 432201 - RNA, 19 nt, Artificial Sequence
  Description of Artificial Sequence: Synthetic oligonucleotide
cuaaucugccauuagaagu

SEQ ID NO: 432202 - RNA, 19 nt, Artificial Sequence
  Description of Artificial Sequence: Synthetic oligonucleotide
guaugcaccaauaaacguc

SEQ ID NO: 432203 - RNA, 19 nt, Artificial Sequence
  Description of Artificial Sequence: Synthetic oligonucleotide
acguuacaggcauauuauc

SEQ ID NO: 432204 - RNA, 19 nt, Artificial Sequence
  Description of Artificial Sequence: Synthetic oligonucleotide
ugagaacaacugaauacau

SEQ ID NO: 432205 - RNA, 19 nt, Artificial Sequence
  Description of Artificial Sequence: Synthetic oligonucleotide
aacuuauauggugaggguu

SEQ ID NO: 432206 - RNA, 19 nt, Artificial Sequence
  Description of Artificial Sequence: Synthetic oligonucleotide
uuuguagaaucuggcagca

SEQ ID NO: 432207 - RNA, 19 nt, Artificial Sequence
  Description of Artificial Sequence: Synthetic oligonucleotide
uagaaguauugaaaaguuu

SEQ ID NO: 432208 - RNA, 19 nt, Artificial Sequence
  Description of Artificial Sequence: Synthetic oligonucleotide
uauuauggccuccucuaau

SEQ ID NO: 432209 - RNA, 19 nt, Artificial Sequence
  Description of Artificial Sequence: Synthetic oligonucleotide
cagaggauuagauucauua

SEQ ID NO: 432210 - RNA, 19 nt, Artificial Sequence
  Description of Artificial Sequence: Synthetic oligonucleotide
ugcguaacauaaucauagc

SEQ ID NO: 432211 - RNA, 19 nt, Artificial Sequence
  Description of Artificial Sequence: Synthetic oligonucleotide
gcaauaucuuuaugcagcg

SEQ ID NO: 432212 - RNA, 19 nt, Artificial Sequence
  Description of Artificial Sequence: Synthetic oligonucleotide
uauauccccgugaacuagu

SEQ ID NO: 432213 - RNA, 19 nt, Artificial Sequence
  Description of Artificial Sequence: Synthetic oligonucleotide
uagcuaccauuccagauaa

SEQ ID NO: 432214 - RNA, 19 nt, Artificial Sequence
  Description of Artificial Sequence: Synthetic oligonucleotide
ugcugauaguucaguagca

SEQ ID NO: 432215 - RNA, 19 nt, Artificial Sequence
  Description of Artificial Sequence: Synthetic oligonucleotide
uaucuauauggguauguuu

SEQ ID NO: 432216 - RNA, 19 nt, Artificial Sequence
  Description of Artificial Sequence: Synthetic oligonucleotide
caugauugaagauguagaa

SEQ ID NO: 432217 - RNA, 19 nt, Artificial Sequence
  Description of Artificial Sequence: Synthetic oligonucleotide
aguuucgaaaagaaguagu

SEQ ID NO: 432218 - RNA, 19 nt, Artificial Sequence
  Description of Artificial Sequence: Synthetic oligonucleotide
cauuaugaagaagucagca

SEQ ID NO: 432219 - RNA, 19 nt, Artificial Sequence
  Description of Artificial Sequence: Synthetic oligonucleotide
uaugguugcuucagaacau

SEQ ID NO: 432220 - RNA, 19 nt, Artificial Sequence
  Description of Artificial Sequence: Synthetic oligonucleotide
uccuagaaagacugacagc

SEQ ID NO: 432221 - RNA, 19 nt, Artificial Sequence
  Description of Artificial Sequence: Synthetic oligonucleotide
cuagacgcccaucugauga

SEQ ID NO: 432222 - RNA, 19 nt, Artificial Sequence
  Description of Artificial Sequence: Synthetic oligonucleotide
augacgauaccaggcaagg

SEQ ID NO: 432223 - RNA, 19 nt, Artificial Sequence
  Description of Artificial Sequence: Synthetic oligonucleotide
aaguauugaaaaguuuaua

SEQ ID NO: 432224 - RNA, 19 nt, Artificial Sequence
  Description of Artificial Sequence: Synthetic oligonucleotide
caaaguacaggauugugcu

SEQ ID NO: 432225 - RNA, 19 nt, Artificial Sequence
  Description of Artificial Sequence: Synthetic oligonucleotide
uagauucauuaugaagaag

SEQ ID NO: 432226 - RNA, 19 nt, Artificial Sequence
  Description of Artificial Sequence: Synthetic oligonucleotide
gaaucugacgaggaaucug

SEQ ID NO: 432227 - RNA, 19 nt, Artificial Sequence
  Description of Artificial Sequence: Synthetic oligonucleotide
aaacgcuuuaguguugaaa

SEQ ID NO: 432228 - RNA, 19 nt, Artificial Sequence
  Description of Artificial Sequence: Synthetic oligonucleotide
gaaucugauugguucuaac

SEQ ID NO: 432229 - RNA, 19 nt, Artificial Sequence
  Description of Artificial Sequence: Synthetic oligonucleotide
uagaaugacuguucaggaa

SEQ ID NO: 432230 - RNA, 19 nt, Artificial Sequence
  Description of Artificial Sequence: Synthetic oligonucleotide
gacggaauauauccccgug

SEQ ID NO: 432231 - RNA, 19 nt, Artificial Sequence
  Description of Artificial Sequence: Synthetic oligonucleotide
gguguucuuaaguaugcug

SEQ ID NO: 432232 - RNA, 19 nt, Artificial Sequence
  Description of Artificial Sequence: Synthetic oligonucleotide
ucuuuaugcagcgugcgua

SEQ ID NO: 432233 - RNA, 19 nt, Artificial Sequence
  Description of Artificial Sequence: Synthetic oligonucleotide
cucuaaucugccauuagaa

SEQ ID NO: 432234 - RNA, 19 nt, Artificial Sequence
  Description of Artificial Sequence: Synthetic oligonucleotide
caugauaauauauuuugau

SEQ ID NO: 432235 - RNA, 19 nt, Artificial Sequence
  Description of Artificial Sequence: Synthetic oligonucleotide
uccucaaaacuaacagagu

SEQ ID NO: 432236 - RNA, 19 nt, Artificial Sequence
  Description of Artificial Sequence: Synthetic oligonucleotide
gagguguucuuaaguaugc

SEQ ID NO: 432237 - RNA, 19 nt, Artificial Sequence
  Description of Artificial Sequence: Synthetic oligonucleotide
agagugccgaaagggaugg

SEQ ID NO: 432238 - RNA, 19 nt, Artificial Sequence
  Description of Artificial Sequence: Synthetic oligonucleotide
caaugauaauccuccgcac

SEQ ID NO: 432239 - RNA, 19 nt, Artificial Sequence
  Description of Artificial Sequence: Synthetic oligonucleotide
uacuuaauccaaucacaau

SEQ ID NO: 432240 - RNA, 19 nt, Artificial Sequence
  Description of Artificial Sequence: Synthetic oligonucleotide
ggcauauuauccacaaucc

SEQ ID NO: 432241 - RNA, 19 nt, Artificial Sequence
  Description of Artificial Sequence: Synthetic oligonucleotide
aaaggccgauaccauggga

SEQ ID NO: 432242 - RNA, 19 nt, Artificial Sequence
  Description of Artificial Sequence: Synthetic oligonucleotide
acggaauauauccccguga

SEQ ID NO: 432243 - RNA, 19 nt, Artificial Sequence
  Description of Artificial Sequence: Synthetic oligonucleotide
ccaauaaacgucaaaggca

SEQ ID NO: 432244 - RNA, 19 nt, Artificial Sequence
  Description of Artificial Sequence: Synthetic oligonucleotide
ugaugaagauuuaguuuau

SEQ ID NO: 432245 - RNA, 19 nt, Artificial Sequence
  Description of Artificial Sequence: Synthetic oligonucleotide
aucauaacaccacguuaca

SEQ ID NO: 432246 - RNA, 19 nt, Artificial Sequence
  Description of Artificial Sequence: Synthetic oligonucleotide
acuaguuuccagccaaauu

SEQ ID NO: 432247 - RNA, 19 nt, Artificial Sequence
  Description of Artificial Sequence: Synthetic oligonucleotide
uacagaaccucugaccauc

SEQ ID NO: 432248 - RNA, 19 nt, Artificial Sequence
  Description of Artificial Sequence: Synthetic oligonucleotide
augugaacuuauaugguga

SEQ ID NO: 432249 - RNA, 19 nt, Artificial Sequence
  Description of Artificial Sequence: Synthetic oligonucleotide
auguuuucgugcaaacaag

SEQ ID NO: 432250 - RNA, 19 nt, Artificial Sequence
  Description of Artificial Sequence: Synthetic oligonucleotide
cguuacaggcauauuaucc

SEQ ID NO: 432251 - RNA, 19 nt, Artificial Sequence
  Description of Artificial Sequence: Synthetic oligonucleotide
accuaccgagccuagaaaa

SEQ ID NO: 432252 - RNA, 19 nt, Artificial Sequence
  Description of Artificial Sequence: Synthetic oligonucleotide
uguucuuaaguaugcuguu

SEQ ID NO: 432253 - RNA, 19 nt, Artificial Sequence
  Description of Artificial Sequence: Synthetic oligonucleotide
ggauuacuaggccaauaag

SEQ ID NO: 432254 - RNA, 19 nt, Artificial Sequence
  Description of Artificial Sequence: Synthetic oligonucleotide
uguauauuuuggugacaaa

SEQ ID NO: 432255 - RNA, 19 nt, Artificial Sequence
  Description of Artificial Sequence: Synthetic oligonucleotide
ugccgaaagggauggcugc

SEQ ID NO: 432256 - RNA, 19 nt, Artificial Sequence
  Description of Artificial Sequence: Synthetic oligonucleotide
uccccgugaacuaguuucc

SEQ ID NO: 432257 - RNA, 19 nt, Artificial Sequence
  Description of Artificial Sequence: Synthetic oligonucleotide
agccuagaaaauccuauuu

SEQ ID NO: 432258 - RNA, 19 nt, Artificial Sequence
  Description of Artificial Sequence: Synthetic oligonucleotide
uuaucuauauggguauguu

SEQ ID NO: 432259 - RNA, 19 nt, Artificial Sequence
  Description of Artificial Sequence: Synthetic oligonucleotide
uuucaacaacaugauaaua

SEQ ID NO: 432260 - RNA, 19 nt, Artificial Sequence
  Description of Artificial Sequence: Synthetic oligonucleotide
gugaucugcaguuucgaaa

SEQ ID NO: 432261 - RNA, 19 nt, Artificial Sequence
  Description of Artificial Sequence: Synthetic oligonucleotide
uacuaaucuugcucccaug

SEQ ID NO: 432262 - RNA, 19 nt, Artificial Sequence
  Description of Artificial Sequence: Synthetic oligonucleotide
uaaacgucaaaggcacaga

SEQ ID NO: 432263 - RNA, 19 nt, Artificial Sequence
  Description of Artificial Sequence: Synthetic oligonucleotide
agaaaugaugucaguaaaa

SEQ ID NO: 432264 - RNA, 19 nt, Artificial Sequence
  Description of Artificial Sequence: Synthetic oligonucleotide
cauuaugcuaaaccacuga

SEQ ID NO: 432265 - RNA, 19 nt, Artificial Sequence
  Description of Artificial Sequence: Synthetic oligonucleotide
uaaccagcaggugugccca

SEQ ID NO: 432266 - RNA, 19 nt, Artificial Sequence
  Description of Artificial Sequence: Synthetic oligonucleotide
gacuguucaggaaucugac

SEQ ID NO: 432267 - RNA, 19 nt, Artificial Sequence
  Description of Artificial Sequence: Synthetic oligonucleotide
uaugcagcgugcguaacau

SEQ ID NO: 432268 - RNA, 19 nt, Artificial Sequence
  Description of Artificial Sequence: Synthetic oligonucleotide
cagagugccgaaagggaug

SEQ ID NO: 432269 - RNA, 19 nt, Artificial Sequence
  Description of Artificial Sequence: Synthetic oligonucleotide
ugacgauaccaggcaaggg

SEQ ID NO: 432270 - RNA, 19 nt, Artificial Sequence
  Description of Artificial Sequence: Synthetic oligonucleotide
gaucugcaguuucgaaaag

SEQ ID NO: 432271 - RNA, 19 nt, Artificial Sequence
  Description of Artificial Sequence: Synthetic oligonucleotide
gcaaccagagugccgaaag

SEQ ID NO: 432272 - RNA, 19 nt, Artificial Sequence
  Description of Artificial Sequence: Synthetic oligonucleotide
uacaaucaacuguccaguc

SEQ ID NO: 432273 - RNA, 19 nt, Artificial Sequence
  Description of Artificial Sequence: Synthetic oligonucleotide
acagauaugcagaaccaaa

SEQ ID NO: 432274 - RNA, 19 nt, Artificial Sequence
  Description of Artificial Sequence: Synthetic oligonucleotide
acauaguuuaaaaggccga

SEQ ID NO: 432275 - RNA, 19 nt, Artificial Sequence
  Description of Artificial Sequence: Synthetic oligonucleotide
ucccggauccuagaaagac

SEQ ID NO: 432276 - RNA, 19 nt, Artificial Sequence
  Description of Artificial Sequence: Synthetic oligonucleotide
aacgccacugccaaugaua

SEQ ID NO: 432277 - RNA, 19 nt, Artificial Sequence
  Description of Artificial Sequence: Synthetic oligonucleotide
aucuuuaugcagcgugcgu

SEQ ID NO: 432278 - RNA, 19 nt, Artificial Sequence
  Description of Artificial Sequence: Synthetic oligonucleotide
agguagucacaaaacaggu

SEQ ID NO: 432279 - RNA, 19 nt, Artificial Sequence
  Description of Artificial Sequence: Synthetic oligonucleotide
uucgugcaaacaagcuuac

SEQ ID NO: 432280 - RNA, 19 nt, Artificial Sequence
  Description of Artificial Sequence: Synthetic oligonucleotide
ggcauauauuaagaaguag

SEQ ID NO: 432281 - RNA, 19 nt, Artificial Sequence
  Description of Artificial Sequence: Synthetic oligonucleotide
ccaaaggauuuguagaauc

SEQ ID NO: 432282 - RNA, 19 nt, Artificial Sequence
  Description of Artificial Sequence: Synthetic oligonucleotide
aggacggaauauauccccg

SEQ ID NO: 432283 - RNA, 19 nt, Artificial Sequence
  Description of Artificial Sequence: Synthetic oligonucleotide
cugauugguucuaacugga

SEQ ID NO: 432284 - RNA, 19 nt, Artificial Sequence
  Description of Artificial Sequence: Synthetic oligonucleotide
cucaggaguauuauggccu

SEQ ID NO: 432285 - RNA, 19 nt, Artificial Sequence
  Description of Artificial Sequence: Synthetic oligonucleotide
aacuaguuuccagccaaau

SEQ ID NO: 432286 - RNA, 19 nt, Artificial Sequence
  Description of Artificial Sequence: Synthetic oligonucleotide
gucucucaggaguauuaug

SEQ ID NO: 432287 - RNA, 19 nt, Artificial Sequence
  Description of Artificial Sequence: Synthetic oligonucleotide
acaaacgcuuuaguguuga

SEQ ID NO: 432288 - RNA, 19 nt, Artificial Sequence
  Description of Artificial Sequence: Synthetic oligonucleotide
ucuagacgcccaucugaug

SEQ ID NO: 432289 - RNA, 19 nt, Artificial Sequence
  Description of Artificial Sequence: Synthetic oligonucleotide
aggguucaauucucucccg

SEQ ID NO: 432290 - RNA, 19 nt, Artificial Sequence
  Description of Artificial Sequence: Synthetic oligonucleotide
gaguauuauggccuccucu

SEQ ID NO: 432291 - RNA, 19 nt, Artificial Sequence
  Description of Artificial Sequence: Synthetic oligonucleotide
aguuuauagcuaucauauu

SEQ ID NO: 432292 - RNA, 19 nt, Artificial Sequence
  Description of Artificial Sequence: Synthetic oligonucleotide
agugccgaaagggauggcu

SEQ ID NO: 432293 - RNA, 19 nt, Artificial Sequence
  Description of Artificial Sequence: Synthetic oligonucleotide
ccaaugauaauccuccgca

SEQ ID NO: 432294 - RNA, 19 nt, Artificial Sequence
  Description of Artificial Sequence: Synthetic oligonucleotide
aauaaacgucaaaggcaca

SEQ ID NO: 432295 - RNA, 19 nt, Artificial Sequence
  Description of Artificial Sequence: Synthetic oligonucleotide
guuucaacaacaugauaau

SEQ ID NO: 432296 - RNA, 19 nt, Artificial Sequence
  Description of Artificial Sequence: Synthetic oligonucleotide
cuuguugcuuauguccaug

SEQ ID NO: 432297 - RNA, 19 nt, Artificial Sequence
  Description of Artificial Sequence: Synthetic oligonucleotide
guguucuuaaguaugcugu

SEQ ID NO: 432298 - RNA, 19 nt, Artificial Sequence
  Description of Artificial Sequence: Synthetic oligonucleotide
cuucgacaucauaacacca

SEQ ID NO: 432299 - RNA, 19 nt, Artificial Sequence
  Description of Artificial Sequence: Synthetic oligonucleotide
guuuaucuauauggguaug

SEQ ID NO: 432300 - RNA, 19 nt, Artificial Sequence
  Description of Artificial Sequence: Synthetic oligonucleotide
caucuucgacaucauaaca

SEQ ID NO: 432301 - RNA, 19 nt, Artificial Sequence
  Description of Artificial Sequence: Synthetic oligonucleotide
caacauaaccagcaggugu

SEQ ID NO: 432302 - RNA, 19 nt, Artificial Sequence
  Description of Artificial Sequence: Synthetic oligonucleotide
agaguaaguauaggcaauu

SEQ ID NO: 432303 - RNA, 19 nt, Artificial Sequence
  Description of Artificial Sequence: Synthetic oligonucleotide
aaucaacuguccagucucu

SEQ ID NO: 432304 - RNA, 19 nt, Artificial Sequence
  Description of Artificial Sequence: Synthetic oligonucleotide
gguucuaacuggauguuca

SEQ ID NO: 432305 - RNA, 19 nt, Artificial Sequence
  Description of Artificial Sequence: Synthetic oligonucleotide
gcuaccauuccagauaaga

SEQ ID NO: 432306 - RNA, 19 nt, Artificial Sequence
  Description of Artificial Sequence: Synthetic oligonucleotide
cagcgugcguaacauaauc

SEQ ID NO: 432307 - RNA, 19 nt, Artificial Sequence
  Description of Artificial Sequence: Synthetic oligonucleotide
gacaucauaacaccacguu

SEQ ID NO: 432308 - RNA, 19 nt, Artificial Sequence
  Description of Artificial Sequence: Synthetic oligonucleotide
aaggauuacuaggccaaua

SEQ ID NO: 432309 - RNA, 19 nt, Artificial Sequence
  Description of Artificial Sequence: Synthetic oligonucleotide
cuuuaugcagcgugcguaa

SEQ ID NO: 432310 - RNA, 19 nt, Artificial Sequence
  Description of Artificial Sequence: Synthetic oligonucleotide
uacaucugaugugaccaaa

SEQ ID NO: 432311 - RNA, 19 nt, Artificial Sequence
  Description of Artificial Sequence: Synthetic oligonucleotide
aggauugugcuggcuguuc

SEQ ID NO: 432312 - RNA, 19 nt, Artificial Sequence
  Description of Artificial Sequence: Synthetic oligonucleotide
ggauccuagaaagacugac

SEQ ID NO: 432313 - RNA, 19 nt, Artificial Sequence
  Description of Artificial Sequence: Synthetic oligonucleotide
gccaaugauaauccuccgc

SEQ ID NO: 432314 - RNA, 19 nt, Artificial Sequence
  Description of Artificial Sequence: Synthetic oligonucleotide
gcauauuauccacaaucca

SEQ ID NO: 432315 - RNA, 19 nt, Artificial Sequence
  Description of Artificial Sequence: Synthetic oligonucleotide
auagucccaucuagacgcc

SEQ ID NO: 432316 - RNA, 19 nt, Artificial Sequence
  Description of Artificial Sequence: Synthetic oligonucleotide
cauaaccagcaggugugcc

SEQ ID NO: 432317 - RNA, 19 nt, Artificial Sequence
  Description of Artificial Sequence: Synthetic oligonucleotide
ccagugaucugcaguuucg

SEQ ID NO: 432318 - RNA, 19 nt, Artificial Sequence
  Description of Artificial Sequence: Synthetic oligonucleotide
gaacuuauauggugagggu

SEQ ID NO: 432319 - RNA, 19 nt, Artificial Sequence
  Description of Artificial Sequence: Synthetic oligonucleotide
ggacuccaaaauauagucc

SEQ ID NO: 432320 - RNA, 19 nt, Artificial Sequence
  Description of Artificial Sequence: Synthetic oligonucleotide
cugauaguucaguagcaua

SEQ ID NO: 432321 - RNA, 19 nt, Artificial Sequence
  Description of Artificial Sequence: Synthetic oligonucleotide
ggauugugcuggcuguucc

SEQ ID NO: 432322 - RNA, 19 nt, Artificial Sequence
  Description of Artificial Sequence: Synthetic oligonucleotide
aacgucaaaggcacagaua

SEQ ID NO: 432323 - RNA, 19 nt, Artificial Sequence
  Description of Artificial Sequence: Synthetic oligonucleotide
gagaacaacugaauacaua

SEQ ID NO: 432324 - RNA, 19 nt, Artificial Sequence
  Description of Artificial Sequence: Synthetic oligonucleotide
guaugcuguuucugaagga

SEQ ID NO: 432325 - RNA, 19 nt, Artificial Sequence
  Description of Artificial Sequence: Synthetic oligonucleotide
cuuuaguguugaaauacau

SEQ ID NO: 432326 - RNA, 19 nt, Artificial Sequence
  Description of Artificial Sequence: Synthetic oligonucleotide
agcgugcguaacauaauca

SEQ ID NO: 432327 - RNA, 19 nt, Artificial Sequence
  Description of Artificial Sequence: Synthetic oligonucleotide
aggaguucauuaugcuaaa

SEQ ID NO: 432328 - RNA, 19 nt, Artificial Sequence
  Description of Artificial Sequence: Synthetic oligonucleotide
acaggcgcaugggaagagg

SEQ ID NO: 432329 - RNA, 19 nt, Artificial Sequence
  Description of Artificial Sequence: Synthetic oligonucleotide
ccucaaaacuaacagagua

SEQ ID NO: 432330 - RNA, 19 nt, Artificial Sequence
  Description of Artificial Sequence: Synthetic oligonucleotide
ggagcagucugguuuaucu

SEQ ID NO: 432331 - RNA, 19 nt, Artificial Sequence
  Description of Artificial Sequence: Synthetic oligonucleotide
guauuauggccuccucuaa

SEQ ID NO: 432332 - RNA, 19 nt, Artificial Sequence
  Description of Artificial Sequence: Synthetic oligonucleotide
ugauaauccuccgcacaua

SEQ ID NO: 432333 - RNA, 19 nt, Artificial Sequence
  Description of Artificial Sequence: Synthetic oligonucleotide
acgcuuuaguguugaaaua

SEQ ID NO: 432334 - RNA, 19 nt, Artificial Sequence
  Description of Artificial Sequence: Synthetic oligonucleotide
cuuauauggugaggguuca

SEQ ID NO: 432335 - RNA, 19 nt, Artificial Sequence
  Description of Artificial Sequence: Synthetic oligonucleotide
aggagacaagaaucccaga

SEQ ID NO: 432336 - RNA, 19 nt, Artificial Sequence
  Description of Artificial Sequence: Synthetic oligonucleotide
gguuuaucuauauggguau

SEQ ID NO: 432337 - RNA, 19 nt, Artificial Sequence
  Description of Artificial Sequence: Synthetic oligonucleotide
aggccgauaccaugggaau

SEQ ID NO: 432338 - RNA, 19 nt, Artificial Sequence
  Description of Artificial Sequence: Synthetic oligonucleotide
uacaggcgcaugggaagag

SEQ ID NO: 432339 - RNA, 19 nt, Artificial Sequence
  Description of Artificial Sequence: Synthetic oligonucleotide
uagacgcccaucugaugau

SEQ ID NO: 432340 - RNA, 19 nt, Artificial Sequence
  Description of Artificial Sequence: Synthetic oligonucleotide
ggauuagauucauuaugaa

SEQ ID NO: 432341 - RNA, 19 nt, Artificial Sequence
  Description of Artificial Sequence: Synthetic oligonucleotide
ugugaggcauggacuccaa

SEQ ID NO: 432342 - RNA, 19 nt, Artificial Sequence
  Description of Artificial Sequence: Synthetic oligonucleotide
gaaguaguguauggcauau

SEQ ID NO: 432343 - RNA, 19 nt, Artificial Sequence
  Description of Artificial Sequence: Synthetic oligonucleotide
aucuagacgcccaucugau

SEQ ID NO: 432344 - RNA, 19 nt, Artificial Sequence
  Description of Artificial Sequence: Synthetic oligonucleotide
ggaggacggaauauauccc

SEQ ID NO: 432345 - RNA, 19 nt, Artificial Sequence
  Description of Artificial Sequence: Synthetic oligonucleotide
cacaggucaucagggcucc

SEQ ID NO: 432346 - RNA, 19 nt, Artificial Sequence
  Description of Artificial Sequence: Synthetic oligonucleotide
cucgauuggcaggagacaa

SEQ ID NO: 432347 - RNA, 19 nt, Artificial Sequence
  Description of Artificial Sequence: Synthetic oligonucleotide
aagccaaaguaugcaccaa

SEQ ID NO: 432348 - RNA, 19 nt, Artificial Sequence
  Description of Artificial Sequence: Synthetic oligonucleotide
uauccccgugaacuaguuu

SEQ ID NO: 432349 - RNA, 19 nt, Artificial Sequence
  Description of Artificial Sequence: Synthetic oligonucleotide
agucucucaggaguauuau

SEQ ID NO: 432350 - RNA, 19 nt, Artificial Sequence
  Description of Artificial Sequence: Synthetic oligonucleotide
cgcuuuaguguugaaauac

SEQ ID NO: 432351 - RNA, 19 nt, Artificial Sequence
  Description of Artificial Sequence: Synthetic oligonucleotide
ugguuauaucuggcaauau

SEQ ID NO: 432352 - RNA, 19 nt, Artificial Sequence
  Description of Artificial Sequence: Synthetic oligonucleotide
gagcagucugguuuaucua

SEQ ID NO: 432353 - RNA, 19 nt, Artificial Sequence
  Description of Artificial Sequence: Synthetic oligonucleotide
caaucacaauacaaacgcu

SEQ ID NO: 432354 - RNA, 19 nt, Artificial Sequence
  Description of Artificial Sequence: Synthetic oligonucleotide
uuauauggugaggguucaa

SEQ ID NO: 432355 - RNA, 19 nt, Artificial Sequence
  Description of Artificial Sequence: Synthetic oligonucleotide
caauaagucugagaaaauu

SEQ ID NO: 432356 - RNA, 19 nt, Artificial Sequence
  Description of Artificial Sequence: Synthetic oligonucleotide
gcguaacauaaucauagcu

SEQ ID NO: 432357 - RNA, 19 nt, Artificial Sequence
  Description of Artificial Sequence: Synthetic oligonucleotide
augguauguuuucgugcaa

SEQ ID NO: 432358 - RNA, 19 nt, Artificial Sequence
  Description of Artificial Sequence: Synthetic oligonucleotide
acaaccgauacaagauuuu

SEQ ID NO: 432359 - RNA, 19 nt, Artificial Sequence
  Description of Artificial Sequence: Synthetic oligonucleotide
uagucccaucuagacgccc

SEQ ID NO: 432360 - RNA, 19 nt, Artificial Sequence
  Description of Artificial Sequence: Synthetic oligonucleotide
gaaugugggugugaggcau

SEQ ID NO: 432361 - RNA, 19 nt, Artificial Sequence
  Description of Artificial Sequence: Synthetic oligonucleotide
agccuucucuguaugguau

SEQ ID NO: 432362 - RNA, 19 nt, Artificial Sequence
  Description of Artificial Sequence: Synthetic oligonucleotide
guauaaagaugcagccaaa

SEQ ID NO: 432363 - RNA, 19 nt, Artificial Sequence
  Description of Artificial Sequence: Synthetic oligonucleotide
cagucucucaggaguauua

SEQ ID NO: 432364 - RNA, 19 nt, Artificial Sequence
  Description of Artificial Sequence: Synthetic oligonucleotide
gagccuagaaaauccuauu

SEQ ID NO: 432365 - RNA, 19 nt, Artificial Sequence
  Description of Artificial Sequence: Synthetic oligonucleotide
cacagauaugcagaaccaa

SEQ ID NO: 432366 - RNA, 19 nt, Artificial Sequence
  Description of Artificial Sequence: Synthetic oligonucleotide
ggcaucuuuugcaugaccu

SEQ ID NO: 432367 - RNA, 19 nt, Artificial Sequence
  Description of Artificial Sequence: Synthetic oligonucleotide
ggcauucuucuuaaagcca

SEQ ID NO: 432368 - RNA, 19 nt, Artificial Sequence
  Description of Artificial Sequence: Synthetic oligonucleotide
caaccgauacaagauuuua

SEQ ID NO: 432369 - RNA, 19 nt, Artificial Sequence
  Description of Artificial Sequence: Synthetic oligonucleotide
cauaguuuaaaaggccgau

SEQ ID NO: 432370 - RNA, 19 nt, Artificial Sequence
  Description of Artificial Sequence: Synthetic oligonucleotide
gcaacauaaccagcaggug

SEQ ID NO: 432371 - RNA, 19 nt, Artificial Sequence
  Description of Artificial Sequence: Synthetic oligonucleotide
gacgaggaaucugauuggu

SEQ ID NO: 432372 - RNA, 19 nt, Artificial Sequence
  Description of Artificial Sequence: Synthetic oligonucleotide
accgagccuagaaaauccu

SEQ ID NO: 432373 - RNA, 19 nt, Artificial Sequence
  Description of Artificial Sequence: Synthetic oligonucleotide
cccgugaacuaguuuccag

SEQ ID NO: 432374 - RNA, 19 nt, Artificial Sequence
  Description of Artificial Sequence: Synthetic oligonucleotide
uuguagaaucuggcagcaa

SEQ ID NO: 432375 - RNA, 19 nt, Artificial Sequence
  Description of Artificial Sequence: Synthetic oligonucleotide
gaacuaguuuccagccaaa

SEQ ID NO: 432376 - RNA, 19 nt, Artificial Sequence
  Description of Artificial Sequence: Synthetic oligonucleotide
cacugggcuucuucaguca

SEQ ID NO: 432377 - RNA, 19 nt, Artificial Sequence
  Description of Artificial Sequence: Synthetic oligonucleotide
gugucccggauccuagaaa

SEQ ID NO: 432378 - RNA, 19 nt, Artificial Sequence
  Description of Artificial Sequence: Synthetic oligonucleotide
acgcccaucugaugauuuu

SEQ ID NO: 432379 - RNA, 19 nt, Artificial Sequence
  Description of Artificial Sequence: Synthetic oligonucleotide
ggcauggacuccaaaauau

SEQ ID NO: 432380 - RNA, 19 nt, Artificial Sequence
  Description of Artificial Sequence: Synthetic oligonucleotide
cuuuccaccuaccgagccu

SEQ ID NO: 432381 - RNA, 19 nt, Artificial Sequence
  Description of Artificial Sequence: Synthetic oligonucleotide
gccgauaccaugggaauaa

SEQ ID NO: 432382 - RNA, 19 nt, Artificial Sequence
  Description of Artificial Sequence: Synthetic oligonucleotide
gaguaaguauaggcaauuu

SEQ ID NO: 432383 - RNA, 19 nt, Artificial Sequence
  Description of Artificial Sequence: Synthetic oligonucleotide
cccaugacgauaccaggca

SEQ ID NO: 432384 - RNA, 19 nt, Artificial Sequence
  Description of Artificial Sequence: Synthetic oligonucleotide
cuguaauguaacagccaau

SEQ ID NO: 432385 - RNA, 19 nt, Artificial Sequence
  Description of Artificial Sequence: Synthetic oligonucleotide
ucccaucuagacgcccauc

SEQ ID NO: 432386 - RNA, 19 nt, Artificial Sequence
  Description of Artificial Sequence: Synthetic oligonucleotide
gauaccaggcaagggcuuu

SEQ ID NO: 432387 - RNA, 19 nt, Artificial Sequence
  Description of Artificial Sequence: Synthetic oligonucleotide
gcgugcguaacauaaucau

SEQ ID NO: 432388 - RNA, 19 nt, Artificial Sequence
  Description of Artificial Sequence: Synthetic oligonucleotide
ggaacgccacugccaauga

SEQ ID NO: 432389 - RNA, 19 nt, Artificial Sequence
  Description of Artificial Sequence: Synthetic oligonucleotide
auauccccgugaacuaguu

SEQ ID NO: 432390 - RNA, 19 nt, Artificial Sequence
  Description of Artificial Sequence: Synthetic oligonucleotide
caggcgcaugggaagaggu

SEQ ID NO: 432391 - RNA, 19 nt, Artificial Sequence
  Description of Artificial Sequence: Synthetic oligonucleotide
agcuaccauuccagauaag

SEQ ID NO: 432392 - RNA, 19 nt, Artificial Sequence
  Description of Artificial Sequence: Synthetic oligonucleotide
gaaggauuacuaggccaau

SEQ ID NO: 432393 - RNA, 19 nt, Artificial Sequence
  Description of Artificial Sequence: Synthetic oligonucleotide
cggaauauauccccgugaa

SEQ ID NO: 432394 - RNA, 19 nt, Artificial Sequence
  Description of Artificial Sequence: Synthetic oligonucleotide
ggacggaauauauccccgu

SEQ ID NO: 432395 - RNA, 19 nt, Artificial Sequence
  Description of Artificial Sequence: Synthetic oligonucleotide
gagugccgaaagggauggc

SEQ ID NO: 432396 - RNA, 19 nt, Artificial Sequence
  Description of Artificial Sequence: Synthetic oligonucleotide
gucccggauccuagaaaga

SEQ ID NO: 432397 - RNA, 19 nt, Artificial Sequence
  Description of Artificial Sequence: Synthetic oligonucleotide
cgucaaaggcacagauaug

SEQ ID NO: 432398 - RNA, 19 nt, Artificial Sequence
  Description of Artificial Sequence: Synthetic oligonucleotide
uugcucccauggacccagu

SEQ ID NO: 432399 - RNA, 19 nt, Artificial Sequence
  Description of Artificial Sequence: Synthetic oligonucleotide
cuccgcacauagguggaaa

SEQ ID NO: 432400 - RNA, 19 nt, Artificial Sequence
  Description of Artificial Sequence: Synthetic oligonucleotide
accacguuacaggcauauu

SEQ ID NO: 432401 - RNA, 19 nt, Artificial Sequence
  Description of Artificial Sequence: Synthetic oligonucleotide
aucugccauuagaaguauu

SEQ ID NO: 432402 - RNA, 19 nt, Artificial Sequence
  Description of Artificial Sequence: Synthetic oligonucleotide
gacgcccaucugaugauuu

SEQ ID NO: 432403 - RNA, 19 nt, Artificial Sequence
  Description of Artificial Sequence: Synthetic oligonucleotide
cgugcguaacauaaucaua

SEQ ID NO: 432404 - RNA, 19 nt, Artificial Sequence
  Description of Artificial Sequence: Synthetic oligonucleotide
caccacguuacaggcauau

SEQ ID NO: 432405 - RNA, 19 nt, Artificial Sequence
  Description of Artificial Sequence: Synthetic oligonucleotide
ccagagugccgaaagggau

SEQ ID NO: 432406 - RNA, 19 nt, Artificial Sequence
  Description of Artificial Sequence: Synthetic oligonucleotide
cgagccuagaaaauccuau

SEQ ID NO: 432407 - RNA, 19 nt, Artificial Sequence
  Description of Artificial Sequence: Synthetic oligonucleotide
gccgaaagggauggcugca

SEQ ID NO: 432408 - RNA, 19 nt, Artificial Sequence
  Description of Artificial Sequence: Synthetic oligonucleotide
guacaggauugugcuggcu

SEQ ID NO: 432409 - RNA, 19 nt, Artificial Sequence
  Description of Artificial Sequence: Synthetic oligonucleotide
ccuaccgagccuagaaaau

SEQ ID NO: 432410 - RNA, 19 nt, Artificial Sequence
  Description of Artificial Sequence: Synthetic oligonucleotide
ggcaaccagagugccgaaa

SEQ ID NO: 432411 - RNA, 19 nt, Artificial Sequence
  Description of Artificial Sequence: Synthetic oligonucleotide
cgcccaucugaugauuuuc

SEQ ID NO: 432412 - RNA, 19 nt, Artificial Sequence
  Description of Artificial Sequence: Synthetic oligonucleotide
ccgagccuagaaaauccua

SEQ ID NO: 432413 - RNA, 19 nt, Artificial Sequence
  Description of Artificial Sequence: Synthetic oligonucleotide
cccggauccuagaaagacu

SEQ ID NO: 432414 - RNA, 19 nt, Artificial Sequence
  Description of Artificial Sequence: Synthetic oligonucleotide
ccucgauuggcaggagaca

SEQ ID NO: 432415 - RNA, 19 nt, Artificial Sequence
  Description of Artificial Sequence: Synthetic oligonucleotide
acaccacguuacaggcaua

SEQ ID NO: 432416 - RNA, 19 nt, Artificial Sequence
  Description of Artificial Sequence: Synthetic oligonucleotide
ccgcacauagguggaaaua

SEQ ID NO: 432417 - RNA, 19 nt, Artificial Sequence
  Description of Artificial Sequence: Synthetic oligonucleotide
gcagcgugcguaacauaau

SEQ ID NO: 432418 - RNA, 19 nt, Artificial Sequence
  Description of Artificial Sequence: Synthetic oligonucleotide
ccccgugaacuaguuucca

SEQ ID NO: 432419 - RNA, 19 nt, Artificial Sequence
  Description of Artificial Sequence: Synthetic oligonucleotide
ccagaggauuagauucauu

SEQ ID NO: 432420 - RNA, 19 nt, Artificial Sequence
  Description of Artificial Sequence: Synthetic oligonucleotide
cggagcagucugguuuauc

SEQ ID NO: 432421 - RNA, 19 nt, Artificial Sequence
  Description of Artificial Sequence: Synthetic oligonucleotide
ccuccgcacauagguggaa

SEQ ID NO: 432422 - RNA, 19 nt, Artificial Sequence
  Description of Artificial Sequence: Synthetic oligonucleotide
gcgcaugggaagagguguu

SEQ ID NO: 432423 - RNA, 19 nt, Artificial Sequence
  Description of Artificial Sequence: Synthetic oligonucleotide
ccggagcagucugguuuau

SEQ ID NO: 432424 - RNA, 19 nt, Artificial Sequence
  Description of Artificial Sequence: Synthetic oligonucleotide
aaauggacuauacacagcc

SEQ ID NO: 432425 - RNA, 19 nt, Artificial Sequence
  Description of Artificial Sequence: Synthetic oligonucleotide
acucuuauuacccacaagc

SEQ ID NO: 432426 - RNA, 19 nt, Artificial Sequence
  Description of Artificial Sequence: Synthetic oligonucleotide
auaggaaccacauuguugc

SEQ ID NO: 432427 - RNA, 19 nt, Artificial Sequence
  Description of Artificial Sequence: Synthetic oligonucleotide
aguaaaucgagacaggagg

SEQ ID NO: 432428 - RNA, 19 nt, Artificial Sequence
  Description of Artificial Sequence: Synthetic oligonucleotide
aguuuauuaaacuagggcu

SEQ ID NO: 432429 - RNA, 19 nt, Artificial Sequence
  Description of Artificial Sequence: Synthetic oligonucleotide
uaugggaauaaaauuaggc

SEQ ID NO: 432430 - RNA, 19 nt, Artificial Sequence
  Description of Artificial Sequence: Synthetic oligonucleotide
uuaaacuagggcuagagaa

SEQ ID NO: 432431 - RNA, 19 nt, Artificial Sequence
  Description of Artificial Sequence: Synthetic oligonucleotide
acaacauagaccuauuaag

SEQ ID NO: 432432 - RNA, 19 nt, Artificial Sequence
  Description of Artificial Sequence: Synthetic oligonucleotide
acucauuccgaguaaaucg

SEQ ID NO: 432433 - RNA, 19 nt, Artificial Sequence
  Description of Artificial Sequence: Synthetic oligonucleotide
aaugucauaauacuagcau

SEQ ID NO: 432434 - RNA, 19 nt, Artificial Sequence
  Description of Artificial Sequence: Synthetic oligonucleotide
aaaauuaggcuguauuuca

SEQ ID NO: 432435 - RNA, 19 nt, Artificial Sequence
  Description of Artificial Sequence: Synthetic oligonucleotide
ugggaauaaaauuaggcug

SEQ ID NO: 432436 - RNA, 19 nt, Artificial Sequence
  Description of Artificial Sequence: Synthetic oligonucleotide
uaucccaccauccugaaca

SEQ ID NO: 432437 - RNA, 19 nt, Artificial Sequence
  Description of Artificial Sequence: Synthetic oligonucleotide
uuagaauugucugaaaagc

SEQ ID NO: 432438 - RNA, 19 nt, Artificial Sequence
  Description of Artificial Sequence: Synthetic oligonucleotide
uuacccacaagcaugauaa

SEQ ID NO: 432439 - RNA, 19 nt, Artificial Sequence
  Description of Artificial Sequence: Synthetic oligonucleotide
uuaauuccaauuauguagu

SEQ ID NO: 432440 - RNA, 19 nt, Artificial Sequence
  Description of Artificial Sequence: Synthetic oligonucleotide
cuaagguugucuuaguuag

SEQ ID NO: 432441 - RNA, 19 nt, Artificial Sequence
  Description of Artificial Sequence: Synthetic oligonucleotide
agagagacgccuuagaugu

SEQ ID NO: 432442 - RNA, 19 nt, Artificial Sequence
  Description of Artificial Sequence: Synthetic oligonucleotide
ucuuaguuagauucaauca

SEQ ID NO: 432443 - RNA, 19 nt, Artificial Sequence
  Description of Artificial Sequence: Synthetic oligonucleotide
gacaacuuuaaagagguag

SEQ ID NO: 432444 - RNA, 19 nt, Artificial Sequence
  Description of Artificial Sequence: Synthetic oligonucleotide
uuuauuaggaugagaauau

SEQ ID NO: 432445 - RNA, 19 nt, Artificial Sequence
  Description of Artificial Sequence: Synthetic oligonucleotide
aacuauauuccauuauaca

SEQ ID NO: 432446 - RNA, 19 nt, Artificial Sequence
  Description of Artificial Sequence: Synthetic oligonucleotide
caacauagaccuauuaagg

SEQ ID NO: 432447 - RNA, 19 nt, Artificial Sequence
  Description of Artificial Sequence: Synthetic oligonucleotide
auaauacuagcauuaagcu

SEQ ID NO: 432448 - RNA, 19 nt, Artificial Sequence
  Description of Artificial Sequence: Synthetic oligonucleotide
gaacacaugccuuuaagug

SEQ ID NO: 432449 - RNA, 19 nt, Artificial Sequence
  Description of Artificial Sequence: Synthetic oligonucleotide
aacgagacuaguuaaacua

SEQ ID NO: 432450 - RNA, 19 nt, Artificial Sequence
  Description of Artificial Sequence: Synthetic oligonucleotide
auucuacuuaaacucaagg

SEQ ID NO: 432451 - RNA, 19 nt, Artificial Sequence
  Description of Artificial Sequence: Synthetic oligonucleotide
uuaagugugaggaaguaau

SEQ ID NO: 432452 - RNA, 19 nt, Artificial Sequence
  Description of Artificial Sequence: Synthetic oligonucleotide
aaacuaaguauuagugugc

SEQ ID NO: 432453 - RNA, 19 nt, Artificial Sequence
  Description of Artificial Sequence: Synthetic oligonucleotide
uuauaacuguuuauuagga

SEQ ID NO: 432454 - RNA, 19 nt, Artificial Sequence
  Description of Artificial Sequence: Synthetic oligonucleotide
acauuuguagaaucuagag

SEQ ID NO: 432455 - RNA, 19 nt, Artificial Sequence
  Description of Artificial Sequence: Synthetic oligonucleotide
aaccaugaaacauagucau

SEQ ID NO: 432456 - RNA, 19 nt, Artificial Sequence
  Description of Artificial Sequence: Synthetic oligonucleotide
cauaucugcgccuuuauug

SEQ ID NO: 432457 - RNA, 19 nt, Artificial Sequence
  Description of Artificial Sequence: Synthetic oligonucleotide
augggaauaaaauuaggcu

SEQ ID NO: 432458 - RNA, 19 nt, Artificial Sequence
  Description of Artificial Sequence: Synthetic oligonucleotide
aagagagacgccuuagaug

SEQ ID NO: 432459 - RNA, 19 nt, Artificial Sequence
  Description of Artificial Sequence: Synthetic oligonucleotide
uccgaguaaaucgagacag

SEQ ID NO: 432460 - RNA, 19 nt, Artificial Sequence
  Description of Artificial Sequence: Synthetic oligonucleotide
aagaacacaugccuuuaag

SEQ ID NO: 432461 - RNA, 19 nt, Artificial Sequence
  Description of Artificial Sequence: Synthetic oligonucleotide
uucuacuuaaacucaaggu

SEQ ID NO: 432462 - RNA, 19 nt, Artificial Sequence
  Description of Artificial Sequence: Synthetic oligonucleotide
uuaggaugagaauauacuc

SEQ ID NO: 432463 - RNA, 19 nt, Artificial Sequence
  Description of Artificial Sequence: Synthetic oligonucleotide
aguaugcagauguuauagc

SEQ ID NO: 432464 - RNA, 19 nt, Artificial Sequence
  Description of Artificial Sequence: Synthetic oligonucleotide
aaauuaaccucacuguauu

SEQ ID NO: 432465 - RNA, 19 nt, Artificial Sequence
  Description of Artificial Sequence: Synthetic oligonucleotide
uuuaagugguaccacuuga

SEQ ID NO: 432466 - RNA, 19 nt, Artificial Sequence
  Description of Artificial Sequence: Synthetic oligonucleotide
uacaacauagaccuauuaa

SEQ ID NO: 432467 - RNA, 19 nt, Artificial Sequence
  Description of Artificial Sequence: Synthetic oligonucleotide
uugcaguuaacuuucagaa

SEQ ID NO: 432468 - RNA, 19 nt, Artificial Sequence
  Description of Artificial Sequence: Synthetic oligonucleotide
agauguuauagcccuguac

SEQ ID NO: 432469 - RNA, 19 nt, Artificial Sequence
  Description of Artificial Sequence: Synthetic oligonucleotide
auaugugagaugcuuagca

SEQ ID NO: 432470 - RNA, 19 nt, Artificial Sequence
  Description of Artificial Sequence: Synthetic oligonucleotide
uaacuuaugaccccauaac

SEQ ID NO: 432471 - RNA, 19 nt, Artificial Sequence
  Description of Artificial Sequence: Synthetic oligonucleotide
guaugcagauguuauagcc

SEQ ID NO: 432472 - RNA, 19 nt, Artificial Sequence
  Description of Artificial Sequence: Synthetic oligonucleotide
aaaucuauuucaggacuac

SEQ ID NO: 432473 - RNA, 19 nt, Artificial Sequence
  Description of Artificial Sequence: Synthetic oligonucleotide
uuaagugguaccacuugag

SEQ ID NO: 432474 - RNA, 19 nt, Artificial Sequence
  Description of Artificial Sequence: Synthetic oligonucleotide
uuaaaucucagaccuggga

SEQ ID NO: 432475 - RNA, 19 nt, Artificial Sequence
  Description of Artificial Sequence: Synthetic oligonucleotide
uaguaugcagauguuauag

SEQ ID NO: 432476 - RNA, 19 nt, Artificial Sequence
  Description of Artificial Sequence: Synthetic oligonucleotide
uucagugguagguggaacg

SEQ ID NO: 432477 - RNA, 19 nt, Artificial Sequence
  Description of Artificial Sequence: Synthetic oligonucleotide
aguuagauucaaucaggac

SEQ ID NO: 432478 - RNA, 19 nt, Artificial Sequence
  Description of Artificial Sequence: Synthetic oligonucleotide
uauuaaacuagggcuagag

SEQ ID NO: 432479 - RNA, 19 nt, Artificial Sequence
  Description of Artificial Sequence: Synthetic oligonucleotide
agcuaguuauugcaugagc

SEQ ID NO: 432480 - RNA, 19 nt, Artificial Sequence
  Description of Artificial Sequence: Synthetic oligonucleotide
uuauuacccacaagcauga

SEQ ID NO: 432481 - RNA, 19 nt, Artificial Sequence
  Description of Artificial Sequence: Synthetic oligonucleotide
aaacauagucaucuaugca

SEQ ID NO: 432482 - RNA, 19 nt, Artificial Sequence
  Description of Artificial Sequence: Synthetic oligonucleotide
cucugugcaaaauaauagc

SEQ ID NO: 432483 - RNA, 19 nt, Artificial Sequence
  Description of Artificial Sequence: Synthetic oligonucleotide
gauuaaccaugaaacauag

SEQ ID NO: 432484 - RNA, 19 nt, Artificial Sequence
  Description of Artificial Sequence: Synthetic oligonucleotide
aagugaucaaguucuauua

SEQ ID NO: 432485 - RNA, 19 nt, Artificial Sequence
  Description of Artificial Sequence: Synthetic oligonucleotide
uauuagugugcacauuucu

SEQ ID NO: 432486 - RNA, 19 nt, Artificial Sequence
  Description of Artificial Sequence: Synthetic oligonucleotide
aaacgagacuaguuaaacu

SEQ ID NO: 432487 - RNA, 19 nt, Artificial Sequence
  Description of Artificial Sequence: Synthetic oligonucleotide
uaaaauuaggcuguauuuc

SEQ ID NO: 432488 - RNA, 19 nt, Artificial Sequence
  Description of Artificial Sequence: Synthetic oligonucleotide
gaaacuaguagcuccauua

SEQ ID NO: 432489 - RNA, 19 nt, Artificial Sequence
  Description of Artificial Sequence: Synthetic oligonucleotide
acuacaaugccuaagugca

SEQ ID NO: 432490 - RNA, 19 nt, Artificial Sequence
  Description of Artificial Sequence: Synthetic oligonucleotide
uaagcuaguuauugcauga

SEQ ID NO: 432491 - RNA, 19 nt, Artificial Sequence
  Description of Artificial Sequence: Synthetic oligonucleotide
ucuuauuacccacaagcau

SEQ ID NO: 432492 - RNA, 19 nt, Artificial Sequence
  Description of Artificial Sequence: Synthetic oligonucleotide
ugaauaggaaccacauugu

SEQ ID NO: 432493 - RNA, 19 nt, Artificial Sequence
  Description of Artificial Sequence: Synthetic oligonucleotide
agauugaacucauuccgag

SEQ ID NO: 432494 - RNA, 19 nt, Artificial Sequence
  Description of Artificial Sequence: Synthetic oligonucleotide
uaauuacccaugcuuguug

SEQ ID NO: 432495 - RNA, 19 nt, Artificial Sequence
  Description of Artificial Sequence: Synthetic oligonucleotide
aaauuaggcuguauuucac

SEQ ID NO: 432496 - RNA, 19 nt, Artificial Sequence
  Description of Artificial Sequence: Synthetic oligonucleotide
uaagcauuguuaaaauaau

SEQ ID NO: 432497 - RNA, 19 nt, Artificial Sequence
  Description of Artificial Sequence: Synthetic oligonucleotide
uaagugguaccacuugagc

SEQ ID NO: 432498 - RNA, 19 nt, Artificial Sequence
  Description of Artificial Sequence: Synthetic oligonucleotide
aggaugagaauauacucca

SEQ ID NO: 432499 - RNA, 19 nt, Artificial Sequence
  Description of Artificial Sequence: Synthetic oligonucleotide
auguuauagcccuguaccg

SEQ ID NO: 432500 - RNA, 19 nt, Artificial Sequence
  Description of Artificial Sequence: Synthetic oligonucleotide
uuucacgucugucugacau

SEQ ID NO: 432501 - RNA, 19 nt, Artificial Sequence
  Description of Artificial Sequence: Synthetic oligonucleotide
uaguuagauucaaucagga

SEQ ID NO: 432502 - RNA, 19 nt, Artificial Sequence
  Description of Artificial Sequence: Synthetic oligonucleotide
aacugaacuauauuccauu

SEQ ID NO: 432503 - RNA, 19 nt, Artificial Sequence
  Description of Artificial Sequence: Synthetic oligonucleotide
uuuauagggcaauccuuag

SEQ ID NO: 432504 - RNA, 19 nt, Artificial Sequence
  Description of Artificial Sequence: Synthetic oligonucleotide
ucuaagguugucuuaguua

SEQ ID NO: 432505 - RNA, 19 nt, Artificial Sequence
  Description of Artificial Sequence: Synthetic oligonucleotide
agagugucuuacaagcugc

SEQ ID NO: 432506 - RNA, 19 nt, Artificial Sequence
  Description of Artificial Sequence: Synthetic oligonucleotide
gucuuaguuagauucaauc

SEQ ID NO: 432507 - RNA, 19 nt, Artificial Sequence
  Description of Artificial Sequence: Synthetic oligonucleotide
agcauuaagcuaguuauug

SEQ ID NO: 432508 - RNA, 19 nt, Artificial Sequence
  Description of Artificial Sequence: Synthetic oligonucleotide
uuguugcaaacucuacucc

SEQ ID NO: 432509 - RNA, 19 nt, Artificial Sequence
  Description of Artificial Sequence: Synthetic oligonucleotide
aggacuacaaugccuaagu

SEQ ID NO: 432510 - RNA, 19 nt, Artificial Sequence
  Description of Artificial Sequence: Synthetic oligonucleotide
cuaaguauuagugugcaca

SEQ ID NO: 432511 - RNA, 19 nt, Artificial Sequence
  Description of Artificial Sequence: Synthetic oligonucleotide
uucaggacuacaaugccua

SEQ ID NO: 432512 - RNA, 19 nt, Artificial Sequence
  Description of Artificial Sequence: Synthetic oligonucleotide
uucacuuacuagaaggguu

SEQ ID NO: 432513 - RNA, 19 nt, Artificial Sequence
  Description of Artificial Sequence: Synthetic oligonucleotide
cauuaagcuaguuauugca

SEQ ID NO: 432514 - RNA, 19 nt, Artificial Sequence
  Description of Artificial Sequence: Synthetic oligonucleotide
agacuaguuaaacuacuca

SEQ ID NO: 432515 - RNA, 19 nt, Artificial Sequence
  Description of Artificial Sequence: Synthetic oligonucleotide
ugggaaacgagacuaguua

SEQ ID NO: 432516 - RNA, 19 nt, Artificial Sequence
  Description of Artificial Sequence: Synthetic oligonucleotide
uaauacuagcauuaagcua

SEQ ID NO: 432517 - RNA, 19 nt, Artificial Sequence
  Description of Artificial Sequence: Synthetic oligonucleotide
aaacuacucaggcugccga

SEQ ID NO: 432518 - RNA, 19 nt, Artificial Sequence
  Description of Artificial Sequence: Synthetic oligonucleotide
auaucugcgccuuuauugu

SEQ ID NO: 432519 - RNA, 19 nt, Artificial Sequence
  Description of Artificial Sequence: Synthetic oligonucleotide
aaaugucauaauacuagca

SEQ ID NO: 432520 - RNA, 19 nt, Artificial Sequence
  Description of Artificial Sequence: Synthetic oligonucleotide
uauuuaaaucucagaccug

SEQ ID NO: 432521 - RNA, 19 nt, Artificial Sequence
  Description of Artificial Sequence: Synthetic oligonucleotide
aacuaaguauuagugugca

SEQ ID NO: 432522 - RNA, 19 nt, Artificial Sequence
  Description of Artificial Sequence: Synthetic oligonucleotide
gugaucaaguucuauuaug

SEQ ID NO: 432523 - RNA, 19 nt, Artificial Sequence
  Description of Artificial Sequence: Synthetic oligonucleotide
uguuuauagggcaauccuu

SEQ ID NO: 432524 - RNA, 19 nt, Artificial Sequence
  Description of Artificial Sequence: Synthetic oligonucleotide
aauaacugacuagagcaau

SEQ ID NO: 432525 - RNA, 19 nt, Artificial Sequence
  Description of Artificial Sequence: Synthetic oligonucleotide
acuagcauuaagcuaguua

SEQ ID NO: 432526 - RNA, 19 nt, Artificial Sequence
  Description of Artificial Sequence: Synthetic oligonucleotide
agcaaugucauaaaccagu

SEQ ID NO: 432527 - RNA, 19 nt, Artificial Sequence
  Description of Artificial Sequence: Synthetic oligonucleotide
acaaaccauucuucucugc

SEQ ID NO: 432528 - RNA, 19 nt, Artificial Sequence
  Description of Artificial Sequence: Synthetic oligonucleotide
auuaaacuagggcuagaga

SEQ ID NO: 432529 - RNA, 19 nt, Artificial Sequence
  Description of Artificial Sequence: Synthetic oligonucleotide
uucuuaagugugaggaagu

SEQ ID NO: 432530 - RNA, 19 nt, Artificial Sequence
  Description of Artificial Sequence: Synthetic oligonucleotide
uguuauagcccuguaccgc

SEQ ID NO: 432531 - RNA, 19 nt, Artificial Sequence
  Description of Artificial Sequence: Synthetic oligonucleotide
gaaacgagacuaguuaaac

SEQ ID NO: 432532 - RNA, 19 nt, Artificial Sequence
  Description of Artificial Sequence: Synthetic oligonucleotide
cuagcauuaagcuaguuau

SEQ ID NO: 432533 - RNA, 19 nt, Artificial Sequence
  Description of Artificial Sequence: Synthetic oligonucleotide
aaugccuaagugcauucua

SEQ ID NO: 432534 - RNA, 19 nt, Artificial Sequence
  Description of Artificial Sequence: Synthetic oligonucleotide
uuaugaccccauaaccaug

SEQ ID NO: 432535 - RNA, 19 nt, Artificial Sequence
  Description of Artificial Sequence: Synthetic oligonucleotide
aacccgagcgccgagcuuc

SEQ ID NO: 432536 - RNA, 19 nt, Artificial Sequence
  Description of Artificial Sequence: Synthetic oligonucleotide
uaugugagaugcuuagcaa

SEQ ID NO: 432537 - RNA, 19 nt, Artificial Sequence
  Description of Artificial Sequence: Synthetic oligonucleotide
uucuaggggaagagagacg

SEQ ID NO: 432538 - RNA, 19 nt, Artificial Sequence
  Description of Artificial Sequence: Synthetic oligonucleotide
uccacgauaguaugcagau

SEQ ID NO: 432539 - RNA, 19 nt, Artificial Sequence
  Description of Artificial Sequence: Synthetic oligonucleotide
uucauaugugagaugcuua

SEQ ID NO: 432540 - RNA, 19 nt, Artificial Sequence
  Description of Artificial Sequence: Synthetic oligonucleotide
ucacuuacuagaaggguuu

SEQ ID NO: 432541 - RNA, 19 nt, Artificial Sequence
  Description of Artificial Sequence: Synthetic oligonucleotide
uauacacugcagaacugaa

SEQ ID NO: 432542 - RNA, 19 nt, Artificial Sequence
  Description of Artificial Sequence: Synthetic oligonucleotide
ggucugucaaaauauguac

SEQ ID NO: 432543 - RNA, 19 nt, Artificial Sequence
  Description of Artificial Sequence: Synthetic oligonucleotide
cucaaugaacgacaaacca

SEQ ID NO: 432544 - RNA, 19 nt, Artificial Sequence
  Description of Artificial Sequence: Synthetic oligonucleotide
agcuccauuaauuccaauu

SEQ ID NO: 432545 - RNA, 19 nt, Artificial Sequence
  Description of Artificial Sequence: Synthetic oligonucleotide
cuguauucuuuagacauac

SEQ ID NO: 432546 - RNA, 19 nt, Artificial Sequence
  Description of Artificial Sequence: Synthetic oligonucleotide
auaugggaauaaaauuagg

SEQ ID NO: 432547 - RNA, 19 nt, Artificial Sequence
  Description of Artificial Sequence: Synthetic oligonucleotide
caucaugagcacugcaaag

SEQ ID NO: 432548 - RNA, 19 nt, Artificial Sequence
  Description of Artificial Sequence: Synthetic oligonucleotide
uuagauguucugacagcac

SEQ ID NO: 432549 - RNA, 19 nt, Artificial Sequence
  Description of Artificial Sequence: Synthetic oligonucleotide
acgagacuaguuaaacuac

SEQ ID NO: 432550 - RNA, 19 nt, Artificial Sequence
  Description of Artificial Sequence: Synthetic oligonucleotide
aaauaacugacuagagcaa

SEQ ID NO: 432551 - RNA, 19 nt, Artificial Sequence
  Description of Artificial Sequence: Synthetic oligonucleotide
gcguaaaucacucuuauua

SEQ ID NO: 432552 - RNA, 19 nt, Artificial Sequence
  Description of Artificial Sequence: Synthetic oligonucleotide
aucuagagcagaugucuca

SEQ ID NO: 432553 - RNA, 19 nt, Artificial Sequence
  Description of Artificial Sequence: Synthetic oligonucleotide
cugccgaucacugcaauag

SEQ ID NO: 432554 - RNA, 19 nt, Artificial Sequence
  Description of Artificial Sequence: Synthetic oligonucleotide
cuaagugcauucuacuuaa

SEQ ID NO: 432555 - RNA, 19 nt, Artificial Sequence
  Description of Artificial Sequence: Synthetic oligonucleotide
uugagaagagugucuuaca

SEQ ID NO: 432556 - RNA, 19 nt, Artificial Sequence
  Description of Artificial Sequence: Synthetic oligonucleotide
ugucagguaucccaccauc

SEQ ID NO: 432557 - RNA, 19 nt, Artificial Sequence
  Description of Artificial Sequence: Synthetic oligonucleotide
agagacgccuuagauguuc

SEQ ID NO: 432558 - RNA, 19 nt, Artificial Sequence
  Description of Artificial Sequence: Synthetic oligonucleotide
gcuguuauguuuauagggc

SEQ ID NO: 432559 - RNA, 19 nt, Artificial Sequence
  Description of Artificial Sequence: Synthetic oligonucleotide
cacgauaguaugcagaugu

SEQ ID NO: 432560 - RNA, 19 nt, Artificial Sequence
  Description of Artificial Sequence: Synthetic oligonucleotide
acuaguagcuccauuaauu

SEQ ID NO: 432561 - RNA, 19 nt, Artificial Sequence
  Description of Artificial Sequence: Synthetic oligonucleotide
uggagacaugucauuuuca

SEQ ID NO: 432562 - RNA, 19 nt, Artificial Sequence
  Description of Artificial Sequence: Synthetic oligonucleotide
aucuaugcaagcccacaca

SEQ ID NO: 432563 - RNA, 19 nt, Artificial Sequence
  Description of Artificial Sequence: Synthetic oligonucleotide
cucuuauuacccacaagca

SEQ ID NO: 432564 - RNA, 19 nt, Artificial Sequence
  Description of Artificial Sequence: Synthetic oligonucleotide
gcagguuaacuuaugaccc

SEQ ID NO: 432565 - RNA, 19 nt, Artificial Sequence
  Description of Artificial Sequence: Synthetic oligonucleotide
uaguuauugcaugagcaau

SEQ ID NO: 432566 - RNA, 19 nt, Artificial Sequence
  Description of Artificial Sequence: Synthetic oligonucleotide
caugauaacaauguugcua

SEQ ID NO: 432567 - RNA, 19 nt, Artificial Sequence
  Description of Artificial Sequence: Synthetic oligonucleotide
augccuaagugcauucuac

SEQ ID NO: 432568 - RNA, 19 nt, Artificial Sequence
  Description of Artificial Sequence: Synthetic oligonucleotide
acugaacuauauuccauua

SEQ ID NO: 432569 - RNA, 19 nt, Artificial Sequence
  Description of Artificial Sequence: Synthetic oligonucleotide
gaaauggacuauacacagc

SEQ ID NO: 432570 - RNA, 19 nt, Artificial Sequence
  Description of Artificial Sequence: Synthetic oligonucleotide
gccuuagauguucugacag

SEQ ID NO: 432571 - RNA, 19 nt, Artificial Sequence
  Description of Artificial Sequence: Synthetic oligonucleotide
gauaguaugcagauguuau

SEQ ID NO: 432572 - RNA, 19 nt, Artificial Sequence
  Description of Artificial Sequence: Synthetic oligonucleotide
uacucgucgucacgggugc

SEQ ID NO: 432573 - RNA, 19 nt, Artificial Sequence
  Description of Artificial Sequence: Synthetic oligonucleotide
agauuaaccaugaaacaua

SEQ ID NO: 432574 - RNA, 19 nt, Artificial Sequence
  Description of Artificial Sequence: Synthetic oligonucleotide
cuguuauguuuauagggca

SEQ ID NO: 432575 - RNA, 19 nt, Artificial Sequence
  Description of Artificial Sequence: Synthetic oligonucleotide
ugccuaagugcauucuacu

SEQ ID NO: 432576 - RNA, 19 nt, Artificial Sequence
  Description of Artificial Sequence: Synthetic oligonucleotide
cucauuccgaguaaaucga

SEQ ID NO: 432577 - RNA, 19 nt, Artificial Sequence
  Description of Artificial Sequence: Synthetic oligonucleotide
gaccuauuaaggcauuuua

SEQ ID NO: 432578 - RNA, 19 nt, Artificial Sequence
  Description of Artificial Sequence: Synthetic oligonucleotide
acagagcaugcauaaaaua

SEQ ID NO: 432579 - RNA, 19 nt, Artificial Sequence
  Description of Artificial Sequence: Synthetic oligonucleotide
uugaacucauuccgaguaa

SEQ ID NO: 432580 - RNA, 19 nt, Artificial Sequence
  Description of Artificial Sequence: Synthetic oligonucleotide
caguuuacugcugggaaac

SEQ ID NO: 432581 - RNA, 19 nt, Artificial Sequence
  Description of Artificial Sequence: Synthetic oligonucleotide
aaucucagaccugggaaau

SEQ ID NO: 432582 - RNA, 19 nt, Artificial Sequence
  Description of Artificial Sequence: Synthetic oligonucleotide
caaucaggaccaauagguc

SEQ ID NO: 432583 - RNA, 19 nt, Artificial Sequence
  Description of Artificial Sequence: Synthetic oligonucleotide
ucaucuaugcaagcccaca

SEQ ID NO: 432584 - RNA, 19 nt, Artificial Sequence
  Description of Artificial Sequence: Synthetic oligonucleotide
auaacugacuagagcaaug

SEQ ID NO: 432585 - RNA, 19 nt, Artificial Sequence
  Description of Artificial Sequence: Synthetic oligonucleotide
gaaucuccaauaaggacaa

SEQ ID NO: 432586 - RNA, 19 nt, Artificial Sequence
  Description of Artificial Sequence: Synthetic oligonucleotide
uuauguuuauagggcaauc

SEQ ID NO: 432587 - RNA, 19 nt, Artificial Sequence
  Description of Artificial Sequence: Synthetic oligonucleotide
auaguaugcagauguuaua

SEQ ID NO: 432588 - RNA, 19 nt, Artificial Sequence
  Description of Artificial Sequence: Synthetic oligonucleotide
ugucuuaguuagauucaau

SEQ ID NO: 432589 - RNA, 19 nt, Artificial Sequence
  Description of Artificial Sequence: Synthetic oligonucleotide
uggcguaaaucacucuuau

SEQ ID NO: 432590 - RNA, 19 nt, Artificial Sequence
  Description of Artificial Sequence: Synthetic oligonucleotide
gcauuaagcuaguuauugc

SEQ ID NO: 432591 - RNA, 19 nt, Artificial Sequence
  Description of Artificial Sequence: Synthetic oligonucleotide
augccuuuaagugguacca

SEQ ID NO: 432592 - RNA, 19 nt, Artificial Sequence
  Description of Artificial Sequence: Synthetic oligonucleotide
aacuacucaggcugccgau

SEQ ID NO: 432593 - RNA, 19 nt, Artificial Sequence
  Description of Artificial Sequence: Synthetic oligonucleotide
cauaugugagaugcuuagc

SEQ ID NO: 432594 - RNA, 19 nt, Artificial Sequence
  Description of Artificial Sequence: Synthetic oligonucleotide
ggagguuacucuuuccaac

SEQ ID NO: 432595 - RNA, 19 nt, Artificial Sequence
  Description of Artificial Sequence: Synthetic oligonucleotide
cauggcgcggccgaggagc

SEQ ID NO: 432596 - RNA, 19 nt, Artificial Sequence
  Description of Artificial Sequence: Synthetic oligonucleotide
gaacgacaaaccauucuuc

SEQ ID NO: 432597 - RNA, 19 nt, Artificial Sequence
  Description of Artificial Sequence: Synthetic oligonucleotide
ucgucacgggugcccaugg

SEQ ID NO: 432598 - RNA, 19 nt, Artificial Sequence
  Description of Artificial Sequence: Synthetic oligonucleotide
gcuaguuauugcaugagca

SEQ ID NO: 432599 - RNA, 19 nt, Artificial Sequence
  Description of Artificial Sequence: Synthetic oligonucleotide
aguaaggcgccuacugcuc

SEQ ID NO: 432600 - RNA, 19 nt, Artificial Sequence
  Description of Artificial Sequence: Synthetic oligonucleotide
ugaccacaagaauuacaaa

SEQ ID NO: 432601 - RNA, 19 nt, Artificial Sequence
  Description of Artificial Sequence: Synthetic oligonucleotide
ucagugguagguggaacgu

SEQ ID NO: 432602 - RNA, 19 nt, Artificial Sequence
  Description of Artificial Sequence: Synthetic oligonucleotide
cuuauuucuaagguugucu

SEQ ID NO: 432603 - RNA, 19 nt, Artificial Sequence
  Description of Artificial Sequence: Synthetic oligonucleotide
guaaggcgccuacugcucc

SEQ ID NO: 432604 - RNA, 19 nt, Artificial Sequence
  Description of Artificial Sequence: Synthetic oligonucleotide
auuacccaugcuuguuggu

SEQ ID NO: 432605 - RNA, 19 nt, Artificial Sequence
  Description of Artificial Sequence: Synthetic oligonucleotide
aguuauugcaugagcaaua

SEQ ID NO: 432606 - RNA, 19 nt, Artificial Sequence
  Description of Artificial Sequence: Synthetic oligonucleotide
uagcauuaagcuaguuauu

SEQ ID NO: 432607 - RNA, 19 nt, Artificial Sequence
  Description of Artificial Sequence: Synthetic oligonucleotide
ucuuaagugugaggaagua

SEQ ID NO: 432608 - RNA, 19 nt, Artificial Sequence
  Description of Artificial Sequence: Synthetic oligonucleotide
cagauugaacucauuccga

SEQ ID NO: 432609 - RNA, 19 nt, Artificial Sequence
  Description of Artificial Sequence: Synthetic oligonucleotide
gguacucuugcuuuccaga

SEQ ID NO: 432610 - RNA, 19 nt, Artificial Sequence
  Description of Artificial Sequence: Synthetic oligonucleotide
cucuacuccaaugguacuc

SEQ ID NO: 432611 - RNA, 19 nt, Artificial Sequence
  Description of Artificial Sequence: Synthetic oligonucleotide
caaugaacgacaaaccauu

SEQ ID NO: 432612 - RNA, 19 nt, Artificial Sequence
  Description of Artificial Sequence: Synthetic oligonucleotide
cauuccgaguaaaucgaga

SEQ ID NO: 432613 - RNA, 19 nt, Artificial Sequence
  Description of Artificial Sequence: Synthetic oligonucleotide
uuucagugguagguggaac

SEQ ID NO: 432614 - RNA, 19 nt, Artificial Sequence
  Description of Artificial Sequence: Synthetic oligonucleotide
uaaaucgagacaggagguu

SEQ ID NO: 432615 - RNA, 19 nt, Artificial Sequence
  Description of Artificial Sequence: Synthetic oligonucleotide
agguuaacuuaugacccca

SEQ ID NO: 432616 - RNA, 19 nt, Artificial Sequence
  Description of Artificial Sequence: Synthetic oligonucleotide
accaugaaacauagucauc

SEQ ID NO: 432617 - RNA, 19 nt, Artificial Sequence
  Description of Artificial Sequence: Synthetic oligonucleotide
uaaaccaguaaggcgccua

SEQ ID NO: 432618 - RNA, 19 nt, Artificial Sequence
  Description of Artificial Sequence: Synthetic oligonucleotide
guacucgucgucacgggug

SEQ ID NO: 432619 - RNA, 19 nt, Artificial Sequence
  Description of Artificial Sequence: Synthetic oligonucleotide
caggacuacaaugccuaag

SEQ ID NO: 432620 - RNA, 19 nt, Artificial Sequence
  Description of Artificial Sequence: Synthetic oligonucleotide
uaaggcgccuacugcucca

SEQ ID NO: 432621 - RNA, 19 nt, Artificial Sequence
  Description of Artificial Sequence: Synthetic oligonucleotide
acucuacuccaaugguacu

SEQ ID NO: 432622 - RNA, 19 nt, Artificial Sequence
  Description of Artificial Sequence: Synthetic oligonucleotide
agggcaauccuuaggucug

SEQ ID NO: 432623 - RNA, 19 nt, Artificial Sequence
  Description of Artificial Sequence: Synthetic oligonucleotide
gaugcccuacacaaaauau

SEQ ID NO: 432624 - RNA, 19 nt, Artificial Sequence
  Description of Artificial Sequence: Synthetic oligonucleotide
ggaccaauaggucugaguu

SEQ ID NO: 432625 - RNA, 19 nt, Artificial Sequence
  Description of Artificial Sequence: Synthetic oligonucleotide
gaacgugaauaggaaccac

SEQ ID NO: 432626 - RNA, 19 nt, Artificial Sequence
  Description of Artificial Sequence: Synthetic oligonucleotide
guuaacuuaugaccccaua

SEQ ID NO: 432627 - RNA, 19 nt, Artificial Sequence
  Description of Artificial Sequence: Synthetic oligonucleotide
auuacagagcaugcauaaa

SEQ ID NO: 432628 - RNA, 19 nt, Artificial Sequence
  Description of Artificial Sequence: Synthetic oligonucleotide
gggaaacgagacuaguuaa

SEQ ID NO: 432629 - RNA, 19 nt, Artificial Sequence
  Description of Artificial Sequence: Synthetic oligonucleotide
ugccuuuaagugguaccac

SEQ ID NO: 432630 - RNA, 19 nt, Artificial Sequence
  Description of Artificial Sequence: Synthetic oligonucleotide
guaaaucgagacaggaggu

SEQ ID NO: 432631 - RNA, 19 nt, Artificial Sequence
  Description of Artificial Sequence: Synthetic oligonucleotide
ugguggauaugggaauaaa

SEQ ID NO: 432632 - RNA, 19 nt, Artificial Sequence
  Description of Artificial Sequence: Synthetic oligonucleotide
gccgaucacugcaauagag

SEQ ID NO: 432633 - RNA, 19 nt, Artificial Sequence
  Description of Artificial Sequence: Synthetic oligonucleotide
ccauuauacacugcagaac

SEQ ID NO: 432634 - RNA, 19 nt, Artificial Sequence
  Description of Artificial Sequence: Synthetic oligonucleotide
augcccuacacaaaauaua

SEQ ID NO: 432635 - RNA, 19 nt, Artificial Sequence
  Description of Artificial Sequence: Synthetic oligonucleotide
gcagcagguuaacuuauga

SEQ ID NO: 432636 - RNA, 19 nt, Artificial Sequence
  Description of Artificial Sequence: Synthetic oligonucleotide
gguggauaugggaauaaaa

SEQ ID NO: 432637 - RNA, 19 nt, Artificial Sequence
  Description of Artificial Sequence: Synthetic oligonucleotide
ccugggaaauggacuauac

SEQ ID NO: 432638 - RNA, 19 nt, Artificial Sequence
  Description of Artificial Sequence: Synthetic oligonucleotide
gcgccuuuauuguuuuccc

SEQ ID NO: 432639 - RNA, 19 nt, Artificial Sequence
  Description of Artificial Sequence: Synthetic oligonucleotide
gcagggguaacccgagcgc

SEQ ID NO: 432640 - RNA, 19 nt, Artificial Sequence
  Description of Artificial Sequence: Synthetic oligonucleotide
ccgaguaaaucgagacagg

SEQ ID NO: 432641 - RNA, 19 nt, Artificial Sequence
  Description of Artificial Sequence: Synthetic oligonucleotide
ccuaagugcauucuacuua

SEQ ID NO: 432642 - RNA, 19 nt, Artificial Sequence
  Description of Artificial Sequence: Synthetic oligonucleotide
gucaucuaugcaagcccac

SEQ ID NO: 432643 - RNA, 19 nt, Artificial Sequence
  Description of Artificial Sequence: Synthetic oligonucleotide
guaccacuugagcauaaau

SEQ ID NO: 432644 - RNA, 19 nt, Artificial Sequence
  Description of Artificial Sequence: Synthetic oligonucleotide
auaaaccaguaaggcgccu

SEQ ID NO: 432645 - RNA, 19 nt, Artificial Sequence
  Description of Artificial Sequence: Synthetic oligonucleotide
cauuguugcuuggagacau

SEQ ID NO: 432646 - RNA, 19 nt, Artificial Sequence
  Description of Artificial Sequence: Synthetic oligonucleotide
ugcccugagauggcguaaa

SEQ ID NO: 432647 - RNA, 19 nt, Artificial Sequence
  Description of Artificial Sequence: Synthetic oligonucleotide
gaccaauaggucugaguuu

SEQ ID NO: 432648 - RNA, 19 nt, Artificial Sequence
  Description of Artificial Sequence: Synthetic oligonucleotide
auacuagcauuaagcuagu

SEQ ID NO: 432649 - RNA, 19 nt, Artificial Sequence
  Description of Artificial Sequence: Synthetic oligonucleotide
aggcgccuacugcuccacg

SEQ ID NO: 432650 - RNA, 19 nt, Artificial Sequence
  Description of Artificial Sequence: Synthetic oligonucleotide
caucgcucuacauuuucau

SEQ ID NO: 432651 - RNA, 19 nt, Artificial Sequence
  Description of Artificial Sequence: Synthetic oligonucleotide
acucgucgucacgggugcc

SEQ ID NO: 432652 - RNA, 19 nt, Artificial Sequence
  Description of Artificial Sequence: Synthetic oligonucleotide
guaacccgagcgccgagcu

SEQ ID NO: 432653 - RNA, 19 nt, Artificial Sequence
  Description of Artificial Sequence: Synthetic oligonucleotide
gcuuauuucuaagguuguc

SEQ ID NO: 432654 - RNA, 19 nt, Artificial Sequence
  Description of Artificial Sequence: Synthetic oligonucleotide
gguaacccgagcgccgagc

SEQ ID NO: 432655 - RNA, 19 nt, Artificial Sequence
  Description of Artificial Sequence: Synthetic oligonucleotide
auagaccuauuaaggcauu

SEQ ID NO: 432656 - RNA, 19 nt, Artificial Sequence
  Description of Artificial Sequence: Synthetic oligonucleotide
cuagggcuagagaagccau

SEQ ID NO: 432657 - RNA, 19 nt, Artificial Sequence
  Description of Artificial Sequence: Synthetic oligonucleotide
ggcgccuacugcuccacga

SEQ ID NO: 432658 - RNA, 19 nt, Artificial Sequence
  Description of Artificial Sequence: Synthetic oligonucleotide
uacuagcauuaagcuaguu

SEQ ID NO: 432659 - RNA, 19 nt, Artificial Sequence
  Description of Artificial Sequence: Synthetic oligonucleotide
guucuacagugacaggcuu

SEQ ID NO: 432660 - RNA, 19 nt, Artificial Sequence
  Description of Artificial Sequence: Synthetic oligonucleotide
acgauaguaugcagauguu

SEQ ID NO: 432661 - RNA, 19 nt, Artificial Sequence
  Description of Artificial Sequence: Synthetic oligonucleotide
aucaaccuggaugcuucuu

SEQ ID NO: 432662 - RNA, 19 nt, Artificial Sequence
  Description of Artificial Sequence: Synthetic oligonucleotide
ggcagcagguuaacuuaug

SEQ ID NO: 432663 - RNA, 19 nt, Artificial Sequence
  Description of Artificial Sequence: Synthetic oligonucleotide
gcuagagaagccauagcau

SEQ ID NO: 432664 - RNA, 19 nt, Artificial Sequence
  Description of Artificial Sequence: Synthetic oligonucleotide
cuaugcaagcccacacauu

SEQ ID NO: 432665 - RNA, 19 nt, Artificial Sequence
  Description of Artificial Sequence: Synthetic oligonucleotide
gagaaacuaguagcuccau

SEQ ID NO: 432666 - RNA, 19 nt, Artificial Sequence
  Description of Artificial Sequence: Synthetic oligonucleotide
aggcuguauuucacuuacu

SEQ ID NO: 432667 - RNA, 19 nt, Artificial Sequence
  Description of Artificial Sequence: Synthetic oligonucleotide
ccgagcgccgagcuucagc

SEQ ID NO: 432668 - RNA, 19 nt, Artificial Sequence
  Description of Artificial Sequence: Synthetic oligonucleotide
gccuaagugcauucuacuu

SEQ ID NO: 432669 - RNA, 19 nt, Artificial Sequence
  Description of Artificial Sequence: Synthetic oligonucleotide
cacuuacuagaaggguuua

SEQ ID NO: 432670 - RNA, 19 nt, Artificial Sequence
  Description of Artificial Sequence: Synthetic oligonucleotide
gguaccacuugagcauaaa

SEQ ID NO: 432671 - RNA, 19 nt, Artificial Sequence
  Description of Artificial Sequence: Synthetic oligonucleotide
ccacgauaguaugcagaug

SEQ ID NO: 432672 - RNA, 19 nt, Artificial Sequence
  Description of Artificial Sequence: Synthetic oligonucleotide
cgagacuaguuaaacuacu

SEQ ID NO: 432673 - RNA, 19 nt, Artificial Sequence
  Description of Artificial Sequence: Synthetic oligonucleotide
ccaauaggucugaguuuca

SEQ ID NO: 432674 - RNA, 19 nt, Artificial Sequence
  Description of Artificial Sequence: Synthetic oligonucleotide
gcugggaaacgagacuagu

SEQ ID NO: 432675 - RNA, 19 nt, Artificial Sequence
  Description of Artificial Sequence: Synthetic oligonucleotide
ggcguaaaucacucuuauu

SEQ ID NO: 432676 - RNA, 19 nt, Artificial Sequence
  Description of Artificial Sequence: Synthetic oligonucleotide
gguuaacuuaugaccccau

SEQ ID NO: 432677 - RNA, 19 nt, Artificial Sequence
  Description of Artificial Sequence: Synthetic oligonucleotide
cgucgcugcagggguaacc

SEQ ID NO: 432678 - RNA, 19 nt, Artificial Sequence
  Description of Artificial Sequence: Synthetic oligonucleotide
cugcccugagauggcguaa

SEQ ID NO: 432679 - RNA, 19 nt, Artificial Sequence
  Description of Artificial Sequence: Synthetic oligonucleotide
ccaugcuuguugguggaua

SEQ ID NO: 432680 - RNA, 19 nt, Artificial Sequence
  Description of Artificial Sequence: Synthetic oligonucleotide
ggcgucgcugcagggguaa

SEQ ID NO: 432681 - RNA, 19 nt, Artificial Sequence
  Description of Artificial Sequence: Synthetic oligonucleotide
ccuacugcuccacgauagu

SEQ ID NO: 432682 - RNA, 19 nt, Artificial Sequence
  Description of Artificial Sequence: Synthetic oligonucleotide
gagagacgccuuagauguu

SEQ ID NO: 432683 - RNA, 19 nt, Artificial Sequence
  Description of Artificial Sequence: Synthetic oligonucleotide
gcgccuacugcuccacgau

SEQ ID NO: 432684 - RNA, 19 nt, Artificial Sequence
  Description of Artificial Sequence: Synthetic oligonucleotide
gcgucgcugcagggguaac

SEQ ID NO: 432685 - RNA, 19 nt, Artificial Sequence
  Description of Artificial Sequence: Synthetic oligonucleotide
cgacagcggcgggaccagg

SEQ ID NO: 432686 - RNA, 19 nt, Artificial Sequence
  Description of Artificial Sequence: Synthetic oligonucleotide
gggcgucgcugcaggggua

SEQ ID NO: 432687 - RNA, 19 nt, Artificial Sequence
  Description of Artificial Sequence: Synthetic oligonucleotide
aaaguucguagucuggucc

SEQ ID NO: 432688 - RNA, 19 nt, Artificial Sequence
  Description of Artificial Sequence: Synthetic oligonucleotide
uaaaguugcagccuccucg

SEQ ID NO: 432689 - RNA, 19 nt, Artificial Sequence
  Description of Artificial Sequence: Synthetic oligonucleotide
uguuagaagagccucuggc

SEQ ID NO: 432690 - RNA, 19 nt, Artificial Sequence
  Description of Artificial Sequence: Synthetic oligonucleotide
ucagaugugaacuuucgga

SEQ ID NO: 432691 - RNA, 19 nt, Artificial Sequence
  Description of Artificial Sequence: Synthetic oligonucleotide
uagaauuccuggauguacg

SEQ ID NO: 432692 - RNA, 19 nt, Artificial Sequence
  Description of Artificial Sequence: Synthetic oligonucleotide
ucaaugguaaauguaguag

SEQ ID NO: 432693 - RNA, 19 nt, Artificial Sequence
  Description of Artificial Sequence: Synthetic oligonucleotide
aaggccaucccaucacucc

SEQ ID NO: 432694 - RNA, 19 nt, Artificial Sequence
  Description of Artificial Sequence: Synthetic oligonucleotide
agcgauugcacauagguga

SEQ ID NO: 432695 - RNA, 19 nt, Artificial Sequence
  Description of Artificial Sequence: Synthetic oligonucleotide
gaaauugugcaccagggca

SEQ ID NO: 432696 - RNA, 19 nt, Artificial Sequence
  Description of Artificial Sequence: Synthetic oligonucleotide
agaaauugugcaccagggc

SEQ ID NO: 432697 - RNA, 19 nt, Artificial Sequence
  Description of Artificial Sequence: Synthetic oligonucleotide
acuacuaggaagucuacug

SEQ ID NO: 432698 - RNA, 19 nt, Artificial Sequence
  Description of Artificial Sequence: Synthetic oligonucleotide
aaugguaaauguaguaguc

SEQ ID NO: 432699 - RNA, 19 nt, Artificial Sequence
  Description of Artificial Sequence: Synthetic oligonucleotide
uccaucuuaaaguugcagc

SEQ ID NO: 432700 - RNA, 19 nt, Artificial Sequence
  Description of Artificial Sequence: Synthetic oligonucleotide
aagaaauugugcaccaggg

SEQ ID NO: 432701 - RNA, 19 nt, Artificial Sequence
  Description of Artificial Sequence: Synthetic oligonucleotide
aacgcuguacagcuguccg

SEQ ID NO: 432702 - RNA, 19 nt, Artificial Sequence
  Description of Artificial Sequence: Synthetic oligonucleotide
aaaggucuugguuuggacu

SEQ ID NO: 432703 - RNA, 19 nt, Artificial Sequence
  Description of Artificial Sequence: Synthetic oligonucleotide
uguucggggaccauccugg

SEQ ID NO: 432704 - RNA, 19 nt, Artificial Sequence
  Description of Artificial Sequence: Synthetic oligonucleotide
guagucuucauacugcccc

SEQ ID NO: 432705 - RNA, 19 nt, Artificial Sequence
  Description of Artificial Sequence: Synthetic oligonucleotide
guuggaacugggaugaucg

SEQ ID NO: 432706 - RNA, 19 nt, Artificial Sequence
  Description of Artificial Sequence: Synthetic oligonucleotide
agauacagagcacuggcag

SEQ ID NO: 432707 - RNA, 19 nt, Artificial Sequence
  Description of Artificial Sequence: Synthetic oligonucleotide
uuugucggagcucacggag

SEQ ID NO: 432708 - RNA, 19 nt, Artificial Sequence
  Description of Artificial Sequence: Synthetic oligonucleotide
guuucaagggaccugggag

SEQ ID NO: 432709 - RNA, 19 nt, Artificial Sequence
  Description of Artificial Sequence: Synthetic oligonucleotide
uuuucguugaaaaccaaua

SEQ ID NO: 432710 - RNA, 19 nt, Artificial Sequence
  Description of Artificial Sequence: Synthetic oligonucleotide
aaauugugcaccagggcac

SEQ ID NO: 432711 - RNA, 19 nt, Artificial Sequence
  Description of Artificial Sequence: Synthetic oligonucleotide
gaugcugaagucuugggca

SEQ ID NO: 432712 - RNA, 19 nt, Artificial Sequence
  Description of Artificial Sequence: Synthetic oligonucleotide
aaucuccugagcucgaacu

SEQ ID NO: 432713 - RNA, 19 nt, Artificial Sequence
  Description of Artificial Sequence: Synthetic oligonucleotide
acagcgauugcacauaggu

SEQ ID NO: 432714 - RNA, 19 nt, Artificial Sequence
  Description of Artificial Sequence: Synthetic oligonucleotide
uugggaacuccgaagcugg

SEQ ID NO: 432715 - RNA, 19 nt, Artificial Sequence
  Description of Artificial Sequence: Synthetic oligonucleotide
guuguuucgacagaccggg

SEQ ID NO: 432716 - RNA, 19 nt, Artificial Sequence
  Description of Artificial Sequence: Synthetic oligonucleotide
uacguguacacgcacuucc

SEQ ID NO: 432717 - RNA, 19 nt, Artificial Sequence
  Description of Artificial Sequence: Synthetic oligonucleotide
uuucguugaaaaccaauaa

SEQ ID NO: 432718 - RNA, 19 nt, Artificial Sequence
  Description of Artificial Sequence: Synthetic oligonucleotide
acagcgguagaauuccugg

SEQ ID NO: 432719 - RNA, 19 nt, Artificial Sequence
  Description of Artificial Sequence: Synthetic oligonucleotide
auagccacgggucuuagcu

SEQ ID NO: 432720 - RNA, 19 nt, Artificial Sequence
  Description of Artificial Sequence: Synthetic oligonucleotide
ucggggaccauccugggag

SEQ ID NO: 432721 - RNA, 19 nt, Artificial Sequence
  Description of Artificial Sequence: Synthetic oligonucleotide
uuccgcuccucaaaguucg

SEQ ID NO: 432722 - RNA, 19 nt, Artificial Sequence
  Description of Artificial Sequence: Synthetic oligonucleotide
uucuggaccagacagcggu

SEQ ID NO: 432723 - RNA, 19 nt, Artificial Sequence
  Description of Artificial Sequence: Synthetic oligonucleotide
aaucagaugugaacuuucg

SEQ ID NO: 432724 - RNA, 19 nt, Artificial Sequence
  Description of Artificial Sequence: Synthetic oligonucleotide
uugaucucaaugguaaaug

SEQ ID NO: 432725 - RNA, 19 nt, Artificial Sequence
  Description of Artificial Sequence: Synthetic oligonucleotide
ucuggcgccuguuuugugg

SEQ ID NO: 432726 - RNA, 19 nt, Artificial Sequence
  Description of Artificial Sequence: Synthetic oligonucleotide
cuccgaagcugguagaacg

SEQ ID NO: 432727 - RNA, 19 nt, Artificial Sequence
  Description of Artificial Sequence: Synthetic oligonucleotide
auugcacauaggugaagac

SEQ ID NO: 432728 - RNA, 19 nt, Artificial Sequence
  Description of Artificial Sequence: Synthetic oligonucleotide
uguuucgacagaccgggca

SEQ ID NO: 432729 - RNA, 19 nt, Artificial Sequence
  Description of Artificial Sequence: Synthetic oligonucleotide
auugcuucggcucucuccu

SEQ ID NO: 432730 - RNA, 19 nt, Artificial Sequence
  Description of Artificial Sequence: Synthetic oligonucleotide
uagaacgcuguacagcugu

SEQ ID NO: 432731 - RNA, 19 nt, Artificial Sequence
  Description of Artificial Sequence: Synthetic oligonucleotide
cagaugugaacuuucggac

SEQ ID NO: 432732 - RNA, 19 nt, Artificial Sequence
  Description of Artificial Sequence: Synthetic oligonucleotide
gaugugaacuuucggacuc

SEQ ID NO: 432733 - RNA, 19 nt, Artificial Sequence
  Description of Artificial Sequence: Synthetic oligonucleotide
aucagaugugaacuuucgg

SEQ ID NO: 432734 - RNA, 19 nt, Artificial Sequence
  Description of Artificial Sequence: Synthetic oligonucleotide
guccacucgagucugcucg

SEQ ID NO: 432735 - RNA, 19 nt, Artificial Sequence
  Description of Artificial Sequence: Synthetic oligonucleotide
gaugcuauuggcauuggga

SEQ ID NO: 432736 - RNA, 19 nt, Artificial Sequence
  Description of Artificial Sequence: Synthetic oligonucleotide
uacuaggaagucuacugca

SEQ ID NO: 432737 - RNA, 19 nt, Artificial Sequence
  Description of Artificial Sequence: Synthetic oligonucleotide
ucuauuuggggcuggcugu

SEQ ID NO: 432738 - RNA, 19 nt, Artificial Sequence
  Description of Artificial Sequence: Synthetic oligonucleotide
gaggacgugagugacacug

SEQ ID NO: 432739 - RNA, 19 nt, Artificial Sequence
  Description of Artificial Sequence: Synthetic oligonucleotide
uguacacgcacuuccaguc

SEQ ID NO: 432740 - RNA, 19 nt, Artificial Sequence
  Description of Artificial Sequence: Synthetic oligonucleotide
cuacuaggaagucuacugc

SEQ ID NO: 432741 - RNA, 19 nt, Artificial Sequence
  Description of Artificial Sequence: Synthetic oligonucleotide
uaucaaaacgcugcgugug

SEQ ID NO: 432742 - RNA, 19 nt, Artificial Sequence
  Description of Artificial Sequence: Synthetic oligonucleotide
uuaguguuagaagagccuc

SEQ ID NO: 432743 - RNA, 19 nt, Artificial Sequence
  Description of Artificial Sequence: Synthetic oligonucleotide
gaagugagggcuguucggg

SEQ ID NO: 432744 - RNA, 19 nt, Artificial Sequence
  Description of Artificial Sequence: Synthetic oligonucleotide
ucuuaaaguugcagccucc

SEQ ID NO: 432745 - RNA, 19 nt, Artificial Sequence
  Description of Artificial Sequence: Synthetic oligonucleotide
aaguucguagucuggucca

SEQ ID NO: 432746 - RNA, 19 nt, Artificial Sequence
  Description of Artificial Sequence: Synthetic oligonucleotide
guaguagagggcucugggg

SEQ ID NO: 432747 - RNA, 19 nt, Artificial Sequence
  Description of Artificial Sequence: Synthetic oligonucleotide
gucagaucugcucucuuag

SEQ ID NO: 432748 - RNA, 19 nt, Artificial Sequence
  Description of Artificial Sequence: Synthetic oligonucleotide
uguuucaagggaccuggga

SEQ ID NO: 432749 - RNA, 19 nt, Artificial Sequence
  Description of Artificial Sequence: Synthetic oligonucleotide
cucggaucagcuuacguuc

SEQ ID NO: 432750 - RNA, 19 nt, Artificial Sequence
  Description of Artificial Sequence: Synthetic oligonucleotide
acuccgaagcaguaugguc

SEQ ID NO: 432751 - RNA, 19 nt, Artificial Sequence
  Description of Artificial Sequence: Synthetic oligonucleotide
uuccgaugcccacaggcag

SEQ ID NO: 432752 - RNA, 19 nt, Artificial Sequence
  Description of Artificial Sequence: Synthetic oligonucleotide
augcuauuggcauugggaa

SEQ ID NO: 432753 - RNA, 19 nt, Artificial Sequence
  Description of Artificial Sequence: Synthetic oligonucleotide
ucuguggccguauugcuuc

SEQ ID NO: 432754 - RNA, 19 nt, Artificial Sequence
  Description of Artificial Sequence: Synthetic oligonucleotide
uacacgcacuuccagucag

SEQ ID NO: 432755 - RNA, 19 nt, Artificial Sequence
  Description of Artificial Sequence: Synthetic oligonucleotide
acguuccucguacucaccg

SEQ ID NO: 432756 - RNA, 19 nt, Artificial Sequence
  Description of Artificial Sequence: Synthetic oligonucleotide
ucugcucucuuaguguuag

SEQ ID NO: 432757 - RNA, 19 nt, Artificial Sequence
  Description of Artificial Sequence: Synthetic oligonucleotide
ucuccugagcucgaacucg

SEQ ID NO: 432758 - RNA, 19 nt, Artificial Sequence
  Description of Artificial Sequence: Synthetic oligonucleotide
gggaugaucgugcaagggg

SEQ ID NO: 432759 - RNA, 19 nt, Artificial Sequence
  Description of Artificial Sequence: Synthetic oligonucleotide
agaugugaacuuucggacu

SEQ ID NO: 432760 - RNA, 19 nt, Artificial Sequence
  Description of Artificial Sequence: Synthetic oligonucleotide
ggguuguuucgacagaccg

SEQ ID NO: 432761 - RNA, 19 nt, Artificial Sequence
  Description of Artificial Sequence: Synthetic oligonucleotide
acgugagugacacugccca

SEQ ID NO: 432762 - RNA, 19 nt, Artificial Sequence
  Description of Artificial Sequence: Synthetic oligonucleotide
ugguaccuuaccagggucc

SEQ ID NO: 432763 - RNA, 19 nt, Artificial Sequence
  Description of Artificial Sequence: Synthetic oligonucleotide
uccguuggaacugggauga

SEQ ID NO: 432764 - RNA, 19 nt, Artificial Sequence
  Description of Artificial Sequence: Synthetic oligonucleotide
caucccaucacuccagcug

SEQ ID NO: 432765 - RNA, 19 nt, Artificial Sequence
  Description of Artificial Sequence: Synthetic oligonucleotide
gaagacgcauuuggggucg

SEQ ID NO: 432766 - RNA, 19 nt, Artificial Sequence
  Description of Artificial Sequence: Synthetic oligonucleotide
uuacguuccucguacucac

SEQ ID NO: 432767 - RNA, 19 nt, Artificial Sequence
  Description of Artificial Sequence: Synthetic oligonucleotide
acuaggaagucuacugcac

SEQ ID NO: 432768 - RNA, 19 nt, Artificial Sequence
  Description of Artificial Sequence: Synthetic oligonucleotide
cagaucugcucucuuagug

SEQ ID NO: 432769 - RNA, 19 nt, Artificial Sequence
  Description of Artificial Sequence: Synthetic oligonucleotide
uccgaagcugguagaacgc

SEQ ID NO: 432770 - RNA, 19 nt, Artificial Sequence
  Description of Artificial Sequence: Synthetic oligonucleotide
cucugguaccuuaccaggg

SEQ ID NO: 432771 - RNA, 19 nt, Artificial Sequence
  Description of Artificial Sequence: Synthetic oligonucleotide
cuccgaagcaguaugguca

SEQ ID NO: 432772 - RNA, 19 nt, Artificial Sequence
  Description of Artificial Sequence: Synthetic oligonucleotide
uucuuugucggagcucacg

SEQ ID NO: 432773 - RNA, 19 nt, Artificial Sequence
  Description of Artificial Sequence: Synthetic oligonucleotide
gauugcacauaggugaaga

SEQ ID NO: 432774 - RNA, 19 nt, Artificial Sequence
  Description of Artificial Sequence: Synthetic oligonucleotide
aucuggcuccaucuuaaag

SEQ ID NO: 432775 - RNA, 19 nt, Artificial Sequence
  Description of Artificial Sequence: Synthetic oligonucleotide
uucguagucugguccagca

SEQ ID NO: 432776 - RNA, 19 nt, Artificial Sequence
  Description of Artificial Sequence: Synthetic oligonucleotide
cugacacgggugauggugg

SEQ ID NO: 432777 - RNA, 19 nt, Artificial Sequence
  Description of Artificial Sequence: Synthetic oligonucleotide
uaguguuagaagagccucu

SEQ ID NO: 432778 - RNA, 19 nt, Artificial Sequence
  Description of Artificial Sequence: Synthetic oligonucleotide
ugguagaacgcuguacagc

SEQ ID NO: 432779 - RNA, 19 nt, Artificial Sequence
  Description of Artificial Sequence: Synthetic oligonucleotide
aguucuggcgccuguuuug

SEQ ID NO: 432780 - RNA, 19 nt, Artificial Sequence
  Description of Artificial Sequence: Synthetic oligonucleotide
ucucugacggagccagucc

SEQ ID NO: 432781 - RNA, 19 nt, Artificial Sequence
  Description of Artificial Sequence: Synthetic oligonucleotide
aguccguuggaacugggau

SEQ ID NO: 432782 - RNA, 19 nt, Artificial Sequence
  Description of Artificial Sequence: Synthetic oligonucleotide
ugaagacgcauuugggguc

SEQ ID NO: 432783 - RNA, 19 nt, Artificial Sequence
  Description of Artificial Sequence: Synthetic oligonucleotide
aaaacgcugcguguguaca

SEQ ID NO: 432784 - RNA, 19 nt, Artificial Sequence
  Description of Artificial Sequence: Synthetic oligonucleotide
cucuuaguguuagaagagc

SEQ ID NO: 432785 - RNA, 19 nt, Artificial Sequence
  Description of Artificial Sequence: Synthetic oligonucleotide
auuuggggcuggcugucgg

SEQ ID NO: 432786 - RNA, 19 nt, Artificial Sequence
  Description of Artificial Sequence: Synthetic oligonucleotide
uuaaaguugcagccuccuc

SEQ ID NO: 432787 - RNA, 19 nt, Artificial Sequence
  Description of Artificial Sequence: Synthetic oligonucleotide
gauguacguguacacgcac

SEQ ID NO: 432788 - RNA, 19 nt, Artificial Sequence
  Description of Artificial Sequence: Synthetic oligonucleotide
agaauuccuggauguacgu

SEQ ID NO: 432789 - RNA, 19 nt, Artificial Sequence
  Description of Artificial Sequence: Synthetic oligonucleotide
cuuugcgugcuugggaugc

SEQ ID NO: 432790 - RNA, 19 nt, Artificial Sequence
  Description of Artificial Sequence: Synthetic oligonucleotide
ucagcuuacguuccucgua

SEQ ID NO: 432791 - RNA, 19 nt, Artificial Sequence
  Description of Artificial Sequence: Synthetic oligonucleotide
aguccaccagcauccgugg

SEQ ID NO: 432792 - RNA, 19 nt, Artificial Sequence
  Description of Artificial Sequence: Synthetic oligonucleotide
gaaucagaugugaacuuuc

SEQ ID NO: 432793 - RNA, 19 nt, Artificial Sequence
  Description of Artificial Sequence: Synthetic oligonucleotide
ucggaucagcuuacguucc

SEQ ID NO: 432794 - RNA, 19 nt, Artificial Sequence
  Description of Artificial Sequence: Synthetic oligonucleotide
gaacuuucggacucggucu

SEQ ID NO: 432795 - RNA, 19 nt, Artificial Sequence
  Description of Artificial Sequence: Synthetic oligonucleotide
caccaauccagcaacaucu

SEQ ID NO: 432796 - RNA, 19 nt, Artificial Sequence
  Description of Artificial Sequence: Synthetic oligonucleotide
gacauucuugccgcgcagg

SEQ ID NO: 432797 - RNA, 19 nt, Artificial Sequence
  Description of Artificial Sequence: Synthetic oligonucleotide
ucaaaguucuggcgccugu

SEQ ID NO: 432798 - RNA, 19 nt, Artificial Sequence
  Description of Artificial Sequence: Synthetic oligonucleotide
ugagugacacugcccaguc

SEQ ID NO: 432799 - RNA, 19 nt, Artificial Sequence
  Description of Artificial Sequence: Synthetic oligonucleotide
aucaaaacgcugcgugugu

SEQ ID NO: 432800 - RNA, 19 nt, Artificial Sequence
  Description of Artificial Sequence: Synthetic oligonucleotide
cugguagaacgcuguacag

SEQ ID NO: 432801 - RNA, 19 nt, Artificial Sequence
  Description of Artificial Sequence: Synthetic oligonucleotide
agcugguagaacgcuguac

SEQ ID NO: 432802 - RNA, 19 nt, Artificial Sequence
  Description of Artificial Sequence: Synthetic oligonucleotide
gggagucacuacuaggaag

SEQ ID NO: 432803 - RNA, 19 nt, Artificial Sequence
  Description of Artificial Sequence: Synthetic oligonucleotide
guguuagaagagccucugg

SEQ ID NO: 432804 - RNA, 19 nt, Artificial Sequence
  Description of Artificial Sequence: Synthetic oligonucleotide
cagcuuacguuccucguac

SEQ ID NO: 432805 - RNA, 19 nt, Artificial Sequence
  Description of Artificial Sequence: Synthetic oligonucleotide
ugagcucgaacucgucgga

SEQ ID NO: 432806 - RNA, 19 nt, Artificial Sequence
  Description of Artificial Sequence: Synthetic oligonucleotide
aauugugcaccagggcaca

SEQ ID NO: 432807 - RNA, 19 nt, Artificial Sequence
  Description of Artificial Sequence: Synthetic oligonucleotide
caaaguucguagucugguc

SEQ ID NO: 432808 - RNA, 19 nt, Artificial Sequence
  Description of Artificial Sequence: Synthetic oligonucleotide
ggcauugggaacuccgaag

SEQ ID NO: 432809 - RNA, 19 nt, Artificial Sequence
  Description of Artificial Sequence: Synthetic oligonucleotide
uuaccagccccuucuggac

SEQ ID NO: 432810 - RNA, 19 nt, Artificial Sequence
  Description of Artificial Sequence: Synthetic oligonucleotide
ggugguuguacagcgauug

SEQ ID NO: 432811 - RNA, 19 nt, Artificial Sequence
  Description of Artificial Sequence: Synthetic oligonucleotide
caaaacgcugcguguguac

SEQ ID NO: 432812 - RNA, 19 nt, Artificial Sequence
  Description of Artificial Sequence: Synthetic oligonucleotide
caaugguaaauguaguagu

SEQ ID NO: 432813 - RNA, 19 nt, Artificial Sequence
  Description of Artificial Sequence: Synthetic oligonucleotide
cugggaugaucgugcaagg

SEQ ID NO: 432814 - RNA, 19 nt, Artificial Sequence
  Description of Artificial Sequence: Synthetic oligonucleotide
aaacgcugcguguguacaa

SEQ ID NO: 432815 - RNA, 19 nt, Artificial Sequence
  Description of Artificial Sequence: Synthetic oligonucleotide
guacagcgauugcacauag

SEQ ID NO: 432816 - RNA, 19 nt, Artificial Sequence
  Description of Artificial Sequence: Synthetic oligonucleotide
aacucgucggauggcagcu

SEQ ID NO: 432817 - RNA, 19 nt, Artificial Sequence
  Description of Artificial Sequence: Synthetic oligonucleotide
agcucgaacucgucggaug

SEQ ID NO: 432818 - RNA, 19 nt, Artificial Sequence
  Description of Artificial Sequence: Synthetic oligonucleotide
uggcucucuauuuggggcu

SEQ ID NO: 432819 - RNA, 19 nt, Artificial Sequence
  Description of Artificial Sequence: Synthetic oligonucleotide
cucagcagaugagaaggcc

SEQ ID NO: 432820 - RNA, 19 nt, Artificial Sequence
  Description of Artificial Sequence: Synthetic oligonucleotide
guccguuggaacugggaug

SEQ ID NO: 432821 - RNA, 19 nt, Artificial Sequence
  Description of Artificial Sequence: Synthetic oligonucleotide
gugaagacgcauuuggggu

SEQ ID NO: 432822 - RNA, 19 nt, Artificial Sequence
  Description of Artificial Sequence: Synthetic oligonucleotide
cagucucccagccaaggug

SEQ ID NO: 432823 - RNA, 19 nt, Artificial Sequence
  Description of Artificial Sequence: Synthetic oligonucleotide
cuggcgccuguuuuguggg

SEQ ID NO: 432824 - RNA, 19 nt, Artificial Sequence
  Description of Artificial Sequence: Synthetic oligonucleotide
ugggagucacuacuaggaa

SEQ ID NO: 432825 - RNA, 19 nt, Artificial Sequence
  Description of Artificial Sequence: Synthetic oligonucleotide
caguauggucaacuccucc

SEQ ID NO: 432826 - RNA, 19 nt, Artificial Sequence
  Description of Artificial Sequence: Synthetic oligonucleotide
cucgucggauggcagcucg

SEQ ID NO: 432827 - RNA, 19 nt, Artificial Sequence
  Description of Artificial Sequence: Synthetic oligonucleotide
agaguggcuagacauucuu

SEQ ID NO: 432828 - RNA, 19 nt, Artificial Sequence
  Description of Artificial Sequence: Synthetic oligonucleotide
cagcgauugcacauaggug

SEQ ID NO: 432829 - RNA, 19 nt, Artificial Sequence
  Description of Artificial Sequence: Synthetic oligonucleotide
uguacagcgauugcacaua

SEQ ID NO: 432830 - RNA, 19 nt, Artificial Sequence
  Description of Artificial Sequence: Synthetic oligonucleotide
aggcgcagcucauggcgcc

SEQ ID NO: 432831 - RNA, 19 nt, Artificial Sequence
  Description of Artificial Sequence: Synthetic oligonucleotide
acgcuguacagcuguccgg

SEQ ID NO: 432832 - RNA, 19 nt, Artificial Sequence
  Description of Artificial Sequence: Synthetic oligonucleotide
gcugguagaacgcuguaca

SEQ ID NO: 432833 - RNA, 19 nt, Artificial Sequence
  Description of Artificial Sequence: Synthetic oligonucleotide
gucacuacuaggaagucua

SEQ ID NO: 432834 - RNA, 19 nt, Artificial Sequence
  Description of Artificial Sequence: Synthetic oligonucleotide
gucuacugcacagucuccc

SEQ ID NO: 432835 - RNA, 19 nt, Artificial Sequence
  Description of Artificial Sequence: Synthetic oligonucleotide
agucgggucacagucccag

SEQ ID NO: 432836 - RNA, 19 nt, Artificial Sequence
  Description of Artificial Sequence: Synthetic oligonucleotide
accuuaccaggguccaauc

SEQ ID NO: 432837 - RNA, 19 nt, Artificial Sequence
  Description of Artificial Sequence: Synthetic oligonucleotide
gguagaacgcuguacagcu

SEQ ID NO: 432838 - RNA, 19 nt, Artificial Sequence
  Description of Artificial Sequence: Synthetic oligonucleotide
aucagcuuacguuccucgu

SEQ ID NO: 432839 - RNA, 19 nt, Artificial Sequence
  Description of Artificial Sequence: Synthetic oligonucleotide
gguuguuucgacagaccgg

SEQ ID NO: 432840 - RNA, 19 nt, Artificial Sequence
  Description of Artificial Sequence: Synthetic oligonucleotide
acgcauuuggggucgggcu

SEQ ID NO: 432841 - RNA, 19 nt, Artificial Sequence
  Description of Artificial Sequence: Synthetic oligonucleotide
gcucgaacucgucggaugg

SEQ ID NO: 432842 - RNA, 19 nt, Artificial Sequence
  Description of Artificial Sequence: Synthetic oligonucleotide
cuacugcacagucucccag

SEQ ID NO: 432843 - RNA, 19 nt, Artificial Sequence
  Description of Artificial Sequence: Synthetic oligonucleotide
agacauucuugccgcgcag

SEQ ID NO: 432844 - RNA, 19 nt, Artificial Sequence
  Description of Artificial Sequence: Synthetic oligonucleotide
uccgaagcaguauggucaa

SEQ ID NO: 432845 - RNA, 19 nt, Artificial Sequence
  Description of Artificial Sequence: Synthetic oligonucleotide
agaagagccucuggcgggg

SEQ ID NO: 432846 - RNA, 19 nt, Artificial Sequence
  Description of Artificial Sequence: Synthetic oligonucleotide
ggcuaagcugcccauaguc

SEQ ID NO: 432847 - RNA, 19 nt, Artificial Sequence
  Description of Artificial Sequence: Synthetic oligonucleotide
cucgagucugcucggugcc

SEQ ID NO: 432848 - RNA, 19 nt, Artificial Sequence
  Description of Artificial Sequence: Synthetic oligonucleotide
acgugggcuggcuuggucu

SEQ ID NO: 432849 - RNA, 19 nt, Artificial Sequence
  Description of Artificial Sequence: Synthetic oligonucleotide
ucgaacucgucggauggca

SEQ ID NO: 432850 - RNA, 19 nt, Artificial Sequence
  Description of Artificial Sequence: Synthetic oligonucleotide
uugucggagcucacggagu

SEQ ID NO: 432851 - RNA, 19 nt, Artificial Sequence
  Description of Artificial Sequence: Synthetic oligonucleotide
cucggucucugacggagcc

SEQ ID NO: 432852 - RNA, 19 nt, Artificial Sequence
  Description of Artificial Sequence: Synthetic oligonucleotide
ucggagcucacggagugca

SEQ ID NO: 432853 - RNA, 19 nt, Artificial Sequence
  Description of Artificial Sequence: Synthetic oligonucleotide
acuccgaagcugguagaac

SEQ ID NO: 432854 - RNA, 19 nt, Artificial Sequence
  Description of Artificial Sequence: Synthetic oligonucleotide
ggucucagcagaugagaag

SEQ ID NO: 432855 - RNA, 19 nt, Artificial Sequence
  Description of Artificial Sequence: Synthetic oligonucleotide
uauuuggggcuggcugucg

SEQ ID NO: 432856 - RNA, 19 nt, Artificial Sequence
  Description of Artificial Sequence: Synthetic oligonucleotide
agucagaucugcucucuua

SEQ ID NO: 432857 - RNA, 19 nt, Artificial Sequence
  Description of Artificial Sequence: Synthetic oligonucleotide
gacgcauuuggggucgggc

SEQ ID NO: 432858 - RNA, 19 nt, Artificial Sequence
  Description of Artificial Sequence: Synthetic oligonucleotide
aacuccgaagcugguagaa

SEQ ID NO: 432859 - RNA, 19 nt, Artificial Sequence
  Description of Artificial Sequence: Synthetic oligonucleotide
agucacuacuaggaagucu

SEQ ID NO: 432860 - RNA, 19 nt, Artificial Sequence
  Description of Artificial Sequence: Synthetic oligonucleotide
ugcgugcuugggaugcuga

SEQ ID NO: 432861 - RNA, 19 nt, Artificial Sequence
  Description of Artificial Sequence: Synthetic oligonucleotide
ggcacuccgaagcaguaug

SEQ ID NO: 432862 - RNA, 19 nt, Artificial Sequence
  Description of Artificial Sequence: Synthetic oligonucleotide
uucaaaguucuggcgccug

SEQ ID NO: 432863 - RNA, 19 nt, Artificial Sequence
  Description of Artificial Sequence: Synthetic oligonucleotide
ucgcuguucucguucccug

SEQ ID NO: 432864 - RNA, 19 nt, Artificial Sequence
  Description of Artificial Sequence: Synthetic oligonucleotide
gacgugagugacacugccc

SEQ ID NO: 432865 - RNA, 19 nt, Artificial Sequence
  Description of Artificial Sequence: Synthetic oligonucleotide
gaguggcuagacauucuug

SEQ ID NO: 432866 - RNA, 19 nt, Artificial Sequence
  Description of Artificial Sequence: Synthetic oligonucleotide
cauccguggggccccaagc

SEQ ID NO: 432867 - RNA, 19 nt, Artificial Sequence
  Description of Artificial Sequence: Synthetic oligonucleotide
aggacgugagugacacugc

SEQ ID NO: 432868 - RNA, 19 nt, Artificial Sequence
  Description of Artificial Sequence: Synthetic oligonucleotide
ucgagaggaggaguugcug

SEQ ID NO: 432869 - RNA, 19 nt, Artificial Sequence
  Description of Artificial Sequence: Synthetic oligonucleotide
ucgucggauggcagcucgg

SEQ ID NO: 432870 - RNA, 19 nt, Artificial Sequence
  Description of Artificial Sequence: Synthetic oligonucleotide
aacugggaugaucgugcaa

SEQ ID NO: 432871 - RNA, 19 nt, Artificial Sequence
  Description of Artificial Sequence: Synthetic oligonucleotide
aagcugcccauagucaaaa

SEQ ID NO: 432872 - RNA, 19 nt, Artificial Sequence
  Description of Artificial Sequence: Synthetic oligonucleotide
uacucaccggcacuccgaa

SEQ ID NO: 432873 - RNA, 19 nt, Artificial Sequence
  Description of Artificial Sequence: Synthetic oligonucleotide
agaccgggcagcaguggcc

SEQ ID NO: 432874 - RNA, 19 nt, Artificial Sequence
  Description of Artificial Sequence: Synthetic oligonucleotide
uuugugggcuaagcugccc

SEQ ID NO: 432875 - RNA, 19 nt, Artificial Sequence
  Description of Artificial Sequence: Synthetic oligonucleotide
gaaugagcaaguucucuuu

SEQ ID NO: 432876 - RNA, 19 nt, Artificial Sequence
  Description of Artificial Sequence: Synthetic oligonucleotide
ccugagcucgaacucgucg

SEQ ID NO: 432877 - RNA, 19 nt, Artificial Sequence
  Description of Artificial Sequence: Synthetic oligonucleotide
uucggggaccauccuggga

SEQ ID NO: 432878 - RNA, 19 nt, Artificial Sequence
  Description of Artificial Sequence: Synthetic oligonucleotide
cuguucggggaccauccug

SEQ ID NO: 432879 - RNA, 19 nt, Artificial Sequence
  Description of Artificial Sequence: Synthetic oligonucleotide
ugucggggacugagcacag

SEQ ID NO: 432880 - RNA, 19 nt, Artificial Sequence
  Description of Artificial Sequence: Synthetic oligonucleotide
agcucggaucagcuuacgu

SEQ ID NO: 432881 - RNA, 19 nt, Artificial Sequence
  Description of Artificial Sequence: Synthetic oligonucleotide
ugacggagccaguccguug

SEQ ID NO: 432882 - RNA, 19 nt, Artificial Sequence
  Description of Artificial Sequence: Synthetic oligonucleotide
uuucggacucggucucuga

SEQ ID NO: 432883 - RNA, 19 nt, Artificial Sequence
  Description of Artificial Sequence: Synthetic oligonucleotide
cacgggugaugguggaggc

SEQ ID NO: 432884 - RNA, 19 nt, Artificial Sequence
  Description of Artificial Sequence: Synthetic oligonucleotide
uuguuucgacagaccgggc

SEQ ID NO: 432885 - RNA, 19 nt, Artificial Sequence
  Description of Artificial Sequence: Synthetic oligonucleotide
gaacugggaugaucgugca

SEQ ID NO: 432886 - RNA, 19 nt, Artificial Sequence
  Description of Artificial Sequence: Synthetic oligonucleotide
ccucaaaguucguagucug

SEQ ID NO: 432887 - RNA, 19 nt, Artificial Sequence
  Description of Artificial Sequence: Synthetic oligonucleotide
uggccguauugcuucggcu

SEQ ID NO: 432888 - RNA, 19 nt, Artificial Sequence
  Description of Artificial Sequence: Synthetic oligonucleotide
aggaagucuacugcacagu

SEQ ID NO: 432889 - RNA, 19 nt, Artificial Sequence
  Description of Artificial Sequence: Synthetic oligonucleotide
uguggccguauugcuucgg

SEQ ID NO: 432890 - RNA, 19 nt, Artificial Sequence
  Description of Artificial Sequence: Synthetic oligonucleotide
ggacgugagugacacugcc

SEQ ID NO: 432891 - RNA, 19 nt, Artificial Sequence
  Description of Artificial Sequence: Synthetic oligonucleotide
cacgcacuuccagucaggc

SEQ ID NO: 432892 - RNA, 19 nt, Artificial Sequence
  Description of Artificial Sequence: Synthetic oligonucleotide
guggccguauugcuucggc

SEQ ID NO: 432893 - RNA, 19 nt, Artificial Sequence
  Description of Artificial Sequence: Synthetic oligonucleotide
caggcgcagcucauggcgc

SEQ ID NO: 432894 - RNA, 19 nt, Artificial Sequence
  Description of Artificial Sequence: Synthetic oligonucleotide
aguucguagucugguccag

SEQ ID NO: 432895 - RNA, 19 nt, Artificial Sequence
  Description of Artificial Sequence: Synthetic oligonucleotide
ucguagucugguccagcau

SEQ ID NO: 432896 - RNA, 19 nt, Artificial Sequence
  Description of Artificial Sequence: Synthetic oligonucleotide
guucggggaccauccuggg

SEQ ID NO: 432897 - RNA, 19 nt, Artificial Sequence
  Description of Artificial Sequence: Synthetic oligonucleotide
ucugcucggugccguuagc

SEQ ID NO: 432898 - RNA, 19 nt, Artificial Sequence
  Description of Artificial Sequence: Synthetic oligonucleotide
ucgagucugcucggugccg

SEQ ID NO: 432899 - RNA, 19 nt, Artificial Sequence
  Description of Artificial Sequence: Synthetic oligonucleotide
cucgaagccgcaccauguc

SEQ ID NO: 432900 - RNA, 19 nt, Artificial Sequence
  Description of Artificial Sequence: Synthetic oligonucleotide
ggccguauugcuucggcuc

SEQ ID NO: 432901 - RNA, 19 nt, Artificial Sequence
  Description of Artificial Sequence: Synthetic oligonucleotide
augggucucagcagaugag

SEQ ID NO: 432902 - RNA, 19 nt, Artificial Sequence
  Description of Artificial Sequence: Synthetic oligonucleotide
cucguacucaccggcacuc

SEQ ID NO: 432903 - RNA, 19 nt, Artificial Sequence
  Description of Artificial Sequence: Synthetic oligonucleotide
guuaccaggggaggacgug

SEQ ID NO: 432904 - RNA, 19 nt, Artificial Sequence
  Description of Artificial Sequence: Synthetic oligonucleotide
cuuugucggagcucacgga

SEQ ID NO: 432905 - RNA, 19 nt, Artificial Sequence
  Description of Artificial Sequence: Synthetic oligonucleotide
ugugagcagaguggcuaga

SEQ ID NO: 432906 - RNA, 19 nt, Artificial Sequence
  Description of Artificial Sequence: Synthetic oligonucleotide
guacacgcacuuccaguca

SEQ ID NO: 432907 - RNA, 19 nt, Artificial Sequence
  Description of Artificial Sequence: Synthetic oligonucleotide
ggagucacuacuaggaagu

SEQ ID NO: 432908 - RNA, 19 nt, Artificial Sequence
  Description of Artificial Sequence: Synthetic oligonucleotide
cugucggggacugagcaca

SEQ ID NO: 432909 - RNA, 19 nt, Artificial Sequence
  Description of Artificial Sequence: Synthetic oligonucleotide
gacacgggugaugguggag

SEQ ID NO: 432910 - RNA, 19 nt, Artificial Sequence
  Description of Artificial Sequence: Synthetic oligonucleotide
aagacgcauuuggggucgg

SEQ ID NO: 432911 - RNA, 19 nt, Artificial Sequence
  Description of Artificial Sequence: Synthetic oligonucleotide
cuguggccguauugcuucg

SEQ ID NO: 432912 - RNA, 19 nt, Artificial Sequence
  Description of Artificial Sequence: Synthetic oligonucleotide
guuccgaugcccacaggca

SEQ ID NO: 432913 - RNA, 19 nt, Artificial Sequence
  Description of Artificial Sequence: Synthetic oligonucleotide
gaagucuugggcagacucu

SEQ ID NO: 432914 - RNA, 19 nt, Artificial Sequence
  Description of Artificial Sequence: Synthetic oligonucleotide
acagaccgggcagcagugg

SEQ ID NO: 432915 - RNA, 19 nt, Artificial Sequence
  Description of Artificial Sequence: Synthetic oligonucleotide
guguacacgcacuuccagu

SEQ ID NO: 432916 - RNA, 19 nt, Artificial Sequence
  Description of Artificial Sequence: Synthetic oligonucleotide
acgcacuuccagucaggcu

SEQ ID NO: 432917 - RNA, 19 nt, Artificial Sequence
  Description of Artificial Sequence: Synthetic oligonucleotide
gcaccaauccagcaacauc

SEQ ID NO: 432918 - RNA, 19 nt, Artificial Sequence
  Description of Artificial Sequence: Synthetic oligonucleotide
cuugggaugcugaagucuu

SEQ ID NO: 432919 - RNA, 19 nt, Artificial Sequence
  Description of Artificial Sequence: Synthetic oligonucleotide
guucguagucugguccagc

SEQ ID NO: 432920 - RNA, 19 nt, Artificial Sequence
  Description of Artificial Sequence: Synthetic oligonucleotide
gggucagcgaagugagggc

SEQ ID NO: 432921 - RNA, 19 nt, Artificial Sequence
  Description of Artificial Sequence: Synthetic oligonucleotide
ccagggaaugagcaaguuc

SEQ ID NO: 432922 - RNA, 19 nt, Artificial Sequence
  Description of Artificial Sequence: Synthetic oligonucleotide
cguagucugguccagcauc

SEQ ID NO: 432923 - RNA, 19 nt, Artificial Sequence
  Description of Artificial Sequence: Synthetic oligonucleotide
guagaacgcuguacagcug

SEQ ID NO: 432924 - RNA, 19 nt, Artificial Sequence
  Description of Artificial Sequence: Synthetic oligonucleotide
cucgaacucgucggauggc

SEQ ID NO: 432925 - RNA, 19 nt, Artificial Sequence
  Description of Artificial Sequence: Synthetic oligonucleotide
ucguacucaccggcacucc

SEQ ID NO: 432926 - RNA, 19 nt, Artificial Sequence
  Description of Artificial Sequence: Synthetic oligonucleotide
gucagcgaagugagggcug

SEQ ID NO: 432927 - RNA, 19 nt, Artificial Sequence
  Description of Artificial Sequence: Synthetic oligonucleotide
uugcgugcuugggaugcug

SEQ ID NO: 432928 - RNA, 19 nt, Artificial Sequence
  Description of Artificial Sequence: Synthetic oligonucleotide
gagucacuacuaggaaguc

SEQ ID NO: 432929 - RNA, 19 nt, Artificial Sequence
  Description of Artificial Sequence: Synthetic oligonucleotide
ccaaucugugagcugccug

SEQ ID NO: 432930 - RNA, 19 nt, Artificial Sequence
  Description of Artificial Sequence: Synthetic oligonucleotide
cuuaaaguugcagccuccu

SEQ ID NO: 432931 - RNA, 19 nt, Artificial Sequence
  Description of Artificial Sequence: Synthetic oligonucleotide
uccugagcucgaacucguc

SEQ ID NO: 432932 - RNA, 19 nt, Artificial Sequence
  Description of Artificial Sequence: Synthetic oligonucleotide
gaccgggcagcaguggcca

SEQ ID NO: 432933 - RNA, 19 nt, Artificial Sequence
  Description of Artificial Sequence: Synthetic oligonucleotide
gcgcaggcgcagcucaugg

SEQ ID NO: 432934 - RNA, 19 nt, Artificial Sequence
  Description of Artificial Sequence: Synthetic oligonucleotide
gcacuccgaagcaguaugg

SEQ ID NO: 432935 - RNA, 19 nt, Artificial Sequence
  Description of Artificial Sequence: Synthetic oligonucleotide
agacgcauuuggggucggg

SEQ ID NO: 432936 - RNA, 19 nt, Artificial Sequence
  Description of Artificial Sequence: Synthetic oligonucleotide
acguguacacgcacuucca

SEQ ID NO: 432937 - RNA, 19 nt, Artificial Sequence
  Description of Artificial Sequence: Synthetic oligonucleotide
caguccguuggaacuggga

SEQ ID NO: 432938 - RNA, 19 nt, Artificial Sequence
  Description of Artificial Sequence: Synthetic oligonucleotide
guacguguacacgcacuuc

SEQ ID NO: 432939 - RNA, 19 nt, Artificial Sequence
  Description of Artificial Sequence: Synthetic oligonucleotide
ucggucucugacggagcca

SEQ ID NO: 432940 - RNA, 19 nt, Artificial Sequence
  Description of Artificial Sequence: Synthetic oligonucleotide
ccucgagaggaggaguugc

SEQ ID NO: 432941 - RNA, 19 nt, Artificial Sequence
  Description of Artificial Sequence: Synthetic oligonucleotide
uugccgcgcaggcgcagcu

SEQ ID NO: 432942 - RNA, 19 nt, Artificial Sequence
  Description of Artificial Sequence: Synthetic oligonucleotide
gguaccuuaccagggucca

SEQ ID NO: 432943 - RNA, 19 nt, Artificial Sequence
  Description of Artificial Sequence: Synthetic oligonucleotide
acucgucggauggcagcuc

SEQ ID NO: 432944 - RNA, 19 nt, Artificial Sequence
  Description of Artificial Sequence: Synthetic oligonucleotide
caagguaguagagggcucu

SEQ ID NO: 432945 - RNA, 19 nt, Artificial Sequence
  Description of Artificial Sequence: Synthetic oligonucleotide
cuugccgcgcaggcgcagc

SEQ ID NO: 432946 - RNA, 19 nt, Artificial Sequence
  Description of Artificial Sequence: Synthetic oligonucleotide
cucgguuaccaggggagga

SEQ ID NO: 432947 - RNA, 19 nt, Artificial Sequence
  Description of Artificial Sequence: Synthetic oligonucleotide
gcuuugcgugcuugggaug

SEQ ID NO: 432948 - RNA, 19 nt, Artificial Sequence
  Description of Artificial Sequence: Synthetic oligonucleotide
ucccguagucgcuguucuc

SEQ ID NO: 432949 - RNA, 19 nt, Artificial Sequence
  Description of Artificial Sequence: Synthetic oligonucleotide
guggcggugcugugcugug

SEQ ID NO: 432950 - RNA, 19 nt, Artificial Sequence
  Description of Artificial Sequence: Synthetic oligonucleotide
cguuccucguacucaccgg

SEQ ID NO: 432951 - RNA, 19 nt, Artificial Sequence
  Description of Artificial Sequence: Synthetic oligonucleotide
cguacucaccggcacuccg

SEQ ID NO: 432952 - RNA, 19 nt, Artificial Sequence
  Description of Artificial Sequence: Synthetic oligonucleotide
aagggaccugggagucaag

SEQ ID NO: 432953 - RNA, 19 nt, Artificial Sequence
  Description of Artificial Sequence: Synthetic oligonucleotide
cguguacacgcacuuccag

SEQ ID NO: 432954 - RNA, 19 nt, Artificial Sequence
  Description of Artificial Sequence: Synthetic oligonucleotide
caggugguuguacagcgau

SEQ ID NO: 432955 - RNA, 19 nt, Artificial Sequence
  Description of Artificial Sequence: Synthetic oligonucleotide
gggagggguuguuucgaca

SEQ ID NO: 432956 - RNA, 19 nt, Artificial Sequence
  Description of Artificial Sequence: Synthetic oligonucleotide
ccaagguaguagagggcuc

SEQ ID NO: 432957 - RNA, 19 nt, Artificial Sequence
  Description of Artificial Sequence: Synthetic oligonucleotide
uggcggggcccaagguagu

SEQ ID NO: 432958 - RNA, 19 nt, Artificial Sequence
  Description of Artificial Sequence: Synthetic oligonucleotide
ggcuuugcgugcuugggau

SEQ ID NO: 432959 - RNA, 19 nt, Artificial Sequence
  Description of Artificial Sequence: Synthetic oligonucleotide
gugccucccguagucgcug

SEQ ID NO: 432960 - RNA, 19 nt, Artificial Sequence
  Description of Artificial Sequence: Synthetic oligonucleotide
acggagccaguccguugga

SEQ ID NO: 432961 - RNA, 19 nt, Artificial Sequence
  Description of Artificial Sequence: Synthetic oligonucleotide
ugccucccguagucgcugu

SEQ ID NO: 432962 - RNA, 19 nt, Artificial Sequence
  Description of Artificial Sequence: Synthetic oligonucleotide
cacuacuaggaagucuacu

SEQ ID NO: 432963 - RNA, 19 nt, Artificial Sequence
  Description of Artificial Sequence: Synthetic oligonucleotide
caguccgcaugggucucag

SEQ ID NO: 432964 - RNA, 19 nt, Artificial Sequence
  Description of Artificial Sequence: Synthetic oligonucleotide
gguuuggacuguggugcug

SEQ ID NO: 432965 - RNA, 19 nt, Artificial Sequence
  Description of Artificial Sequence: Synthetic oligonucleotide
agacagcgguagaauuccu

SEQ ID NO: 432966 - RNA, 19 nt, Artificial Sequence
  Description of Artificial Sequence: Synthetic oligonucleotide
gaccagacagcgguagaau

SEQ ID NO: 432967 - RNA, 19 nt, Artificial Sequence
  Description of Artificial Sequence: Synthetic oligonucleotide
ccucuggcggggcccaagg

SEQ ID NO: 432968 - RNA, 19 nt, Artificial Sequence
  Description of Artificial Sequence: Synthetic oligonucleotide
gcuccucaaaguucguagu

SEQ ID NO: 432969 - RNA, 19 nt, Artificial Sequence
  Description of Artificial Sequence: Synthetic oligonucleotide
ggcucucuauuuggggcug

SEQ ID NO: 432970 - RNA, 19 nt, Artificial Sequence
  Description of Artificial Sequence: Synthetic oligonucleotide
cgaacucgucggauggcag

SEQ ID NO: 432971 - RNA, 19 nt, Artificial Sequence
  Description of Artificial Sequence: Synthetic oligonucleotide
ccucgguuaccaggggagg

SEQ ID NO: 432972 - RNA, 19 nt, Artificial Sequence
  Description of Artificial Sequence: Synthetic oligonucleotide
gggaaugagcaaguucucu

SEQ ID NO: 432973 - RNA, 19 nt, Artificial Sequence
  Description of Artificial Sequence: Synthetic oligonucleotide
guucuggcgccuguuuugu

SEQ ID NO: 432974 - RNA, 19 nt, Artificial Sequence
  Description of Artificial Sequence: Synthetic oligonucleotide
cucccguagucgcuguucu

SEQ ID NO: 432975 - RNA, 19 nt, Artificial Sequence
  Description of Artificial Sequence: Synthetic oligonucleotide
gucgcuguucucguucccu

SEQ ID NO: 432976 - RNA, 19 nt, Artificial Sequence
  Description of Artificial Sequence: Synthetic oligonucleotide
gcagcucggaucagcuuac

SEQ ID NO: 432977 - RNA, 19 nt, Artificial Sequence
  Description of Artificial Sequence: Synthetic oligonucleotide
cacauaggugaagacgcau

SEQ ID NO: 432978 - RNA, 19 nt, Artificial Sequence
  Description of Artificial Sequence: Synthetic oligonucleotide
agucugcucggugccguua

SEQ ID NO: 432979 - RNA, 19 nt, Artificial Sequence
  Description of Artificial Sequence: Synthetic oligonucleotide
gggacugagcacagauaca

SEQ ID NO: 432980 - RNA, 19 nt, Artificial Sequence
  Description of Artificial Sequence: Synthetic oligonucleotide
ggucagcgaagugagggcu

SEQ ID NO: 432981 - RNA, 19 nt, Artificial Sequence
  Description of Artificial Sequence: Synthetic oligonucleotide
gccguauugcuucggcucu

SEQ ID NO: 432982 - RNA, 19 nt, Artificial Sequence
  Description of Artificial Sequence: Synthetic oligonucleotide
aggugguuguacagcgauu

SEQ ID NO: 432983 - RNA, 19 nt, Artificial Sequence
  Description of Artificial Sequence: Synthetic oligonucleotide
agcagggguuaggacuuuu

SEQ ID NO: 432984 - RNA, 19 nt, Artificial Sequence
  Description of Artificial Sequence: Synthetic oligonucleotide
ggggugugccaggaccugc

SEQ ID NO: 432985 - RNA, 19 nt, Artificial Sequence
  Description of Artificial Sequence: Synthetic oligonucleotide
gccuguuuugugggcuaag

SEQ ID NO: 432986 - RNA, 19 nt, Artificial Sequence
  Description of Artificial Sequence: Synthetic oligonucleotide
cccaagguaguagagggcu

SEQ ID NO: 432987 - RNA, 19 nt, Artificial Sequence
  Description of Artificial Sequence: Synthetic oligonucleotide
gccccaagcagggguuagg

SEQ ID NO: 432988 - RNA, 19 nt, Artificial Sequence
  Description of Artificial Sequence: Synthetic oligonucleotide
gggcaguccgcaugggucu

SEQ ID NO: 432989 - RNA, 19 nt, Artificial Sequence
  Description of Artificial Sequence: Synthetic oligonucleotide
ggcgcagcucauggcgccg

SEQ ID NO: 432990 - RNA, 19 nt, Artificial Sequence
  Description of Artificial Sequence: Synthetic oligonucleotide
ccuugaucucaaugguaaa

SEQ ID NO: 432991 - RNA, 19 nt, Artificial Sequence
  Description of Artificial Sequence: Synthetic oligonucleotide
ggucuuagcucugcaccaa

SEQ ID NO: 432992 - RNA, 19 nt, Artificial Sequence
  Description of Artificial Sequence: Synthetic oligonucleotide
gcagaugagaaggccauuu

SEQ ID NO: 432993 - RNA, 19 nt, Artificial Sequence
  Description of Artificial Sequence: Synthetic oligonucleotide
gcgauugcacauaggugaa

SEQ ID NO: 432994 - RNA, 19 nt, Artificial Sequence
  Description of Artificial Sequence: Synthetic oligonucleotide
cacuccgaagcaguauggu

SEQ ID NO: 432995 - RNA, 19 nt, Artificial Sequence
  Description of Artificial Sequence: Synthetic oligonucleotide
cagcccggaugagcuuccg

SEQ ID NO: 432996 - RNA, 19 nt, Artificial Sequence
  Description of Artificial Sequence: Synthetic oligonucleotide
cguuggaacugggaugauc

SEQ ID NO: 432997 - RNA, 19 nt, Artificial Sequence
  Description of Artificial Sequence: Synthetic oligonucleotide
guaccuuaccaggguccaa

SEQ ID NO: 432998 - RNA, 19 nt, Artificial Sequence
  Description of Artificial Sequence: Synthetic oligonucleotide
gcggggcccaagguaguag

SEQ ID NO: 432999 - RNA, 19 nt, Artificial Sequence
  Description of Artificial Sequence: Synthetic oligonucleotide
ggccccaagcagggguuag

SEQ ID NO: 433000 - RNA, 19 nt, Artificial Sequence
  Description of Artificial Sequence: Synthetic oligonucleotide
gcccgugccucccguaguc

SEQ ID NO: 433001 - RNA, 19 nt, Artificial Sequence
  Description of Artificial Sequence: Synthetic oligonucleotide
cagucgggucacaguccca

SEQ ID NO: 433002 - RNA, 19 nt, Artificial Sequence
  Description of Artificial Sequence: Synthetic oligonucleotide
cugcucggugccguuagcu

SEQ ID NO: 433003 - RNA, 19 nt, Artificial Sequence
  Description of Artificial Sequence: Synthetic oligonucleotide
gggaacuccgaagcuggua

SEQ ID NO: 433004 - RNA, 19 nt, Artificial Sequence
  Description of Artificial Sequence: Synthetic oligonucleotide
gagcucgaacucgucggau

SEQ ID NO: 433005 - RNA, 19 nt, Artificial Sequence
  Description of Artificial Sequence: Synthetic oligonucleotide
ugccgcgcaggcgcagcuc

SEQ ID NO: 433006 - RNA, 19 nt, Artificial Sequence
  Description of Artificial Sequence: Synthetic oligonucleotide
cgauugcacauaggugaag

SEQ ID NO: 433007 - RNA, 19 nt, Artificial Sequence
  Description of Artificial Sequence: Synthetic oligonucleotide
gcagcccggaugagcuucc

SEQ ID NO: 433008 - RNA, 19 nt, Artificial Sequence
  Description of Artificial Sequence: Synthetic oligonucleotide
gcucuguuucaagggaccu

SEQ ID NO: 433009 - RNA, 19 nt, Artificial Sequence
  Description of Artificial Sequence: Synthetic oligonucleotide
ggcgccuguuuugugggcu

SEQ ID NO: 433010 - RNA, 19 nt, Artificial Sequence
  Description of Artificial Sequence: Synthetic oligonucleotide
ccccaagcagggguuagga

SEQ ID NO: 433011 - RNA, 19 nt, Artificial Sequence
  Description of Artificial Sequence: Synthetic oligonucleotide
cuggcuccccaguuccgau

SEQ ID NO: 433012 - RNA, 19 nt, Artificial Sequence
  Description of Artificial Sequence: Synthetic oligonucleotide
gagucugcucggugccguu

SEQ ID NO: 433013 - RNA, 19 nt, Artificial Sequence
  Description of Artificial Sequence: Synthetic oligonucleotide
ucggugccguuagcugcuu

SEQ ID NO: 433014 - RNA, 19 nt, Artificial Sequence
  Description of Artificial Sequence: Synthetic oligonucleotide
gccgcggggugugagcaga

SEQ ID NO: 433015 - RNA, 19 nt, Artificial Sequence
  Description of Artificial Sequence: Synthetic oligonucleotide
cucuggcggggcccaaggu

SEQ ID NO: 433016 - RNA, 19 nt, Artificial Sequence
  Description of Artificial Sequence: Synthetic oligonucleotide
cggggcccaagguaguaga

SEQ ID NO: 433017 - RNA, 19 nt, Artificial Sequence
  Description of Artificial Sequence: Synthetic oligonucleotide
gcuguucggggaccauccu

SEQ ID NO: 433018 - RNA, 19 nt, Artificial Sequence
  Description of Artificial Sequence: Synthetic oligonucleotide
ccguauugcuucggcucuc

SEQ ID NO: 433019 - RNA, 19 nt, Artificial Sequence
  Description of Artificial Sequence: Synthetic oligonucleotide
cugacggagccaguccguu

SEQ ID NO: 433020 - RNA, 19 nt, Artificial Sequence
  Description of Artificial Sequence: Synthetic oligonucleotide
gcgggcaguccgcaugggu

SEQ ID NO: 433021 - RNA, 19 nt, Artificial Sequence
  Description of Artificial Sequence: Synthetic oligonucleotide
ccggggugugccaggaccu

SEQ ID NO: 433022 - RNA, 19 nt, Artificial Sequence
  Description of Artificial Sequence: Synthetic oligonucleotide
ggaggacgugagugacacu

SEQ ID NO: 433023 - RNA, 19 nt, Artificial Sequence
  Description of Artificial Sequence: Synthetic oligonucleotide
cgggccgcggggugugagc

SEQ ID NO: 433024 - RNA, 19 nt, Artificial Sequence
  Description of Artificial Sequence: Synthetic oligonucleotide
ggccucgagaggaggaguu

SEQ ID NO: 433025 - RNA, 19 nt, Artificial Sequence
  Description of Artificial Sequence: Synthetic oligonucleotide
ccgaagcugguagaacgcu

SEQ ID NO: 433026 - RNA, 19 nt, Artificial Sequence
  Description of Artificial Sequence: Synthetic oligonucleotide
gggccucgagaggaggagu

SEQ ID NO: 433027 - RNA, 19 nt, Artificial Sequence
  Description of Artificial Sequence: Synthetic oligonucleotide
cgucggauggcagcucgga

SEQ ID NO: 433028 - RNA, 19 nt, Artificial Sequence
  Description of Artificial Sequence: Synthetic oligonucleotide
ggcccgugccucccguagu

SEQ ID NO: 433029 - RNA, 19 nt, Artificial Sequence
  Description of Artificial Sequence: Synthetic oligonucleotide
cggggacugagcacagaua

SEQ ID NO: 433030 - RNA, 19 nt, Artificial Sequence
  Description of Artificial Sequence: Synthetic oligonucleotide
ggcggggcccaagguagua

SEQ ID NO: 433031 - RNA, 19 nt, Artificial Sequence
  Description of Artificial Sequence: Synthetic oligonucleotide
cgcgcaggcgcagcucaug

SEQ ID NO: 433032 - RNA, 19 nt, Artificial Sequence
  Description of Artificial Sequence: Synthetic oligonucleotide
ccgcuccucaaaguucgua

SEQ ID NO: 433033 - RNA, 19 nt, Artificial Sequence
  Description of Artificial Sequence: Synthetic oligonucleotide
gcgcgggccgcggggugug

SEQ ID NO: 433034 - RNA, 19 nt, Artificial Sequence
  Description of Artificial Sequence: Synthetic oligonucleotide
cgcaugggucucagcagau

SEQ ID NO: 433035 - RNA, 19 nt, Artificial Sequence
  Description of Artificial Sequence: Synthetic oligonucleotide
cagcgaagugagggcuguu

SEQ ID NO: 433036 - RNA, 19 nt, Artificial Sequence
  Description of Artificial Sequence: Synthetic oligonucleotide
gccucccguagucgcuguu

SEQ ID NO: 433037 - RNA, 19 nt, Artificial Sequence
  Description of Artificial Sequence: Synthetic oligonucleotide
cggcacuccgaagcaguau

SEQ ID NO: 433038 - RNA, 19 nt, Artificial Sequence
  Description of Artificial Sequence: Synthetic oligonucleotide
ccgggacgugggcuggcuu

SEQ ID NO: 433039 - RNA, 19 nt, Artificial Sequence
  Description of Artificial Sequence: Synthetic oligonucleotide
cgggcccgugccucccgua

SEQ ID NO: 433040 - RNA, 19 nt, Artificial Sequence
  Description of Artificial Sequence: Synthetic oligonucleotide
ccguuggaacugggaugau

SEQ ID NO: 433041 - RNA, 19 nt, Artificial Sequence
  Description of Artificial Sequence: Synthetic oligonucleotide
cgcgggccgcgggguguga

SEQ ID NO: 433042 - RNA, 19 nt, Artificial Sequence
  Description of Artificial Sequence: Synthetic oligonucleotide
aguucaauccuuuucauac

SEQ ID NO: 433043 - RNA, 19 nt, Artificial Sequence
  Description of Artificial Sequence: Synthetic oligonucleotide
aaucccauggaaaauacgc

SEQ ID NO: 433044 - RNA, 19 nt, Artificial Sequence
  Description of Artificial Sequence: Synthetic oligonucleotide
uuaaaggugagucaccuag

SEQ ID NO: 433045 - RNA, 19 nt, Artificial Sequence
  Description of Artificial Sequence: Synthetic oligonucleotide
uucucuauccucaagguag

SEQ ID NO: 433046 - RNA, 19 nt, Artificial Sequence
  Description of Artificial Sequence: Synthetic oligonucleotide
aguaccauaucuugaaggc

SEQ ID NO: 433047 - RNA, 19 nt, Artificial Sequence
  Description of Artificial Sequence: Synthetic oligonucleotide
uagauuaccucaaagaagu

SEQ ID NO: 433048 - RNA, 19 nt, Artificial Sequence
  Description of Artificial Sequence: Synthetic oligonucleotide
uucaaccuaauaaaagugg

SEQ ID NO: 433049 - RNA, 19 nt, Artificial Sequence
  Description of Artificial Sequence: Synthetic oligonucleotide
aaacggcuaauauuauugc

SEQ ID NO: 433050 - RNA, 19 nt, Artificial Sequence
  Description of Artificial Sequence: Synthetic oligonucleotide
aaaagagugacacuccgca

SEQ ID NO: 433051 - RNA, 19 nt, Artificial Sequence
  Description of Artificial Sequence: Synthetic oligonucleotide
uucauuguuaaccagacuu

SEQ ID NO: 433052 - RNA, 19 nt, Artificial Sequence
  Description of Artificial Sequence: Synthetic oligonucleotide
aauaucugugucuaaacaa

SEQ ID NO: 433053 - RNA, 19 nt, Artificial Sequence
  Description of Artificial Sequence: Synthetic oligonucleotide
acaacaaaccccuacacug

SEQ ID NO: 433054 - RNA, 19 nt, Artificial Sequence
  Description of Artificial Sequence: Synthetic oligonucleotide
ucgucgaugacacaguucc

SEQ ID NO: 433055 - RNA, 19 nt, Artificial Sequence
  Description of Artificial Sequence: Synthetic oligonucleotide
aaaacggcuaauauuauug

SEQ ID NO: 433056 - RNA, 19 nt, Artificial Sequence
  Description of Artificial Sequence: Synthetic oligonucleotide
auaggaguugcauuguugg

SEQ ID NO: 433057 - RNA, 19 nt, Artificial Sequence
  Description of Artificial Sequence: Synthetic oligonucleotide
aaacaauuuaagguucccc

SEQ ID NO: 433058 - RNA, 19 nt, Artificial Sequence
  Description of Artificial Sequence: Synthetic oligonucleotide
augaguaauaggaagaagg

SEQ ID NO: 433059 - RNA, 19 nt, Artificial Sequence
  Description of Artificial Sequence: Synthetic oligonucleotide
aacguuaaaacacuuuuaa

SEQ ID NO: 433060 - RNA, 19 nt, Artificial Sequence
  Description of Artificial Sequence: Synthetic oligonucleotide
aaauacgcccaaaaguacc

SEQ ID NO: 433061 - RNA, 19 nt, Artificial Sequence
  Description of Artificial Sequence: Synthetic oligonucleotide
uaucauaacuucagagucg

SEQ ID NO: 433062 - RNA, 19 nt, Artificial Sequence
  Description of Artificial Sequence: Synthetic oligonucleotide
agugguaucuagaaaauac

SEQ ID NO: 433063 - RNA, 19 nt, Artificial Sequence
  Description of Artificial Sequence: Synthetic oligonucleotide
uuuccguucaaccuaauaa

SEQ ID NO: 433064 - RNA, 19 nt, Artificial Sequence
  Description of Artificial Sequence: Synthetic oligonucleotide
gaugcuugaucuuuaacug

SEQ ID NO: 433065 - RNA, 19 nt, Artificial Sequence
  Description of Artificial Sequence: Synthetic oligonucleotide
cuaugaaggugcaaaacgg

SEQ ID NO: 433066 - RNA, 19 nt, Artificial Sequence
  Description of Artificial Sequence: Synthetic oligonucleotide
gaguaccauaucuugaagg

SEQ ID NO: 433067 - RNA, 19 nt, Artificial Sequence
  Description of Artificial Sequence: Synthetic oligonucleotide
aaccccuuuccguucaacc

SEQ ID NO: 433068 - RNA, 19 nt, Artificial Sequence
  Description of Artificial Sequence: Synthetic oligonucleotide
uaguaucauaacuucagag

SEQ ID NO: 433069 - RNA, 19 nt, Artificial Sequence
  Description of Artificial Sequence: Synthetic oligonucleotide
uccguuagcaucauuguca

SEQ ID NO: 433070 - RNA, 19 nt, Artificial Sequence
  Description of Artificial Sequence: Synthetic oligonucleotide
cuagauuaccucaaagaag

SEQ ID NO: 433071 - RNA, 19 nt, Artificial Sequence
  Description of Artificial Sequence: Synthetic oligonucleotide
cuacaagaaauauuacugc

SEQ ID NO: 433072 - RNA, 19 nt, Artificial Sequence
  Description of Artificial Sequence: Synthetic oligonucleotide
gucuuuauggaucaccucc

SEQ ID NO: 433073 - RNA, 19 nt, Artificial Sequence
  Description of Artificial Sequence: Synthetic oligonucleotide
ugaguaauaggaagaaggu

SEQ ID NO: 433074 - RNA, 19 nt, Artificial Sequence
  Description of Artificial Sequence: Synthetic oligonucleotide
cucaagguaggauaacugg

SEQ ID NO: 433075 - RNA, 19 nt, Artificial Sequence
  Description of Artificial Sequence: Synthetic oligonucleotide
auuaagucugucuuuagaa

SEQ ID NO: 433076 - RNA, 19 nt, Artificial Sequence
  Description of Artificial Sequence: Synthetic oligonucleotide
ucaaccuaauaaaaguggu

SEQ ID NO: 433077 - RNA, 19 nt, Artificial Sequence
  Description of Artificial Sequence: Synthetic oligonucleotide
ugcauuaguaucauaacuu

SEQ ID NO: 433078 - RNA, 19 nt, Artificial Sequence
  Description of Artificial Sequence: Synthetic oligonucleotide
auuaguaucauaacuucag

SEQ ID NO: 433079 - RNA, 19 nt, Artificial Sequence
  Description of Artificial Sequence: Synthetic oligonucleotide
aggugagucaccuagauua

SEQ ID NO: 433080 - RNA, 19 nt, Artificial Sequence
  Description of Artificial Sequence: Synthetic oligonucleotide
acuuaagccagccuugaag

SEQ ID NO: 433081 - RNA, 19 nt, Artificial Sequence
  Description of Artificial Sequence: Synthetic oligonucleotide
agaagaguaccauaucuug

SEQ ID NO: 433082 - RNA, 19 nt, Artificial Sequence
  Description of Artificial Sequence: Synthetic oligonucleotide
cugauauaaaacacacgcg

SEQ ID NO: 433083 - RNA, 19 nt, Artificial Sequence
  Description of Artificial Sequence: Synthetic oligonucleotide
agcucucagauacugaguc

SEQ ID NO: 433084 - RNA, 19 nt, Artificial Sequence
  Description of Artificial Sequence: Synthetic oligonucleotide
auagugacuaauaagguca

SEQ ID NO: 433085 - RNA, 19 nt, Artificial Sequence
  Description of Artificial Sequence: Synthetic oligonucleotide
guaucauaacuucagaguc

SEQ ID NO: 433086 - RNA, 19 nt, Artificial Sequence
  Description of Artificial Sequence: Synthetic oligonucleotide
uguaccaaaucuugcuggg

SEQ ID NO: 433087 - RNA, 19 nt, Artificial Sequence
  Description of Artificial Sequence: Synthetic oligonucleotide
aaccuaauaaaagugguau

SEQ ID NO: 433088 - RNA, 19 nt, Artificial Sequence
  Description of Artificial Sequence: Synthetic oligonucleotide
aagaguaccauaucuugaa

SEQ ID NO: 433089 - RNA, 19 nt, Artificial Sequence
  Description of Artificial Sequence: Synthetic oligonucleotide
ugaaacuuaggccucuccu

SEQ ID NO: 433090 - RNA, 19 nt, Artificial Sequence
  Description of Artificial Sequence: Synthetic oligonucleotide
aacacugauaaagugcgug

SEQ ID NO: 433091 - RNA, 19 nt, Artificial Sequence
  Description of Artificial Sequence: Synthetic oligonucleotide
ugaagagugucgucgauga

SEQ ID NO: 433092 - RNA, 19 nt, Artificial Sequence
  Description of Artificial Sequence: Synthetic oligonucleotide
agugacacuccgcaagucg

SEQ ID NO: 433093 - RNA, 19 nt, Artificial Sequence
  Description of Artificial Sequence: Synthetic oligonucleotide
uaugcaaacaugaguaaua

SEQ ID NO: 433094 - RNA, 19 nt, Artificial Sequence
  Description of Artificial Sequence: Synthetic oligonucleotide
gaaaauacgcccaaaagua

SEQ ID NO: 433095 - RNA, 19 nt, Artificial Sequence
  Description of Artificial Sequence: Synthetic oligonucleotide
uguguaccaaaucuugcug

SEQ ID NO: 433096 - RNA, 19 nt, Artificial Sequence
  Description of Artificial Sequence: Synthetic oligonucleotide
uacuaauuugcacugccgu

SEQ ID NO: 433097 - RNA, 19 nt, Artificial Sequence
  Description of Artificial Sequence: Synthetic oligonucleotide
caaaccauucccaaaagca

SEQ ID NO: 433098 - RNA, 19 nt, Artificial Sequence
  Description of Artificial Sequence: Synthetic oligonucleotide
auauuacugcacaacaaac

SEQ ID NO: 433099 - RNA, 19 nt, Artificial Sequence
  Description of Artificial Sequence: Synthetic oligonucleotide
uuaguaucauaacuucaga

SEQ ID NO: 433100 - RNA, 19 nt, Artificial Sequence
  Description of Artificial Sequence: Synthetic oligonucleotide
aacaugaguaauaggaaga

SEQ ID NO: 433101 - RNA, 19 nt, Artificial Sequence
  Description of Artificial Sequence: Synthetic oligonucleotide
acagcuauuccaaauaucu

SEQ ID NO: 433102 - RNA, 19 nt, Artificial Sequence
  Description of Artificial Sequence: Synthetic oligonucleotide
acacugauaaagugcgugg

SEQ ID NO: 433103 - RNA, 19 nt, Artificial Sequence
  Description of Artificial Sequence: Synthetic oligonucleotide
agaaacaauuuaagguucc

SEQ ID NO: 433104 - RNA, 19 nt, Artificial Sequence
  Description of Artificial Sequence: Synthetic oligonucleotide
ugguaucuagaaaauacuc

SEQ ID NO: 433105 - RNA, 19 nt, Artificial Sequence
  Description of Artificial Sequence: Synthetic oligonucleotide
ucuagaaaauacuccacau

SEQ ID NO: 433106 - RNA, 19 nt, Artificial Sequence
  Description of Artificial Sequence: Synthetic oligonucleotide
auugaccuggggcaugccc

SEQ ID NO: 433107 - RNA, 19 nt, Artificial Sequence
  Description of Artificial Sequence: Synthetic oligonucleotide
aggauuauuggcuucuacu

SEQ ID NO: 433108 - RNA, 19 nt, Artificial Sequence
  Description of Artificial Sequence: Synthetic oligonucleotide
aaagggucgauguccacgu

SEQ ID NO: 433109 - RNA, 19 nt, Artificial Sequence
  Description of Artificial Sequence: Synthetic oligonucleotide
accuagauuaccucaaaga

SEQ ID NO: 433110 - RNA, 19 nt, Artificial Sequence
  Description of Artificial Sequence: Synthetic oligonucleotide
aacggcuaauauuauugcu

SEQ ID NO: 433111 - RNA, 19 nt, Artificial Sequence
  Description of Artificial Sequence: Synthetic oligonucleotide
ggaaaguucaacccgaaac

SEQ ID NO: 433112 - RNA, 19 nt, Artificial Sequence
  Description of Artificial Sequence: Synthetic oligonucleotide
ugugcuacguguaaagcau

SEQ ID NO: 433113 - RNA, 19 nt, Artificial Sequence
  Description of Artificial Sequence: Synthetic oligonucleotide
aaguucgucucacugggca

SEQ ID NO: 433114 - RNA, 19 nt, Artificial Sequence
  Description of Artificial Sequence: Synthetic oligonucleotide
ucucauuguccccuaaaca

SEQ ID NO: 433115 - RNA, 19 nt, Artificial Sequence
  Description of Artificial Sequence: Synthetic oligonucleotide
cauagugacuaauaagguc

SEQ ID NO: 433116 - RNA, 19 nt, Artificial Sequence
  Description of Artificial Sequence: Synthetic oligonucleotide
aauugccugaggauuauug

SEQ ID NO: 433117 - RNA, 19 nt, Artificial Sequence
  Description of Artificial Sequence: Synthetic oligonucleotide
ggugauaggaguugcauug

SEQ ID NO: 433118 - RNA, 19 nt, Artificial Sequence
  Description of Artificial Sequence: Synthetic oligonucleotide
auuguuaaccagacuuucc

SEQ ID NO: 433119 - RNA, 19 nt, Artificial Sequence
  Description of Artificial Sequence: Synthetic oligonucleotide
cuacacugauauaaaacac

SEQ ID NO: 433120 - RNA, 19 nt, Artificial Sequence
  Description of Artificial Sequence: Synthetic oligonucleotide
agugucgucgaugacacag

SEQ ID NO: 433121 - RNA, 19 nt, Artificial Sequence
  Description of Artificial Sequence: Synthetic oligonucleotide
accuaauaaaagugguauc

SEQ ID NO: 433122 - RNA, 19 nt, Artificial Sequence
  Description of Artificial Sequence: Synthetic oligonucleotide
cauaucuugaaggcaaacc

SEQ ID NO: 433123 - RNA, 19 nt, Artificial Sequence
  Description of Artificial Sequence: Synthetic oligonucleotide
acccgaaacacugauaaag

SEQ ID NO: 433124 - RNA, 19 nt, Artificial Sequence
  Description of Artificial Sequence: Synthetic oligonucleotide
agacguaggcucccaaggc

SEQ ID NO: 433125 - RNA, 19 nt, Artificial Sequence
  Description of Artificial Sequence: Synthetic oligonucleotide
agccauguguaccaaaucu

SEQ ID NO: 433126 - RNA, 19 nt, Artificial Sequence
  Description of Artificial Sequence: Synthetic oligonucleotide
agaccucgaagcuuacagc

SEQ ID NO: 433127 - RNA, 19 nt, Artificial Sequence
  Description of Artificial Sequence: Synthetic oligonucleotide
ugccguagaaacaauuuaa

SEQ ID NO: 433128 - RNA, 19 nt, Artificial Sequence
  Description of Artificial Sequence: Synthetic oligonucleotide
cagcuguugaaacuuaggc

SEQ ID NO: 433129 - RNA, 19 nt, Artificial Sequence
  Description of Artificial Sequence: Synthetic oligonucleotide
ugcaaacaugaguaauagg

SEQ ID NO: 433130 - RNA, 19 nt, Artificial Sequence
  Description of Artificial Sequence: Synthetic oligonucleotide
cuaauuugcacugccguag

SEQ ID NO: 433131 - RNA, 19 nt, Artificial Sequence
  Description of Artificial Sequence: Synthetic oligonucleotide
uucucauuguccccuaaac

SEQ ID NO: 433132 - RNA, 19 nt, Artificial Sequence
  Description of Artificial Sequence: Synthetic oligonucleotide
guacaggaaaguucaaccc

SEQ ID NO: 433133 - RNA, 19 nt, Artificial Sequence
  Description of Artificial Sequence: Synthetic oligonucleotide
cacgcguggaaguaguugg

SEQ ID NO: 433134 - RNA, 19 nt, Artificial Sequence
  Description of Artificial Sequence: Synthetic oligonucleotide
auuauuggcuucuacuaau

SEQ ID NO: 433135 - RNA, 19 nt, Artificial Sequence
  Description of Artificial Sequence: Synthetic oligonucleotide
gcaaacaugaguaauagga

SEQ ID NO: 433136 - RNA, 19 nt, Artificial Sequence
  Description of Artificial Sequence: Synthetic oligonucleotide
cuugcuuccgggcuguggg

SEQ ID NO: 433137 - RNA, 19 nt, Artificial Sequence
  Description of Artificial Sequence: Synthetic oligonucleotide
cuugaaggcaaaccauucc

SEQ ID NO: 433138 - RNA, 19 nt, Artificial Sequence
  Description of Artificial Sequence: Synthetic oligonucleotide
ugagauagcccuugggaac

SEQ ID NO: 433139 - RNA, 19 nt, Artificial Sequence
  Description of Artificial Sequence: Synthetic oligonucleotide
uuauccuuucccuggauau

SEQ ID NO: 433140 - RNA, 19 nt, Artificial Sequence
  Description of Artificial Sequence: Synthetic oligonucleotide
gacguaggcucccaaggcg

SEQ ID NO: 433141 - RNA, 19 nt, Artificial Sequence
  Description of Artificial Sequence: Synthetic oligonucleotide
aaaggugagucaccuagau

SEQ ID NO: 433142 - RNA, 19 nt, Artificial Sequence
  Description of Artificial Sequence: Synthetic oligonucleotide
uuuauacuuaagccagccu

SEQ ID NO: 433143 - RNA, 19 nt, Artificial Sequence
  Description of Artificial Sequence: Synthetic oligonucleotide
uggaucaccucccuucuug

SEQ ID NO: 433144 - RNA, 19 nt, Artificial Sequence
  Description of Artificial Sequence: Synthetic oligonucleotide
uuugcaugccaagugaagu

SEQ ID NO: 433145 - RNA, 19 nt, Artificial Sequence
  Description of Artificial Sequence: Synthetic oligonucleotide
cuacuaauuugcacugccg

SEQ ID NO: 433146 - RNA, 19 nt, Artificial Sequence
  Description of Artificial Sequence: Synthetic oligonucleotide
aaucccagcuuauauucaa

SEQ ID NO: 433147 - RNA, 19 nt, Artificial Sequence
  Description of Artificial Sequence: Synthetic oligonucleotide
cuucuacuaauuugcacug

SEQ ID NO: 433148 - RNA, 19 nt, Artificial Sequence
  Description of Artificial Sequence: Synthetic oligonucleotide
agagugucgucgaugacac

SEQ ID NO: 433149 - RNA, 19 nt, Artificial Sequence
  Description of Artificial Sequence: Synthetic oligonucleotide
guaggauaacuggugauag

SEQ ID NO: 433150 - RNA, 19 nt, Artificial Sequence
  Description of Artificial Sequence: Synthetic oligonucleotide
gguaucuagaaaauacucc

SEQ ID NO: 433151 - RNA, 19 nt, Artificial Sequence
  Description of Artificial Sequence: Synthetic oligonucleotide
uaggauaacuggugauagg

SEQ ID NO: 433152 - RNA, 19 nt, Artificial Sequence
  Description of Artificial Sequence: Synthetic oligonucleotide
cuugaagcacaucuuucag

SEQ ID NO: 433153 - RNA, 19 nt, Artificial Sequence
  Description of Artificial Sequence: Synthetic oligonucleotide
aggauaacuggugauagga

SEQ ID NO: 433154 - RNA, 19 nt, Artificial Sequence
  Description of Artificial Sequence: Synthetic oligonucleotide
ucugaauagccauguguac

SEQ ID NO: 433155 - RNA, 19 nt, Artificial Sequence
  Description of Artificial Sequence: Synthetic oligonucleotide
uuggaaucccagcuuauau

SEQ ID NO: 433156 - RNA, 19 nt, Artificial Sequence
  Description of Artificial Sequence: Synthetic oligonucleotide
gagucgucuggguggaugg

SEQ ID NO: 433157 - RNA, 19 nt, Artificial Sequence
  Description of Artificial Sequence: Synthetic oligonucleotide
cuccaaaagagugacacuc

SEQ ID NO: 433158 - RNA, 19 nt, Artificial Sequence
  Description of Artificial Sequence: Synthetic oligonucleotide
aucccauggaaaauacgcc

SEQ ID NO: 433159 - RNA, 19 nt, Artificial Sequence
  Description of Artificial Sequence: Synthetic oligonucleotide
uaggaguugcauuguuggg

SEQ ID NO: 433160 - RNA, 19 nt, Artificial Sequence
  Description of Artificial Sequence: Synthetic oligonucleotide
caaaagagugacacuccgc

SEQ ID NO: 433161 - RNA, 19 nt, Artificial Sequence
  Description of Artificial Sequence: Synthetic oligonucleotide
augcaaacaugaguaauag

SEQ ID NO: 433162 - RNA, 19 nt, Artificial Sequence
  Description of Artificial Sequence: Synthetic oligonucleotide
auauugaccuggggcaugc

SEQ ID NO: 433163 - RNA, 19 nt, Artificial Sequence
  Description of Artificial Sequence: Synthetic oligonucleotide
aagcuuacagcucuccguu

SEQ ID NO: 433164 - RNA, 19 nt, Artificial Sequence
  Description of Artificial Sequence: Synthetic oligonucleotide
aauacgcccaaaaguaccu

SEQ ID NO: 433165 - RNA, 19 nt, Artificial Sequence
  Description of Artificial Sequence: Synthetic oligonucleotide
agcaguuggcacuaagaca

SEQ ID NO: 433166 - RNA, 19 nt, Artificial Sequence
  Description of Artificial Sequence: Synthetic oligonucleotide
cagacguaggcucccaagg

SEQ ID NO: 433167 - RNA, 19 nt, Artificial Sequence
  Description of Artificial Sequence: Synthetic oligonucleotide
aguucgucucacugggcac

SEQ ID NO: 433168 - RNA, 19 nt, Artificial Sequence
  Description of Artificial Sequence: Synthetic oligonucleotide
caaacgugcuucugcaggc

SEQ ID NO: 433169 - RNA, 19 nt, Artificial Sequence
  Description of Artificial Sequence: Synthetic oligonucleotide
ucagacguaggcucccaag

SEQ ID NO: 433170 - RNA, 19 nt, Artificial Sequence
  Description of Artificial Sequence: Synthetic oligonucleotide
agucaccuagauuaccuca

SEQ ID NO: 433171 - RNA, 19 nt, Artificial Sequence
  Description of Artificial Sequence: Synthetic oligonucleotide
agacaaacgugcuucugca

SEQ ID NO: 433172 - RNA, 19 nt, Artificial Sequence
  Description of Artificial Sequence: Synthetic oligonucleotide
auggaaaauacgcccaaaa

SEQ ID NO: 433173 - RNA, 19 nt, Artificial Sequence
  Description of Artificial Sequence: Synthetic oligonucleotide
agaguaccauaucuugaag

SEQ ID NO: 433174 - RNA, 19 nt, Artificial Sequence
  Description of Artificial Sequence: Synthetic oligonucleotide
acaggcacuugcuuccggg

SEQ ID NO: 433175 - RNA, 19 nt, Artificial Sequence
  Description of Artificial Sequence: Synthetic oligonucleotide
uaaaggugagucaccuaga

SEQ ID NO: 433176 - RNA, 19 nt, Artificial Sequence
  Description of Artificial Sequence: Synthetic oligonucleotide
ucuaugcaaacaugaguaa

SEQ ID NO: 433177 - RNA, 19 nt, Artificial Sequence
  Description of Artificial Sequence: Synthetic oligonucleotide
ggaaaauacgcccaaaagu

SEQ ID NO: 433178 - RNA, 19 nt, Artificial Sequence
  Description of Artificial Sequence: Synthetic oligonucleotide
aagucagacguaggcuccc

SEQ ID NO: 433179 - RNA, 19 nt, Artificial Sequence
  Description of Artificial Sequence: Synthetic oligonucleotide
ugucuacuuggaaucccag

SEQ ID NO: 433180 - RNA, 19 nt, Artificial Sequence
  Description of Artificial Sequence: Synthetic oligonucleotide
ugcuacguguaaagcaucu

SEQ ID NO: 433181 - RNA, 19 nt, Artificial Sequence
  Description of Artificial Sequence: Synthetic oligonucleotide
gacuuugcaugccaaguga

SEQ ID NO: 433182 - RNA, 19 nt, Artificial Sequence
  Description of Artificial Sequence: Synthetic oligonucleotide
uucaacccgaaacacugau

SEQ ID NO: 433183 - RNA, 19 nt, Artificial Sequence
  Description of Artificial Sequence: Synthetic oligonucleotide
ucauguacggcaguaucac

SEQ ID NO: 433184 - RNA, 19 nt, Artificial Sequence
  Description of Artificial Sequence: Synthetic oligonucleotide
uaauuugcacugccguaga

SEQ ID NO: 433185 - RNA, 19 nt, Artificial Sequence
  Description of Artificial Sequence: Synthetic oligonucleotide
uggggcaugcccauagcca

SEQ ID NO: 433186 - RNA, 19 nt, Artificial Sequence
  Description of Artificial Sequence: Synthetic oligonucleotide
aauaguucugcuaguguuu

SEQ ID NO: 433187 - RNA, 19 nt, Artificial Sequence
  Description of Artificial Sequence: Synthetic oligonucleotide
ucgacuuugccgguacagg

SEQ ID NO: 433188 - RNA, 19 nt, Artificial Sequence
  Description of Artificial Sequence: Synthetic oligonucleotide
aagaagaguaccauaucuu

SEQ ID NO: 433189 - RNA, 19 nt, Artificial Sequence
  Description of Artificial Sequence: Synthetic oligonucleotide
uucauacuaugaaggugca

SEQ ID NO: 433190 - RNA, 19 nt, Artificial Sequence
  Description of Artificial Sequence: Synthetic oligonucleotide
agggucgauguccacguag

SEQ ID NO: 433191 - RNA, 19 nt, Artificial Sequence
  Description of Artificial Sequence: Synthetic oligonucleotide
uccuucguuuaaaauuuaa

SEQ ID NO: 433192 - RNA, 19 nt, Artificial Sequence
  Description of Artificial Sequence: Synthetic oligonucleotide
caacccgaaacacugauaa

SEQ ID NO: 433193 - RNA, 19 nt, Artificial Sequence
  Description of Artificial Sequence: Synthetic oligonucleotide
ucuccguuagcaucauugu

SEQ ID NO: 433194 - RNA, 19 nt, Artificial Sequence
  Description of Artificial Sequence: Synthetic oligonucleotide
uaucugugucuaaacaauu

SEQ ID NO: 433195 - RNA, 19 nt, Artificial Sequence
  Description of Artificial Sequence: Synthetic oligonucleotide
ccuacacugauauaaaaca

SEQ ID NO: 433196 - RNA, 19 nt, Artificial Sequence
  Description of Artificial Sequence: Synthetic oligonucleotide
aacacacgcguggaaguag

SEQ ID NO: 433197 - RNA, 19 nt, Artificial Sequence
  Description of Artificial Sequence: Synthetic oligonucleotide
ggaucauaaauaguucugc

SEQ ID NO: 433198 - RNA, 19 nt, Artificial Sequence
  Description of Artificial Sequence: Synthetic oligonucleotide
aaauauugaccuggggcau

SEQ ID NO: 433199 - RNA, 19 nt, Artificial Sequence
  Description of Artificial Sequence: Synthetic oligonucleotide
agacagcuauuccaaauau

SEQ ID NO: 433200 - RNA, 19 nt, Artificial Sequence
  Description of Artificial Sequence: Synthetic oligonucleotide
gaagaguaccauaucuuga

SEQ ID NO: 433201 - RNA, 19 nt, Artificial Sequence
  Description of Artificial Sequence: Synthetic oligonucleotide
gcuguugaaacuuaggccu

SEQ ID NO: 433202 - RNA, 19 nt, Artificial Sequence
  Description of Artificial Sequence: Synthetic oligonucleotide
auaucugugucuaaacaau

SEQ ID NO: 433203 - RNA, 19 nt, Artificial Sequence
  Description of Artificial Sequence: Synthetic oligonucleotide
cacugauaaagugcguggg

SEQ ID NO: 433204 - RNA, 19 nt, Artificial Sequence
  Description of Artificial Sequence: Synthetic oligonucleotide
auauggcuauauccuucac

SEQ ID NO: 433205 - RNA, 19 nt, Artificial Sequence
  Description of Artificial Sequence: Synthetic oligonucleotide
ucugugcuacguguaaagc

SEQ ID NO: 433206 - RNA, 19 nt, Artificial Sequence
  Description of Artificial Sequence: Synthetic oligonucleotide
cuauccucaagguaggaua

SEQ ID NO: 433207 - RNA, 19 nt, Artificial Sequence
  Description of Artificial Sequence: Synthetic oligonucleotide
ugggaaauugccugaggau

SEQ ID NO: 433208 - RNA, 19 nt, Artificial Sequence
  Description of Artificial Sequence: Synthetic oligonucleotide
acuaauuugcacugccgua

SEQ ID NO: 433209 - RNA, 19 nt, Artificial Sequence
  Description of Artificial Sequence: Synthetic oligonucleotide
ugggcuauucgguagccau

SEQ ID NO: 433210 - RNA, 19 nt, Artificial Sequence
  Description of Artificial Sequence: Synthetic oligonucleotide
gaagucagacguaggcucc

SEQ ID NO: 433211 - RNA, 19 nt, Artificial Sequence
  Description of Artificial Sequence: Synthetic oligonucleotide
ugggaacuacugcuggcgc

SEQ ID NO: 433212 - RNA, 19 nt, Artificial Sequence
  Description of Artificial Sequence: Synthetic oligonucleotide
uaguuggagcugcauguac

SEQ ID NO: 433213 - RNA, 19 nt, Artificial Sequence
  Description of Artificial Sequence: Synthetic oligonucleotide
cauuguuaaccagacuuuc

SEQ ID NO: 433214 - RNA, 19 nt, Artificial Sequence
  Description of Artificial Sequence: Synthetic oligonucleotide
ucaagaccgagcagccggc

SEQ ID NO: 433215 - RNA, 19 nt, Artificial Sequence
  Description of Artificial Sequence: Synthetic oligonucleotide
auguacggcaguaucacca

SEQ ID NO: 433216 - RNA, 19 nt, Artificial Sequence
  Description of Artificial Sequence: Synthetic oligonucleotide
agugcgugggacuuccccu

SEQ ID NO: 433217 - RNA, 19 nt, Artificial Sequence
  Description of Artificial Sequence: Synthetic oligonucleotide
gcuaauauuauugcuacaa

SEQ ID NO: 433218 - RNA, 19 nt, Artificial Sequence
  Description of Artificial Sequence: Synthetic oligonucleotide
aauuugcacugccguagaa

SEQ ID NO: 433219 - RNA, 19 nt, Artificial Sequence
  Description of Artificial Sequence: Synthetic oligonucleotide
uccuaagaagaguaccaua

SEQ ID NO: 433220 - RNA, 19 nt, Artificial Sequence
  Description of Artificial Sequence: Synthetic oligonucleotide
aucugaauagccaugugua

SEQ ID NO: 433221 - RNA, 19 nt, Artificial Sequence
  Description of Artificial Sequence: Synthetic oligonucleotide
ugccgguacaggaaaguuc

SEQ ID NO: 433222 - RNA, 19 nt, Artificial Sequence
  Description of Artificial Sequence: Synthetic oligonucleotide
gaccucgaagcuuacagcu

SEQ ID NO: 433223 - RNA, 19 nt, Artificial Sequence
  Description of Artificial Sequence: Synthetic oligonucleotide
ggcgcugauacugucaucc

SEQ ID NO: 433224 - RNA, 19 nt, Artificial Sequence
  Description of Artificial Sequence: Synthetic oligonucleotide
gcuucuacuaauuugcacu

SEQ ID NO: 433225 - RNA, 19 nt, Artificial Sequence
  Description of Artificial Sequence: Synthetic oligonucleotide
aaaccccuuuccguucaac

SEQ ID NO: 433226 - RNA, 19 nt, Artificial Sequence
  Description of Artificial Sequence: Synthetic oligonucleotide
acggcaguaucaccauggg

SEQ ID NO: 433227 - RNA, 19 nt, Artificial Sequence
  Description of Artificial Sequence: Synthetic oligonucleotide
aauugccaauuuaaacuaa

SEQ ID NO: 433228 - RNA, 19 nt, Artificial Sequence
  Description of Artificial Sequence: Synthetic oligonucleotide
aaagggcauugucugugau

SEQ ID NO: 433229 - RNA, 19 nt, Artificial Sequence
  Description of Artificial Sequence: Synthetic oligonucleotide
ucgucuggguggauggcug

SEQ ID NO: 433230 - RNA, 19 nt, Artificial Sequence
  Description of Artificial Sequence: Synthetic oligonucleotide
cauguacggcaguaucacc

SEQ ID NO: 433231 - RNA, 19 nt, Artificial Sequence
  Description of Artificial Sequence: Synthetic oligonucleotide
acuuugccgguacaggaaa

SEQ ID NO: 433232 - RNA, 19 nt, Artificial Sequence
  Description of Artificial Sequence: Synthetic oligonucleotide
aaggugagucaccuagauu

SEQ ID NO: 433233 - RNA, 19 nt, Artificial Sequence
  Description of Artificial Sequence: Synthetic oligonucleotide
ggcacuaagacagcuauuc

SEQ ID NO: 433234 - RNA, 19 nt, Artificial Sequence
  Description of Artificial Sequence: Synthetic oligonucleotide
ggauuauuggcuucuacua

SEQ ID NO: 433235 - RNA, 19 nt, Artificial Sequence
  Description of Artificial Sequence: Synthetic oligonucleotide
ucuauccucaagguaggau

SEQ ID NO: 433236 - RNA, 19 nt, Artificial Sequence
  Description of Artificial Sequence: Synthetic oligonucleotide
uacgcccaaaaguaccuuc

SEQ ID NO: 433237 - RNA, 19 nt, Artificial Sequence
  Description of Artificial Sequence: Synthetic oligonucleotide
uuugccgguacaggaaagu

SEQ ID NO: 433238 - RNA, 19 nt, Artificial Sequence
  Description of Artificial Sequence: Synthetic oligonucleotide
auaaaagcaguuggcacua

SEQ ID NO: 433239 - RNA, 19 nt, Artificial Sequence
  Description of Artificial Sequence: Synthetic oligonucleotide
cuggggcaugcccauagcc

SEQ ID NO: 433240 - RNA, 19 nt, Artificial Sequence
  Description of Artificial Sequence: Synthetic oligonucleotide
uuacgaauguuugcuuuuc

SEQ ID NO: 433241 - RNA, 19 nt, Artificial Sequence
  Description of Artificial Sequence: Synthetic oligonucleotide
cuuugccgguacaggaaag

SEQ ID NO: 433242 - RNA, 19 nt, Artificial Sequence
  Description of Artificial Sequence: Synthetic oligonucleotide
gcuauuccaaauaucugug

SEQ ID NO: 433243 - RNA, 19 nt, Artificial Sequence
  Description of Artificial Sequence: Synthetic oligonucleotide
uggugauaggaguugcauu

SEQ ID NO: 433244 - RNA, 19 nt, Artificial Sequence
  Description of Artificial Sequence: Synthetic oligonucleotide
cacguagggcgucuggccc

SEQ ID NO: 433245 - RNA, 19 nt, Artificial Sequence
  Description of Artificial Sequence: Synthetic oligonucleotide
uagggcgucuggcccagag

SEQ ID NO: 433246 - RNA, 19 nt, Artificial Sequence
  Description of Artificial Sequence: Synthetic oligonucleotide
uuagaaguucagguuugaa

SEQ ID NO: 433247 - RNA, 19 nt, Artificial Sequence
  Description of Artificial Sequence: Synthetic oligonucleotide
ggacuuugcaugccaagug

SEQ ID NO: 433248 - RNA, 19 nt, Artificial Sequence
  Description of Artificial Sequence: Synthetic oligonucleotide
ucaacccgaaacacugaua

SEQ ID NO: 433249 - RNA, 19 nt, Artificial Sequence
  Description of Artificial Sequence: Synthetic oligonucleotide
auucgguagccaucuuuca

SEQ ID NO: 433250 - RNA, 19 nt, Artificial Sequence
  Description of Artificial Sequence: Synthetic oligonucleotide
ugguaguccaugggaaaca

SEQ ID NO: 433251 - RNA, 19 nt, Artificial Sequence
  Description of Artificial Sequence: Synthetic oligonucleotide
acguaggcucccaaggcgg

SEQ ID NO: 433252 - RNA, 19 nt, Artificial Sequence
  Description of Artificial Sequence: Synthetic oligonucleotide
acggcuaauauuauugcua

SEQ ID NO: 433253 - RNA, 19 nt, Artificial Sequence
  Description of Artificial Sequence: Synthetic oligonucleotide
aguugauuggcugggcuau

SEQ ID NO: 433254 - RNA, 19 nt, Artificial Sequence
  Description of Artificial Sequence: Synthetic oligonucleotide
uccacguagggcgucuggc

SEQ ID NO: 433255 - RNA, 19 nt, Artificial Sequence
  Description of Artificial Sequence: Synthetic oligonucleotide
caacaaaccccuacacuga

SEQ ID NO: 433256 - RNA, 19 nt, Artificial Sequence
  Description of Artificial Sequence: Synthetic oligonucleotide
cuuaggccucuccucuggg

SEQ ID NO: 433257 - RNA, 19 nt, Artificial Sequence
  Description of Artificial Sequence: Synthetic oligonucleotide
aacccgaaacacugauaaa

SEQ ID NO: 433258 - RNA, 19 nt, Artificial Sequence
  Description of Artificial Sequence: Synthetic oligonucleotide
cuguugaaacuuaggccuc

SEQ ID NO: 433259 - RNA, 19 nt, Artificial Sequence
  Description of Artificial Sequence: Synthetic oligonucleotide
cugcauuaguaucauaacu

SEQ ID NO: 433260 - RNA, 19 nt, Artificial Sequence
  Description of Artificial Sequence: Synthetic oligonucleotide
gucgacuuugccgguacag

SEQ ID NO: 433261 - RNA, 19 nt, Artificial Sequence
  Description of Artificial Sequence: Synthetic oligonucleotide
uuaggccucuccucugggu

SEQ ID NO: 433262 - RNA, 19 nt, Artificial Sequence
  Description of Artificial Sequence: Synthetic oligonucleotide
cuccguuagcaucauuguc

SEQ ID NO: 433263 - RNA, 19 nt, Artificial Sequence
  Description of Artificial Sequence: Synthetic oligonucleotide
ugucgucgaugacacaguu

SEQ ID NO: 433264 - RNA, 19 nt, Artificial Sequence
  Description of Artificial Sequence: Synthetic oligonucleotide
gccuccaaaagagugacac

SEQ ID NO: 433265 - RNA, 19 nt, Artificial Sequence
  Description of Artificial Sequence: Synthetic oligonucleotide
gagucgacuuugccgguac

SEQ ID NO: 433266 - RNA, 19 nt, Artificial Sequence
  Description of Artificial Sequence: Synthetic oligonucleotide
cuuucccuggauauggcua

SEQ ID NO: 433267 - RNA, 19 nt, Artificial Sequence
  Description of Artificial Sequence: Synthetic oligonucleotide
gcagaaauauugaccuggg

SEQ ID NO: 433268 - RNA, 19 nt, Artificial Sequence
  Description of Artificial Sequence: Synthetic oligonucleotide
gccguagaaacaauuuaag

SEQ ID NO: 433269 - RNA, 19 nt, Artificial Sequence
  Description of Artificial Sequence: Synthetic oligonucleotide
caugcccauagccacaaaa

SEQ ID NO: 433270 - RNA, 19 nt, Artificial Sequence
  Description of Artificial Sequence: Synthetic oligonucleotide
uacuuaagccagccuugaa

SEQ ID NO: 433271 - RNA, 19 nt, Artificial Sequence
  Description of Artificial Sequence: Synthetic oligonucleotide
aggccaucacagcaaacaa

SEQ ID NO: 433272 - RNA, 19 nt, Artificial Sequence
  Description of Artificial Sequence: Synthetic oligonucleotide
caaccuaauaaaaguggua

SEQ ID NO: 433273 - RNA, 19 nt, Artificial Sequence
  Description of Artificial Sequence: Synthetic oligonucleotide
uccccuaaacagugguagu

SEQ ID NO: 433274 - RNA, 19 nt, Artificial Sequence
  Description of Artificial Sequence: Synthetic oligonucleotide
aaacacacgcguggaagua

SEQ ID NO: 433275 - RNA, 19 nt, Artificial Sequence
  Description of Artificial Sequence: Synthetic oligonucleotide
aaacgugcuucugcaggcu

SEQ ID NO: 433276 - RNA, 19 nt, Artificial Sequence
  Description of Artificial Sequence: Synthetic oligonucleotide
gcucucagauacugagucg

SEQ ID NO: 433277 - RNA, 19 nt, Artificial Sequence
  Description of Artificial Sequence: Synthetic oligonucleotide
aggaaaguucaacccgaaa

SEQ ID NO: 433278 - RNA, 19 nt, Artificial Sequence
  Description of Artificial Sequence: Synthetic oligonucleotide
ggauaacuggugauaggag

SEQ ID NO: 433279 - RNA, 19 nt, Artificial Sequence
  Description of Artificial Sequence: Synthetic oligonucleotide
gugguaguccaugggaaac

SEQ ID NO: 433280 - RNA, 19 nt, Artificial Sequence
  Description of Artificial Sequence: Synthetic oligonucleotide
ccgaaacacugauaaagug

SEQ ID NO: 433281 - RNA, 19 nt, Artificial Sequence
  Description of Artificial Sequence: Synthetic oligonucleotide
acacgcguggaaguaguug

SEQ ID NO: 433282 - RNA, 19 nt, Artificial Sequence
  Description of Artificial Sequence: Synthetic oligonucleotide
ucauaacuucagagucgac

SEQ ID NO: 433283 - RNA, 19 nt, Artificial Sequence
  Description of Artificial Sequence: Synthetic oligonucleotide
acugccguagaaacaauuu

SEQ ID NO: 433284 - RNA, 19 nt, Artificial Sequence
  Description of Artificial Sequence: Synthetic oligonucleotide
aaggcacgguguucuggga

SEQ ID NO: 433285 - RNA, 19 nt, Artificial Sequence
  Description of Artificial Sequence: Synthetic oligonucleotide
acuugcuuccgggcugugg

SEQ ID NO: 433286 - RNA, 19 nt, Artificial Sequence
  Description of Artificial Sequence: Synthetic oligonucleotide
gaagagugucgucgaugac

SEQ ID NO: 433287 - RNA, 19 nt, Artificial Sequence
  Description of Artificial Sequence: Synthetic oligonucleotide
agucgucuggguggauggc

SEQ ID NO: 433288 - RNA, 19 nt, Artificial Sequence
  Description of Artificial Sequence: Synthetic oligonucleotide
aucugugucuaaacaauuu

SEQ ID NO: 433289 - RNA, 19 nt, Artificial Sequence
  Description of Artificial Sequence: Synthetic oligonucleotide
uuccuucguuuaaaauuua

SEQ ID NO: 433290 - RNA, 19 nt, Artificial Sequence
  Description of Artificial Sequence: Synthetic oligonucleotide
augcccauagccacaaaau

SEQ ID NO: 433291 - RNA, 19 nt, Artificial Sequence
  Description of Artificial Sequence: Synthetic oligonucleotide
gcauuccuaaggcacggug

SEQ ID NO: 433292 - RNA, 19 nt, Artificial Sequence
  Description of Artificial Sequence: Synthetic oligonucleotide
ucauacuaugaaggugcaa

SEQ ID NO: 433293 - RNA, 19 nt, Artificial Sequence
  Description of Artificial Sequence: Synthetic oligonucleotide
cauuccuaaggcacggugu

SEQ ID NO: 433294 - RNA, 19 nt, Artificial Sequence
  Description of Artificial Sequence: Synthetic oligonucleotide
agguuugaaagcauuccua

SEQ ID NO: 433295 - RNA, 19 nt, Artificial Sequence
  Description of Artificial Sequence: Synthetic oligonucleotide
gugagucaccuagauuacc

SEQ ID NO: 433296 - RNA, 19 nt, Artificial Sequence
  Description of Artificial Sequence: Synthetic oligonucleotide
aaggcggcauggaacucug

SEQ ID NO: 433297 - RNA, 19 nt, Artificial Sequence
  Description of Artificial Sequence: Synthetic oligonucleotide
ugacacuccgcaagucguu

SEQ ID NO: 433298 - RNA, 19 nt, Artificial Sequence
  Description of Artificial Sequence: Synthetic oligonucleotide
ugcgugggacuuccccuug

SEQ ID NO: 433299 - RNA, 19 nt, Artificial Sequence
  Description of Artificial Sequence: Synthetic oligonucleotide
gaaguucgucucacugggc

SEQ ID NO: 433300 - RNA, 19 nt, Artificial Sequence
  Description of Artificial Sequence: Synthetic oligonucleotide
gugguaucuagaaaauacu

SEQ ID NO: 433301 - RNA, 19 nt, Artificial Sequence
  Description of Artificial Sequence: Synthetic oligonucleotide
caaaagggucgauguccac

SEQ ID NO: 433302 - RNA, 19 nt, Artificial Sequence
  Description of Artificial Sequence: Synthetic oligonucleotide
gccgguacaggaaaguuca

SEQ ID NO: 433303 - RNA, 19 nt, Artificial Sequence
  Description of Artificial Sequence: Synthetic oligonucleotide
cggcuaauauuauugcuac

SEQ ID NO: 433304 - RNA, 19 nt, Artificial Sequence
  Description of Artificial Sequence: Synthetic oligonucleotide
ucgcucagguagaggcuca

SEQ ID NO: 433305 - RNA, 19 nt, Artificial Sequence
  Description of Artificial Sequence: Synthetic oligonucleotide
uccgcaagucguucuucuc

SEQ ID NO: 433306 - RNA, 19 nt, Artificial Sequence
  Description of Artificial Sequence: Synthetic oligonucleotide
guccacguagggcgucugg

SEQ ID NO: 433307 - RNA, 19 nt, Artificial Sequence
  Description of Artificial Sequence: Synthetic oligonucleotide
aaaccccuacacugauaua

SEQ ID NO: 433308 - RNA, 19 nt, Artificial Sequence
  Description of Artificial Sequence: Synthetic oligonucleotide
guacggcaguaucaccaug

SEQ ID NO: 433309 - RNA, 19 nt, Artificial Sequence
  Description of Artificial Sequence: Synthetic oligonucleotide
acagagcauagugacuaau

SEQ ID NO: 433310 - RNA, 19 nt, Artificial Sequence
  Description of Artificial Sequence: Synthetic oligonucleotide
gacacuccgcaagucguuc

SEQ ID NO: 433311 - RNA, 19 nt, Artificial Sequence
  Description of Artificial Sequence: Synthetic oligonucleotide
ggugugucagcucucagau

SEQ ID NO: 433312 - RNA, 19 nt, Artificial Sequence
  Description of Artificial Sequence: Synthetic oligonucleotide
gucgaugacacaguuccua

SEQ ID NO: 433313 - RNA, 19 nt, Artificial Sequence
  Description of Artificial Sequence: Synthetic oligonucleotide
agguugagcugcauuagua

SEQ ID NO: 433314 - RNA, 19 nt, Artificial Sequence
  Description of Artificial Sequence: Synthetic oligonucleotide
gucaccuagauuaccucaa

SEQ ID NO: 433315 - RNA, 19 nt, Artificial Sequence
  Description of Artificial Sequence: Synthetic oligonucleotide
ggugcaaaacggcuaauau

SEQ ID NO: 433316 - RNA, 19 nt, Artificial Sequence
  Description of Artificial Sequence: Synthetic oligonucleotide
cacuagagaauucauuguu

SEQ ID NO: 433317 - RNA, 19 nt, Artificial Sequence
  Description of Artificial Sequence: Synthetic oligonucleotide
cucucagauacugagucgu

SEQ ID NO: 433318 - RNA, 19 nt, Artificial Sequence
  Description of Artificial Sequence: Synthetic oligonucleotide
caguucaauccuuuucaua

SEQ ID NO: 433319 - RNA, 19 nt, Artificial Sequence
  Description of Artificial Sequence: Synthetic oligonucleotide
aggugcaaaacggcuaaua

SEQ ID NO: 433320 - RNA, 19 nt, Artificial Sequence
  Description of Artificial Sequence: Synthetic oligonucleotide
gguaggauaacuggugaua

SEQ ID NO: 433321 - RNA, 19 nt, Artificial Sequence
  Description of Artificial Sequence: Synthetic oligonucleotide
auagcccuugggaacuacu

SEQ ID NO: 433322 - RNA, 19 nt, Artificial Sequence
  Description of Artificial Sequence: Synthetic oligonucleotide
acuggugauaggaguugca

SEQ ID NO: 433323 - RNA, 19 nt, Artificial Sequence
  Description of Artificial Sequence: Synthetic oligonucleotide
caucgcacuggucuguucu

SEQ ID NO: 433324 - RNA, 19 nt, Artificial Sequence
  Description of Artificial Sequence: Synthetic oligonucleotide
ggcggcauggaacucuguc

SEQ ID NO: 433325 - RNA, 19 nt, Artificial Sequence
  Description of Artificial Sequence: Synthetic oligonucleotide
cucgaagcuuacagcucuc

SEQ ID NO: 433326 - RNA, 19 nt, Artificial Sequence
  Description of Artificial Sequence: Synthetic oligonucleotide
uugccgguacaggaaaguu

SEQ ID NO: 433327 - RNA, 19 nt, Artificial Sequence
  Description of Artificial Sequence: Synthetic oligonucleotide
caguugauuggcugggcua

SEQ ID NO: 433328 - RNA, 19 nt, Artificial Sequence
  Description of Artificial Sequence: Synthetic oligonucleotide
cguucaaccuaauaaaagu

SEQ ID NO: 433329 - RNA, 19 nt, Artificial Sequence
  Description of Artificial Sequence: Synthetic oligonucleotide
caagaccgagcagccggcg

SEQ ID NO: 433330 - RNA, 19 nt, Artificial Sequence
  Description of Artificial Sequence: Synthetic oligonucleotide
caaaacggcuaauauuauu

SEQ ID NO: 433331 - RNA, 19 nt, Artificial Sequence
  Description of Artificial Sequence: Synthetic oligonucleotide
agucgacuuugccgguaca

SEQ ID NO: 433332 - RNA, 19 nt, Artificial Sequence
  Description of Artificial Sequence: Synthetic oligonucleotide
cuaugcaaacaugaguaau

SEQ ID NO: 433333 - RNA, 19 nt, Artificial Sequence
  Description of Artificial Sequence: Synthetic oligonucleotide
acacacgcguggaaguagu

SEQ ID NO: 433334 - RNA, 19 nt, Artificial Sequence
  Description of Artificial Sequence: Synthetic oligonucleotide
ugcaggcucugugcuacgu

SEQ ID NO: 433335 - RNA, 19 nt, Artificial Sequence
  Description of Artificial Sequence: Synthetic oligonucleotide
aggucauuucucacauagu

SEQ ID NO: 433336 - RNA, 19 nt, Artificial Sequence
  Description of Artificial Sequence: Synthetic oligonucleotide
uauugaccuggggcaugcc

SEQ ID NO: 433337 - RNA, 19 nt, Artificial Sequence
  Description of Artificial Sequence: Synthetic oligonucleotide
agcucauuccacaggcaau

SEQ ID NO: 433338 - RNA, 19 nt, Artificial Sequence
  Description of Artificial Sequence: Synthetic oligonucleotide
aaggugcaaaacggcuaau

SEQ ID NO: 433339 - RNA, 19 nt, Artificial Sequence
  Description of Artificial Sequence: Synthetic oligonucleotide
ccuaaacagugguagucca

SEQ ID NO: 433340 - RNA, 19 nt, Artificial Sequence
  Description of Artificial Sequence: Synthetic oligonucleotide
cggcauggaacucugucag

SEQ ID NO: 433341 - RNA, 19 nt, Artificial Sequence
  Description of Artificial Sequence: Synthetic oligonucleotide
ggugagucaccuagauuac

SEQ ID NO: 433342 - RNA, 19 nt, Artificial Sequence
  Description of Artificial Sequence: Synthetic oligonucleotide
ccaaaaguaccuucuugaa

SEQ ID NO: 433343 - RNA, 19 nt, Artificial Sequence
  Description of Artificial Sequence: Synthetic oligonucleotide
cccauggaaaauacgccca

SEQ ID NO: 433344 - RNA, 19 nt, Artificial Sequence
  Description of Artificial Sequence: Synthetic oligonucleotide
gauguccacguagggcguc

SEQ ID NO: 433345 - RNA, 19 nt, Artificial Sequence
  Description of Artificial Sequence: Synthetic oligonucleotide
ccacguagggcgucuggcc

SEQ ID NO: 433346 - RNA, 19 nt, Artificial Sequence
  Description of Artificial Sequence: Synthetic oligonucleotide
ggcacgguguucugggaga

SEQ ID NO: 433347 - RNA, 19 nt, Artificial Sequence
  Description of Artificial Sequence: Synthetic oligonucleotide
guucaacccgaaacacuga

SEQ ID NO: 433348 - RNA, 19 nt, Artificial Sequence
  Description of Artificial Sequence: Synthetic oligonucleotide
cuuggaaucccagcuuaua

SEQ ID NO: 433349 - RNA, 19 nt, Artificial Sequence
  Description of Artificial Sequence: Synthetic oligonucleotide
gucgucgaugacacaguuc

SEQ ID NO: 433350 - RNA, 19 nt, Artificial Sequence
  Description of Artificial Sequence: Synthetic oligonucleotide
aagggucgauguccacgua

SEQ ID NO: 433351 - RNA, 19 nt, Artificial Sequence
  Description of Artificial Sequence: Synthetic oligonucleotide
caggaaaguucaacccgaa

SEQ ID NO: 433352 - RNA, 19 nt, Artificial Sequence
  Description of Artificial Sequence: Synthetic oligonucleotide
gcuacguguaaagcaucug

SEQ ID NO: 433353 - RNA, 19 nt, Artificial Sequence
  Description of Artificial Sequence: Synthetic oligonucleotide
ccugaggauuauuggcuuc

SEQ ID NO: 433354 - RNA, 19 nt, Artificial Sequence
  Description of Artificial Sequence: Synthetic oligonucleotide
cauggaaaauacgcccaaa

SEQ ID NO: 433355 - RNA, 19 nt, Artificial Sequence
  Description of Artificial Sequence: Synthetic oligonucleotide
gcugauacugucauccagu

SEQ ID NO: 433356 - RNA, 19 nt, Artificial Sequence
  Description of Artificial Sequence: Synthetic oligonucleotide
gggcacuagcagguuaaag

SEQ ID NO: 433357 - RNA, 19 nt, Artificial Sequence
  Description of Artificial Sequence: Synthetic oligonucleotide
uguccacguagggcgucug

SEQ ID NO: 433358 - RNA, 19 nt, Artificial Sequence
  Description of Artificial Sequence: Synthetic oligonucleotide
gugacacuccgcaagucgu

SEQ ID NO: 433359 - RNA, 19 nt, Artificial Sequence
  Description of Artificial Sequence: Synthetic oligonucleotide
accccuacacugauauaaa

SEQ ID NO: 433360 - RNA, 19 nt, Artificial Sequence
  Description of Artificial Sequence: Synthetic oligonucleotide
auguccacguagggcgucu

SEQ ID NO: 433361 - RNA, 19 nt, Artificial Sequence
  Description of Artificial Sequence: Synthetic oligonucleotide
gugcuacguguaaagcauc

SEQ ID NO: 433362 - RNA, 19 nt, Artificial Sequence
  Description of Artificial Sequence: Synthetic oligonucleotide
gaacuacugcuggcgcuga

SEQ ID NO: 433363 - RNA, 19 nt, Artificial Sequence
  Description of Artificial Sequence: Synthetic oligonucleotide
ucgucucacugggcacuag

SEQ ID NO: 433364 - RNA, 19 nt, Artificial Sequence
  Description of Artificial Sequence: Synthetic oligonucleotide
cugauacugucauccaguu

SEQ ID NO: 433365 - RNA, 19 nt, Artificial Sequence
  Description of Artificial Sequence: Synthetic oligonucleotide
gguaguccaugggaaacaa

SEQ ID NO: 433366 - RNA, 19 nt, Artificial Sequence
  Description of Artificial Sequence: Synthetic oligonucleotide
gaguugcauuguugggugu

SEQ ID NO: 433367 - RNA, 19 nt, Artificial Sequence
  Description of Artificial Sequence: Synthetic oligonucleotide
gcauagugacuaauaaggu

SEQ ID NO: 433368 - RNA, 19 nt, Artificial Sequence
  Description of Artificial Sequence: Synthetic oligonucleotide
agauuaccucaaagaagua

SEQ ID NO: 433369 - RNA, 19 nt, Artificial Sequence
  Description of Artificial Sequence: Synthetic oligonucleotide
ugggcacuagcagguuaaa

SEQ ID NO: 433370 - RNA, 19 nt, Artificial Sequence
  Description of Artificial Sequence: Synthetic oligonucleotide
agagucgacuuugccggua

SEQ ID NO: 433371 - RNA, 19 nt, Artificial Sequence
  Description of Artificial Sequence: Synthetic oligonucleotide
auacgcccaaaaguaccuu

SEQ ID NO: 433372 - RNA, 19 nt, Artificial Sequence
  Description of Artificial Sequence: Synthetic oligonucleotide
guucgucucacugggcacu

SEQ ID NO: 433373 - RNA, 19 nt, Artificial Sequence
  Description of Artificial Sequence: Synthetic oligonucleotide
ggcuauucgguagccaucu

SEQ ID NO: 433374 - RNA, 19 nt, Artificial Sequence
  Description of Artificial Sequence: Synthetic oligonucleotide
ggcacuggaccagcuguug

SEQ ID NO: 433375 - RNA, 19 nt, Artificial Sequence
  Description of Artificial Sequence: Synthetic oligonucleotide
uggcgcugauacugucauc

SEQ ID NO: 433376 - RNA, 19 nt, Artificial Sequence
  Description of Artificial Sequence: Synthetic oligonucleotide
gugauaggaguugcauugu

SEQ ID NO: 433377 - RNA, 19 nt, Artificial Sequence
  Description of Artificial Sequence: Synthetic oligonucleotide
cagcacuagagaauucauu

SEQ ID NO: 433378 - RNA, 19 nt, Artificial Sequence
  Description of Artificial Sequence: Synthetic oligonucleotide
acaaaccccuacacugaua

SEQ ID NO: 433379 - RNA, 19 nt, Artificial Sequence
  Description of Artificial Sequence: Synthetic oligonucleotide
acgcguggaaguaguugga

SEQ ID NO: 433380 - RNA, 19 nt, Artificial Sequence
  Description of Artificial Sequence: Synthetic oligonucleotide
cagguugagcugcauuagu

SEQ ID NO: 433381 - RNA, 19 nt, Artificial Sequence
  Description of Artificial Sequence: Synthetic oligonucleotide
cuggugauaggaguugcau

SEQ ID NO: 433382 - RNA, 19 nt, Artificial Sequence
  Description of Artificial Sequence: Synthetic oligonucleotide
cuacuuggaaucccagcuu

SEQ ID NO: 433383 - RNA, 19 nt, Artificial Sequence
  Description of Artificial Sequence: Synthetic oligonucleotide
ggcucccaaggcggcaugg

SEQ ID NO: 433384 - RNA, 19 nt, Artificial Sequence
  Description of Artificial Sequence: Synthetic oligonucleotide
cuuccgggcuguggggcug

SEQ ID NO: 433385 - RNA, 19 nt, Artificial Sequence
  Description of Artificial Sequence: Synthetic oligonucleotide
gagugucgucgaugacaca

SEQ ID NO: 433386 - RNA, 19 nt, Artificial Sequence
  Description of Artificial Sequence: Synthetic oligonucleotide
caaggcggcauggaacucu

SEQ ID NO: 433387 - RNA, 19 nt, Artificial Sequence
  Description of Artificial Sequence: Synthetic oligonucleotide
cgacuuugccgguacagga

SEQ ID NO: 433388 - RNA, 19 nt, Artificial Sequence
  Description of Artificial Sequence: Synthetic oligonucleotide
cuugaagagugucgucgau

SEQ ID NO: 433389 - RNA, 19 nt, Artificial Sequence
  Description of Artificial Sequence: Synthetic oligonucleotide
guaggcucccaaggcggca

SEQ ID NO: 433390 - RNA, 19 nt, Artificial Sequence
  Description of Artificial Sequence: Synthetic oligonucleotide
gcgaccagggccggggacc

SEQ ID NO: 433391 - RNA, 19 nt, Artificial Sequence
  Description of Artificial Sequence: Synthetic oligonucleotide
uucccuggauauggcuaua

SEQ ID NO: 433392 - RNA, 19 nt, Artificial Sequence
  Description of Artificial Sequence: Synthetic oligonucleotide
gugugucagcucucagaua

SEQ ID NO: 433393 - RNA, 19 nt, Artificial Sequence
  Description of Artificial Sequence: Synthetic oligonucleotide
ccucgaagcuuacagcucu

SEQ ID NO: 433394 - RNA, 19 nt, Artificial Sequence
  Description of Artificial Sequence: Synthetic oligonucleotide
guaccuucuugaagcacau

SEQ ID NO: 433395 - RNA, 19 nt, Artificial Sequence
  Description of Artificial Sequence: Synthetic oligonucleotide
gucgucuggguggauggcu

SEQ ID NO: 433396 - RNA, 19 nt, Artificial Sequence
  Description of Artificial Sequence: Synthetic oligonucleotide
aggcucacgcugggccccg

SEQ ID NO: 433397 - RNA, 19 nt, Artificial Sequence
  Description of Artificial Sequence: Synthetic oligonucleotide
cugggcuauucgguagcca

SEQ ID NO: 433398 - RNA, 19 nt, Artificial Sequence
  Description of Artificial Sequence: Synthetic oligonucleotide
ccauggaaaauacgcccaa

SEQ ID NO: 433399 - RNA, 19 nt, Artificial Sequence
  Description of Artificial Sequence: Synthetic oligonucleotide
gcuggcgcugauacuguca

SEQ ID NO: 433400 - RNA, 19 nt, Artificial Sequence
  Description of Artificial Sequence: Synthetic oligonucleotide
cccaaggcggcauggaacu

SEQ ID NO: 433401 - RNA, 19 nt, Artificial Sequence
  Description of Artificial Sequence: Synthetic oligonucleotide
gggcuauucgguagccauc

SEQ ID NO: 433402 - RNA, 19 nt, Artificial Sequence
  Description of Artificial Sequence: Synthetic oligonucleotide
ggagaccucgaagcuuaca

SEQ ID NO: 433403 - RNA, 19 nt, Artificial Sequence
  Description of Artificial Sequence: Synthetic oligonucleotide
ccccuacacugauauaaaa

SEQ ID NO: 433404 - RNA, 19 nt, Artificial Sequence
  Description of Artificial Sequence: Synthetic oligonucleotide
gugucgucgaugacacagu

SEQ ID NO: 433405 - RNA, 19 nt, Artificial Sequence
  Description of Artificial Sequence: Synthetic oligonucleotide
acugcacaacaaaccccua

SEQ ID NO: 433406 - RNA, 19 nt, Artificial Sequence
  Description of Artificial Sequence: Synthetic oligonucleotide
ggcaugcccauagccacaa

SEQ ID NO: 433407 - RNA, 19 nt, Artificial Sequence
  Description of Artificial Sequence: Synthetic oligonucleotide
gcgcugauacugucaucca

SEQ ID NO: 433408 - RNA, 19 nt, Artificial Sequence
  Description of Artificial Sequence: Synthetic oligonucleotide
cgcguggaaguaguuggag

SEQ ID NO: 433409 - RNA, 19 nt, Artificial Sequence
  Description of Artificial Sequence: Synthetic oligonucleotide
gcacgguguucugggagac

SEQ ID NO: 433410 - RNA, 19 nt, Artificial Sequence
  Description of Artificial Sequence: Synthetic oligonucleotide
gugcgugggacuuccccuu

SEQ ID NO: 433411 - RNA, 19 nt, Artificial Sequence
  Description of Artificial Sequence: Synthetic oligonucleotide
gccauguguaccaaaucuu

SEQ ID NO: 433412 - RNA, 19 nt, Artificial Sequence
  Description of Artificial Sequence: Synthetic oligonucleotide
agcucuccguuagcaucau

SEQ ID NO: 433413 - RNA, 19 nt, Artificial Sequence
  Description of Artificial Sequence: Synthetic oligonucleotide
ccgcaagucguucuucucu

SEQ ID NO: 433414 - RNA, 19 nt, Artificial Sequence
  Description of Artificial Sequence: Synthetic oligonucleotide
cagagccauccaucgcacu

SEQ ID NO: 433415 - RNA, 19 nt, Artificial Sequence
  Description of Artificial Sequence: Synthetic oligonucleotide
ccaucgcacuggucuguuc

SEQ ID NO: 433416 - RNA, 19 nt, Artificial Sequence
  Description of Artificial Sequence: Synthetic oligonucleotide
gcaaaacggcuaauauuau

SEQ ID NO: 433417 - RNA, 19 nt, Artificial Sequence
  Description of Artificial Sequence: Synthetic oligonucleotide
ccuccaaaagagugacacu

SEQ ID NO: 433418 - RNA, 19 nt, Artificial Sequence
  Description of Artificial Sequence: Synthetic oligonucleotide
cagagucgacuuugccggu

SEQ ID NO: 433419 - RNA, 19 nt, Artificial Sequence
  Description of Artificial Sequence: Synthetic oligonucleotide
gcgugggacuuccccuuga

SEQ ID NO: 433420 - RNA, 19 nt, Artificial Sequence
  Description of Artificial Sequence: Synthetic oligonucleotide
ccuugaagauaagcauaaa

SEQ ID NO: 433421 - RNA, 19 nt, Artificial Sequence
  Description of Artificial Sequence: Synthetic oligonucleotide
ccccuaguccaaaguaacu

SEQ ID NO: 433422 - RNA, 19 nt, Artificial Sequence
  Description of Artificial Sequence: Synthetic oligonucleotide
cacuugcuuccgggcugug

SEQ ID NO: 433423 - RNA, 19 nt, Artificial Sequence
  Description of Artificial Sequence: Synthetic oligonucleotide
cacacgcguggaaguaguu

SEQ ID NO: 433424 - RNA, 19 nt, Artificial Sequence
  Description of Artificial Sequence: Synthetic oligonucleotide
cguccucgcucagguagag

SEQ ID NO: 433425 - RNA, 19 nt, Artificial Sequence
  Description of Artificial Sequence: Synthetic oligonucleotide
ccaaggcggcauggaacuc

SEQ ID NO: 433426 - RNA, 19 nt, Artificial Sequence
  Description of Artificial Sequence: Synthetic oligonucleotide
gcgucuggcccagagucau

SEQ ID NO: 433427 - RNA, 19 nt, Artificial Sequence
  Description of Artificial Sequence: Synthetic oligonucleotide
ccgguacaggaaaguucaa

SEQ ID NO: 433428 - RNA, 19 nt, Artificial Sequence
  Description of Artificial Sequence: Synthetic oligonucleotide
gcuauucgguagccaucuu

SEQ ID NO: 433429 - RNA, 19 nt, Artificial Sequence
  Description of Artificial Sequence: Synthetic oligonucleotide
guagggcgucuggcccaga

SEQ ID NO: 433430 - RNA, 19 nt, Artificial Sequence
  Description of Artificial Sequence: Synthetic oligonucleotide
ccgcaggagcggcgaccag

SEQ ID NO: 433431 - RNA, 19 nt, Artificial Sequence
  Description of Artificial Sequence: Synthetic oligonucleotide
gcucuccguuagcaucauu

SEQ ID NO: 433432 - RNA, 19 nt, Artificial Sequence
  Description of Artificial Sequence: Synthetic oligonucleotide
aaaauuugcuucuaugggc

SEQ ID NO: 433433 - RNA, 19 nt, Artificial Sequence
  Description of Artificial Sequence: Synthetic oligonucleotide
ugagguuugaagcagaccc

SEQ ID NO: 433434 - RNA, 19 nt, Artificial Sequence
  Description of Artificial Sequence: Synthetic oligonucleotide
uggaguauucauuacaagg

SEQ ID NO: 433435 - RNA, 19 nt, Artificial Sequence
  Description of Artificial Sequence: Synthetic oligonucleotide
uauucaacugagaagaugu

SEQ ID NO: 433436 - RNA, 19 nt, Artificial Sequence
  Description of Artificial Sequence: Synthetic oligonucleotide
uacaaggucaaucaggggc

SEQ ID NO: 433437 - RNA, 19 nt, Artificial Sequence
  Description of Artificial Sequence: Synthetic oligonucleotide
aaauuugcuucuaugggcc

SEQ ID NO: 433438 - RNA, 19 nt, Artificial Sequence
  Description of Artificial Sequence: Synthetic oligonucleotide
uguagugguagacacagcc

SEQ ID NO: 433439 - RNA, 19 nt, Artificial Sequence
  Description of Artificial Sequence: Synthetic oligonucleotide
uuagauaggagucccgccg

SEQ ID NO: 433440 - RNA, 19 nt, Artificial Sequence
  Description of Artificial Sequence: Synthetic oligonucleotide
uaucaguauaggcaggugg

SEQ ID NO: 433441 - RNA, 19 nt, Artificial Sequence
  Description of Artificial Sequence: Synthetic oligonucleotide
cuagauaugagguuugaag

SEQ ID NO: 433442 - RNA, 19 nt, Artificial Sequence
  Description of Artificial Sequence: Synthetic oligonucleotide
ugugagacuaucaguauag

SEQ ID NO: 433443 - RNA, 19 nt, Artificial Sequence
  Description of Artificial Sequence: Synthetic oligonucleotide
aagaaagucgccuggcagg

SEQ ID NO: 433444 - RNA, 19 nt, Artificial Sequence
  Description of Artificial Sequence: Synthetic oligonucleotide
cuuuauguccaacaggucc

SEQ ID NO: 433445 - RNA, 19 nt, Artificial Sequence
  Description of Artificial Sequence: Synthetic oligonucleotide
aaagaucgaagucaaauuu

SEQ ID NO: 433446 - RNA, 19 nt, Artificial Sequence
  Description of Artificial Sequence: Synthetic oligonucleotide
cuucuaugggccuaaagcc

SEQ ID NO: 433447 - RNA, 19 nt, Artificial Sequence
  Description of Artificial Sequence: Synthetic oligonucleotide
ugguguuugacagaggccg

SEQ ID NO: 433448 - RNA, 19 nt, Artificial Sequence
  Description of Artificial Sequence: Synthetic oligonucleotide
cuuacuaccaguauccauc

SEQ ID NO: 433449 - RNA, 19 nt, Artificial Sequence
  Description of Artificial Sequence: Synthetic oligonucleotide
auuacaaggucaaucaggg

SEQ ID NO: 433450 - RNA, 19 nt, Artificial Sequence
  Description of Artificial Sequence: Synthetic oligonucleotide
uuuagccccaacuugcuag

SEQ ID NO: 433451 - RNA, 19 nt, Artificial Sequence
  Description of Artificial Sequence: Synthetic oligonucleotide
agagagguguguucaagcc

SEQ ID NO: 433452 - RNA, 19 nt, Artificial Sequence
  Description of Artificial Sequence: Synthetic oligonucleotide
aauuuaaguuuacagucau

SEQ ID NO: 433453 - RNA, 19 nt, Artificial Sequence
  Description of Artificial Sequence: Synthetic oligonucleotide
uuuuaagugacaugggguc

SEQ ID NO: 433454 - RNA, 19 nt, Artificial Sequence
  Description of Artificial Sequence: Synthetic oligonucleotide
aaagucgccuggcaggcac

SEQ ID NO: 433455 - RNA, 19 nt, Artificial Sequence
  Description of Artificial Sequence: Synthetic oligonucleotide
ucuguagugguagacacag

SEQ ID NO: 433456 - RNA, 19 nt, Artificial Sequence
  Description of Artificial Sequence: Synthetic oligonucleotide
ugaggugccauuaauggaa

SEQ ID NO: 433457 - RNA, 19 nt, Artificial Sequence
  Description of Artificial Sequence: Synthetic oligonucleotide
ugggccuaaagccacaaca

SEQ ID NO: 433458 - RNA, 19 nt, Artificial Sequence
  Description of Artificial Sequence: Synthetic oligonucleotide
ugagacuaucaguauaggc

SEQ ID NO: 433459 - RNA, 19 nt, Artificial Sequence
  Description of Artificial Sequence: Synthetic oligonucleotide
gaagaaagucgccuggcag

SEQ ID NO: 433460 - RNA, 19 nt, Artificial Sequence
  Description of Artificial Sequence: Synthetic oligonucleotide
auaaacagaguaaagggca

SEQ ID NO: 433461 - RNA, 19 nt, Artificial Sequence
  Description of Artificial Sequence: Synthetic oligonucleotide
aaguggugaauccacauuu

SEQ ID NO: 433462 - RNA, 19 nt, Artificial Sequence
  Description of Artificial Sequence: Synthetic oligonucleotide
aguuucguccucugaagac

SEQ ID NO: 433463 - RNA, 19 nt, Artificial Sequence
  Description of Artificial Sequence: Synthetic oligonucleotide
uggagguuuccccacauca

SEQ ID NO: 433464 - RNA, 19 nt, Artificial Sequence
  Description of Artificial Sequence: Synthetic oligonucleotide
agauaugagguuugaagca

SEQ ID NO: 433465 - RNA, 19 nt, Artificial Sequence
  Description of Artificial Sequence: Synthetic oligonucleotide
aucaguauaggcagguggc

SEQ ID NO: 433466 - RNA, 19 nt, Artificial Sequence
  Description of Artificial Sequence: Synthetic oligonucleotide
uuaaacgggucuguagugg

SEQ ID NO: 433467 - RNA, 19 nt, Artificial Sequence
  Description of Artificial Sequence: Synthetic oligonucleotide
acuuuaaacgggucuguag

SEQ ID NO: 433468 - RNA, 19 nt, Artificial Sequence
  Description of Artificial Sequence: Synthetic oligonucleotide
uuuaaacgggucuguagug

SEQ ID NO: 433469 - RNA, 19 nt, Artificial Sequence
  Description of Artificial Sequence: Synthetic oligonucleotide
guugagagguccuugacuc

SEQ ID NO: 433470 - RNA, 19 nt, Artificial Sequence
  Description of Artificial Sequence: Synthetic oligonucleotide
cagaggaucuccuugugag

SEQ ID NO: 433471 - RNA, 19 nt, Artificial Sequence
  Description of Artificial Sequence: Synthetic oligonucleotide
uucuaugggccuaaagcca

SEQ ID NO: 433472 - RNA, 19 nt, Artificial Sequence
  Description of Artificial Sequence: Synthetic oligonucleotide
uguugagugggccccaaug

SEQ ID NO: 433473 - RNA, 19 nt, Artificial Sequence
  Description of Artificial Sequence: Synthetic oligonucleotide
uuuagauaggagucccgcc

SEQ ID NO: 433474 - RNA, 19 nt, Artificial Sequence
  Description of Artificial Sequence: Synthetic oligonucleotide
gcuucuaugggccuaaagc

SEQ ID NO: 433475 - RNA, 19 nt, Artificial Sequence
  Description of Artificial Sequence: Synthetic oligonucleotide
uccgcaagagcuuuggggu

SEQ ID NO: 433476 - RNA, 19 nt, Artificial Sequence
  Description of Artificial Sequence: Synthetic oligonucleotide
ggaucgcuugcuuagacgg

SEQ ID NO: 433477 - RNA, 19 nt, Artificial Sequence
  Description of Artificial Sequence: Synthetic oligonucleotide
gauucacucuuguuuggag

SEQ ID NO: 433478 - RNA, 19 nt, Artificial Sequence
  Description of Artificial Sequence: Synthetic oligonucleotide
ugcuuauauccacagugga

SEQ ID NO: 433479 - RNA, 19 nt, Artificial Sequence
  Description of Artificial Sequence: Synthetic oligonucleotide
caccguuccagacacaagc

SEQ ID NO: 433480 - RNA, 19 nt, Artificial Sequence
  Description of Artificial Sequence: Synthetic oligonucleotide
accauuagcugacucacca

SEQ ID NO: 433481 - RNA, 19 nt, Artificial Sequence
  Description of Artificial Sequence: Synthetic oligonucleotide
acaccauuagcugacucac

SEQ ID NO: 433482 - RNA, 19 nt, Artificial Sequence
  Description of Artificial Sequence: Synthetic oligonucleotide
uugggauaggggaacuaag

SEQ ID NO: 433483 - RNA, 19 nt, Artificial Sequence
  Description of Artificial Sequence: Synthetic oligonucleotide
cucucaccggcaaagcucg

SEQ ID NO: 433484 - RNA, 19 nt, Artificial Sequence
  Description of Artificial Sequence: Synthetic oligonucleotide
gaguauucauuacaagguc

SEQ ID NO: 433485 - RNA, 19 nt, Artificial Sequence
  Description of Artificial Sequence: Synthetic oligonucleotide
agguccuugacuccccugg

SEQ ID NO: 433486 - RNA, 19 nt, Artificial Sequence
  Description of Artificial Sequence: Synthetic oligonucleotide
ccuacuuugcccaauuugc

SEQ ID NO: 433487 - RNA, 19 nt, Artificial Sequence
  Description of Artificial Sequence: Synthetic oligonucleotide
cauuagcugacucaccaac

SEQ ID NO: 433488 - RNA, 19 nt, Artificial Sequence
  Description of Artificial Sequence: Synthetic oligonucleotide
ucgccuggauggaugaagg

SEQ ID NO: 433489 - RNA, 19 nt, Artificial Sequence
  Description of Artificial Sequence: Synthetic oligonucleotide
aggagugauggugaguugg

SEQ ID NO: 433490 - RNA, 19 nt, Artificial Sequence
  Description of Artificial Sequence: Synthetic oligonucleotide
ucuaugagagggcggucag

SEQ ID NO: 433491 - RNA, 19 nt, Artificial Sequence
  Description of Artificial Sequence: Synthetic oligonucleotide
uguagcuugcugguggucc

SEQ ID NO: 433492 - RNA, 19 nt, Artificial Sequence
  Description of Artificial Sequence: Synthetic oligonucleotide
uccucuuuguucuggaguc

SEQ ID NO: 433493 - RNA, 19 nt, Artificial Sequence
  Description of Artificial Sequence: Synthetic oligonucleotide
aguguugacauccgucuca

SEQ ID NO: 433494 - RNA, 19 nt, Artificial Sequence
  Description of Artificial Sequence: Synthetic oligonucleotide
uggauugcuuauauccaca

SEQ ID NO: 433495 - RNA, 19 nt, Artificial Sequence
  Description of Artificial Sequence: Synthetic oligonucleotide
ugagugggccccaaugagc

SEQ ID NO: 433496 - RNA, 19 nt, Artificial Sequence
  Description of Artificial Sequence: Synthetic oligonucleotide
uaugagguuugaagcagac

SEQ ID NO: 433497 - RNA, 19 nt, Artificial Sequence
  Description of Artificial Sequence: Synthetic oligonucleotide
aacgggucuguagugguag

SEQ ID NO: 433498 - RNA, 19 nt, Artificial Sequence
  Description of Artificial Sequence: Synthetic oligonucleotide
ugcuccuggagacacacau

SEQ ID NO: 433499 - RNA, 19 nt, Artificial Sequence
  Description of Artificial Sequence: Synthetic oligonucleotide
uuacaaggucaaucagggg

SEQ ID NO: 433500 - RNA, 19 nt, Artificial Sequence
  Description of Artificial Sequence: Synthetic oligonucleotide
aguauucauuacaagguca

SEQ ID NO: 433501 - RNA, 19 nt, Artificial Sequence
  Description of Artificial Sequence: Synthetic oligonucleotide
uguaacagugcuggguuug

SEQ ID NO: 433502 - RNA, 19 nt, Artificial Sequence
  Description of Artificial Sequence: Synthetic oligonucleotide
uguucaagccuagaggaaa

SEQ ID NO: 433503 - RNA, 19 nt, Artificial Sequence
  Description of Artificial Sequence: Synthetic oligonucleotide
accccucucgccuggaugg

SEQ ID NO: 433504 - RNA, 19 nt, Artificial Sequence
  Description of Artificial Sequence: Synthetic oligonucleotide
uuagagagguguguucaag

SEQ ID NO: 433505 - RNA, 19 nt, Artificial Sequence
  Description of Artificial Sequence: Synthetic oligonucleotide
guuuagauaggagucccgc

SEQ ID NO: 433506 - RNA, 19 nt, Artificial Sequence
  Description of Artificial Sequence: Synthetic oligonucleotide
guuugacagaggccgagag

SEQ ID NO: 433507 - RNA, 19 nt, Artificial Sequence
  Description of Artificial Sequence: Synthetic oligonucleotide
aggggaacuaagcauggcu

SEQ ID NO: 433508 - RNA, 19 nt, Artificial Sequence
  Description of Artificial Sequence: Synthetic oligonucleotide
aauuugcuucuaugggccu

SEQ ID NO: 433509 - RNA, 19 nt, Artificial Sequence
  Description of Artificial Sequence: Synthetic oligonucleotide
gaucacuggaguuugcucu

SEQ ID NO: 433510 - RNA, 19 nt, Artificial Sequence
  Description of Artificial Sequence: Synthetic oligonucleotide
agaugucagggugucaggg

SEQ ID NO: 433511 - RNA, 19 nt, Artificial Sequence
  Description of Artificial Sequence: Synthetic oligonucleotide
uugugagacuaucaguaua

SEQ ID NO: 433512 - RNA, 19 nt, Artificial Sequence
  Description of Artificial Sequence: Synthetic oligonucleotide
gauggaucaguggggaacc

SEQ ID NO: 433513 - RNA, 19 nt, Artificial Sequence
  Description of Artificial Sequence: Synthetic oligonucleotide
auggaugaaggcacgucgc

SEQ ID NO: 433514 - RNA, 19 nt, Artificial Sequence
  Description of Artificial Sequence: Synthetic oligonucleotide
uuagacggcucccucuacu

SEQ ID NO: 433515 - RNA, 19 nt, Artificial Sequence
  Description of Artificial Sequence: Synthetic oligonucleotide
uaaacgggucuguaguggu

SEQ ID NO: 433516 - RNA, 19 nt, Artificial Sequence
  Description of Artificial Sequence: Synthetic oligonucleotide
uccuugugagacuaucagu

SEQ ID NO: 433517 - RNA, 19 nt, Artificial Sequence
  Description of Artificial Sequence: Synthetic oligonucleotide
ugcuucuaugggccuaaag

SEQ ID NO: 433518 - RNA, 19 nt, Artificial Sequence
  Description of Artificial Sequence: Synthetic oligonucleotide
ucuuacuaccaguauccau

SEQ ID NO: 433519 - RNA, 19 nt, Artificial Sequence
  Description of Artificial Sequence: Synthetic oligonucleotide
gaagucuaugagagggcgg

SEQ ID NO: 433520 - RNA, 19 nt, Artificial Sequence
  Description of Artificial Sequence: Synthetic oligonucleotide
uuccccacaucauuucuac

SEQ ID NO: 433521 - RNA, 19 nt, Artificial Sequence
  Description of Artificial Sequence: Synthetic oligonucleotide
cuaagcauggcuggagaag

SEQ ID NO: 433522 - RNA, 19 nt, Artificial Sequence
  Description of Artificial Sequence: Synthetic oligonucleotide
agggaucgcuugcuuagac

SEQ ID NO: 433523 - RNA, 19 nt, Artificial Sequence
  Description of Artificial Sequence: Synthetic oligonucleotide
ccgaaucaaauacaguucc

SEQ ID NO: 433524 - RNA, 19 nt, Artificial Sequence
  Description of Artificial Sequence: Synthetic oligonucleotide
gggaacuaagcauggcugg

SEQ ID NO: 433525 - RNA, 19 nt, Artificial Sequence
  Description of Artificial Sequence: Synthetic oligonucleotide
ucuuuagccccaacuugcu

SEQ ID NO: 433526 - RNA, 19 nt, Artificial Sequence
  Description of Artificial Sequence: Synthetic oligonucleotide
aagaucgaagucaaauuuu

SEQ ID NO: 433527 - RNA, 19 nt, Artificial Sequence
  Description of Artificial Sequence: Synthetic oligonucleotide
ugagaucccuuuucauuca

SEQ ID NO: 433528 - RNA, 19 nt, Artificial Sequence
  Description of Artificial Sequence: Synthetic oligonucleotide
caagccuagaggaaaggca

SEQ ID NO: 433529 - RNA, 19 nt, Artificial Sequence
  Description of Artificial Sequence: Synthetic oligonucleotide
guggauugcuuauauccac

SEQ ID NO: 433530 - RNA, 19 nt, Artificial Sequence
  Description of Artificial Sequence: Synthetic oligonucleotide
agguugagagguccuugac

SEQ ID NO: 433531 - RNA, 19 nt, Artificial Sequence
  Description of Artificial Sequence: Synthetic oligonucleotide
ugcugaagucuaugagagg

SEQ ID NO: 433532 - RNA, 19 nt, Artificial Sequence
  Description of Artificial Sequence: Synthetic oligonucleotide
cuggaguauucauuacaag

SEQ ID NO: 433533 - RNA, 19 nt, Artificial Sequence
  Description of Artificial Sequence: Synthetic oligonucleotide
caugcacuagauaugaggu

SEQ ID NO: 433534 - RNA, 19 nt, Artificial Sequence
  Description of Artificial Sequence: Synthetic oligonucleotide
ugaggcacacaggauggag

SEQ ID NO: 433535 - RNA, 19 nt, Artificial Sequence
  Description of Artificial Sequence: Synthetic oligonucleotide
gaaagaucgaagucaaauu

SEQ ID NO: 433536 - RNA, 19 nt, Artificial Sequence
  Description of Artificial Sequence: Synthetic oligonucleotide
gccgagaggagucagguug

SEQ ID NO: 433537 - RNA, 19 nt, Artificial Sequence
  Description of Artificial Sequence: Synthetic oligonucleotide
ggauugcuuauauccacag

SEQ ID NO: 433538 - RNA, 19 nt, Artificial Sequence
  Description of Artificial Sequence: Synthetic oligonucleotide
aggggcacaucacuuugag

SEQ ID NO: 433539 - RNA, 19 nt, Artificial Sequence
  Description of Artificial Sequence: Synthetic oligonucleotide
uagacggcucccucuacug

SEQ ID NO: 433540 - RNA, 19 nt, Artificial Sequence
  Description of Artificial Sequence: Synthetic oligonucleotide
uuucguccucugaagacua

SEQ ID NO: 433541 - RNA, 19 nt, Artificial Sequence
  Description of Artificial Sequence: Synthetic oligonucleotide
cauguuggacucaggggug

SEQ ID NO: 433542 - RNA, 19 nt, Artificial Sequence
  Description of Artificial Sequence: Synthetic oligonucleotide
ggagggaucgcuugcuuag

SEQ ID NO: 433543 - RNA, 19 nt, Artificial Sequence
  Description of Artificial Sequence: Synthetic oligonucleotide
cuaggaacagggagggauc

SEQ ID NO: 433544 - RNA, 19 nt, Artificial Sequence
  Description of Artificial Sequence: Synthetic oligonucleotide
gacuaucaguauaggcagg

SEQ ID NO: 433545 - RNA, 19 nt, Artificial Sequence
  Description of Artificial Sequence: Synthetic oligonucleotide
ucuacccaugucuggagua

SEQ ID NO: 433546 - RNA, 19 nt, Artificial Sequence
  Description of Artificial Sequence: Synthetic oligonucleotide
agaucccuuuucauucagc

SEQ ID NO: 433547 - RNA, 19 nt, Artificial Sequence
  Description of Artificial Sequence: Synthetic oligonucleotide
cacaccauuagcugacuca

SEQ ID NO: 433548 - RNA, 19 nt, Artificial Sequence
  Description of Artificial Sequence: Synthetic oligonucleotide
uuuggagguuuccccacau

SEQ ID NO: 433549 - RNA, 19 nt, Artificial Sequence
  Description of Artificial Sequence: Synthetic oligonucleotide
ggucuguagugguagacac

SEQ ID NO: 433550 - RNA, 19 nt, Artificial Sequence
  Description of Artificial Sequence: Synthetic oligonucleotide
agguggcuucaacaggguc

SEQ ID NO: 433551 - RNA, 19 nt, Artificial Sequence
  Description of Artificial Sequence: Synthetic oligonucleotide
ugcuuagacggcucccucu

SEQ ID NO: 433552 - RNA, 19 nt, Artificial Sequence
  Description of Artificial Sequence: Synthetic oligonucleotide
gccauguuggacucagggg

SEQ ID NO: 433553 - RNA, 19 nt, Artificial Sequence
  Description of Artificial Sequence: Synthetic oligonucleotide
cugucuugcaguuuagaua

SEQ ID NO: 433554 - RNA, 19 nt, Artificial Sequence
  Description of Artificial Sequence: Synthetic oligonucleotide
gcuuauauccacaguggag

SEQ ID NO: 433555 - RNA, 19 nt, Artificial Sequence
  Description of Artificial Sequence: Synthetic oligonucleotide
acuggaguuugcucugccu

SEQ ID NO: 433556 - RNA, 19 nt, Artificial Sequence
  Description of Artificial Sequence: Synthetic oligonucleotide
gacucaccaacugaaaacu

SEQ ID NO: 433557 - RNA, 19 nt, Artificial Sequence
  Description of Artificial Sequence: Synthetic oligonucleotide
gugagacuaucaguauagg

SEQ ID NO: 433558 - RNA, 19 nt, Artificial Sequence
  Description of Artificial Sequence: Synthetic oligonucleotide
gccuacuuugcccaauuug

SEQ ID NO: 433559 - RNA, 19 nt, Artificial Sequence
  Description of Artificial Sequence: Synthetic oligonucleotide
gugacauggggucuuucuc

SEQ ID NO: 433560 - RNA, 19 nt, Artificial Sequence
  Description of Artificial Sequence: Synthetic oligonucleotide
augggccuaaagccacaac

SEQ ID NO: 433561 - RNA, 19 nt, Artificial Sequence
  Description of Artificial Sequence: Synthetic oligonucleotide
gggaucgcuugcuuagacg

SEQ ID NO: 433562 - RNA, 19 nt, Artificial Sequence
  Description of Artificial Sequence: Synthetic oligonucleotide
uucguccucugaagacuag

SEQ ID NO: 433563 - RNA, 19 nt, Artificial Sequence
  Description of Artificial Sequence: Synthetic oligonucleotide
uucuuacuaccaguaucca

SEQ ID NO: 433564 - RNA, 19 nt, Artificial Sequence
  Description of Artificial Sequence: Synthetic oligonucleotide
ucguccucugaagacuagc

SEQ ID NO: 433565 - RNA, 19 nt, Artificial Sequence
  Description of Artificial Sequence: Synthetic oligonucleotide
gggauaggggaacuaagca

SEQ ID NO: 433566 - RNA, 19 nt, Artificial Sequence
  Description of Artificial Sequence: Synthetic oligonucleotide
ggaguauucauuacaaggu

SEQ ID NO: 433567 - RNA, 19 nt, Artificial Sequence
  Description of Artificial Sequence: Synthetic oligonucleotide
cuugacuccccuggcagug

SEQ ID NO: 433568 - RNA, 19 nt, Artificial Sequence
  Description of Artificial Sequence: Synthetic oligonucleotide
cucgccuggauggaugaag

SEQ ID NO: 433569 - RNA, 19 nt, Artificial Sequence
  Description of Artificial Sequence: Synthetic oligonucleotide
cccaaugagcgucucacag

SEQ ID NO: 433570 - RNA, 19 nt, Artificial Sequence
  Description of Artificial Sequence: Synthetic oligonucleotide
agaaucccacccgggcacc

SEQ ID NO: 433571 - RNA, 19 nt, Artificial Sequence
  Description of Artificial Sequence: Synthetic oligonucleotide
gcaguuuagauaggagucc

SEQ ID NO: 433572 - RNA, 19 nt, Artificial Sequence
  Description of Artificial Sequence: Synthetic oligonucleotide
gcugauguguccgcaagag

SEQ ID NO: 433573 - RNA, 19 nt, Artificial Sequence
  Description of Artificial Sequence: Synthetic oligonucleotide
gaaggaggagauucacucu

SEQ ID NO: 433574 - RNA, 19 nt, Artificial Sequence
  Description of Artificial Sequence: Synthetic oligonucleotide
cacaugcacuagauaugag

SEQ ID NO: 433575 - RNA, 19 nt, Artificial Sequence
  Description of Artificial Sequence: Synthetic oligonucleotide
cuggguuuguucaggggca

SEQ ID NO: 433576 - RNA, 19 nt, Artificial Sequence
  Description of Artificial Sequence: Synthetic oligonucleotide
ccuugugagacuaucagua

SEQ ID NO: 433577 - RNA, 19 nt, Artificial Sequence
  Description of Artificial Sequence: Synthetic oligonucleotide
auaugagguuugaagcaga

SEQ ID NO: 433578 - RNA, 19 nt, Artificial Sequence
  Description of Artificial Sequence: Synthetic oligonucleotide
caccauuagcugacucacc

SEQ ID NO: 433579 - RNA, 19 nt, Artificial Sequence
  Description of Artificial Sequence: Synthetic oligonucleotide
cauugcuccugcucuccug

SEQ ID NO: 433580 - RNA, 19 nt, Artificial Sequence
  Description of Artificial Sequence: Synthetic oligonucleotide
gggccuaaagccacaacag

SEQ ID NO: 433581 - RNA, 19 nt, Artificial Sequence
  Description of Artificial Sequence: Synthetic oligonucleotide
gagagguguguucaagccu

SEQ ID NO: 433582 - RNA, 19 nt, Artificial Sequence
  Description of Artificial Sequence: Synthetic oligonucleotide
gaaggcacgucgcagccgu

SEQ ID NO: 433583 - RNA, 19 nt, Artificial Sequence
  Description of Artificial Sequence: Synthetic oligonucleotide
augcacuagauaugagguu

SEQ ID NO: 433584 - RNA, 19 nt, Artificial Sequence
  Description of Artificial Sequence: Synthetic oligonucleotide
gagagggcggucagcuagg

SEQ ID NO: 433585 - RNA, 19 nt, Artificial Sequence
  Description of Artificial Sequence: Synthetic oligonucleotide
acccaugucuggaguauuc

SEQ ID NO: 433586 - RNA, 19 nt, Artificial Sequence
  Description of Artificial Sequence: Synthetic oligonucleotide
uugcuuagacggcucccuc

SEQ ID NO: 433587 - RNA, 19 nt, Artificial Sequence
  Description of Artificial Sequence: Synthetic oligonucleotide
cccgaaucaaauacaguuc

SEQ ID NO: 433588 - RNA, 19 nt, Artificial Sequence
  Description of Artificial Sequence: Synthetic oligonucleotide
guugggauaggggaacuaa

SEQ ID NO: 433589 - RNA, 19 nt, Artificial Sequence
  Description of Artificial Sequence: Synthetic oligonucleotide
guguccgcaagagcuuugg

SEQ ID NO: 433590 - RNA, 19 nt, Artificial Sequence
  Description of Artificial Sequence: Synthetic oligonucleotide
cucaccggcaaagcucggg

SEQ ID NO: 433591 - RNA, 19 nt, Artificial Sequence
  Description of Artificial Sequence: Synthetic oligonucleotide
gucuaugagagggcgguca

SEQ ID NO: 433592 - RNA, 19 nt, Artificial Sequence
  Description of Artificial Sequence: Synthetic oligonucleotide
uaccaguauccaucuucac

SEQ ID NO: 433593 - RNA, 19 nt, Artificial Sequence
  Description of Artificial Sequence: Synthetic oligonucleotide
guauccaucuucaccccuc

SEQ ID NO: 433594 - RNA, 19 nt, Artificial Sequence
  Description of Artificial Sequence: Synthetic oligonucleotide
uucaggagugauggugagu

SEQ ID NO: 433595 - RNA, 19 nt, Artificial Sequence
  Description of Artificial Sequence: Synthetic oligonucleotide
uaggggaacuaagcauggc

SEQ ID NO: 433596 - RNA, 19 nt, Artificial Sequence
  Description of Artificial Sequence: Synthetic oligonucleotide
gggaacccaggucaaucag

SEQ ID NO: 433597 - RNA, 19 nt, Artificial Sequence
  Description of Artificial Sequence: Synthetic oligonucleotide
gaaguggugaauccacauu

SEQ ID NO: 433598 - RNA, 19 nt, Artificial Sequence
  Description of Artificial Sequence: Synthetic oligonucleotide
gguggauugcuuauaucca

SEQ ID NO: 433599 - RNA, 19 nt, Artificial Sequence
  Description of Artificial Sequence: Synthetic oligonucleotide
gggguuguuggccgagagg

SEQ ID NO: 433600 - RNA, 19 nt, Artificial Sequence
  Description of Artificial Sequence: Synthetic oligonucleotide
ucucaccggcaaagcucgg

SEQ ID NO: 433601 - RNA, 19 nt, Artificial Sequence
  Description of Artificial Sequence: Synthetic oligonucleotide
gagguccuugacuccccug

SEQ ID NO: 433602 - RNA, 19 nt, Artificial Sequence
  Description of Artificial Sequence: Synthetic oligonucleotide
cagguggauugcuuauauc

SEQ ID NO: 433603 - RNA, 19 nt, Artificial Sequence
  Description of Artificial Sequence: Synthetic oligonucleotide
cuaugagagggcggucagc

SEQ ID NO: 433604 - RNA, 19 nt, Artificial Sequence
  Description of Artificial Sequence: Synthetic oligonucleotide
agucuaugagagggcgguc

SEQ ID NO: 433605 - RNA, 19 nt, Artificial Sequence
  Description of Artificial Sequence: Synthetic oligonucleotide
uggugaguugguccagcuu

SEQ ID NO: 433606 - RNA, 19 nt, Artificial Sequence
  Description of Artificial Sequence: Synthetic oligonucleotide
cuuagacggcucccucuac

SEQ ID NO: 433607 - RNA, 19 nt, Artificial Sequence
  Description of Artificial Sequence: Synthetic oligonucleotide
ucccgccguuuuaugcugc

SEQ ID NO: 433608 - RNA, 19 nt, Artificial Sequence
  Description of Artificial Sequence: Synthetic oligonucleotide
agucgccuggcaggcacac

SEQ ID NO: 433609 - RNA, 19 nt, Artificial Sequence
  Description of Artificial Sequence: Synthetic oligonucleotide
caguguugacauccgucuc

SEQ ID NO: 433610 - RNA, 19 nt, Artificial Sequence
  Description of Artificial Sequence: Synthetic oligonucleotide
guuucguccucugaagacu

SEQ ID NO: 433611 - RNA, 19 nt, Artificial Sequence
  Description of Artificial Sequence: Synthetic oligonucleotide
ccucucaccggcaaagcuc

SEQ ID NO: 433612 - RNA, 19 nt, Artificial Sequence
  Description of Artificial Sequence: Synthetic oligonucleotide
aguaaagggcagaguugug

SEQ ID NO: 433613 - RNA, 19 nt, Artificial Sequence
  Description of Artificial Sequence: Synthetic oligonucleotide
uguuggccgagaggaguca

SEQ ID NO: 433614 - RNA, 19 nt, Artificial Sequence
  Description of Artificial Sequence: Synthetic oligonucleotide
cugaacgauggcaggcaga

SEQ ID NO: 433615 - RNA, 19 nt, Artificial Sequence
  Description of Artificial Sequence: Synthetic oligonucleotide
gagguguguucaagccuag

SEQ ID NO: 433616 - RNA, 19 nt, Artificial Sequence
  Description of Artificial Sequence: Synthetic oligonucleotide
gucccgccguuuuaugcug

SEQ ID NO: 433617 - RNA, 19 nt, Artificial Sequence
  Description of Artificial Sequence: Synthetic oligonucleotide
gagugauggugaguugguc

SEQ ID NO: 433618 - RNA, 19 nt, Artificial Sequence
  Description of Artificial Sequence: Synthetic oligonucleotide
ccgagaggagucagguugg

SEQ ID NO: 433619 - RNA, 19 nt, Artificial Sequence
  Description of Artificial Sequence: Synthetic oligonucleotide
gacauccgucucaugcuca

SEQ ID NO: 433620 - RNA, 19 nt, Artificial Sequence
  Description of Artificial Sequence: Synthetic oligonucleotide
ugguaggggcuguuuucaa

SEQ ID NO: 433621 - RNA, 19 nt, Artificial Sequence
  Description of Artificial Sequence: Synthetic oligonucleotide
gccuaaagccacaacagaa

SEQ ID NO: 433622 - RNA, 19 nt, Artificial Sequence
  Description of Artificial Sequence: Synthetic oligonucleotide
uaggagucccgccguuuua

SEQ ID NO: 433623 - RNA, 19 nt, Artificial Sequence
  Description of Artificial Sequence: Synthetic oligonucleotide
ggcacaucacuuugagauc

SEQ ID NO: 433624 - RNA, 19 nt, Artificial Sequence
  Description of Artificial Sequence: Synthetic oligonucleotide
ugcccaagcucagccuuug

SEQ ID NO: 433625 - RNA, 19 nt, Artificial Sequence
  Description of Artificial Sequence: Synthetic oligonucleotide
ggccgagagccacuaguag

SEQ ID NO: 433626 - RNA, 19 nt, Artificial Sequence
  Description of Artificial Sequence: Synthetic oligonucleotide
ucgcuugcuuagacggcuc

SEQ ID NO: 433627 - RNA, 19 nt, Artificial Sequence
  Description of Artificial Sequence: Synthetic oligonucleotide
uuguugagugggccccaau

SEQ ID NO: 433628 - RNA, 19 nt, Artificial Sequence
  Description of Artificial Sequence: Synthetic oligonucleotide
agacccucagugucuucau

SEQ ID NO: 433629 - RNA, 19 nt, Artificial Sequence
  Description of Artificial Sequence: Synthetic oligonucleotide
gguugagagguccuugacu

SEQ ID NO: 433630 - RNA, 19 nt, Artificial Sequence
  Description of Artificial Sequence: Synthetic oligonucleotide
gguuugucugcaagaugcc

SEQ ID NO: 433631 - RNA, 19 nt, Artificial Sequence
  Description of Artificial Sequence: Synthetic oligonucleotide
auguuggacucaggggugu

SEQ ID NO: 433632 - RNA, 19 nt, Artificial Sequence
  Description of Artificial Sequence: Synthetic oligonucleotide
ggggaacccaggucaauca

SEQ ID NO: 433633 - RNA, 19 nt, Artificial Sequence
  Description of Artificial Sequence: Synthetic oligonucleotide
guauaggcagguggcuuca

SEQ ID NO: 433634 - RNA, 19 nt, Artificial Sequence
  Description of Artificial Sequence: Synthetic oligonucleotide
aaacgggucuguaguggua

SEQ ID NO: 433635 - RNA, 19 nt, Artificial Sequence
  Description of Artificial Sequence: Synthetic oligonucleotide
aaucccacccgggcaccgu

SEQ ID NO: 433636 - RNA, 19 nt, Artificial Sequence
  Description of Artificial Sequence: Synthetic oligonucleotide
cccaagagaggcugucccc

SEQ ID NO: 433637 - RNA, 19 nt, Artificial Sequence
  Description of Artificial Sequence: Synthetic oligonucleotide
aggagucccgccguuuuau

SEQ ID NO: 433638 - RNA, 19 nt, Artificial Sequence
  Description of Artificial Sequence: Synthetic oligonucleotide
ggaacuaagcauggcugga

SEQ ID NO: 433639 - RNA, 19 nt, Artificial Sequence
  Description of Artificial Sequence: Synthetic oligonucleotide
uggagguugagagguccuu

SEQ ID NO: 433640 - RNA, 19 nt, Artificial Sequence
  Description of Artificial Sequence: Synthetic oligonucleotide
agcuaggucucugccuccu

SEQ ID NO: 433641 - RNA, 19 nt, Artificial Sequence
  Description of Artificial Sequence: Synthetic oligonucleotide
gaggagauucacucuuguu

SEQ ID NO: 433642 - RNA, 19 nt, Artificial Sequence
  Description of Artificial Sequence: Synthetic oligonucleotide
gccccaaugagcgucucac

SEQ ID NO: 433643 - RNA, 19 nt, Artificial Sequence
  Description of Artificial Sequence: Synthetic oligonucleotide
ccccgaaucaaauacaguu

SEQ ID NO: 433644 - RNA, 19 nt, Artificial Sequence
  Description of Artificial Sequence: Synthetic oligonucleotide
gcccuuguugagugggccc

SEQ ID NO: 433645 - RNA, 19 nt, Artificial Sequence
  Description of Artificial Sequence: Synthetic oligonucleotide
aggcacgucgcagccgucu

SEQ ID NO: 433646 - RNA, 19 nt, Artificial Sequence
  Description of Artificial Sequence: Synthetic oligonucleotide
agcucucaucugaggacug

SEQ ID NO: 433647 - RNA, 19 nt, Artificial Sequence
  Description of Artificial Sequence: Synthetic oligonucleotide
cuuuagccccaacuugcua

SEQ ID NO: 433648 - RNA, 19 nt, Artificial Sequence
  Description of Artificial Sequence: Synthetic oligonucleotide
uauaggcagguggcuucaa

SEQ ID NO: 433649 - RNA, 19 nt, Artificial Sequence
  Description of Artificial Sequence: Synthetic oligonucleotide
gagggaucgcuugcuuaga

SEQ ID NO: 433650 - RNA, 19 nt, Artificial Sequence
  Description of Artificial Sequence: Synthetic oligonucleotide
guguucaagccuagaggaa

SEQ ID NO: 433651 - RNA, 19 nt, Artificial Sequence
  Description of Artificial Sequence: Synthetic oligonucleotide
cuugcuuagacggcucccu

SEQ ID NO: 433652 - RNA, 19 nt, Artificial Sequence
  Description of Artificial Sequence: Synthetic oligonucleotide
ggcagcccuuguugagugg

SEQ ID NO: 433653 - RNA, 19 nt, Artificial Sequence
  Description of Artificial Sequence: Synthetic oligonucleotide
ggagucccgccguuuuaug

SEQ ID NO: 433654 - RNA, 19 nt, Artificial Sequence
  Description of Artificial Sequence: Synthetic oligonucleotide
agguguguucaagccuaga

SEQ ID NO: 433655 - RNA, 19 nt, Artificial Sequence
  Description of Artificial Sequence: Synthetic oligonucleotide
cuccccaagagaggcuguc

SEQ ID NO: 433656 - RNA, 19 nt, Artificial Sequence
  Description of Artificial Sequence: Synthetic oligonucleotide
augagagggcggucagcua

SEQ ID NO: 433657 - RNA, 19 nt, Artificial Sequence
  Description of Artificial Sequence: Synthetic oligonucleotide
gaaagucgccuggcaggca

SEQ ID NO: 433658 - RNA, 19 nt, Artificial Sequence
  Description of Artificial Sequence: Synthetic oligonucleotide
aaggcacgucgcagccguc

SEQ ID NO: 433659 - RNA, 19 nt, Artificial Sequence
  Description of Artificial Sequence: Synthetic oligonucleotide
agccugauuuggagguuga

SEQ ID NO: 433660 - RNA, 19 nt, Artificial Sequence
  Description of Artificial Sequence: Synthetic oligonucleotide
ggaggagauucacucuugu

SEQ ID NO: 433661 - RNA, 19 nt, Artificial Sequence
  Description of Artificial Sequence: Synthetic oligonucleotide
uguuggacucagggguguu

SEQ ID NO: 433662 - RNA, 19 nt, Artificial Sequence
  Description of Artificial Sequence: Synthetic oligonucleotide
gcuuagacggcucccucua

SEQ ID NO: 433663 - RNA, 19 nt, Artificial Sequence
  Description of Artificial Sequence: Synthetic oligonucleotide
ccggcaaagcucggggugg

SEQ ID NO: 433664 - RNA, 19 nt, Artificial Sequence
  Description of Artificial Sequence: Synthetic oligonucleotide
acccgggcaccguuccaga

SEQ ID NO: 433665 - RNA, 19 nt, Artificial Sequence
  Description of Artificial Sequence: Synthetic oligonucleotide
ggaacagggagggaucgcu

SEQ ID NO: 433666 - RNA, 19 nt, Artificial Sequence
  Description of Artificial Sequence: Synthetic oligonucleotide
ccugcuagcugguguccug

SEQ ID NO: 433667 - RNA, 19 nt, Artificial Sequence
  Description of Artificial Sequence: Synthetic oligonucleotide
cuguagcuugcuggugguc

SEQ ID NO: 433668 - RNA, 19 nt, Artificial Sequence
  Description of Artificial Sequence: Synthetic oligonucleotide
agccacuaguaggaauauu

SEQ ID NO: 433669 - RNA, 19 nt, Artificial Sequence
  Description of Artificial Sequence: Synthetic oligonucleotide
ucucgccuggauggaugaa

SEQ ID NO: 433670 - RNA, 19 nt, Artificial Sequence
  Description of Artificial Sequence: Synthetic oligonucleotide
gggagggaucgcuugcuua

SEQ ID NO: 433671 - RNA, 19 nt, Artificial Sequence
  Description of Artificial Sequence: Synthetic oligonucleotide
gguguuugacagaggccga

SEQ ID NO: 433672 - RNA, 19 nt, Artificial Sequence
  Description of Artificial Sequence: Synthetic oligonucleotide
uacugccgggcagcccuug

SEQ ID NO: 433673 - RNA, 19 nt, Artificial Sequence
  Description of Artificial Sequence: Synthetic oligonucleotide
caaagccauguuggacuca

SEQ ID NO: 433674 - RNA, 19 nt, Artificial Sequence
  Description of Artificial Sequence: Synthetic oligonucleotide
gcacgucgcagccgucucc

SEQ ID NO: 433675 - RNA, 19 nt, Artificial Sequence
  Description of Artificial Sequence: Synthetic oligonucleotide
gccugauuuggagguugag

SEQ ID NO: 433676 - RNA, 19 nt, Artificial Sequence
  Description of Artificial Sequence: Synthetic oligonucleotide
gcuaggucucugccuccug

SEQ ID NO: 433677 - RNA, 19 nt, Artificial Sequence
  Description of Artificial Sequence: Synthetic oligonucleotide
ugcccaccauuggcauugc

SEQ ID NO: 433678 - RNA, 19 nt, Artificial Sequence
  Description of Artificial Sequence: Synthetic oligonucleotide
cccgccguuuuaugcugcc

SEQ ID NO: 433679 - RNA, 19 nt, Artificial Sequence
  Description of Artificial Sequence: Synthetic oligonucleotide
ggacugaccuuggcccugc

SEQ ID NO: 433680 - RNA, 19 nt, Artificial Sequence
  Description of Artificial Sequence: Synthetic oligonucleotide
gagccacuaguaggaauau

SEQ ID NO: 433681 - RNA, 19 nt, Artificial Sequence
  Description of Artificial Sequence: Synthetic oligonucleotide
ccgcaagagcuuugggguc

SEQ ID NO: 433682 - RNA, 19 nt, Artificial Sequence
  Description of Artificial Sequence: Synthetic oligonucleotide
gcaccguuccagacacaag

SEQ ID NO: 433683 - RNA, 19 nt, Artificial Sequence
  Description of Artificial Sequence: Synthetic oligonucleotide
gcugacucaccaacugaaa

SEQ ID NO: 433684 - RNA, 19 nt, Artificial Sequence
  Description of Artificial Sequence: Synthetic oligonucleotide
ccauuagcugacucaccaa

SEQ ID NO: 433685 - RNA, 19 nt, Artificial Sequence
  Description of Artificial Sequence: Synthetic oligonucleotide
ggcacgucgcagccgucuc

SEQ ID NO: 433686 - RNA, 19 nt, Artificial Sequence
  Description of Artificial Sequence: Synthetic oligonucleotide
cuuguugagugggccccaa

SEQ ID NO: 433687 - RNA, 19 nt, Artificial Sequence
  Description of Artificial Sequence: Synthetic oligonucleotide
cuacccaugucuggaguau

SEQ ID NO: 433688 - RNA, 19 nt, Artificial Sequence
  Description of Artificial Sequence: Synthetic oligonucleotide
cauccgucucaugcucaca

SEQ ID NO: 433689 - RNA, 19 nt, Artificial Sequence
  Description of Artificial Sequence: Synthetic oligonucleotide
gucaggguccagccuuggu

SEQ ID NO: 433690 - RNA, 19 nt, Artificial Sequence
  Description of Artificial Sequence: Synthetic oligonucleotide
ggagugauggugaguuggu

SEQ ID NO: 433691 - RNA, 19 nt, Artificial Sequence
  Description of Artificial Sequence: Synthetic oligonucleotide
gaacagggagggaucgcuu

SEQ ID NO: 433692 - RNA, 19 nt, Artificial Sequence
  Description of Artificial Sequence: Synthetic oligonucleotide
gccguuuuaugcugccagu

SEQ ID NO: 433693 - RNA, 19 nt, Artificial Sequence
  Description of Artificial Sequence: Synthetic oligonucleotide
gacuagcuggugccucuuu

SEQ ID NO: 433694 - RNA, 19 nt, Artificial Sequence
  Description of Artificial Sequence: Synthetic oligonucleotide
ggaguuugcucugccugcu

SEQ ID NO: 433695 - RNA, 19 nt, Artificial Sequence
  Description of Artificial Sequence: Synthetic oligonucleotide
ggcgccgacuggcaggggu

SEQ ID NO: 433696 - RNA, 19 nt, Artificial Sequence
  Description of Artificial Sequence: Synthetic oligonucleotide
ccgggcaccguuccagaca

SEQ ID NO: 433697 - RNA, 19 nt, Artificial Sequence
  Description of Artificial Sequence: Synthetic oligonucleotide
gcgccgacuggcaggggug

SEQ ID NO: 433698 - RNA, 19 nt, Artificial Sequence
  Description of Artificial Sequence: Synthetic oligonucleotide
cccugaacgauggcaggca

SEQ ID NO: 433699 - RNA, 19 nt, Artificial Sequence
  Description of Artificial Sequence: Synthetic oligonucleotide
cguccucugaagacuagcu

SEQ ID NO: 433700 - RNA, 19 nt, Artificial Sequence
  Description of Artificial Sequence: Synthetic oligonucleotide
gucgccuggcaggcacaca

SEQ ID NO: 433701 - RNA, 19 nt, Artificial Sequence
  Description of Artificial Sequence: Synthetic oligonucleotide
ggucggcuccacucugacu

SEQ ID NO: 433702 - RNA, 19 nt, Artificial Sequence
  Description of Artificial Sequence: Synthetic oligonucleotide
auacugccgggcagcccuu

SEQ ID NO: 433703 - RNA, 19 nt, Artificial Sequence
  Description of Artificial Sequence: Synthetic oligonucleotide
ccugggucggcuccacucu

SEQ ID NO: 433704 - RNA, 19 nt, Artificial Sequence
  Description of Artificial Sequence: Synthetic oligonucleotide
ccuugacuccccuggcagu

SEQ ID NO: 433705 - RNA, 19 nt, Artificial Sequence
  Description of Artificial Sequence: Synthetic oligonucleotide
aggcgccgacuggcagggg

SEQ ID NO: 433706 - RNA, 19 nt, Artificial Sequence
  Description of Artificial Sequence: Synthetic oligonucleotide
gagucagguuggaggccuu

SEQ ID NO: 433707 - RNA, 19 nt, Artificial Sequence
  Description of Artificial Sequence: Synthetic oligonucleotide
ccucuuuguucuggagucu

SEQ ID NO: 433708 - RNA, 19 nt, Artificial Sequence
  Description of Artificial Sequence: Synthetic oligonucleotide
ggcaaagcucgggguggcu

SEQ ID NO: 433709 - RNA, 19 nt, Artificial Sequence
  Description of Artificial Sequence: Synthetic oligonucleotide
ccgccguuuuaugcugcca

SEQ ID NO: 433710 - RNA, 19 nt, Artificial Sequence
  Description of Artificial Sequence: Synthetic oligonucleotide
gcuccccaagagaggcugu

SEQ ID NO: 433711 - RNA, 19 nt, Artificial Sequence
  Description of Artificial Sequence: Synthetic oligonucleotide
ccccucucgccuggaugga

SEQ ID NO: 433712 - RNA, 19 nt, Artificial Sequence
  Description of Artificial Sequence: Synthetic oligonucleotide
auuauuaggauguacaggc

SEQ ID NO: 433713 - RNA, 19 nt, Artificial Sequence
  Description of Artificial Sequence: Synthetic oligonucleotide
uauaauaagaagcagcagg

SEQ ID NO: 433714 - RNA, 19 nt, Artificial Sequence
  Description of Artificial Sequence: Synthetic oligonucleotide
uuaaaguaggcauugacgg

SEQ ID NO: 433715 - RNA, 19 nt, Artificial Sequence
  Description of Artificial Sequence: Synthetic oligonucleotide
ucuaacaagauccaaauga

SEQ ID NO: 433716 - RNA, 19 nt, Artificial Sequence
  Description of Artificial Sequence: Synthetic oligonucleotide
agauguuuugaacacaucc

SEQ ID NO: 433717 - RNA, 19 nt, Artificial Sequence
  Description of Artificial Sequence: Synthetic oligonucleotide
aacucaauuagauugagcu

SEQ ID NO: 433718 - RNA, 19 nt, Artificial Sequence
  Description of Artificial Sequence: Synthetic oligonucleotide
ugaguuaacauucaaaacu

SEQ ID NO: 433719 - RNA, 19 nt, Artificial Sequence
  Description of Artificial Sequence: Synthetic oligonucleotide
ugaauauugcauuugauca

SEQ ID NO: 433720 - RNA, 19 nt, Artificial Sequence
  Description of Artificial Sequence: Synthetic oligonucleotide
acauaacucaauuagauug

SEQ ID NO: 433721 - RNA, 19 nt, Artificial Sequence
  Description of Artificial Sequence: Synthetic oligonucleotide
aacuuauggaacuucaaag

SEQ ID NO: 433722 - RNA, 19 nt, Artificial Sequence
  Description of Artificial Sequence: Synthetic oligonucleotide
auaccugauacuuuaauac

SEQ ID NO: 433723 - RNA, 19 nt, Artificial Sequence
  Description of Artificial Sequence: Synthetic oligonucleotide
gacucuaaauacuuaaugg

SEQ ID NO: 433724 - RNA, 19 nt, Artificial Sequence
  Description of Artificial Sequence: Synthetic oligonucleotide
acuuauggaacuucaaagc

SEQ ID NO: 433725 - RNA, 19 nt, Artificial Sequence
  Description of Artificial Sequence: Synthetic oligonucleotide
auuaaucccacuuaguuug

SEQ ID NO: 433726 - RNA, 19 nt, Artificial Sequence
  Description of Artificial Sequence: Synthetic oligonucleotide
uucacaauacacuugguag

SEQ ID NO: 433727 - RNA, 19 nt, Artificial Sequence
  Description of Artificial Sequence: Synthetic oligonucleotide
uuaauggaaagcuaaauaa

SEQ ID NO: 433728 - RNA, 19 nt, Artificial Sequence
  Description of Artificial Sequence: Synthetic oligonucleotide
aauaauugcuugcagauuu

SEQ ID NO: 433729 - RNA, 19 nt, Artificial Sequence
  Description of Artificial Sequence: Synthetic oligonucleotide
uuauaauccacucucagau

SEQ ID NO: 433730 - RNA, 19 nt, Artificial Sequence
  Description of Artificial Sequence: Synthetic oligonucleotide
uguuacuacauucuaaccu

SEQ ID NO: 433731 - RNA, 19 nt, Artificial Sequence
  Description of Artificial Sequence: Synthetic oligonucleotide
aaauuuacguuguuuauau

SEQ ID NO: 433732 - RNA, 19 nt, Artificial Sequence
  Description of Artificial Sequence: Synthetic oligonucleotide
ucugaguuaacauucaaaa

SEQ ID NO: 433733 - RNA, 19 nt, Artificial Sequence
  Description of Artificial Sequence: Synthetic oligonucleotide
aauuagauugagcucugag

SEQ ID NO: 433734 - RNA, 19 nt, Artificial Sequence
  Description of Artificial Sequence: Synthetic oligonucleotide
gacaguaacagcuugcaug

SEQ ID NO: 433735 - RNA, 19 nt, Artificial Sequence
  Description of Artificial Sequence: Synthetic oligonucleotide
aaacgaaggggucccaagc

SEQ ID NO: 433736 - RNA, 19 nt, Artificial Sequence
  Description of Artificial Sequence: Synthetic oligonucleotide
ucuguagauguuuugaaca

SEQ ID NO: 433737 - RNA, 19 nt, Artificial Sequence
  Description of Artificial Sequence: Synthetic oligonucleotide
uguuggaaagcacacuagg

SEQ ID NO: 433738 - RNA, 19 nt, Artificial Sequence
  Description of Artificial Sequence: Synthetic oligonucleotide
uucucauuggguaaagaag

SEQ ID NO: 433739 - RNA, 19 nt, Artificial Sequence
  Description of Artificial Sequence: Synthetic oligonucleotide
uuuacguuguuuauauuca

SEQ ID NO: 433740 - RNA, 19 nt, Artificial Sequence
  Description of Artificial Sequence: Synthetic oligonucleotide
gacggauucuguaagagcg

SEQ ID NO: 433741 - RNA, 19 nt, Artificial Sequence
  Description of Artificial Sequence: Synthetic oligonucleotide
auaucuacucccgagaggg

SEQ ID NO: 433742 - RNA, 19 nt, Artificial Sequence
  Description of Artificial Sequence: Synthetic oligonucleotide
uuagauugagcucugaguu

SEQ ID NO: 433743 - RNA, 19 nt, Artificial Sequence
  Description of Artificial Sequence: Synthetic oligonucleotide
ucacaauacacuugguagg

SEQ ID NO: 433744 - RNA, 19 nt, Artificial Sequence
  Description of Artificial Sequence: Synthetic oligonucleotide
aauaucuacucccgagagg

SEQ ID NO: 433745 - RNA, 19 nt, Artificial Sequence
  Description of Artificial Sequence: Synthetic oligonucleotide
gauauugucacgucuccag

SEQ ID NO: 433746 - RNA, 19 nt, Artificial Sequence
  Description of Artificial Sequence: Synthetic oligonucleotide
cuggguauuucauuaaucc

SEQ ID NO: 433747 - RNA, 19 nt, Artificial Sequence
  Description of Artificial Sequence: Synthetic oligonucleotide
ugcauuugaucauuaauca

SEQ ID NO: 433748 - RNA, 19 nt, Artificial Sequence
  Description of Artificial Sequence: Synthetic oligonucleotide
gauuauuaggauguacagg

SEQ ID NO: 433749 - RNA, 19 nt, Artificial Sequence
  Description of Artificial Sequence: Synthetic oligonucleotide
ucccagauaauuuccaaag

SEQ ID NO: 433750 - RNA, 19 nt, Artificial Sequence
  Description of Artificial Sequence: Synthetic oligonucleotide
uugaucuggaauaagcuuc

SEQ ID NO: 433751 - RNA, 19 nt, Artificial Sequence
  Description of Artificial Sequence: Synthetic oligonucleotide
cagauaauuuccaaagggc

SEQ ID NO: 433752 - RNA, 19 nt, Artificial Sequence
  Description of Artificial Sequence: Synthetic oligonucleotide
agauuauuaggauguacag

SEQ ID NO: 433753 - RNA, 19 nt, Artificial Sequence
  Description of Artificial Sequence: Synthetic oligonucleotide
cuaaccuuuguacaaacac

SEQ ID NO: 433754 - RNA, 19 nt, Artificial Sequence
  Description of Artificial Sequence: Synthetic oligonucleotide
ucuccgaaaucccagauaa

SEQ ID NO: 433755 - RNA, 19 nt, Artificial Sequence
  Description of Artificial Sequence: Synthetic oligonucleotide
auuagauugagcucugagu

SEQ ID NO: 433756 - RNA, 19 nt, Artificial Sequence
  Description of Artificial Sequence: Synthetic oligonucleotide
ucauuaaucccacuuaguu

SEQ ID NO: 433757 - RNA, 19 nt, Artificial Sequence
  Description of Artificial Sequence: Synthetic oligonucleotide
gaugauccaaacgaagggg

SEQ ID NO: 433758 - RNA, 19 nt, Artificial Sequence
  Description of Artificial Sequence: Synthetic oligonucleotide
aacaagauccaaaugacaa

SEQ ID NO: 433759 - RNA, 19 nt, Artificial Sequence
  Description of Artificial Sequence: Synthetic oligonucleotide
ucacuaagaaauugcacug

SEQ ID NO: 433760 - RNA, 19 nt, Artificial Sequence
  Description of Artificial Sequence: Synthetic oligonucleotide
aaugacucacuuugaaagu

SEQ ID NO: 433761 - RNA, 19 nt, Artificial Sequence
  Description of Artificial Sequence: Synthetic oligonucleotide
agguccaucaacaaucagc

SEQ ID NO: 433762 - RNA, 19 nt, Artificial Sequence
  Description of Artificial Sequence: Synthetic oligonucleotide
uaaccuuuguacaaacaca

SEQ ID NO: 433763 - RNA, 19 nt, Artificial Sequence
  Description of Artificial Sequence: Synthetic oligonucleotide
aauuugcuaauuucucugu

SEQ ID NO: 433764 - RNA, 19 nt, Artificial Sequence
  Description of Artificial Sequence: Synthetic oligonucleotide
uguauguuggaaagcacac

SEQ ID NO: 433765 - RNA, 19 nt, Artificial Sequence
  Description of Artificial Sequence: Synthetic oligonucleotide
gauguuuugaacacauccc

SEQ ID NO: 433766 - RNA, 19 nt, Artificial Sequence
  Description of Artificial Sequence: Synthetic oligonucleotide
auaaccagugccaacuagc

SEQ ID NO: 433767 - RNA, 19 nt, Artificial Sequence
  Description of Artificial Sequence: Synthetic oligonucleotide
uucacccuaaagcacagca

SEQ ID NO: 433768 - RNA, 19 nt, Artificial Sequence
  Description of Artificial Sequence: Synthetic oligonucleotide
uuucucauuggguaaagaa

SEQ ID NO: 433769 - RNA, 19 nt, Artificial Sequence
  Description of Artificial Sequence: Synthetic oligonucleotide
aacgcuucuuuacuaaaga

SEQ ID NO: 433770 - RNA, 19 nt, Artificial Sequence
  Description of Artificial Sequence: Synthetic oligonucleotide
uugagguagacaguaacag

SEQ ID NO: 433771 - RNA, 19 nt, Artificial Sequence
  Description of Artificial Sequence: Synthetic oligonucleotide
uuuggaaagaacaggugau

SEQ ID NO: 433772 - RNA, 19 nt, Artificial Sequence
  Description of Artificial Sequence: Synthetic oligonucleotide
acuuauaauccacucucag

SEQ ID NO: 433773 - RNA, 19 nt, Artificial Sequence
  Description of Artificial Sequence: Synthetic oligonucleotide
ugauggaucacugaacaca

SEQ ID NO: 433774 - RNA, 19 nt, Artificial Sequence
  Description of Artificial Sequence: Synthetic oligonucleotide
auuaaucauuacuguguac

SEQ ID NO: 433775 - RNA, 19 nt, Artificial Sequence
  Description of Artificial Sequence: Synthetic oligonucleotide
aauugcuugcagauuucgc

SEQ ID NO: 433776 - RNA, 19 nt, Artificial Sequence
  Description of Artificial Sequence: Synthetic oligonucleotide
gauuuagaggaguggacug

SEQ ID NO: 433777 - RNA, 19 nt, Artificial Sequence
  Description of Artificial Sequence: Synthetic oligonucleotide
agaaauugcacugcaagug

SEQ ID NO: 433778 - RNA, 19 nt, Artificial Sequence
  Description of Artificial Sequence: Synthetic oligonucleotide
ugaagacuuuaauaauucc

SEQ ID NO: 433779 - RNA, 19 nt, Artificial Sequence
  Description of Artificial Sequence: Synthetic oligonucleotide
gaugaauuccgauucaucu

SEQ ID NO: 433780 - RNA, 19 nt, Artificial Sequence
  Description of Artificial Sequence: Synthetic oligonucleotide
uauaaccagugccaacuag

SEQ ID NO: 433781 - RNA, 19 nt, Artificial Sequence
  Description of Artificial Sequence: Synthetic oligonucleotide
ugcuggguccuucugaaag

SEQ ID NO: 433782 - RNA, 19 nt, Artificial Sequence
  Description of Artificial Sequence: Synthetic oligonucleotide
aagcacacuaggugcgacc

SEQ ID NO: 433783 - RNA, 19 nt, Artificial Sequence
  Description of Artificial Sequence: Synthetic oligonucleotide
gaagagauagaagaagaac

SEQ ID NO: 433784 - RNA, 19 nt, Artificial Sequence
  Description of Artificial Sequence: Synthetic oligonucleotide
auuugcucgagucugcuga

SEQ ID NO: 433785 - RNA, 19 nt, Artificial Sequence
  Description of Artificial Sequence: Synthetic oligonucleotide
caauuugcuaauuucucug

SEQ ID NO: 433786 - RNA, 19 nt, Artificial Sequence
  Description of Artificial Sequence: Synthetic oligonucleotide
uucauuagaugaauuccga

SEQ ID NO: 433787 - RNA, 19 nt, Artificial Sequence
  Description of Artificial Sequence: Synthetic oligonucleotide
aagcugugaauuuggaaga

SEQ ID NO: 433788 - RNA, 19 nt, Artificial Sequence
  Description of Artificial Sequence: Synthetic oligonucleotide
aaauuuugcucugagggau

SEQ ID NO: 433789 - RNA, 19 nt, Artificial Sequence
  Description of Artificial Sequence: Synthetic oligonucleotide
acucaauuagauugagcuc

SEQ ID NO: 433790 - RNA, 19 nt, Artificial Sequence
  Description of Artificial Sequence: Synthetic oligonucleotide
ucuugagguagacaguaac

SEQ ID NO: 433791 - RNA, 19 nt, Artificial Sequence
  Description of Artificial Sequence: Synthetic oligonucleotide
acaauuugcuaauuucucu

SEQ ID NO: 433792 - RNA, 19 nt, Artificial Sequence
  Description of Artificial Sequence: Synthetic oligonucleotide
cacuuaguuugccugaagg

SEQ ID NO: 433793 - RNA, 19 nt, Artificial Sequence
  Description of Artificial Sequence: Synthetic oligonucleotide
cucaauaucuacucccgag

SEQ ID NO: 433794 - RNA, 19 nt, Artificial Sequence
  Description of Artificial Sequence: Synthetic oligonucleotide
aauacacuugguaggaucu

SEQ ID NO: 433795 - RNA, 19 nt, Artificial Sequence
  Description of Artificial Sequence: Synthetic oligonucleotide
aaucauuacuguguacaag

SEQ ID NO: 433796 - RNA, 19 nt, Artificial Sequence
  Description of Artificial Sequence: Synthetic oligonucleotide
aaaauaguguuuggaaaga

SEQ ID NO: 433797 - RNA, 19 nt, Artificial Sequence
  Description of Artificial Sequence: Synthetic oligonucleotide
uggguauuucauuaauccc

SEQ ID NO: 433798 - RNA, 19 nt, Artificial Sequence
  Description of Artificial Sequence: Synthetic oligonucleotide
uauuaauuccuguaauuuu

SEQ ID NO: 433799 - RNA, 19 nt, Artificial Sequence
  Description of Artificial Sequence: Synthetic oligonucleotide
cuuggagguggaacgaugg

SEQ ID NO: 433800 - RNA, 19 nt, Artificial Sequence
  Description of Artificial Sequence: Synthetic oligonucleotide
gaacaggugaugcagugac

SEQ ID NO: 433801 - RNA, 19 nt, Artificial Sequence
  Description of Artificial Sequence: Synthetic oligonucleotide
aacaaucagccaaguaucg

SEQ ID NO: 433802 - RNA, 19 nt, Artificial Sequence
  Description of Artificial Sequence: Synthetic oligonucleotide
uguuuggaaagaacaggug

SEQ ID NO: 433803 - RNA, 19 nt, Artificial Sequence
  Description of Artificial Sequence: Synthetic oligonucleotide
ugauuuuguuaacucuuca

SEQ ID NO: 433804 - RNA, 19 nt, Artificial Sequence
  Description of Artificial Sequence: Synthetic oligonucleotide
ucguccaguggcaaaacgc

SEQ ID NO: 433805 - RNA, 19 nt, Artificial Sequence
  Description of Artificial Sequence: Synthetic oligonucleotide
uuauaauaagaagcagcag

SEQ ID NO: 433806 - RNA, 19 nt, Artificial Sequence
  Description of Artificial Sequence: Synthetic oligonucleotide
uugaucucuauccgguacc

SEQ ID NO: 433807 - RNA, 19 nt, Artificial Sequence
  Description of Artificial Sequence: Synthetic oligonucleotide
aaaguaggcauugacggau

SEQ ID NO: 433808 - RNA, 19 nt, Artificial Sequence
  Description of Artificial Sequence: Synthetic oligonucleotide
acauucuaaccuuuguaca

SEQ ID NO: 433809 - RNA, 19 nt, Artificial Sequence
  Description of Artificial Sequence: Synthetic oligonucleotide
aaagcuaucucugacucua

SEQ ID NO: 433810 - RNA, 19 nt, Artificial Sequence
  Description of Artificial Sequence: Synthetic oligonucleotide
uggaaaugauauugucacg

SEQ ID NO: 433811 - RNA, 19 nt, Artificial Sequence
  Description of Artificial Sequence: Synthetic oligonucleotide
uggggauaguguuauauuc

SEQ ID NO: 433812 - RNA, 19 nt, Artificial Sequence
  Description of Artificial Sequence: Synthetic oligonucleotide
uauugucacgucuccagug

SEQ ID NO: 433813 - RNA, 19 nt, Artificial Sequence
  Description of Artificial Sequence: Synthetic oligonucleotide
ccaaguaucguccaguggc

SEQ ID NO: 433814 - RNA, 19 nt, Artificial Sequence
  Description of Artificial Sequence: Synthetic oligonucleotide
uggaaagcuaaauaauuuu

SEQ ID NO: 433815 - RNA, 19 nt, Artificial Sequence
  Description of Artificial Sequence: Synthetic oligonucleotide
gucccaagcaaguaaauca

SEQ ID NO: 433816 - RNA, 19 nt, Artificial Sequence
  Description of Artificial Sequence: Synthetic oligonucleotide
acugugauggaucacugaa

SEQ ID NO: 433817 - RNA, 19 nt, Artificial Sequence
  Description of Artificial Sequence: Synthetic oligonucleotide
ucccucacuaagaaauugc

SEQ ID NO: 433818 - RNA, 19 nt, Artificial Sequence
  Description of Artificial Sequence: Synthetic oligonucleotide
ucugauuaccuauggcaca

SEQ ID NO: 433819 - RNA, 19 nt, Artificial Sequence
  Description of Artificial Sequence: Synthetic oligonucleotide
uguaagagcgauugccaca

SEQ ID NO: 433820 - RNA, 19 nt, Artificial Sequence
  Description of Artificial Sequence: Synthetic oligonucleotide
auuucauuaaucccacuua

SEQ ID NO: 433821 - RNA, 19 nt, Artificial Sequence
  Description of Artificial Sequence: Synthetic oligonucleotide
uaacucaauuagauugagc

SEQ ID NO: 433822 - RNA, 19 nt, Artificial Sequence
  Description of Artificial Sequence: Synthetic oligonucleotide
uuguuacuacauucuaacc

SEQ ID NO: 433823 - RNA, 19 nt, Artificial Sequence
  Description of Artificial Sequence: Synthetic oligonucleotide
uggguaaagaagauggcuu

SEQ ID NO: 433824 - RNA, 19 nt, Artificial Sequence
  Description of Artificial Sequence: Synthetic oligonucleotide
ugagacuuuacuugcuccu

SEQ ID NO: 433825 - RNA, 19 nt, Artificial Sequence
  Description of Artificial Sequence: Synthetic oligonucleotide
cuauggagacuuuaaguuc

SEQ ID NO: 433826 - RNA, 19 nt, Artificial Sequence
  Description of Artificial Sequence: Synthetic oligonucleotide
aguacguugcaagauuuag

SEQ ID NO: 433827 - RNA, 19 nt, Artificial Sequence
  Description of Artificial Sequence: Synthetic oligonucleotide
uucauuaaucccacuuagu

SEQ ID NO: 433828 - RNA, 19 nt, Artificial Sequence
  Description of Artificial Sequence: Synthetic oligonucleotide
uccuuuauuaauuccugua

SEQ ID NO: 433829 - RNA, 19 nt, Artificial Sequence
  Description of Artificial Sequence: Synthetic oligonucleotide
uuugaacacaucccacacu

SEQ ID NO: 433830 - RNA, 19 nt, Artificial Sequence
  Description of Artificial Sequence: Synthetic oligonucleotide
ugugguacuggcacuacau

SEQ ID NO: 433831 - RNA, 19 nt, Artificial Sequence
  Description of Artificial Sequence: Synthetic oligonucleotide
uacuuauaauccacucuca

SEQ ID NO: 433832 - RNA, 19 nt, Artificial Sequence
  Description of Artificial Sequence: Synthetic oligonucleotide
uauccgguaccucuuuggc

SEQ ID NO: 433833 - RNA, 19 nt, Artificial Sequence
  Description of Artificial Sequence: Synthetic oligonucleotide
uguagucagcuuucaaaga

SEQ ID NO: 433834 - RNA, 19 nt, Artificial Sequence
  Description of Artificial Sequence: Synthetic oligonucleotide
uccauauugcaggggaggg

SEQ ID NO: 433835 - RNA, 19 nt, Artificial Sequence
  Description of Artificial Sequence: Synthetic oligonucleotide
gauugccacagguaaggug

SEQ ID NO: 433836 - RNA, 19 nt, Artificial Sequence
  Description of Artificial Sequence: Synthetic oligonucleotide
aguuagugaagcugaagau

SEQ ID NO: 433837 - RNA, 19 nt, Artificial Sequence
  Description of Artificial Sequence: Synthetic oligonucleotide
guaagagcgauugccacag

SEQ ID NO: 433838 - RNA, 19 nt, Artificial Sequence
  Description of Artificial Sequence: Synthetic oligonucleotide
cuauccgguaccucuuugg

SEQ ID NO: 433839 - RNA, 19 nt, Artificial Sequence
  Description of Artificial Sequence: Synthetic oligonucleotide
acuaggugcgaccauggcu

SEQ ID NO: 433840 - RNA, 19 nt, Artificial Sequence
  Description of Artificial Sequence: Synthetic oligonucleotide
ucaauuagauugagcucug

SEQ ID NO: 433841 - RNA, 19 nt, Artificial Sequence
  Description of Artificial Sequence: Synthetic oligonucleotide
uccgguaccucuuuggcuc

SEQ ID NO: 433842 - RNA, 19 nt, Artificial Sequence
  Description of Artificial Sequence: Synthetic oligonucleotide
cuuauaauccacucucaga

SEQ ID NO: 433843 - RNA, 19 nt, Artificial Sequence
  Description of Artificial Sequence: Synthetic oligonucleotide
uacuacauucuaaccuuug

SEQ ID NO: 433844 - RNA, 19 nt, Artificial Sequence
  Description of Artificial Sequence: Synthetic oligonucleotide
uguguggugcagauuauua

SEQ ID NO: 433845 - RNA, 19 nt, Artificial Sequence
  Description of Artificial Sequence: Synthetic oligonucleotide
caauacacuugguaggauc

SEQ ID NO: 433846 - RNA, 19 nt, Artificial Sequence
  Description of Artificial Sequence: Synthetic oligonucleotide
cauaacucaauuagauuga

SEQ ID NO: 433847 - RNA, 19 nt, Artificial Sequence
  Description of Artificial Sequence: Synthetic oligonucleotide
agacuuuaaguucauccaa

SEQ ID NO: 433848 - RNA, 19 nt, Artificial Sequence
  Description of Artificial Sequence: Synthetic oligonucleotide
cauugacggauucuguaag

SEQ ID NO: 433849 - RNA, 19 nt, Artificial Sequence
  Description of Artificial Sequence: Synthetic oligonucleotide
uucccuugagaaaaccgcu

SEQ ID NO: 433850 - RNA, 19 nt, Artificial Sequence
  Description of Artificial Sequence: Synthetic oligonucleotide
ugacggauucuguaagagc

SEQ ID NO: 433851 - RNA, 19 nt, Artificial Sequence
  Description of Artificial Sequence: Synthetic oligonucleotide
ugaugcagugacagguuug

SEQ ID NO: 433852 - RNA, 19 nt, Artificial Sequence
  Description of Artificial Sequence: Synthetic oligonucleotide
ggucugauuaccuauggca

SEQ ID NO: 433853 - RNA, 19 nt, Artificial Sequence
  Description of Artificial Sequence: Synthetic oligonucleotide
uggacugcuuccagggucc

SEQ ID NO: 433854 - RNA, 19 nt, Artificial Sequence
  Description of Artificial Sequence: Synthetic oligonucleotide
gacaauuugcuaauuucuc

SEQ ID NO: 433855 - RNA, 19 nt, Artificial Sequence
  Description of Artificial Sequence: Synthetic oligonucleotide
auuucgcuaguuuugucau

SEQ ID NO: 433856 - RNA, 19 nt, Artificial Sequence
  Description of Artificial Sequence: Synthetic oligonucleotide
ugcuugcagauuucgcuag

SEQ ID NO: 433857 - RNA, 19 nt, Artificial Sequence
  Description of Artificial Sequence: Synthetic oligonucleotide
caagcugugaauaauugcu

SEQ ID NO: 433858 - RNA, 19 nt, Artificial Sequence
  Description of Artificial Sequence: Synthetic oligonucleotide
ucauuagaugaauuccgau

SEQ ID NO: 433859 - RNA, 19 nt, Artificial Sequence
  Description of Artificial Sequence: Synthetic oligonucleotide
uuccuguaauuuucuaaca

SEQ ID NO: 433860 - RNA, 19 nt, Artificial Sequence
  Description of Artificial Sequence: Synthetic oligonucleotide
agagaugauccaaacgaag

SEQ ID NO: 433861 - RNA, 19 nt, Artificial Sequence
  Description of Artificial Sequence: Synthetic oligonucleotide
uccgaaaucccagauaauu

SEQ ID NO: 433862 - RNA, 19 nt, Artificial Sequence
  Description of Artificial Sequence: Synthetic oligonucleotide
auacuuaauggaaagcuaa

SEQ ID NO: 433863 - RNA, 19 nt, Artificial Sequence
  Description of Artificial Sequence: Synthetic oligonucleotide
guucccuugagaaaaccgc

SEQ ID NO: 433864 - RNA, 19 nt, Artificial Sequence
  Description of Artificial Sequence: Synthetic oligonucleotide
auaacucaauuagauugag

SEQ ID NO: 433865 - RNA, 19 nt, Artificial Sequence
  Description of Artificial Sequence: Synthetic oligonucleotide
ucccaagcaaguaaaucau

SEQ ID NO: 433866 - RNA, 19 nt, Artificial Sequence
  Description of Artificial Sequence: Synthetic oligonucleotide
ugcucgagucugcugaugu

SEQ ID NO: 433867 - RNA, 19 nt, Artificial Sequence
  Description of Artificial Sequence: Synthetic oligonucleotide
agaaaaccgcuuuccaggu

SEQ ID NO: 433868 - RNA, 19 nt, Artificial Sequence
  Description of Artificial Sequence: Synthetic oligonucleotide
cuaucucugacucuaaaua

SEQ ID NO: 433869 - RNA, 19 nt, Artificial Sequence
  Description of Artificial Sequence: Synthetic oligonucleotide
auccaaacgaagggguccc

SEQ ID NO: 433870 - RNA, 19 nt, Artificial Sequence
  Description of Artificial Sequence: Synthetic oligonucleotide
ggugccuauacaaagagga

SEQ ID NO: 433871 - RNA, 19 nt, Artificial Sequence
  Description of Artificial Sequence: Synthetic oligonucleotide
uggucugauuaccuauggc

SEQ ID NO: 433872 - RNA, 19 nt, Artificial Sequence
  Description of Artificial Sequence: Synthetic oligonucleotide
cacaccuacuguuggagug

SEQ ID NO: 433873 - RNA, 19 nt, Artificial Sequence
  Description of Artificial Sequence: Synthetic oligonucleotide
uauugcauuugaucauuaa

SEQ ID NO: 433874 - RNA, 19 nt, Artificial Sequence
  Description of Artificial Sequence: Synthetic oligonucleotide
ggguauuucccucacuaag

SEQ ID NO: 433875 - RNA, 19 nt, Artificial Sequence
  Description of Artificial Sequence: Synthetic oligonucleotide
gaccccgugacacaccuac

SEQ ID NO: 433876 - RNA, 19 nt, Artificial Sequence
  Description of Artificial Sequence: Synthetic oligonucleotide
gauuaccuauggcacauaa

SEQ ID NO: 433877 - RNA, 19 nt, Artificial Sequence
  Description of Artificial Sequence: Synthetic oligonucleotide
auugacggauucuguaaga

SEQ ID NO: 433878 - RNA, 19 nt, Artificial Sequence
  Description of Artificial Sequence: Synthetic oligonucleotide
aucguccaguggcaaaacg

SEQ ID NO: 433879 - RNA, 19 nt, Artificial Sequence
  Description of Artificial Sequence: Synthetic oligonucleotide
ucacccuaaagcacagcac

SEQ ID NO: 433880 - RNA, 19 nt, Artificial Sequence
  Description of Artificial Sequence: Synthetic oligonucleotide
uccaaaugacaauuugcua

SEQ ID NO: 433881 - RNA, 19 nt, Artificial Sequence
  Description of Artificial Sequence: Synthetic oligonucleotide
agaugaauuccgauucauc

SEQ ID NO: 433882 - RNA, 19 nt, Artificial Sequence
  Description of Artificial Sequence: Synthetic oligonucleotide
ugcuaauuucucuguagau

SEQ ID NO: 433883 - RNA, 19 nt, Artificial Sequence
  Description of Artificial Sequence: Synthetic oligonucleotide
cucaauuagauugagcucu

SEQ ID NO: 433884 - RNA, 19 nt, Artificial Sequence
  Description of Artificial Sequence: Synthetic oligonucleotide
cauucuaaccuuuguacaa

SEQ ID NO: 433885 - RNA, 19 nt, Artificial Sequence
  Description of Artificial Sequence: Synthetic oligonucleotide
gaaauugcacugcaagugu

SEQ ID NO: 433886 - RNA, 19 nt, Artificial Sequence
  Description of Artificial Sequence: Synthetic oligonucleotide
ucugagggauccagaaccu

SEQ ID NO: 433887 - RNA, 19 nt, Artificial Sequence
  Description of Artificial Sequence: Synthetic oligonucleotide
gaggguauuucccucacua

SEQ ID NO: 433888 - RNA, 19 nt, Artificial Sequence
  Description of Artificial Sequence: Synthetic oligonucleotide
auuugaucauuaaucauua

SEQ ID NO: 433889 - RNA, 19 nt, Artificial Sequence
  Description of Artificial Sequence: Synthetic oligonucleotide
uaauccacucucagaucug

SEQ ID NO: 433890 - RNA, 19 nt, Artificial Sequence
  Description of Artificial Sequence: Synthetic oligonucleotide
uccaaagggcuuucauuug

SEQ ID NO: 433891 - RNA, 19 nt, Artificial Sequence
  Description of Artificial Sequence: Synthetic oligonucleotide
uccaguacguugcaagauu

SEQ ID NO: 433892 - RNA, 19 nt, Artificial Sequence
  Description of Artificial Sequence: Synthetic oligonucleotide
uuggaaguuacaggugggc

SEQ ID NO: 433893 - RNA, 19 nt, Artificial Sequence
  Description of Artificial Sequence: Synthetic oligonucleotide
aauccacucucagaucugu

SEQ ID NO: 433894 - RNA, 19 nt, Artificial Sequence
  Description of Artificial Sequence: Synthetic oligonucleotide
ggaacgauggugccuauac

SEQ ID NO: 433895 - RNA, 19 nt, Artificial Sequence
  Description of Artificial Sequence: Synthetic oligonucleotide
ucucagaucugugguacug

SEQ ID NO: 433896 - RNA, 19 nt, Artificial Sequence
  Description of Artificial Sequence: Synthetic oligonucleotide
uggcacuacauuuccagua

SEQ ID NO: 433897 - RNA, 19 nt, Artificial Sequence
  Description of Artificial Sequence: Synthetic oligonucleotide
agacuuuacuugcuccucu

SEQ ID NO: 433898 - RNA, 19 nt, Artificial Sequence
  Description of Artificial Sequence: Synthetic oligonucleotide
ucccgagaggguauuuccc

SEQ ID NO: 433899 - RNA, 19 nt, Artificial Sequence
  Description of Artificial Sequence: Synthetic oligonucleotide
cucccgagaggguauuucc

SEQ ID NO: 433900 - RNA, 19 nt, Artificial Sequence
  Description of Artificial Sequence: Synthetic oligonucleotide
cuuaguuugccugaaggaa

SEQ ID NO: 433901 - RNA, 19 nt, Artificial Sequence
  Description of Artificial Sequence: Synthetic oligonucleotide
ugaugauaccugauacuuu

SEQ ID NO: 433902 - RNA, 19 nt, Artificial Sequence
  Description of Artificial Sequence: Synthetic oligonucleotide
acacuuggaauuguaauuu

SEQ ID NO: 433903 - RNA, 19 nt, Artificial Sequence
  Description of Artificial Sequence: Synthetic oligonucleotide
cacccuaaagcacagcaca

SEQ ID NO: 433904 - RNA, 19 nt, Artificial Sequence
  Description of Artificial Sequence: Synthetic oligonucleotide
gagcgauugccacagguaa

SEQ ID NO: 433905 - RNA, 19 nt, Artificial Sequence
  Description of Artificial Sequence: Synthetic oligonucleotide
ugauauugucacgucucca

SEQ ID NO: 433906 - RNA, 19 nt, Artificial Sequence
  Description of Artificial Sequence: Synthetic oligonucleotide
uugcuugcagauuucgcua

SEQ ID NO: 433907 - RNA, 19 nt, Artificial Sequence
  Description of Artificial Sequence: Synthetic oligonucleotide
uuuagaggaguggacugaa

SEQ ID NO: 433908 - RNA, 19 nt, Artificial Sequence
  Description of Artificial Sequence: Synthetic oligonucleotide
ugacuccuccauccacugg

SEQ ID NO: 433909 - RNA, 19 nt, Artificial Sequence
  Description of Artificial Sequence: Synthetic oligonucleotide
ugcgaccauggcuucuggg

SEQ ID NO: 433910 - RNA, 19 nt, Artificial Sequence
  Description of Artificial Sequence: Synthetic oligonucleotide
gaagaacucucugcccggg

SEQ ID NO: 433911 - RNA, 19 nt, Artificial Sequence
  Description of Artificial Sequence: Synthetic oligonucleotide
auuuagaggaguggacuga

SEQ ID NO: 433912 - RNA, 19 nt, Artificial Sequence
  Description of Artificial Sequence: Synthetic oligonucleotide
cuuuacuugcuccucucca

SEQ ID NO: 433913 - RNA, 19 nt, Artificial Sequence
  Description of Artificial Sequence: Synthetic oligonucleotide
uguacaggcuugaucucua

SEQ ID NO: 433914 - RNA, 19 nt, Artificial Sequence
  Description of Artificial Sequence: Synthetic oligonucleotide
ugacacaccuacuguugga

SEQ ID NO: 433915 - RNA, 19 nt, Artificial Sequence
  Description of Artificial Sequence: Synthetic oligonucleotide
uuacuacauucuaaccuuu

SEQ ID NO: 433916 - RNA, 19 nt, Artificial Sequence
  Description of Artificial Sequence: Synthetic oligonucleotide
ggaauuguaauuuuccuuu

SEQ ID NO: 433917 - RNA, 19 nt, Artificial Sequence
  Description of Artificial Sequence: Synthetic oligonucleotide
agguuuguuacuacauucu

SEQ ID NO: 433918 - RNA, 19 nt, Artificial Sequence
  Description of Artificial Sequence: Synthetic oligonucleotide
ggagguggaacgauggugc

SEQ ID NO: 433919 - RNA, 19 nt, Artificial Sequence
  Description of Artificial Sequence: Synthetic oligonucleotide
guagcucuuucucuaacaa

SEQ ID NO: 433920 - RNA, 19 nt, Artificial Sequence
  Description of Artificial Sequence: Synthetic oligonucleotide
ggaaagcacacuaggugcg

SEQ ID NO: 433921 - RNA, 19 nt, Artificial Sequence
  Description of Artificial Sequence: Synthetic oligonucleotide
ccuacuguuggaguguugg

SEQ ID NO: 433922 - RNA, 19 nt, Artificial Sequence
  Description of Artificial Sequence: Synthetic oligonucleotide
cuacuguuggaguguuggc

SEQ ID NO: 433923 - RNA, 19 nt, Artificial Sequence
  Description of Artificial Sequence: Synthetic oligonucleotide
gggacugcauauuugugac

SEQ ID NO: 433924 - RNA, 19 nt, Artificial Sequence
  Description of Artificial Sequence: Synthetic oligonucleotide
cucagaucugugguacugg

SEQ ID NO: 433925 - RNA, 19 nt, Artificial Sequence
  Description of Artificial Sequence: Synthetic oligonucleotide
uugccugaaggaagcuuug

SEQ ID NO: 433926 - RNA, 19 nt, Artificial Sequence
  Description of Artificial Sequence: Synthetic oligonucleotide
uaagguguccugguuucca

SEQ ID NO: 433927 - RNA, 19 nt, Artificial Sequence
  Description of Artificial Sequence: Synthetic oligonucleotide
ucuucacaauacacuuggu

SEQ ID NO: 433928 - RNA, 19 nt, Artificial Sequence
  Description of Artificial Sequence: Synthetic oligonucleotide
uagaugaauuccgauucau

SEQ ID NO: 433929 - RNA, 19 nt, Artificial Sequence
  Description of Artificial Sequence: Synthetic oligonucleotide
cuuuagacuucuggagggc

SEQ ID NO: 433930 - RNA, 19 nt, Artificial Sequence
  Description of Artificial Sequence: Synthetic oligonucleotide
acgcuucuuuacuaaagaa

SEQ ID NO: 433931 - RNA, 19 nt, Artificial Sequence
  Description of Artificial Sequence: Synthetic oligonucleotide
uguugcuugcucuccugaa

SEQ ID NO: 433932 - RNA, 19 nt, Artificial Sequence
  Description of Artificial Sequence: Synthetic oligonucleotide
uugcagauuucgcuaguuu

SEQ ID NO: 433933 - RNA, 19 nt, Artificial Sequence
  Description of Artificial Sequence: Synthetic oligonucleotide
aagguguccugguuuccaa

SEQ ID NO: 433934 - RNA, 19 nt, Artificial Sequence
  Description of Artificial Sequence: Synthetic oligonucleotide
ggggauaguguuauauucc

SEQ ID NO: 433935 - RNA, 19 nt, Artificial Sequence
  Description of Artificial Sequence: Synthetic oligonucleotide
gguuguacuuauaauccac

SEQ ID NO: 433936 - RNA, 19 nt, Artificial Sequence
  Description of Artificial Sequence: Synthetic oligonucleotide
ccaucaacaaucagccaag

SEQ ID NO: 433937 - RNA, 19 nt, Artificial Sequence
  Description of Artificial Sequence: Synthetic oligonucleotide
ugucacgucuccagugauc

SEQ ID NO: 433938 - RNA, 19 nt, Artificial Sequence
  Description of Artificial Sequence: Synthetic oligonucleotide
ugaucucuauccgguaccu

SEQ ID NO: 433939 - RNA, 19 nt, Artificial Sequence
  Description of Artificial Sequence: Synthetic oligonucleotide
aaauugcacugcaaguguu

SEQ ID NO: 433940 - RNA, 19 nt, Artificial Sequence
  Description of Artificial Sequence: Synthetic oligonucleotide
ggaaagaacaggugaugca

SEQ ID NO: 433941 - RNA, 19 nt, Artificial Sequence
  Description of Artificial Sequence: Synthetic oligonucleotide
aguaucguccaguggcaaa

SEQ ID NO: 433942 - RNA, 19 nt, Artificial Sequence
  Description of Artificial Sequence: Synthetic oligonucleotide
ggaaaugauauugucacgu

SEQ ID NO: 433943 - RNA, 19 nt, Artificial Sequence
  Description of Artificial Sequence: Synthetic oligonucleotide
cauuagaugaauuccgauu

SEQ ID NO: 433944 - RNA, 19 nt, Artificial Sequence
  Description of Artificial Sequence: Synthetic oligonucleotide
auccgguaccucuuuggcu

SEQ ID NO: 433945 - RNA, 19 nt, Artificial Sequence
  Description of Artificial Sequence: Synthetic oligonucleotide
uacuggcacuacauuucca

SEQ ID NO: 433946 - RNA, 19 nt, Artificial Sequence
  Description of Artificial Sequence: Synthetic oligonucleotide
gcgauugccacagguaagg

SEQ ID NO: 433947 - RNA, 19 nt, Artificial Sequence
  Description of Artificial Sequence: Synthetic oligonucleotide
acaaucagccaaguaucgu

SEQ ID NO: 433948 - RNA, 19 nt, Artificial Sequence
  Description of Artificial Sequence: Synthetic oligonucleotide
acacaccuacuguuggagu

SEQ ID NO: 433949 - RNA, 19 nt, Artificial Sequence
  Description of Artificial Sequence: Synthetic oligonucleotide
agcacacuaggugcgacca

SEQ ID NO: 433950 - RNA, 19 nt, Artificial Sequence
  Description of Artificial Sequence: Synthetic oligonucleotide
acucccgagaggguauuuc

SEQ ID NO: 433951 - RNA, 19 nt, Artificial Sequence
  Description of Artificial Sequence: Synthetic oligonucleotide
gagaggguauuucccucac

SEQ ID NO: 433952 - RNA, 19 nt, Artificial Sequence
  Description of Artificial Sequence: Synthetic oligonucleotide
cuguuggaguguuggcagc

SEQ ID NO: 433953 - RNA, 19 nt, Artificial Sequence
  Description of Artificial Sequence: Synthetic oligonucleotide
cacaauacacuugguagga

SEQ ID NO: 433954 - RNA, 19 nt, Artificial Sequence
  Description of Artificial Sequence: Synthetic oligonucleotide
gugauggaucacugaacac

SEQ ID NO: 433955 - RNA, 19 nt, Artificial Sequence
  Description of Artificial Sequence: Synthetic oligonucleotide
cgaaaucccagauaauuuc

SEQ ID NO: 433956 - RNA, 19 nt, Artificial Sequence
  Description of Artificial Sequence: Synthetic oligonucleotide
aggguauuucccucacuaa

SEQ ID NO: 433957 - RNA, 19 nt, Artificial Sequence
  Description of Artificial Sequence: Synthetic oligonucleotide
gagacuuuacuugcuccuc

SEQ ID NO: 433958 - RNA, 19 nt, Artificial Sequence
  Description of Artificial Sequence: Synthetic oligonucleotide
auucaauaucaaacuuaug

SEQ ID NO: 433959 - RNA, 19 nt, Artificial Sequence
  Description of Artificial Sequence: Synthetic oligonucleotide
gaaaaccgcuuuccagguc

SEQ ID NO: 433960 - RNA, 19 nt, Artificial Sequence
  Description of Artificial Sequence: Synthetic oligonucleotide
guacguugcaagauuuaga

SEQ ID NO: 433961 - RNA, 19 nt, Artificial Sequence
  Description of Artificial Sequence: Synthetic oligonucleotide
cuaggugcgaccauggcuu

SEQ ID NO: 433962 - RNA, 19 nt, Artificial Sequence
  Description of Artificial Sequence: Synthetic oligonucleotide
agacaguaacagcuugcau

SEQ ID NO: 433963 - RNA, 19 nt, Artificial Sequence
  Description of Artificial Sequence: Synthetic oligonucleotide
uuccaguacguugcaagau

SEQ ID NO: 433964 - RNA, 19 nt, Artificial Sequence
  Description of Artificial Sequence: Synthetic oligonucleotide
uuugcucgagucugcugau

SEQ ID NO: 433965 - RNA, 19 nt, Artificial Sequence
  Description of Artificial Sequence: Synthetic oligonucleotide
agcuaucucugacucuaaa

SEQ ID NO: 433966 - RNA, 19 nt, Artificial Sequence
  Description of Artificial Sequence: Synthetic oligonucleotide
uaucuacucccgagagggu

SEQ ID NO: 433967 - RNA, 19 nt, Artificial Sequence
  Description of Artificial Sequence: Synthetic oligonucleotide
gccauuugaugauaccuga

SEQ ID NO: 433968 - RNA, 19 nt, Artificial Sequence
  Description of Artificial Sequence: Synthetic oligonucleotide
gcuaagggagcagguaggg

SEQ ID NO: 433969 - RNA, 19 nt, Artificial Sequence
  Description of Artificial Sequence: Synthetic oligonucleotide
auacacuugguaggaucug

SEQ ID NO: 433970 - RNA, 19 nt, Artificial Sequence
  Description of Artificial Sequence: Synthetic oligonucleotide
agcgauugccacagguaag

SEQ ID NO: 433971 - RNA, 19 nt, Artificial Sequence
  Description of Artificial Sequence: Synthetic oligonucleotide
acaccuacuguuggagugu

SEQ ID NO: 433972 - RNA, 19 nt, Artificial Sequence
  Description of Artificial Sequence: Synthetic oligonucleotide
guaucguccaguggcaaaa

SEQ ID NO: 433973 - RNA, 19 nt, Artificial Sequence
  Description of Artificial Sequence: Synthetic oligonucleotide
ccuggguauuucauuaauc

SEQ ID NO: 433974 - RNA, 19 nt, Artificial Sequence
  Description of Artificial Sequence: Synthetic oligonucleotide
ucgcuaguuuugucauuga

SEQ ID NO: 433975 - RNA, 19 nt, Artificial Sequence
  Description of Artificial Sequence: Synthetic oligonucleotide
gccaaguaucguccagugg

SEQ ID NO: 433976 - RNA, 19 nt, Artificial Sequence
  Description of Artificial Sequence: Synthetic oligonucleotide
cacuaggugcgaccauggc

SEQ ID NO: 433977 - RNA, 19 nt, Artificial Sequence
  Description of Artificial Sequence: Synthetic oligonucleotide
gguuuguuacuacauucua

SEQ ID NO: 433978 - RNA, 19 nt, Artificial Sequence
  Description of Artificial Sequence: Synthetic oligonucleotide
uuucgcuaguuuugucauu

SEQ ID NO: 433979 - RNA, 19 nt, Artificial Sequence
  Description of Artificial Sequence: Synthetic oligonucleotide
aucuacucccgagagggua

SEQ ID NO: 433980 - RNA, 19 nt, Artificial Sequence
  Description of Artificial Sequence: Synthetic oligonucleotide
uaucguccaguggcaaaac

SEQ ID NO: 433981 - RNA, 19 nt, Artificial Sequence
  Description of Artificial Sequence: Synthetic oligonucleotide
gcauugacggauucuguaa

SEQ ID NO: 433982 - RNA, 19 nt, Artificial Sequence
  Description of Artificial Sequence: Synthetic oligonucleotide
cacuacauuuccaguacgu

SEQ ID NO: 433983 - RNA, 19 nt, Artificial Sequence
  Description of Artificial Sequence: Synthetic oligonucleotide
uuguguggugcagauuauu

SEQ ID NO: 433984 - RNA, 19 nt, Artificial Sequence
  Description of Artificial Sequence: Synthetic oligonucleotide
uucuucuauuguagcucuu

SEQ ID NO: 433985 - RNA, 19 nt, Artificial Sequence
  Description of Artificial Sequence: Synthetic oligonucleotide
aacucucugcccgggcuaa

SEQ ID NO: 433986 - RNA, 19 nt, Artificial Sequence
  Description of Artificial Sequence: Synthetic oligonucleotide
gcuaaauaauuuuguugcu

SEQ ID NO: 433987 - RNA, 19 nt, Artificial Sequence
  Description of Artificial Sequence: Synthetic oligonucleotide
ggcauugacggauucugua

SEQ ID NO: 433988 - RNA, 19 nt, Artificial Sequence
  Description of Artificial Sequence: Synthetic oligonucleotide
agcucugaguuaacauuca

SEQ ID NO: 433989 - RNA, 19 nt, Artificial Sequence
  Description of Artificial Sequence: Synthetic oligonucleotide
ccuauggagacuuuaaguu

SEQ ID NO: 433990 - RNA, 19 nt, Artificial Sequence
  Description of Artificial Sequence: Synthetic oligonucleotide
accuuuguacaaacacaga

SEQ ID NO: 433991 - RNA, 19 nt, Artificial Sequence
  Description of Artificial Sequence: Synthetic oligonucleotide
cacauaacucaauuagauu

SEQ ID NO: 433992 - RNA, 19 nt, Artificial Sequence
  Description of Artificial Sequence: Synthetic oligonucleotide
cacugugauggaucacuga

SEQ ID NO: 433993 - RNA, 19 nt, Artificial Sequence
  Description of Artificial Sequence: Synthetic oligonucleotide
acaauacacuugguaggau

SEQ ID NO: 433994 - RNA, 19 nt, Artificial Sequence
  Description of Artificial Sequence: Synthetic oligonucleotide
ggucccaagcaaguaaauc

SEQ ID NO: 433995 - RNA, 19 nt, Artificial Sequence
  Description of Artificial Sequence: Synthetic oligonucleotide
aguuguaggucuggcugau

SEQ ID NO: 433996 - RNA, 19 nt, Artificial Sequence
  Description of Artificial Sequence: Synthetic oligonucleotide
gcaaauguuccaagcugug

SEQ ID NO: 433997 - RNA, 19 nt, Artificial Sequence
  Description of Artificial Sequence: Synthetic oligonucleotide
cuuucucauuggguaaaga

SEQ ID NO: 433998 - RNA, 19 nt, Artificial Sequence
  Description of Artificial Sequence: Synthetic oligonucleotide
uauucccuauggagacuuu

SEQ ID NO: 433999 - RNA, 19 nt, Artificial Sequence
  Description of Artificial Sequence: Synthetic oligonucleotide
aaguaggcauugacggauu

SEQ ID NO: 434000 - RNA, 19 nt, Artificial Sequence
  Description of Artificial Sequence: Synthetic oligonucleotide
acggauucuguaagagcga

SEQ ID NO: 434001 - RNA, 19 nt, Artificial Sequence
  Description of Artificial Sequence: Synthetic oligonucleotide
cuauaaccagugccaacua

SEQ ID NO: 434002 - RNA, 19 nt, Artificial Sequence
  Description of Artificial Sequence: Synthetic oligonucleotide
gugcgaccauggcuucugg

SEQ ID NO: 434003 - RNA, 19 nt, Artificial Sequence
  Description of Artificial Sequence: Synthetic oligonucleotide
ggucauuucagugcuauuu

SEQ ID NO: 434004 - RNA, 19 nt, Artificial Sequence
  Description of Artificial Sequence: Synthetic oligonucleotide
gcacauaacucaauuagau

SEQ ID NO: 434005 - RNA, 19 nt, Artificial Sequence
  Description of Artificial Sequence: Synthetic oligonucleotide
cccucacuaagaaauugca

SEQ ID NO: 434006 - RNA, 19 nt, Artificial Sequence
  Description of Artificial Sequence: Synthetic oligonucleotide
gguggaacgauggugccua

SEQ ID NO: 434007 - RNA, 19 nt, Artificial Sequence
  Description of Artificial Sequence: Synthetic oligonucleotide
ggcugaauggccuggguau

SEQ ID NO: 434008 - RNA, 19 nt, Artificial Sequence
  Description of Artificial Sequence: Synthetic oligonucleotide
uccaaacgaagggguccca

SEQ ID NO: 434009 - RNA, 19 nt, Artificial Sequence
  Description of Artificial Sequence: Synthetic oligonucleotide
cugcccgggcuaagggagc

SEQ ID NO: 434010 - RNA, 19 nt, Artificial Sequence
  Description of Artificial Sequence: Synthetic oligonucleotide
aggucauuucagugcuauu

SEQ ID NO: 434011 - RNA, 19 nt, Artificial Sequence
  Description of Artificial Sequence: Synthetic oligonucleotide
uaggugcgaccauggcuuc

SEQ ID NO: 434012 - RNA, 19 nt, Artificial Sequence
  Description of Artificial Sequence: Synthetic oligonucleotide
caaagcuaucucugacucu

SEQ ID NO: 434013 - RNA, 19 nt, Artificial Sequence
  Description of Artificial Sequence: Synthetic oligonucleotide
ccccgugacacaccuacug

SEQ ID NO: 434014 - RNA, 19 nt, Artificial Sequence
  Description of Artificial Sequence: Synthetic oligonucleotide
ccuauggcacauaacucaa

SEQ ID NO: 434015 - RNA, 19 nt, Artificial Sequence
  Description of Artificial Sequence: Synthetic oligonucleotide
ugauuaccuauggcacaua

SEQ ID NO: 434016 - RNA, 19 nt, Artificial Sequence
  Description of Artificial Sequence: Synthetic oligonucleotide
aagcuaucucugacucuaa

SEQ ID NO: 434017 - RNA, 19 nt, Artificial Sequence
  Description of Artificial Sequence: Synthetic oligonucleotide
aguuacaggugggcugaau

SEQ ID NO: 434018 - RNA, 19 nt, Artificial Sequence
  Description of Artificial Sequence: Synthetic oligonucleotide
caguacguugcaagauuua

SEQ ID NO: 434019 - RNA, 19 nt, Artificial Sequence
  Description of Artificial Sequence: Synthetic oligonucleotide
uggaacgauggugccuaua

SEQ ID NO: 434020 - RNA, 19 nt, Artificial Sequence
  Description of Artificial Sequence: Synthetic oligonucleotide
gcuugcauguucauccaaa

SEQ ID NO: 434021 - RNA, 19 nt, Artificial Sequence
  Description of Artificial Sequence: Synthetic oligonucleotide
cugauuaccuauggcacau

SEQ ID NO: 434022 - RNA, 19 nt, Artificial Sequence
  Description of Artificial Sequence: Synthetic oligonucleotide
cacaucccacacuggugca

SEQ ID NO: 434023 - RNA, 19 nt, Artificial Sequence
  Description of Artificial Sequence: Synthetic oligonucleotide
ggguaaagaagauggcuuu

SEQ ID NO: 434024 - RNA, 19 nt, Artificial Sequence
  Description of Artificial Sequence: Synthetic oligonucleotide
cccuauggagacuuuaagu

SEQ ID NO: 434025 - RNA, 19 nt, Artificial Sequence
  Description of Artificial Sequence: Synthetic oligonucleotide
ccgcuuuccagguccauca

SEQ ID NO: 434026 - RNA, 19 nt, Artificial Sequence
  Description of Artificial Sequence: Synthetic oligonucleotide
ccacuuaguuugccugaag

SEQ ID NO: 434027 - RNA, 19 nt, Artificial Sequence
  Description of Artificial Sequence: Synthetic oligonucleotide
ggcuugaucucuauccggu

SEQ ID NO: 434028 - RNA, 19 nt, Artificial Sequence
  Description of Artificial Sequence: Synthetic oligonucleotide
ccgagaggguauuucccuc

SEQ ID NO: 434029 - RNA, 19 nt, Artificial Sequence
  Description of Artificial Sequence: Synthetic oligonucleotide
gggcugaauggccugggua

SEQ ID NO: 434030 - RNA, 19 nt, Artificial Sequence
  Description of Artificial Sequence: Synthetic oligonucleotide
accuacuguuggaguguug

SEQ ID NO: 434031 - RNA, 19 nt, Artificial Sequence
  Description of Artificial Sequence: Synthetic oligonucleotide
cccgggcuaagggagcagg

SEQ ID NO: 434032 - RNA, 19 nt, Artificial Sequence
  Description of Artificial Sequence: Synthetic oligonucleotide
ccaaagggcuuucauuugu

SEQ ID NO: 434033 - RNA, 19 nt, Artificial Sequence
  Description of Artificial Sequence: Synthetic oligonucleotide
aggugcgaccauggcuucu

SEQ ID NO: 434034 - RNA, 19 nt, Artificial Sequence
  Description of Artificial Sequence: Synthetic oligonucleotide
caaggucauuucagugcua

SEQ ID NO: 434035 - RNA, 19 nt, Artificial Sequence
  Description of Artificial Sequence: Synthetic oligonucleotide
uacucccgagaggguauuu

SEQ ID NO: 434036 - RNA, 19 nt, Artificial Sequence
  Description of Artificial Sequence: Synthetic oligonucleotide
cgagaggguauuucccuca

SEQ ID NO: 434037 - RNA, 19 nt, Artificial Sequence
  Description of Artificial Sequence: Synthetic oligonucleotide
ccgaaaucccagauaauuu

SEQ ID NO: 434038 - RNA, 19 nt, Artificial Sequence
  Description of Artificial Sequence: Synthetic oligonucleotide
cuugcagauuucgcuaguu

SEQ ID NO: 434039 - RNA, 19 nt, Artificial Sequence
  Description of Artificial Sequence: Synthetic oligonucleotide
guacaggcuugaucucuau

SEQ ID NO: 434040 - RNA, 19 nt, Artificial Sequence
  Description of Artificial Sequence: Synthetic oligonucleotide
caucaacaaucagccaagu

SEQ ID NO: 434041 - RNA, 19 nt, Artificial Sequence
  Description of Artificial Sequence: Synthetic oligonucleotide
ggacugcauauuugugacu

SEQ ID NO: 434042 - RNA, 19 nt, Artificial Sequence
  Description of Artificial Sequence: Synthetic oligonucleotide
ggccugaguuauguucuga

SEQ ID NO: 434043 - RNA, 19 nt, Artificial Sequence
  Description of Artificial Sequence: Synthetic oligonucleotide
cguccaguggcaaaacgcu

SEQ ID NO: 434044 - RNA, 19 nt, Artificial Sequence
  Description of Artificial Sequence: Synthetic oligonucleotide
ccugaguuauguucugaau

SEQ ID NO: 434045 - RNA, 19 nt, Artificial Sequence
  Description of Artificial Sequence: Synthetic oligonucleotide
gccuggguauuucauuaau

SEQ ID NO: 434046 - RNA, 19 nt, Artificial Sequence
  Description of Artificial Sequence: Synthetic oligonucleotide
accccgugacacaccuacu

SEQ ID NO: 434047 - RNA, 19 nt, Artificial Sequence
  Description of Artificial Sequence: Synthetic oligonucleotide
ggaguggacugaaugccau

SEQ ID NO: 434048 - RNA, 19 nt, Artificial Sequence
  Description of Artificial Sequence: Synthetic oligonucleotide
cuccgaaaucccagauaau

SEQ ID NO: 434049 - RNA, 19 nt, Artificial Sequence
  Description of Artificial Sequence: Synthetic oligonucleotide
cccgagaggguauuucccu

SEQ ID NO: 434050 - RNA, 19 nt, Artificial Sequence
  Description of Artificial Sequence: Synthetic oligonucleotide
gcuugcagauuucgcuagu

SEQ ID NO: 434051 - RNA, 19 nt, Artificial Sequence
  Description of Artificial Sequence: Synthetic oligonucleotide
ccgauucaucuguacagau

SEQ ID NO: 434052 - RNA, 19 nt, Artificial Sequence
  Description of Artificial Sequence: Synthetic oligonucleotide
cccgugacacaccuacugu

SEQ ID NO: 434053 - RNA, 19 nt, Artificial Sequence
  Description of Artificial Sequence: Synthetic oligonucleotide
guaccaccaccuguauguu

SEQ ID NO: 434054 - RNA, 19 nt, Artificial Sequence
  Description of Artificial Sequence: Synthetic oligonucleotide
agggucccugcaacuucuu

SEQ ID NO: 434055 - RNA, 19 nt, Artificial Sequence
  Description of Artificial Sequence: Synthetic oligonucleotide
ggauucuguaagagcgauu

SEQ ID NO: 434056 - RNA, 19 nt, Artificial Sequence
  Description of Artificial Sequence: Synthetic oligonucleotide
guggaacgauggugccuau

SEQ ID NO: 434057 - RNA, 19 nt, Artificial Sequence
  Description of Artificial Sequence: Synthetic oligonucleotide
caccuacuguuggaguguu

SEQ ID NO: 434058 - RNA, 19 nt, Artificial Sequence
  Description of Artificial Sequence: Synthetic oligonucleotide
gggucccaagcaaguaaau

SEQ ID NO: 434059 - RNA, 19 nt, Artificial Sequence
  Description of Artificial Sequence: Synthetic oligonucleotide
ccgggcuaagggagcaggu

SEQ ID NO: 434060 - RNA, 19 nt, Artificial Sequence
  Description of Artificial Sequence: Synthetic oligonucleotide
ccgguaccucuuuggcucu

SEQ ID NO: 434061 - RNA, 19 nt, Artificial Sequence
  Description of Artificial Sequence: Synthetic oligonucleotide
ggaccccgugacacaccua

SEQ ID NO: 434062 - RNA, 19 nt, Artificial Sequence
  Description of Artificial Sequence: Synthetic oligonucleotide
cgauugccacagguaaggu

SEQ ID NO: 434063 - RNA, 19 nt, Artificial Sequence
  Description of Artificial Sequence: Synthetic oligonucleotide
aguaaugcacaguacaucc

SEQ ID NO: 434064 - RNA, 19 nt, Artificial Sequence
  Description of Artificial Sequence: Synthetic oligonucleotide
uuuaugaauaggauaacca

SEQ ID NO: 434065 - RNA, 19 nt, Artificial Sequence
  Description of Artificial Sequence: Synthetic oligonucleotide
uguucauuuaugaauagga

SEQ ID NO: 434066 - RNA, 19 nt, Artificial Sequence
  Description of Artificial Sequence: Synthetic oligonucleotide
ugugaaauugaucuggugu

SEQ ID NO: 434067 - RNA, 19 nt, Artificial Sequence
  Description of Artificial Sequence: Synthetic oligonucleotide
aggacaauuauacaggcag

SEQ ID NO: 434068 - RNA, 19 nt, Artificial Sequence
  Description of Artificial Sequence: Synthetic oligonucleotide
gauauuaucauaaguagac

SEQ ID NO: 434069 - RNA, 19 nt, Artificial Sequence
  Description of Artificial Sequence: Synthetic oligonucleotide
ugaaagacaagaaguaaca

SEQ ID NO: 434070 - RNA, 19 nt, Artificial Sequence
  Description of Artificial Sequence: Synthetic oligonucleotide
uggaagacgcucaugaaag

SEQ ID NO: 434071 - RNA, 19 nt, Artificial Sequence
  Description of Artificial Sequence: Synthetic oligonucleotide
ugauauuaucauaaguaga

SEQ ID NO: 434072 - RNA, 19 nt, Artificial Sequence
  Description of Artificial Sequence: Synthetic oligonucleotide
aagugagucaagacaaugc

SEQ ID NO: 434073 - RNA, 19 nt, Artificial Sequence
  Description of Artificial Sequence: Synthetic oligonucleotide
auagcggacaagcagaaug

SEQ ID NO: 434074 - RNA, 19 nt, Artificial Sequence
  Description of Artificial Sequence: Synthetic oligonucleotide
gacggacuuauuuagguag

SEQ ID NO: 434075 - RNA, 19 nt, Artificial Sequence
  Description of Artificial Sequence: Synthetic oligonucleotide
uuaugaauaggauaaccaa

SEQ ID NO: 434076 - RNA, 19 nt, Artificial Sequence
  Description of Artificial Sequence: Synthetic oligonucleotide
uuauuuagguaguagaguu

SEQ ID NO: 434077 - RNA, 19 nt, Artificial Sequence
  Description of Artificial Sequence: Synthetic oligonucleotide
uuaucauaaguagacagga

SEQ ID NO: 434078 - RNA, 19 nt, Artificial Sequence
  Description of Artificial Sequence: Synthetic oligonucleotide
aacccucugaacuugucag

SEQ ID NO: 434079 - RNA, 19 nt, Artificial Sequence
  Description of Artificial Sequence: Synthetic oligonucleotide
gacgucauagcacuccugg

SEQ ID NO: 434080 - RNA, 19 nt, Artificial Sequence
  Description of Artificial Sequence: Synthetic oligonucleotide
cuuaaguugugguagggug

SEQ ID NO: 434081 - RNA, 19 nt, Artificial Sequence
  Description of Artificial Sequence: Synthetic oligonucleotide
auuaucauaaguagacagg

SEQ ID NO: 434082 - RNA, 19 nt, Artificial Sequence
  Description of Artificial Sequence: Synthetic oligonucleotide
ucgggugugguauuggagg

SEQ ID NO: 434083 - RNA, 19 nt, Artificial Sequence
  Description of Artificial Sequence: Synthetic oligonucleotide
guuucggacauugaaaucc

SEQ ID NO: 434084 - RNA, 19 nt, Artificial Sequence
  Description of Artificial Sequence: Synthetic oligonucleotide
ucauaaguagacaggacaa

SEQ ID NO: 434085 - RNA, 19 nt, Artificial Sequence
  Description of Artificial Sequence: Synthetic oligonucleotide
gagcaucuaagucugcugg

SEQ ID NO: 434086 - RNA, 19 nt, Artificial Sequence
  Description of Artificial Sequence: Synthetic oligonucleotide
aaaucuguggugcccagca

SEQ ID NO: 434087 - RNA, 19 nt, Artificial Sequence
  Description of Artificial Sequence: Synthetic oligonucleotide
caugcuaugcacgugauug

SEQ ID NO: 434088 - RNA, 19 nt, Artificial Sequence
  Description of Artificial Sequence: Synthetic oligonucleotide
ugguauuggaggucgaugc

SEQ ID NO: 434089 - RNA, 19 nt, Artificial Sequence
  Description of Artificial Sequence: Synthetic oligonucleotide
auaauggugacauuucgaa

SEQ ID NO: 434090 - RNA, 19 nt, Artificial Sequence
  Description of Artificial Sequence: Synthetic oligonucleotide
guagacaggacaauuauac

SEQ ID NO: 434091 - RNA, 19 nt, Artificial Sequence
  Description of Artificial Sequence: Synthetic oligonucleotide
acuugagcaugcuaugcac

SEQ ID NO: 434092 - RNA, 19 nt, Artificial Sequence
  Description of Artificial Sequence: Synthetic oligonucleotide
uuaaguugugguaggguga

SEQ ID NO: 434093 - RNA, 19 nt, Artificial Sequence
  Description of Artificial Sequence: Synthetic oligonucleotide
gacuuauuuagguaguaga

SEQ ID NO: 434094 - RNA, 19 nt, Artificial Sequence
  Description of Artificial Sequence: Synthetic oligonucleotide
aguacaucccugucacugc

SEQ ID NO: 434095 - RNA, 19 nt, Artificial Sequence
  Description of Artificial Sequence: Synthetic oligonucleotide
uggauagcggacaagcaga

SEQ ID NO: 434096 - RNA, 19 nt, Artificial Sequence
  Description of Artificial Sequence: Synthetic oligonucleotide
agugagucaagacaaugca

SEQ ID NO: 434097 - RNA, 19 nt, Artificial Sequence
  Description of Artificial Sequence: Synthetic oligonucleotide
auuucgaucucaugugaag

SEQ ID NO: 434098 - RNA, 19 nt, Artificial Sequence
  Description of Artificial Sequence: Synthetic oligonucleotide
acuaccggcgccccuaggc

SEQ ID NO: 434099 - RNA, 19 nt, Artificial Sequence
  Description of Artificial Sequence: Synthetic oligonucleotide
uuucauggucccuucugcg

SEQ ID NO: 434100 - RNA, 19 nt, Artificial Sequence
  Description of Artificial Sequence: Synthetic oligonucleotide
cucgaguagccuuggaugg

SEQ ID NO: 434101 - RNA, 19 nt, Artificial Sequence
  Description of Artificial Sequence: Synthetic oligonucleotide
ucaugugaagccaugcguc

SEQ ID NO: 434102 - RNA, 19 nt, Artificial Sequence
  Description of Artificial Sequence: Synthetic oligonucleotide
agacaaugcaggccuuucc

SEQ ID NO: 434103 - RNA, 19 nt, Artificial Sequence
  Description of Artificial Sequence: Synthetic oligonucleotide
aaacccucugaacuuguca

SEQ ID NO: 434104 - RNA, 19 nt, Artificial Sequence
  Description of Artificial Sequence: Synthetic oligonucleotide
agucaagacaaugcaggcc

SEQ ID NO: 434105 - RNA, 19 nt, Artificial Sequence
  Description of Artificial Sequence: Synthetic oligonucleotide
uaaugcguugcgaggaggc

SEQ ID NO: 434106 - RNA, 19 nt, Artificial Sequence
  Description of Artificial Sequence: Synthetic oligonucleotide
uuucgaucucaugugaagc

SEQ ID NO: 434107 - RNA, 19 nt, Artificial Sequence
  Description of Artificial Sequence: Synthetic oligonucleotide
acauugaaauccaagcgag

SEQ ID NO: 434108 - RNA, 19 nt, Artificial Sequence
  Description of Artificial Sequence: Synthetic oligonucleotide
gauacugugucacaugaua

SEQ ID NO: 434109 - RNA, 19 nt, Artificial Sequence
  Description of Artificial Sequence: Synthetic oligonucleotide
agaaagugagucaagacaa

SEQ ID NO: 434110 - RNA, 19 nt, Artificial Sequence
  Description of Artificial Sequence: Synthetic oligonucleotide
cuaugcacgugauugucag

SEQ ID NO: 434111 - RNA, 19 nt, Artificial Sequence
  Description of Artificial Sequence: Synthetic oligonucleotide
ucaguggcguugauauugg

SEQ ID NO: 434112 - RNA, 19 nt, Artificial Sequence
  Description of Artificial Sequence: Synthetic oligonucleotide
augaaacucagcuuggguu

SEQ ID NO: 434113 - RNA, 19 nt, Artificial Sequence
  Description of Artificial Sequence: Synthetic oligonucleotide
aaugcguugcgaggaggcc

SEQ ID NO: 434114 - RNA, 19 nt, Artificial Sequence
  Description of Artificial Sequence: Synthetic oligonucleotide
ugugucacaugauauuauc

SEQ ID NO: 434115 - RNA, 19 nt, Artificial Sequence
  Description of Artificial Sequence: Synthetic oligonucleotide
uccaagcgagcacugagca

SEQ ID NO: 434116 - RNA, 19 nt, Artificial Sequence
  Description of Artificial Sequence: Synthetic oligonucleotide
uauuuagguaguagaguuc

SEQ ID NO: 434117 - RNA, 19 nt, Artificial Sequence
  Description of Artificial Sequence: Synthetic oligonucleotide
cuggauagcggacaagcag

SEQ ID NO: 434118 - RNA, 19 nt, Artificial Sequence
  Description of Artificial Sequence: Synthetic oligonucleotide
uccagagacucaaaccucu

SEQ ID NO: 434119 - RNA, 19 nt, Artificial Sequence
  Description of Artificial Sequence: Synthetic oligonucleotide
uaucauaaguagacaggac

SEQ ID NO: 434120 - RNA, 19 nt, Artificial Sequence
  Description of Artificial Sequence: Synthetic oligonucleotide
aagagguacagaauccuca

SEQ ID NO: 434121 - RNA, 19 nt, Artificial Sequence
  Description of Artificial Sequence: Synthetic oligonucleotide
uugaaauccaagcgagcac

SEQ ID NO: 434122 - RNA, 19 nt, Artificial Sequence
  Description of Artificial Sequence: Synthetic oligonucleotide
ucauggagagguuucggac

SEQ ID NO: 434123 - RNA, 19 nt, Artificial Sequence
  Description of Artificial Sequence: Synthetic oligonucleotide
auguucauuuaugaauagg

SEQ ID NO: 434124 - RNA, 19 nt, Artificial Sequence
  Description of Artificial Sequence: Synthetic oligonucleotide
uauuucgaucucaugugaa

SEQ ID NO: 434125 - RNA, 19 nt, Artificial Sequence
  Description of Artificial Sequence: Synthetic oligonucleotide
gagucaagacaaugcaggc

SEQ ID NO: 434126 - RNA, 19 nt, Artificial Sequence
  Description of Artificial Sequence: Synthetic oligonucleotide
uaaguugugguagggugag

SEQ ID NO: 434127 - RNA, 19 nt, Artificial Sequence
  Description of Artificial Sequence: Synthetic oligonucleotide
uuucggacauugaaaucca

SEQ ID NO: 434128 - RNA, 19 nt, Artificial Sequence
  Description of Artificial Sequence: Synthetic oligonucleotide
uuugaguccucuugguccu

SEQ ID NO: 434129 - RNA, 19 nt, Artificial Sequence
  Description of Artificial Sequence: Synthetic oligonucleotide
cucagcuuggguucuuucc

SEQ ID NO: 434130 - RNA, 19 nt, Artificial Sequence
  Description of Artificial Sequence: Synthetic oligonucleotide
caugugaagccaugcgucc

SEQ ID NO: 434131 - RNA, 19 nt, Artificial Sequence
  Description of Artificial Sequence: Synthetic oligonucleotide
uggaggucgaugcauguuc

SEQ ID NO: 434132 - RNA, 19 nt, Artificial Sequence
  Description of Artificial Sequence: Synthetic oligonucleotide
gucaguggcguugauauug

SEQ ID NO: 434133 - RNA, 19 nt, Artificial Sequence
  Description of Artificial Sequence: Synthetic oligonucleotide
ugcccuuugcccaggagca

SEQ ID NO: 434134 - RNA, 19 nt, Artificial Sequence
  Description of Artificial Sequence: Synthetic oligonucleotide
uucuuaaguugugguaggg

SEQ ID NO: 434135 - RNA, 19 nt, Artificial Sequence
  Description of Artificial Sequence: Synthetic oligonucleotide
agaauucuggcuaaugcgu

SEQ ID NO: 434136 - RNA, 19 nt, Artificial Sequence
  Description of Artificial Sequence: Synthetic oligonucleotide
uugucagccaaccugcauu

SEQ ID NO: 434137 - RNA, 19 nt, Artificial Sequence
  Description of Artificial Sequence: Synthetic oligonucleotide
gcucaugaaagacaagaag

SEQ ID NO: 434138 - RNA, 19 nt, Artificial Sequence
  Description of Artificial Sequence: Synthetic oligonucleotide
ucggauaauggugacauuu

SEQ ID NO: 434139 - RNA, 19 nt, Artificial Sequence
  Description of Artificial Sequence: Synthetic oligonucleotide
gauaauggugacauuucga

SEQ ID NO: 434140 - RNA, 19 nt, Artificial Sequence
  Description of Artificial Sequence: Synthetic oligonucleotide
uagacaggacaauuauaca

SEQ ID NO: 434141 - RNA, 19 nt, Artificial Sequence
  Description of Artificial Sequence: Synthetic oligonucleotide
uagcggacaagcagaaugu

SEQ ID NO: 434142 - RNA, 19 nt, Artificial Sequence
  Description of Artificial Sequence: Synthetic oligonucleotide
uucugggcgauaucgggug

SEQ ID NO: 434143 - RNA, 19 nt, Artificial Sequence
  Description of Artificial Sequence: Synthetic oligonucleotide
ugagcaaaucuguggugcc

SEQ ID NO: 434144 - RNA, 19 nt, Artificial Sequence
  Description of Artificial Sequence: Synthetic oligonucleotide
ugcucaugugggaaagagc

SEQ ID NO: 434145 - RNA, 19 nt, Artificial Sequence
  Description of Artificial Sequence: Synthetic oligonucleotide
agaauccucaccgacgugu

SEQ ID NO: 434146 - RNA, 19 nt, Artificial Sequence
  Description of Artificial Sequence: Synthetic oligonucleotide
cauugaaauccaagcgagc

SEQ ID NO: 434147 - RNA, 19 nt, Artificial Sequence
  Description of Artificial Sequence: Synthetic oligonucleotide
uggcuaaugcguugcgagg

SEQ ID NO: 434148 - RNA, 19 nt, Artificial Sequence
  Description of Artificial Sequence: Synthetic oligonucleotide
cacgugauugucaguggcg

SEQ ID NO: 434149 - RNA, 19 nt, Artificial Sequence
  Description of Artificial Sequence: Synthetic oligonucleotide
aagacgcucaugaaagaca

SEQ ID NO: 434150 - RNA, 19 nt, Artificial Sequence
  Description of Artificial Sequence: Synthetic oligonucleotide
uguagggucagagucuccu

SEQ ID NO: 434151 - RNA, 19 nt, Artificial Sequence
  Description of Artificial Sequence: Synthetic oligonucleotide
uagaguuccucagcguggg

SEQ ID NO: 434152 - RNA, 19 nt, Artificial Sequence
  Description of Artificial Sequence: Synthetic oligonucleotide
aucauggagagguuucgga

SEQ ID NO: 434153 - RNA, 19 nt, Artificial Sequence
  Description of Artificial Sequence: Synthetic oligonucleotide
aagccaguugcacacugau

SEQ ID NO: 434154 - RNA, 19 nt, Artificial Sequence
  Description of Artificial Sequence: Synthetic oligonucleotide
augcacgugauugucagug

SEQ ID NO: 434155 - RNA, 19 nt, Artificial Sequence
  Description of Artificial Sequence: Synthetic oligonucleotide
ucccgaccgaccuucuugg

SEQ ID NO: 434156 - RNA, 19 nt, Artificial Sequence
  Description of Artificial Sequence: Synthetic oligonucleotide
ucuggacgcgugaauaaaa

SEQ ID NO: 434157 - RNA, 19 nt, Artificial Sequence
  Description of Artificial Sequence: Synthetic oligonucleotide
gacauuucgaagaauuucu

SEQ ID NO: 434158 - RNA, 19 nt, Artificial Sequence
  Description of Artificial Sequence: Synthetic oligonucleotide
uuagguaguagaguuccuc

SEQ ID NO: 434159 - RNA, 19 nt, Artificial Sequence
  Description of Artificial Sequence: Synthetic oligonucleotide
aggucgaugcauguucuac

SEQ ID NO: 434160 - RNA, 19 nt, Artificial Sequence
  Description of Artificial Sequence: Synthetic oligonucleotide
gaucccauggauccacuca

SEQ ID NO: 434161 - RNA, 19 nt, Artificial Sequence
  Description of Artificial Sequence: Synthetic oligonucleotide
ugcacgugauugucagugg

SEQ ID NO: 434162 - RNA, 19 nt, Artificial Sequence
  Description of Artificial Sequence: Synthetic oligonucleotide
aaaggcuccuugugugugu

SEQ ID NO: 434163 - RNA, 19 nt, Artificial Sequence
  Description of Artificial Sequence: Synthetic oligonucleotide
ucuuaaguugugguagggu

SEQ ID NO: 434164 - RNA, 19 nt, Artificial Sequence
  Description of Artificial Sequence: Synthetic oligonucleotide
agcacuccuggguaagguc

SEQ ID NO: 434165 - RNA, 19 nt, Artificial Sequence
  Description of Artificial Sequence: Synthetic oligonucleotide
augcguugcgaggaggccc

SEQ ID NO: 434166 - RNA, 19 nt, Artificial Sequence
  Description of Artificial Sequence: Synthetic oligonucleotide
cuuccgcuggaucccaugg

SEQ ID NO: 434167 - RNA, 19 nt, Artificial Sequence
  Description of Artificial Sequence: Synthetic oligonucleotide
auaaguagacaggacaauu

SEQ ID NO: 434168 - RNA, 19 nt, Artificial Sequence
  Description of Artificial Sequence: Synthetic oligonucleotide
ucgaguucccuggagggcc

SEQ ID NO: 434169 - RNA, 19 nt, Artificial Sequence
  Description of Artificial Sequence: Synthetic oligonucleotide
gaccuucuugggugcaugg

SEQ ID NO: 434170 - RNA, 19 nt, Artificial Sequence
  Description of Artificial Sequence: Synthetic oligonucleotide
ggccacaaggagcagagcc

SEQ ID NO: 434171 - RNA, 19 nt, Artificial Sequence
  Description of Artificial Sequence: Synthetic oligonucleotide
aaaacccucugaacuuguc

SEQ ID NO: 434172 - RNA, 19 nt, Artificial Sequence
  Description of Artificial Sequence: Synthetic oligonucleotide
guacagaauccucaccgac

SEQ ID NO: 434173 - RNA, 19 nt, Artificial Sequence
  Description of Artificial Sequence: Synthetic oligonucleotide
gguucugggcgauaucggg

SEQ ID NO: 434174 - RNA, 19 nt, Artificial Sequence
  Description of Artificial Sequence: Synthetic oligonucleotide
uuggauggagcaggaagcc

SEQ ID NO: 434175 - RNA, 19 nt, Artificial Sequence
  Description of Artificial Sequence: Synthetic oligonucleotide
acgucauagcacuccuggg

SEQ ID NO: 434176 - RNA, 19 nt, Artificial Sequence
  Description of Artificial Sequence: Synthetic oligonucleotide
auccacucagccgucuggc

SEQ ID NO: 434177 - RNA, 19 nt, Artificial Sequence
  Description of Artificial Sequence: Synthetic oligonucleotide
gggagacggacuuauuuag

SEQ ID NO: 434178 - RNA, 19 nt, Artificial Sequence
  Description of Artificial Sequence: Synthetic oligonucleotide
ugugguagggugaggucaa

SEQ ID NO: 434179 - RNA, 19 nt, Artificial Sequence
  Description of Artificial Sequence: Synthetic oligonucleotide
ugcguugcgaggaggcccc

SEQ ID NO: 434180 - RNA, 19 nt, Artificial Sequence
  Description of Artificial Sequence: Synthetic oligonucleotide
gauaucgggugugguauug

SEQ ID NO: 434181 - RNA, 19 nt, Artificial Sequence
  Description of Artificial Sequence: Synthetic oligonucleotide
acccagacugccggaaucc

SEQ ID NO: 434182 - RNA, 19 nt, Artificial Sequence
  Description of Artificial Sequence: Synthetic oligonucleotide
uguucuggacgcgugaaua

SEQ ID NO: 434183 - RNA, 19 nt, Artificial Sequence
  Description of Artificial Sequence: Synthetic oligonucleotide
uaucgggugugguauugga

SEQ ID NO: 434184 - RNA, 19 nt, Artificial Sequence
  Description of Artificial Sequence: Synthetic oligonucleotide
aauguucuggacgcgugaa

SEQ ID NO: 434185 - RNA, 19 nt, Artificial Sequence
  Description of Artificial Sequence: Synthetic oligonucleotide
ggauggagcaggaagccgg

SEQ ID NO: 434186 - RNA, 19 nt, Artificial Sequence
  Description of Artificial Sequence: Synthetic oligonucleotide
cucaccgacgugugcaaag

SEQ ID NO: 434187 - RNA, 19 nt, Artificial Sequence
  Description of Artificial Sequence: Synthetic oligonucleotide
caagcaacuaccggcgccc

SEQ ID NO: 434188 - RNA, 19 nt, Artificial Sequence
  Description of Artificial Sequence: Synthetic oligonucleotide
agagcuccagucuucuuaa

SEQ ID NO: 434189 - RNA, 19 nt, Artificial Sequence
  Description of Artificial Sequence: Synthetic oligonucleotide
ucaguaggggcucgaguuc

SEQ ID NO: 434190 - RNA, 19 nt, Artificial Sequence
  Description of Artificial Sequence: Synthetic oligonucleotide
ucgaucucaugugaagcca

SEQ ID NO: 434191 - RNA, 19 nt, Artificial Sequence
  Description of Artificial Sequence: Synthetic oligonucleotide
aguguauggaagacgcuca

SEQ ID NO: 434192 - RNA, 19 nt, Artificial Sequence
  Description of Artificial Sequence: Synthetic oligonucleotide
guacaucccugucacugcc

SEQ ID NO: 434193 - RNA, 19 nt, Artificial Sequence
  Description of Artificial Sequence: Synthetic oligonucleotide
ccgcacaucauccagguac

SEQ ID NO: 434194 - RNA, 19 nt, Artificial Sequence
  Description of Artificial Sequence: Synthetic oligonucleotide
gauggagcaggaagccggg

SEQ ID NO: 434195 - RNA, 19 nt, Artificial Sequence
  Description of Artificial Sequence: Synthetic oligonucleotide
gugcaagccaguugcacac

SEQ ID NO: 434196 - RNA, 19 nt, Artificial Sequence
  Description of Artificial Sequence: Synthetic oligonucleotide
gaauguucuggacgcguga

SEQ ID NO: 434197 - RNA, 19 nt, Artificial Sequence
  Description of Artificial Sequence: Synthetic oligonucleotide
auuggaggucgaugcaugu

SEQ ID NO: 434198 - RNA, 19 nt, Artificial Sequence
  Description of Artificial Sequence: Synthetic oligonucleotide
auguucuaccucaugguca

SEQ ID NO: 434199 - RNA, 19 nt, Artificial Sequence
  Description of Artificial Sequence: Synthetic oligonucleotide
cuauuucgaucucauguga

SEQ ID NO: 434200 - RNA, 19 nt, Artificial Sequence
  Description of Artificial Sequence: Synthetic oligonucleotide
agcccugacgucauagcac

SEQ ID NO: 434201 - RNA, 19 nt, Artificial Sequence
  Description of Artificial Sequence: Synthetic oligonucleotide
agggaggcuggauagcgga

SEQ ID NO: 434202 - RNA, 19 nt, Artificial Sequence
  Description of Artificial Sequence: Synthetic oligonucleotide
guuacuguccucccaccuc

SEQ ID NO: 434203 - RNA, 19 nt, Artificial Sequence
  Description of Artificial Sequence: Synthetic oligonucleotide
gaagagguacagaauccuc

SEQ ID NO: 434204 - RNA, 19 nt, Artificial Sequence
  Description of Artificial Sequence: Synthetic oligonucleotide
cuaaugcguugcgaggagg

SEQ ID NO: 434205 - RNA, 19 nt, Artificial Sequence
  Description of Artificial Sequence: Synthetic oligonucleotide
guaaugcacaguacauccc

SEQ ID NO: 434206 - RNA, 19 nt, Artificial Sequence
  Description of Artificial Sequence: Synthetic oligonucleotide
gaccauuucuccagucuug

SEQ ID NO: 434207 - RNA, 19 nt, Artificial Sequence
  Description of Artificial Sequence: Synthetic oligonucleotide
ggucgaugcauguucuacc

SEQ ID NO: 434208 - RNA, 19 nt, Artificial Sequence
  Description of Artificial Sequence: Synthetic oligonucleotide
uuuauuccugcaucuccuu

SEQ ID NO: 434209 - RNA, 19 nt, Artificial Sequence
  Description of Artificial Sequence: Synthetic oligonucleotide
uucugcgcgggccucugca

SEQ ID NO: 434210 - RNA, 19 nt, Artificial Sequence
  Description of Artificial Sequence: Synthetic oligonucleotide
ccugguucacccuuaggcc

SEQ ID NO: 434211 - RNA, 19 nt, Artificial Sequence
  Description of Artificial Sequence: Synthetic oligonucleotide
auaucgggugugguauugg

SEQ ID NO: 434212 - RNA, 19 nt, Artificial Sequence
  Description of Artificial Sequence: Synthetic oligonucleotide
cuaccggcgccccuaggcg

SEQ ID NO: 434213 - RNA, 19 nt, Artificial Sequence
  Description of Artificial Sequence: Synthetic oligonucleotide
aagcaacuaccggcgcccc

SEQ ID NO: 434214 - RNA, 19 nt, Artificial Sequence
  Description of Artificial Sequence: Synthetic oligonucleotide
cuccccaagcaacuaccgg

SEQ ID NO: 434215 - RNA, 19 nt, Artificial Sequence
  Description of Artificial Sequence: Synthetic oligonucleotide
ugacgucauagcacuccug

SEQ ID NO: 434216 - RNA, 19 nt, Artificial Sequence
  Description of Artificial Sequence: Synthetic oligonucleotide
caguaaugcacaguacauc

SEQ ID NO: 434217 - RNA, 19 nt, Artificial Sequence
  Description of Artificial Sequence: Synthetic oligonucleotide
gucccgaccgaccuucuug

SEQ ID NO: 434218 - RNA, 19 nt, Artificial Sequence
  Description of Artificial Sequence: Synthetic oligonucleotide
ucuggcuaaugcguugcga

SEQ ID NO: 434219 - RNA, 19 nt, Artificial Sequence
  Description of Artificial Sequence: Synthetic oligonucleotide
ugcgcgggccucugcaggg

SEQ ID NO: 434220 - RNA, 19 nt, Artificial Sequence
  Description of Artificial Sequence: Synthetic oligonucleotide
aagagccgcccuguuacug

SEQ ID NO: 434221 - RNA, 19 nt, Artificial Sequence
  Description of Artificial Sequence: Synthetic oligonucleotide
ggcucgaguucccuggagg

SEQ ID NO: 434222 - RNA, 19 nt, Artificial Sequence
  Description of Artificial Sequence: Synthetic oligonucleotide
ggacuuauuuagguaguag

SEQ ID NO: 434223 - RNA, 19 nt, Artificial Sequence
  Description of Artificial Sequence: Synthetic oligonucleotide
cucagaauucuggcuaaug

SEQ ID NO: 434224 - RNA, 19 nt, Artificial Sequence
  Description of Artificial Sequence: Synthetic oligonucleotide
uggcccuccagugccaaag

SEQ ID NO: 434225 - RNA, 19 nt, Artificial Sequence
  Description of Artificial Sequence: Synthetic oligonucleotide
gagcaaaucuguggugccc

SEQ ID NO: 434226 - RNA, 19 nt, Artificial Sequence
  Description of Artificial Sequence: Synthetic oligonucleotide
ccucgaguagccuuggaug

SEQ ID NO: 434227 - RNA, 19 nt, Artificial Sequence
  Description of Artificial Sequence: Synthetic oligonucleotide
gacgugugcaaagacaggu

SEQ ID NO: 434228 - RNA, 19 nt, Artificial Sequence
  Description of Artificial Sequence: Synthetic oligonucleotide
augcuaugcacgugauugu

SEQ ID NO: 434229 - RNA, 19 nt, Artificial Sequence
  Description of Artificial Sequence: Synthetic oligonucleotide
guagccuuggauggagcag

SEQ ID NO: 434230 - RNA, 19 nt, Artificial Sequence
  Description of Artificial Sequence: Synthetic oligonucleotide
gccccuuugagccuuugag

SEQ ID NO: 434231 - RNA, 19 nt, Artificial Sequence
  Description of Artificial Sequence: Synthetic oligonucleotide
ugaaaagccucggggucca

SEQ ID NO: 434232 - RNA, 19 nt, Artificial Sequence
  Description of Artificial Sequence: Synthetic oligonucleotide
agccaugcguccuuccaga

SEQ ID NO: 434233 - RNA, 19 nt, Artificial Sequence
  Description of Artificial Sequence: Synthetic oligonucleotide
ugccugguucacccuuagg

SEQ ID NO: 434234 - RNA, 19 nt, Artificial Sequence
  Description of Artificial Sequence: Synthetic oligonucleotide
agacggacuuauuuaggua

SEQ ID NO: 434235 - RNA, 19 nt, Artificial Sequence
  Description of Artificial Sequence: Synthetic oligonucleotide
auagcacuccuggguaagg

SEQ ID NO: 434236 - RNA, 19 nt, Artificial Sequence
  Description of Artificial Sequence: Synthetic oligonucleotide
cauagcacuccuggguaag

SEQ ID NO: 434237 - RNA, 19 nt, Artificial Sequence
  Description of Artificial Sequence: Synthetic oligonucleotide
acaccucggauaaugguga

SEQ ID NO: 434238 - RNA, 19 nt, Artificial Sequence
  Description of Artificial Sequence: Synthetic oligonucleotide
cauggucccuucugcgcgg

SEQ ID NO: 434239 - RNA, 19 nt, Artificial Sequence
  Description of Artificial Sequence: Synthetic oligonucleotide
ugccuauuucgaucucaug

SEQ ID NO: 434240 - RNA, 19 nt, Artificial Sequence
  Description of Artificial Sequence: Synthetic oligonucleotide
agacgcucaugaaagacaa

SEQ ID NO: 434241 - RNA, 19 nt, Artificial Sequence
  Description of Artificial Sequence: Synthetic oligonucleotide
ugcuaugcacgugauuguc

SEQ ID NO: 434242 - RNA, 19 nt, Artificial Sequence
  Description of Artificial Sequence: Synthetic oligonucleotide
aagcgagcacugagcagac

SEQ ID NO: 434243 - RNA, 19 nt, Artificial Sequence
  Description of Artificial Sequence: Synthetic oligonucleotide
ggcuggauagcggacaagc

SEQ ID NO: 434244 - RNA, 19 nt, Artificial Sequence
  Description of Artificial Sequence: Synthetic oligonucleotide
agagccgcccuguuacugu

SEQ ID NO: 434245 - RNA, 19 nt, Artificial Sequence
  Description of Artificial Sequence: Synthetic oligonucleotide
acgugauugucaguggcgu

SEQ ID NO: 434246 - RNA, 19 nt, Artificial Sequence
  Description of Artificial Sequence: Synthetic oligonucleotide
uuccgcuggaucccaugga

SEQ ID NO: 434247 - RNA, 19 nt, Artificial Sequence
  Description of Artificial Sequence: Synthetic oligonucleotide
aacuaccggcgccccuagg

SEQ ID NO: 434248 - RNA, 19 nt, Artificial Sequence
  Description of Artificial Sequence: Synthetic oligonucleotide
augcaugcucucagaauuc

SEQ ID NO: 434249 - RNA, 19 nt, Artificial Sequence
  Description of Artificial Sequence: Synthetic oligonucleotide
aggaagccgggguccuccc

SEQ ID NO: 434250 - RNA, 19 nt, Artificial Sequence
  Description of Artificial Sequence: Synthetic oligonucleotide
auccucaccgacgugugca

SEQ ID NO: 434251 - RNA, 19 nt, Artificial Sequence
  Description of Artificial Sequence: Synthetic oligonucleotide
cucuucccaugccuagucc

SEQ ID NO: 434252 - RNA, 19 nt, Artificial Sequence
  Description of Artificial Sequence: Synthetic oligonucleotide
ucaccgacgugugcaaaga

SEQ ID NO: 434253 - RNA, 19 nt, Artificial Sequence
  Description of Artificial Sequence: Synthetic oligonucleotide
gccuuugaguccugaaaag

SEQ ID NO: 434254 - RNA, 19 nt, Artificial Sequence
  Description of Artificial Sequence: Synthetic oligonucleotide
agccgucuggcccacugug

SEQ ID NO: 434255 - RNA, 19 nt, Artificial Sequence
  Description of Artificial Sequence: Synthetic oligonucleotide
caguaggggcucgaguucc

SEQ ID NO: 434256 - RNA, 19 nt, Artificial Sequence
  Description of Artificial Sequence: Synthetic oligonucleotide
gaagccgggguccucccca

SEQ ID NO: 434257 - RNA, 19 nt, Artificial Sequence
  Description of Artificial Sequence: Synthetic oligonucleotide
uaugcacgugauugucagu

SEQ ID NO: 434258 - RNA, 19 nt, Artificial Sequence
  Description of Artificial Sequence: Synthetic oligonucleotide
aggaauguucuggacgcgu

SEQ ID NO: 434259 - RNA, 19 nt, Artificial Sequence
  Description of Artificial Sequence: Synthetic oligonucleotide
ucgaugcauguucuaccuc

SEQ ID NO: 434260 - RNA, 19 nt, Artificial Sequence
  Description of Artificial Sequence: Synthetic oligonucleotide
agcagcccugacgucauag

SEQ ID NO: 434261 - RNA, 19 nt, Artificial Sequence
  Description of Artificial Sequence: Synthetic oligonucleotide
uucggacauugaaauccaa

SEQ ID NO: 434262 - RNA, 19 nt, Artificial Sequence
  Description of Artificial Sequence: Synthetic oligonucleotide
aucauucaguaggggcucg

SEQ ID NO: 434263 - RNA, 19 nt, Artificial Sequence
  Description of Artificial Sequence: Synthetic oligonucleotide
ugugguauuggaggucgau

SEQ ID NO: 434264 - RNA, 19 nt, Artificial Sequence
  Description of Artificial Sequence: Synthetic oligonucleotide
uucuggacgcgugaauaaa

SEQ ID NO: 434265 - RNA, 19 nt, Artificial Sequence
  Description of Artificial Sequence: Synthetic oligonucleotide
ggagacggacuuauuuagg

SEQ ID NO: 434266 - RNA, 19 nt, Artificial Sequence
  Description of Artificial Sequence: Synthetic oligonucleotide
gacccagacugccggaauc

SEQ ID NO: 434267 - RNA, 19 nt, Artificial Sequence
  Description of Artificial Sequence: Synthetic oligonucleotide
uggguucuuuccaggccac

SEQ ID NO: 434268 - RNA, 19 nt, Artificial Sequence
  Description of Artificial Sequence: Synthetic oligonucleotide
aucgggugugguauuggag

SEQ ID NO: 434269 - RNA, 19 nt, Artificial Sequence
  Description of Artificial Sequence: Synthetic oligonucleotide
cucaugugaagccaugcgu

SEQ ID NO: 434270 - RNA, 19 nt, Artificial Sequence
  Description of Artificial Sequence: Synthetic oligonucleotide
ugcguccuuccagagacuc

SEQ ID NO: 434271 - RNA, 19 nt, Artificial Sequence
  Description of Artificial Sequence: Synthetic oligonucleotide
aguagacaggacaauuaua

SEQ ID NO: 434272 - RNA, 19 nt, Artificial Sequence
  Description of Artificial Sequence: Synthetic oligonucleotide
cauucaguaggggcucgag

SEQ ID NO: 434273 - RNA, 19 nt, Artificial Sequence
  Description of Artificial Sequence: Synthetic oligonucleotide
cagguucuuuugacagcgg

SEQ ID NO: 434274 - RNA, 19 nt, Artificial Sequence
  Description of Artificial Sequence: Synthetic oligonucleotide
guaguucugccaguccgug

SEQ ID NO: 434275 - RNA, 19 nt, Artificial Sequence
  Description of Artificial Sequence: Synthetic oligonucleotide
gcucaugugggaaagagcu

SEQ ID NO: 434276 - RNA, 19 nt, Artificial Sequence
  Description of Artificial Sequence: Synthetic oligonucleotide
caaaucuguggugcccagc

SEQ ID NO: 434277 - RNA, 19 nt, Artificial Sequence
  Description of Artificial Sequence: Synthetic oligonucleotide
gcacgugauugucaguggc

SEQ ID NO: 434278 - RNA, 19 nt, Artificial Sequence
  Description of Artificial Sequence: Synthetic oligonucleotide
guucuggacgcgugaauaa

SEQ ID NO: 434279 - RNA, 19 nt, Artificial Sequence
  Description of Artificial Sequence: Synthetic oligonucleotide
gauggugguacagaggcuu

SEQ ID NO: 434280 - RNA, 19 nt, Artificial Sequence
  Description of Artificial Sequence: Synthetic oligonucleotide
auugucaguggcguugaua

SEQ ID NO: 434281 - RNA, 19 nt, Artificial Sequence
  Description of Artificial Sequence: Synthetic oligonucleotide
gucgaugcauguucuaccu

SEQ ID NO: 434282 - RNA, 19 nt, Artificial Sequence
  Description of Artificial Sequence: Synthetic oligonucleotide
gaccgaccuucuugggugc

SEQ ID NO: 434283 - RNA, 19 nt, Artificial Sequence
  Description of Artificial Sequence: Synthetic oligonucleotide
gugaccccugucuuuccug

SEQ ID NO: 434284 - RNA, 19 nt, Artificial Sequence
  Description of Artificial Sequence: Synthetic oligonucleotide
gguacagaauccucaccga

SEQ ID NO: 434285 - RNA, 19 nt, Artificial Sequence
  Description of Artificial Sequence: Synthetic oligonucleotide
uaccggcgccccuaggcgc

SEQ ID NO: 434286 - RNA, 19 nt, Artificial Sequence
  Description of Artificial Sequence: Synthetic oligonucleotide
ucgaguagccuuggaugga

SEQ ID NO: 434287 - RNA, 19 nt, Artificial Sequence
  Description of Artificial Sequence: Synthetic oligonucleotide
gcuaaugcguugcgaggag

SEQ ID NO: 434288 - RNA, 19 nt, Artificial Sequence
  Description of Artificial Sequence: Synthetic oligonucleotide
ucuccucgucugucuuccg

SEQ ID NO: 434289 - RNA, 19 nt, Artificial Sequence
  Description of Artificial Sequence: Synthetic oligonucleotide
cucgaguucccuggagggc

SEQ ID NO: 434290 - RNA, 19 nt, Artificial Sequence
  Description of Artificial Sequence: Synthetic oligonucleotide
ucauucaguaggggcucga

SEQ ID NO: 434291 - RNA, 19 nt, Artificial Sequence
  Description of Artificial Sequence: Synthetic oligonucleotide
gaagcgcucccugagcaaa

SEQ ID NO: 434292 - RNA, 19 nt, Artificial Sequence
  Description of Artificial Sequence: Synthetic oligonucleotide
guaggaggcaagagccgcc

SEQ ID NO: 434293 - RNA, 19 nt, Artificial Sequence
  Description of Artificial Sequence: Synthetic oligonucleotide
gguauuggaggucgaugca

SEQ ID NO: 434294 - RNA, 19 nt, Artificial Sequence
  Description of Artificial Sequence: Synthetic oligonucleotide
gguuucggacauugaaauc

SEQ ID NO: 434295 - RNA, 19 nt, Artificial Sequence
  Description of Artificial Sequence: Synthetic oligonucleotide
augugaagccaugcguccu

SEQ ID NO: 434296 - RNA, 19 nt, Artificial Sequence
  Description of Artificial Sequence: Synthetic oligonucleotide
ccaagcaacuaccggcgcc

SEQ ID NO: 434297 - RNA, 19 nt, Artificial Sequence
  Description of Artificial Sequence: Synthetic oligonucleotide
acaguacaucccugucacu

SEQ ID NO: 434298 - RNA, 19 nt, Artificial Sequence
  Description of Artificial Sequence: Synthetic oligonucleotide
acggacuuauuuagguagu

SEQ ID NO: 434299 - RNA, 19 nt, Artificial Sequence
  Description of Artificial Sequence: Synthetic oligonucleotide
cugcgcgggccucugcagg

SEQ ID NO: 434300 - RNA, 19 nt, Artificial Sequence
  Description of Artificial Sequence: Synthetic oligonucleotide
ccugacgucauagcacucc

SEQ ID NO: 434301 - RNA, 19 nt, Artificial Sequence
  Description of Artificial Sequence: Synthetic oligonucleotide
gucggugccucgaguagcc

SEQ ID NO: 434302 - RNA, 19 nt, Artificial Sequence
  Description of Artificial Sequence: Synthetic oligonucleotide
ugaggguccuggagacccu

SEQ ID NO: 434303 - RNA, 19 nt, Artificial Sequence
  Description of Artificial Sequence: Synthetic oligonucleotide
cagcccugacgucauagca

SEQ ID NO: 434304 - RNA, 19 nt, Artificial Sequence
  Description of Artificial Sequence: Synthetic oligonucleotide
uugagccuuugaguccuga

SEQ ID NO: 434305 - RNA, 19 nt, Artificial Sequence
  Description of Artificial Sequence: Synthetic oligonucleotide
ggcguugauauuggugaag

SEQ ID NO: 434306 - RNA, 19 nt, Artificial Sequence
  Description of Artificial Sequence: Synthetic oligonucleotide
uccucaccgacgugugcaa

SEQ ID NO: 434307 - RNA, 19 nt, Artificial Sequence
  Description of Artificial Sequence: Synthetic oligonucleotide
cuuugagccuuugaguccu

SEQ ID NO: 434308 - RNA, 19 nt, Artificial Sequence
  Description of Artificial Sequence: Synthetic oligonucleotide
ggugccucgaguagccuug

SEQ ID NO: 434309 - RNA, 19 nt, Artificial Sequence
  Description of Artificial Sequence: Synthetic oligonucleotide
caagccaguugcacacuga

SEQ ID NO: 434310 - RNA, 19 nt, Artificial Sequence
  Description of Artificial Sequence: Synthetic oligonucleotide
ggcuaaugcguugcgagga

SEQ ID NO: 434311 - RNA, 19 nt, Artificial Sequence
  Description of Artificial Sequence: Synthetic oligonucleotide
uuacugggccagugauacu

SEQ ID NO: 434312 - RNA, 19 nt, Artificial Sequence
  Description of Artificial Sequence: Synthetic oligonucleotide
agcgcucccugagcaaauc

SEQ ID NO: 434313 - RNA, 19 nt, Artificial Sequence
  Description of Artificial Sequence: Synthetic oligonucleotide
agacaagaaguaacaucaa

SEQ ID NO: 434314 - RNA, 19 nt, Artificial Sequence
  Description of Artificial Sequence: Synthetic oligonucleotide
agcggggucccgaccgacc

SEQ ID NO: 434315 - RNA, 19 nt, Artificial Sequence
  Description of Artificial Sequence: Synthetic oligonucleotide
caccgacgugugcaaagac

SEQ ID NO: 434316 - RNA, 19 nt, Artificial Sequence
  Description of Artificial Sequence: Synthetic oligonucleotide
uguuaccaagagguccuuu

SEQ ID NO: 434317 - RNA, 19 nt, Artificial Sequence
  Description of Artificial Sequence: Synthetic oligonucleotide
ucucagaauucuggcuaau

SEQ ID NO: 434318 - RNA, 19 nt, Artificial Sequence
  Description of Artificial Sequence: Synthetic oligonucleotide
gaagugcugcgcagacccc

SEQ ID NO: 434319 - RNA, 19 nt, Artificial Sequence
  Description of Artificial Sequence: Synthetic oligonucleotide
uuggaggucgaugcauguu

SEQ ID NO: 434320 - RNA, 19 nt, Artificial Sequence
  Description of Artificial Sequence: Synthetic oligonucleotide
cgaugcauguucuaccuca

SEQ ID NO: 434321 - RNA, 19 nt, Artificial Sequence
  Description of Artificial Sequence: Synthetic oligonucleotide
gcauugcagcaucaggcca

SEQ ID NO: 434322 - RNA, 19 nt, Artificial Sequence
  Description of Artificial Sequence: Synthetic oligonucleotide
ccagacugccggaaucccc

SEQ ID NO: 434323 - RNA, 19 nt, Artificial Sequence
  Description of Artificial Sequence: Synthetic oligonucleotide
agcaacuaccggcgccccu

SEQ ID NO: 434324 - RNA, 19 nt, Artificial Sequence
  Description of Artificial Sequence: Synthetic oligonucleotide
ccaugccuaguccagccug

SEQ ID NO: 434325 - RNA, 19 nt, Artificial Sequence
  Description of Artificial Sequence: Synthetic oligonucleotide
cgaccgaccuucuugggug

SEQ ID NO: 434326 - RNA, 19 nt, Artificial Sequence
  Description of Artificial Sequence: Synthetic oligonucleotide
caacuaccggcgccccuag

SEQ ID NO: 434327 - RNA, 19 nt, Artificial Sequence
  Description of Artificial Sequence: Synthetic oligonucleotide
gaaagugagucaagacaau

SEQ ID NO: 434328 - RNA, 19 nt, Artificial Sequence
  Description of Artificial Sequence: Synthetic oligonucleotide
ugccucgaguagccuugga

SEQ ID NO: 434329 - RNA, 19 nt, Artificial Sequence
  Description of Artificial Sequence: Synthetic oligonucleotide
gcauguucuaccucauggu

SEQ ID NO: 434330 - RNA, 19 nt, Artificial Sequence
  Description of Artificial Sequence: Synthetic oligonucleotide
cggauaauggugacauuuc

SEQ ID NO: 434331 - RNA, 19 nt, Artificial Sequence
  Description of Artificial Sequence: Synthetic oligonucleotide
guauuggaggucgaugcau

SEQ ID NO: 434332 - RNA, 19 nt, Artificial Sequence
  Description of Artificial Sequence: Synthetic oligonucleotide
cagaauccucaccgacgug

SEQ ID NO: 434333 - RNA, 19 nt, Artificial Sequence
  Description of Artificial Sequence: Synthetic oligonucleotide
gacaggucccuggcucccc

SEQ ID NO: 434334 - RNA, 19 nt, Artificial Sequence
  Description of Artificial Sequence: Synthetic oligonucleotide
uggugccuauuucgaucuc

SEQ ID NO: 434335 - RNA, 19 nt, Artificial Sequence
  Description of Artificial Sequence: Synthetic oligonucleotide
ggcgauaucggguguggua

SEQ ID NO: 434336 - RNA, 19 nt, Artificial Sequence
  Description of Artificial Sequence: Synthetic oligonucleotide
gaggucgaugcauguucua

SEQ ID NO: 434337 - RNA, 19 nt, Artificial Sequence
  Description of Artificial Sequence: Synthetic oligonucleotide
auggucccuucugcgcggg

SEQ ID NO: 434338 - RNA, 19 nt, Artificial Sequence
  Description of Artificial Sequence: Synthetic oligonucleotide
gaugccugguucacccuua

SEQ ID NO: 434339 - RNA, 19 nt, Artificial Sequence
  Description of Artificial Sequence: Synthetic oligonucleotide
ggugguacagaggcuuuga

SEQ ID NO: 434340 - RNA, 19 nt, Artificial Sequence
  Description of Artificial Sequence: Synthetic oligonucleotide
ccaagcgagcacugagcag

SEQ ID NO: 434341 - RNA, 19 nt, Artificial Sequence
  Description of Artificial Sequence: Synthetic oligonucleotide
cccgcugaccuggugaccc

SEQ ID NO: 434342 - RNA, 19 nt, Artificial Sequence
  Description of Artificial Sequence: Synthetic oligonucleotide
accggcgccccuaggcgcg

SEQ ID NO: 434343 - RNA, 19 nt, Artificial Sequence
  Description of Artificial Sequence: Synthetic oligonucleotide
agcucuuuacugggccagu

SEQ ID NO: 434344 - RNA, 19 nt, Artificial Sequence
  Description of Artificial Sequence: Synthetic oligonucleotide
aaacucagcuuggguucuu

SEQ ID NO: 434345 - RNA, 19 nt, Artificial Sequence
  Description of Artificial Sequence: Synthetic oligonucleotide
guucugggcgauaucgggu

SEQ ID NO: 434346 - RNA, 19 nt, Artificial Sequence
  Description of Artificial Sequence: Synthetic oligonucleotide
gguucuuuugacagcggcu

SEQ ID NO: 434347 - RNA, 19 nt, Artificial Sequence
  Description of Artificial Sequence: Synthetic oligonucleotide
gcggacaagcagaauguuc

SEQ ID NO: 434348 - RNA, 19 nt, Artificial Sequence
  Description of Artificial Sequence: Synthetic oligonucleotide
gccaugcguccuuccagag

SEQ ID NO: 434349 - RNA, 19 nt, Artificial Sequence
  Description of Artificial Sequence: Synthetic oligonucleotide
cugacgucauagcacuccu

SEQ ID NO: 434350 - RNA, 19 nt, Artificial Sequence
  Description of Artificial Sequence: Synthetic oligonucleotide
cacugccagcugaucucac

SEQ ID NO: 434351 - RNA, 19 nt, Artificial Sequence
  Description of Artificial Sequence: Synthetic oligonucleotide
gucagccaaccugcauugc

SEQ ID NO: 434352 - RNA, 19 nt, Artificial Sequence
  Description of Artificial Sequence: Synthetic oligonucleotide
gaugcauguucuaccucau

SEQ ID NO: 434353 - RNA, 19 nt, Artificial Sequence
  Description of Artificial Sequence: Synthetic oligonucleotide
gcucuuuacugggccagug

SEQ ID NO: 434354 - RNA, 19 nt, Artificial Sequence
  Description of Artificial Sequence: Synthetic oligonucleotide
gaaaagccucgggguccag

SEQ ID NO: 434355 - RNA, 19 nt, Artificial Sequence
  Description of Artificial Sequence: Synthetic oligonucleotide
agcggacaagcagaauguu

SEQ ID NO: 434356 - RNA, 19 nt, Artificial Sequence
  Description of Artificial Sequence: Synthetic oligonucleotide
cccgacaggucccuggcuc

SEQ ID NO: 434357 - RNA, 19 nt, Artificial Sequence
  Description of Artificial Sequence: Synthetic oligonucleotide
aagcgcucccugagcaaau

SEQ ID NO: 434358 - RNA, 19 nt, Artificial Sequence
  Description of Artificial Sequence: Synthetic oligonucleotide
agcaugcuaugcacgugau

SEQ ID NO: 434359 - RNA, 19 nt, Artificial Sequence
  Description of Artificial Sequence: Synthetic oligonucleotide
acucagccgucuggcccac

SEQ ID NO: 434360 - RNA, 19 nt, Artificial Sequence
  Description of Artificial Sequence: Synthetic oligonucleotide
ggacaccucggauaauggu

SEQ ID NO: 434361 - RNA, 19 nt, Artificial Sequence
  Description of Artificial Sequence: Synthetic oligonucleotide
guguauggaagacgcucau

SEQ ID NO: 434362 - RNA, 19 nt, Artificial Sequence
  Description of Artificial Sequence: Synthetic oligonucleotide
ucccgcugaccuggugacc

SEQ ID NO: 434363 - RNA, 19 nt, Artificial Sequence
  Description of Artificial Sequence: Synthetic oligonucleotide
cgcucccugagcaaaucug

SEQ ID NO: 434364 - RNA, 19 nt, Artificial Sequence
  Description of Artificial Sequence: Synthetic oligonucleotide
aggcggccccugaggaccc

SEQ ID NO: 434365 - RNA, 19 nt, Artificial Sequence
  Description of Artificial Sequence: Synthetic oligonucleotide
ggcccuccagugccaaagc

SEQ ID NO: 434366 - RNA, 19 nt, Artificial Sequence
  Description of Artificial Sequence: Synthetic oligonucleotide
gcccugacgucauagcacu

SEQ ID NO: 434367 - RNA, 19 nt, Artificial Sequence
  Description of Artificial Sequence: Synthetic oligonucleotide
ggauagcggacaagcagaa

SEQ ID NO: 434368 - RNA, 19 nt, Artificial Sequence
  Description of Artificial Sequence: Synthetic oligonucleotide
ccgugaccaucuucuguag

SEQ ID NO: 434369 - RNA, 19 nt, Artificial Sequence
  Description of Artificial Sequence: Synthetic oligonucleotide
ggaagccgggguccucccc

SEQ ID NO: 434370 - RNA, 19 nt, Artificial Sequence
  Description of Artificial Sequence: Synthetic oligonucleotide
gggcucgaguucccuggag

SEQ ID NO: 434371 - RNA, 19 nt, Artificial Sequence
  Description of Artificial Sequence: Synthetic oligonucleotide
cagcugaucucacuuucau

SEQ ID NO: 434372 - RNA, 19 nt, Artificial Sequence
  Description of Artificial Sequence: Synthetic oligonucleotide
cgaguagccuuggauggag

SEQ ID NO: 434373 - RNA, 19 nt, Artificial Sequence
  Description of Artificial Sequence: Synthetic oligonucleotide
ccagugauacugugucaca

SEQ ID NO: 434374 - RNA, 19 nt, Artificial Sequence
  Description of Artificial Sequence: Synthetic oligonucleotide
auggugguacagaggcuuu

SEQ ID NO: 434375 - RNA, 19 nt, Artificial Sequence
  Description of Artificial Sequence: Synthetic oligonucleotide
gcgauaucgggugugguau

SEQ ID NO: 434376 - RNA, 19 nt, Artificial Sequence
  Description of Artificial Sequence: Synthetic oligonucleotide
gauagcggacaagcagaau

SEQ ID NO: 434377 - RNA, 19 nt, Artificial Sequence
  Description of Artificial Sequence: Synthetic oligonucleotide
ucggugccucgaguagccu

SEQ ID NO: 434378 - RNA, 19 nt, Artificial Sequence
  Description of Artificial Sequence: Synthetic oligonucleotide
gugccuauuucgaucucau

SEQ ID NO: 434379 - RNA, 19 nt, Artificial Sequence
  Description of Artificial Sequence: Synthetic oligonucleotide
cuggcccucuucuccccga

SEQ ID NO: 434380 - RNA, 19 nt, Artificial Sequence
  Description of Artificial Sequence: Synthetic oligonucleotide
ccucggauaauggugacau

SEQ ID NO: 434381 - RNA, 19 nt, Artificial Sequence
  Description of Artificial Sequence: Synthetic oligonucleotide
aggcaagagccgcccuguu

SEQ ID NO: 434382 - RNA, 19 nt, Artificial Sequence
  Description of Artificial Sequence: Synthetic oligonucleotide
ccgcuggaucccauggauc

SEQ ID NO: 434383 - RNA, 19 nt, Artificial Sequence
  Description of Artificial Sequence: Synthetic oligonucleotide
cgcucaugaaagacaagaa

SEQ ID NO: 434384 - RNA, 19 nt, Artificial Sequence
  Description of Artificial Sequence: Synthetic oligonucleotide
ggggucccgaccgaccuuc

SEQ ID NO: 434385 - RNA, 19 nt, Artificial Sequence
  Description of Artificial Sequence: Synthetic oligonucleotide
gauugucaguggcguugau

SEQ ID NO: 434386 - RNA, 19 nt, Artificial Sequence
  Description of Artificial Sequence: Synthetic oligonucleotide
caucccuuucugccagugu

SEQ ID NO: 434387 - RNA, 19 nt, Artificial Sequence
  Description of Artificial Sequence: Synthetic oligonucleotide
gccucgaguagccuuggau

SEQ ID NO: 434388 - RNA, 19 nt, Artificial Sequence
  Description of Artificial Sequence: Synthetic oligonucleotide
cccuuaggcccuguggcuc

SEQ ID NO: 434389 - RNA, 19 nt, Artificial Sequence
  Description of Artificial Sequence: Synthetic oligonucleotide
ggaggucgaugcauguucu

SEQ ID NO: 434390 - RNA, 19 nt, Artificial Sequence
  Description of Artificial Sequence: Synthetic oligonucleotide
ggugaccccugucuuuccu

SEQ ID NO: 434391 - RNA, 19 nt, Artificial Sequence
  Description of Artificial Sequence: Synthetic oligonucleotide
ggauggcauuuccucgucu

SEQ ID NO: 434392 - RNA, 19 nt, Artificial Sequence
  Description of Artificial Sequence: Synthetic oligonucleotide
gcccacugugaaauugauc

SEQ ID NO: 434393 - RNA, 19 nt, Artificial Sequence
  Description of Artificial Sequence: Synthetic oligonucleotide
cccgaccgaccuucuuggg

SEQ ID NO: 434394 - RNA, 19 nt, Artificial Sequence
  Description of Artificial Sequence: Synthetic oligonucleotide
cccagacugccggaauccc

SEQ ID NO: 434395 - RNA, 19 nt, Artificial Sequence
  Description of Artificial Sequence: Synthetic oligonucleotide
gugugguauuggaggucga

SEQ ID NO: 434396 - RNA, 19 nt, Artificial Sequence
  Description of Artificial Sequence: Synthetic oligonucleotide
caagagccgcccuguuacu

SEQ ID NO: 434397 - RNA, 19 nt, Artificial Sequence
  Description of Artificial Sequence: Synthetic oligonucleotide
augcguccuuccagagacu

SEQ ID NO: 434398 - RNA, 19 nt, Artificial Sequence
  Description of Artificial Sequence: Synthetic oligonucleotide
cagcggggucccgaccgac

SEQ ID NO: 434399 - RNA, 19 nt, Artificial Sequence
  Description of Artificial Sequence: Synthetic oligonucleotide
ggggcucgaguucccugga

SEQ ID NO: 434400 - RNA, 19 nt, Artificial Sequence
  Description of Artificial Sequence: Synthetic oligonucleotide
cguccuuccagagacucaa

SEQ ID NO: 434401 - RNA, 19 nt, Artificial Sequence
  Description of Artificial Sequence: Synthetic oligonucleotide
cggucggugccucgaguag

SEQ ID NO: 434402 - RNA, 19 nt, Artificial Sequence
  Description of Artificial Sequence: Synthetic oligonucleotide
cccggggacaccucggaua

SEQ ID NO: 434403 - RNA, 19 nt, Artificial Sequence
  Description of Artificial Sequence: Synthetic oligonucleotide
ccgucuggcccacugugaa

SEQ ID NO: 434404 - RNA, 19 nt, Artificial Sequence
  Description of Artificial Sequence: Synthetic oligonucleotide
caguggcguugauauuggu

SEQ ID NO: 434405 - RNA, 19 nt, Artificial Sequence
  Description of Artificial Sequence: Synthetic oligonucleotide
ccgcugaccuggugacccc

SEQ ID NO: 434406 - RNA, 19 nt, Artificial Sequence
  Description of Artificial Sequence: Synthetic oligonucleotide
gcccggucggugccucgag

SEQ ID NO: 434407 - RNA, 19 nt, Artificial Sequence
  Description of Artificial Sequence: Synthetic oligonucleotide
ccggucggugccucgagua

SEQ ID NO: 434408 - RNA, 19 nt, Artificial Sequence
  Description of Artificial Sequence: Synthetic oligonucleotide
cucggauaauggugacauu

SEQ ID NO: 434409 - RNA, 19 nt, Artificial Sequence
  Description of Artificial Sequence: Synthetic oligonucleotide
cccugacgucauagcacuc

SEQ ID NO: 434410 - RNA, 19 nt, Artificial Sequence
  Description of Artificial Sequence: Synthetic oligonucleotide
ggguccuccccaagcaacu

SEQ ID NO: 434411 - RNA, 19 nt, Artificial Sequence
  Description of Artificial Sequence: Synthetic oligonucleotide
gcgcucccugagcaaaucu

SEQ ID NO: 434412 - RNA, 19 nt, Artificial Sequence
  Description of Artificial Sequence: Synthetic oligonucleotide
cccuaggcgcggcccgcgg

SEQ ID NO: 434413 - RNA, 19 nt, Artificial Sequence
  Description of Artificial Sequence: Synthetic oligonucleotide
gcggggucccgaccgaccu

SEQ ID NO: 434414 - RNA, 19 nt, Artificial Sequence
  Description of Artificial Sequence: Synthetic oligonucleotide
ccgaccgaccuucuugggu

SEQ ID NO: 434415 - RNA, 19 nt, Artificial Sequence
  Description of Artificial Sequence: Synthetic oligonucleotide
gguccuccccaagcaacua

SEQ ID NO: 434416 - RNA, 19 nt, Artificial Sequence
  Description of Artificial Sequence: Synthetic oligonucleotide
cgaucucaugugaagccau

SEQ ID NO: 434417 - RNA, 19 nt, Artificial Sequence
  Description of Artificial Sequence: Synthetic oligonucleotide
ggcccacugugaaauugau

SEQ ID NO: 434418 - RNA, 19 nt, Artificial Sequence
  Description of Artificial Sequence: Synthetic oligonucleotide
cggacuuauuuagguagua

SEQ ID NO: 434419 - RNA, 19 nt, Artificial Sequence
  Description of Artificial Sequence: Synthetic oligonucleotide
ccgcccuguuacuguccuc

SEQ ID NO: 434420 - RNA, 19 nt, Artificial Sequence
  Description of Artificial Sequence: Synthetic oligonucleotide
gggcagcuuuacagaaagu

SEQ ID NO: 434421 - RNA, 19 nt, Artificial Sequence
  Description of Artificial Sequence: Synthetic oligonucleotide
ccucaccgacgugugcaaa

SEQ ID NO: 434422 - RNA, 19 nt, Artificial Sequence
  Description of Artificial Sequence: Synthetic oligonucleotide
cugugcgguucugggcgau

SEQ ID NO: 434423 - RNA, 19 nt, Artificial Sequence
  Description of Artificial Sequence: Synthetic oligonucleotide
cgugauugucaguggcguu

SEQ ID NO: 434424 - RNA, 19 nt, Artificial Sequence
  Description of Artificial Sequence: Synthetic oligonucleotide
gcccggggacaccucggau

SEQ ID NO: 434425 - RNA, 19 nt, Artificial Sequence
  Description of Artificial Sequence: Synthetic oligonucleotide
ccggcgccccuaggcgcgg

SEQ ID NO: 434426 - RNA, 19 nt, Artificial Sequence
  Description of Artificial Sequence: Synthetic oligonucleotide
cgauaucgggugugguauu

SEQ ID NO: 434427 - RNA, 19 nt, Artificial Sequence
  Description of Artificial Sequence: Synthetic oligonucleotide
cccggucggugccucgagu

SEQ ID NO: 434428 - RNA, 19 nt, Artificial Sequence
  Description of Artificial Sequence: Synthetic oligonucleotide
ccccgacaggucccuggcu

SEQ ID NO: 434429 - RNA, 19 nt, Artificial Sequence
  Description of Artificial Sequence: Synthetic oligonucleotide
gcugccccuuugagccuuu

SEQ ID NO: 434430 - RNA, 19 nt, Artificial Sequence
  Description of Artificial Sequence: Synthetic oligonucleotide
aaauagucaagcuugaaga

SEQ ID NO: 434431 - RNA, 19 nt, Artificial Sequence
  Description of Artificial Sequence: Synthetic oligonucleotide
aaaauagucaagcuugaag

SEQ ID NO: 434432 - RNA, 19 nt, Artificial Sequence
  Description of Artificial Sequence: Synthetic oligonucleotide
  modified_base (4)..(4): a, c, u, g, unknown or other
ucanaaauuuucuuuauca

SEQ ID NO: 434433 - RNA, 19 nt, Artificial Sequence
  Description of Artificial Sequence: Synthetic oligonucleotide
uacaccuagaaucagaagc

SEQ ID NO: 434434 - RNA, 19 nt, Artificial Sequence
  Description of Artificial Sequence: Synthetic oligonucleotide
aacugaaucauguucacug

SEQ ID NO: 434435 - RNA, 19 nt, Artificial Sequence
  Description of Artificial Sequence: Synthetic oligonucleotide
aaagcuacuacacccaaag

SEQ ID NO: 434436 - RNA, 19 nt, Artificial Sequence
  Description of Artificial Sequence: Synthetic oligonucleotide
aaggacuauguauaauucc

SEQ ID NO: 434437 - RNA, 19 nt, Artificial Sequence
  Description of Artificial Sequence: Synthetic oligonucleotide
uuaauagcgaauguaaagg

SEQ ID NO: 434438 - RNA, 19 nt, Artificial Sequence
  Description of Artificial Sequence: Synthetic oligonucleotide
auauagaaggacuugaucu

SEQ ID NO: 434439 - RNA, 19 nt, Artificial Sequence
  Description of Artificial Sequence: Synthetic oligonucleotide
gauuguaaccuacaguacg

SEQ ID NO: 434440 - RNA, 19 nt, Artificial Sequence
  Description of Artificial Sequence: Synthetic oligonucleotide
aauacagugauuguaaccu

SEQ ID NO: 434441 - RNA, 19 nt, Artificial Sequence
  Description of Artificial Sequence: Synthetic oligonucleotide
auuaauagcgaauguaaag

SEQ ID NO: 434442 - RNA, 19 nt, Artificial Sequence
  Description of Artificial Sequence: Synthetic oligonucleotide
agcuacuacacccaaaggg

SEQ ID NO: 434443 - RNA, 19 nt, Artificial Sequence
  Description of Artificial Sequence: Synthetic oligonucleotide
uuaaaguucggguugaggu

SEQ ID NO: 434444 - RNA, 19 nt, Artificial Sequence
  Description of Artificial Sequence: Synthetic oligonucleotide
aaugauaauuuucuuugcu

SEQ ID NO: 434445 - RNA, 19 nt, Artificial Sequence
  Description of Artificial Sequence: Synthetic oligonucleotide
cucuauauccuucuaaugc

SEQ ID NO: 434446 - RNA, 19 nt, Artificial Sequence
  Description of Artificial Sequence: Synthetic oligonucleotide
uuaggaaucuuuccaagcc

SEQ ID NO: 434447 - RNA, 19 nt, Artificial Sequence
  Description of Artificial Sequence: Synthetic oligonucleotide
uauauaagcauuuaucauu

SEQ ID NO: 434448 - RNA, 19 nt, Artificial Sequence
  Description of Artificial Sequence: Synthetic oligonucleotide
caucgcugcauauagaagg

SEQ ID NO: 434449 - RNA, 19 nt, Artificial Sequence
  Description of Artificial Sequence: Synthetic oligonucleotide
uaguucauccgccugaaag

SEQ ID NO: 434450 - RNA, 19 nt, Artificial Sequence
  Description of Artificial Sequence: Synthetic oligonucleotide
uugugaauccacauaaaug

SEQ ID NO: 434451 - RNA, 19 nt, Artificial Sequence
  Description of Artificial Sequence: Synthetic oligonucleotide
cucuaaacgguucaggagg

SEQ ID NO: 434452 - RNA, 19 nt, Artificial Sequence
  Description of Artificial Sequence: Synthetic oligonucleotide
gguacaagcacacaucucg

SEQ ID NO: 434453 - RNA, 19 nt, Artificial Sequence
  Description of Artificial Sequence: Synthetic oligonucleotide
uauguauaauuccagugac

SEQ ID NO: 434454 - RNA, 19 nt, Artificial Sequence
  Description of Artificial Sequence: Synthetic oligonucleotide
aacagauucaguaagucga

SEQ ID NO: 434455 - RNA, 19 nt, Artificial Sequence
  Description of Artificial Sequence: Synthetic oligonucleotide
aauagcgaauguaaaggac

SEQ ID NO: 434456 - RNA, 19 nt, Artificial Sequence
  Description of Artificial Sequence: Synthetic oligonucleotide
ucuauauccuucuaaugca

SEQ ID NO: 434457 - RNA, 19 nt, Artificial Sequence
  Description of Artificial Sequence: Synthetic oligonucleotide
gauugguucauuaauggug

SEQ ID NO: 434458 - RNA, 19 nt, Artificial Sequence
  Description of Artificial Sequence: Synthetic oligonucleotide
caacuaaagagugacaugc

SEQ ID NO: 434459 - RNA, 19 nt, Artificial Sequence
  Description of Artificial Sequence: Synthetic oligonucleotide
ucuguauaccaauaauaag

SEQ ID NO: 434460 - RNA, 19 nt, Artificial Sequence
  Description of Artificial Sequence: Synthetic oligonucleotide
uugguuagugggaauacag

SEQ ID NO: 434461 - RNA, 19 nt, Artificial Sequence
  Description of Artificial Sequence: Synthetic oligonucleotide
  modified_base (11)..(11): a, c, u, g, unknown or other
  modified_base (15)..(15): a, c, u, g, unknown or other
uuuguuuuggnuuunuuuu

SEQ ID NO: 434462 - RNA, 19 nt, Artificial Sequence
  Description of Artificial Sequence: Synthetic oligonucleotide
uguuaaaggggcaucgaug

SEQ ID NO: 434463 - RNA, 19 nt, Artificial Sequence
  Description of Artificial Sequence: Synthetic oligonucleotide
aguucauccgccugaaagg

SEQ ID NO: 434464 - RNA, 19 nt, Artificial Sequence
  Description of Artificial Sequence: Synthetic oligonucleotide
cucgauagcaucugaauag

SEQ ID NO: 434465 - RNA, 19 nt, Artificial Sequence
  Description of Artificial Sequence: Synthetic oligonucleotide
uguaccaucucgcaacacc

SEQ ID NO: 434466 - RNA, 19 nt, Artificial Sequence
  Description of Artificial Sequence: Synthetic oligonucleotide
augauaccuguucagaauc

SEQ ID NO: 434467 - RNA, 19 nt, Artificial Sequence
  Description of Artificial Sequence: Synthetic oligonucleotide
uuuuguuaaaggggcaucg

SEQ ID NO: 434468 - RNA, 19 nt, Artificial Sequence
  Description of Artificial Sequence: Synthetic oligonucleotide
aaagauuaauagcgaaugu

SEQ ID NO: 434469 - RNA, 19 nt, Artificial Sequence
  Description of Artificial Sequence: Synthetic oligonucleotide
ucugcuaguaccaucccug

SEQ ID NO: 434470 - RNA, 19 nt, Artificial Sequence
  Description of Artificial Sequence: Synthetic oligonucleotide
aauggugucugucaucagu

SEQ ID NO: 434471 - RNA, 19 nt, Artificial Sequence
  Description of Artificial Sequence: Synthetic oligonucleotide
uuuuauaguaaugggaaaa

SEQ ID NO: 434472 - RNA, 19 nt, Artificial Sequence
  Description of Artificial Sequence: Synthetic oligonucleotide
uuaauggugucugucauca

SEQ ID NO: 434473 - RNA, 19 nt, Artificial Sequence
  Description of Artificial Sequence: Synthetic oligonucleotide
ucauccgccugaaaggccg

SEQ ID NO: 434474 - RNA, 19 nt, Artificial Sequence
  Description of Artificial Sequence: Synthetic oligonucleotide
uuuuauagccuucuagaau

SEQ ID NO: 434475 - RNA, 19 nt, Artificial Sequence
  Description of Artificial Sequence: Synthetic oligonucleotide
aggaaaccgacacagcagg

SEQ ID NO: 434476 - RNA, 19 nt, Artificial Sequence
  Description of Artificial Sequence: Synthetic oligonucleotide
uagaaaagauuaauagcga

SEQ ID NO: 434477 - RNA, 19 nt, Artificial Sequence
  Description of Artificial Sequence: Synthetic oligonucleotide
ucugucgaagaagugaucc

SEQ ID NO: 434478 - RNA, 19 nt, Artificial Sequence
  Description of Artificial Sequence: Synthetic oligonucleotide
acgaaucgaggguacaagc

SEQ ID NO: 434479 - RNA, 19 nt, Artificial Sequence
  Description of Artificial Sequence: Synthetic oligonucleotide
cacaugagugaauucagcc

SEQ ID NO: 434480 - RNA, 19 nt, Artificial Sequence
  Description of Artificial Sequence: Synthetic oligonucleotide
cacuagguccucuaaacgg

SEQ ID NO: 434481 - RNA, 19 nt, Artificial Sequence
  Description of Artificial Sequence: Synthetic oligonucleotide
uaaagagugacaugccaug

SEQ ID NO: 434482 - RNA, 19 nt, Artificial Sequence
  Description of Artificial Sequence: Synthetic oligonucleotide
ggcaauacagaaaacaucc

SEQ ID NO: 434483 - RNA, 19 nt, Artificial Sequence
  Description of Artificial Sequence: Synthetic oligonucleotide
uaauagcgaauguaaagga

SEQ ID NO: 434484 - RNA, 19 nt, Artificial Sequence
  Description of Artificial Sequence: Synthetic oligonucleotide
uguaccauauuuucucuga

SEQ ID NO: 434485 - RNA, 19 nt, Artificial Sequence
  Description of Artificial Sequence: Synthetic oligonucleotide
caacagauucaguaagucg

SEQ ID NO: 434486 - RNA, 19 nt, Artificial Sequence
  Description of Artificial Sequence: Synthetic oligonucleotide
ugggacuuagaaaugacau

SEQ ID NO: 434487 - RNA, 19 nt, Artificial Sequence
  Description of Artificial Sequence: Synthetic oligonucleotide
  modified_base (5)..(5): a, c, u, g, unknown or other
uucanaaauuuucuuuauc

SEQ ID NO: 434488 - RNA, 19 nt, Artificial Sequence
  Description of Artificial Sequence: Synthetic oligonucleotide
uucacuaucccaagagcgc

SEQ ID NO: 434489 - RNA, 19 nt, Artificial Sequence
  Description of Artificial Sequence: Synthetic oligonucleotide
uuuaggccuguuuuaaaug

SEQ ID NO: 434490 - RNA, 19 nt, Artificial Sequence
  Description of Artificial Sequence: Synthetic oligonucleotide
uagaaucagaagcacggug

SEQ ID NO: 434491 - RNA, 19 nt, Artificial Sequence
  Description of Artificial Sequence: Synthetic oligonucleotide
guugauggaaaaucagacc

SEQ ID NO: 434492 - RNA, 19 nt, Artificial Sequence
  Description of Artificial Sequence: Synthetic oligonucleotide
accaacauugggcaucaac

SEQ ID NO: 434493 - RNA, 19 nt, Artificial Sequence
  Description of Artificial Sequence: Synthetic oligonucleotide
ucucgcaacaccagaaaca

SEQ ID NO: 434494 - RNA, 19 nt, Artificial Sequence
  Description of Artificial Sequence: Synthetic oligonucleotide
auaccaauaauaaggagca

SEQ ID NO: 434495 - RNA, 19 nt, Artificial Sequence
  Description of Artificial Sequence: Synthetic oligonucleotide
uguaugacugggcaauaca

SEQ ID NO: 434496 - RNA, 19 nt, Artificial Sequence
  Description of Artificial Sequence: Synthetic oligonucleotide
aacuaaagagugacaugcc
